(19) United States
(12) Patent Application Publication
(10) Pub. No.: US 2025/0121052 A1
(43) Pub. Date: Apr. 17, 2025

(54) SARS-COV-2 VACCINES

(71) Applicant: Gritstone bio, Inc., Emeryville, CA (US)

(72) Inventors: Leonid Gitlin, Foster City, CA (US); Karin Jooss, San Diego, CA (US); Sue-Jean Hong, Emeryville, CA (US); Ciaran Daniel Scallan, San Francisco, CA (US); Amy Rachel Rappaport, Daly City, CA (US); Christine Denise Palmer, Cambridge, MA (US); Minh Duc Cao, Belmont, MA (US)

(21) Appl. No.: 18/658,552

(22) Filed: May 8, 2024

Related U.S. Application Data
(63) Continuation of application No. PCT/US2022/079510, filed on Nov. 8, 2022.
(60) Provisional application No. 63/379,896, filed on Oct. 17, 2022.
(60) Provisional application No. 63/370,373, filed on Aug. 3, 2022.
(60) Provisional application No. 63/346,769, filed on May 27, 2022.
(60) Provisional application No. 63/322,142, filed on Mar. 21, 2022.
(60) Provisional application No. 63/306,022, filed on Feb. 2, 2022.
(60) Provisional application No. 63/295,449, filed on Dec. 30, 2021.
(60) Provisional application No. 63/265,991, filed on Dec. 23, 2021.
(60) Provisional application No. 63/277,105, filed on Nov. 8, 2021.

(51) Int. Cl. A61K 39/215; A61K 9/51; A61K 39/00; A61P 37/04

(52) U.S. Cl. CPC A61K 39/215; A61K 9/5123; A61P 37/04; A61K 2039/5256

(57) ABSTRACT

Disclosed herein are vaccine compositions that include SARS-CoV-2 MHC epitope-encoding cassettes and/or full-length SARS-CoV-2 proteins. Also disclosed are nucleotides, cells, and methods associated with the compositions including their use as vaccines.

### CROSS REFERENCE TO RELATED APPLICATIONS

[0001] This application is a Continuation of International Patent Application No. PCT/US2022/079510, filed Nov. 8, 2022, which claims the benefit of U.S. Provisional Application Nos. 63/277,105 filed Nov. 8, 2021, 63/295,449 filed Dec. 30, 2021, 63/306,022 filed Feb. 2, 2022, 63/322,142 filed Mar. 21, 2022, 63/346,769 filed May 27, 2022, 63/370,373 filed Aug. 3, 2022, 63/379,896 filed Oct. 17, 2022, and 63/265,991 filed Dec. 23, 2021, each of which is hereby incorporated in its entirety by reference for all purposes.

### SEQUENCE LISTING

[0002] The instant application contains a Sequence Listing which has been submitted electronically in xml format and is hereby incorporated by reference in its entirety. Said .xml copy, created on 6 Jan. 2023, is named GSO-102WO2_SL and is 40,205,856 bytes in size.

### BACKGROUND

[0003] Severe acute respiratory syndrome corona virus 2 (SARS-CoV-2) is the virus strain responsible for the Coronavirus Disease 2019 (Covid-19) pandemic. As of Dec. 21, 2021, the virus has infected over 275 million people and caused about 5.4 million deaths worldwide. A CD8+ T cell response may be important for COVID-19 for two reasons in a coronavirus context. First is the recurrent observation in pre-clinical models that SARS vaccines that only stimulate antibody responses are often associated with pulmonary inflammation, independent of viral clearance. This has been observed in both rodents and non-human primates (NHP), and the current consensus is that it is caused by an imbalanced immune response, and is likely to be solved by using vaccines that drive a balanced antibody and CD8+ T cell (Th1) response (Consensus considerations on the assessment of the risk of disease enhancement with COVID-19 vaccines: Outcome of a Coalition for Epidemic Preparedness Innovations (CEPI)/Brighton Collaboration (BC) scientific working meeting, Mar. 12-13, 2020). Secondly, coronaviruses are evidently mutating frequently and crossing from animal reservoirs into humans, with three epidemics/pandemics over the last 18 years (SARS in 2002, MERS in 2012, now COVID-19). Antibody responses are often against highly mutable proteins (such as the Spike protein of SARS-CoV-2) which change significantly between strains and isolates, whereas T cell epitopes often derive from more evolutionarily conserved proteins. T cell memory is also generally more durable than B cell memory and thus CD8+ T memory against SARS-CoV-2 may provide longer, and better protection against future SARS variants. Many vaccines have demonstrated an ability to drive antibody responses in NHP and humans, but commonly used modalities such as protein/peptide and mRNA vaccines have not stimulated meaningful CD8+ T cell responses in these species.

[0004] An additional question for antigen vaccine design in infectious disease settings is which of the many proteins present generate the “best” therapeutic antigens, e.g., antigens that can stimulate immunity.

[0005] In addition to the challenges of current antigen prediction methods certain challenges also exist with the available vector systems that can be used for antigen delivery in humans, many of which are derived from humans. For example, many humans have pre-existing immunity to human viruses as a result of previous natural exposure, and this immunity can be a major obstacle to the use of recombinant human viruses for antigen delivery in vaccination strategies, such as in cancer treatment or vaccinations against infectious diseases.

[0006] While some progress has been made in vaccinations strategies addressing the above problems, improvements are still needed, particularly for clinical applications, such as improved vaccine potency and efficacy, such as the need for a SARS-CoV-2 vaccine that stimulates balanced B and T cell immunity in humans, including the elderly.

### SUMMARY

[0007] Provided for herein is a composition for delivery of a self-amplifying alphavirus-based expression system, wherein the composition for delivery of the self-amplifying alphavirus-based expression system comprises: (A) the self-amplifying alphavirus-based expression system, wherein the self-amplifying alphavirus-based expression system comprises one or more vectors, wherein the one or more vectors comprises: (a) an RNA alphavirus backbone, wherein the RNA alphavirus backbone comprises: (i) at least one promoter nucleotide sequence, and (ii) at least one polyadenylation (poly(A)) sequence; and (b) an antigen cassette, wherein the antigen cassette is inserted into the vector backbone, and wherein the antigen cassette comprises: (i) at least one SARS-CoV-2 derived nucleic acid sequence encoding an immunogenic polypeptide, wherein the immunogenic polypeptide comprises:
[0008] at least one MHC class I epitope comprising a polypeptide sequence as set forth in Table A,
[0009] at least one MHC class II epitope comprising a polypeptide sequence as set forth in Table B,
[0010] at least one MHC class I epitope comprising a polypeptide sequence as set forth in Table C, optionally wherein the at least one MHC I epitope is present in a concatenated polypeptide sequence as set forth in SEQ ID NO:57 or SEQ ID NO:58,
[0011] at least one polypeptide sequence as set forth in Table 7, or an epitope-containing fragment thereof, optionally wherein the at least one polypeptide sequence is present in a concatenated polypeptide sequence as set forth in SEQ ID NO:92,
[0012] at least one polypeptide sequence as set forth in Table 9A, Table 9B, or Table 9C, or an epitope-containing fragment thereof, optionally wherein the at least one polypeptide sequence is present in a concatenated polypeptide comprising each of the sequences set forth in Table 9A, Table 9B, or Table 9C, optionally wherein the concatenated polypeptide comprises the order of sequences set forth in Table 9A, Table 9B, or Table 9C,
[0013] at least one MHC class I epitope comprising a polypeptide sequence as set forth in Table A and/or Table C or MHC class II epitope comprising a polypeptide sequence as set forth in Table B, wherein the encoded SARS-CoV-2 immunogenic polypeptide is conserved between SARS-CoV-2 and a Coronavirus species and/or sub-species other than SARS-CoV-2, optionally wherein the Coronavirus species and/or sub-species other than SARS-CoV-2 is Severe acute respiratory syndrome (SARS) and/or Middle East respiratory syndrome (MERS),
[0014] one or more validated epitopes and/or at least 4, 5, 6, or 7 predicted epitopes, wherein at least 85%, 90%, or 95% of a population carries at least one HLA validated to present at least one of the one or more validated epitopes and/or at least one HLA predicted to present each of the at least 4, 5, 6, or 7 predicted epitopes,
[0015] a SARS-CoV-2 Spike protein comprising a Spike polypeptide sequence as set forth in SEQ ID NO:59 or an epitope-containing fragment thereof, optionally wherein the Spike polypeptide comprises a D614G mutation with reference to SEQ ID NO:59, and optionally wherein the Spike polypeptide is encoded by the nucleotide sequence shown in SEQ ID NO:79, SEQ ID NO:83, SEQ ID NO:85, or SEQ ID NO:87,
[0016] a SARS-CoV-2 modified Spike protein comprising a mutation selected from the group consisting of: a Spike R682 mutation, a Spike R815 mutation, a Spike K986P mutation, a Spike V987P mutation, and combinations thereof with reference to the Spike polypeptide sequence as set forth in SEQ ID NO:59, and optionally wherein the modified Spike protein comprises a polypeptide sequence as set forth in SEQ ID NO:60 or SEQ ID NO:90 or an epitope-containing fragment thereof,
[0017] a SARS-CoV-2 Membrane protein comprising a Membrane polypeptide sequence as set forth in SEQ ID NO:61 or an epitope-containing fragment thereof,
[0018] a SARS-CoV-2 Nucleocapsid protein comprising a Nucleocapsid polypeptide sequence as set forth in SEQ ID NO:62 or an epitope-containing fragment thereof,
[0019] a SARS-CoV-2 Envelope protein comprising an Envelope polypeptide sequence as set forth in SEQ ID NO:63 or an epitope-containing fragment thereof,
[0020] a variant of any of the above comprising a mutation found in 1% or greater of SARS-CoV-2 subtypes, optionally wherein the variant comprises a SARS-CoV-2 variant shown in Table 1, and/or optionally wherein the variant comprises a SARS-CoV-2 variant Spike protein comprising a Spike D614G mutation with reference to the Spike polypeptide sequence as set forth in SEQ ID NO:59, a SARS-CoV-2 variant Spike protein corresponding to a B.1.351 SARS-CoV-2 isolate optionally comprising the Spike polypeptide sequence as set forth in SEQ ID NO:112 or subvariant, a SARS-CoV-2 variant Spike protein corresponding to a B.1.1.7 SARS-CoV-2 isolate optionally comprising the Spike polypeptide sequence as set forth in SEQ ID NO:110, a SARS-CoV-2 variant Spike protein corresponding to a B.1.1.529 SARS-CoV-2 isolate optionally comprising the Spike polypeptide sequence as set forth in SEQ ID NO: 27974 and/or is encoded by nucleotides 9714-13,526 of the nucleotide sequence set forth in SEQ ID NO: 27976, or a SARS-CoV-2 variant Spike protein corresponding to a B.1.1.529 BA5 SARS-CoV-2 subvariant optionally comprising the Spike polypeptide sequence as set forth in SEQ ID NO: 27978 and/or encoded by SEQ ID NO: 27980,
[0021] or combinations thereof; and
   wherein the immunogenic polypeptide optionally comprises a N-terminal linker and/or a C-terminal linker; (ii) optionally, a second promoter nucleotide sequence operably linked to the SARS-CoV-2 derived nucleic acid sequence; and (iii) optionally, at least one MHC class II epitope-encoding nucleic acid sequence; (iv) optionally, at least one nucleic acid sequence encoding a GPGPG amino acid linker sequence (SEQ ID NO:56); and (v) optionally, at least one second poly(A) sequence, wherein the second poly(A) sequence is a native poly(A) sequence or an exogenous poly(A) sequence to the vector backbone, optionally wherein the exogenous poly(A) sequence comprises an SV40 poly(A) signal sequence or a Bovine Growth Hormone (BGH) poly(A) signal sequence; and (B) a lipid-nanoparticle (LNP), wherein the LNP encapsulates the self-amplifying alphavirus-based expression system, and wherein the composition comprises at least 10 μg of each of the one or more vectors.

[0022] In some aspects, the composition for delivery of the self-amplifying alphavirus-based expression system comprises at least 30 μg of each of the one or more vectors. In some aspects, the composition for delivery of the self-amplifying alphavirus-based expression system comprises 30 μg or less of each of the one or more vectors. In some aspects, the composition for delivery of the self-amplifying alphavirus-based expression system comprises between 10-30 μg or between 10-100 μg of each of the one or more vectors. In some aspects, the composition for delivery of the self-amplifying alphavirus-based expression system comprises at least 10 μg total of the one or more vectors combined. In some aspects, the composition for delivery of the self-amplifying alphavirus-based expression system comprises at least 30 μg total of the one or more vectors combined. In some aspects, the composition for delivery of the self-amplifying alphavirus-based expression system comprises 30 μg or less total of the one or more vectors combined. In some aspects, the composition for delivery of the self-amplifying alphavirus-based expression system comprises between 10-30 μg or between 10-100 μg total of the one or more vectors combined.

[0023] In some aspects, the one or more vectors of wherein the self-amplifying alphavirus-based expression system is at a concentration of 1 mg/mL. In some aspects, the RNA alphavirus backbone comprises one or more elements obtained from the sequence of SEQ ID NO:3 or SEQ ID NO:5, optionally wherein the one or more elements are selected from the group consisting of the sequences necessary for nonstructural protein-mediated amplification, the 26S promoter nucleotide sequence, the poly(A) sequence, and the nsP1-4 genes of the sequence set forth in SEQ ID NO:3 or SEQ ID NO:5, optionally the RNA alphavirus backbone comprises the sequence set forth in the sequences selected from the group consisting of SEQ ID NOs:6-9.

[0024] In some aspects, the self-amplifying alphavirus-based expression system comprises a vector selected from the group of sequences consisting of: SEQ ID NO: 27983, SEQ ID NO:27981, SEQ ID NO:27982, SEQ ID NO: 27976, and SEQ ID NO: 27976 with Spike encoding sequences substituted with the sequence set forth in SEQ ID NO:27980.

[0025] Also provided for herein is a method for stimulating an immune response in a subject, the method comprising administering to the subject the composition for delivery of the self-amplifying alphavirus-based expression systems provided herein.

[0026] In some aspects, the method comprises administering at least two doses of the composition for delivery of the self-amplifying alphavirus-based expression system. In some aspects, the at least two doses comprises a priming dose and at least one boosting dose. In some aspects, the at least two doses are administered on days 1 and day 28 or later. In some aspects, day 28 or later comprises day 29 or later. In some aspects, the at least two doses are administered on days 1 and on or after week 4. In some aspects, the at least two doses are administered on days 1 and between day 28 to 113. In some aspects, the at least two doses are administered on days 1 and day 113 or later.

[0027] In some aspects, the at least two doses comprise the same antigen cassette.

[0028] In some aspects, the method further comprises administration of a chimpanzee adenovirus (ChAdV)-based expression system, wherein the composition for delivery of the ChAdV-based expression system comprises: the ChAdV-based expression system, wherein the ChAdV-based expression system comprises a viral particle comprising a ChAdV vector, wherein the ChAdV vector comprises: (a) a ChAdV backbone, wherein the ChAdV backbone comprises: (i) at least one promoter nucleotide sequence, and (ii) at least one polyadenylation (poly(A)) sequence; and (b) an antigen cassette, wherein the antigen cassette is inserted into the vector backbone, and wherein the antigen cassette comprises at least one SARS-CoV-2 derived nucleic acid sequence encoding an immunogenic polypeptide.

[0029] In some aspects, the ChAdV-based expression system is administered as a priming dose. In some aspects, the antigen cassette of the ChAdV-based expression system is the same as the antigen cassette of the self-amplifying alphavirus-based expression system.

[0030] Also provided for herein is a composition for delivery of a chimpanzee adenovirus (ChAdV)-based expression system, wherein the composition for delivery of the ChAdV-based expression system comprises: the ChAdV-based expression system, wherein the ChAdV-based expression system comprises a viral particle comprising a ChAdV vector, wherein the ChAdV vector comprises: (a) a ChAdV backbone, wherein the ChAdV backbone comprises: (i) at least one promoter nucleotide sequence, and (ii) at least one polyadenylation (poly(A)) sequence; and (b) an antigen cassette, wherein the antigen cassette is inserted into the vector backbone, and wherein the antigen cassette comprises: (i) at least one SARS-CoV-2 derived nucleic acid sequence encoding an immunogenic polypeptide, wherein the immunogenic polypeptide comprises:
[0031] at least one MHC class I epitope comprising a polypeptide sequence as set forth in Table A,
[0032] at least one MHC class II epitope comprising a polypeptide sequence as set forth in Table B,
[0033] at least one MHC class I epitope comprising a polypeptide sequence as set forth in Table C, optionally wherein the at least one MHC I epitope is present in a concatenated polypeptide sequence as set forth in SEQ ID NO:57 or SEQ ID NO:58,
[0034] at least one polypeptide sequence as set forth in Table 7, or an epitope-containing fragment thereof, optionally wherein the at least one polypeptide sequence is present in a concatenated polypeptide sequence as set forth in SEQ ID NO:92,
[0035] at least one polypeptide sequence as set forth in Table 9A, Table 9B, or Table 9C, or an epitope-containing fragment thereof, optionally wherein the at least one polypeptide sequence is present in a concatenated polypeptide comprising each of the sequences set forth in Table 9A, Table 9B, or Table 9C, optionally wherein the concatenated polypeptide comprises the order of sequences set forth in Table 9A, Table 9B, or Table 9C,
[0036] at least one MHC class I epitope comprising a polypeptide sequence as set forth in Table A and/or Table C or MHC class II epitope comprising a polypeptide sequence as set forth in Table B, wherein the encoded SARS-CoV-2 immunogenic polypeptide is conserved between SARS-CoV-2 and a Coronavirus species and/or sub-species other than SARS-CoV-2, optionally wherein the Coronavirus species and/or sub-species other than SARS-CoV-2 is Severe acute respiratory syndrome (SARS) and/or Middle East respiratory syndrome (MERS),
[0037] one or more validated epitopes and/or at least 4, 5, 6, or 7 predicted epitopes, wherein at least 85%, 90%, or 95% of a population carries at least one HLA validated to present at least one of the one or more validated epitopes and/or at least one HLA predicted to present each of the at least 4, 5, 6, or 7 predicted epitopes,
[0038] a SARS-CoV-2 Spike protein comprising a Spike polypeptide sequence as set forth in SEQ ID NO:59 or an epitope-containing fragment thereof, optionally wherein the Spike polypeptide comprises a D614G mutation with reference to SEQ ID NO:59, and optionally wherein the Spike polypeptide is encoded by the nucleotide sequence shown in SEQ ID NO:79, SEQ ID NO:83, SEQ ID NO:85, or SEQ ID NO:87,
[0039] a SARS-CoV-2 modified Spike protein comprising a mutation selected from the group consisting of: a Spike R682 mutation, a Spike R815 mutation, a Spike K986P mutation, a Spike V987P mutation, and combinations thereof with reference to the Spike polypeptide sequence as set forth in SEQ ID NO:59, and optionally wherein the modified Spike protein comprises a polypeptide sequence as set forth in SEQ ID NO:60 or SEQ ID NO:90 or an epitope-containing fragment thereof,
[0040] a SARS-CoV-2 Membrane protein comprising a Membrane polypeptide sequence as set forth in SEQ ID NO:61 or an epitope-containing fragment thereof,
[0041] a SARS-CoV-2 Nucleocapsid protein comprising a Nucleocapsid polypeptide sequence as set forth in SEQ ID NO:62 or an epitope-containing fragment thereof,
[0042] a SARS-CoV-2 Envelope protein comprising an Envelope polypeptide sequence as set forth in SEQ ID NO:63 or an epitope-containing fragment thereof,
[0043] a variant of any of the above comprising a mutation found in 1% or greater of SARS-CoV-2 subtypes, optionally wherein the variant comprises a SARS-CoV-2 variant shown in Table 1, and/or optionally wherein the variant comprises a SARS-CoV-2 variant Spike protein comprising a Spike D614G mutation with reference to the Spike polypeptide sequence as set forth in SEQ ID NO:59, a SARS-CoV-2 variant Spike protein corresponding to a B.1.351 SARS-CoV-2 isolate optionally comprising the Spike polypeptide sequence as set forth in SEQ ID NO:112 or subvariant, a SARS-CoV-2 variant Spike protein corresponding to a B.1.1.7 SARS-CoV-2 isolate optionally comprising the Spike polypeptide sequence as set forth in SEQ ID NO:110, a SARS-CoV-2 variant Spike protein corresponding to a B.1.1.529 SARS-CoV-2 isolate optionally comprising the Spike polypeptide sequence as set forth in SEQ ID NO: 27974 and/or is encoded by nucleotides 9714-13,526 of the nucleotide sequence set forth in SEQ ID NO: 27976, or a SARS-CoV-2 variant Spike protein corresponding to a B.1.1.529 BA5 SARS-CoV-2 subvariant optionally comprising the Spike polypeptide sequence as set forth in SEQ ID NO: 27978 and/or encoded by SEQ ID NO: 27980,
[0044] or combinations thereof; and
   wherein the immunogenic polypeptide optionally comprises a N-terminal linker and/or a C-terminal linker; (ii) optionally, a second promoter nucleotide sequence operably linked to the SARS-CoV-2 derived nucleic acid sequence; and (iii) optionally, at least one MHC class II epitope-encoding nucleic acid sequence; (iv) optionally, at least one nucleic acid sequence encoding a GPGPG amino acid linker sequence (SEQ ID NO:56); and (v) optionally, at least one second poly(A) sequence, wherein the second poly(A) sequence is a native poly(A) sequence or an exogenous poly(A) sequence to the vector backbone, optionally wherein the exogenous poly(A) sequence comprises an SV40 poly(A) signal sequence or a Bovine Growth Hormone (BGH) poly(A) signal sequence, and wherein the cassette is operably linked to the at least one promoter nucleotide sequence and the at least one poly(A) sequence, and wherein the composition comprises 1×10¹² or less of the viral particles.

[0045] In some aspects, the composition for delivery of the ChAdV-based expression system comprises at least 1×10¹¹ of the viral particles. In some aspects, the composition for delivery of the ChAdV-based expression system comprises between 1×10¹¹ and 1×10¹². In some aspects, the composition for delivery of the ChAdV-based expression system comprises 1×10¹¹, 3×10¹¹, or 1×10¹² of the viral particles. In some aspects, the viral particles are at a concentration of 5×10¹¹ vp/mL.

[0046] In some aspects, the ChAdV backbone comprises at least nucleotides 2 to 36,518 of the sequence set forth in SEQ ID NO:1, wherein the nucleotides 2 to 36,518 lack: (1) nucleotides 577 to 3403 of the sequence shown in SEQ ID NO:1 corresponding to an E1 deletion; (2) nucleotides 27,125 to 31,825 of the sequence shown in SEQ ID NO:1 corresponding to an E3 deletion; and (3) optionally nucleotides 34,916 to 35,642 of the sequence shown in SEQ ID NO:1 corresponding to a partial E4 deletion; optionally wherein the antigen cassette is inserted within the E1 deletion.

[0047] Also provided for herein is a method for stimulating an immune response in a subject, the method comprising administering to the subject the composition for delivery of the ChAdV-based expression systems described herein.

[0048] In some aspects, the the ChAdV-based expression system is administered as a priming dose. In some aspects, the method further comprises administration of a composition for delivery of a self-amplifying alphavirus-based expression system, wherein the composition for delivery of the self-amplifying alphavirus-based expression system comprises: (A) the self-amplifying alphavirus-based expression system, wherein the self-amplifying alphavirus-based expression system comprises one or more vectors, wherein the one or more vectors comprises: (a) an RNA alphavirus backbone, wherein the RNA alphavirus backbone comprises: (i) at least one promoter nucleotide sequence, and (ii) at least one polyadenylation (poly(A)) sequence; and (b) an antigen cassette, wherein the antigen cassette is inserted into the vector backbone, and wherein the antigen cassette comprises at least one SARS-CoV-2 derived nucleic acid sequence encoding an immunogenic polypeptide.

[0049] In some aspects, the antigen cassette of the ChAdV-based expression system is the same as the antigen cassette of the self-amplifying alphavirus-based expression system.

[0050] In some aspects, the composition for delivery of the expression system is formulated in a pharmaceutical composition comprising a pharmaceutically acceptable carrier.

[0051] Also provided herein is a kit comprising the composition for delivery of the expression systems provided herein, and instructions for use.

[0052] Also provided for herein is a method for stimulating an immune response in a subject, the method comprising administering to the subject a composition for delivery of a self-amplifying alphavirus-based expression system wherein the composition for delivery of the self-amplifying alphavirus-based expression system comprises: (A) the self-amplifying alphavirus-based expression system, wherein the self-amplifying alphavirus-based expression system comprises one or more vectors, wherein the one or more vectors comprises: (a) an RNA alphavirus backbone, wherein the RNA alphavirus backbone comprises: (i) at least one promoter nucleotide sequence, and (ii) at least one polyadenylation (poly(A)) sequence; and (b) an antigen cassette, wherein the antigen cassette is inserted into the vector backbone, and wherein the antigen cassette comprises: (i) at least one SARS-CoV-2 derived nucleic acid sequence encoding an immunogenic polypeptide, wherein the immunogenic polypeptide comprises:
[0053] at least one MHC class I epitope comprising a polypeptide sequence as set forth in Table A,
[0054] at least one MHC class II epitope comprising a polypeptide sequence as set forth in Table B,
[0055] at least one MHC class I epitope comprising a polypeptide sequence as set forth in Table C, optionally wherein the at least one MHC I epitope is present in a concatenated polypeptide sequence as set forth in SEQ ID NO:57 or SEQ ID NO:58,
[0056] at least one polypeptide sequence as set forth in Table 7, or an epitope-containing fragment thereof, optionally wherein the at least one polypeptide sequence is present in a concatenated polypeptide sequence as set forth in SEQ ID NO:92,
[0057] at least one polypeptide sequence as set forth in Table 9A, Table 9B, or Table 9C, or an epitope-containing fragment thereof, optionally wherein the at least one polypeptide sequence is present in a concatenated polypeptide comprising each of the sequences set forth in Table 9A, Table 9B, or Table 9C, optionally wherein the concatenated polypeptide comprises the order of sequences set forth in Table 9A, Table 9B, or Table 9C,
[0058] at least one MHC class I epitope comprising a polypeptide sequence as set forth in Table A and/or Table C or MHC class II epitope comprising a polypeptide sequence as set forth in Table B, wherein the encoded SARS-CoV-2 immunogenic polypeptide is conserved between SARS-CoV-2 and a Coronavirus species and/or sub-species other than SARS-CoV-2, optionally wherein the Coronavirus species and/or sub-species other than SARS-CoV-2 is Severe acute respiratory syndrome (SARS) and/or Middle East respiratory syndrome (MERS),
[0059] one or more validated epitopes and/or at least 4, 5, 6, or 7 predicted epitopes, wherein at least 85%, 90%, or 95% of a population carries at least one HLA validated to present at least one of the one or more validated epitopes and/or at least one HLA predicted to present each of the at least 4, 5, 6, or 7 predicted epitopes,
[0060] a SARS-CoV-2 Spike protein comprising a Spike polypeptide sequence as set forth in SEQ ID NO:59 or an epitope-containing fragment thereof, optionally wherein the Spike polypeptide comprises a D614G mutation with reference to SEQ ID NO:59, and optionally wherein the Spike polypeptide is encoded by the nucleotide sequence shown in SEQ ID NO:79, SEQ ID NO:83, SEQ ID NO:85, or SEQ ID NO:87,
[0061] a SARS-CoV-2 modified Spike protein comprising a mutation selected from the group consisting of: a Spike R682 mutation, a Spike R815 mutation, a Spike K986P mutation, a Spike V987P mutation, and combinations thereof with reference to the Spike polypeptide sequence as set forth in SEQ ID NO:59, and optionally wherein the modified Spike protein comprises a polypeptide sequence as set forth in SEQ ID NO:60 or SEQ ID NO:90 or an epitope-containing fragment thereof,
[0062] a SARS-CoV-2 Membrane protein comprising a Membrane polypeptide sequence as set forth in SEQ ID NO:61 or an epitope-containing fragment thereof,
[0063] a SARS-CoV-2 Nucleocapsid protein comprising a Nucleocapsid polypeptide sequence as set forth in SEQ ID NO:62 or an epitope-containing fragment thereof,
[0064] a SARS-CoV-2 Envelope protein comprising an Envelope polypeptide sequence as set forth in SEQ ID NO:63 or an epitope-containing fragment thereof,
[0065] a variant of any of the above comprising a mutation found in 1% or greater of SARS-CoV-2 subtypes, optionally wherein the variant comprises a SARS-CoV-2 variant shown in Table 1, and/or optionally wherein the variant comprises a SARS-CoV-2 variant Spike protein comprising a Spike D614G mutation with reference to the Spike polypeptide sequence as set forth in SEQ ID NO:59, a SARS-CoV-2 variant Spike protein corresponding to a B.1.351 SARS-CoV-2 isolate optionally comprising the Spike polypeptide sequence as set forth in SEQ ID NO:112 or subvariant, a SARS-CoV-2 variant Spike protein corresponding to a B.1.1.7 SARS-CoV-2 isolate optionally comprising the Spike polypeptide sequence as set forth in SEQ ID NO:110, a SARS-CoV-2 variant Spike protein corresponding to a B.1.1.529 SARS-CoV-2 isolate optionally comprising the Spike polypeptide sequence as set forth in SEQ ID NO: 27974 and/or is encoded by nucleotides 9714-13,526 of the nucleotide sequence set forth in SEQ ID NO: 27976, or a SARS-CoV-2 variant Spike protein corresponding to a B.1.1.529 BA5 SARS-CoV-2 subvariant optionally comprising the Spike polypeptide sequence as set forth in SEQ ID NO: 27978 and/or encoded by SEQ ID NO: 27980,
[0066] or combinations thereof; and
   wherein the immunogenic polypeptide optionally comprises a N-terminal linker and/or a C-terminal linker; (ii) optionally, a second promoter nucleotide sequence operably linked to the SARS-CoV-2 derived nucleic acid sequence; and (iii) optionally, at least one MHC class II epitope-encoding nucleic acid sequence; (iv) optionally, at least one nucleic acid sequence encoding a GPGPG amino acid linker sequence (SEQ ID NO:56); and (v) optionally, at least one second poly(A) sequence, wherein the second poly(A) sequence is a native poly(A) sequence or an exogenous poly(A) sequence to the vector backbone, optionally wherein the exogenous poly(A) sequence comprises an SV40 poly(A) signal sequence or a Bovine Growth Hormone (BGH) poly(A) signal sequence; and (B) a lipid-nanoparticle (LNP), wherein the LNP encapsulates the self-amplifying alphavirus-based expression system, and wherein the composition comprises at least 10 μg of each of the one or more vectors.

[0067] Also provided for herein is a method for stimulating an immune response in a subject, the method comprising administering to the subject a composition for delivery of the ChAdV-based expression system, wherein the composition for delivery of the ChAdV-based expression system comprises: the ChAdV-based expression system, wherein the ChAdV-based expression system comprises a viral particle comprising a ChAdV vector, wherein the ChAdV vector comprises: (a) a ChAdV backbone, wherein the ChAdV backbone comprises: (i) at least one promoter nucleotide sequence, and (ii) at least one polyadenylation (poly(A)) sequence; and (b) an antigen cassette, wherein the antigen cassette is inserted into the vector backbone, and wherein the antigen cassette comprises: (i) at least one SARS-CoV-2 derived nucleic acid sequence encoding an immunogenic polypeptide, wherein the immunogenic polypeptide comprises:
[0068] at least one MHC class I epitope comprising a polypeptide sequence as set forth in Table A,
[0069] at least one MHC class II epitope comprising a polypeptide sequence as set forth in Table B,
[0070] at least one MHC class I epitope comprising a polypeptide sequence as set forth in Table C, optionally wherein the at least one MHC I epitope is present in a concatenated polypeptide sequence as set forth in SEQ ID NO:57 or SEQ ID NO:58,
[0071] at least one polypeptide sequence as set forth in Table 7, or an epitope-containing fragment thereof, optionally wherein the at least one polypeptide sequence is present in a concatenated polypeptide sequence as set forth in SEQ ID NO:92,
[0072] at least one polypeptide sequence as set forth in Table 9A, Table 9B, or Table 9C, or an epitope-containing fragment thereof, optionally wherein the at least one polypeptide sequence is present in a concatenated polypeptide comprising each of the sequences set forth in Table 9A, Table 9B, or Table 9C, optionally wherein the concatenated polypeptide comprises the order of sequences set forth in Table 9A, Table 9B, or Table 9C,
[0073] at least one MHC class I epitope comprising a polypeptide sequence as set forth in Table A and/or Table C or MHC class II epitope comprising a polypeptide sequence as set forth in Table B, wherein the encoded SARS-CoV-2 immunogenic polypeptide is conserved between SARS-CoV-2 and a Coronavirus species and/or sub-species other than SARS-CoV-2, optionally wherein the Coronavirus species and/or sub-species other than SARS-CoV-2 is Severe acute respiratory syndrome (SARS) and/or Middle East respiratory syndrome (MERS),
[0074] one or more validated epitopes and/or at least 4, 5, 6, or 7 predicted epitopes, wherein at least 85%, 90%, or 95% of a population carries at least one HLA validated to present at least one of the one or more validated epitopes and/or at least one HLA predicted to present each of the at least 4, 5, 6, or 7 predicted epitopes,
[0075] a SARS-CoV-2 Spike protein comprising a Spike polypeptide sequence as set forth in SEQ ID NO:59 or an epitope-containing fragment thereof, optionally wherein the Spike polypeptide comprises a D614G mutation with reference to SEQ ID NO:59, and optionally wherein the Spike polypeptide is encoded by the nucleotide sequence shown in SEQ ID NO:79, SEQ ID NO:83, SEQ ID NO:85, or SEQ ID NO:87,
[0076] a SARS-CoV-2 modified Spike protein comprising a mutation selected from the group consisting of: a Spike R682 mutation, a Spike R815 mutation, a Spike K986P mutation, a Spike V987P mutation, and combinations thereof with reference to the Spike polypeptide sequence as set forth in SEQ ID NO:59, and optionally wherein the modified Spike protein comprises a polypeptide sequence as set forth in SEQ ID NO:60 or SEQ ID NO:90 or an epitope-containing fragment thereof,
[0077] a SARS-CoV-2 Membrane protein comprising a Membrane polypeptide sequence as set forth in SEQ ID NO:61 or an epitope-containing fragment thereof,
[0078] a SARS-CoV-2 Nucleocapsid protein comprising a Nucleocapsid polypeptide sequence as set forth in SEQ ID NO:62 or an epitope-containing fragment thereof,
[0079] a SARS-CoV-2 Envelope protein comprising an Envelope polypeptide sequence as set forth in SEQ ID NO:63 or an epitope-containing fragment thereof,
[0080] a variant of any of the above comprising a mutation found in 1% or greater of SARS-CoV-2 subtypes, optionally wherein the variant comprises a SARS-CoV-2 variant shown in Table 1, and/or optionally wherein the variant comprises a SARS-CoV-2 variant Spike protein comprising a Spike D614G mutation with reference to the Spike polypeptide sequence as set forth in SEQ ID NO:59, a SARS-CoV-2 variant Spike protein corresponding to a B.1.351 SARS-CoV-2 isolate optionally comprising the Spike polypeptide sequence as set forth in SEQ ID NO:112 or subvariant, a SARS-CoV-2 variant Spike protein corresponding to a B.1.1.7 SARS-CoV-2 isolate optionally comprising the Spike polypeptide sequence as set forth in SEQ ID NO:110, a SARS-CoV-2 variant Spike protein corresponding to a B.1.1.529 SARS-CoV-2 isolate optionally comprising the Spike polypeptide sequence as set forth in SEQ ID NO: 27974 and/or is encoded by nucleotides 9714-13,526 of the nucleotide sequence set forth in SEQ ID NO: 27976, or a SARS-CoV-2 variant Spike protein corresponding to a B.1.1.529 BA5 SARS-CoV-2 subvariant optionally comprising the Spike polypeptide sequence as set forth in SEQ ID NO: 27978 and/or encoded by SEQ ID NO: 27980,
[0081] or combinations thereof; and
   wherein the immunogenic polypeptide optionally comprises a N-terminal linker and/or a C-terminal linker; (ii) optionally, a second promoter nucleotide sequence operably linked to the SARS-CoV-2 derived nucleic acid sequence; and (iii) optionally, at least one MHC class II epitope-encoding nucleic acid sequence; (iv) optionally, at least one nucleic acid sequence encoding a GPGPG amino acid linker sequence (SEQ ID NO:56); and (v) optionally, at least one second poly(A) sequence, wherein the second poly(A) sequence is a native poly(A) sequence or an exogenous poly(A) sequence to the vector backbone, optionally wherein the exogenous poly(A) sequence comprises an SV40 poly(A) signal sequence or a Bovine Growth Hormone (BGH) poly(A) signal sequence, and wherein the cassette is operably linked to the at least one promoter nucleotide sequence and the at least one poly(A) sequence, and wherein the composition comprises 1×10¹² or less of the viral particles.

[0082] Also provided for herein is a method for stimulating an immune response in a subject, the method comprising administering to the subject a composition for delivery of a self-amplifying alphavirus-based expression system and administering to the subject a composition for delivery of a chimpanzee adenovirus (ChAdV)-based expression system, and wherein either: a. the composition for delivery of the ChAdV-based expression system comprises the ChAdV-based expression system, wherein the ChAdV-based expression system comprises a viral particle comprising a ChAdV vector, and wherein the composition comprises 1×10¹² or less of the viral particles, b. wherein the composition for delivery of the self-amplifying alphavirus-based expression system comprises the self-amplifying alphavirus-based expression system, wherein the self-amplifying alphavirus-based expression system comprises one or more vectors, and wherein the composition comprises at least 10 μg of each of the one or more vectors, or c. the composition for delivery of the ChAdV-based expression system comprises the ChAdV-based expression system, wherein the ChAdV-based expression system comprises a viral particle comprising a ChAdV vector, and wherein the composition comprises 1×10¹² or less of the viral particles and wherein the composition for delivery of the self-amplifying alphavirus-based expression system comprises the self-amplifying alphavirus-based expression system, wherein the self-amplifying alphavirus-based expression system comprises one or more vectors, and wherein the composition comprises at least 10 μg of each of the one or more vectors.

[0083] In some aspects, the composition for delivery of the ChAdV-based expression system is administered as a priming dose and the composition for delivery of the self-amplifying alphavirus-based expression system is administered as one or more boosting doses.

[0084] Also provided for herein is a composition for delivery of an antigen expression system, comprising: the antigen expression system, wherein the antigen expression system comprises: (a) optionally, one or more vectors, the one or more vectors comprising: a vector backbone, wherein the vector backbone comprises: (i) at least one promoter nucleotide sequence, and (ii) at least one polyadenylation (poly(A)) sequence; and (b) an antigen cassette, optionally wherein the antigen cassette is inserted into the vector backbone when present, and wherein the antigen cassette comprises: (i) a SARS-CoV-2 derived nucleic acid sequence encoding an immunogenic polypeptide, wherein the immunogenic polypeptide comprises a SARS-CoV-2 variant Spike protein corresponding to a B.1.1.529 SARS-CoV-2 isolate optionally comprising the Spike polypeptide sequence as set forth in SEQ ID NO: 27974 and/or is encoded by nucleotides 9714-13,526 of the nucleotide sequence set forth in SEQ ID NO: 27976, or a SARS-CoV-2 variant Spike protein corresponding to a B.1.1.529 BA5 SARS-CoV-2 subvariant optionally comprising the Spike polypeptide sequence as set forth in SEQ ID NO: 27978 and/or encoded by SEQ ID NO: 27980, optionally wherein (a) the B.1.1.529 isolate Spike protein or fragment comprises a mutation selected from the group consisting of: a Spike R679 mutation, a Spike R680 mutation, a Spike R682 mutation, a Spike K983P mutation, a Spike V984P mutation, and combinations thereof with reference to the Spike polypeptide sequence as set forth in SEQ ID NO:27977 or (b) the B.1.1.529 BA5 subvariant Spike protein or fragment comprises a mutation selected from the group consisting of: a Spike R677 mutation, a Spike R678 mutation, a Spike R680 mutation, a Spike K981P mutation, a Spike V982P mutation, and combinations thereof with reference to the Spike polypeptide sequence as set forth in SEQ ID NO: 27979, and optionally wherein the antigen cassette further comprises at least one additional SARS-CoV-2 derived nucleic acid sequence encoding at least one additional immunogenic polypeptide, wherein the at least one additional immunogenic polypeptide comprises:
[0085] at least one MHC class I epitope comprising a polypeptide sequence as set forth in Table A,
[0086] at least one MHC class II epitope comprising a polypeptide sequence as set forth in Table B,
[0087] at least one MHC class I epitope comprising a polypeptide sequence as set forth in Table C, optionally wherein the at least one MHC I epitope is present in a concatenated polypeptide sequence as set forth in SEQ ID NO:57 or SEQ ID NO:58,
[0088] at least one polypeptide sequence as set forth in Table 6, or an epitope-containing fragment thereof, optionally wherein the at least one polypeptide sequence is present in a concatenated polypeptide sequence as set forth in SEQ ID NO:92,
[0089] at least one polypeptide sequence as set forth in Table 9A, Table 9B, or Table 9C, or an epitope-containing fragment thereof, optionally wherein the at least one polypeptide sequence is present in a concatenated polypeptide comprising each of the sequences set forth in Table 9A, Table 9B, or Table 9C, optionally wherein the concatenated polypeptide comprises the order of sequences set forth in Table 9A, Table 9B, or Table 9C,
[0090] at least one MHC class I epitope comprising a polypeptide sequence as set forth in Table A and/or Table C or MHC class II epitope comprising a polypeptide sequence as set forth in Table B, wherein the encoded SARS-CoV-2 immunogenic polypeptide is conserved between SARS-CoV-2 and a Coronavirus species and/or sub-species other than SARS-CoV-2, optionally wherein the Coronavirus species and/or sub-species other than SARS-CoV-2 is Severe acute respiratory syndrome (SARS) and/or Middle East respiratory syndrome (MERS),
[0091] one or more validated epitopes and/or at least 4, 5, 6, or 7 predicted epitopes, wherein at least 85%, 90%, or 95% of a population carries at least one HLA validated to present at least one of the one or more validated epitopes and/or at least one HLA predicted to present each of the at least 4, 5, 6, or 7 predicted epitopes,
[0092] a SARS-CoV-2 Spike protein or an epitope-containing fragment thereof corresponding to an isolate other than a B.1.1.529 SARS-CoV-2 isolate, optionally comprising a Spike polypeptide sequence as set forth in SEQ ID NO:59, optionally wherein the Spike polypeptide comprises a D614G mutation with reference to SEQ ID NO:59, and optionally wherein the Spike polypeptide is encoded by the nucleotide sequence shown in SEQ ID NO:79, SEQ ID NO:83, SEQ ID NO:85, or SEQ ID NO:87,
[0093] a SARS-CoV-2 modified Spike protein comprising a mutation selected from the group consisting of: a Spike R682 mutation, a Spike R683 mutation, a Spike R685 mutation, a Spike R815 mutation, a Spike K986P mutation, a Spike V987P mutation, and combinations thereof with reference to the Spike polypeptide sequence as set forth in SEQ ID NO:59, and optionally wherein the modified Spike protein comprises a polypeptide sequence as set forth in SEQ ID NO:60 or SEQ ID NO:90 or an epitope-containing fragment thereof,
[0094] a SARS-CoV-2 Membrane protein comprising a Membrane polypeptide sequence as set forth in SEQ ID NO:61 or an epitope-containing fragment thereof,
[0095] a SARS-CoV-2 Nucleocapsid protein comprising a Nucleocapsid polypeptide sequence as set forth in SEQ ID NO:62 or an epitope-containing fragment thereof,
[0096] a SARS-CoV-2 Envelope protein comprising an Envelope polypeptide sequence as set forth in SEQ ID NO:63 or an epitope-containing fragment thereof,
[0097] a variant of any of the above comprising a mutation found in 1% or greater of SARS-CoV-2 subtypes, optionally wherein the variant comprises a SARS-CoV-2 variant shown in Table 1,
[0098] or combinations thereof; and
   wherein the immunogenic polypeptide optionally comprises a N-terminal linker and/or a C-terminal linker; (ii) optionally, a second promoter nucleotide sequence operably linked to at least one of the SARS-CoV-2 derived nucleic acid sequences; and (iii) optionally, at least one MHC class II epitope-encoding nucleic acid sequence; and (iv) optionally, at least one nucleic acid sequence encoding a GPGPG amino acid linker sequence (SEQ ID NO:56); and (v) optionally, at least one second poly(A) sequence, wherein the second poly(A) sequence is a native poly(A) sequence or an exogenous poly(A) sequence to the vector backbone, optionally wherein the exogenous poly(A) sequence comprises an SV40 poly(A) signal sequence or a Bovine Growth Hormone (BGH) poly(A) signal sequence.

[0099] Also provided herein is an antigen-based vaccine comprising (i) a SARS-CoV-2 variant Spike protein corresponding to a B.1.1.529 SARS-CoV-2 isolate optionally comprising the Spike polypeptide sequence as set forth in SEQ ID NO: 27974 and/or is encoded by nucleotides 9714-13,526 of the nucleotide sequence set forth in SEQ ID NO: 27976, or a SARS-CoV-2 variant Spike protein corresponding to a B.1.1.529 BA5 SARS-CoV-2 subvariant optionally comprising the Spike polypeptide sequence as set forth in SEQ ID NO: 27978 and/or encoded by SEQ ID NO: 27980, optionally wherein (a) the B.1.1.529 isolate Spike protein or fragment comprises a mutation selected from the group consisting of: a Spike R679 mutation, a Spike R680 mutation, a Spike R682 mutation, a Spike K983P mutation, a Spike V984P mutation, and combinations thereof with reference to the Spike polypeptide sequence as set forth in SEQ ID NO:27977 or (b) the B.1.1.529 BA5 subvariant Spike protein or fragment comprises a mutation selected from the group consisting of: a Spike R677 mutation, a Spike R678 mutation, a Spike R680 mutation, a Spike K981P mutation, a Spike V982P mutation, and combinations thereof with reference to the Spike polypeptide sequence as set forth in SEQ ID NO: 27979, and optionally wherein the antigen-based vaccine further comprises at least one additional SARS-CoV-2 derived immunogenic polypeptide, wherein the additional immunogenic polypeptide comprises:
[0100] at least one MHC class I epitope comprising a polypeptide sequence as set forth in Table A,
[0101] at least one MHC class II epitope comprising a polypeptide sequence as set forth in Table B,
[0102] at least one MHC class I epitope comprising a polypeptide sequence as set forth in Table C, optionally wherein the at least one MHC I epitope is present in a concatenated polypeptide sequence as set forth in SEQ ID NO:57 or SEQ ID NO:58,
[0103] at least one polypeptide sequence as set forth in Table 6, or an epitope-containing fragment thereof, optionally wherein the at least one polypeptide sequence is present in a concatenated polypeptide sequence as set forth in SEQ ID NO:92,
[0104] at least one polypeptide sequence as set forth in Table 9A, Table 9B, or Table 9C, or an epitope-containing fragment thereof, optionally wherein the at least one polypeptide sequence is present in a concatenated polypeptide comprising each of the sequences set forth in Table 9A, Table 9B, or Table 9C, optionally wherein the concatenated polypeptide comprises the order of sequences set forth in Table 9A, Table 9B, or Table 9C,
[0105] at least one MHC class I epitope comprising a polypeptide sequence as set forth in Table A and/or Table C or MHC class II epitope comprising a polypeptide sequence as set forth in Table B, wherein the encoded SARS-CoV-2 immunogenic polypeptide is conserved between SARS-CoV-2 and a Coronavirus species and/or sub-species other than SARS-CoV-2, optionally wherein the Coronavirus species and/or sub-species other than SARS-CoV-2 is Severe acute respiratory syndrome (SARS) and/or Middle East respiratory syndrome (MERS),
[0106] one or more validated epitopes and/or at least 4, 5, 6, or 7 predicted epitopes, wherein at least 85%, 90%, or 95% of a population carries at least one HLA validated to present at least one of the one or more validated epitopes and/or at least one HLA predicted to present each of the at least 4, 5, 6, or 7 predicted epitopes,
[0107] a SARS-CoV-2 Spike protein comprising a Spike polypeptide sequence as set forth in SEQ ID NO:59 or an epitope-containing fragment thereof, optionally wherein the Spike polypeptide comprises a D614G mutation with reference to SEQ ID NO:59, and optionally wherein the Spike polypeptide is encoded by the nucleotide sequence shown in SEQ ID NO:79, SEQ ID NO:83, SEQ ID NO:85, or SEQ ID NO:87,
[0108] a SARS-CoV-2 modified Spike protein comprising a mutation selected from the group consisting of: a Spike R682 mutation, a Spike R683 mutation, a Spike R685 mutation, a Spike R815 mutation, a Spike K986P mutation, a Spike V987P mutation, and combinations thereof with reference to the Spike polypeptide sequence as set forth in SEQ ID NO:59, and optionally wherein the modified Spike protein comprises a polypeptide sequence as set forth in SEQ ID NO:60 or SEQ ID NO:90 or an epitope-containing fragment thereof,
[0109] a SARS-CoV-2 Membrane protein comprising a Membrane polypeptide sequence as set forth in SEQ ID NO:61 or an epitope-containing fragment thereof,
[0110] a SARS-CoV-2 Nucleocapsid protein comprising a Nucleocapsid polypeptide sequence as set forth in SEQ ID NO:62 or an epitope-containing fragment thereof,
[0111] a SARS-CoV-2 Envelope protein comprising an Envelope polypeptide sequence as set forth in SEQ ID NO:63 or an epitope-containing fragment thereof,
[0112] a variant of any of the above comprising a mutation found in 1% or greater of SARS-CoV-2 subtypes, optionally wherein the variant comprises a SARS-CoV-2 variant shown in Table 1,
[0113] or combinations thereof; and
   wherein the immunogenic peptide optionally comprises a N-terminal linker and/or a C-terminal linker (ii) optionally, at least one MHC class II antigen; and (iii) optionally, at least one GPGPG amino acid linker sequence (SEQ ID NO:56).

[0114] Also provided for herein is a composition for delivery of an antigen expression system, comprising: the antigen expression system, wherein the antigen expression system comprises: (a) optionally, one or more vectors, the one or more vectors comprising: a vector backbone, wherein the vector backbone comprises: (i) at least one promoter nucleotide sequence, and (ii) at least one polyadenylation (poly(A)) sequence; and (b) an antigen cassette, optionally wherein the antigen cassette is inserted into the vector backbone when present, and wherein the antigen cassette comprises: (i) three SARS-CoV-2 derived nucleic acid sequences encoding immunogenic polypeptides, wherein the immunogenic polypeptides comprises: (A) a SARS-CoV-2 derived nucleic acid sequence encoding an immunogenic polypeptide, wherein the immunogenic polypeptide comprises a SARS-CoV-2 variant Spike protein corresponding to a B.1.1.529 SARS-CoV-2 isolate optionally comprising the Spike polypeptide sequence as set forth in SEQ ID NO: 27974 and/or is encoded by nucleotides 9714-13,526 of the nucleotide sequence set forth in SEQ ID NO: 27976, or a SARS-CoV-2 variant Spike protein corresponding to a B.1.1.529 BA5 SARS-CoV-2 subvariant optionally comprising the Spike polypeptide sequence as set forth in SEQ ID NO: 27978 and/or encoded by SEQ ID NO: 27980, optionally wherein (a) the B.1.1.529 isolate Spike protein or fragment comprises a mutation selected from the group consisting of: a Spike R679 mutation, a Spike R680 mutation, a Spike R682 mutation, a Spike K983P mutation, a Spike V984P mutation, and combinations thereof with reference to the Spike polypeptide sequence as set forth in SEQ ID NO:27977 or (b) the B.1.1.529 BA5 subvariant Spike protein or fragment comprises a mutation selected from the group consisting of: a Spike R677 mutation, a Spike R678 mutation, a Spike R680 mutation, a Spike K981P mutation, a Spike V982P mutation, and combinations thereof with reference to the Spike polypeptide sequence as set forth in SEQ ID NO: 27979; (B) at least one polypeptide sequence as set forth in Table 9C, or an epitope-containing fragment thereof, optionally wherein the at least one polypeptide sequence is present in a concatenated polypeptide comprising each of the sequences set forth in Table 9C, optionally wherein the concatenated polypeptide comprises the order of sequences set forth in Table 9C, and (C) a SARS-CoV-2 Nucleocapsid protein, optionally comprising a Nucleocapsid polypeptide sequence as set forth in SEQ ID NO:62 or an epitope-containing fragment thereof, wherein each of the SAR-CoV-2 SARS-CoV-2 derived nucleic acid sequences comprises; (I) optionally, a 5′ linker sequence, and (II) optionally, a 3′ linker sequence; (ii) optionally, a second promoter nucleotide sequence operably linked to one or more of the three SARS-CoV-2 derived nucleic acid sequences; and (iii) optionally, at least one MHC class II epitope-encoding nucleic acid sequence; (iv) optionally, at least one nucleic acid sequence encoding a GPGPG amino acid linker sequence (SEQ ID NO:56); and (v) optionally, at least one second poly(A) sequence, wherein the second poly(A) sequence is a native poly(A) sequence or an exogenous poly(A) sequence to the vector backbone optionally wherein the exogenous poly(A) sequence comprises an SV40 poly(A) signal sequence or a Bovine Growth Hormone (BGH) poly(A) signal sequence.

[0115] Also provided for herein is a composition for delivery of an antigen expression system, comprising: the antigen expression system, wherein the antigen expression system comprises: (a) one or more vectors, the one or more vectors comprising: a vector backbone, wherein the vector backbone comprises a chimpanzee adenovirus vector, optionally wherein the chimpanzee adenovirus vector is a ChAdV68 vector, or an alphavirus vector, optionally wherein the alphavirus vector is a Venezuelan equine encephalitis virus vector, and wherein the vector backbone comprises: (i) at least one promoter nucleotide sequence, and (ii) at least one polyadenylation (poly(A)) sequence; and (b) an antigen cassette, wherein the antigen cassette is inserted into the vector backbone such that the antigen cassette is operably linked to the at least one promoter nucleotide sequence, and wherein the antigen cassette comprises: (i) three SARS-CoV-2 derived nucleic acid sequences encoding immunogenic polypeptides, wherein the immunogenic polypeptides comprises: (A) a SARS-CoV-2 variant Spike protein corresponding to a B.1.1.529 SARS-CoV-2 isolate optionally comprising the Spike polypeptide sequence as set forth in SEQ ID NO: 27974 and/or is encoded by nucleotides 9714-13,526 of the nucleotide sequence set forth in SEQ ID NO: 27976, or a SARS-CoV-2 variant Spike protein corresponding to a B.1.1.529 BA5 SARS-CoV-2 subvariant optionally comprising the Spike polypeptide sequence as set forth in SEQ ID NO: 27978 and/or encoded by SEQ ID NO: 27980, optionally wherein (a) the B.1.1.529 isolate Spike protein or fragment comprises a mutation selected from the group consisting of: a Spike R679 mutation, a Spike R680 mutation, a Spike R682 mutation, a Spike K983P mutation, a Spike V984P mutation, and combinations thereof with reference to the Spike polypeptide sequence as set forth in SEQ ID NO:27977 or (b) the B.1.1.529 BA5 subvariant Spike protein or fragment comprises a mutation selected from the group consisting of: a Spike R677 mutation, a Spike R678 mutation, a Spike R680 mutation, a Spike K981P mutation, a Spike V982P mutation, and combinations thereof with reference to the Spike polypeptide sequence as set forth in SEQ ID NO: 27979, and (B) at least one polypeptide sequence as set forth in Table 9C, or an epitope-containing fragment thereof, optionally wherein the at least one polypeptide sequence is present in a concatenated polypeptide comprising each of the sequences set forth in Table 9C, optionally wherein the concatenated polypeptide comprises the order of sequences set forth in Table 9C, and (C) a SARS-CoV-2 Nucleocapsid protein, optionally comprising a Nucleocapsid polypeptide sequence as set forth in SEQ ID NO:62 or an epitope-containing fragment thereof, (ii) optionally, a second promoter nucleotide sequence operably linked to at least one of the three SARS-CoV-2 derived nucleic acid sequences; and (iii) optionally, at least one MHC class II epitope-encoding nucleic acid sequence; (iv) optionally, at least one nucleic acid sequence encoding a GPGPG amino acid linker sequences (SEQ ID NO:56); and (v) optionally, at least one second poly(A) sequence, wherein the second poly(A) sequence is a native poly(A) sequence or an exogenous poly(A) sequence to the vector backbone optionally wherein the exogenous poly(A) sequence comprises an SV40 poly(A) signal sequence or a Bovine Growth Hormone (BGH) poly(A) signal sequence.

[0116] Also provided for herein is a composition for delivery of an antigen expression system, comprising: the antigen expression system, wherein the antigen expression system comprises: (a) a vector backbone, wherein the vector backbone comprises an alphavirus vector, wherein the alphavirus vector is a Venezuelan equine encephalitis virus vector, and wherein the vector backbone comprises: (i) a subgenomic promoter nucleotide sequence, and (ii) at least one polyadenylation (poly(A)) sequence; and (b) an antigen cassette, wherein the antigen cassette is inserted into the vector backbone such that the antigen cassette is operably linked to the at least one promoter nucleotide sequence, and wherein the antigen cassette comprises: (i) three SARS-CoV-2 derived nucleic acid sequences encoding immunogenic polypeptides, wherein the immunogenic polypeptides comprises: (A) a SARS-CoV-2 derived nucleic acid sequence encoding an immunogenic polypeptide, wherein the immunogenic polypeptide comprises a SARS-CoV-2 variant Spike protein corresponding to a B.1.1.529 SARS-CoV-2 isolate optionally comprising the Spike polypeptide sequence as set forth in SEQ ID NO: 27974 and/or is encoded by nucleotides 9714-13,526 of the nucleotide sequence set forth in SEQ ID NO: 27976, or a SARS-CoV-2 variant Spike protein corresponding to a B.1.1.529 BA5 SARS-CoV-2 subvariant optionally comprising the Spike polypeptide sequence as set forth in SEQ ID NO: 27978 and/or encoded by SEQ ID NO: 27980, optionally wherein (a) the B.1.1.529 isolate Spike protein or fragment comprises a mutation selected from the group consisting of: a Spike R679 mutation, a Spike R680 mutation, a Spike R682 mutation, a Spike K983P mutation, a Spike V984P mutation, and combinations thereof with reference to the Spike polypeptide sequence as set forth in SEQ ID NO:27977 or (b) the B.1.1.529 BA5 subvariant Spike protein or fragment comprises a mutation selected from the group consisting of: a Spike R677 mutation, a Spike R678 mutation, a Spike R680 mutation, a Spike K981P mutation, a Spike V982P mutation, and combinations thereof with reference to the Spike polypeptide sequence as set forth in SEQ ID NO: 27979; (B) at least one polypeptide sequence as set forth in Table 9C, or an epitope-containing fragment thereof, optionally wherein the at least one polypeptide sequence is present in a concatenated polypeptide comprising each of the sequences set forth in Table 9C, optionally wherein the concatenated polypeptide comprises the order of sequences set forth in Table 9C, and (C) a SARS-CoV-2 Nucleocapsid protein, optionally comprising a Nucleocapsid polypeptide sequence as set forth in SEQ ID NO:62 or an epitope-containing fragment thereof; (ii) a second subgenomic promoter nucleotide sequence operably linked to at least one of the three SARS-CoV-2 derived nucleic acid sequences; and (iii) optionally, at least one MHC class II epitope-encoding nucleic acid sequence; (iv) optionally, at least one nucleic acid sequence encoding a GPGPG amino acid linker sequence (SEQ ID NO:56); and (v) optionally, at least one second poly(A) sequence, wherein the second poly(A) sequence is a native poly(A) sequence or an exogenous poly(A) sequence to the vector backbone optionally wherein the exogenous poly(A) sequence comprises an SV40 poly(A) signal sequence or a Bovine Growth Hormone (BGH) poly(A) signal sequence.

[0117] Also provided for herein is a composition for delivery of an antigen expression system, wherein the antigen expression system comprises the nucleotide sequence as set forth in SEQ ID NO:27976, optionally wherein the nucleotides encoding a SARS-CoV-2 variant Spike protein corresponding to the B.1.1.529 SARS-CoV-2 isolate are substituted with the nucleotides encoding a SARS-CoV-2 variant Spike protein corresponding to a B.1.1.529 BA5 SARS-CoV-2 subvariant.

[0118] Also provided for herein is a composition for delivery of an antigen expression system, wherein the antigen expression system comprises the nucleotide sequence as set forth in nucleotides 7,571 to 13,526 of SEQ ID NO:27976, optionally wherein the nucleotides encoding a SARS-CoV-2 variant Spike protein corresponding to the B.1.1.529 SARS-CoV-2 isolate are substituted with the nucleotides encoding a SARS-CoV-2 variant Spike protein corresponding to a B.1.1.529 BA5 SARS-CoV-2 subvariant.

[0119] Also provided for herein is a composition for delivery of an antigen expression system, comprising: the antigen expression system, wherein the antigen expression system comprises: (a) a vector backbone, wherein the vector backbone comprises an alphavirus vector, optionally wherein the alphavirus vector is a Venezuelan equine encephalitis virus vector, and wherein the vector backbone comprises: (i) a subgenomic promoter nucleotide sequence, and (ii) a polyadenylation (poly(A)) sequence; and (b) an antigen cassette, wherein the antigen cassette is inserted into the vector backbone such that the antigen cassette is operably linked to the subgenomic promoter nucleotide sequence, and wherein the antigen cassette comprises, in order from 5′ to 3′: (i) a nucleotide sequence encoding a SARS-CoV-2 Nucleocapsid protein comprising a Nucleocapsid polypeptide sequence as set forth in SEQ ID NO:62; (ii) a 2A ribosome skipping sequence element; (iii) a nucleotide sequence encoding a concatenated polypeptide comprising each of the sequences set forth in Table 9C and in the order of sequences set forth in Table 9C; (iv) a nucleotide sequence encoding at least one universal MHC class II epitope, optionally further encoding one or more GPGPG amino acid linker sequences (SEQ ID NO:56) at the 5′ terminus, 3′ terminus, and/or in between concatenated universal MHC class II epitope sequences; (v) a second subgenomic promoter nucleotide sequence; and (vi) a nucleotide sequence encoding a B.1.1.529 SARS-CoV-2 isolate optionally comprising the Spike polypeptide sequence as set forth in SEQ ID NO: 27974 and/or is encoded by nucleotides 9714-13,526 of the nucleotide sequence set forth in SEQ ID NO: 27976, or a SARS-CoV-2 variant Spike protein corresponding to a B.1.1.529 BA5 SARS-CoV-2 subvariant optionally comprising the Spike polypeptide sequence as set forth in SEQ ID NO: 27978 and/or encoded by SEQ ID NO: 27980.

[0120] Also provided for herein is a composition for delivery of an antigen expression system, comprising a self-amplifying alphavirus-based expression system comprising a vector selected from the group of sequences consisting of: SEQ ID NO: 27983, SEQ ID NO:27981, SEQ ID NO:27982, SEQ ID NO: 27976, and SEQ ID NO: 27976 with Spike encoding sequences substituted with the sequence set forth in SEQ ID NO:27980.

[0121] In some aspects, the composition for delivery of the self-amplifying alphavirus-based expression system comprises at least 3 μg of each of the one or more vectors. In some aspects, the composition for delivery of the self-amplifying alphavirus-based expression system comprises at least 10 μg of each of the one or more vectors. In some aspects, the composition for delivery of the self-amplifying alphavirus-based expression system comprises at least 30 μg of each of the one or more vectors. In some aspects, the composition for delivery of the self-amplifying alphavirus-based expression system comprises at least 100 μg of each of the one or more vectors. In some aspects, the composition for delivery of the self-amplifying alphavirus-based expression system comprises at least 300 μg of each of the one or more vectors. In some aspects, the composition for delivery of the self-amplifying alphavirus-based expression system comprises at least 400 μg, at least 500 μg, at least 600 μg, at least 700 μg, at least 800 μg, at least 900 μg, at least 1000 μg of each of the one or more vectors. In some aspects, the composition for delivery of the self-amplifying alphavirus-based expression system comprises between 10-30 μg, 10-100 μg, 10-300 μg, 30-100 μg, 30-300 μg, or 100-300 μg of each of the one or more vectors. In some aspects, the composition for delivery of the self-amplifying alphavirus-based expression system comprises between 3-10 μg, 3-30 μg, 3-100 μg, 3-300 μg, 10-30 μg, or 100-300 μg of each of the one or more vectors. In some aspects, the composition for delivery of the self-amplifying alphavirus-based expression system comprises between 10-500 μg, 10-1000 μg, 30-500 μg, 30-1000 μg, or 500-1000 μg of each of the one or more vectors. In some aspects, the composition for delivery of the self-amplifying alphavirus-based expression system comprises 10 μg, 30 μg, 100 μg, or 300 μg of each of the one or more vectors. In some aspects, the composition for delivery of the self-amplifying alphavirus-based expression system comprises 400 μg, 500 μg, 600 μg, 700 μg, 800 μg, 900 μg, or 1000 μg of each of the one or more vectors. In some aspects, the composition for delivery of the self-amplifying alphavirus-based expression system comprises less than or equal to 300 μg of each of the one or more vectors. In some aspects, the composition for delivery of the self-amplifying alphavirus-based expression system comprises less than or equal to 100 μg of each of the one or more vectors. In some aspects, the composition for delivery of the self-amplifying alphavirus-based expression system comprises less than or equal to 30 μg of each of the one or more vectors. A dose of can represent the total content of RNA/samRNA administered. A dose of can represent the total content of RNA/samRNA administered and include only a single distinct samRNA construct.

[0122] In some aspects, an ordered sequence of one or more of the SARS-CoV-2 derived nucleic acid sequences encoding the immunogenic polypeptide is described in the formula, from 5′ to 3′, comprising:

Pa-(L5b-Nc-L3d)X-(G5e-Uf)Y-G3g

wherein P comprises the second promoter nucleotide sequence, where a=0 or 1, N comprises one of the SARS-CoV-2 derived nucleic acid sequences, where c=1, optionally wherein each N encodes a polypeptide sequence as set forth in Table A, Table B, and/or Table C, L5 comprises the 5′ linker sequence, where b=0 or 1, L3 comprises the 3′ linker sequence, where d=0 or 1, G5 comprises one of the at least one nucleic acid sequences encoding a GPGPG amino acid linker (SEQ ID NO: 56), where e=0 or 1, G3 comprises one of the at least one nucleic acid sequences encoding a GPGPG amino acid linker (SEQ ID NO: 56), where g=0 or 1, U comprises one of the at least one MHC class II epitope-encoding nucleic acid sequence, where f=1, X=1 to 400, where for each X the corresponding Nc is a SARS-CoV-2 derived nucleic acid sequence, and Y=0, 1, or 2, where for each Y the corresponding Uf is a universal MHC class II epitope-encoding nucleic acid sequence, optionally wherein the at least one universal sequence comprises at least one of Tetanus toxoid and PADRE, or a MHC class II SARS-CoV-2 derived epitope-encoding nucleic acid sequence.

[0123] In some aspects, for each X the corresponding Nc is a distinct SARS-CoV-2 derived nucleic acid sequence. In some aspects, for each Y the corresponding Uf is a distinct MHC class II SARS-CoV-2 derived nucleic acid sequence. In some aspects, b=1, d=1, e=1, g=1, h=1, X=18, Y=2, (i) the vector backbone comprises a ChAdV68 vector, a=1, P is a CMV promoter, the at least one second poly(A) sequence is present, wherein the second poly(A) sequence is an exogenous poly(A) sequence to the vector backbone, and optionally wherein the exogenous poly(A) sequence comprises an SV40 poly(A) signal sequence or a BGH poly(A) signal sequence, or (ii) the vector backbone comprises a Venezuelan equine encephalitis virus vector, a=0, and the antigen cassette is operably linked to an endogenous 26S promoter, and the at least one polyadenylation poly(A) sequence is a poly(A) sequence of at least 80 consecutive A nucleotides (SEQ ID NO: 27940) provided by the backbone, each N encodes a MHC class I epitope 7-15 amino acids in length, a MHC class II epitope, an epitope capable of stimulating a B cell response, or combinations thereof, L5 is a native 5′ linker sequence that encodes a native N-terminal amino acid sequence of the epitope, and wherein the 5′ linker sequence encodes a peptide that is at least 3 amino acids in length, L3 is a native 3′ linker sequence that encodes a native C-terminal amino acid sequence of the epitope, and wherein the 3′ linker sequence encodes a peptide that is at least 3 amino acids in length, and U is each of a PADRE class II sequence and a Tetanus toxoid MHC class II sequence.

[0124] In some aspects, the composition further comprises a nanoparticulate delivery vehicle. In some aspects, the nanoparticulate delivery vehicle is a lipid nanoparticle (LNP). In some aspects, the LNP comprises ionizable amino lipids. In some aspects, the ionizable amino lipids comprise MC3-like (dilinoleylmethyl-4-dimethylaminobutyrate) molecules. In some aspects, the nanoparticulate delivery vehicle encapsulates the antigen expression system.

[0125] In some aspects, the antigen cassette is integrated between the at least one promoter nucleotide sequence and the at least one poly(A) sequence. In some aspects, the at least one promoter nucleotide sequence is operably linked to the SARS-CoV-2 derived nucleic acid sequence.

[0126] In some aspects, the one or more vectors comprise one or more +-stranded RNA In some aspects, the one or more +-stranded RNA vectors comprise a 5′ 7-methylguanosine (m7g) cap. In some aspects, the one or more +-stranded RNA vectors are produced by in vitro transcription. In some aspects, the one or more vectors are self-replicating within a mammalian cell.

[0127] In some aspects, the backbone comprises at least one nucleotide sequence of an Aura virus, a Fort Morgan virus, a Venezuelan equine encephalitis virus, a Ross River virus, a Semliki Forest virus, a Sindbis virus, or a Mayaro virus. In some aspects, the backbone comprises at least one nucleotide sequence of a Venezuelan equine encephalitis virus. In some aspects, the backbone comprises at least sequences for nonstructural protein-mediated amplification, a 26S promoter sequence, a poly(A) sequence, a nonstructural protein 1 (nsP1) gene, a nsP2 gene, a nsP3 gene, and a nsP4 gene encoded by the nucleotide sequence of the Aura virus, the Fort Morgan virus, the Venezuelan equine encephalitis virus, the Ross River virus, the Semliki Forest virus, the Sindbis virus, or the Mayaro virus. In some aspects, the backbone comprises at least sequences for nonstructural protein-mediated amplification, a 26S promoter sequence, and a poly(A) sequence encoded by the nucleotide sequence of the Aura virus, the Fort Morgan virus, the Venezuelan equine encephalitis virus, the Ross River virus, the Semliki Forest virus, the Sindbis virus, or the Mayaro virus. In some aspects, sequences for nonstructural protein-mediated amplification are selected from the group consisting of: an alphavirus 5′ UTR, a 51-nt CSE, a 24-nt CSE, a 26S subgenomic promoter sequence, a 19-nt CSE, an alphavirus 3′ UTR, or combinations thereof. In some aspects, the backbone does not encode structural virion proteins capsid, E2 and E1. In some aspects, the antigen cassette is inserted in place of structural virion proteins within the nucleotide sequence of the Aura virus, the Fort Morgan virus, the Venezuelan equine encephalitis virus, the Ross River virus, the Semliki Forest virus, the Sindbis virus, or the Mayaro virus. In some aspects, the Venezuelan equine encephalitis virus comprises the sequence of SEQ ID NO:3 or SEQ ID NO:5. In some aspects, the Venezuelan equine encephalitis virus comprises the sequence of SEQ ID NO:3 or SEQ ID NO:5 further comprising a deletion between base pair 7544 and 11176. In some aspects, the backbone comprises the sequence set forth in SEQ ID NO:6 or SEQ ID NO:7. In some aspects, the antigen cassette is inserted at position 7544 to replace the deletion between base pairs 7544 and 11176 as set forth in the sequence of SEQ ID NO:3 or SEQ ID NO:5. In some aspects, the insertion of the antigen cassette provides for transcription of a polycistronic RNA comprising the nsP1-4 genes and the at least one SARS-CoV-2 derived nucleic acid sequence, wherein the nsP1-4 genes and the at least one SARS-CoV-2 derived nucleic acid sequence are in separate open reading frames. In some aspects, the at least one promoter nucleotide sequence is the native 26S promoter nucleotide sequence encoded by the backbone.

[0128] In some aspects, the backbone comprises at least one nucleotide sequence of a chimpanzee adenovirus vector, optionally wherein the chimpanzee adenovirus vector is a ChAdV68 vector. In some aspects, the ChAdV68 vector backbone comprises the sequence set forth in SEQ ID NO:1. In some aspects, the ChAdV68 vector backbone comprises the sequence set forth in SEQ ID NO:1, except that the sequence is fully deleted or functionally deleted in at least one gene selected from the group consisting of the chimpanzee adenovirus E1A, E1B, E2A, E2B, E3, E4, L1, L2, L3, L4, and L5 genes of the sequence set forth in SEQ ID NO:1, optionally wherein the sequence is fully deleted or functionally deleted in: (1) E1A and E1B; (2) E1A, E1B, and E3; or (3) E1A, E1B, E3, and E4 of the sequence set forth in SEQ ID NO:1. In some aspects, the ChAdV68 vector backbone comprises a gene or regulatory sequence obtained from the sequence of SEQ ID NO:1, optionally wherein the gene is selected from the group consisting of the chimpanzee adenovirus inverted terminal repeat (ITR), E1A, E1B, E2A, E2B, E3, E4, L1, L2, L3, L4, and L5 genes of the sequence set forth in SEQ ID NO:1. In some aspects, the ChAdV68 vector backbone comprises a partially deleted E4 gene comprising a deleted or partially-deleted E4orf2 region and a deleted or partially-deleted E4orf3 region, and optionally a deleted or partially-deleted E4orf4 region. In some aspects, the ChAdV68 vector backbone comprises at least nucleotides 2 to 36,518 of the sequence set forth in SEQ ID NO:1 and further comprising: (1) an E1 deletion of at least nucleotides 577 to 3403 of the sequence shown in SEQ ID NO:1, (2) an E3 deletion of at least nucleotides 27,125 to 31,825 of the sequence shown in SEQ ID NO:1, and (3) an E4 deletion of at least nucleotides 34,916 to 35,642 of the sequence shown in SEQ ID NO:1; optionally wherein the antigen cassette is inserted within the E1 deletion. In some aspects, the ChAdV68 vector backbone comprises the sequence set forth in SEQ ID NO:75, optionally wherein the antigen cassette is inserted within the E1 deletion. In some aspects, the ChAdV68 vector backbone comprises one or more deletions between base pair number 577 and 3403 or between base pair 456 and 3014, and optionally wherein the vector further comprises one or more deletions between base pair 27,125 and 31,825 or between base pair 27,816 and 31,333 of the sequence set forth in SEQ ID NO:1. In some aspects, the ChAdV68 vector backbone comprises one or more deletions between base pair number 3957 and 10346, base pair number 21787 and 23370, and base pair number 33486 and 36193 of the sequence set forth in SEQ ID NO:1. In some aspects, the wherein the cassette is inserted in the ChAdV backbone at the E1 region, E3 region, and/or any deleted AdV region that allows incorporation of the cassette. In some aspects, the ChAdV backbone is generated from one of a first generation, a second generation, or a helper-dependent adenoviral vector

[0129] In some aspects, the at least one promoter nucleotide sequence is selected from the group consisting of: a CMV, a SV40, an EF-1, a RSV, a PGK, a HSA, a MCK, and a EBV promoter sequence. In some aspects, the at least one promoter nucleotide sequence is a CMV promoter sequence. In some aspects, the at least one promoter nucleotide sequence is an exogenous RNA promoter. In some aspects, the second promoter nucleotide sequence is a 26S promoter nucleotide sequence or a CMV promoter nucleotide sequence. In some aspects, the second promoter nucleotide sequence comprises multiple 26S promoter nucleotide sequences or multiple CMV promoter nucleotide sequences, wherein each 26S promoter nucleotide sequence or CMV promoter nucleotide sequence provides for transcription of one or more of the separate open reading frames.

[0130] In some aspects, one or more of the cassettes are at least 100, 200, 300, 400, 500, 600, 700, 800, or 900 nucleotides in length. In some aspects, one or more of the cassettes are at least 1000, 2000, 3000, 4000, 5000, 6000, 7000, 8000, 9000, or 10000 nucleotides in length. In some aspects, the one or more vectors are capable of driving expression of a cassette that is at least 3500 nucleotides in length. In some aspects, the one or more vectors are capable of driving expression of a cassette that is at least 6000 nucleotides in length.

[0131] In some aspects, at least one of the at least one SARS-CoV-2 derived nucleic acid sequences encodes a polypeptide sequence or portion thereof that is presented by MHC class I. In some aspects, at least one of the at least one SARS-CoV-2 derived nucleic acid sequences encodes a polypeptide sequence or portion thereof that is presented by MHC class II. In some aspects, at least one of the at least one SARS-CoV-2 derived nucleic acid sequences encodes a polypeptide sequence or portion thereof capable of stimulating a B cell response, optionally wherein the polypeptide sequence or portion thereof capable of stimulating a B cell response comprises a full-length protein, a protein domain, a protein subunit, or an antigenic fragment predicted or known to be capable of being bound by an antibody.

[0132] In some aspects, each SARS-CoV-2 derived nucleic acid sequence is linked directly to one another. In some aspects, at least one of the at least one SARS-CoV-2 derived nucleic acid sequences is linked to a distinct SARS-CoV-2 derived nucleic acid sequence with a nucleic acid sequence encoding a linker. In some aspects, the linker links In some aspects, the linker is selected from the group consisting of: (1) consecutive glycine residues, at least 2, 3, 4, 5, 6, 7, 8, 9, or 10 residues in length (SEQ ID NO: 27941); (2) consecutive alanine residues, at least 2, 3, 4, 5, 6, 7, 8, 9, or 10 residues in length (SEQ ID NO: 27942); (3) two arginine residues (RR); (4) alanine, alanine, tyrosine (AAY); (5) a consensus sequence at least 2, 3, 4, 5, 6, 7, 8, 9, or 10 amino acid residues in length that is processed efficiently by a mammalian proteasome; (6) one or more native sequences flanking the antigen derived from the cognate protein of origin and that is at least 2, 3, 4, 5, 6, 7, 8, 9, 10, 11, 12, 13, 14, 15, 16, 17, 18, 19, 20, or 2-20 amino acid residues in length; and (7) a furin or TEV cleavage sequence. In some aspects, the linker links two MHC class II sequences or an MHC class II sequence to an MHC class I sequence. In some aspects, the linker comprises the sequence GPGPG (SEQ ID NO: 56).

[0133] In some aspects, at least one sequence of the at least one SARS-CoV-2 derived nucleic acid sequences is linked, operably or directly, to a separate or contiguous sequence that enhances the expression, stability, cell trafficking, processing and presentation, and/or immunogenicity of the at least one SARS-CoV-2 derived nucleic acid sequences. In some aspects, the separate or contiguous sequence comprises at least one of: a ubiquitin sequence, a ubiquitin sequence modified to increase proteasome targeting (e.g., the ubiquitin sequence contains a Gly to Ala substitution at position 76), an immunoglobulin signal sequence (e.g., IgK), a major histocompatibility class I sequence, lysosomal-associated membrane protein (LAMP)-1, human dendritic cell lysosomal-associated membrane protein, and a major histocompatibility class II sequence; optionally wherein the ubiquitin sequence modified to increase proteasome targeting is A76.

[0134] In some aspects, at least one of the at least one SARS-CoV-2 derived nucleic acid sequences encodes two or more distinct polypeptides predicted or validated to be capable of presentation by at least one HLA allele.

[0135] In some aspects, each of the at least one SARS-CoV-2 derived nucleic acid sequences encodes a polypeptide sequence or portion thereof that is less than 50%, less than 49%, less than 48%, less than 47%, less than 46%, less than 45%, less than 45%, less than 43%, less than 42%, less than 41%, less than 40%, less than 39%, less than 38%, less than 37%, less than 36%, less than 35%, less than 34%, or less than 33% of the translated, corresponding full-length SARS-CoV-2 protein.

[0136] In some aspects, each of the at least one SARS-CoV-2 derived nucleic acid sequences encodes a polypeptide sequence or portion thereof that does not encode a functional protein, functional protein domain, functional protein subunit, or functional protein fragment of the translated, corresponding SARS-CoV-2 protein.

[0137] In some aspects, two or more of the at least one SARS-CoV-2 derived nucleic acid sequences are derived from the same SARS-CoV-2 gene. In some aspects, the two or more SARS-CoV-2 derived nucleic acid sequences derived from the same SARS-CoV-2 gene are ordered such that a first nucleic acid sequence cannot be immediately followed by or linked to a second nucleic acid sequence if the second nucleic acid sequence follows first nucleic acid sequence in the corresponding SARS-CoV-2 gene.

[0138] In some aspects, the at least one SARS-CoV-2 derived nucleic acid sequence comprises at least 2-10, 2, 3, 4, 5, 6, 7, 8, 9, or 10 nucleic acid sequences. In some aspects, the at least one SARS-CoV-2 derived nucleic acid sequence comprises at least 11-20, 15-20, 11-100, 11-200, 11-300, 11-400, 11, 12, 13, 14, 15, 16, 17, 18, 19, 20 or up to 400 nucleic acid sequences. In some aspects, the at least one SARS-CoV-2 derived nucleic acid sequence comprises at least 2-400 nucleic acid sequences and wherein at least two of the SARS-CoV-2 derived nucleic acid sequences encode polypeptide sequences or portions thereof that are (1) presented by MHC class I, (2) presented by MHC class II, and/or (3) capable of stimulating a B cell response. In some aspects, at least two of the SARS-CoV-2 derived nucleic acid sequences encode polypeptide sequences or portions thereof that are (1) presented by MHC class I, (2) presented by MHC class II, and/or (3) capable of stimulating a B cell response class.

[0139] In some aspects, when administered to the subject and translated, at least one of the antigens encoded by the at least one SARS-CoV-2 derived nucleic acid sequence are presented on antigen presenting cells resulting in an immune response targeting at least one of the antigens on a SARS-CoV-2 infected cell surface. In some aspects, when administered to the subject and translated, at least one of the antigens encoded by the at least one SARS-CoV-2 derived nucleic acid sequence results in an antibody response targeting at least one of the antigens on a SARS-CoV-2 virus. In some aspects, the at least one SARS-CoV-2 derived nucleic acid sequences when administered to the subject and translated, at least one of the MHC class I or class II antigens are presented on antigen presenting cells resulting in an immune response targeting at least one of the antigens on a SARS-CoV-2 infected cell surface, and optionally wherein the expression of each of the at least one SARS-CoV-2 derived nucleic acid sequences is driven by the at least one promoter nucleotide sequence.

[0140] In some aspects, each MHC class I epitope-encoding SARS-CoV-2 derived nucleic acid sequence encodes a polypeptide sequence between 8 and 35 amino acids in length, optionally 9-17, 9-25, 8, 9, 10, 11, 12, 13, 14, 15, 16, 17, 18, 19, 20, 21, 22, 23, 24, 25, 26, 27, 28, 29, 30, 31, 32, 33, 34 or 35 amino acids in length. In some aspects, the at least one MHC class II epitope-encoding nucleic acid sequence is present. In some aspects, the at least one MHC class II epitope-encoding nucleic acid sequence is present and comprises at least one MHC class II SARS-CoV-2 derived nucleic acid sequence. In some aspects, the at least one MHC class II epitope-encoding nucleic acid sequence is 12-20, 12, 13, 14, 15, 16, 17, 18, 19, 20, or 20-40 amino acids in length. In some aspects, the at least one MHC class II epitope-encoding nucleic acid sequence is present and comprises at least one universal MHC class II epitope-encoding nucleic acid sequence, optionally wherein the at least one universal sequence comprises at least one of Tetanus toxoid and PADRE, and/or at least one MHC class II SARS-CoV-2 derived epitope-encoding nucleic acid sequence.

[0141] In some aspects, the at least one promoter nucleotide sequence or the second promoter nucleotide sequence is inducible. In some aspects, the at least one promoter nucleotide sequence or the second promoter nucleotide sequence is non-inducible. In some aspects, the at least one poly(A) sequence comprises a poly(A) sequence native to the backbone. In some aspects, the at least one poly(A) sequence comprises a poly(A) sequence exogenous to the backbone.

[0142] In some aspects, the at least one poly(A) sequence is operably linked to at least one of the at least one SARS-CoV-2 derived nucleic acid sequences. In some aspects, the at least one poly(A) sequence is at least 20, at least 30, at least 40, at least 50, at least 60, at least 70, at least 80, or at least 90 consecutive A nucleotides (SEQ ID NO: 27943). In some aspects, the at least one poly(A) sequence is at least 80 consecutive A nucleotides (SEQ ID NO: 27940). In some aspects, the at least one second poly(A) sequence is present. In some aspects, the at least one second poly(A) sequence comprises an SV40 poly(A) signal sequence or a Bovine Growth Hormone (BGH) poly(A) signal sequence, or a combination of two more SV40 poly(A) signal sequences or BGH poly(A) signal sequence. In some aspects, the at least one second poly(A) sequence comprises two or more second poly(A) sequences, optionally wherein the two or more second poly(A) sequences comprises two or more SV40 poly(A) signal sequences two or more BGH poly(A) signal sequences, or a combination of SV40 poly(A) signal sequences and BGH poly(A) signal sequences.

[0143] In some aspects, the antigen cassette further comprises at least one of: an intron sequence, an exogenous intron sequence, a Constitutive Transport Element (CTE), a RNA Transport Element (RTE), a woodchuck hepatitis virus posttranscriptional regulatory element (WPRE) sequence, an internal ribosome entry sequence (IRES) sequence, a nucleotide sequence encoding a 2A self cleaving peptide sequence, a nucleotide sequence encoding a Furin cleavage site, or a sequence in the 5′ or 3′ non-coding region known to enhance the nuclear export, stability, or translation efficiency of mRNA that is operably linked to at least one of the at least one SARS-CoV-2 derived nucleic acid sequences.

[0144] In some aspects, the antigen cassette further comprises a reporter gene, including but not limited to, green fluorescent protein (GFP), a GFP variant, secreted alkaline phosphatase, luciferase, a luciferase variant, or a detectable peptide or epitope. In some aspects, the detectable peptide or epitope is selected from the group consisting of an HA tag, a Flag tag, a His-tag, or a V5 tag.

[0145] In some aspects, the one or more vectors further comprises one or more nucleic acid sequences encoding at least one immune modulator. In some aspects, the immune modulator is an anti-CTLA4 antibody or an antigen-binding fragment thereof, an anti-PD-1 antibody or an antigen-binding fragment thereof, an anti-PD-L1 antibody or an antigen-binding fragment thereof, an anti-4-1BB antibody or an antigen-binding fragment thereof, or an anti-OX-40 antibody or an antigen-binding fragment thereof. In some aspects, the antibody or antigen-binding fragment thereof is a Fab fragment, a Fab′ fragment, a single chain Fv (scFv), a single domain antibody (sdAb) either as single specific or multiple specificities linked together (e.g., camelid antibody domains), or full-length single-chain antibody (e.g., full-length IgG with heavy and light chains linked by a flexible linker). In some aspects, the heavy and light chain sequences of the antibody are a contiguous sequence separated by either a self-cleaving sequence such as 2A or IRES; or the heavy and light chain sequences of the antibody are linked by a flexible linker such as consecutive glycine residues. In some aspects, the immune modulator is a cytokine. In some aspects, the cytokine is at least one of IL-2, IL-7, IL-12, IL-15, or IL-21 or variants thereof of each.

[0146] In some aspects, a MHC class I or MHC class II epitope-encoding SARS-CoV-2 derived nucleic acid sequence is selected by performing the steps of: (a) obtaining at least one of exome, transcriptome, or whole genome SARS-CoV-2 nucleotide sequencing data from a SARS-CoV-2 virus or SARS-CoV-2 infected cell, wherein the SARS-CoV-2 nucleotide sequencing data is used to obtain data representing peptide sequences of each of a set of antigens; (b) inputting the peptide sequence of each antigen into a presentation model to generate a set of numerical likelihoods that each of the antigens is presented by one or more of the MHC alleles on a SARS-CoV-2 infected cell surface, the set of numerical likelihoods having been identified at least based on received mass spectrometry data; and (c) selecting a subset of the set of antigens based on the set of numerical likelihoods to generate a set of selected antigens which are used to generate the MHC class I or MHC class II epitope-encoding SARS-CoV-2 derived nucleic acid sequence.

[0147] In some aspects, each MHC class I or MHC class II epitope-encoding SARS-CoV-2 derived nucleic acid sequences is selected by performing the steps of: (a) obtaining at least one of exome, transcriptome, or whole genome SARS-CoV-2 nucleotide sequencing data from a SARS-CoV-2 virus or SARS-CoV-2 infected cell, wherein the SARS-CoV-2 nucleotide sequencing data is used to obtain data representing peptide sequences of each of a set of antigens; (b) inputting the peptide sequence of each antigen into a presentation model to generate a set of numerical likelihoods that each of the antigens is presented by one or more of the MHC alleles on a SARS-CoV-2 infected cell surface, the set of numerical likelihoods having been identified at least based on received mass spectrometry data; and (c) selecting a subset of the set of antigens based on the set of numerical likelihoods to generate a set of selected antigens which are used to generate the at least 18 SARS-CoV-2 derived nucleic acid sequences. In some aspects, a number of the set of selected antigens is 2-20. In some aspects, the presentation model represents dependence between: (a) presence of a pair of a particular one of the MHC alleles and a particular amino acid at a particular position of a peptide sequence; and (b) likelihood of presentation on a SARS-CoV-2 infected cell surface, by the particular one of the MHC alleles of the pair, of such a peptide sequence comprising the particular amino acid at the particular position. In some aspects, selecting the set of selected antigens comprises selecting antigens that have an increased likelihood of being presented on a SARS-CoV-2 infected cell surface relative to unselected antigens based on the presentation model, optionally wherein the selected antigens have been validated as being presented by one or more specific HLA alleles. In some aspects, selecting the set of selected antigens comprises selecting antigens that have an increased likelihood of being capable of inducing a SARS-CoV-2 specific immune response in the subject relative to unselected antigens based on the presentation model. In some aspects, selecting the set of selected antigens comprises selecting antigens that have an increased likelihood of being capable of being presented to naïve T cells by professional antigen presenting cells (APCs) relative to unselected antigens based on the presentation model, optionally wherein the APC is a dendritic cell (DC). In some aspects, selecting the set of selected antigens comprises selecting antigens that have a decreased likelihood of being subject to inhibition via central or peripheral tolerance relative to unselected antigens based on the presentation model. In some aspects, selecting the set of selected antigens comprises selecting antigens that have a decreased likelihood of being capable of inducing an autoimmune response to normal tissue in the subject relative to unselected antigens based on the presentation model. In some aspects, exome or transcriptome SARS-CoV-2 nucleotide sequencing data is obtained by performing sequencing on a SARS-CoV-2 virus or SARS-CoV-2 infected tissue or cell. In some aspects, the sequencing is next generation sequencing (NGS) or any massively parallel sequencing approach.

[0148] In some aspects, the antigen cassette comprises junctional epitope sequences formed by adjacent sequences in the antigen cassette. In some aspects, at least one or each junctional epitope sequence has an affinity of greater than 500 nM for MHC. In some aspects, each junctional epitope sequence is non-self.

[0149] In some aspects, each of the MHC class I and/or MHC class II epitopes is predicted or validated to be capable of presentation by at least one HLA allele present in at least 5% of a population. In some aspects, each of the MHC class I and/or MHC class II epitopes is predicted or validated to be capable of presentation by at least one HLA allele, wherein each antigen/HLA pair has an antigen/HLA prevalence of at least 0.01% in a population. In some aspects, each of the MHC class I and/or MHC class II epitopes is predicted or validated to be capable of presentation by at least one HLA allele, wherein each antigen/HLA pair has an antigen/HLA prevalence of at least 0.1% in a population.

[0150] In some aspects, the antigen cassette does not encode a non-therapeutic MHC class I or class II epitope nucleic acid sequence comprising a translated, wild-type nucleic acid sequence, wherein the non-therapeutic epitope is predicted to be displayed on an MHC allele of the subject. In some aspects, the non-therapeutic predicted MHC class I or class II epitope sequence is a junctional epitope sequence formed by adjacent sequences in the antigen cassette.

[0151] In some aspects, the prediction is based on presentation likelihoods generated by inputting sequences of the non-therapeutic epitopes into a presentation model. In some aspects, an order of the at least one SARS-CoV-2 derived nucleic acid sequences in the antigen cassette is determined by a series of steps comprising: (a) generating a set of candidate antigen cassette sequences corresponding to different orders of the at least one SARS-CoV-2 derived nucleic acid sequences; (b) determining, for each candidate antigen cassette sequence, a presentation score based on presentation of non-therapeutic epitopes in the candidate antigen cassette sequence; and (c) selecting a candidate cassette sequence associated with a presentation score below a predetermined threshold as the antigen cassette sequence for an antigen vaccine.

[0152] Also provided for herein is a pharmaceutical composition any of the compositions provided herein and a pharmaceutically acceptable carrier. In some aspects, the composition further comprises an adjuvant. In some aspects, the composition further comprises an immune modulator. In some aspects, the immune modulator is an anti-CTLA4 antibody or an antigen-binding fragment thereof, an anti-PD-1 antibody or an antigen-binding fragment thereof, an anti-PD-L1 antibody or an antigen-binding fragment thereof, an anti-4-1BB antibody or an antigen-binding fragment thereof, or an anti-OX-40 antibody or an antigen-binding fragment thereof.

[0153] Also provided herein is an isolated nucleotide sequence or set of isolated nucleotide sequences comprising the antigen cassette of any of the compositions described herein and one or more elements obtained from the sequence of SEQ ID NO:3 or SEQ ID NO:5, optionally wherein the one or more elements are selected from the group consisting of the sequences necessary for nonstructural protein-mediated amplification, the 26S promoter nucleotide sequence, the poly(A) sequence, and the nsP1-4 genes of the sequence set forth in SEQ ID NO:3 or SEQ ID NO:5, and optionally wherein the nucleotide sequence is cDNA. In some aspects, the sequence or set of isolated nucleotide sequences comprises the antigen cassette of any of the above composition claims inserted at position 7544 of the sequence set forth in SEQ ID NO:6 or SEQ ID NO:7. In some aspects, the isolated sequence further comprises: a T7 or SP6 RNA polymerase promoter nucleotide sequence 5′ of the one or more elements obtained from the sequence of SEQ ID NO:3 or SEQ ID NO:5; and optionally, one or more restriction sites 3′ of the poly(A) sequence. In some aspects, the antigen cassette of any of the compositions provided herein is inserted at position 7563 of SEQ ID NO:8 or SEQ ID NO:9.

[0154] Also provided herein is an isolated nucleotide sequence or set of isolated nucleotide sequences comprising the antigen cassette of any of the compositions provided herein and one or more elements obtained from the sequence of SEQ ID NO:1 or SEQ ID NO:75, optionally wherein the one or more elements are selected from the group consisting of the chimpanzee adenovirus inverted terminal repeat (ITR), E1A, E1B, E2A, E2B, E3, E4, L1, L2, L3, L4, and L5 genes of the sequence set forth in SEQ ID NO:1, and optionally wherein the nucleotide sequence is cDNA. In some aspects, the sequence or set of isolated nucleotide sequences comprises the antigen cassette of any of the compositions provided herein inserted within the E1 deletion of the sequence set forth in SEQ ID NO:75. In some aspects, the isolated sequence further comprises: a T7 or SP6 RNA polymerase promoter nucleotide sequence 5′ of the one or more elements obtained from the sequence of SEQ ID NO:1 or SEQ ID NO:75; and optionally, one or more restriction sites 3′ of the poly(A) sequence.

[0155] Also provided herein is a vector or set of vectors comprising any of the isolated nucleotide sequences or set of isolated nucleotide sequences provided herein.

[0156] Also provided herein is an isolated cell comprising any of the isolated nucleotide sequences or set of isolated nucleotide sequences provided herein, optionally wherein the cell is a BHK-21, CHO, HEK293 or variants thereof, 911, HeLa, A549, LP-293, PER.C6, or AE1-2a cell.

[0157] Also provided herein is a kit comprising any of the compositions provided herein and instructions for use.

[0158] Also provided herein is a method for treating a SARS-CoV-2 infection or preventing a SARS-CoV-2 infection in a subject, the method comprising administering to the subject any of the compositions or pharmaceutical compositions provided herein. In some aspects, the SARS-CoV-2 derived nucleic acid sequence encodes at least one immunogenic polypeptide corresponding to a polypeptide encoded by a SARS-CoV-2 subtype the subject is infected with or at risk for infection by.

[0159] In some aspects, any of the methods described herein comprises a homologous prime/boost strategy. In some aspects, any of the methods described herein comprises a heterologous prime/boost strategy. In some aspects, the heterologous prime/boost strategy comprises an identical antigen cassette encoded by different vaccine platforms. In some aspects, the heterologous prime/boost strategy comprises different antigen cassettes encoded by the same vaccine platform. In some aspects, the heterologous prime/boost strategy comprises different antigen cassettes encoded by different vaccine platforms. In some aspects, the different antigen cassettes comprise a Spike-encoding cassette and a separate T cell epitope encoding cassette. In some aspects, the different antigen cassettes comprise cassettes encoding distinct epitopes and/or antigens derived from different isolates of SARS-CoV-2.

[0160] Also provided herein is a method for inducing an immune response in a subject, the method comprising administering to the subject any of the compositions or pharmaceutical compositions provided herein. In some aspects, the subject expresses at least one HLA allele predicted or known to present a MHC class I or MHC class II epitope encoded by the at least one SARS-CoV-2 derived nucleic acid sequence. In some aspects, the subject expresses at least one HLA allele predicted or known to present a MHC class I epitope encoded by the at least one SARS-CoV-2 derived nucleic acid sequence, and wherein the MHC class I epitope comprises at least one MHC class I epitope comprising a polypeptide sequence as set forth in Table A. In some aspects, the subject express at least one HLA allele predicted or known to present a MHC class II epitope encoded by the at least one SARS-CoV-2 derived nucleic acid sequence, and wherein the MHC class II epitope comprises at least one MHC class II epitope comprising a polypeptide sequence as set forth in Table B. In some aspects, the composition is administered intramuscularly (IM), intradermally (ID), subcutaneously (SC), or intravenously (IV). In some aspects, the composition is administered intramuscularly

[0161] In some aspects, the method further comprises administration of one or more immune modulators, optionally wherein the immune modulator is administered before, concurrently with, or after administration of the composition or pharmaceutical composition. In some aspects, the one or more immune modulators are selected from the group consisting of: an anti-CTLA4 antibody or an antigen-binding fragment thereof, an anti-PD-1 antibody or an antigen-binding fragment thereof, an anti-PD-L1 antibody or an antigen-binding fragment thereof, an anti-4-1BB antibody or an antigen-binding fragment thereof, or an anti-OX-40 antibody or an antigen-binding fragment thereof. In some aspects, the immune modulator is administered intravenously (IV), intramuscularly (IM), intradermally (ID), or subcutaneously (SC). In some aspects, the subcutaneous administration is near the site of the composition or pharmaceutical composition administration or in close proximity to one or more vector or composition draining lymph nodes.

[0162] In some aspects, the method further comprises administering to the subject a second vaccine composition. In some aspects, the second vaccine composition is administered prior to the administration of the first composition or pharmaceutical composition. In some aspects, the second vaccine composition is administered subsequent to the administration of any of the compositions or pharmaceutical compositions provided herein. In some aspects, the second vaccine composition is the same as the first composition or pharmaceutical composition administered. In some aspects, the second vaccine composition is different from the first composition or pharmaceutical composition administered. In some aspects, the second vaccine composition comprises a chimpanzee adenovirus vector encoding at least one SARS-CoV-2 derived nucleic acid sequence. In some aspects, the at least one SARS-CoV-2 derived nucleic acid sequence encoded by the chimpanzee adenovirus vector is the same as the at least one SARS-CoV-2 derived nucleic acid sequence of any of the compositions provided herein.

[0163] Also provided herein is a method of manufacturing the one or more vectors of any of the above composition claims, the method comprising: (a) obtaining a linearized DNA sequence comprising the backbone and the antigen cassette; (b) in vitro transcribing the linearized DNA sequence by addition of the linearized DNA sequence to an in vitro transcription reaction containing all the necessary components to transcribe the linearized DNA sequence into RNA, optionally further comprising in vitro addition of the m7g cap to the resulting RNA; and (c) isolating the one or more vectors from the in vitro transcription reaction. In some aspects, the linearized DNA sequence is generated by linearizing a DNA plasmid sequence or by amplification using PCR. In some aspects, the DNA plasmid sequence is generated using one of bacterial recombination or full genome DNA synthesis or full genome DNA synthesis with amplification of synthesized DNA in bacterial cells. In some aspects, isolating the one or more vectors from the in vitro transcription reaction involves one or more of phenol chloroform extraction, silica column based purification, or similar RNA purification methods.

[0164] Also provided herein is a method of manufacturing the composition of any of the above composition claims for delivery of the antigen expression system, the method comprising: (a) providing components for the nanoparticulate delivery vehicle; (b) providing the antigen expression system; and (c) providing conditions sufficient for the nanoparticulate delivery vehicle and the antigen expression system to produce the composition for delivery of the antigen expression system. In some aspects, the conditions are provided by microfluidic mixing.

[0165] Also provided herein is a method of manufacturing an adenovirus vector disclosed herein, the method comprising: obtaining a plasmid sequence comprising the at least one promoter sequence and the antigen cassette; transfecting the plasmid sequence into one or more host cells; and isolating the adenovirus vector from the one or more host cells.

[0166] In some aspects, isolating comprises: lysing the host cell to obtain a cell lysate comprising the adenovirus vector; and purifying the adenovirus vector from the cell lysate.

[0167] In some aspects, the plasmid sequence is generated using one of bacterial recombination or full genome DNA synthesis or full genome DNA synthesis with amplification of synthesized DNA in bacterial cells. In some aspects, the one or more host cells are at least one of CHO, HEK293 or variants thereof, 911, HeLa, A549, LP-293, PER.C6, and AE1-2a cells. In some aspects, purifying the adenovirus vector from the cell lysate involves one or more of chromatographic separation, centrifugation, virus precipitation, and filtration.

[0168] In some aspects, any of the above compositions further comprise a nanoparticulate delivery vehicle. The nanoparticulate delivery vehicle, in some aspects, may be a lipid nanoparticle (LNP). In some aspects, the LNP comprises ionizable amino lipids. In some aspects, the ionizable amino lipids comprise MC3-like (dilinoleylmethyl-4-dimethylaminobutyrate) molecules. In some aspects, the nanoparticulate delivery vehicle encapsulates the antigen expression system.

[0169] In some aspects, any of the above compositions further comprise a plurality of LNPs, wherein the LNPs comprise: the antigen expression system; a cationic lipid; a non-cationic lipid; and a conjugated lipid that inhibits aggregation of the LNPs, wherein at least about 95% of the LNPs in the plurality of LNPs either: have a non-lamellar morphology; or are electron-dense.

[0170] In some aspects, the non-cationic lipid is a mixture of (1) a phospholipid and (2) cholesterol or a cholesterol derivative.

[0171] In some aspects, the conjugated lipid that inhibits aggregation of the LNPs is a polyethyleneglycol (PEG)-lipid conjugate. In some aspects, the PEG-lipid conjugate is selected from the group consisting of: a PEG-diacylglycerol (PEG-DAG) conjugate, a PEG dialkyloxypropyl (PEG-DAA) conjugate, a PEG-phospholipid conjugate, a PEG-ceramide (PEG-Cer) conjugate, and a mixture thereof. In some aspects the PEG-DAA conjugate is a member selected from the group consisting of: a PEG-didecyloxypropyl (C₁₀) conjugate, a PEG-dilauryloxypropyl (C₁₂) conjugate, a PEG-dimyristyloxypropyl (C₁₄) conjugate, a PEG-dipalmityloxypropyl (C₁₆) conjugate, a PEG-distearyloxypropyl (C₁₈) conjugate, and a mixture thereof.

[0172] In some aspects, the antigen expression system is fully encapsulated in the LNPs.

[0173] In some aspects, the non-lamellar morphology of the LNPs comprises an inverse hexagonal (H_{II}) or cubic phase structure.

[0174] In some aspects, the cationic lipid comprises from about 10 mol % to about 50 mol % of the total lipid present in the LNPs. In some aspects, the cationic lipid comprises from about 20 mol % to about 50 mol % of the total lipid present in the LNPs. In some aspects, the cationic lipid comprises from about 20 mol % to about 40 mol % of the total lipid present in the LNPs.

[0175] In some aspects, the non-cationic lipid comprises from about 10 mol % to about 60 mol % of the total lipid present in the LNPs. In some aspects, the non-cationic lipid comprises from about 20 mol % to about 55 mol % of the total lipid present in the LNPs. In some aspects, the non-cationic lipid comprises from about 25 mol % to about 50 mol % of the total lipid present in the LNPs.

[0176] In some aspects, the conjugated lipid comprises from about 0.5 mol % to about 20 mol % of the total lipid present in the LNPs. In some aspects, the conjugated lipid comprises from about 2 mol % to about 20 mol % of the total lipid present in the LNPs. In some aspects, the conjugated lipid comprises from about 1.5 mol % to about 18 mol % of the total lipid present in the LNPs.

[0177] In some aspects, greater than 95% of the LNPs have a non-lamellar morphology. In some aspects, greater than 95% of the LNPs are electron dense.

[0178] In some aspects, any of the above compositions further comprise a plurality of LNPs, wherein the LNPs comprise: a cationic lipid comprising from 50 mol % to 65 mol % of the total lipid present in the LNPs; a conjugated lipid that inhibits aggregation of LNPs comprising from 0.5 mol % to 2 mol % of the total lipid present in the LNPs; and a non-cationic lipid comprising either: a mixture of a phospholipid and cholesterol or a derivative thereof, wherein the phospholipid comprises from 4 mol % to 10 mol % of the total lipid present in the LNPs and the cholesterol or derivative thereof comprises from 30 mol % to 40 mol % of the total lipid present in the LNPs; a mixture of a phospholipid and cholesterol or a derivative thereof, wherein the phospholipid comprises from 3 mol % to 15 mol % of the total lipid present in the LNPs and the cholesterol or derivative thereof comprises from 30 mol % to 40 mol % of the total lipid present in the LNPs; or up to 49.5 mol % of the total lipid present in the LNPs and comprising a mixture of a phospholipid and cholesterol or a derivative thereof, wherein the cholesterol or derivative thereof comprises from 30 mol % to 40 mol % of the total lipid present in the LNPs.

[0179] In some aspects, any of the above compositions further comprise a plurality of LNPs, wherein the LNPs comprise: a cationic lipid comprising from 50 mol % to 85 mol % of the total lipid present in the LNPs; a conjugated lipid that inhibits aggregation of LNPs comprising from 0.5 mol % to 2 mol % of the total lipid present in the LNPs; and a non-cationic lipid comprising from 13 mol % to 49.5 mol % of the total lipid present in the LNPs.

[0180] In some aspects, the phospholipid comprises dipalmitoylphosphatidylcholine (DPPC), distearoylphosphatidylcholine (DSPC), or a mixture thereof.

[0181] In some aspects, the conjugated lipid comprises a polyethyleneglycol (PEG)-lipid conjugate. In some aspects, the PEG-lipid conjugate comprises a PEG-diacylglycerol (PEG-DAG) conjugate, a PEG-dialkyloxypropyl (PEG-DAA) conjugate, or a mixture thereof. In some aspects, the PEG-DAA conjugate comprises a PEG-dimyristyloxypropyl (PEG-DMA) conjugate, a PEG-distearyloxypropyl (PEG-DSA) conjugate, or a mixture thereof. In some aspects, the PEG portion of the conjugate has an average molecular weight of about 2,000 daltons.

[0182] In some aspects, the conjugated lipid comprises from 1 mol % to 2 mol % of the total lipid present in the LNPs.

[0183] In some aspects, the LNP comprises a compound having a structure of:

[chemical structure]

or a pharmaceutically acceptable salt, tautomer, prodrug or stereoisomer thereof, wherein: L¹ and L² are each independently —O(C═O)—, —(C═O)O—, —C(═O)—, —O—, —S(O)ₓ—, —S—S—, —C(═O)S—, —SC(═O)—, —R^{a}C(═O)—, —C(═O) R^{a}—, —R^{a}C(═O) R^{a}—, —OC(═O) R^{a}—, —R^{a}C(═O)O— or a direct bond; G¹ is Cᵢ-C₂ alkylene, —(C═O)—, —O(C═O)—, —SC(═O)—, —R^{a}C(═O)— or a direct bond: —C(═O)—, —(C═O)O—, —C(═O)S—, —C(═O) R^{a}— or a direct bond; G is Ci-C₆ alkylene; R^{a} is H or C1-C12 alkyl; R^{1a} and R^{1b} are, at each occurrence, independently either: (a) H or C₁-C₁₂ alkyl; or (b) R^{1a} is H or C₁-C₁₂ alkyl, and R^{1b} together with the carbon atom to which it is bound is taken together with an adjacent R^{1b} and the carbon atom to which it is bound to form a carbon-carbon double bond; R^{2a} and R^{2b} are, at each occurrence, independently either: (a) H or C₁-C₁₂ alkyl; or (b) R^{2a} is H or C₁-C₁₂ alkyl, and R^{2b} together with the carbon atom to which it is bound is taken together with an adjacent R^{2b} and the carbon atom to which it is bound to form a carbon-carbon double bond; R^{3a} and R^{3b} are, at each occurrence, independently either (a): H or C₁-C₁₂ alkyl; or (b) R^{3a} is H or C₁-C₁₂ alkyl, and R^{3b} together with the carbon atom to which it is bound is taken together with an adjacent R and the carbon atom to which it is bound to form a carbon-carbon double bond; R^{4a} and R^{4b} are, at each occurrence, independently either: (a) H or C1-C12 alkyl; or (b) R^{4a} is H or C1-C12 alkyl, and R^{4b} together with the carbon atom to which it is bound is taken together with an adjacent R^{4b} and the carbon atom to which it is bound to form a carbon-carbon double bond; R⁵ and R⁶ are each independently H or methyl; R⁷ is C4-C20 alkyl; R⁸ and R⁹ are each independently C1-C12 alkyl; or R⁸ and R⁹, together with the nitrogen atom to which they are attached, form a 5, 6 or 7-membered heterocyclic ring; a, b, c and d are each independently an integer from 1 to 24; and x is 0, 1 or 2.

[0184] In some aspects, the LNP comprises a compound having a structure of Formula II:

[chemical structure]

or a pharmaceutically acceptable salt, tautomer, prodrug or stereoisomer thereof, wherein: L¹ and L² are each independently —O(C═O)—, —(C═O)O— or a carbon-carbon double bond; R^{1a} and R^{1b} are, at each occurrence, independently either (a) H or C₁-C₁₂ alkyl, or (b) R^{1a} is H or C₁-C₁₂ alkyl, and R^{1b} together with the carbon atom to which it is bound is taken together with an adjacent R^{1b} and the carbon atom to which it is bound to form a carbon-carbon double bond; R^{2a} and R^{2b} are, at each occurrence, independently either (a) H or C₁-C₁₂ alkyl, or (b) R^{2a} is H or C₁-C₁₂ alkyl, and R^{2b} together with the carbon atom to which it is bound is taken together with an adjacent R^{2b} and the carbon atom to which it is bound to form a carbon-carbon double bond; R^{3a} and R^{3b} are, at each occurrence, independently either (a) H or C₁-C₁₂ alkyl, or (b) R^{3a} is H or C₁-C₁₂ alkyl, and R^{3b} together with the carbon atom to which it is bound is taken together with an adjacent R^{3b} and the carbon atom to which it is bound to form a carbon-carbon double bond; R^{4a} and R^{4b} are, at each occurrence, independently either (a) H or C₁-C₁₂ alkyl, or (b) R^{4a} is H or C₁-C₁₂ alkyl, and R^{4b} together with the carbon atom to which it is bound is taken together with an adjacent R^{4b} and the carbon atom to which it is bound to form a carbon-carbon double bond; R⁵ and R⁶ are each independently methyl or cycloalkyl; R⁷ is, at each occurrence, independently H or C₁-C₁₂ alkyl; R⁸ and R⁹ are each independently unsubstituted C1-C12 alkyl; or R⁸ and R⁹, together with the nitrogen atom to which they are attached, form a 5, 6 or 7-membered heterocyclic ring comprising one nitrogen atom; a and d are each independently an integer from 0 to 24; b and c are each independently an integer from 1 to 24; and e is 1 or 2, provided that: at least one of R^{1a}, R^{2a}, R^{3a} or R^{4a} is C1-C12 alkyl, or at least one of L¹ or L² is —O(C═O)— or —(C═O)O—; and R^{1a} and R^{1b} are not isopropyl when a is 6 or n-butyl when a is 8.

[0185] In some aspects, any of the above compositions further comprise one or more excipients comprising a neutral lipid, a steroid, and a polymer conjugated lipid. In some aspects, the neutral lipid comprises at least one of 1,2-Distearoyl-sn-glycero-3-phosphocholine (DSPC), 1,2-Dipalmitoyl-sn-glycero-3-phosphocholine (DPPC), 1,2-Dimyristoyl-sn-glycero-3-phosphocholine (DMPC), 1-Palmitoyl-2-oleoyl-sn-glycero-3-phosphocholine (POPC), 1,2-dioleoyl-sn-glycero-3-phosphocholine (DOPC), and 1,2-Dioleoyl-sn-glycero-3-phosphoethanolamine (DOPE). In some aspects, the neutral lipid is DSPC.

[0186] In some aspects, the molar ratio of the compound to the neutral lipid ranges from about 2:1 to about 8:1.

[0187] In some aspects, the steroid is cholesterol. In some aspects, the molar ratio of the compound to cholesterol ranges from about 2:1 to 1:1.

[0188] In some aspects, the polymer conjugated lipid is a pegylated lipid. In some aspects, the molar ratio of the compound to the pegylated lipid ranges from about 100:1 to about 25:1. In some aspects, the pegylated lipid is PEG-DAG, a PEG polyethylene (PEG-PE), a PEG-succinoyl-diacylglycerol (PEG-S-DAG), PEG-cer or a PEG dialkyoxypropylcarbamate. In some aspects, the pegylated lipid has the following structure III:

[chemical structure]

or a pharmaceutically acceptable salt, tautomer or stereoisomer thereof, wherein: R¹⁰ and R¹¹” are each independently a straight or branched, saturated or unsaturated alkyl chain containing from 10 to 30 carbon atoms, wherein the alkyl chain is optionally interrupted by one or more ester bonds; and z has a mean value ranging from 30 to 60. In some aspects, R¹⁰ and R¹¹ are each independently straight, saturated alkyl chains having 12 to 16 carbon atoms. In some aspects, the average z is about 45. start here

[0189] In some aspects, the LNP self-assembles into non-bilayer structures when mixed with polyanionic nucleic acid. In some aspects, the non-bilayer structures have a diameter between 60 nm and 120 nm. In some aspects, the non-bilayer structures have a diameter of about 70 nm, about 80 nm, about 90 nm, or about 100 nm. In some aspects, wherein the nanoparticulate delivery vehicle has a diameter of about 100 nm.

[0190] Also provided for herein is a vector or set of vectors comprising any of the nucleotide sequence described herein. Also disclosed herein is a vector comprising an isolated nucleotide sequence disclosed herein.

[0191] Also provided for herein is an isolated cell comprising any of the nucleotide sequences or set of isolated nucleotide sequences described herein, optionally wherein the cell is a BHK-21, CHO, HEK293 or variants thereof, 911, HeLa, A549, LP-293, PER.C6, or AE1-2a cell.

[0192] Also provided for herein is a kit comprising any of the compositions described herein and instructions for use. Also disclosed herein is a kit comprising a vector or a composition disclosed herein and instructions for use.

[0193] Also provided for herein is a method for treating a subject suffering from Covid-19, the method comprising administering to the subject any of the compositions or any of the pharmaceutical compositions described herein.

[0194] Also provided for herein is a method for treating a subject infected with or at risk for infection by SARS-CoV-2, the method comprising administering to the subject any of the compositions or any of the pharmaceutical compositions described herein.

[0195] Also provided for herein is a method for stimulating an immune response in a subject, the method comprising administering to the subject any of the compositions or any of the pharmaceutical compositions described herein.

[0196] Also disclosed herein is a method for treating a subject, the method comprising administering to the subject a vector disclosed herein or a pharmaceutical composition disclosed herein.

[0197] Also disclosed herein is a method of manufacturing the one or more vectors of any of the above compositions.

[0198] Also disclosed herein is a method of manufacturing any of the compositions disclosed herein.

### BRIEF DESCRIPTION OF THE SEVERAL VIEWS OF THE DRAWINGS

[0199] These and other features, aspects, and advantages of the present invention will become better understood with regard to the following description, and accompanying drawings, where:

[0200] FIG. 1 presents a schematic of the SARS-CoV-2 genome structure depicting the at least 14 open reading frames (ORF) identified in. Figure adapted from Zhou et al. (2020) [A pneumonia outbreak associated with a new coronavirus of probable bat origin. Nature, 579 (January)].

[0201] FIG. 2 depicts the 16 cleavage products of the replicase ORFlab and related information. Figure adapted from Wu et al. (2020). [A new coronavirus associated with human respiratory disease in China. Nature, 579 (January)].

[0202] FIG. 3 depicts the general vaccination approach of producing a balanced immune response inducing both neutralizing antibodies (from B cells) as well as effector and memory CD8+ T cell responses for maximum efficacy. SARS-CoV-2 genome structure adapted from Zhou et al. (2020) [A pneumonia outbreak associated with a new coronavirus of probable bat origin. Nature, 579 (January)].

[0203] FIG. 4 demonstrates the known prevalence of the wildtype and D614G variant SARS-Cov-2 Spike protein over time across various geographic locations.

[0204] FIG. 5 demonstrates coverage of cassettes encoding only Spike or encoding Spike and the additional predicted concatenated T cell epitopes over the four populations shown. The first column demonstrates the number of SARS-CoV-2 epitopes predicted to be presented and the second column demonstrates the expected number of presented epitopes, based on a 0.2 PPV. Each row shows the protection coverage of each population if a certain number of epitopes is used.

[0205] FIG. 6A illustrates the number of predicted epitopes presented by each MHC class II allele separately for the Spike protein or the additional predicted concatenated T cell epitopes.

[0206] FIG. 6B illustrates the number of the number of SARS-CoV-2 epitopes predicted to be presented over the four populations shown from cassettes encoding only Spike (top panel) or encoding Spike and the additional predicted concatenated T cell epitopes (bottom panel).

[0207] FIG. 7A presents the number of training samples containing Class I alleles (with at least 10 samples).

[0208] FIG. 7B presents a histogram depicting the number of training samples per Class I allele versus the number of alleles.

[0209] FIG. 8A shows a Western blot using an anti-Spike S2 antibody for Spike expression in vectors encoding various Spike variations.

[0210] FIG. 8B shows a Western blot using an anti-Spike S1 antibody for Spike expression in vectors encoding various Spike variations.

[0211] FIG. 8C shows a Western blot using an anti-Spike S1 antibody for Spike expression in vectors encoding full-length Spike, Spike S1 alone, or Spike S2 alone.

[0212] FIG. 8D shows a Western blot using an anti-Spike S2 antibody for Spike expression in vectors encoding full-length Spike, Spike S1 alone, or Spike S2 alone.

[0213] FIG. 9 shows a Western blot using an anti-Spike S2 antibody for Spike expression in vectors encoding various sequence-optimized Spike variations.

[0214] FIG. 10A depicts a schematic of PCR-based assay to assess RNA splicing of SARS-CoV-2 transcripts.

[0215] FIG. 10B shows PCR amplicons for encoded Spike proteins. Left panel depicts amplicons from cDNA templates from infected 293 cells (“ChAd-Spike (IDT) cDNA”) or from the plasmid encoding the SARS-CoV-2 Spike cassette (“Spike Plasmid”). Right panel depicts amplicons from the cDNA of 293 cells infected with a vector encoding Spike S1 alone (“SpikeS1”) or full-length Spike (“Spike”).

[0216] FIG. 11 shows PCR amplicons for encoded Spike proteins from the cDNA of 293 cells infected with vector encoding various Spike variations.

[0217] FIG. 12 presents estimated coverages for the percentage of the indicated ancestry populations having at least one HLA estimated to receive at least one immunogenic epitope encoded by TCE5, where receipt of the immunogenic peptide presentation is considered to occur when an individual's HLA is either (1) known to present an encoded epitope (“validated epitope”), or (2) predicted to present at least 4 (Col. 1), 5 (Col. 2), 6 (Col. 3), or 7 (Col. 4) encoded epitopes (“predicted epitope”; EDGE score >0.01). FA=African American, API=Asian or Pacific Islander, EUR=European, HIS=Hispanic

[0218] FIG. 13A presents T cell responses (left panel), Spike-specific IgG antibodies (middle panel) and neutralizing antibodies (right panel) following administration of ChAdV-platforms with Spike-encoding cassettes featuring different sequence optimizations “IDTSpike_{g}” (shown as “Spike V1” or “v1”) or “CTSpike_{g}” (shown as “Spike V2” or “v2”). Balb/c mice immunized with 1×10¹¹ VP ChAdV-based vaccine platform.

[0219] FIG. 13B presents T cell responses (left panel), Spike-specific IgG antibodies (middle panel) and neutralizing antibodies (right panel) following administration of SAM-platforms with Spike-encoding cassettes featuring different sequence optimizations “IDTSpike_{g}” (shown as “Spike V1” or “vi”) or “CTSpike_{g}” (shown as “Spike V2” or “v2”). Balb/c mice immunized with 10 μg SAM-based vaccine platform.

[0220] FIG. 14 presents Spike-specific IgG antibody production following administration of either ChAdV-platform (left panel) or SAM-platform (right panel) with unmodified or modified (“CTSpikeF2P_{g}” shown as “SpikeF2P”) Spike-encoding cassettes (all vectors utilize Spike sequence v2). Balb/c mice immunized with 1×10¹¹ VP ChAdV-based vaccine platform or 10 μg SAM-based vaccine platform, as indicated.

[0221] FIG. 15A presents T cell responses to Spike (left panel) and T cell responses to the encoded T cell epitopes (right panel) following administration of ChAdV-platforms with a modified Spike-encoding only cassette (“CTSpikeF2P_{g}” shown as “Spike”) and modified Spike together with additional non-Spike T cell epitopes encoded TCE5 (shown as “Spike TCE”). Balb/c mice immunized with 1×10¹¹ VP ChAdV-based vaccine platform. Shown is IFNγ ELISpot, 2 weeks post immunization. T cell response to overlapping peptide pools spanning either Spike, Nucleocapsid, or Orf3a.

[0222] FIG. 15B presents T cell responses to Spike (left panel) and T cell responses to the encoded T cell epitopes (right panel) following administration of SAM-platforms with a modified Spike-encoding only cassette (“CTSpikeF2P_{g}” shown as “Spike”) and modified Spike together with additional non-Spike T cell epitopes encoded TCE5 (shown as “TCE Spike”). Balb/c mice immunized with 10 μg SAM-based vaccine platform. Shown is IFNγ ELISpot, 2 weeks post immunization. T cell response to overlapping peptide pools spanning either Spike, Nucleocapsid, or Orf3a.

[0223] FIG. 16A presents T cell responses to Spike (top panel; IFNg ELISpot. Sum of response to 8 overlapping peptide pools spanning Spike antigen), T cell responses to the encoded cell epitopes (middle panel; IFNg ELISpot. Sum of response to 3 overlapping peptide pools spanning NCap, Membrane, and Orf3a), and Spike-specific IgG antibodies (bottom panel; S1 IgG binding measured by MSD ELISA. Interpolated endpoint titer. Geomean, geometric SD) following immunization with SAM constructs including “IDTSpike_{g}” alone (left columns), IDTSpike_{g} expressed from a first subgenomic promoter followed by TCE5 expressed from a second subgenomic promoter (middle columns), or TCE5 expressed from a first subgenomic promoter followed by IDTSpike_{g} expressed from a second subgenomic promoter (right columns). For T cell responses, Balb/c mice were immunized with 10 ug of each vaccine, n=6/group. Splenocyte isolation at 2-weeks post immunization. For IgG response, Balb/c mice immunized with 10 ug of each vaccine, n=4/group. Serum collected and analyzed at 4-weeks post immunization.

[0224] FIG. 16B presents T cell responses to Spike (top panel; IFNg ELISpot. Sum of response to 8 overlapping peptide pools spanning Spike antigen), T cell responses to the encoded T cell epitopes (middle panel; IFNg ELISpot. Sum of response to 3 overlapping peptide pools spanning NCap, Membrane, and Orf3a), and Spike-specific IgG antibodies (bottom panel; S1 IgG binding measured by MSD ELISA. Interpolated endpoint titer. Geomean, geometric SD) following immunization with SAM constructs including “IDTSpike_{g}” alone (first column), IDTSpike_{g} expressed from a first subgenomic promoter followed by TCE6 or TCE7 expressed from a second subgenomic promoter (columns 2 and 4, respectively), or TCE6 or TCE7 expressed from a first subgenomic promoter followed by IDTSpike_{g} expressed from a second subgenomic promoter (columns 3 and 5, respectively). For T cell responses, Balb/c mice were immunized with 10 ug of each vaccine, n=6/group. Splenocyte isolation at 2-weeks post immunization. For IgG response, Balb/c mice immunized with 10 ug of each vaccine, n=4/group. Serum collected and analyzed at 4-weeks post immunization.

[0225] FIG. 16C presents T cell responses to Spike (top panel; IFNg ELISpot. Sum of response to 2 overlapping peptide pools spanning Spike antigen), T cell responses to the encoded T cell epitopes (middle panel; IFNg ELISpot. Sum of response to 2 overlapping peptide pools spanning NCap and Orf3a), and Spike-specific IgG antibodies (bottom panel; S1 IgG binding measured by MSD ELISA. Interpolated endpoint titer. Geomean, geometric SD) following immunization with SAM constructs including “CTSpike_{g}” alone (first column), CTSpike_{g} expressed from a first subgenomic promoter followed by TCE5 or TCE8 expressed from a second subgenomic promoter (columns 2 and 4, respectively), or TCE5 or TCE8 expressed from a first subgenomic promoter followed by CTSpike_{g} expressed from a second subgenomic promoter (columns 3 and 5, respectively). For T cell responses, Balb/c mice were immunized with 10 ug of each vaccine, n=6/group. Splenocyte isolation at 2-weeks post immunization. For IgG response, Balb/c mice immunized with 10 ug of each vaccine, n=4/group. Serum collected and analyzed at 4-weeks post immunization.

[0226] FIG. 17A presents a map of sequences included in TCE10 for Nucleocapsid, including frames with flanking sequences, validated epitopes, predicted epitopes, mutations, and overlap between frames and mutations.

[0227] FIG. 17B presents a map of sequences included in TCE10 for ORF3a, including frames with flanking sequences, validated epitopes, predicted epitopes, mutations, and overlap between frames and mutations.

[0228] FIG. 17C presents a map of sequences included in TCE10 for nsp3, including frames with flanking sequences, validated epitopes, predicted epitopes, mutations, and overlap between frames and mutations.

[0229] FIG. 17D presents a map of sequences included in TCE10 for Membrane, including frames with flanking sequences, validated epitopes, predicted epitopes, mutations, and overlap between frames and mutations.

[0230] FIG. 17E presents a map of sequences included in TCE10 for nsp4, including frames with flanking sequences, validated epitopes, predicted epitopes, mutations, and overlap between frames and mutations.

[0231] FIG. 17F presents a map of sequences included in TCE10 for nsp12, including frames with flanking sequences, validated epitopes, predicted epitopes, mutations, and overlap between frames and mutations.

[0232] FIG. 18A presents a map of sequences included in TCE9 for nsp12, including frames with flanking sequences, validated epitopes, predicted epitopes, mutations, and overlap between frames and mutations.

[0233] FIG. 18B presents a map of sequences included in TCE9 for nsp4, including frames with flanking sequences, validated epitopes, predicted epitopes, mutations, and overlap between frames and mutations.

[0234] FIG. 18C presents a map of sequences included in TCE9 for Membrane, including frames with flanking sequences, validated epitopes, predicted epitopes, mutations, and overlap between frames and mutations.

[0235] FIG. 18D presents a map of sequences included in TCE9 for nsp3, including frames with flanking sequences, validated epitopes, predicted epitopes, mutations, and overlap between frames and mutations.

[0236] FIG. 18E presents a map of sequences included in TCE9 for ORF3a, including frames with flanking sequences, validated epitopes, predicted epitopes, mutations, and overlap between frames and mutations.

[0237] FIG. 18F presents a map of sequences included in TCE9 for Nucleocapsid, including frames with flanking sequences, validated epitopes, predicted epitopes, mutations, and overlap between frames and mutations.

[0238] FIG. 18G presents a map of sequences included in TCE9 for nsp6, including frames with flanking sequences, validated epitopes, predicted epitopes, mutations, and overlap between frames and mutations.

[0239] FIG. 19A presents a map of sequences included in TCE11 for nsp12, including frames with flanking sequences, validated epitopes, predicted epitopes, mutations, and overlap between frames and mutations.

[0240] FIG. 19B presents a map of sequences included in TCE11 for Membrane, including frames with flanking sequences, validated epitopes, predicted epitopes, mutations, and overlap between frames and mutations.

[0241] FIG. 19C presents a map of sequences included in TCE11 for nsp4, including frames with flanking sequences, validated epitopes, predicted epitopes, mutations, and overlap between frames and mutations.

[0242] FIG. 19D presents a map of sequences included in TCE11 for nsp3, including frames with flanking sequences, validated epitopes, predicted epitopes, mutations, and overlap between frames and mutations.

[0243] FIG. 20 presents the percentages of shared candidate 9-mer epitope distribution between SARS-CoV-2 and SARS-CoV (left panel) and between SARS-CoV-2 and MERS (right panel).

[0244] FIG. 21 illustrates homologous and heterologous prime/boost regimens in Indian rhesus macaques assessing ChAdV and SAM vaccine platforms encoding different isolates of the SARS-CoV-2 Spike protein.

[0245] FIG. 22A presents T cell responses across multiple Spike T cell epitope pools (top panel; Mean+−SE for each pool), T cell responses for individual NHPs directed to a single large Spike T cell epitope pool over time (middle panel), and Spike-specific IgG antibody titers over time (bottom panel) for Group 1. n=5 NHPs

[0246] FIG. 22B presents T cell responses across multiple Spike T cell epitope pools (top panel; Mean+−SE for each pool), T cell responses for individual NHPs directed to a single large Spike T cell epitope pool over time (middle panel), and Spike-specific IgG antibody titers over time (bottom panel) for Group 2. n=5 NHPs

[0247] FIG. 22C presents T cell responses across multiple Spike T cell epitope pools (top panel; Mean+−SE for each pool), T cell responses for individual NHPs directed to a single large Spike T cell epitope pool over time (middle panel), and Spike-specific IgG antibody titers over time (bottom panel) for Group 5. n=5 NHPs

[0248] FIG. 22D presents T cell responses across multiple Spike T cell epitope pools (top panel; Mean+−SE for each pool), T cell responses for individual NHPs directed to a single large Spike T cell epitope pool over time (middle panel), and Spike-specific IgG antibody titers over time (bottom panel) for Group 6. n=5 NHPs

[0249] FIG. 23 presents summaries of T cell responses for individual NHPs directed to a single large Spike T cell epitope pool over time (top panel), T cell responses to the TCE5-encoded epitopes (middle panel), and Spike-specific IgG antibody titers over time (bottom panel) for Group 1. n=5 NHPs

[0250] FIG. 24 presents neutralizing antibody production to both the D614G pseudovirus (left panels) and B.1.351 pseudovirus (right panels) following Boost 1 (left columns) and Boost 2 (right columns) for each of the NHP Groups.

[0251] FIG. 25 presents neutralizing antibody production comparing the relative Nab titer levels against each of the pseudoviruses following Boost 1 (top panels) and following Boost 2 (bottom panels).

[0252] FIG. 26 shows a dosing regimen for Rhesus macaques immunized twice with SAM encoding SARS-CoV-2 Spike antigen at specified dose of either 30 μg or 300 μg. Shown are PBMCs assessed by ex-vivo IFNγ ELISpot following overnight stimulation with Spike-specific overlapping peptide pool (left panel) and neutralizing antibodies measured in serum at study week 8 by pseudovirus neutralization assay (right panel).

[0253] FIG. 27 presents impact of Omicron variant mutations on epitope coverage for TCE5, TCE9, and TCE11.

[0254] FIG. 28A shows a schematic of SARS-CoV-2 vaccine evaluation and challenge in rhesus macaques. Filled circles represent ChAd immunization (5×10¹¹ VP), squares represent SAM vaccination at varying doses, and open circle represents challenge with SARS-CoV-2 virus. N=5/group.

[0255] FIG. 28B shows spike S1 IgG endpoint titers, geometric mean (annotated) and geometric SD. LOD=50, samples below LOD set to ½ LOD.

[0256] FIG. 28C shows IFNγ ELISpot (SFU/10⁶ PBMCs) at specified timepoint post immunization, following overnight stimulation with overlapping peptide pool spanning spike antigen. Mean (annotated) +/−SEM.

[0257] FIG. 28D shows IL-4 vs IFNγ ELISpot of PBMCs assessed 1-week post boost immunization. Individual animal values (n=5/group). Background corrected values. Diagonal line represents unity line.

[0258] FIG. 28E shows pseudovirus neutralization titers (50% inhibition, NT50) assessed in sera at specified timepoint post immunization. LOD=50, samples <LOD set to ½ LOD. Geometric mean (annotated) and SD. HCS=human convalescent serum assessed by same assay. C═PBS control injected animals assessed 8 weeks post injection.

[0259] FIG. 28F shows live virus microneutralizing titer (50% inhibition, NT50) at specified timepoint post immunization and post SARS-CoV-2 challenge, geometric mean (annotated) and geometric SD. LOD=20, samples below LOD set to ½ LOD.

[0260] FIG. 29 shows a scatterplot comparing NT50 titers measured by pseudovirus neutralization assay (PNA) and live virus microneutralization assay (MNA) for all samples that were assessed by both assays (excluding baseline samples). Dashed line represents unity. LOD for MNA assay=20, LOD for PNA assay=50. Solid line represents non-linear regression analysis best fit.

[0261] FIG. 30 shows Serum IFNα2α concentration assessed by MSD in rhesus macaques (n=5/group) 8 hours post immunization with SAM-Spike(V2)-F2P at the specified dose. Median, IQR, range.

[0262] FIG. 31A shows viral replication in vaccinated NHP following SARS-CoV-2 challenge as assessed by subgenomic RNA levels determined by RT-qPCR at specified timepoint post SARSCoV-2 challenge for each animal in bronchial alveolar lavage. LOD=422, samples below LOD set to ½ LOD. Geometric mean and SD. Numbers above each bar are numbers of NHP with viral load levels >LOD.

[0263] FIG. 31B shows viral replication in vaccinated NHP following SARS-CoV-2 challenge as assessed by subgenomic RNA levels determined by RT-qPCR at specified timepoint post SARSCoV-2 challenge for each animal in oropharyngeal swab. LOD=422, samples below LOD set to ½ LOD. Geometric mean and SD. Numbers above each bar are numbers of NHP with viral load levels >LOD.

[0264] FIG. 31C shows viral replication in vaccinated NHP following SARS-CoV-2 challenge as assessed by subgenomic RNA levels determined by RT-qPCR at specified timepoint post SARSCoV-2 challenge for each animal in nasal swab. LOD=422, samples below LOD set to ½ LOD. Geometric mean and SD. Numbers above each bar are numbers of NHP with viral load levels >LOD.

[0265] FIG. 32 shows viral replication assessed in vaccinated NHP following SARS-CoV-2 challenge. Peak subgenomic RNA levels in bronchial alveolar lavage for each animal determined by RT-qPCR between day 3 and day 10 post SARS-CoV-2 challenge (left panel). Peak subgenomic RNA levels in nasal swab for each animal determined by RT-qPCR between day 2 and day 10 post SARS-CoV-2 challenge (right panel). LOD=422, samples below LOD set to ½ LOD. LLOQ=3,881. Bars represent median. Statistical analyses: Mann-Whitney test for each group compared to unvaccinated control group.

[0266] FIG. 33A shows total genomic RNA levels (N1) determined by RT-qPCR at specified timepoint post SARS-CoV-2 challenge for each animal in bronchial alveolar lavage. LOD=230, samples below LOD set to ½ LOD. Geometric mean and SD.

[0267] FIG. 33B shows total genomic RNA levels (N1) determined by RT-qPCR at specified timepoint post SARS-CoV-2 challenge for each animal in oropharyngeal swab. LOD=230, samples below LOD set to ½ LOD. Geometric mean and SD.

[0268] FIG. 33C shows total genomic RNA levels (N1) determined by RT-qPCR at specified timepoint post SARS-CoV-2 challenge for each animal in nasal swab. LOD=230, samples below LOD set to ½ LOD. Geometric mean and SD.

[0269] FIG. 34 shows a schematic of vaccine candidate GRT-R910 (SAM-SGP1-TCE5-SGP2-CTSpike_{G}F2P) and its antigenic coverage.

[0270] FIG. 35 shows a schematic of the cohorts for the clinical trial (GO-009) assessing vaccine candidate GRT-R910 (SAM-SGP1-TCE5-SGP2-CTSpike_{G}F2P).

[0271] FIG. 36 shows a summary of the participant demographics for the clinical trial (GO-009) assessing vaccine candidate GRT-R910 (SAM-SGP1-TCE5-SGP2-CTSpike_{G}F2P). Subjects enrolled in cohorts 1 and 2 must have had negative SARS-CoV-2 serology whereas subjects enrolled in cohorts 3 and 4 may have had positive SARS-CoV-2 serology provided that they did not have symptoms consistent with SARS-CoV-2 infection within 112 days prior to enrollment Subjects without positive N-serology had SARS-Cov-2 infection occurred within 6 months (subject reported in CRF), so the status captured as convalescent. Subject 0014 in Cohort 1 received a BNT vaccine on Feb. 13, 2022 after receiving R910 on Sep. 30, 2021. Subject 0024 in Cohort 2 received a BNT vaccine on Feb. 24, 2022 after receiving R910 on Nov. 18, 2021. ¹Status at baseline.

[0272] FIG. 37 shows safety and reactogenicity summaries for the clinical trial (GO-009) assessing vaccine candidate GRT-R910 (SAM-SGP1-TCE5-SGP2-CTSpike_{G}F2P) following dose 1 (top panel) and dose 2 (bottom panel) as a comparison between 10 μg and 30 μg doses.

[0273] FIG. 38 shows safety and reactogenicity summaries for the clinical trial (GO-009) assessing vaccine candidate GRT-R910 (SAM-SGP1-TCE5-SGP2-CTSpike_{G}F2P) broken down by cohort.

[0274] FIG. 39 shows nAb response against Wild Type, Beta, Delta, and Omicron variants of SARS-CoV-2 in healthy adults (≥60 years old) following a single 10 μg samRNA boost. *ID50=Median infective dose, **Geomean ID50 titer values notated—not studied head-to-head directly. Treatment day=day 1 GRTS samRNA boost dose was administered. Boxes and horizontal bars denote interquartile range (IQR) and median neutralization, respectively. Whisker endpoints are equal to the maximum and minimum values below or above the median +/−1.5×IQR.

[0275] FIG. 40 shows anti-Spike IgG response as assessed by ELISA against Wild Type, Beta, Delta, and Omicron variants of SARS-CoV-2 in healthy adults (≥60 years old) following a single 10 μg samRNA boost. *Geomean AU/ml indicated. Treatment day=day 1 GRTS samRNA boost dose was administered. Boxes and horizontal bars denote interquartile range (IQR) and median binding, respectively. Whisker endpoints are equal to the maximum and minimum values below or above the median +/−1.5×IQR.

[0276] FIG. 41 shows titer levels for Spike IgG (top panel) and nAb (bottom panel) following single doses of 10 μg or 30 μg samRNA.

[0277] FIG. 42 shows pre and post boost titer levels for Spike IgG (top panel) and nAb (bottom panel) following single doses of 10 μg or 30 μg samRNA. AU/mL=Arbitrary units per mL; ID50 titer=Median infective dose; Geometric mean of AU/mL or ID50 titer values notated. Treatment day=day 1 single dose (10 μg or 30 μg) of GRT-R910 samRNA was administered. Boxes and horizontal bars denote interquartile range (IQR) and median values, respectively. Whisker endpoints are equal to the maximum and minimum values. 17 shown, 10 subjects from cohort 1 (10 μg) and 7 subjects from cohort 2 (30 μg, denoted by black circles).

[0278] FIG. 43 shows neutralizing antibodies against multiple SARS-CoV-2 variants of interest over a time course of 6-months following a single boost of 10 μg or 30 μg in healthy adults (≥60 years old). 7 previously vaccinated subjects 60+ years of age receiving one 10 mcg or 30 mcg dose of samRNA post ChAdOx1 series. Subjects G09-101-0014 & G09-101-0024 were excluded at Day 180 due to positive COVID diagnosis (D108 & D110) and BNT162b2 vaccination (D137 & D135).

[0279] FIG. 44 shows Spike IgG (top panel) and neutralizing (bottom panel) antibodies against multiple SARS-CoV-2 variants of interest over a time course of 6-months following a single boost of 10 μg or 30 μg in healthy adults (≥60 years old). AU/ml=Arbitrary units per ml; ID:50 titer=Mean infective dose; Geometric mean of AU/ml or ID50 titer values notated. Treatment day=day 1 single dose (10 μg or 30 μg) of GRT-R910 samRNA was administered. Boxes and horizontal bars denote interquartile range (IQR) and median values, respectively. Whisker endpoints are equal to the maximum and minimum values. 7 subjects from cohorts 1 (10 μg) and 2 (30 μg, subjects denoted by black circles). Two subject timepoints were excluded at D180 due to positive COV/D19 diagnosis (D108 & D110) and BNT162b2 vaccination (D137 & 135) prior to D180.

[0280] FIG. 45 shows T cell responses after a single boost with the samRNA against Spike and non-Spike T cell epitope (TCE) regions. SFU=Spot forming units per 10⁶ cells; Treatment day=day 1 single dose (10 μg or 30 μg) of GRT-R910 samRNA was administered. Peak=maximum T cell response at either day RT-R910 dose. Boxes and horizontal bars denote interquartile range (IQR) and median values, respectively. Whisker endpoints are equal to the maximum and minimum values. 17 subjects day 8 or day 29 after shown, 10 subjects from cohort 1 (10 μg) and 7 subjects from cohort 2 (30 μg, denoted by black circles). Ex vivo=overnight ELISpot (Spike only). Responses to Nucleocapsid, Membrane and ORF3a are after in vitro expansion. Circles denote positive responses, triangles denote responses <LOD/<2×DMSO control.

[0281] FIG. 46 shows T cell responses against Spike (top panel) and TCE epitopes (bottom panel) over a time course. SFU=Spot forming units per 10⁶ cells; Treatment day=day 1 single dose (10 μg or 30 μg) of GRT-R910 samRNA was administered. Boxes and horizontal bars denote interquartile range (IQR) and median values, respectively. Whisker endpoints are equal to the maximum and minimum values. 7 subjects shown, 4 subjects s from cohort 1 (10 μg) and 3 subjects from cohort 2 (30 μg, denoted by black circles). Ex vivo=overnight ELISpot. Two subject timepoints were excluded at D180 due to positive COVID19 diagnosis (D108 & D110) and BNT162b2 vaccination (D137 & 135) prior to D180 timepoint.

[0282] FIG. 47 shows T cell responses against Nucleocapsid, Membrane, and ORF3a, as assessed by IFNγELISpot assay (post-IVS). SFU=Spot forming units per 10⁶ cells; Treatment day=day 1 single dose (10 μg or 30 μg) of GRT-R910 samRNA was administered. Boxes and horizontal bars denote interquartile range (IQR) and median values, respectively. Whisker endpoints are equal to the maximum and minimum values. 7 subjects shown, 4 subjects from cohort 1 (10 μg) and 3 subjects from cohort 2 (30 μg, denoted by black circles). IVS=in vitro expansion. Circles denote positive responses, triangles denote responses <LOD/<2×DMSO control. Two subject timepoints were excluded at D180 due to positive COVID19 diagnosis (D108 & D110) and BNT162b2 vaccination (D137 & 135) prior to D180 timepoint.

[0283] FIG. 48 shows T cell responses against Spike (top panel) and TCE epitopes (bottom panel) over a time course as a percentage of response to different T cell epitope pools.

[0284] FIG. 49 shows T cell responses as assessed by ELISpot against Spike overlapping peptides (left panel), TCE overlapping peptides (OLP, 15 amino acid peptides; middle panel), and minimal epitopes (8-11 amino acid peptides; right panel).

[0285] FIG. 50 shows T cell responses as assessed by ELISpot against Nucleocapsid, Membrane, and ORF3a as a percentage of response for both 10 μg (Cohort 1) and 30 μg (Cohort 2) doses.

[0286] FIG. 51 shows ex vivo ELISpot responses and MSD analysis of ELISpot supernatants for IFNγ, IL-2, and IL-4.

[0287] FIG. 52 shows intracellular cytokine staining for CD8+ T cells stimulated with TCE and ORF3a overlapping peptide pools and a ORF3a minimal epitope pool following a single 10 μg dose of samRNA. Shown is data for subject 0003 post treatment.

[0288] FIG. 53 shows intracellular cytokine staining for CD4+ T cells stimulated with TCE and ORF3a overlapping peptide pools and a ORF3a minimal epitope pool following a single 10 μg dose of samRNA. Shown is data for subject 0003 post treatment.

[0289] FIG. 54 shows post-expansion ELISpot responses in pre-pandemic donors to vaccine candidate GRT-R910 (SAM-SGP1-TCE5-SGP2-CTSpike_{G}F2P). Overlapping peptide pools (15mer) were used for expansion and ELISpot stimulation.

[0290] FIG. 55 shows ex vivo (left panel) and post-expansion (right panel) ELISpot responses to TCE5 components in convalescent donors for the indicated peptide pools.

[0291] FIG. 56 shows a schematic of vaccine candidates GRT-R912 (N-TCE11-Spike-beta; SEQ ID NO: 27981), GRT-R914 (TCE9-Spike-beta; SEQ ID NO: 27982), GRT-R918 (SAM-Nuc-TCE11-SpikeB.1.1.529 sequence; SEQ ID NO: 27976) and their antigenic coverage.

[0292] FIG. 57 shows a schematic of the cohorts for a clinical trial assessing vaccine candidates GRT-R912 (N-TCE11-Spike-beta), GRT-R914 (TCE9-Spike-beta), GRT-R918 (SAM-Nuc-TCE11-SpikeB.1.1.529 sequence).

[0293] FIG. 58 shows a summary of the participant demographics for the clinical trial (GO-012) assessing for a clinical trial assessing vaccine candidate GRT-R914 (TCE9-Spike-beta). *Cohort A1-A3: Participants were defined as “naïve” based on negative baseline N-Specific serology. **Cohort A4-A6: Participants were defined as “convalescent” if they confirmed a prior diagnosis of COVID-19 six months or more prior to screening or were positive on baseline N-Specific serology and did not have symptoms consistent with COVID-19 in the six months prior to screening.

[0294] FIG. 59A shows safety and reactogenicity summaries for vaccine candidate GRT-R914 (TCE9-Spike-beta) in “naïve” participants following dose 1.

[0295] FIG. 59B shows safety and reactogenicity summaries for vaccine candidate GRT-R914 (TCE9-Spike-beta) in “naïve” participants following dose 2.

[0296] FIG. 59C shows safety and reactogenicity summaries for vaccine candidate GRT-R914 (TCE9-Spike-beta) in “convalescent” participants following a single dose.

[0297] FIG. 60 shows Spike nAb against Beta variant following administration of GRT-R914 in COVID-naïve participants. Bottom rows of numbers represent negative N- & negative S-specific serology Middle rows of numbers represent negative N- & positive S-specific serology. Top rows of numbers represent negative N- & unknown S-specific serology subjects. nAb data were analyzed by microneutralization (MNA) assay. Note: Geometric mean in Cohort A1 does not include data of subject 105-0001 at Day 57 since 2^{nd} dose was not given due to an AE (Grade 1 neutropenia) and note that this subject had SARS-COV-2 infection on Day 58. Log₁₀ (ND₅₀ titer) is used for the y-axis scale and ND₅₀ titer is used for geometric means; Box plots with interquartile range and median are shown with the maximum and the minimum.

[0298] FIG. 61 shows Spike nAb against Delta variant following administration of GRT-R914 in COVID-naïve participants. Bottom rows of numbers represent negative N- & negative S-specific serology. Middle rows of numbers negative N- & positive S-specific serology. Top rows of numbers represent negative N- & unknown S-specific serology subjects. nAb data were analyzed by microneutralization (MNA) assay. Note: Geometric mean in Cohort A1 does not include data of subject 105-0001 at Day 57 since 2^{nd} dose was not given due to an AE (Grade 1 neutropenia) and note that this subject had SARS-COV-2 infection on Day 5. Log₁₀ (ND₅₀ titer) is used for the y-axis scale and ND₅₀ titer is used for geometric means; Box plots with interquartile range and median are shown with the maximum and the minimum.

[0299] FIG. 62 shows Spike nAb against Beta variant following administration of GRT-R914 in COVID-convalescent participants. nAb data were analyzed by microneutralization (MNA) assay. Log₁₀ (ND₅₀ titer) is used for the y-axis scale and ND₅₀ titer is used for geometric means; Box plots with interquartile range and median are shown with the maximum and the minimum.

[0300] FIG. 63 shows Spike nAb against Delta variant following administration of GRT-R914 in COVID-convalescent participants nAb data were analyzed by microneutralization (MNA) assay. Log₁₀ (ND₅₀ titer) is used for the y-axis scale and ND₅₀ titer is used for geometric means; Box plots with interquartile range and median are shown with the maximum and the minimum.

[0301] FIG. 64 shows Spike IgG following administration of GRT-R914 in COVID-naïve participants. Bottom rows of numbers represent Naïve & Negative S-specific subjects. Middle and top rows of numbers represent Naïve & Positive/NA S-specific subjects. Raw data is displayed in log₁₀ scale for presentation. Geometric means of raw data (ELU/mL) are presented. Geometric mean in Cohort A1 does not include subject 105-0001 at Day 57 since 2^{nd} dose received Grade 1 neutropenia and had SARS-COV-2 infection on Day 58.

[0302] FIG. 65 shows Spike IgG following administration of GRT-R914 in COVID-convalescent participants. Raw data is displayed in log₁₀ scale for presentation. Geometric means of raw data are presented.

[0303] FIG. 66A shows summaries of statistics for nAb data against Beta variant.

[0304] FIG. 66B shows summaries of statistics for fold change against Beta variant.

[0305] FIG. 66C shows summaries of statistics for nAb data against Delta variant.

[0306] FIG. 66D shows summaries of statistics for fold change against Delta variant.

[0307] FIG. 66E shows summaries of statistics for IgG data against wild-type.

[0308] FIG. 66F shows summaries of statistics for fold change against wild-type.

### DETAILED DESCRIPTION

### I. Definitions

[0309] In general, terms used in the claims and the specification are intended to be construed as having the plain meaning understood by a person of ordinary skill in the art. Certain terms are defined below to provide additional clarity. In case of conflict between the plain meaning and the provided definitions, the provided definitions are to be used.

[0310] As used herein the term “antigen” is a substance that stimulates an immune response. An antigen can be a neoantigen. An antigen can be a “shared antigen” that is an antigen found among a specific population, e.g., a specific population of SARS-CoV-2 patients with or at risk of infection for an infectious disease.

[0311] As used herein the term “antigen-based vaccine” is a vaccine composition based on one or more antigens, e.g., a plurality of antigens. The vaccines can be nucleotide-based (e.g., virally based, RNA based, or DNA based), protein-based (e.g., peptide based), or a combination thereof.

[0312] As used herein the term “candidate antigen” is a mutation or other aberration giving rise to a sequence that may represent an antigen.

[0313] As used herein the term “coding region” is the portion(s) of a gene that encode protein.

[0314] As used herein the term “coding mutation” is a mutation occurring in a coding region.

[0315] As used herein the term “ORF” means open reading frame.

[0316] As used herein the term “missense mutation” is a mutation causing a substitution from one amino acid to another.

[0317] As used herein the term “nonsense mutation” is a mutation causing a substitution from an amino acid to a stop codon or causing removal of a canonical start codon.

[0318] As used herein the term “frameshift mutation” is a mutation causing a change in the frame of the protein.

[0319] As used herein the term “indel” is an insertion or deletion of one or more nucleic acids.

[0320] As used herein, the term percent “identity,” in the context of two or more nucleic acid or polypeptide sequences, refer to two or more sequences or subsequences that have a specified percentage of nucleotides or amino acid residues that are the same, when compared and aligned for maximum correspondence, as measured using one of the sequence comparison algorithms described below (e.g., BLASTP and BLASTN or other algorithms available to persons of skill) or by visual inspection. Depending on the application, the percent “identity” can exist over a region of the sequence being compared, e.g., over a functional domain, or, alternatively, exist over the full length of the two sequences to be compared.

[0321] For sequence comparison, typically one sequence acts as a reference sequence to which test sequences are compared. When using a sequence comparison algorithm, test and reference sequences are input into a computer, subsequence coordinates are designated, if necessary, and sequence algorithm program parameters are designated. The sequence comparison algorithm then calculates the percent sequence identity for the test sequence(s) relative to the reference sequence, based on the designated program parameters. Alternatively, sequence similarity or dissimilarity can be established by the combined presence or absence of particular nucleotides, or, for translated sequences, amino acids at selected sequence positions (e.g., sequence motifs).

[0322] Optimal alignment of sequences for comparison can be conducted, e.g., by the local homology algorithm of Smith & Waterman, Adv. Appl. Math. 2:482 (1981), by the homology alignment algorithm of Needleman & Wunsch, J. Mol. Biol. 48:443 (1970), by the search for similarity method of Pearson & Lipman, Proc. Nat'l. Acad. Sci. USA 85:2444 (1988), by computerized implementations of these algorithms (GAP, BESTFIT, FASTA, and TFASTA in the Wisconsin Genetics Software Package, Genetics Computer Group, 575 Science Dr., Madison, Wis.), or by visual inspection (see generally Ausubel et al., infra).

[0323] One example of an algorithm that is suitable for determining percent sequence identity and sequence similarity is the BLAST algorithm, which is described in Altschul et al., J. Mol. Biol. 215:403-410 (1990). Software for performing BLAST analyses is publicly available through the National Center for Biotechnology Information.

[0324] As used herein the term “non-stop or read-through” is a mutation causing the removal of the natural stop codon.

[0325] As used herein the term “epitope” is the specific portion of an antigen typically bound by an antibody or T cell receptor.

[0326] As used herein the term “immunogenic” is the ability to stimulate an immune response, e.g., via T cells, B cells, or both.

[0327] As used herein the term “HLA binding affinity” “MHC binding affinity” means affinity of binding between a specific antigen and a specific MHC allele.

[0328] As used herein the term “bait” is a nucleic acid probe used to enrich a specific sequence of DNA or RNA from a sample.

[0329] As used herein the term “variant” is a difference between a subject's nucleic acids and the reference human genome used as a control.

[0330] As used herein the term “variant call” is an algorithmic determination of the presence of a variant, typically from sequencing.

[0331] As used herein the term “polymorphism” is a germline variant, i.e., a variant found in all DNA-bearing cells of an individual.

[0332] As used herein the term “somatic variant” is a variant arising in non-germline cells of an individual.

[0333] As used herein the term “allele” is a version of a gene or a version of a genetic sequence or a version of a protein.

[0334] As used herein the term “HLA type” is the complement of HLA gene alleles.

[0335] As used herein the term “nonsense-mediated decay” or “NMD” is a degradation of an mRNA by a cell due to a premature stop codon.

[0336] As used herein the term “exome” is a subset of the genome that codes for proteins. An exome can be the collective exons of a genome.

[0337] As used herein the term “logistic regression” is a regression model for binary data from statistics where the logit of the probability that the dependent variable is equal to one is modeled as a linear function of the dependent variables.

[0338] As used herein the term “neural network” is a machine learning model for classification or regression consisting of multiple layers of linear transformations followed by element-wise nonlinearities typically trained via stochastic gradient descent and back-propagation.

[0339] As used herein the term “proteome” is the set of all proteins expressed and/or translated by a cell, group of cells, or individual.

[0340] As used herein the term “peptidome” is the set of all peptides presented by MHC-I or MHC-II on the cell surface. The peptidome may refer to a property of a cell or a collection of cells (e.g., the infectious disease peptidome, meaning the union of the peptidomes of all cells that are infected by the infectious disease).

[0341] As used herein the term “ELISPOT” means Enzyme-linked immunosorbent spot assay—which is a common method for monitoring immune responses in humans and animals.

[0342] As used herein the term “dextramers” is a dextran-based peptide-MHC multimers used for antigen-specific T-cell staining in flow cytometry.

[0343] As used herein the term “tolerance or immune tolerance” is a state of immune non-responsiveness to one or more antigens, e.g. self-antigens.

[0344] As used herein the term “central tolerance” is a tolerance affected in the thymus, either by deleting self-reactive T-cell clones or by promoting self-reactive T-cell clones to differentiate into immunosuppressive regulatory T-cells (Tregs).

[0345] As used herein the term “peripheral tolerance” is a tolerance affected in the periphery by downregulating or energizing self-reactive T-cells that survive central tolerance or promoting these T cells to differentiate into Tregs.

[0346] The term “sample” can include a single cell or multiple cells or fragments of cells or an aliquot of body fluid, taken from a subject, by means including venipuncture, excretion, ejaculation, massage, biopsy, needle aspirate, lavage sample, scraping, surgical incision, or intervention or other means known in the art.

[0347] The term “subject” encompasses a cell, tissue, or organism, human or non-human, whether in vivo, ex vivo, or in vitro, male or female. The term subject is inclusive of mammals including humans.

[0348] The term “mammal” encompasses both humans and non-humans and includes but is not limited to humans, non-human primates, canines, felines, murines, bovines, equines, and porcines.

[0349] The term “clinical factor” refers to a measure of a condition of a subject, e.g., disease activity or severity. “Clinical factor” encompasses all markers of a subject's health status, including non-sample markers, and/or other characteristics of a subject, such as, without limitation, age and gender. A clinical factor can be a score, a value, or a set of values that can be obtained from evaluation of a sample (or population of samples) from a subject or a subject under a determined condition. A clinical factor can also be predicted by markers and/or other parameters such as gene expression surrogates. Clinical factors can include infection type (e.g., Coronavirus species), infection sub-type (e.g., SARS-CoV-2 variant), and medical history.

[0350] The term “antigen-encoding nucleic acid sequences derived from an infection” refers to nucleic acid sequences obtained from infected cells or an infectious disease organism, e.g. via RT-PCR; or sequence data obtained by sequencing the infected cell or infectious disease organism and then synthesizing the nucleic acid sequences using the sequencing data, e.g., via various synthetic or PCR-based methods known in the art. Derived sequences can include nucleic acid sequence variants, such as sequence-optimized nucleic acid sequence variants (e.g., codon-optimized and/or otherwise optimized for expression), that encode the same polypeptide sequence as the corresponding native infectious disease organism nucleic acid sequence. Derived sequences can include nucleic acid sequence variants that encode a modified infectious disease organism polypeptide sequence having one or more (e.g., 1, 2, 3, 4, or 5) mutations relative to a native infectious disease organism polypeptide sequence. For example, a modified polypeptide sequence can have one or more missense mutations relative to the native polypeptide sequence of an infectious disease organism protein.

[0351] The term “SARS-CoV-2 nucleic acid sequence encoding an immunogenic polypeptide” refers to nucleic acid sequences obtained from a SARS-CoV-2 virus, e.g. via RT-PCR; or sequence data obtained by sequencing a SARS-CoV-2 virus or a SARS-CoV-2 virus infected cell, and then synthesizing the nucleic acid sequences using the sequencing data, e.g., via various synthetic or PCR-based methods known in the art. Derived sequences can include nucleic acid sequence variants, such as sequence-optimized nucleic acid sequence variants (e.g., codon-optimized and/or otherwise optimized for expression), that encode the same polypeptide sequence as the corresponding native SARS-CoV-2 nucleic acid sequence. Derived sequences can include nucleic acid sequence variants that encode a modified SARS-CoV-2 polypeptide sequence having one or more (e.g., 1, 2, 3, 4, or 5) mutations relative to a native SARS-CoV-2 polypeptide sequence. For example, a modified Spike polypeptide sequence can have one or more mutations such as one or more missense mutations of R682, R815, K986P, or V987P relative to the native spike polypeptide sequence of a SARS-CoV-2 protein.

[0352] The term “alphavirus” refers to members of the family Togaviridae, and are positive-sense single-stranded RNA viruses. Alphaviruses are typically classified as either Old World, such as Sindbis, Ross River, Mayaro, Chikungunya, and Semliki Forest viruses, or New World, such as eastern equine encephalitis, Aura, Fort Morgan, or Venezuelan equine encephalitis and its derivative strain TC-83. Alphaviruses are typically self-replicating RNA viruses.

[0353] The term “alphavirus backbone” refers to minimal sequence(s) of an alphavirus that allow for self-replication of the viral genome. Minimal sequences can include conserved sequences for nonstructural protein-mediated amplification, a nonstructural protein 1 (nsP1) gene, a nsP2 gene, a nsP3 gene, a nsP4 gene, and a polyA sequence, as well as sequences for expression of subgenomic viral RNA including a subgenomic promoter (e.g., a 26S promoter element).

[0354] The term “sequences for nonstructural protein-mediated amplification” includes alphavirus conserved sequence elements (CSE) well known to those in the art. CSEs include, but are not limited to, an alphavirus 5′ UTR, a 51-nt CSE, a 24-nt CSE, a subgenomic promoter sequence (e.g., a 26S subgenomic promoter sequence), a 19-nt CSE, and an alphavirus 3′ UTR.

[0355] The term “RNA polymerase” includes polymerases that catalyze the production of RNA polynucleotides from a DNA template. RNA polymerases include, but are not limited to, bacteriophage derived polymerases including T3, T7, and SP6.

[0356] The term “lipid” includes hydrophobic and/or amphiphilic molecules. Lipids can be cationic, anionic, or neutral. Lipids can be synthetic or naturally derived, and in some instances biodegradable. Lipids can include cholesterol, phospholipids, lipid conjugates including, but not limited to, polyethyleneglycol (PEG) conjugates (PEGylated lipids), waxes, oils, glycerides, fats, and fat-soluble vitamins. Lipids can also include dilinoleylmethyl-4-dimethylaminobutyrate (MC3) and MC3-like molecules.

[0357] The term “lipid nanoparticle” or “LNP” includes vesicle like structures formed using a lipid containing membrane surrounding an aqueous interior, also referred to as liposomes. Lipid nanoparticles includes lipid-based compositions with a solid lipid core stabilized by a surfactant. The core lipids can be fatty acids, acylglycerols, waxes, and mixtures of these surfactants. Biological membrane lipids such as phospholipids, sphingomyelins, bile salts (sodium taurocholate), and sterols (cholesterol) can be utilized as stabilizers. Lipid nanoparticles can be formed using defined ratios of different lipid molecules, including, but not limited to, defined ratios of one or more cationic, anionic, or neutral lipids. Lipid nanoparticles can encapsulate molecules within an outer-membrane shell and subsequently can be contacted with target cells to deliver the encapsulated molecules to the host cell cytosol. Lipid nanoparticles can be modified or functionalized with non-lipid molecules, including on their surface. Lipid nanoparticles can be single-layered (unilamellar) or multi-layered (multilamellar). Lipid nanoparticles can be complexed with nucleic acid. Unilamellar lipid nanoparticles can be complexed with nucleic acid, wherein the nucleic acid is in the aqueous interior. Multilamellar lipid nanoparticles can be complexed with nucleic acid, wherein the nucleic acid is in the aqueous interior, or to form or sandwiched between

[0358] Abbreviations: MHC: major histocompatibility complex; HLA: human leukocyte antigen, or the human MHC gene locus; NGS: next-generation sequencing; PPV: positive predictive value; TSNA: tumor-specific neoantigen; FFPE: formalin-fixed, paraffin-embedded; NMD: nonsense-mediated decay; NSCLC: non-small-cell lung cancer; DC: dendritic cell.

[0359] It should be noted that, as used in the specification and the appended claims, the singular forms “a,” “an,” and “the” include plural referents unless the context clearly dictates otherwise.

[0360] Unless specifically stated or otherwise apparent from context, as used herein the term “about” is understood as within a range of normal tolerance in the art, for example within 2 standard deviations of the mean. About can be understood as within 10%, 9%, 8%, 7%, 6%, 5%, 4%, 3%, 2%, 1%, 0.5%, 0.1%, 0.05%, or 0.01% of the stated value. Unless otherwise clear from context, all numerical values provided herein are modified by the term about.

[0361] Any terms not directly defined herein shall be understood to have the meanings commonly associated with them as understood within the art of the invention. Certain terms are discussed herein to provide additional guidance to the practitioner in describing the compositions, devices, methods and the like of aspects of the invention, and how to make or use them. It will be appreciated that the same thing may be said in more than one way. Consequently, alternative language and synonyms may be used for any one or more of the terms discussed herein. No significance is to be placed upon whether or not a term is elaborated or discussed herein. Some synonyms or substitutable methods, materials and the like are provided. Recital of one or a few synonyms or equivalents does not exclude use of other synonyms or equivalents, unless it is explicitly stated. Use of examples, including examples of terms, is for illustrative purposes only and does not limit the scope and meaning of the aspects of the invention herein.

[0362] All references, issued patents and patent applications cited within the body of the specification are hereby incorporated by reference in their entirety, for all purposes.

### II. Antigen Identification

[0363] Research methods for NGS analysis of tumor and normal exome and transcriptomes have been described and applied in the antigen identification space. ^{6, 14, 15} Certain optimizations for greater sensitivity and specificity for antigen identification in the clinical setting can be considered. These optimizations can be grouped into two areas, those related to laboratory processes and those related to the NGS data analysis. The research methods described can also be applied to identification of antigens in other settings, such as identification of identifying antigens from an infectious disease organism (e.g., SARS-CoV-2), an infection in a subject, or an infected cell of a subject. Examples of optimizations are known to those skilled in the art, for example the methods described in more detail in U.S. Pat. No. 10,055,540, US Application Pub. No. US20200010849A1, international patent application publications WO/2018/195357 and WO/2018/208856, U.S. application Ser. No. 16/606,577, and international patent application PCT/US2020/021508, each herein incorporated by reference, in their entirety, for all purposes.

[0364] Methods for identifying antigens (e.g., antigens derived from an infectious disease organism) include identifying antigens that are likely to be presented on a cell surface (e.g., presented by MHC on an infected cell or an immune cell, including professional antigen presenting cells such as dendritic cells), and/or are likely to be immunogenic. As an example, one such method may comprise the steps of: obtaining at least one of exome, transcriptome or whole genome nucleotide sequencing and/or expression data from an infected cell or an infectious disease organism (e.g., SARS-CoV-2), wherein the nucleotide sequencing data and/or expression data is used to obtain data representing peptide sequences of each of a set of antigens (e.g., antigens derived from the infectious disease organism); inputting the peptide sequence of each antigen into one or more presentation models to generate a set of numerical likelihoods that each of the antigens is presented by one or more MHC alleles on a cell surface, such as an infected cell of the subject, the set of numerical likelihoods having been identified at least based on received mass spectrometry data; and selecting a subset of the set of antigens based on the set of numerical likelihoods to generate a set of selected antigens.

### IV. Antigens

[0365] Antigens can include nucleotides or polypeptides. For example, an antigen can be an RNA sequence that encodes for a polypeptide sequence. Antigens useful in vaccines can therefore include nucleotide sequences or polypeptide sequences.

[0366] Disclosed herein are peptides and nucleic acid sequences encoding peptides derived from any polypeptide associated with SARS-CoV-2, a SARS-CoV-2 infection in a subject, or a SARS-CoV-2 infected cell of a subject. Antigens can be derived from nucleotide sequences or polypeptide sequences of a SARS-CoV-2 virus. Polypeptide sequences of SARS-CoV-2 include, but are not limited to, predicted MHC class I epitopes shown in Table A, predicted MHC class II epitopes shown in Table B, predicted MHC class I epitopes shown in Table C, SARS-CoV-2 Spike peptides (e.g., peptides derived from SEQ ID NO:59), SARS-CoV-2 Membrane peptides (e.g., peptides derived from SEQ ID NO:61), SARS-CoV-2 Nucleocapsid peptides (e.g., peptides derived from SEQ ID NO:62), SARS-CoV-2 Envelope peptides (e.g., peptides derived from SEQ ID NO:63), SARS-CoV-2 replicase orf1a and orf1b peptides [such as one or more of non-structural proteins (nsp) 1-16], or any other peptide sequence encoded by a SARS-CoV-2 virus. Peptides and nucleic acid sequences encoding peptides can be derived from the Wuhan-Hu-1 SARS-CoV-2 isolate, sometimes referred to as the SARS-CoV-2 reference sequence (SEQ ID NO:76; NC_045512.2, herein incorporated by reference for all purposes). Peptides and nucleic acid sequences encoding peptides can be derived from an isolate distinct from the Wuhan-Hu-1 SARS-CoV-2 isolate, such as from the from a B.1.351 (“South African” or “Beta” or “501Y.V2”), a SARS-CoV-2 isolate the B.1.1.7 (“UK”) SARS-CoV-2 isolate, a B.1.1.529 (“Omicron”) isolate, or subisolates thereof, e.g., a B.1.1.529 BA5 subisolate. Peptides and nucleic acid sequences encoding peptides can be derived from an isolate distinct from the Wuhan-Hu-1 SARS-CoV-2 isolate, such as isolates having one or more mutations in proteins (also referred to as protein variants) with reference to the Wuhan-Hu-1 isolate. Vaccination strategies can include multiple vaccines with peptides and nucleic acid sequences encoding peptides derived from distinct isolates. For example, as an illustrative non-limiting example, a vaccine encoding a Spike protein from the Wuhan-Hu-1 SARS-CoV-2 isolate can be administered, followed by subsequent administration of a vaccine encoding a Spike protein from the B.1.351 (“South African” or “Beta” or “501Y.V2”) SARS-CoV-2 isolate (e.g., SEQ ID NO:112) or from the B.1.1.7 (“UK”) SARS-CoV-2 isolate (e.g., SEQ ID NO:110). The one or more variants can include, but are not limited to, mutations in the SARS-CoV-2 Spike protein, SARS-CoV-2 Membrane protein, SARS-CoV-2 Nucleocapsid protein, SARS-CoV-2 Envelope protein, SARS-CoV-2 replicase orf1a and orf1b protein [such as one or more of non-structural proteins (nsp) 1-16], or any other protein sequences encoded by a SARS-CoV-2 virus. Variants can be selected based on prevalence of the mutation among SARS-CoV-2 subtypes/isolates, such as mutations/variants that are present in 1% or greater, 2% or greater, 3% or greater, 4% or greater, 5% or greater, 6% or greater, 7% or greater, 8% or greater, 9% or greater, 10% or greater, 20% or greater, 30% or greater, 40% or greater, 50% or greater, 60% or greater, 70% or greater, 80% or greater, 90% or greater of SARS-CoV-2 subtypes/isolates. Examples of mutations in greater than 1% of isolates are shown in Table 1. Variants can be selected based on prevalence of the mutation among SARS-CoV-2 subtypes/isolates present in a specific population, such as a specific demographic or geographic population. An illustrative non-limiting example of a prevalent variant/mutation is the Spike D614G missense mutation found in 60.05% of genomes sequenced worldwide, and 70.46% and 58.49% of the sequences in Europe and North America, respectively. Accordingly, vaccines can be designed to encode at least one immunogenic polypeptide corresponding to a polypeptide encoded by a SARS-CoV-2 subtype the subject is infected with or at risk for infection by, such as for use in prophylactic vaccines for a specific demographic or geographic population at risk for infection by the specific SARS-CoV-2 subtype/isolate. Vaccines can be designed to encode at least one immunogenic polypeptide corresponding to a polypeptide encoded by SARS-CoV-2 and at least one immunogenic polypeptide corresponding to a polypeptide encoded by a Coronavirus species and/or sub-species other than SARS-CoV-2, e.g., the Severe acute respiratory syndrome (SARS) 2002-associated species (NC_004718.3, herein incorporated by reference for all purposes) and/or Middle East respiratory syndrome (MERS) 2012-associated species (NC_019843.3, herein incorporated by reference for all purposes). Vaccines can be designed to encode at least one immunogenic polypeptide corresponding to a polypeptide encoded by SARS-CoV-2 that is conserved (e.g., 100% amino acid sequence conservation between epitopes) between SARS-CoV-2 and a Coronavirus species and/or sub-species other than SARS-CoV-2, e.g., Severe acute respiratory syndrome (SARS) and/or Middle East respiratory syndrome (MERS) species. SARS-CoV-2 epitopes that are conserved between SARS-CoV-2 and a Coronavirus species and/or sub-species other than SARS-CoV-2 can include epitopes derived from a Coronavirus Spike protein, a Coronavirus Membrane protein, a Coronavirus Nucleocapsid protein, a Coronavirus Envelope protein, a Coronavirus replicase orf1a and orf1b protein [such as one or more of non-structural proteins (nsp) 1-16], or any other protein sequences encoded by a Coronavirus.

[0367] Antigens can be selected that are predicted to be presented on the cell surface of a cell, such as an infected cell or an immune cell, including professional antigen presenting cells such as dendritic cells. Antigens can be selected that are predicted to be immunogenic. Exemplary antigens predicted using the methods described herein to be presented on the cell surface by an MHC include predicted MHC class I epitopes shown in Table A, predicted MHC class II epitopes shown in Table B, and predicted MHC class I epitopes shown in Table C.

[0368] Antigens can be selected that have been validated to be presented by a specific HLA and/or stimulate an immune response, such as previously reported/validated in the literature (for example, as in Nelde et al. [Nature Immunology volume 22, pages 74-85 2021], Tarke et al. 2021, or Schelien et al. [bioRxiv 2020.08.13.249433]). The magnitude of stimulation of an immune response can be used to guide epitope/antigen selection, such as to select epitopes that stimulate as robust an immune response as possible, including when cassettes have a size constraint. As an illustrative non-limiting example of magnitude based-selection, the following can be used (1) An individual's magnitude is the sum of all epitope magnitudes across their respective diplotype alleles; (2) Each epitopes magnitude=(magnitude of response)×(Frequency of positive response/100), [e.g., using values found in Tarke et al. (Comprehensive analysis of T cell immunodominance and immunoprevalence of SARS-CoV-2 epitopes in COVID-19 cases. Cell Rep Med. 2021 Feb. 16; 2(2):100204. doi: 10.1016/j.xcrm.2021.100204. Epub 2021 Jan. 26.), herein incorporated by reference for all purposes]; (3) exclusion of epitopes other than those from starting proteins that span mutations with >5% frequency, optionally with mutations allowed in flanking regions; and/or (4) cassette order determined to minimize unintended junction epitopes across adjacent frames, as well as minimize consecutive frames in the same protein to reduce chance of functional protein fragments, as described herein.

[0369] A cassette can be constructed to encode one or more validated epitopes and/or at least 4, 5, 6, or 7 predicted epitopes, wherein at least 85%, 90%, or 95% of a population carries at least one HLA validated to present at least one of the one or more validated epitopes and/or at least one HLA predicted to present each of the at least 4, 5, 6, or 7 predicted epitopes. A cassette can be constructed to encode one or more validated epitopes and at least 4, 5, 6, or 7 predicted epitopes, wherein at least 85%, 90%, or 95% of a population carries at least one HLA validated to present at least one of the one or more validated epitopes or at least one HLA predicted to present each of the at least 4, 5, 6, or 7 predicted epitopes.

[0370] One or more polypeptides encoded by an antigen nucleotide sequence can comprise at least one of: a binding affinity with MHC with an IC50 value of less than 1000 nM, for MHC Class I peptides a length of 8-15, 8, 9, 10, 11, 12, 13, 14, or 15 amino acids, presence of sequence motifs within or near the peptide promoting proteasome cleavage, and presence or sequence motifs promoting TAP transport. For MHC Class II peptides a length 6-30, 6, 7, 8, 9, 10, 11, 12, 13, 14, 15, 16, 17, 18, 19, 20, 21, 22, 23, 24, 25, 26, 27, 28, 29, or 30 amino acids, presence of sequence motifs within or near the peptide promoting cleavage by extracellular or lysosomal proteases (e.g., cathepsins) or HLA-DM catalyzed HLA binding.

[0371] One or more antigens can be presented on the surface of an infected cell (e.g., a SARS-CoV-2 infected cell).

[0372] One or more antigens can be immunogenic in a subject having or suspected to have an infection (e.g., a SARS-CoV-2 infection), e.g., capable of stimulating a T cell response and/or a B cell response in the subject. One or more antigens can be immunogenic in a subject at risk of an infection (e.g., a SARS-CoV-2 infection), e.g., capable of stimulating a T cell response and/or a B cell response in the subject that provides immunological protection (i.e., immunity) against the infection, e.g., such as stimulating the production of memory T cells, memory B cells, or antibodies specific to the infection.

[0373] One or more antigens can be capable of stimulating a B cell response, such as the production of antibodies that recognize the one or more antigens (e.g., antibodies that recognize a SARS-CoV-2 antigen and/or virus). Antibodies can recognize linear polypeptide sequences or recognize secondary and tertiary structures. Accordingly, B cell antigens can include linear polypeptide sequences or polypeptides having secondary and tertiary structures, including, but not limited to, full-length proteins, protein subunits, protein domains, or any polypeptide sequence known or predicted to have secondary and tertiary structures. Antigens capable of stimulating a B cell response to an infection can be antigens found on the surface of an infectious disease organism (e.g., SARS-CoV-2). Antigens capable of stimulating a B cell response to an infection can be an intracellular antigen expressed in an infectious disease organism. SARS-CoV-2 antigens capable of stimulating a B cell response include, but are not limited to, SARS-CoV-2 Spike peptides, SARS-CoV-2 Membrane peptides, SARS-CoV-2 Nucleocapsid peptides, and SARS-CoV-2 Envelope peptides.

[0374] One or more antigens can include a combination of antigens capable of stimulating a T cell response (e.g., peptides including predicted T cell epitope sequences) and distinct antigens capable of stimulating a B cell response (e.g., full-length proteins, protein subunits, protein domains).

[0375] One or more antigens that stimulate an autoimmune response in a subject can be excluded from consideration in the context of vaccine generation for a subject.

[0376] The size of at least one antigenic peptide molecule (e.g., an epitope sequence) can comprise, but is not limited to, about 5, about 6, about 7, about 8, about 9, about 10, about 11, about 12, about 13, about 14, about 15, about 16, about 17, about 18, about 19, about 20, about 21, about 22, about 23, about 24, about 25, about 26, about 27, about 28, about 29, about 30, about 31, about 32, about 33, about 34, about 35, about 36, about 37, about 38, about 39, about 40, about 41, about 42, about 43, about 44, about 45, about 46, about 47, about 48, about 49, about 50, about 60, about 70, about 80, about 90, about 100, about 110, about 120 or greater amino molecule residues, and any range derivable therein. In specific embodiments the antigenic peptide molecules are equal to or less than 50 amino acids.

[0377] Antigenic peptides and polypeptides can be: for MHC Class 115 residues or less in length and usually consist of between about 8 and about 11 residues, particularly 9 or 10 residues; for MHC Class II, 6-30 residues, inclusive.

[0378] If desirable, a longer peptide can be designed in several ways. In one case, when presentation likelihoods of peptides on HLA alleles are predicted or known, a longer peptide could consist of either: (1) individual presented peptides with an extensions of 2-5 amino acids toward the N- and C-terminus of each corresponding gene product; (2) a concatenation of some or all of the presented peptides with extended sequences for each. In another case, when sequencing reveals a long (>10 residues) epitope sequence present, a longer peptide would consist of: (3) the entire stretch of novel infectious disease-specific amino acids—thus bypassing the need for computational or in vitro test-based selection of the strongest HLA-presented shorter peptide. In both cases, use of a longer peptide allows endogenous processing by patient cells and may lead to more effective antigen presentation leading to increased T cell responses. Longer peptides can also include a full-length protein, a protein subunit, a protein domain, and combinations thereof of a peptide, such as those expressed in an infectious disease organism. Longer peptides (e.g., full-length protein, protein subunit, or protein domain) and combinations thereof can be included to stimulate a B cell response.

[0379] Antigenic peptides and polypeptides can be presented on an HLA protein. In some aspects antigenic peptides and polypeptides are presented on an HLA protein with greater affinity than a wild-type peptide. In some aspects, an antigenic peptide or polypeptide can have an IC50 of at least less than 5000 nM, at least less than 1000 nM, at least less than 500 nM, at least less than 250 nM, at least less than 200 nM, at least less than 150 nM, at least less than 100 nM, at least less than 50 nM or less.

[0380] In some aspects, antigenic peptides and polypeptides do not stimulate an autoimmune response and/or invoke immunological tolerance when administered to a subject.

[0381] Also provided are compositions comprising at least two or more antigenic peptides. In some embodiments the composition contains at least two distinct peptides. At least two distinct peptides can be derived from the same polypeptide. By distinct polypeptides is meant that the peptide vary by length, amino acid sequence, or both. The peptides can be derived from any polypeptide known to or suspected to be associated with an infectious disease organism, or peptides derived from any polypeptide known to or have been found to have altered expression in an infected cell in comparison to a normal cell or tissue (e.g., an infectious disease polynucleotide or polypeptide, including infectious disease polynucleotides or polypeptides with expression restricted to a host cell).

[0382] Antigenic peptides and polypeptides having a desired activity or property can be modified to provide certain desired attributes, e.g., improved pharmacological characteristics, while increasing or at least retaining substantially all of the biological activity of the unmodified peptide to bind the desired MHC molecule and activate the appropriate T cell. For instance, antigenic peptide and polypeptides can be subject to various changes, such as substitutions, either conservative or non-conservative, where such changes might provide for certain advantages in their use, such as improved MHC binding, stability or presentation. By conservative substitutions is meant replacing an amino acid residue with another which is biologically and/or chemically similar, e.g., one hydrophobic residue for another, or one polar residue for another. The substitutions include combinations such as Gly, Ala; Val, Ile, Leu, Met; Asp, Glu; Asn, Gln; Ser, Thr; Lys, Arg; and Phe, Tyr. The effect of single amino acid substitutions may also be probed using D-amino acids. Such modifications can be made using well known peptide synthesis procedures, as described in e.g., Merrifield, Science 232:341-347 (1986), Barany & Merrifield, The Peptides, Gross & Meienhofer, eds. (N.Y., Academic Press), pp. 1-284 (1979); and Stewart & Young, Solid Phase Peptide Synthesis, (Rockford, Ill., Pierce), 2d Ed. (1984).

[0383] Modifications of peptides and polypeptides with various amino acid mimetics or unnatural amino acids can be particularly useful in increasing the stability of the peptide and polypeptide in vivo. Stability can be assayed in a number of ways. For instance, peptidases and various biological media, such as human plasma and serum, have been used to test stability. See, e.g., Verhoef et al., Eur. J. Drug Metab Pharmacokin. 11:291-302 (1986). Half-life of the peptides can be conveniently determined using a 25% human serum (v/v) assay. The protocol is generally as follows. Pooled human serum (Type AB, non-heat inactivated) is delipidated by centrifugation before use. The serum is then diluted to 25% with RPMI tissue culture media and used to test peptide stability. At predetermined time intervals a small amount of reaction solution is removed and added to either 6% aqueous trichloracetic acid or ethanol. The cloudy reaction sample is cooled (4 degrees C.) for 15 minutes and then spun to pellet the precipitated serum proteins. The presence of the peptides is then determined by reversed-phase HPLC using stability-specific chromatography conditions.

[0384] The peptides and polypeptides can be modified to provide desired attributes other than improved serum half-life. For instance, the ability of the peptides to stimulate CTL activity can be enhanced by linkage to a sequence which contains at least one epitope that is capable of inducing a T helper cell response. Immunogenic peptides/T helper conjugates can be linked by a spacer molecule. The spacer is typically comprised of relatively small, neutral molecules, such as amino acids or amino acid mimetics, which are substantially uncharged under physiological conditions. The spacers are typically selected from, e.g., Ala, Gly, or other neutral spacers of nonpolar amino acids or neutral polar amino acids. It will be understood that the optionally present spacer need not be comprised of the same residues and thus can be a hetero- or homo-oligomer. When present, the spacer will usually be at least one or two residues, more usually three to six residues. Alternatively, the peptide can be linked to the T helper peptide without a spacer.

[0385] Polypeptides encoding antigens can be modified to alter processing of the polypeptides, such as protease cleavage and/or other post-translation processing. Polypeptides encoding antigens can be modified such that the antigen favors a specific conformation. Polypeptides encoding antigens can be modified such that the mutations (e.g., one or more missense mutations) disrupt a specific conformation in the antigen, such as through the introduction of prolines that disrupt secondary and tertiary structures (e.g., alpha-helix or beta-sheet formation). Altering, reducing, or eliminating processing or conformation changes may, in some instances, bias the antigen to favor states favorable to neutralizing antibody production. In a series of illustrative examples, SARS-CoV-2 Spike mutations at amino acids 682, 815, 987, and 988 are engineered to bias the Spike protein to remain in a predominantly prefusion state, a potentially preferable state for antibody-mediated neutralization. Specifically, without wishing to be bound by theory, mutations at R682 (e.g., R682V) disrupt the Furin cleavage site involved in processing Spike into S1 and S2; mutations at R815 (e.g., R815N) disrupt the cleavage site within S2; and mutations at K986 and V987, such as K986P and V987P introducing two prolines, that interfere with the secondary structure of Spike making it less likely to be processed from the pre to post fusion state. Accordingly, an antigen cassette can encode a modified Spike protein having at least one mutation selected from: a Spike R682V mutation, a Spike R815N mutation, a Spike K986P mutation, a Spike V987P mutation, and combinations thereof with reference the Wuhan-Hu-1 isolate (see SEQ ID NO:59 reference and SEQ ID NO:60/SEQ ID NO:90 containing mutations). Modified polypeptide sequences can be at least 60%, 70%, 80%, or 90% identical to a native SARS-CoV-2 polypeptide sequence. Modified polypeptide sequences can be at least 91%, 92%, 93%, or 94% identical to a native SARS-CoV-2 polypeptide sequence. Modified polypeptide sequences can be at least 95%, 96%, 97%, 98%, or 99% identical to a native SARS-CoV-2 polypeptide sequence. Modified polypeptide sequences can be at least 99.1%, 99.2%, 99.3%, 99.4%, 99.5%, 99.6%, 99.7%, 99.8%, or 99.9% identical to a native SARS-CoV-2 polypeptide sequence.

[0386] An antigenic peptide can be linked to the T helper peptide either directly or via a spacer either at the amino or carboxy terminus of the peptide. The amino terminus of either the antigenic peptide or the T helper peptide can be acylated. Exemplary T helper peptides include tetanus toxoid 830-843, influenza 307-319, malaria circumsporozoite 382-398 and 378-389.

[0387] Proteins or peptides can be made by any technique known to those of skill in the art, including the expression of proteins, polypeptides or peptides through standard molecular biological techniques, the isolation of proteins or peptides from natural sources, or the chemical synthesis of proteins or peptides. The nucleotide and protein, polypeptide and peptide sequences corresponding to various genes have been previously disclosed, and can be found at computerized databases known to those of ordinary skill in the art. One such database is the National Center for Biotechnology Information's Genbank and GenPept databases located at the National Institutes of Health website. The coding regions for known genes can be amplified and/or expressed using the techniques disclosed herein or as would be known to those of ordinary skill in the art. Alternatively, various commercial preparations of proteins, polypeptides and peptides are known to those of skill in the art.

[0388] In a further aspect, an antigen includes a nucleic acid (e.g. polynucleotide) that encodes an antigenic peptide or portion thereof. The polynucleotide can be, e.g., DNA, cDNA, PNA, CNA, RNA (e.g., mRNA), either single- and/or double-stranded, or native or stabilized forms of polynucleotides, such as, e.g., polynucleotides with a phosphorothioate backbone, or combinations thereof and it may or may not contain introns. A polynucleotide sequence encoding an antigen can be sequence-optimized to improve expression, such as through improving transcription, translation, post-transcriptional processing, and/or RNA stability. For example, polynucleotide sequence encoding an antigen can be codon-optimized. “Codon-optimization” herein refers to replacing infrequently used codons, with respect to codon bias of a given organism, with frequently used synonymous codons. Polynucleotide sequences can be optimized to improve post-transcriptional processing, for example optimized to reduce unintended splicing, such as through removal of splicing motifs (e.g., canonical and/or cryptic/non-canonical splice donor, branch, and/or acceptor sequences) and/or introduction of exogenous splicing motifs (e.g., splice donor, branch, and/or acceptor sequences) to bias favored splicing events. Exogenous intron sequences include, but are not limited to, those derived from SV40 (e.g., an SV40 mini-intron [SEQ ID NO:88]) and derived from immunoglobulins (e.g., human β-globin gene). Exogenous intron sequences can be incorporated between a promoter/enhancer sequence and the antigen(s) sequence. Exogenous intron sequences for use in expression vectors are described in more detail in Callendret et al. (Virology. 2007 Jul. 5; 363(2): 288-302), herein incorporated by reference for all purposes. Polynucleotide sequences can be optimized to improve transcript stability, for example through removal of RNA instability motifs (e.g., AU-rich elements and 3′ UTR motifs) and/or repetitive nucleotide sequences. Polynucleotide sequences can be optimized to improve accurate transcription, for example through removal of cryptic transcriptional initiators and/or terminators. Polynucleotide sequences can be optimized to improve translation and translational accuracy, for example through removal of cryptic AUG start codons, premature polyA sequences, and/or secondary structure motifs. Polynucleotide sequences can be optimized to improve nuclear export of transcripts, such as through addition of a Constitutive Transport Element (CTE), RNA Transport Element (RTE), or Woodchuck Posttranscriptional Regulatory Element (WPRE). Nuclear export signals for use in expression vectors are described in more detail in Callendret et al. (Virology. 2007 Jul. 5; 363(2): 288-302), herein incorporated by reference for all purposes. Polynucleotide sequences can be optimized with respect to GC content, for example to reflect the average GC content of a given organism. Sequence optimization can balance one or more sequence properties, such as transcription, translation, post-transcriptional processing, and/or RNA stability. Sequence optimization can generate an optimal sequence balancing each of transcription, translation, post-transcriptional processing, and RNA stability. Sequence optimization algorithms are known to those of skill in the art, such as GeneArt (Thermo Fisher), Codon Optimization Tool (IDT), Cool Tool, SGI-DNA (La Jolla California). One or more regions of an antigen-encoding protein can be sequence-optimized separately. As a non-limiting illustrative example, SARS-CoV-2 Spike protein can be sequence-optimized (or unoptimized) in the S1 region of the protein and the S2 region is separately optimized (e.g., optimized using a different algorithm and/or optimized for one or more sequence properties specific for the S2 region).

[0389] A method disclosed herein can also include identifying one or more T cells that are antigen-specific for at least one of the antigens in the subset. In some embodiments, the identification comprises co-culturing the one or more T cells with one or more of the antigens in the subset under conditions that expand the one or more antigen-specific T cells. In further embodiments, the identification comprises contacting the one or more T cells with a tetramer comprising one or more of the antigens in the subset under conditions that allow binding between the T cell and the tetramer. In even further embodiments, the method disclosed herein can also include identifying one or more T cell receptors (TCR) of the one or more identified T cells. In certain embodiments, identifying the one or more T cell receptors comprises sequencing the T cell receptor sequences of the one or more identified T cells. The method disclosed herein can further comprise genetically engineering a plurality of T cells to express at least one of the one or more identified T cell receptors; culturing the plurality of T cells under conditions that expand the plurality of T cells; and infusing the expanded T cells into the subject. In some embodiments, genetically engineering the plurality of T cells to express at least one of the one or more identified T cell receptors comprises cloning the T cell receptor sequences of the one or more identified T cells into an expression vector; and transfecting each of the plurality of T cells with the expression vector. In some embodiments, the method disclosed herein further comprises culturing the one or more identified T cells under conditions that expand the one or more identified T cells; and infusing the expanded T cells into the subject.

[0390] Also disclosed herein is an isolated T cell that is antigen-specific for at least one selected antigen in the subset.

[0391] A still further aspect provides an expression vector capable of expressing a polypeptide or portion thereof. Expression vectors for different cell types are well known in the art and can be selected without undue experimentation. Generally, DNA is inserted into an expression vector, such as a plasmid, in proper orientation and correct reading frame for expression. If necessary, DNA can be linked to the appropriate transcriptional and translational regulatory control nucleotide sequences recognized by the desired host, although such controls are generally available in the expression vector. The vector is then introduced into the host through standard techniques. Guidance can be found e.g. in Sambrook et al. (1989) Molecular Cloning, A Laboratory Manual, Cold Spring Harbor Laboratory, Cold Spring Harbor, N.Y.

### V. Vaccine Compositions

[0392] Also disclosed herein is an immunogenic composition, e.g., a vaccine composition, capable of raising a specific immune response, e.g., an infectious disease organism-specific immune response. Vaccine compositions typically comprise one or a plurality of antigens, e.g., selected using a method described herein. Vaccine compositions can also be referred to as vaccines.

[0393] A vaccine can contain between 1 and 30 peptides, 2, 3, 4, 5, 6, 7, 8, 9, 10, 11, 12, 13, 14, 15, 16, 17, 18, 19, 20, 21, 22, 23, 24, 25, 26, 27, 28, 29, or 30 different peptides, 6, 7, 8, 9, 10 11, 12, 13, or 14 different peptides, or 12, 13 or 14 different peptides. Peptides can include post-translational modifications. A vaccine can contain between 1 and 100 or more nucleotide sequences, 2, 3, 4, 5, 6, 7, 8, 9, 10, 11, 12, 13, 14, 15, 16, 17, 18, 19, 20, 21, 22, 23, 24, 25, 26, 27, 28, 29, 30, 31, 32, 33, 34, 35, 36, 37, 38, 39, 40, 41, 42, 43, 44, 45, 46, 47, 48, 49, 50, 51, 52, 53, 54, 55, 56, 57, 58, 59, 60, 61, 62, 63, 64, 65, 66, 67, 68, 69, 70, 71, 72, 73, 74, 75, 76, 77, 78, 79, 80, 81, 82, 83, 84, 85, 86, 87, 88, 89, 90, 91, 92, 93, 94, 95, 96, 97, 98, 99, 100 or more different nucleotide sequences, 6, 7, 8, 9, 10 11, 12, 13, or 14 different nucleotide sequences, or 12, 13 or 14 different nucleotide sequences. A vaccine can contain between 1 and 30 antigen sequences, 2, 3, 4, 5, 6, 7, 8, 9, 10, 11, 12, 13, 14, 15, 16, 17, 18, 19, 20, 21, 22, 23, 24, 25, 26, 27, 28, 29, 30, 31, 32, 33, 34, 35, 36, 37, 38, 39, 40, 41, 42, 43, 44, 45, 46, 47, 48, 49, 50, 51, 52, 53, 54, 55, 56, 57, 58, 59, 60, 61, 62, 63, 64, 65, 66, 67, 68, 69, 70, 71, 72, 73, 74, 75, 76, 77, 78, 79, 80, 81, 82, 83, 84, 85, 86, 87, 88, 89, 90, 91, 92, 93, 94, 95, 96, 97, 98, 99, 100 or more different antigen sequences, 6, 7, 8, 9, 10 11, 12, 13, or 14 different antigen sequences, or 12, 13 or 14 different antigen sequences.

[0394] A vaccine can contain between 1 and 30 antigen-encoding nucleic acid sequences, 2, 3, 4, 5, 6, 7, 8, 9, 10, 11, 12, 13, 14, 15, 16, 17, 18, 19, 20, 21, 22, 23, 24, 25, 26, 27, 28, 29, 30, 31, 32, 33, 34, 35, 36, 37, 38, 39, 40, 41, 42, 43, 44, 45, 46, 47, 48, 49, 50, 51, 52, 53, 54, 55, 56, 57, 58, 59, 60, 61, 62, 63, 64, 65, 66, 67, 68, 69, 70, 71, 72, 73, 74, 75, 76, 77, 78, 79, 80, 81, 82, 83, 84, 85, 86, 87, 88, 89, 90, 91, 92, 93, 94, 95, 96, 97, 98, 99, 100 or more different antigen-encoding nucleic acid sequences, 6, 7, 8, 9, 10 11, 12, 13, or 14 different antigen-encoding nucleic acid sequences, or 12, 13 or 14 different antigen-encoding nucleic acid sequences. Antigen-encoding nucleic acid sequences can refer to the antigen encoding portion of an “antigen cassette.” Features of an antigen cassette are described in greater detail herein. An antigen-encoding nucleic acid sequence can contain one or more epitope-encoding nucleic acid sequences (e.g., an antigen-encoding nucleic acid sequence encoding concatenated T cell epitopes).

[0395] A vaccine can contain between 1 and 30 distinct epitope-encoding nucleic acid sequences, 2, 3, 4, 5, 6, 7, 8, 9, 10, 11, 12, 13, 14, 15, 16, 17, 18, 19, 20, 21, 22, 23, 24, 25, 26, 27, 28, 29, 30, 31, 32, 33, 34, 35, 36, 37, 38, 39, 40, 41, 42, 43, 44, 45, 46, 47, 48, 49, 50, 51, 52, 53, 54, 55, 56, 57, 58, 59, 60, 61, 62, 63, 64, 65, 66, 67, 68, 69, 70, 71, 72, 73, 74, 75, 76, 77, 78, 79, 80, 81, 82, 83, 84, 85, 86, 87, 88, 89, 90, 91, 92, 93, 94, 95, 96, 97, 98, 99, 100 or more distinct epitope-encoding nucleic acid sequences, 6, 7, 8, 9, 10 11, 12, 13, or 14 distinct epitope-encoding nucleic acid sequences, or 12, 13 or 14 distinct epitope-encoding nucleic acid sequences. Epitope-encoding nucleic acid sequences can refer to sequences for individual epitope sequences, such as each of the T cell epitopes in an antigen-encoding nucleic acid sequence encoding concatenated T cell epitopes.

[0396] A vaccine can contain at least two repeats of an epitope-encoding nucleic acid sequence. A used herein, a “repeat” refers to two or more iterations of an identical nucleic acid epitope-encoding nucleic acid sequence (inclusive of the optional 5′ linker sequence and/or the optional 3′ linker sequences described herein) within an antigen-encoding nucleic acid sequence. In one example, the antigen-encoding nucleic acid sequence portion of a cassette encodes at least two repeats of an epitope-encoding nucleic acid sequence. In further non-limiting examples, the antigen-encoding nucleic acid sequence portion of a cassette encodes more than one distinct epitope, and at least one of the distinct epitopes is encoded by at least two repeats of the nucleic acid sequence encoding the distinct epitope (i.e., at least two distinct epitope-encoding nucleic acid sequences). In illustrative non-limiting examples, an antigen-encoding nucleic acid sequence encodes epitopes A, B, and C encoded by epitope-encoding nucleic acid sequences epitope-encoding sequence A (E_{A}), epitope-encoding sequence B (E_{B}), and epitope-encoding sequence C (E_{C}), and exemplary antigen-encoding nucleic acid sequences having repeats of at least one of the distinct epitopes are illustrated by, but is not limited to, the formulas below:
[0397] Repeat of one distinct epitope (repeat of epitope A):

E_{A}-E_{B}-E_{C}-E_{A}; or

E_{A}-E_{A}-E_{B}-E_{C}
[0398] Repeat of multiple distinct epitopes (repeats of epitopes A, B, and C):

E_{A}-E_{B}-E_{C}-E_{A}-E_{B}-E_{C}; or

E_{A}-E_{A}-E_{B}-E_{B}-E_{C}-E_{C}
[0399] Multiple repeats of multiple distinct epitopes (repeats of epitopes A, B, and C):

E_{A}-E_{B}-E_{C}-E_{A}-E_{B}-E_{C}-E_{A}-E_{B}-E_{C}; or

E_{A}-E_{A}-E_{A}-E_{B}-E_{B}-E_{B}-E_{C}-E_{C}-E_{C}

[0400] The above examples are not limiting and the antigen-encoding nucleic acid sequences having repeats of at least one of the distinct epitopes can encode each of the distinct epitopes in any order or frequency. For example, the order and frequency can be a random arrangement of the distinct epitopes, e.g., in an example with epitopes A, B, and C, by the formula E_{A}-E_{B}-E_{C}-E_{C}-E_{A}-E_{B}-E_{A}-E_{C}-E_{A}-E_{C}-E_{C}-E_{B}.

[0401] Also provided for herein is an antigen-encoding cassette, the antigen-encoding cassette having at least one antigen-encoding nucleic acid sequence described, from 5′ to 3′, by the formula:

(Eₓ-(E^{N}ₐ)_{y})_{z}
[0402] where E represents a nucleotide sequence comprising at least one of the at least one distinct epitope-encoding nucleic acid sequences,
[0403] n represents the number of separate distinct epitope-encoding nucleic acid sequences and is any integer including 0,
[0404] E^{N} represents a nucleotide sequence comprising the separate distinct epitope-encoding nucleic acid sequence for each corresponding n,
[0405] for each iteration of z: x=0 or 1, y=0 or 1 for each n, and at least one of x or y=1, and z=2 or greater, wherein the antigen-encoding nucleic acid sequence comprises at least two iterations of E, a given E^{N}, or a combination thereof.

[0406] Each E or E^{N} can independently comprise any epitope-encoding nucleic acid sequence described herein (e.g., a nucleotide sequence encoding a polypeptide sequence as set forth in Table A, Table B, and/or Table C). For example, Each E or E^{N} can independently comprises a nucleotide sequence described, from 5′ to 3′, by the formula (L5_{b}-N_{c}-L3_{d}), where N comprises the distinct epitope-encoding nucleic acid sequence associated with each E or E^{N}, where c=1, L⁵ comprises a 5′ linker sequence, where b=0 or 1, and L3 comprises a 3′ linker sequence, where d=0 or 1. Epitopes and linkers that can be used are further described herein.

[0407] Repeats of an epitope-encoding nucleic acid sequences (inclusive of optional 5′ linker sequence and/or the optional 3′ linker sequences) can be linearly linked directly to one another (e.g., E_{A}-E_{A}- . . . as illustrated above). Repeats of an epitope-encoding nucleic acid sequences can be separated by one or more additional nucleotides sequences. In general, repeats of an epitope-encoding nucleic acid sequences can be separated by any size nucleotide sequence applicable for the compositions described herein. In one example, repeats of an epitope-encoding nucleic acid sequences can be separated by a separate distinct epitope-encoding nucleic acid sequence (e.g., E_{A}-E_{B}-E_{C}-E_{A} . . . , as illustrated above). In examples where repeats are separated by a single separate distinct epitope-encoding nucleic acid sequence, and each epitope-encoding nucleic acid sequences (inclusive of optional 5′ linker sequence and/or the optional 3′ linker sequences) encodes a peptide 25 amino acids in length, the repeats can be separated by 75 nucleotides, such as in antigen-encoding nucleic acid represented by E_{A}-E_{B}-E_{A} . . . , E_{A} is separated by 75 nucleotides. In an illustrative example, an antigen-encoding nucleic acid having the sequence VTNTEMFVTAPDNLGYMYEVQWPGQTQPQIANCSVYDFFVWLHYYSVRDTVTNTEMF VTAPDNLGYMYEVQWPGQTQPQIANCSVYDFFVWLHYYSVRDT (SEQ ID NO: 115) encoding repeats of 25mer antigens Trp1 (VTNTEMFVTAPDNLGYMYEVQWPGQ; SEQ ID NO: 116) and Trp2 (TQPQIANCSVYDFFVWLHYYSVRDT; SEQ ID NO: 117), the repeats of Trp1 are separated by the 25mer Trp2 and thus the repeats of the Trp1 epitope-encoding nucleic acid sequences are separated the 75 nucleotide Trp2 epitope-encoding nucleic acid sequence. In examples where repeats are separated by 2, 3, 4, 5, 6, 7, 8, or 9 separate distinct epitope-encoding nucleic acid sequence, and each epitope-encoding nucleic acid sequences (inclusive of optional 5′ linker sequence and/or the optional 3′ linker sequences) encodes a peptide 25 amino acids in length, the repeats can be separated by 150, 225, 300, 375, 450, 525, 600, or 675 nucleotides, respectively.

[0408] In one embodiment, different peptides and/or polypeptides or nucleotide sequences encoding them are selected so that the peptides and/or polypeptides capable of associating with different MHC molecules, such as different MHC class I molecules and/or different MHC class II molecules. In some aspects, one vaccine composition comprises coding sequence for peptides and/or polypeptides capable of associating with the most frequently occurring MHC class I molecules and/or different MHC class II molecules. Hence, vaccine compositions can comprise different fragments capable of associating with at least 2 preferred, at least 3 preferred, or at least 4 preferred MHC class I molecules and/or different MHC class II molecules.

[0409] The vaccine composition can stimulate a specific cytotoxic T-cell response and a specific helper T-cell response.

[0410] The vaccine composition can stimulate a specific B-cell response (e.g., an antibody response).

[0411] The vaccine composition can stimulate a specific cytotoxic T-cell response, a specific helper T-cell response, and/or a specific B-cell response. The vaccine composition can stimulate a specific cytotoxic T-cell response and a specific B-cell response. The vaccine composition can stimulate a specific helper T-cell response and a specific B-cell response. The vaccine composition can stimulate a specific cytotoxic T-cell response, a specific helper T-cell response, and a specific B-cell response.

[0412] A combination of vaccine compositions can stimulate a specific cytotoxic T-cell response, a specific helper T-cell response, and/or a specific B-cell response. Vaccine compositions can be homologous and stimulate a specific cytotoxic T-cell response, a specific helper T-cell response, and/or a specific B-cell response in combination. Vaccine compositions can be homologous and stimulate a specific cytotoxic T-cell response, a specific helper T-cell response, and a specific B-cell response in combination. Vaccine compositions can be heterologous and stimulate a specific cytotoxic T-cell response, a specific helper T-cell response, and/or a specific B-cell response in combination. Vaccine compositions can be heterologous and stimulate a specific cytotoxic T-cell response, a specific helper T-cell response, and a specific B-cell response in combination. Heterologous vaccines include an identical antigen cassette encoded by different vaccine platforms, e.g., a viral vaccine (e.g., a ChAdV-based platform) and a mRNA vaccine (e.g., a SAM-based platform). Heterologous vaccines include different antigen cassettes (e.g., a Spike cassette and a separate T cell epitope encoding cassette, or epitopes/antigens derived from different subtype isolates of SARS-CoV-2, such as Spike protein variants from a Wuhan-Hu-1 subtype isolate and a B.1.351 subtype isolate) encoded by the same vaccine platform, e.g., either a viral vaccine (e.g., a ChAdV-based platform) or a mRNA vaccine (e.g., a SAM-based platform). Heterologous vaccines include different antigen cassettes (e.g., a Spike cassette and a separate T cell epitope encoding cassette or epitopes/antigens derived from different isolate/subtype of SARS-CoV-2, such as Spike protein variants from a Wuhan-Hu-1 subtype isolate and a B.1.351 subtype isolate) encoded by different vaccine platforms, e.g., a viral vaccine (e.g., a ChAdV-based platform) and a mRNA vaccine (e.g., a SAM-based platform). For example, as an illustrative non-limiting example, a viral vaccine (e.g., a ChAdV-based platform) can in particular stimulate a robust cytotoxic T-cell response and a mRNA vaccine (e.g., a SAM-based platform) can in particular stimulate a robust B-cell response.

[0413] A vaccine composition can further comprise an adjuvant and/or a carrier. Examples of useful adjuvants and carriers are given herein below. A composition can be associated with a carrier such as e.g. a protein or an antigen-presenting cell such as, e.g., a dendritic cell (DC) capable of presenting the peptide to a T-cell.

[0414] Adjuvants are any substance whose admixture into a vaccine composition increases or otherwise modifies the immune response to an antigen. Carriers can be scaffold structures, for example a polypeptide or a polysaccharide, to which an antigen, is capable of being associated. Optionally, adjuvants are conjugated covalently or non-covalently.

[0415] The ability of an adjuvant to increase an immune response to an antigen is typically manifested by a significant or substantial increase in an immune-mediated reaction, or reduction in disease symptoms. For example, an increase in humoral immunity is typically manifested by a significant increase in the titer of antibodies raised to the antigen, and an increase in T-cell activity is typically manifested in increased cell proliferation, or cellular cytotoxicity, or cytokine secretion. An adjuvant may also alter an immune response, for example, by changing a primarily humoral or Th response into a primarily cellular, or Th response.

[0416] Suitable adjuvants include, but are not limited to 1018 ISS, alum, aluminum salts, Amplivax, AS15, BCG, CP-870,893, CpG7909, CyaA, dSLIM, GM-CSF, IC30, IC31, Imiquimod, ImuFact IMP321, IS Patch, ISS, ISCOMATRIX, Juvlmmune, LipoVac, MF59, monophosphoryl lipid A, Montanide IMS 1312, Montanide ISA 206, Montanide ISA 50V, Montanide ISA-51, OK-432, OM-174, OM-197-MP-E_{C}, ONTAK, PepTel vector system, PLG microparticles, resiquimod, SRL172, Virosomes and other Virus-like particles, YF-17D, VEGF trap, R848, beta-glucan, Pam3Cys, Aquila's QS21 stimulon (Aquila Biotech, Worcester, Mass., USA) which is derived from saponin, mycobacterial extracts and synthetic bacterial cell wall mimics, and other proprietary adjuvants such as Ribi's Detox. Quil or Superfos. Adjuvants such as incomplete Freund's or GM-CSF are useful. Several immunological adjuvants (e.g., MF59) specific for dendritic cells and their preparation have been described previously (Dupuis M, et al., Cell Immunol. 1998; 186(1):18-27; Allison A C; Dev Biol Stand. 1998; 92:3-11). Also cytokines can be used. Several cytokines have been directly linked to influencing dendritic cell migration to lymphoid tissues (e.g., TNF-alpha), accelerating the maturation of dendritic cells into efficient antigen-presenting cells for T-lymphocytes (e.g., GM-CSF, IL-1 and IL-4) (U.S. Pat. No. 5,849,589, specifically incorporated herein by reference in its entirety) and acting as immunoadjuvants (e.g., IL-12) (Gabrilovich D I, et al., J Immunother Emphasis Tumor Immunol. 1996 (6):414-418).

[0417] CpG immunostimulatory oligonucleotides have also been reported to enhance the effects of adjuvants in a vaccine setting. Other TLR binding molecules such as RNA binding TLR 7, TLR 8 and/or TLR 9 may also be used.

[0418] Other examples of useful adjuvants include, but are not limited to, chemically modified CpGs (e.g. CpR, Idera), Poly(I:C) (e.g. polyi:CI2U), non-CpG bacterial DNA or RNA as well as immunoactive small molecules and antibodies such as cyclophosphamide, sunitinib, bevacizumab, celebrex, NCX-4016, sildenafil, tadalafil, vardenafil, sorafinib, XL-999, CP-547632, pazopanib, ZD2171, AZD2171, ipilimumab, tremelimumab, and SC58175, which may act therapeutically and/or as an adjuvant. The amounts and concentrations of adjuvants and additives can readily be determined by the skilled artisan without undue experimentation. Additional adjuvants include colony-stimulating factors, such as Granulocyte Macrophage Colony Stimulating Factor (GM-CSF, sargramostim).

[0419] A vaccine composition can comprise more than one different adjuvant. Furthermore, a therapeutic composition can comprise any adjuvant substance including any of the above or combinations thereof. It is also contemplated that a vaccine and an adjuvant can be administered together or separately in any appropriate sequence.

[0420] A carrier (or excipient) can be present independently of an adjuvant. The function of a carrier can for example be to increase the molecular weight of in particular mutant to increase activity or immunogenicity, to confer stability, to increase the biological activity, or to increase serum half-life. Furthermore, a carrier can aid presenting peptides to T-cells. A carrier can be any suitable carrier known to the person skilled in the art, for example a protein or an antigen presenting cell. A carrier protein could be but is not limited to keyhole limpet hemocyanin, serum proteins such as transferrin, bovine serum albumin, human serum albumin, thyroglobulin or ovalbumin, immunoglobulins, or hormones, such as insulin or palmitic acid. For immunization of humans, the carrier is generally a physiologically acceptable carrier acceptable to humans and safe. However, tetanus toxoid and/or diphtheria toxoid are suitable carriers. Alternatively, the carrier can be dextrans for example Sepharose.

[0421] Cytotoxic T-cells (CTLs) recognize an antigen in the form of a peptide bound to an MHC molecule rather than the intact foreign antigen itself. The MHC molecule itself is located at the cell surface of an antigen presenting cell. Thus, an activation of CTLs is possible if a trimeric complex of peptide antigen, MHC molecule, and APC is present. Correspondingly, it may enhance the immune response if not only the peptide is used for activation of CTLs, but if additionally APCs with the respective MHC molecule are added. Therefore, in some embodiments a vaccine composition additionally contains at least one antigen presenting cell.

[0422] Antigens can also be included in viral vector-based vaccine platforms, such as vaccinia, fowlpox, self-replicating alphavirus, marabavirus, adenovirus (See, e.g., Tatsis et al., Adenoviruses, Molecular Therapy (2004) 10, 616-629), or lentivirus, including but not limited to second, third or hybrid second/third generation lentivirus and recombinant lentivirus of any generation designed to target specific cell types or receptors (See, e.g., Hu et al., Immunization Delivered by Lentiviral Vectors for Cancer and Infectious Diseases, Immunol Rev. (2011) 239(1): 45-61, Sakuma et al., Lentiviral vectors: basic to translational, Biochem J. (2012) 443(3):603-18, Cooper et al., Rescue of splicing-mediated intron loss maximizes expression in lentiviral vectors containing the human ubiquitin C promoter, Nucl. Acids Res. (2015) 43 (1): 682-690, Zufferey et al., Self-Inactivating Lentivirus Vector for Safe and Efficient In Vivo Gene Delivery, J. Virol. (1998) 72 (12): 9873-9880). Dependent on the packaging capacity of the above mentioned viral vector-based vaccine platforms, this approach can deliver one or more nucleotide sequences that encode one or more antigen peptides. The sequences may be flanked by non-mutated sequences, may be separated by linkers or may be preceded with one or more sequences targeting a subcellular compartment (See, e.g., Gros et al., Prospective identification of neoantigen-specific lymphocytes in the peripheral blood of melanoma patients, Nat Med. (2016) 22 (4):433-8, Stronen et al., Targeting of cancer neoantigens with donor-derived T cell receptor repertoires, Science. (2016) 352 (6291):1337-41, Lu et al., Efficient identification of mutated cancer antigens recognized by T cells associated with durable tumor regressions, Clin Cancer Res. (2014) 20(13):3401-10). Upon introduction into a host, infected cells express the antigens, and thereby stimulate a host immune (e.g., CTL) response against the peptide(s). Vaccinia vectors and methods useful in immunization protocols are described in, e.g., U.S. Pat. No. 4,722,848. Another vector is BCG (Bacille Calmette Guerin). BCG vectors are described in Stover et al. (Nature 351:456-460 (1991)). A wide variety of other vaccine vectors useful for therapeutic administration or immunization of antigens, e.g., Salmonella typhi vectors, and the like will be apparent to those skilled in the art from the description herein.

### V.A. Antigen Cassette

[0423] The methods employed for the selection of one or more antigens, the cloning and construction of a “cassette” and its insertion into a viral vector are within the skill in the art given the teachings provided herein. By “antigen cassette” or “cassette” is meant the combination of a selected antigen or plurality of antigens (e.g., antigen-encoding nucleic acid sequences) and the other regulatory elements necessary to transcribe the antigen(s) and express the transcribed product. The selected antigen or plurality of antigens can refer to distinct epitope sequences, e.g., an antigen-encoding nucleic acid sequence in the cassette can encode an epitope-encoding nucleic acid sequence (or plurality of epitope-encoding nucleic acid sequences) such that the epitopes are transcribed and expressed. An antigen or plurality of antigens can be operatively linked to regulatory components in a manner which permits transcription. Such components include conventional regulatory elements that can drive expression of the antigen(s) in a cell transfected with the viral vector. Thus the antigen cassette can also contain a selected promoter which is linked to the antigen(s) and located, with other, optional regulatory elements, within the selected viral sequences of the recombinant vector. A cassette can have one or more antigen-encoding nucleic acid sequences, such as a cassette containing multiple antigen-encoding nucleic acid sequences each independently operably linked to separate promoters and/or linked together using other multicistonic systems, such as 2A ribosome skipping sequence elements (e.g., E2A, P2A, F2A, or T2A sequences) or Internal Ribosome Entry Site (IRES) sequence elements. A linker can also have a cleavage site, such as a TEV or furin cleavage site. Linkers with cleavage sites can be used in combination with other elements, such as those in a multicistronic system. In a non-limiting illustrative example, a furin protease cleavage site can be used in conjuction with a 2A ribosome skipping sequence element such that the furin protease cleavage site is configured to facilitate removal of the 2A sequence following translation. In a cassette containing more than one antigen-encoding nucleic acid sequences, each antigen-encoding nucleic acid sequence can contain one or more epitope-encoding nucleic acid sequences (e.g., an antigen-encoding nucleic acid sequence encoding concatenated T cell epitopes). In illustrative examples of multicistronic formats, cassettes encoding SARS-CoV-2 antigens are configured as follows: (1) endogenous 26S promoter-Spike protein-T2A-Membrane protein, or (2) endogenous 26S promoter-Spike protein-26S promoter-concatenated T cell epitopes.

[0424] Useful promoters can be constitutive promoters or regulated (inducible) promoters, which will enable control of the amount of antigen(s) to be expressed. For example, a desirable promoter is that of the cytomegalovirus immediate early promoter/enhancer [see, e.g., Boshart et al, Cell, 41:521-530 (1985)]. Another desirable promoter includes the Rous sarcoma virus LTR promoter/enhancer. Still another promoter/enhancer sequence is the chicken cytoplasmic beta-actin promoter [T. A. Kost et al, Nucl. Acids Res., 11(23):8287 (1983)]. Other suitable or desirable promoters can be selected by one of skill in the art.

[0425] The antigen cassette can also include nucleic acid sequences heterologous to the viral vector sequences including sequences providing signals for efficient polyadenylation of the transcript (poly(A), poly-A or pA) and introns with functional splice donor and acceptor sites. A common poly-A sequence which is employed in the exemplary vectors of this invention is that derived from the papovavirus SV-40. The poly-A sequence generally can be inserted in the cassette following the antigen-based sequences and before the viral vector sequences. A common intron sequence can also be derived from SV-40, and is referred to as the SV-40 T intron sequence. An antigen cassette can also contain such an intron, located between the promoter/enhancer sequence and the antigen(s). Selection of these and other common vector elements are conventional [see, e.g., Sambrook et al, “Molecular Cloning. A Laboratory Manual.”, 2d edit., Cold Spring Harbor Laboratory, New York (1989) and references cited therein] and many such sequences are available from commercial and industrial sources as well as from Genbank.

[0426] An antigen cassette can have one or more antigens. For example, a given cassette can include 1-10, 1-20, 1-30, 10-20, 15-25, 15-20, 1, 2, 3, 4, 5, 6, 7, 8, 9, 10, 11, 12, 13, 14, 15, 16, 17, 18, 19, 20, or more antigens. Antigens can be linked directly to one another. Antigens can also be linked to one another with linkers. Antigens can be in any orientation relative to one another including N to C or C to N.

[0427] As described elsewhere, the antigen cassette can be located in the site of any selected deletion in the viral vector backbone, such as the site of the E1 gene region deletion or E3 gene region deletion of a ChAd-based vector or the deleted structural proteins of a VEE backbone, among others which may be selected.

[0428] The antigen encoding sequence (e.g., cassette or one or more of the nucleic acid sequences encoding an immunogenic polypeptide in the cassette) can be described using the following formula to describe the ordered sequence of each element, from 5′ to 3′:

Pₐ-(L5_{b}-N_{c}-L3_{d})_{X}-(G5ₑ-U_{f})_{Y}-G3_{g}

wherein P comprises the second promoter nucleotide sequence, where a=0 or 1, where c=1, N comprises one of the SARS-CoV-2 derived nucleic acid sequences described herein, optionally wherein each N encodes a polypeptide sequence as set forth in Table A, Table B, and/or Table C,L5 comprises the 5′ linker sequence, where b=0 or 1, L³ comprises the 3′ linker sequence, where d=0 or 1, G5 comprises one of the at least one nucleic acid sequences encoding a GPGPG amino acid linker (SEQ ID NO: 56), where e=0 or 1, G3 comprises one of the at least one nucleic acid sequences encoding a GPGPG amino acid linker (SEQ ID NO: 56), where g=0 or 1, U comprises one of the at least one MHC class II epitope-encoding nucleic acid sequence, where f=1, X=1 to 400, where for each X the corresponding N_{c} is a SARS-CoV-2 derived nucleic acid sequence, and Y=0, 1, or 2, where for each Y the corresponding U_{f} is a (1) universal MHC class II epitope-encoding nucleic acid sequence, optionally wherein the at least one universal sequence comprises at least one of Tetanus toxoid and PADRE, or (2) a MHC class II SARS-CoV-2 derived epitope-encoding nucleic acid sequence. In some aspects, for each X the corresponding N_{c} is a distinct SARS-CoV-2 derived nucleic acid sequence. In some aspects, for each Y the corresponding U_{f} is a distinct universal MHC class II epitope-encoding nucleic acid sequence or a distinct MHC class II SARS-CoV-2 derived epitope-encoding nucleic acid sequence. The above antigen encoding sequence formula in some instances only describes the portion of an antigen cassette encoding concatenated epitope sequences, such as concatenated T cell epitopes. For example, in cassettes encoding concatenated T cell epitopes and one or more full-length SARS-CoV-2 proteins, the above antigen encoding sequence formula describes the concatenated T cell epitopes and separately the cassette encodes one or more full-length SARS-CoV-2 proteins that are linked optionally using a multicistonic system, such as 2A ribosome skipping sequence elements (e.g., E2A, P2A, F2A, or T2A sequences), a Internal Ribosome Entry Site (IRES) sequence elements, and/or independently operably linked to a separate promoter.

[0429] In one example, elements present include where b=1, d=1, e=1, g=1, h=1, X=18, Y=2, and the vector backbone comprises a ChAdV68 vector, a=1, P is a CMV promoter, the at least one second poly(A) sequence is present, wherein the second poly(A) sequence is an exogenous poly(A) sequence to the vector backbone, and optionally wherein the exogenous poly(A) sequence comprises an SV40 poly(A) signal sequence or a BGH poly(A) signal sequence, and each N encodes a MHC class I epitope 7-15 amino acids in length, a MHC class II epitope, an epitope capable of stimulating a B cell response, or combinations thereof, L5 is a native 5′ linker sequence that encodes a native N-terminal amino acid sequence of the epitope, and wherein the 5′ linker sequence encodes a peptide that is at least 3 amino acids in length, L3 is a native 3′ linker sequence that encodes a native C-terminal amino acid sequence of the epitope, and wherein the 3′ linker sequence encodes a peptide that is at least 3 amino acids in length, and U is each of a PADRE class II sequence and a Tetanus toxoid MHC class II sequence. The above antigen encoding sequence formula in some instances only describes the portion of an antigen cassette encoding concatenated epitope sequences, such as concatenated T cell epitopes.

[0430] In one example, elements present include where b=1, d=1, e=1, g=1, h=1, X=18, Y=2, and the vector backbone comprises a Venezuelan equine encephalitis virus vector, a=0, and the antigen cassette is operably linked to an endogenous 26S promoter, and the at least one polyadenylation poly(A) sequence is a poly(A) sequence of at least 80 consecutive A nucleotides (SEQ ID NO: 27940) provided by the backbone, and each N encodes a MHC class I epitope 7-15 amino acids in length, a MHC class II epitope, an epitope capable of stimulating a B cell response, or combinations thereof, L5 is a native 5′ linker sequence that encodes a native N-terminal amino acid sequence of the epitope, and wherein the 5′ linker sequence encodes a peptide that is at least 3 amino acids in length, L3 is a native 3′ linker sequence that encodes a native C-terminal amino acid sequence of the epitope, and wherein the 3′ linker sequence encodes a peptide that is at least 3 amino acids in length, and U is each of a PADRE class II sequence and a Tetanus toxoid MHC class II sequence.

[0431] The antigen encoding sequence can be described using the following formula to describe the ordered sequence of each element, from 5′ to 3′:

(Pa-(L5_{b}-N_{c}-L3_{d})_{X})_{Z}-(P2ₕ-(G5ₑ-U_{f})_{Y})_{W}-G3_{g}

wherein P and P2 comprise promoter nucleotide sequences, N comprises one of the SARS-CoV-2 derived nucleic acid sequences described herein (e.g., N encodes a polypeptide sequence as set forth in Table A, Table B, Table C, and/or Table 7), L5 comprises a 5′ linker sequence, L3 comprises a 3′ linker sequence, G5 comprises a nucleic acid sequences encoding an amino acid linker, G3 comprises one of the at least one nucleic acid sequences encoding an amino acid linker, U comprises an MHC class II epitope-encoding nucleic acid sequence, where for each X the corresponding Nc is a SARS-CoV-2 derived nucleic acid sequence, where for each Y the corresponding U_{f} is a (1) universal MHC class II epitope-encoding nucleic acid sequence, optionally wherein the at least one universal sequence comprises at least one of Tetanus toxoid and PADRE, or (2) a MHC class II SARS-CoV-2 derived epitope-encoding nucleic acid sequence. The composition and ordered sequence can be further defined by selecting the number of elements present, for example where a=0 or 1, where b=0 or 1, where c=1, where d=0 or 1, where e=0 or 1, where f=1, where g=0 or 1, where h=0 or 1, X=1 to 400, Y=0, 1, 2, 3, 4 or 5, Z=1 to 400, and W=0, 1, 2, 3, 4 or 5.

[0432] In one example, elements present include where a=0, b=1, d=1, e=1, g=1, h=0, X=10, Y=2, Z=1, and W=1, describing where no additional promoter is present (e.g. only the promoter nucleotide sequence provided by the vector backbone, such as an RNA alphavirus backbone, is present), 10 epitopes are present, a 5′ linker is present for each N, a 3′ linker is present for each N, 2 MHC class II epitopes are present, a linker is present linking the two MHC class II epitopes, a linker is present linking the 5′ end of the two MHC class II epitopes to the 3′ linker of the final MHC class I epitope, and a linker is present linking the 3′ end of the two MHC class II epitopes to the to the vector backbone. Examples of linking the 3′ end of the antigen cassette to the vector backbone include linking directly to the 3′ UTR elements provided by the vector backbone, such as a 3′ 19-nt CSE. Examples of linking the 5′ end of the antigen cassette to the vector backbone include linking directly to a promoter or 5′ UTR element of the vector backbone, such as a 26S promoter sequence, an alphavirus 5′ UTR, a 51-nt CSE, or a 24-nt CSE of an alphavirus vector backbone.

[0433] Other examples include: where a=1 describing where a promoter other than the promoter nucleotide sequence provided by the vector backbone is present; where a=1 and Z is greater than 1 where multiple promoters other than the promoter nucleotide sequence provided by the vector backbone are present each driving expression of 1 or more distinct MHC class I epitope encoding nucleic acid sequences; where h=1 describing where a separate promoter is present to drive expression of the MHC class II epitope-encoding nucleic acid sequences; and where g=0 describing the MHC class II epitope-encoding nucleic acid sequence, if present, is directly linked to the vector backbone.

[0434] Other examples include where each MHC class I epitope that is present can have a 5′ linker, a 3′ linker, neither, or both. In examples where more than one MHC class I epitope is present in the same antigen cassette, some MHC class I epitopes may have both a 5′ linker and a 3′ linker, while other MHC class I epitopes may have either a 5′ linker, a 3′ linker, or neither. In other examples where more than one MHC class I epitope is present in the same antigen cassette, some MHC class I epitopes may have either a 5′ linker or a 3′ linker, while other MHC class I epitopes may have either a 5′ linker, a 3′ linker, or neither.

[0435] In examples where more than one MHC class II epitope is present in the same antigen cassette, some MHC class II epitopes may have both a 5′ linker and a 3′ linker, while other MHC class II epitopes may have either a 5′ linker, a 3′ linker, or neither. In other examples where more than one MHC class II epitope is present in the same antigen cassette, some MHC class II epitopes may have either a 5′ linker or a 3′ linker, while other MHC class II epitopes may have either a 5′ linker, a 3′ linker, or neither.

[0436] Other examples include where each antigen that is present can have a 5′ linker, a 3′ linker, neither, or both. In examples where more than one antigen is present in the same antigen cassette, some antigens may have both a 5′ linker and a 3′ linker, while other antigens may have either a 5′ linker, a 3′ linker, or neither. In other examples where more than one antigen is present in the same antigen cassette, some antigens may have either a 5′ linker or a 3′ linker, while other antigens may have either a 5′ linker, a 3′ linker, or neither.

[0437] The promoter nucleotide sequences P and/or P2 can be the same as a promoter nucleotide sequence provided by the vector backbone, such as a RNA alphavirus backbone. For example, the promoter sequence provided by the vector backbone, Pn and P2, can each comprise a 26S subgenomic promoter or a CMV promoter. The promoter nucleotide sequences P and/or P2 can be different from the promoter nucleotide sequence provided by the vector backbone, as well as can be different from each other.

[0438] The 5′ linker L5 can be a native sequence or a non-natural sequence. Non-natural sequence include, but are not limited to, AAY, RR, and DPP. The 3′ linker L3 can also be a native sequence or a non-natural sequence. Additionally, L5 and L3 can both be native sequences, both be non-natural sequences, or one can be native and the other non-natural. For each X, the amino acid linkers can be 2, 3, 4, 5, 6, 7, 8, 9, 10, 11, 12, 13, 14, 15, 16, 17, 18, 19, 20, 21, 22, 23, 24, 25, 26, 27, 28, 29, 30, 31, 32, 33, 34, 35, 36, 37, 38, 39, 40, 41, 42, 43, 44, 45, 46, 47, 48, 49, 50, 51, 52, 53, 54, 55, 56, 57, 58, 59, 60, 61, 62, 63, 64, 65, 66, 67, 68, 69, 70, 71, 72, 73, 74, 75, 76, 77, 78, 79, 80, 81, 82, 83, 84, 85, 86, 87, 88, 89, 90, 91, 92, 93, 94, 95, 96, 97, 98, 99, 100 or more amino acids in length. For each X, the amino acid linkers can be also be at least 3, at least 4, at least 5, at least 6, at least 7, at least 8, at least 9, at least 10, at least 11, at least 12, at least 13, at least 14, at least 15, at least 16, at least 17, at least 18, at least 19, at least 20, at least 21, at least 22, at least 23, at least 24, at least 25, at least 26, at least 27, at least 28, at least 29, or at least 30 amino acids in length.

[0439] The amino acid linker G5, for each Y, can be 2, 3, 4, 5, 6, 7, 8, 9, 10, 11, 12, 13, 14, 15, 16, 17, 18, 19, 20, 21, 22, 23, 24, 25, 26, 27, 28, 29, 30, 31, 32, 33, 34, 35, 36, 37, 38, 39, 40, 41, 42, 43, 44, 45, 46, 47, 48, 49, 50, 51, 52, 53, 54, 55, 56, 57, 58, 59, 60, 61, 62, 63, 64, 65, 66, 67, 68, 69, 70, 71, 72, 73, 74, 75, 76, 77, 78, 79, 80, 81, 82, 83, 84, 85, 86, 87, 88, 89, 90, 91, 92, 93, 94, 95, 96, 97, 98, 99, 100 or more amino acids in length. For each Y, the amino acid linkers can be also be at least 3, at least 4, at least 5, at least 6, at least 7, at least 8, at least 9, at least 10, at least 11, at least 12, at least 13, at least 14, at least 15, at least 16, at least 17, at least 18, at least 19, at least 20, at least 21, at least 22, at least 23, at least 24, at least 25, at least 26, at least 27, at least 28, at least 29, or at least 30 amino acids in length.

[0440] The amino acid linker G3 can be 2, 3, 4, 5, 6, 7, 8, 9, 10, 11, 12, 13, 14, 15, 16, 17, 18, 19, 20, 21, 22, 23, 24, 25, 26, 27, 28, 29, 30, 31, 32, 33, 34, 35, 36, 37, 38, 39, 40, 41, 42, 43, 44, 45, 46, 47, 48, 49, 50, 51, 52, 53, 54, 55, 56, 57, 58, 59, 60, 61, 62, 63, 64, 65, 66, 67, 68, 69, 70, 71, 72, 73, 74, 75, 76, 77, 78, 79, 80, 81, 82, 83, 84, 85, 86, 87, 88, 89, 90, 91, 92, 93, 94, 95, 96, 97, 98, 99, 100 or more amino acids in length. G3 can be also be at least 3, at least 4, at least 5, at least 6, at least 7, at least 8, at least 9, at least 10, at least 11, at least 12, at least 13, at least 14, at least 15, at least 16, at least 17, at least 18, at least 19, at least 20, at least 21, at least 22, at least 23, at least 24, at least 25, at least 26, at least 27, at least 28, at least 29, or at least 30 amino acids in length.

[0441] For each X, each N can encode a MHC class I epitope, a MHC class II epitope, an epitope capable of stimulating a B cell response, or a combination thereof. For each X, N can encode a combination of a MHC class I epitope, a MHC class II epitope, and an epitope capable of stimulating a B cell response. For each X, N can encode a combination of a MHC class I epitope and a MHC class II epitope. For each X, N can encode a combination of a MHC class I epitope and an epitope capable of stimulating a B cell response. For each X, N can encode a combination of a MHC class II epitope and an epitope capable of stimulating a B cell response. For each X, each N can encode a MHC class I epitope 7-15 amino acids in length. For each X, each N can also encodes a MHC class I epitope 5, 6, 7, 8, 9, 10, 11, 12, 13, 14, 15, 16, 17, 18, 19, 20, 21, 22, 23, 24, 25, 26, 27, 28, 29, or 30 amino acids in length. For each X, each N can also encodes a MHC class I epitope at least 5, at least 6, at least 7, at least 8, at least 9, at least 10, at least 11, at least 12, at least 13, at least 14, at least 15, at least 16, at least 17, at least 18, at least 19, at least 20, at least 21, at least 22, at least 23, at least 24, at least 25, at least 26, at least 27, at least 28, at least 29, or at least 30 amino acids in length. For each X, each N can encode a MHC class II epitope. For each X, each N can encode an epitope capable of stimulating a B cell response.

[0442] The cassette encoding the one or more antigens can be 700 nucleotides or less. The cassette encoding the one or more antigens can be 700 nucleotides or less and encode 2 distinct epitope-encoding nucleic acid sequences (e.g., encode 2 distinct SARS-CoV-2 derived nucleic acid sequence encoding an immunogenic polypeptide). The cassette encoding the one or more antigens can be 700 nucleotides or less and encode at least 2 distinct epitope-encoding nucleic acid sequences. The cassette encoding the one or more antigens can be 700 nucleotides or less and encode 3 distinct epitope-encoding nucleic acid sequences. The cassette encoding the one or more antigens can be 700 nucleotides or less and encode at least 3 distinct epitope-encoding nucleic acid sequences. The cassette encoding the one or more antigens can be 700 nucleotides or less and include 1-10, 1-5, 1, 2, 3, 4, 5, 6, 7, 8, 9, 10, or more antigens.

[0443] The cassette encoding the one or more antigens can be between 375-700 nucleotides in length. The cassette encoding the one or more antigens can be between 375-700 nucleotides in length and encode 2 distinct epitope-encoding nucleic acid sequences. The cassette encoding the one or more antigens can be between 375-700 nucleotides in length and encode at least 2 distinct epitope-encoding nucleic acid sequences. The cassette encoding the one or more antigens can be between 375-700 nucleotides in length and encode 3 distinct epitope-encoding nucleic acid sequences. The cassette encoding the one or more antigens be between 375-700 nucleotides in length and encode at least 3 distinct epitope-encoding nucleic acid sequences. The cassette encoding the one or more antigens can be between 375-700 nucleotides in length and include 1-10, 1-5, 1, 2, 3, 4, 5, 6, 7, 8, 9, 10, or more antigens.

[0444] The cassette encoding the one or more antigens can be 600, 500, 400, 300, 200, or 100 nucleotides in length or less. The cassette encoding the one or more antigens can be 600, 500, 400, 300, 200, or 100 nucleotides in length or less and encode 2 distinct epitope-encoding nucleic acid sequences. The cassette encoding the one or more antigens can be 600, 500, 400, 300, 200, or 100 nucleotides in length or less and encode at least 2 distinct epitope-encoding nucleic acid sequences. The cassette encoding the one or more antigens can be 600, 500, 400, 300, 200, or 100 nucleotides in length or less and encode 3 distinct epitope-encoding nucleic acid sequences. The cassette encoding the one or more antigens can be 600, 500, 400, 300, 200, or 100 nucleotides in length or less and encode at least 3 distinct epitope-encoding nucleic acid sequences. The cassette encoding the one or more antigens can be 600, 500, 400, 300, 200, or 100 nucleotides in length or less and include 1-10, 1-5, 1, 2, 3, 4, 5, 6, 7, 8, 9, 10, or more antigens.

[0445] The cassette encoding the one or more antigens can be between 375-600, between 375-500, or between 375-400 nucleotides in length. The cassette encoding the one or more antigens can be between 375-600, between 375-500, or between 375-400 nucleotides in length and encode 2 distinct epitope-encoding nucleic acid sequences. The cassette encoding the one or more antigens can be between 375-600, between 375-500, or between 375-400 nucleotides in length and encode at least 2 distinct epitope-encoding nucleic acid sequences. The cassette encoding the one or more antigens can be between 375-600, between 375-500, or between 375-400 nucleotides in length and encode 3 distinct epitope-encoding nucleic acid sequences. The cassette encoding the one or more antigens can be between 375-600, between 375-500, or between 375-400 nucleotides in length and encode at least 3 distinct epitope-encoding nucleic acid sequences. The cassette encoding the one or more antigens can be between 375-600, between 375-500, or between 375-400 nucleotides in length and include 1-10, 1-5, 1, 2, 3, 4, 5, 6, 7, 8, 9, 10, or more antigens.

### V.B. Additional Considerations for Vaccine Design and Manufacture

[0446] After all of the above antigen filters are applied, more candidate antigens may still be available for vaccine inclusion than the vaccine technology can support. Additionally, uncertainty about various aspects of the antigen analysis may remain and tradeoffs may exist between different properties of candidate vaccine antigens. Thus, in place of predetermined filters at each step of the selection process, an integrated multi-dimensional model can be considered that places candidate antigens in a space with at least the following axes and optimizes selection using an integrative approach.
[0447] 1. Risk of auto-immunity or tolerance (risk of germline) (lower risk of auto-immunity is typically preferred)
[0448] 2. Probability of sequencing artifact (lower probability of artifact is typically preferred)
[0449] 3. Probability of immunogenicity (higher probability of immunogenicity is typically preferred)
[0450] 4. Probability of presentation (higher probability of presentation is typically preferred)
[0451] 5. Gene expression (higher expression is typically preferred)
[0452] 6. Coverage of HLA genes (larger number of HLA molecules involved in the presentation of a set of antigens may lower the probability that an infected cell will escape immune attack via downregulation or mutation of HLA molecules)
[0453] 7. Coverage of HLA classes (covering both HLA-I and HLA-II may increase the probability of therapeutic response and decrease the probability of infectious disease escape)

[0454] Additionally, optionally, antigens can be deprioritized (e.g., excluded) from the vaccination if they are predicted to be presented by HLA alleles lost or inactivated in either all or part of the patient's infected cell. HLA allele loss can occur by either somatic mutation, loss of heterozygosity, or homozygous deletion of the locus. Methods for detection of HLA allele somatic mutation are well known in the art, e.g. (Shukla et al., 2015). Methods for detection of somatic LOH and homozygous deletion (including for HLA locus) are likewise well described. (Carter et al., 2012; McGranahan et al., 2017; Van Loo et al., 2010). Antigens can also be deprioritized if mass-spectrometry data indicates a predicted antigen is not presented by a predicted HLA allele.

### V.C. Self-Amplifying RNA Vectors

[0455] In general, all self-amplifying RNA (SAM) vectors contain a self-amplifying backbone derived from a self-replicating virus. The term “self-amplifying backbone” refers to minimal sequence(s) of a self-replicating virus that allows for self-replication of the viral genome. For example, minimal sequences that allow for self-replication of an alphavirus can include conserved sequences for nonstructural protein-mediated amplification (e.g., a nonstructural protein 1 (nsP1) gene, a nsP2 gene, a nsP3 gene, a nsP4 gene, and/or a polyA sequence). A self-amplifying backbone can also include sequences for expression of subgenomic viral RNA (e.g., a 26S promoter element for an alphavirus). SAM vectors can be positive-sense RNA polynucleotides or negative-sense RNA polynucleotides, such as vectors with backbones derived from positive-sense or negative-sense self-replicating viruses. Self-replicating viruses include, but are not limited to, alphaviruses, flaviviruses (e.g., Kunjin virus), measles viruses, and rhabdoviruses (e.g., rabies virus and vesicular stomatitis virus). Examples of SAM vector systems derived from self-replicating viruses are described in greater detail in Lundstrom (Molecules. 2018 Dec. 13; 23(12). pii: E3310. doi: 10.3390/molecules23123310), herein incorporated by reference for all purposes.

### V.C.1. Alphavirus Biology

[0456] Alphaviruses are members of the family Togaviridae, and are positive-sense single stranded RNA viruses. Members are typically classified as either Old World, such as Sindbis, Ross River, Mayaro, Chikungunya, and Semliki Forest viruses, or New World, such as eastern equine encephalitis, Aura, Fort Morgan, or Venezuelan equine encephalitis virus and its derivative strain TC-83 (Strauss Microbrial Review 1994). A natural alphavirus genome is typically around 12 kb in length, the first two-thirds of which contain genes encoding non-structural proteins (nsPs) that form RNA replication complexes for self-replication of the viral genome, and the last third of which contains a subgenomic expression cassette encoding structural proteins for virion production (Frolov RNA 2001).

[0457] A model lifecycle of an alphavirus involves several distinct steps (Strauss Microbrial Review 1994, Jose Future Microbiol 2009). Following virus attachment to a host cell, the virion fuses with membranes within endocytic compartments resulting in the eventual release of genomic RNA into the cytosol. The genomic RNA, which is in a plus-strand orientation and comprises a 5′ methylguanylate cap and 3′ polyA tail, is translated to produce non-structural proteins nsP1-4 that form the replication complex. Early in infection, the plus-strand is then replicated by the complex into a minus-stand template. In the current model, the replication complex is further processed as infection progresses, with the resulting processed complex switching to transcription of the minus-strand into both full-length positive-strand genomic RNA, as well as the 26S subgenomic positive-strand RNA containing the structural genes. Several conserved sequence elements (CSEs) of alphavirus have been identified to potentially play a role in the various RNA replication steps including; a complement of the 5′ UTR in the replication of plus-strand RNAs from a minus-strand template, a 51-nt CSE in the replication of minus-strand synthesis from the genomic template, a 24-nt CSE in the junction region between the nsPs and the 26S RNA in the transcription of the subgenomic RNA from the minus-strand, and a 3′ 19-nt CSE in minus-strand synthesis from the plus-strand template.

[0458] Following the replication of the various RNA species, virus particles are then typically assembled in the natural lifecycle of the virus. The 26S RNA is translated and the resulting proteins further processed to produce the structural proteins including capsid protein, glycoproteins E1 and E2, and two small polypeptides E3 and 6K (Strauss 1994). Encapsidation of viral RNA occurs, with capsid proteins normally specific for only genomic RNA being packaged, followed by virion assembly and budding at the membrane surface.

### V.C.2. Alphavirus as a Delivery Vector

[0459] Alphaviruses (including alphavirus sequences, features, and other elements) can be used to generate alphavirus-based delivery vectors (also be referred to as alphavirus vectors, alphavirus viral vectors, alphavirus vaccine vectors, self-replicating RNA (srRNA) vectors, or self-amplifying RNA (samRNA) vectors). Alphaviruses have previously been engineered for use as expression vector systems (Pushko 1997, Rheme 2004). Alphaviruses offer several advantages, particularly in a vaccine setting where heterologous antigen expression can be desired. Due to its ability to self-replicate in the host cytosol, alphavirus vectors are generally able to produce high copy numbers of the expression cassette within a cell resulting in a high level of heterologous antigen production. Additionally, the vectors are generally transient, resulting in improved biosafety as well as reduced induction of immunological tolerance to the vector. The public, in general, also lacks pre-existing immunity to alphavirus vectors as compared to other standard viral vectors, such as human adenovirus. Alphavirus based vectors also generally result in cytotoxic responses to infected cells. Cytotoxicity, to a certain degree, can be important in a vaccine setting to properly illicit an immune response to the heterologous antigen expressed. However, the degree of desired cytotoxicity can be a balancing act, and thus several attenuated alphaviruses have been developed, including the TC-83 strain of VEE. Thus, an example of an antigen expression vector described herein can utilize an alphavirus backbone that allows for a high level of antigen expression, stimulates a robust immune response to antigen, does not stimulate an immune response to the vector itself, and can be used in a safe manner. Furthermore, the antigen expression cassette can be designed to stimulate different levels of an immune response through optimization of which alphavirus sequences the vector uses, including, but not limited to, sequences derived from VEE or its attenuated derivative TC-83.

[0460] Several expression vector design strategies have been engineered using alphavirus sequences (Pushko 1997). In one strategy, a alphavirus vector design includes inserting a second copy of the 26S promoter sequence elements downstream of the structural protein genes, followed by a heterologous gene (Frolov 1993). Thus, in addition to the natural non-structural and structural proteins, an additional subgenomic RNA is produced that expresses the heterologous protein. In this system, all the elements for production of infectious virions are present and, therefore, repeated rounds of infection of the expression vector in non-infected cells can occur.

[0461] Another expression vector design makes use of helper virus systems (Pushko 1997). In this strategy, the structural proteins are replaced by a heterologous gene. Thus, following self-replication of viral RNA mediated by still intact non-structural genes, the 26S subgenomic RNA provides for expression of the heterologous protein. Traditionally, additional vectors that expresses the structural proteins are then supplied in trans, such as by co-transfection of a cell line, to produce infectious virus. A system is described in detail in U.S. Pat. No. 8,093,021, which is herein incorporated by reference in its entirety, for all purposes. The helper vector system provides the benefit of limiting the possibility of forming infectious particles and, therefore, improves biosafety. In addition, the helper vector system reduces the total vector length, potentially improving the replication and expression efficiency. Thus, an example of an antigen expression vector described herein can utilize an alphavirus backbone wherein the structural proteins are replaced by an antigen cassette, the resulting vector both reducing biosafety concerns, while at the same time promoting efficient expression due to the reduction in overall expression vector size.

### V.C.3. Self-Amplifying Virus Production In Vitro

[0462] A convenient technique well-known in the art for RNA production is in vitro transcription (IVT). In this technique, a DNA template of the desired vector is first produced by techniques well-known to those in the art, including standard molecular biology techniques such as cloning, restriction digestion, ligation, gene synthesis, and polymerase chain reaction (PCR).

[0463] The DNA template contains a RNA polymerase promoter at the 5′ end of the sequence desired to be transcribed into RNA (e.g., SAM). Promoters include, but are not limited to, bacteriophage polymerase promoters such as T3, T7, K11, or SP6. Depending on the specific RNA polymerase promoter sequence chosen, additional 5′ nucleotides can transcribed in addition to the desired sequence. For example, the canonical T7 promoter can be referred to by the sequence TAATACGACTCACTATAGG (SEQ ID NO: 118), in which an IVT reaction using the DNA template TAATACGACTCACTATAGGN (SEQ ID NO: 119) for the production of desired sequence N will result in the mRNA sequence GG-N. In general, and without wishing to be bound by theory, T7 polymerase more efficiently transcribes RNA transcripts beginning with guanosine. In instances where additional 5′ nucleotides are not desired (e.g., no additional GG), the RNA polymerase promoter contained in the DNA template can be a sequence the results in transcripts containing only the 5′ nucleotides of the desired sequence, e.g., a SAM having the native 5′ sequence of the self-replicating virus from which the SAM vector is derived. For example, a minimal T7 promoter can be referred to by the sequence TAATACGACTCACTATA (SEQ ID NO: 120), in which an IVT reaction using the DNA template TAATACGACTCACTATAN (SEQ ID NO: 121) for the production of desired sequence N will result in the mRNA sequence N. Likewise, a minimal SP6 promoter referred to by the sequence ATTTAGGTGACACTATA (SEQ ID NO: 122) can be used to generate transcripts without additional 5′ nucleotides. In a typical IVT reaction, the DNA template is incubated with the appropriate RNA polymerase enzyme, buffer agents, and nucleotides (NTPs).

[0464] The resulting RNA polynucleotide can optionally be further modified including, but limited to, addition of a 5′ cap structure such as 7-methylguanosine or a related structure, and optionally modifying the 3′ end to include a polyadenylate (polyA) tail. In a modified IVT reaction, RNA is capped with a 5′ cap structure co-transcriptionally through the addition of cap analogues during IVT. Cap analogues can include dinucleotide (m⁷G-ppp-N) cap analogues or trinucleotide (m⁷G-ppp-N-N) cap analogues, where N represents a nucleotide or modified nucleotide (e.g., ribonucleosides including, but not limited to, adenosine, guanosine, cytidine, and uradine). Exemplary cap analogues and their use in IVT reactions are also described in greater detail in U.S. Pat. No. 10,519,189, herein incorporated by reference for all purposes. As discussed, T7 polymerase more efficiently transcribes RNA transcripts beginning with guanosine. To improve transcription efficiency in templates that do not begin with guanosine, a trinucleotide cap analogue (m⁷G-ppp-N-N) can be used. The trinucleotide cap analogue can increase transcription efficiency 2, 3, 4, 5, 6, 7, 8, 9, 10, 11, 12, 13, 14, 15, 16, 17, 18, 19, 20-fold or more relative to an IVT reaction using a dinucleotide cap analogue (m⁷G-ppp-N).

[0465] A 5′ cap structure can also be added following transcription, such as using a vaccinia capping system (e.g., NEB Cat. No. M2080) containing mRNA 2′-O-methyltransferase and S-Adenosyl methionine.

[0466] The resulting RNA polynucleotide can optionally be further modified separately from or in addition to the capping techniques described including, but limited to, modifying the 3′ end to include a polyadenylate (polyA) tail.

[0467] The RNA can then be purified using techniques well-known in the field, such as phenol-chloroform extraction.

### V.C.4. Delivery Via Lipid Nanoparticle

[0468] An important aspect to consider in vaccine vector design is immunity against the vector itself (Riley 2017). This may be in the form of preexisting immunity to the vector itself, such as with certain human adenovirus systems, or in the form of developing immunity to the vector following administration of the vaccine. The latter is an important consideration if multiple administrations of the same vaccine are performed, such as separate priming and boosting doses, or if the same vaccine vector system is to be used to deliver different antigen cassettes.

[0469] In the case of alphavirus vectors, the standard delivery method is the previously discussed helper virus system that provides capsid, E1, and E2 proteins in trans to produce infectious viral particles. However, it is important to note that the E1 and E2 proteins are often major targets of neutralizing antibodies (Strauss 1994). Thus, the efficacy of using alphavirus vectors to deliver antigens of interest to target cells may be reduced if infectious particles are targeted by neutralizing antibodies.

[0470] An alternative to viral particle mediated gene delivery is the use of nanomaterials to deliver expression vectors (Riley 2017). Nanomaterial vehicles, importantly, can be made of non-immunogenic materials and generally avoid stimulating immunity to the delivery vector itself. These materials can include, but are not limited to, lipids, inorganic nanomaterials, and other polymeric materials. Lipids can be cationic, anionic, or neutral. The materials can be synthetic or naturally derived, and in some instances biodegradable. Lipids can include fats, cholesterol, phospholipids, lipid conjugates including, but not limited to, polyethyleneglycol (PEG) conjugates (PEGylated lipids), waxes, oils, glycerides, and fat soluble vitamins.

[0471] Lipid nanoparticles (LNPs) are an attractive delivery system due to the amphiphilic nature of lipids enabling formation of membranes and vesicle like structures (Riley 2017). In general, these vesicles deliver the expression vector by absorbing into the membrane of target cells and releasing nucleic acid into the cytosol. In addition, LNPs can be further modified or functionalized to facilitate targeting of specific cell types. Another consideration in LNP design is the balance between targeting efficiency and cytotoxicity. Lipid compositions generally include defined mixtures of cationic, neutral, anionic, and amphipathic lipids. In some instances, specific lipids are included to prevent LNP aggregation, prevent lipid oxidation, or provide functional chemical groups that facilitate attachment of additional moieties. Lipid composition can influence overall LNP size and stability. In an example, the lipid composition comprises dilinoleylmethyl-4-dimethylaminobutyrate (MC3) or MC3-like molecules. MC3 and MC3-like lipid compositions can be formulated to include one or more other lipids, such as a PEG or PEG-conjugated lipid, a sterol, or neutral lipids.

[0472] Nucleic-acid vectors, such as expression vectors, exposed directly to serum can have several undesirable consequences, including degradation of the nucleic acid by serum nucleases or off-target stimulation of the immune system by the free nucleic acids. Therefore, encapsulation of the alphavirus vector can be used to avoid degradation, while also avoiding potential off-target effects. In certain examples, an alphavirus vector is fully encapsulated within the delivery vehicle, such as within the aqueous interior of an LNP. Encapsulation of the alphavirus vector within an LNP can be carried out by techniques well-known to those skilled in the art, such as microfluidic mixing and droplet generation carried out on a microfluidic droplet generating device. Such devices include, but are not limited to, standard T-junction devices or flow-focusing devices. In an example, the desired lipid formulation, such as MC3 or MC3-like containing compositions, is provided to the droplet generating device in parallel with the alphavirus delivery vector and other desired agents, such that the delivery vector and desired agents are fully encapsulated within the interior of the MC3 or MC3-like based LNP. In an example, the droplet generating device can control the size range and size distribution of the LNPs produced. For example, the LNP can have a size ranging from 1 to 1000 nanometers in diameter, e.g., 1, 10, 50, 100, 500, or 1000 nanometers. Following droplet generation, the delivery vehicles encapsulating the expression vectors can be further treated or modified to prepare them for administration.

### V.D. Chimpanzee Adenovirus (ChAd)

### V.D.1. Viral Delivery with Chimpanzee Adenovirus

[0473] Vaccine compositions for delivery of one or more antigens (e.g., via an antigen cassette) can be created by providing adenovirus nucleotide sequences of chimpanzee origin, a variety of novel vectors, and cell lines expressing chimpanzee adenovirus genes. A nucleotide sequence of a chimpanzee C68 adenovirus (also referred to herein as ChAdV68) can be used in a vaccine composition for antigen delivery (See SEQ ID NO: 1). Use of C68 adenovirus derived vectors is described in further detail in U.S. Pat. No. 6,083,716, which is herein incorporated by reference in its entirety, for all purposes.

[0474] In a further aspect, provided herein is a recombinant adenovirus comprising the DNA sequence of a chimpanzee adenovirus such as C68 and an antigen cassette operatively linked to regulatory sequences directing its expression. The recombinant virus is capable of infecting a mammalian, preferably a human, cell and capable of expressing the antigen cassette product in the cell. In this vector, the native chimpanzee E1 gene, and/or E3 gene, and/or E4 gene can be deleted. An antigen cassette can be inserted into any of these sites of gene deletion. The antigen cassette can include an antigen against which a primed immune response is desired.

[0475] In another aspect, provided herein is a mammalian cell infected with a chimpanzee adenovirus such as C68.

[0476] In still a further aspect, a novel mammalian cell line is provided which expresses a chimpanzee adenovirus gene (e.g., from C68) or functional fragment thereof.

[0477] In still a further aspect, provided herein is a method for delivering an antigen cassette into a mammalian cell comprising the step of introducing into the cell an effective amount of a chimpanzee adenovirus, such as C68, that has been engineered to express the antigen cassette.

[0478] Still another aspect provides a method for stimulating an immune response in a mammalian host. The method can comprise the step of administering to the host an effective amount of a recombinant chimpanzee adenovirus, such as C68, comprising an antigen cassette that encodes one or more antigens from the infection against which the immune response is targeted.

[0479] Still another aspect provides a method for stimulating an immune response in a mammalian host to treat or prevent a disease in a subject, such as an infectious disease. The method can comprise the step of administering to the host an effective amount of a recombinant chimpanzee adenovirus, such as C68, comprising an antigen cassette that encodes one or more antigens, such as from the infectious disease against which the immune response is targeted.

[0480] Also disclosed is a non-simian mammalian cell that expresses a chimpanzee adenovirus gene obtained from the sequence of SEQ ID NO: 1. The gene can be selected from the group consisting of the adenovirus E1A, E1B, E2A, E2B, E3, E4, L1, L2, L3, L4 and L5 of SEQ ID NO: 1.

[0481] Also disclosed is a nucleic acid molecule comprising a chimpanzee adenovirus DNA sequence comprising a gene obtained from the sequence of SEQ ID NO: 1. The gene can be selected from the group consisting of said chimpanzee adenovirus E1A, E1B, E2A, E2B, E3, E4, L1, L2, L3, L4 and L5 genes of SEQ ID NO: 1. In some aspects the nucleic acid molecule comprises SEQ ID NO: 1. In some aspects the nucleic acid molecule comprises the sequence of SEQ ID NO: 1, lacking at least one gene selected from the group consisting of E1A, E1B, E2A, E2B, E3, E4, L1, L2, L3, L4 and L5 genes of SEQ ID NO: 1.

[0482] Also disclosed is a vector comprising a chimpanzee adenovirus DNA sequence obtained from SEQ ID NO: 1 and an antigen cassette operatively linked to one or more regulatory sequences which direct expression of the cassette in a heterologous host cell, optionally wherein the chimpanzee adenovirus DNA sequence comprises at least the cis-elements necessary for replication and virion encapsidation, the cis-elements flanking the antigen cassette and regulatory sequences. In some aspects, the chimpanzee adenovirus DNA sequence comprises a gene selected from the group consisting of E1A, E1B, E2A, E2B, E3, E4, L1, L2, L3, L4 and L5 gene sequences of SEQ ID NO: 1. In some aspects the vector can lack the E1A and/or E1B gene.

[0483] Also disclosed herein is a adenovirus vector comprising: a partially deleted E4 gene comprising a deleted or partially-deleted E4orf2 region and a deleted or partially-deleted E4orf3 region, and optionally a deleted or partially-deleted E4orf4 region. The partially deleted E4 can comprise an E4 deletion of at least nucleotides 34,916 to 35,642 of the sequence shown in SEQ ID NO:1, and wherein the vector comprises at least nucleotides 2 to 36,518 of the sequence set forth in SEQ ID NO:1. The partially deleted E4 can comprise an E4 deletion of at least a partial deletion of nucleotides 34,916 to 34,942 of the sequence shown in SEQ ID NO:1, at least a partial deletion of nucleotides 34,952 to 35,305 of the sequence shown in SEQ ID NO:1, and at least a partial deletion of nucleotides 35,302 to 35,642 of the sequence shown in SEQ ID NO:1, and wherein the vector comprises at least nucleotides 2 to 36,518 of the sequence set forth in SEQ ID NO:1 The partially deleted E4 can comprise an E4 deletion of at least nucleotides 34,980 to 36,516 of the sequence shown in SEQ ID NO:1, and wherein the vector comprises at least nucleotides 2 to 36,518 of the sequence set forth in SEQ ID NO:1. The partially deleted E4 can comprise an E4 deletion of at least nucleotides 34,979 to 35,642 of the sequence shown in SEQ ID NO:1, and wherein the vector comprises at least nucleotides 2 to 36,518 of the sequence set forth in SEQ ID NO:1. The partially deleted E4 can comprise an E4 deletion of at least a partial deletion of E4Orf2, a fully deleted E4Orf3, and at least a partial deletion of E4Orf4. The partially deleted E4 can comprise an E4 deletion of at least a partial deletion of E4Orf2, at least a partial deletion of E4Orf3, and at least a partial deletion of E4Orf4. The partially deleted E4 can comprise an E4 deletion of at least a partial deletion of E4Orf1, a fully deleted E4Orf2, and at least a partial deletion of E4Orf3. The partially deleted E4 can comprise an E4 deletion of at least a partial deletion of E4Orf2 and at least a partial deletion of E4Orf3. The partially deleted E4 can comprise an E4 deletion between the start site of E4Orf1 to the start site of E4Orf5. The partially deleted E4 can be an E4 deletion adjacent to the start site of E4Orf1. The partially deleted E4 can be an E4 deletion adjacent to the start site of E4Orf2. The partially deleted E4 can be an E4 deletion adjacent to the start site of E4Orf3. The partially deleted E4 can be an E4 deletion adjacent to the start site of E4Orf4. The E4 deletion can be at least 50, at least 100, at least 200, at least 300, at least 400, at least 500, at least 600, at least 700, at least 800, at least 900, at least 1000, at least 1100, at least 1200, at least 1300, at least 1400, at least 1500, at least 1600, at least 1700, at least 1800, at least 1900, or at least 2000 nucleotides. The E4 deletion can be at least 700 nucleotides. The E4 deletion can be at least 1500 nucleotides. The E4 deletion can be 50 or less, 100 or less, 200 or less, 300 or less, 400 or less, 500 or less, 600 or less, 700 or less, 800 or less, 900 or less, 1000 or less, 1100 or less, 1200 or less, 1300 or less, 1400 or less, 1500 or less, 1600 or less, 1700 or less, 1800 or less, 1900 or less, or 2000 or less nucleotides. The E4 deletion can be 750 nucleotides or less. The E4 deletion can be at least 1550 nucleotides or less.

[0484] Also disclosed herein is a host cell transfected with a vector disclosed herein such as a C68 vector engineered to expression an antigen cassette. Also disclosed herein is a human cell that expresses a selected gene introduced therein through introduction of a vector disclosed herein into the cell.

[0485] Also disclosed herein is a method for delivering an antigen cassette to a mammalian cell comprising introducing into said cell an effective amount of a vector disclosed herein such as a C68 vector engineered to expression the antigen cassette.

[0486] Also disclosed herein is a method for producing an antigen comprising introducing a vector disclosed herein into a mammalian cell, culturing the cell under suitable conditions and producing the antigen.

### V.D.2. E1-Expressing Complementation Cell Lines

[0487] To generate recombinant chimpanzee adenoviruses (Ad) deleted in any of the genes described herein, the function of the deleted gene region, if essential to the replication and infectivity of the virus, can be supplied to the recombinant virus by a helper virus or cell line, i.e., a complementation or packaging cell line. For example, to generate a replication-defective chimpanzee adenovirus vector, a cell line can be used which expresses the E1 gene products of the human or chimpanzee adenovirus; such a cell line can include HEK293 or variants thereof. The protocol for the generation of the cell lines expressing the chimpanzee E1 gene products (Examples 3 and 4 of U.S. Pat. No. 6,083,716) can be followed to generate a cell line which expresses any selected chimpanzee adenovirus gene.

[0488] An AAV augmentation assay can be used to identify a chimpanzee adenovirus E1-expressing cell line. This assay is useful to identify E1 function in cell lines made by using the E1 genes of other uncharacterized adenoviruses, e.g., from other species. That assay is described in Example 4B of U.S. Pat. No. 6,083,716.

[0489] A selected chimpanzee adenovirus gene, e.g., E1, can be under the transcriptional control of a promoter for expression in a selected parent cell line. Inducible or constitutive promoters can be employed for this purpose. Among inducible promoters are included the sheep metallothionine promoter, inducible by zinc, or the mouse mammary tumor virus (MMTV) promoter, inducible by a glucocorticoid, particularly, dexamethasone. Other inducible promoters, such as those identified in International patent application WO95/13392, incorporated by reference herein can also be used in the production of packaging cell lines. Constitutive promoters in control of the expression of the chimpanzee adenovirus gene can be employed also.

[0490] A parent cell can be selected for the generation of a novel cell line expressing any desired C68 gene. Without limitation, such a parent cell line can be HeLa [ATCC Accession No. CCL 2], A549 [ATCC Accession No. CCL 185], KB [CCL 17], Detroit [e.g., Detroit 510, CCL 72] and WI-38 [CCL 75] cells. Other suitable parent cell lines can be obtained from other sources. Parent cell lines can include CHO, HEK293 or variants thereof, 911, HeLa, A549, LP-293, PER.C6, or AE1-2a.

[0491] An E1-expressing cell line can be useful in the generation of recombinant chimpanzee adenovirus E1 deleted vectors. Cell lines constructed using essentially the same procedures that express one or more other chimpanzee adenoviral gene products are useful in the generation of recombinant chimpanzee adenovirus vectors deleted in the genes that encode those products. Further, cell lines which express other human Ad E1 gene products are also useful in generating chimpanzee recombinant Ads.

### V.D.3. Recombinant Viral Particles as Vectors

[0492] The compositions disclosed herein can comprise viral vectors, that deliver at least one antigen to cells. Such vectors comprise a chimpanzee adenovirus DNA sequence such as C68 and an antigen cassette operatively linked to regulatory sequences which direct expression of the cassette. The C68 vector is capable of expressing the cassette in an infected mammalian cell. The C68 vector can be functionally deleted in one or more viral genes. An antigen cassette comprises at least one antigen under the control of one or more regulatory sequences such as a promoter. Optional helper viruses and/or packaging cell lines can supply to the chimpanzee viral vector any necessary products of deleted adenoviral genes.

[0493] The term “functionally deleted” means that a sufficient amount of the gene region is removed or otherwise altered, e.g., by mutation or modification, so that the gene region is no longer capable of producing one or more functional products of gene expression. Mutations or modifications that can result in functional deletions include, but are not limited to, nonsense mutations such as introduction of premature stop codons and removal of canonical and non-canonical start codons, mutations that alter mRNA splicing or other transcriptional processing, or combinations thereof. If desired, the entire gene region can be removed.

[0494] Modifications of the nucleic acid sequences forming the vectors disclosed herein, including sequence deletions, insertions, and other mutations may be generated using standard molecular biological techniques and are within the scope of this invention.

### V.D.4. Construction of The Viral Plasmid Vector

[0495] The chimpanzee adenovirus C68 vectors useful in this invention include recombinant, defective adenoviruses, that is, chimpanzee adenovirus sequences functionally deleted in the E1a or E1b genes, and optionally bearing other mutations, e.g., temperature-sensitive mutations or deletions in other genes. It is anticipated that these chimpanzee sequences are also useful in forming hybrid vectors from other adenovirus and/or adeno-associated virus sequences. Homologous adenovirus vectors prepared from human adenoviruses are described in the published literature [see, for example, Kozarsky I and II, cited above, and references cited therein, U.S. Pat. No. 5,240,846].

[0496] In the construction of useful chimpanzee adenovirus C68 vectors for delivery of an antigen cassette to a human (or other mammalian) cell, a range of adenovirus nucleic acid sequences can be employed in the vectors. A vector comprising minimal chimpanzee C68 adenovirus sequences can be used in conjunction with a helper virus to produce an infectious recombinant virus particle. The helper virus provides essential gene products required for viral infectivity and propagation of the minimal chimpanzee adenoviral vector. When only one or more selected deletions of chimpanzee adenovirus genes are made in an otherwise functional viral vector, the deleted gene products can be supplied in the viral vector production process by propagating the virus in a selected packaging cell line that provides the deleted gene functions in trans.

### V.D.5. Recombinant Minimal Adenovirus

[0497] A minimal chimpanzee Ad C68 virus is a viral particle containing just the adenovirus cis-elements necessary for replication and virion encapsidation. That is, the vector contains the cis-acting 5′ and 3′ inverted terminal repeat (ITR) sequences of the adenoviruses (which function as origins of replication) and the native 5′ packaging/enhancer domains (that contain sequences necessary for packaging linear Ad genomes and enhancer elements for the E1 promoter). See, for example, the techniques described for preparation of a “minimal” human Ad vector in International Patent Application WO96/13597 and incorporated herein by reference.

### V.D.6. Other Defective Adenoviruses

[0498] Recombinant, replication-deficient adenoviruses can also contain more than the minimal chimpanzee adenovirus sequences. These other Ad vectors can be characterized by deletions of various portions of gene regions of the virus, and infectious virus particles formed by the optional use of helper viruses and/or packaging cell lines.

[0499] As one example, suitable vectors may be formed by deleting all or a sufficient portion of the C68 adenoviral immediate early gene E1a and delayed early gene E1b, so as to eliminate their normal biological functions. Replication-defective E1-deleted viruses are capable of replicating and producing infectious virus when grown on a chimpanzee adenovirus-transformed, complementation cell line containing functional adenovirus E1a and E1b genes which provide the corresponding gene products in trans. Based on the homologies to known adenovirus sequences, it is anticipated that, as is true for the human recombinant E1-deleted adenoviruses of the art, the resulting recombinant chimpanzee adenovirus is capable of infecting many cell types and can express antigen(s), but cannot replicate in most cells that do not carry the chimpanzee E1 region DNA unless the cell is infected at a very high multiplicity of infection.

[0500] As another example, all or a portion of the C68 adenovirus delayed early gene E3 can be eliminated from the chimpanzee adenovirus sequence which forms a part of the recombinant virus.

[0501] Chimpanzee adenovirus C68 vectors can also be constructed having a deletion of the E4 gene. Still another vector can contain a deletion in the delayed early gene E2a.

[0502] Deletions can also be made in any of the late genes L1 through L5 of the chimpanzee C68 adenovirus genome. Similarly, deletions in the intermediate genes IX and IVa2 can be useful for some purposes. Other deletions may be made in the other structural or non-structural adenovirus genes.

[0503] The above discussed deletions can be used individually, i.e., an adenovirus sequence can contain deletions of E1 only. Alternatively, deletions of entire genes or portions thereof effective to destroy or reduce their biological activity can be used in any combination. For example, in one exemplary vector, the adenovirus C68 sequence can have deletions of the E1 genes and the E4 gene, or of the E1, E2a and E3 genes, or of the E1 and E3 genes, or of E1, E2a and E4 genes, with or without deletion of E3, and so on. As discussed above, such deletions can be used in combination with other mutations, such as temperature-sensitive mutations, to achieve a desired result.

[0504] The cassette comprising antigen(s) be inserted optionally into any deleted region of the chimpanzee C68 Ad virus. Alternatively, the cassette can be inserted into an existing gene region to disrupt the function of that region, if desired.

### V.D.7. Helper Viruses

[0505] Depending upon the chimpanzee adenovirus gene content of the viral vectors employed to carry the antigen cassette, a helper adenovirus or non-replicating virus fragment can be used to provide sufficient chimpanzee adenovirus gene sequences to produce an infective recombinant viral particle containing the cassette.

[0506] Useful helper viruses contain selected adenovirus gene sequences not present in the adenovirus vector construct and/or not expressed by the packaging cell line in which the vector is transfected. A helper virus can be replication-defective and contain a variety of adenovirus genes in addition to the sequences described above. The helper virus can be used in combination with the E1-expressing cell lines described herein.

[0507] For C68, the “helper” virus can be a fragment formed by clipping the C terminal end of the C68 genome with SspI, which removes about 1300 bp from the left end of the virus. This clipped virus is then co-transfected into an E1-expressing cell line with the plasmid DNA, thereby forming the recombinant virus by homologous recombination with the C68 sequences in the plasmid.

[0508] Helper viruses can also be formed into poly-cation conjugates as described in Wu et al, J. Biol. Chem., 264:16985-16987 (1989); K. J. Fisher and J. M. Wilson, Biochem. J., 299:49 (Apr. 1, 1994). Helper virus can optionally contain a reporter gene. A number of such reporter genes are known to the art. The presence of a reporter gene on the helper virus which is different from the antigen cassette on the adenovirus vector allows both the Ad vector and the helper virus to be independently monitored. This second reporter is used to enable separation between the resulting recombinant virus and the helper virus upon purification.

### V.D.8. Assembly of Viral Particle and Infection of a Cell Line

[0509] Assembly of the selected DNA sequences of the adenovirus, the antigen cassette, and other vector elements into various intermediate plasmids and shuttle vectors, and the use of the plasmids and vectors to produce a recombinant viral particle can all be achieved using conventional techniques. Such techniques include conventional cloning techniques of cDNA, in vitro recombination techniques (e.g., Gibson assembly), use of overlapping oligonucleotide sequences of the adenovirus genomes, polymerase chain reaction, and any suitable method which provides the desired nucleotide sequence. Standard transfection and co-transfection techniques are employed, e.g., CaPO4 precipitation techniques or liposome-mediated transfection methods such as lipofectamine. Other conventional methods employed include homologous recombination of the viral genomes, plaquing of viruses in agar overlay, methods of measuring signal generation, and the like.

[0510] For example, following the construction and assembly of the desired antigen cassette-containing viral vector, the vector can be transfected in vitro in the presence of a helper virus into the packaging cell line. Homologous recombination occurs between the helper and the vector sequences, which permits the adenovirus-antigen sequences in the vector to be replicated and packaged into virion capsids, resulting in the recombinant viral vector particles.

[0511] The resulting recombinant chimpanzee C68 adenoviruses are useful in transferring an antigen cassette to a selected cell. In in vivo experiments with the recombinant virus grown in the packaging cell lines, the E1-deleted recombinant chimpanzee adenovirus demonstrates utility in transferring a cassette to a non-chimpanzee, preferably a human, cell.

### V.D.9. Use of the Recombinant Virus Vectors

[0512] The resulting recombinant chimpanzee C68 adenovirus containing the antigen cassette (produced by cooperation of the adenovirus vector and helper virus or adenoviral vector and packaging cell line, as described above) thus provides an efficient gene transfer vehicle which can deliver antigen(s) to a subject in vivo or ex vivo.

[0513] The above-described recombinant vectors are administered to humans according to published methods for gene therapy. A chimpanzee viral vector bearing an antigen cassette can be administered to a patient, preferably suspended in a biologically compatible solution or pharmaceutically acceptable delivery vehicle. A suitable vehicle includes sterile saline. Other aqueous and non-aqueous isotonic sterile injection solutions and aqueous and non-aqueous sterile suspensions known to be pharmaceutically acceptable carriers and well known to those of skill in the art may be employed for this purpose.

[0514] The chimpanzee adenoviral vectors are administered in sufficient amounts to transduce the human cells and to provide sufficient levels of antigen transfer and expression to provide a therapeutic benefit without undue adverse or with medically acceptable physiological effects, which can be determined by those skilled in the medical arts. Conventional and pharmaceutically acceptable routes of administration include, but are not limited to, direct delivery to the liver, intranasal, intravenous, intramuscular, subcutaneous, intradermal, oral and other parental routes of administration. Routes of administration may be combined, if desired.

[0515] Dosages of the viral vector will depend primarily on factors such as the condition being treated, the age, weight and health of the patient, and may thus vary among patients. The dosage will be adjusted to balance the therapeutic benefit against any side effects and such dosages may vary depending upon the therapeutic application for which the recombinant vector is employed. The levels of expression of antigen(s) can be monitored to determine the frequency of dosage administration.

[0516] Recombinant, replication defective adenoviruses can be administered in a “pharmaceutically effective amount”, that is, an amount of recombinant adenovirus that is effective in a route of administration to transfect the desired cells and provide sufficient levels of expression of the selected gene to provide a vaccinal benefit, i.e., some measurable level of protective immunity. C68 vectors comprising an antigen cassette can be co-administered with adjuvant. Adjuvant can be separate from the vector (e.g., alum) or encoded within the vector, in particular if the adjuvant is a protein. Adjuvants are well known in the art.

[0517] Conventional and pharmaceutically acceptable routes of administration include, but are not limited to, intranasal, intramuscular, intratracheal, subcutaneous, intradermal, rectal, oral and other parental routes of administration. Routes of administration may be combined, if desired, or adjusted depending upon the immunogen or the disease. For example, in prophylaxis of rabies, the subcutaneous, intratracheal and intranasal routes are preferred. The route of administration primarily will depend on the nature of the disease being treated.

[0518] The levels of immunity to antigen(s) can be monitored to determine the need, if any, for boosters. Following an assessment of antibody titers in the serum, for example, optional booster immunizations may be desired

### VI. Therapeutic and Manufacturing Methods

[0519] Also provided is a method of inducing an infectious disease organism-specific (e.g. a SARS-CoV-2 specific) immune response in a subject, vaccinating against an infectious disease organism, treating and/or alleviating a symptom of an infection associated with an infectious disease organism in a subject by administering to the subject one or more antigens such as a plurality of antigens identified using methods disclosed herein.

[0520] In some aspects, a subject has been diagnosed with an infection or is at risk of an infection (e.g. Covid-19 due to a SARS-CoV-2 infection), such as age, geographical/travel, and/or work-related increased risk of or predisposition to an infection, or at risk to a seasonal and/or novel disease infection.

[0521] In some aspects, a subject is immunocompromised, such as diagnosed with and/or suspected of having cancer. A subject can include those treated with a therapy resulting in immunosuppression. For example, a subject can include those diagnosed with a hematopoietic malignancy and treated with a hematopoietic cell targeting therapy, such as a B cell malignancy treated with an anti-CD20 therapy (e.g., rituximab). In another example, a subject can include those diagnosed with multiple sclerosis [e.g., Relapsing-remitting multiple sclerosis (RRMS), Secondary-progressive multiple sclerosis (SPMS), or Primary-progressive multiple sclerosis (PPMS)] and treated with an anti-CD20 therapy.

[0522] An antigen can be administered in an amount sufficient to stimulate a CTL response. An antigen can be administered in an amount sufficient to stimulate a T cell response. An antigen can be administered in an amount sufficient to stimulate a B cell response.

[0523] An antigen can be administered alone or in combination with other therapeutic agents. Therapeutic agents can include those that target an infectious disease organism, such as an anti-viral or antibiotic agent.

[0524] The optimum amount of each antigen to be included in a vaccine composition and the optimum dosing regimen can be determined. For example, an antigen or its variant can be prepared for intravenous (i.v.) injection, sub-cutaneous (s.c.) injection, intradermal (i.d.) injection, intraperitoneal (i.p.) injection, intramuscular (i.m.) injection. Methods of injection include s.c., i.d., i.p., i.m., and i.v. Methods of DNA or RNA injection include i.d., i.m., s.c., i.p. and i.v. Other methods of administration of the vaccine composition are known to those skilled in the art.

[0525] A vaccine can be compiled so that the selection, number and/or amount of antigens present in the composition is/are tissue, infectious disease, and/or patient-specific. For instance, the exact selection of peptides can be guided by expression patterns of the parent proteins in a given tissue or guided by mutation or disease status of a patient. The selection can be dependent on the specific infectious disease (e.g. the specific SARS-CoV-2 isolate the subject is infected with or at risk for infection by), the status of the disease, the goal of the vaccination (e.g., preventative or targeting an ongoing disease), earlier treatment regimens, the immune status of the patient, and, of course, the HLA-haplotype of the patient. Furthermore, a vaccine can contain individualized components, according to personal needs of the particular patient. Examples include varying the selection of antigens according to the expression of the antigen in the particular patient or adjustments for secondary treatments following a first round or scheme of treatment.

[0526] A patient can be identified for administration of an antigen vaccine through the use of various diagnostic methods, e.g., patient selection methods described further below. Patient selection can involve identifying mutations in, or expression patterns of, one or more genes. Patient selection can involve identifying the infectious disease of an ongoing infection (e.g. the presence of a SARS-CoV-2 infection and/or the specific SARS-CoV-2 isolate). Patient selection can involve identifying risk of an infection by an infectious disease. In some cases, patient selection involves identifying the haplotype of the patient. The various patient selection methods can be performed in parallel, e.g., a sequencing diagnostic can identify both the mutations and the haplotype of a patient. The various patient selection methods can be performed sequentially, e.g., one diagnostic test identifies the mutations and separate diagnostic test identifies the haplotype of a patient, and where each test can be the same (e.g., both high-throughput sequencing) or different (e.g., one high-throughput sequencing and the other Sanger sequencing) diagnostic methods.

[0527] For a composition to be used as a vaccine for an infectious disease, antigens with similar normal self-peptides that are expressed in high amounts in normal tissues can be avoided or be present in low amounts in a composition described herein. On the other hand, if it is known that the infected cell of a patient expresses high amounts of a certain antigen, the respective pharmaceutical composition for treatment of this infection can be present in high amounts and/or more than one antigen specific for this particularly antigen or pathway of this antigen can be included.

[0528] Compositions comprising an antigen can be administered to an individual already suffering from an infection. In therapeutic applications, compositions are administered to a patient in an amount sufficient to stimulate an effective CTL response to the infectious disease organism antigen and to cure or at least partially arrest symptoms and/or complications. An amount adequate to accomplish this is defined as “therapeutically effective dose.” Amounts effective for this use will depend on, e.g., the composition, the manner of administration, the stage and severity of the disease being treated, the weight and general state of health of the patient, and the judgment of the prescribing physician. It should be kept in mind that compositions can generally be employed in serious disease states, that is, life-threatening or potentially life threatening situations, especially when the infectious disease organism has induced organ damage and/or other immune pathology. In such cases, in view of the minimization of extraneous substances and the relative nontoxic nature of an antigen, it is possible and can be felt desirable by the treating physician to administer substantial excesses of these compositions.

[0529] For therapeutic use, administration can begin at the detection or treatment of an infection. This can be followed by boosting doses until at least symptoms are substantially abated and for a period thereafter.

[0530] The pharmaceutical compositions (e.g., vaccine compositions) for therapeutic treatment are intended for parenteral, topical, nasal, oral or local administration. A pharmaceutical compositions can be administered parenterally, e.g., intravenously, subcutaneously, intradermally, or intramuscularly. The compositions can be administered to target specific infected tissues and/or cells of a subject. Disclosed herein are compositions for parenteral administration which comprise a solution of the antigen and vaccine compositions are dissolved or suspended in an acceptable carrier, e.g., an aqueous carrier. A variety of aqueous carriers can be used, e.g., water, buffered water, 0.9% saline, 0.3% glycine, hyaluronic acid and the like. These compositions can be sterilized by conventional, well known sterilization techniques, or can be sterile filtered. The resulting aqueous solutions can be packaged for use as is, or lyophilized, the lyophilized preparation being combined with a sterile solution prior to administration. The compositions may contain pharmaceutically acceptable auxiliary substances as required to approximate physiological conditions, such as pH adjusting and buffering agents, tonicity adjusting agents, wetting agents and the like, for example, sodium acetate, sodium lactate, sodium chloride, potassium chloride, calcium chloride, sorbitan monolaurate, triethanolamine oleate, etc.

[0531] Antigens can also be administered via liposomes, which target them to a particular cells tissue, such as lymphoid tissue. Liposomes are also useful in increasing half-life. Liposomes include emulsions, foams, micelles, insoluble monolayers, liquid crystals, phospholipid dispersions, lamellar layers and the like. In these preparations the antigen to be delivered is incorporated as part of a liposome, alone or in conjunction with a molecule which binds to, e.g., a receptor prevalent among lymphoid cells, such as monoclonal antibodies which bind to the CD45 antigen, or with other therapeutic or immunogenic compositions. Thus, liposomes filled with a desired antigen can be directed to the site of lymphoid cells, where the liposomes then deliver the selected therapeutic/immunogenic compositions. Liposomes can be formed from standard vesicle-forming lipids, which generally include neutral and negatively charged phospholipids and a sterol, such as cholesterol. The selection of lipids is generally guided by consideration of, e.g., liposome size, acid lability and stability of the liposomes in the blood stream. A variety of methods are available for preparing liposomes, as described in, e.g., Szoka et al., Ann. Rev. Biophys. Bioeng. 9; 467 (1980), U.S. Pat. Nos. 4,235,871, 4,501,728, 4,501,728, 4,837,028, and 5,019,369.

[0532] For targeting to the immune cells, a ligand to be incorporated into the liposome can include, e.g., antibodies or fragments thereof specific for cell surface determinants of the desired immune system cells. A liposome suspension can be administered intravenously, locally, topically, etc. in a dose which varies according to, inter alia, the manner of administration, the peptide being delivered, and the stage of the disease being treated.

[0533] For therapeutic or immunization purposes, nucleic acids encoding a peptide and optionally one or more of the peptides described herein can also be administered to the patient. A number of methods are conveniently used to deliver the nucleic acids to the patient. For instance, the nucleic acid can be delivered directly, as “naked DNA”. This approach is described, for instance, in Wolff et al., Science 247: 1465-1468 (1990) as well as U.S. Pat. Nos. 5,580,859 and 5,589,466. The nucleic acids can also be administered using ballistic delivery as described, for instance, in U.S. Pat. No. 5,204,253. Particles comprised solely of DNA can be administered. Alternatively, DNA can be adhered to particles, such as gold particles. Approaches for delivering nucleic acid sequences can include viral vectors, mRNA vectors, and DNA vectors with or without electroporation.

[0534] The nucleic acids can also be delivered complexed to cationic compounds, such as cationic lipids. Lipid-mediated gene delivery methods are described, for instance, in 9618372WOAWO 96/18372; 9324640WOAWO 93/24640; Mannino & Gould-Fogerite, BioTechniques 6(7): 682-691 (1988); U.S. Pat. No. 5,279,833 Rose U.S. Pat. No. 5,279,833; 9106309WOAWO 91/06309; and Felgner et al., Proc. Natl. Acad. Sci. USA 84: 7413-7414 (1987).

[0535] Antigens can also be included in viral vector-based vaccine platforms, such as vaccinia, fowlpox, self-replicating alphavirus, marabavirus, adenovirus (See, e.g., Tatsis et al., Adenoviruses, Molecular Therapy (2004) 10, 616-629), or lentivirus, including but not limited to second, third or hybrid second/third generation lentivirus and recombinant lentivirus of any generation designed to target specific cell types or receptors (See, e.g., Hu et al., Immunization Delivered by Lentiviral Vectors for Cancer and Infectious Diseases, Immunol Rev. (2011) 239(1): 45-61, Sakuma et al., Lentiviral vectors: basic to translational, Biochem J. (2012) 443(3):603-18, Cooper et al., Rescue of splicing-mediated intron loss maximizes expression in lentiviral vectors containing the human ubiquitin C promoter, Nucl. Acids Res. (2015) 43 (1): 682-690, Zufferey et al., Self-Inactivating Lentivirus Vector for Safe and Efficient In Vivo Gene Delivery, J. Virol.(1998) 72 (12): 9873-9880). Dependent on the packaging capacity of the above mentioned viral vector-based vaccine platforms, this approach can deliver one or more nucleotide sequences that encode one or more antigen peptides. The sequences may be flanked by non-mutated sequences, may be separated by linkers or may be preceded with one or more sequences targeting a subcellular compartment (See, e.g., Gros et al., Prospective identification of neoantigen-specific lymphocytes in the peripheral blood of melanoma patients, Nat Med. (2016) 22 (4):433-8, Stronen et al., Targeting of cancer neoantigens with donor-derived T cell receptor repertoires, Science. (2016) 352 (6291):1337-41, Lu et al., Efficient identification of mutated cancer antigens recognized by T cells associated with durable tumor regressions, Clin Cancer Res. (2014) 20(13):3401-10). Upon introduction into a host, infected cells express the antigens, and thereby stimulate a host immune (e.g., CTL) response against the peptide(s). Vaccinia vectors and methods useful in immunization protocols are described in, e.g., U.S. Pat. No. 4,722,848. Another vector is BCG (Bacille Calmette Guerin). BCG vectors are described in Stover et al. (Nature 351:456-460 (1991)). A wide variety of other vaccine vectors useful for therapeutic administration or immunization of antigens, e.g., Salmonella typhi vectors, and the like will be apparent to those skilled in the art from the description herein.

[0536] A means of administering nucleic acids uses minigene constructs encoding one or multiple epitopes. To create a DNA sequence encoding the selected CTL epitopes (minigene) for expression in human cells, the amino acid sequences of the epitopes are reverse translated. A human codon usage table is used to guide the codon choice for each amino acid. These epitope-encoding DNA sequences are directly adjoined, creating a continuous polypeptide sequence. To optimize expression and/or immunogenicity, additional elements can be incorporated into the minigene design. Examples of amino acid sequence that could be reverse translated and included in the minigene sequence include: helper T lymphocyte, epitopes, a leader (signal) sequence, and an endoplasmic reticulum retention signal. In addition, MHC presentation of CTL epitopes can be improved by including synthetic (e.g. poly-alanine) or naturally-occurring flanking sequences adjacent to the CTL epitopes. The minigene sequence is converted to DNA by assembling oligonucleotides that encode the plus and minus strands of the minigene. Overlapping oligonucleotides (30-100 bases long) are synthesized, phosphorylated, purified and annealed under appropriate conditions using well known techniques. The ends of the oligonucleotides are joined using T4 DNA ligase. This synthetic minigene, encoding the CTL epitope polypeptide, can then cloned into a desired expression vector.

[0537] Purified plasmid DNA can be prepared for injection using a variety of formulations. The simplest of these is reconstitution of lyophilized DNA in sterile phosphate-buffer saline (PBS). A variety of methods have been described, and new techniques can become available. As noted above, nucleic acids are conveniently formulated with cationic lipids. In addition, glycolipids, fusogenic liposomes, peptides and compounds referred to collectively as protective, interactive, non-condensing (PINC) could also be complexed to purified plasmid DNA to influence variables such as stability, intramuscular dispersion, or trafficking to specific organs or cell types.

[0538] Also disclosed is a method of manufacturing a vaccine, comprising performing the steps of a method disclosed herein; and producing a vaccine comprising a plurality of antigens or a subset of the plurality of antigens.

[0539] Antigens disclosed herein can be manufactured using methods known in the art. For example, a method of producing an antigen or a vector (e.g., a vector including at least one sequence encoding one or more antigens) disclosed herein can include culturing a host cell under conditions suitable for expressing the antigen or vector wherein the host cell comprises at least one polynucleotide encoding the antigen or vector, and purifying the antigen or vector. Standard purification methods include chromatographic techniques, electrophoretic, immunological, precipitation, dialysis, filtration, concentration, and chromatofocusing techniques.

[0540] Host cells can include a Chinese Hamster Ovary (CHO) cell, NSO cell, yeast, or a HEK293 cell. Host cells can be transformed with one or more polynucleotides comprising at least one nucleic acid sequence that encodes an antigen or vector disclosed herein, optionally wherein the isolated polynucleotide further comprises a promoter sequence operably linked to the at least one nucleic acid sequence that encodes the antigen or vector. In certain embodiments the isolated polynucleotide can be cDNA.

### VII. Antigen Use and Administration

[0541] A vaccination protocol can be used to dose a subject with one or more antigens and/or epitopes. A priming vaccine and a boosting vaccine can be used to dose the subject.

[0542] The priming vaccine can be based on C68 (e.g., the sequences shown in SEQ ID NO:1 or 2) or srRNA (e.g., the sequences shown in SEQ ID NO:3 or 4) and the boosting vaccine can be based on C68 (e.g., the sequences shown in SEQ ID NO:1 or 2) or srRNA/samRNA (e.g., the sequences shown in SEQ ID NO:3 or 4). Each vector typically includes a cassette that includes antigens and/or epitopes. Cassettes can include about 20 epitopes (or antigens from which the epitopes are derived), separated by spacers such as the natural sequence that normally surrounds each epitope or other non-natural spacer sequences such as AAY. Cassettes can also include MHCII antigens/epitopes such a tetanus toxoid antigen and PADRE antigen, which can be considered universal class II antigens. Cassettes can also include a targeting sequence such as a ubiquitin targeting sequence.

[0543] A priming vaccine can be injected (e.g., intramuscularly) in a subject. Bilateral injections per dose can be used. For example, one or more injections of ChAdV68 (C68) can be used (e.g., total dose 1×10¹² viral particles); one or more injections of self-amplifying RNA (samRNA or SAM), such as a dose of 3 μg, 10 μg, 30 μg, 100 μg, or 300 μg RNA can be used. A SAM priming dose of 30 μg or less can be used. A SAM priming dose of 10 μg or less can be used. A SAM priming dose of 3 μg or less can be used. One or more injections of samRNA at a dose of 30 μg or less can be used. A dose of 30 μg or less can represent the total content of RNA/samRNA administered. A dose of 30 μg or less can represent the total content of RNA/samRNA administered and include only a single distinct samRNA construct. A SAM prime of between 10-30 μg, 10-100 μg, 10-300 μg, 30-100 μg, 30-300 μg, or 100-300 μg RNA can be administered. A SAM prime of between 10-500 μg, 10-1000 μg, 30-500 μg, 30-1000 μg, or 500-1000 μg RNA can be administered. A SAM prime of at least 400 μg, at least 500 μg, at least 600 μg, at least 700 μg, at least 800 μg, at least 900 μg, at least 1000 μg RNA can be administered. A SAM prime of 10 μg, 30 μg, 100 μg, or 300 μg RNA can be administered. A SAM prime of 300 μg RNA can be administered. A SAM prime of 100 μg RNA can be administered. A SAM prime of 30 μg RNA can be administered. A SAM prime of 10 μg RNA can be administered. A SAM prime of 3 μg RNA can be administered. A SAM prime of at least 300 μg RNA can be administered. A SAM prime of at least 100 μg RNA can be administered. A SAM prime of at least 30 μg RNA can be administered. A SAM prime of at least 10 μg RNA can be administered. A SAM prime of at least 3 μg RNA can be administered. A SAM prime of less than or equal to 300 μg RNA can be administered. A SAM prime of less than or equal to 100 μg RNA can be administered. For ChAdV68 priming, 1×10¹² or less of viral particles can be administered. For ChAdV68 priming, 3×10¹¹ or less of the viral particles can be administered. For ChAdV68 priming, at least 1×10¹¹ of the viral particles can be administered. For ChAdV68 priming, between 1×10¹¹ and 1×10¹², between 3×10¹¹ and 1×10¹², or between 1×10¹¹ and 3×10¹¹ of the viral particles can be administered. For ChAdV68 priming, 1×10¹¹, 3×10¹¹, or 1×10¹² of the viral particles can be administered. For ChAdV68 priming, the viral particles can be at a concentration of at 5×10¹¹ vp/mL.

[0544] A vaccine boost (boosting vaccine) can be injected (e.g., intramuscularly) after prime vaccination. A boosting vaccine can be administered about every 1, 2, 3, 4, 5, 6, 7, 8, 9, or 10 weeks, e.g., every 4 weeks and/or 8 weeks after the prime. A boosting vaccine can be administered 4 weeks after the prime. A boosting vaccine can be administered a month after the prime. A boosting vaccine can be administered 28 days after the prime. A boosting vaccine can be administered 28 days after the prime. A boosting vaccine can be administered 113 days after the prime. A boosting vaccine can be administered at least 4 weeks after the prime. A boosting vaccine can be administered at least a month after the prime. A boosting vaccine can be administered at least 28 days after the prime. A boosting vaccine can be administered at least 28 days after the prime. A boosting vaccine can be administered at least 113 days after the prime. A boosting vaccine can be administered between 28 to 113 days after the prime. Bilateral injections per dose can be used. For example, one or more injections of ChAdV68 (C68) can be used (e.g., total dose 1×10¹² viral particles); one or more injections of self-amplifying RNA (samRNA or SAM), such as a dose of 3 μg, 10 μg, 30 μg, 100 μg, or 300 μg RNA can be used. A SAM boosting dose of 30 μg or less can be used. A SAM boosting dose of 10 μg or less can be used. A SAM boosting dose of 3 μg or less can be used. One or more injections of samRNA at a dose of 30 μg or less can be used. A dose of 30 μg or less can represent the total content of RNA/samRNA administered. A dose of 30 μg or less can represent the total content of RNA/samRNA administered and include only a single distinct samRNA construct. A SAM boost of between 10-30 μg, 10-100 μg, 10-300 μg, 30-100 μg, 30-300 μg, or 100-300 μg RNA can be administered. A SAM boost of between 10-500 μg, 10-1000 μg, 30-500 μg, 30-1000 μg, or 500-1000 μg RNA can be administered. A SAM boost of at least 400 μg, at least 500 μg, at least 600 μg, at least 700 μg, at least 800 μg, at least 900 μg, at least 1000 μg RNA can be administered. A SAM boost of 10 μg, 30 μg, 100 μg, or 300 μg RNA can be administered. A SAM boost of 300 μg RNA can be administered. A SAM boost of 100 μg RNA can be administered. A SAM boost of 30 μg RNA can be administered. A SAM boost of 10 μg RNA can be administered. A SAM boost of 3 μg RNA can be administered. A SAM boost of at least 300 μg RNA can be administered. A SAM boost of at least 100 μg RNA can be administered. A SAM boost of at least 30 μg RNA can be administered. A SAM boost of at least 10 μg RNA can be administered. A SAM boost of at least 3 μg RNA can be administered. A SAM boost of less than or equal to 300 μg RNA can be administered. A SAM boost of less than or equal to 100 μg RNA can be administered. A vaccine boost can include the same antigen cassette (e.g., encode the same SARS-CoV-2 immunogenic polypeptide) as a priming dose. A vaccine boost can include a different antigen cassette as a priming dose. A vaccine boost can include the same composition as a priming dose. As an illustrative non-limiting example, a priming dose can include a non-samRNA based mRNA vaccine (e.g., a commercially available SARS-CoV-2 mRNA vaccine, such as mRNA-1273/SpikeVax® [Moderna]) or other SARS-CoV-2 vaccine platform (e.g., commercially available SARS-CoV-2 vaccine platforms, including, but not limited to, Comirnaty® [BioNTech/Pfizer], AZD1222/Covishield® [Oxford/AstraZeneca], or Ad26.COV2.S/JNJ-78436735 [Janssen/Johnson & Johnson]), and a boosting dose can included any of the samRNA-based and/or ChAdV68-based composition described herein.

[0545] A dose of can represent the total content of RNA/samRNA administered. A dose of can represent the total content of RNA/samRNA administered and include only a single distinct samRNA construct.

[0546] Immune monitoring can be performed before, during, and/or after vaccine administration. Such monitoring can inform safety and efficacy, among other parameters.

[0547] To perform immune monitoring, PBMCs are commonly used. PBMCs can be isolated before prime vaccination, and after prime vaccination (e.g. 4 weeks and 8 weeks). PBMCs can be harvested just prior to boost vaccinations and after each boost vaccination (e.g. 4 weeks and 8 weeks).

[0548] Immune responses, such as T cell responses and B cells responses, can be assessed as part of an immune monitoring protocol. For example, the ability of a vaccine composition described herein to stimulate an immune response can be monitored and/or assessed. As used herein, “stimulate an immune response” refers to any increase in a immune response, such as initiating an immune response (e.g., a priming vaccine stimulating the initiation of an immune response in a naïve subject) or enhancement of an immune response (e.g., a boosting vaccine stimulating the enhancement of an immune response in a subject having a pre-existing immune response to an antigen, such as a pre-existing immune response initiated by a priming vaccine). Enhancing an immune response can include stimulating an immune response in a convalescent subject (e.g., a boosting vaccine stimulating the enhancement of an immune response in a convalescent Covid-19 subject). A subject can include an HIV positive subject. T cell responses can be measured using one or more methods known in the art such as ELISpot, intracellular cytokine staining, cytokine secretion and cell surface capture, T cell proliferation, MHC multimer staining, or by cytotoxicity assay. T cell responses to epitopes encoded in vaccines can be monitored from PBMCs by measuring induction of cytokines, such as IFN-gamma, using an ELISpot assay. Specific CD4 or CD8 T cell responses to epitopes encoded in vaccines can be monitored from PBMCs by measuring induction of cytokines captured intracellularly or extracellularly, such as IFN-gamma, using flow cytometry. Specific CD4 or CD8 T cell responses to epitopes encoded in the vaccines can be monitored from PBMCs by measuring T cell populations expressing T cell receptors specific for epitope/MHC class I complexes using MHC multimer staining. Specific CD4 or CD8 T cell responses to epitopes encoded in the vaccines can be monitored from PBMCs by measuring the ex vivo expansion of T cell populations following 3H-thymidine, bromodeoxyuridine and carboxyfluoresceine-diacetate-succinimidylester (CFSE) incorporation. The antigen recognition capacity and lytic activity of PBMC-derived T cells that are specific for epitopes encoded in vaccines can be assessed functionally by chromium release assay or alternative colorimetric cytotoxicity assays.

[0549] B cell responses can be measured using one or more methods known in the art such as assays used to determine B cell differentiation (e.g., differentiation into plasma cells), B cell or plasma cell proliferation, B cell or plasma cell activation (e.g., upregulation of costimulatory markers such as CD80 or CD86), antibody class switching, and/or antibody production (e.g., an ELISA).

[0550] Vaccination regimens can include assessing neutralizing antibody titers against the vaccine composition of interest, such as a ChAdV68-based vaccine. For example, a ChAdV68-based vaccine can be administered as a priming dose, and re-administration of the ChAdV68-based vaccine as a boosting dose follows determining ChAdV-specific neutralizing antibody titers are below a neutralization threshold prior to re-administration. The neutralizing antibody titer can be an NT50 value calculated as a minimum dilution of sera from the immunized subject that neutralizes a ChAdV virus by 50%. Determining the neutralizing antibody titer can include the steps of: (1) contacting one or more dilutions of sera from the immunized subject with a ChAdV virus under conditions sufficient for neutralization of the ChAdV virus; and (2) assessing neutralization of the ChAdV virus relative to a non-neutralized virus.

### VIII. Isolation and Detection of HLA Peptides

[0551] Isolation of HLA-peptide molecules was performed using classic immunoprecipitation (IP) methods after lysis and solubilization of the tissue sample (55-58). Examples and methods are described in more detail in international patent application publication WO/2018/208856, herein incorporated by reference, in its entirety, for all purposes.

### IX. Presentation Model

[0552] Presentation models can be used to identify likelihoods of peptide presentation in patients. Various presentation models are known to those skilled in the art, for example the presentation models described in more detail in U.S. Pat. No. 10,055,540, US Application Pub. No. US20200010849A1 and US20110293637, and international patent application publications WO/2018/195357, WO/2018/208856, and WO2016187508, each herein incorporated by reference, in their entirety, for all purposes.

### X. Training Module

[0553] Training modules can be used to construct one or more presentation models based on training data sets that generate likelihoods of whether peptide sequences will be presented by MHC alleles associated with the peptide sequences. Various training modules are known to those skilled in the art, for example the presentation models described in more detail in U.S. Pat. No. 10,055,540, US Application Pub. No. US20200010849A1, and international patent application publications WO/2018/195357 and WO/2018/208856, each herein incorporated by reference, in their entirety, for all purposes. A training module can construct a presentation model to predict presentation likelihoods of peptides on a per-allele basis. A training module can also construct a presentation model to predict presentation likelihoods of peptides in a multiple-allele setting where two or more MHC alleles are present.

### XI. Prediction Module

[0554] A prediction module can be used to receive sequence data and select candidate antigens in the sequence data using a presentation model. Specifically, the sequence data may be DNA sequences, RNA sequences, and/or protein sequences extracted from infected cells patients or infectious disease organisms themselves (e.g., SARS-CoV-2). A prediction module may identify candidate antigens that are pathogen-derived peptides (e.g., SARS-CoV-2 derived), such as by comparing sequence data extracted from normal tissue cells of a patient with the sequence data extracted from infected cells of the patient to identify portions containing one or more infectious disease organism associated antigens. A prediction module may identify candidate antigens that are expressed in an infected cell or infected tissue in comparison to a normal cell or tissue by comparing sequence data extracted from normal tissue cells of a patient with the sequence data extracted from infected tissue cells of the patient to identify expressed candidate antigens (e.g., identifying expressed polynucleotides and/or polypeptides specific to an infectious disease).

[0555] A presentation module can apply one or more presentation model to processed peptide sequences to estimate presentation likelihoods of the peptide sequences. Specifically, the prediction module may select one or more candidate antigen peptide sequences that are likely to be presented on infected cell HLA molecules by applying presentation models to the candidate antigens. In one implementation, the presentation module selects candidate antigen sequences that have estimated presentation likelihoods above a predetermined threshold. In another implementation, the presentation model selects the N candidate antigen sequences that have the highest estimated presentation likelihoods (where N is generally the maximum number of epitopes that can be delivered in a vaccine). A vaccine including the selected candidate antigens for a given patient can be injected into the patient to stimulate immune responses.

### XI.B.Cassette Design Module

### XI.B.1 Overview

[0556] A cassette design module can be used to generate a vaccine cassette sequence based on selected candidate peptides for injection into a patient. For example, a cassette design module can be used to generate a sequence encoding concatenated epitope sequences, such as concatenated T cell epitopes. Various cassette design modules are known to those skilled in the art, for example the cassette design modules described in more detail in U.S. Pat. No. 10,055,540, US Application Pub. No. US20200010849A1, and international patent application publications WO/2018/195357 and WO/2018/208856, each herein incorporated by reference, in their entirety, for all purposes.

[0557] A set of therapeutic epitopes may be generated based on the selected peptides determined by a prediction module associated with presentation likelihoods above a predetermined threshold, where the presentation likelihoods are determined by the presentation models. However it is appreciated that in other embodiments, the set of therapeutic epitopes may be generated based on any one or more of a number of methods (alone or in combination), for example, based on binding affinity or predicted binding affinity to HLA class I or class II alleles of the patient, binding stability or predicted binding stability to HLA class I or class II alleles of the patient, random sampling, and the like.

[0558] Therapeutic epitopes may correspond to selected peptides themselves. Therapeutic epitopes may also include C- and/or N-terminal flanking sequences in addition to the selected peptides. N- and C-terminal flanking sequences can be the native N- and C-terminal flanking sequences of the therapeutic vaccine epitope in the context of its source protein. Therapeutic epitopes can represent a fixed-length epitope Therapeutic epitopes can represent a variable-length epitope, in which the length of the epitope can be varied depending on, for example, the length of the C- or N-flanking sequence. For example, the C-terminal flanking sequence and the N-terminal flanking sequence can each have varying lengths of 2-5 residues, resulting in 16 possible choices for the epitope.

[0559] A cassette design module can also generate cassette sequences by taking into account presentation of junction epitopes that span the junction between a pair of therapeutic epitopes in the cassette. Junction epitopes are novel non-self but irrelevant epitope sequences that arise in the cassette due to the process of concatenating therapeutic epitopes and linker sequences in the cassette. The novel sequences of junction epitopes are different from the therapeutic epitopes of the cassette themselves.

[0560] A cassette design module can generate a cassette sequence that reduces the likelihood that junction epitopes are presented in the patient. Specifically, when the cassette is injected into the patient, junction epitopes have the potential to be presented by HLA class I or HLA class II alleles of the patient, and stimulate a CD8 or CD4 T-cell response, respectively. Such reactions are often times undesirable because T-cells reactive to the junction epitopes have no therapeutic benefit, and may diminish the immune response to the selected therapeutic epitopes in the cassette by antigenic competition.⁷⁶

[0561] A cassette design module can iterate through one or more candidate cassettes, and determine a cassette sequence for which a presentation score of junction epitopes associated with that cassette sequence is below a numerical threshold. The junction epitope presentation score is a quantity associated with presentation likelihoods of the junction epitopes in the cassette, and a higher value of the junction epitope presentation score indicates a higher likelihood that junction epitopes of the cassette will be presented by HLA class I or HLA class II or both.

[0562] In one embodiment, a cassette design module may determine a cassette sequence associated with the lowest junction epitope presentation score among the candidate cassette sequences.

[0563] A cassette design module may iterate through one or more candidate cassette sequences, determine the junction epitope presentation score for the candidate cassettes, and identify an optimal cassette sequence associated with a junction epitope presentation score below the threshold.

[0564] A cassette design module may further check the one or more candidate cassette sequences to identify if any of the junction epitopes in the candidate cassette sequences are self-epitopes for a given patient for whom the vaccine is being designed. To accomplish this, the cassette design module checks the junction epitopes against a known database such as BLAST. In one embodiment, the cassette design module may be configured to design cassettes that avoid junction self-epitopes.

[0565] A cassette design module can perform a brute force approach and iterate through all or most possible candidate cassette sequences to select the sequence with the smallest junction epitope presentation score. However, the number of such candidate cassettes can be prohibitively large as the capacity of the vaccine increases. For example, for a vaccine capacity of 20 epitopes, the cassette design module has to iterate through ˜1018 possible candidate cassettes to determine the cassette with the lowest junction epitope presentation score. This determination may be computationally burdensome (in terms of computational processing resources required), and sometimes intractable, for the cassette design module to complete within a reasonable amount of time to generate the vaccine for the patient. Moreover, accounting for the possible junction epitopes for each candidate cassette can be even more burdensome. Thus, a cassette design module may select a cassette sequence based on ways of iterating through a number of candidate cassette sequences that are significantly smaller than the number of candidate cassette sequences for the brute force approach.

[0566] A cassette design module can generate a subset of randomly or at least pseudo-randomly generated candidate cassettes, and selects the candidate cassette associated with a junction epitope presentation score below a predetermined threshold as the cassette sequence. Additionally, the cassette design module may select the candidate cassette from the subset with the lowest junction epitope presentation score as the cassette sequence. For example, the cassette design module may generate a subset of ˜1 million candidate cassettes for a set of 20 selected epitopes, and select the candidate cassette with the smallest junction epitope presentation score. Although generating a subset of random cassette sequences and selecting a cassette sequence with a low junction epitope presentation score out of the subset may be sub-optimal relative to the brute force approach, it requires significantly less computational resources thereby making its implementation technically feasible. Further, performing the brute force method as opposed to this more efficient technique may only result in a minor or even negligible improvement in junction epitope presentation score, thus making it not worthwhile from a resource allocation perspective. A cassette design module can determine an improved cassette configuration by formulating the epitope sequence for the cassette as an asymmetric traveling salesman problem (TSP). Given a list of nodes and distances between each pair of nodes, the TSP determines a sequence of nodes associated with the shortest total distance to visit each node exactly once and return to the original node. For example, given cities A, B, and C with known distances between each other, the solution of the TSP generates a closed sequence of cities, for which the total distance traveled to visit each city exactly once is the smallest among possible routes. The asymmetric version of the TSP determines the optimal sequence of nodes when the distance between a pair of nodes are asymmetric. For example, the “distance” for traveling from node A to node B may be different from the “distance” for traveling from node B to node A. By solving for an improved optimal cassette using an asymmetric TSP, the cassette design module can find a cassette sequence that results in a reduced presentation score across the junctions between epitopes of the cassette. The solution of the asymmetric TSP indicates a sequence of therapeutic epitopes that correspond to the order in which the epitopes should be concatenated in a cassette to minimize the junction epitope presentation score across the junctions of the cassette. A cassette sequence determined through this approach can result in a sequence with significantly less presentation of junction epitopes while potentially requiring significantly less computational resources than the random sampling approach, especially when the number of generated candidate cassette sequences is large. Illustrative examples of different computational approaches and comparisons for optimizing cassette design are described in more detail in U.S. Pat. No. 10,055,540, US Application Pub. No. US20200010849A1, and international patent application publications WO/2018/195357 and WO/2018/208856, each herein incorporated by reference, in their entirety, for all purposes.

[0567] A cassette design module can also generate cassette sequences by taking into account additional protein sequences encoded in the vaccine. For example, a cassette design module used to generate a sequence encoding concatenated T cell epitopes can take into account T cell epitopes already encoded by additional protein sequences present in the vaccine (e.g., full-length protein sequences), such as by removing T cell epitopes already encoded by the additional protein sequences from the list of candidate sequences.

[0568] A cassette design module can also generate cassette sequences by taking into account the size of the sequences. Without wishing to be bound by theory, in general, increased cassette size can negatively impact vaccine aspects, such as vaccine production and/or vaccine efficacy. In one example, the cassette design module can take into account overlapping sequences, such as overlapping T cell epitope sequences. In general, a single sequence containing overlapping T cell epitope sequences (also referred to as a “frame”) is more efficient than separately linking individual T cell epitope sequences as it reduces the sequence size needed to encode the multiple peptides. Accordingly, in an illustrative example, a cassette design module used to generate a sequence encoding concatenated T cell epitopes can take into account the cost/benefit of extending a candidate T cell epitope to encode one or more additional T cell epitopes, such as determining the benefit gained in additional population coverage for an MHC presenting the additional T cell epitope versus the cost of increasing the size of the sequence.

[0569] A cassette design module can also generate cassette sequences by taking into account the magnitude of stimulation of an immune response generated by validated epitopes.

[0570] A cassette design module can also generate cassette sequences by taking into account presentation of encoded epitopes across a population, for example that at least one immunogenic epitope is presented by at least one HLA across a proportion of a population, for example by at least 85%, 90%, or 95% of a population (e.g., HLA-A, HLA-B and HLA-C genes over four major ethnic groups, namely European (EUR), African American (AFA), Asian and Pacific Islander (APA) and Hispanic (HIS)). As an illustrative non-limiting example, a cassette design module can also generate cassette sequences such that at least one HLA is present at least across 85%, 90%, or 95% of a population that presents at least one validated epitope or presents at least 4, 5, 6, or 7 predicted epitopes.

[0571] A cassette design module can also generate cassette sequences by taking into account other aspects that improve potential safety, such as limiting encoding or the potential to encode a functional protein, functional protein domain, functional protein subunit, or functional protein fragment potentially presenting a safety risk. In some cases, a cassette design module can limit sequence size of encoded peptides such that are less than 50%, less than 49%, less than 48%, less than 47%, less than 46%, less than 45%, less than 45%, less than 43%, less than 42%, less than 41%, less than 40%, less than 39%, less than 38%, less than 37%, less than 36%, less than 35%, less than 34%, or less than 33% of the translated, corresponding full-length protein. In some cases, a cassette design module can limit sequence size of encoded peptides such that a single contiguous sequence is less than 50% of the translated, corresponding full-length protein, but more than one sequence may be derived from the same translated, corresponding full-length protein and together encode more than 50%. In an illustrative example, if a single sequence containing overlapping T cell epitope sequences (“frame”) is larger than 50% of the translated, corresponding full-length protein, the frame can be split into multiple frames (e.g., f1, f2 etc.) such that each frame is less than 50% of the translated, corresponding full-length protein. A cassette design module can also limit sequence size of encoded peptides such that a single contiguous sequence is less than 49%, less than 48%, less than 47%, less than 46%, less than 45%, less than 45%, less than 43%, less than 42%, less than 41%, less than 40%, less than 39%, less than 38%, less than 37%, less than 36%, less than 35%, less than 34%, or less than 33% of the translated, corresponding full-length protein. Where multiple frames from the same gene are encoded, the multiple frames can have overlapping sequences with each other, in other words each separately encode the same sequence. Where multiple frames from the same gene are encoded, the two or more nucleic acid sequences derived from the same gene can be ordered such that a first nucleic acid sequence cannot be immediately followed by or linked to a second nucleic acid sequence if the second nucleic acid sequence follows, immediately or not, the first nucleic acid sequence in the corresponding gene. For example, if there are 3 frames within the same gene (f1, f2, f3 in increasing order of amino acid position):
[0572] The following cassette orderings are not allowed:
   [0573] f1 immediately followed by f2
   [0574] f2 immediately followed by f3
   [0575] f1 immediately followed by f3
[0576] The following cassette orderings are allowed:
   [0577] f3 immediately followed by f2
   [0578] f2 immediately followed by f1

### XIII. Example Computer

[0579] A computer can be used for any of the computational methods described herein. One skilled in the art will recognize a computer can have different architectures. Examples of computers are known to those skilled in the art, for example the computers described in more detail in U.S. Pat. No. 10,055,540, US Application Pub. No. US20200010849A1, and international patent application publications WO/2018/195357 and WO/2018/208856, each herein incorporated by reference, in their entirety, for all purposes.

### XIV. Examples

[0580] Below are examples of specific embodiments for carrying out the present invention. The examples are offered for illustrative purposes only, and are not intended to limit the scope of the present invention in any way. Efforts have been made to ensure accuracy with respect to numbers used (e.g., amounts, temperatures, etc.), but some experimental error and deviation should, of course, be allowed for.

[0581] The practice of the present invention will employ, unless otherwise indicated, conventional methods of protein chemistry, biochemistry, recombinant DNA techniques and pharmacology, within the skill of the art. Such techniques are explained fully in the literature. See, e.g., T. E. Creighton, Proteins: Structures and Molecular Properties (W. H. Freeman and Company, 1993); A. L. Lehninger, Biochemistry (Worth Publishers, Inc., current addition); Sambrook, et al., Molecular Cloning: A Laboratory Manual (2nd Edition, 1989); Methods In Enzymology (S. Colowick and N. Kaplan eds., Academic Press, Inc.); Remington's Pharmaceutical Sciences, 18th Edition (Easton, Pennsylvania: Mack Publishing Company, 1990); Carey and Sundberg Advanced Organic Chemistry 3^{rd} Ed. (Plenum Press) Vols A and B (1992).

### XIV.A. SARS-CoV-2 MHC Epitope Prediction and Vaccine Cassette Construction

[0582] The SARS-CoV-2 belongs to the coronavirus family and its reference genome is a single-stranded RNA sequence of 29,903 base pairs. The genome contains at least 14 open reading frames (ORF) as shown in FIG. 1. Among the encoded genes, the essential genes are replicase ORFlab, spike (S), envelope (E), membrane (M) and nucleocapsid (N). The replicase ORFlab (position 266-21555) encode two proteins namely orf1a and orf1b, the latter is translated by a ribosomal frameshift by −1 at position 13468. The two proteins together contain 16 non-structure proteins (nsp1-nsp16), as depicted in FIG. 2, that is, the ORF1a and ORF1b are cleaved into 16 nsps. The spike protein is thought to bind to the ACE2 receptor of the human cell, allowing the virus to enter the human cell to use its replication machinery to produce and disseminate more copies of the virus.

[0583] Because RNA viruses are known to have high mutation rates, a large number of SARS-CoV-2 genomes were analyzed to identify regions in the proteome that are variable. Over 8000 SARS-CoV-2 complete genomes deposited into the GISAID database [www.gisaid.org] as of Apr. 19, 2020 were obtained. Pairwise global alignment of each of the genomes to the SARS-CoV-2 reference genome (Genbank Accession number NC_045512; SEQ ID NO:76) was performed. Sequences on these genomes that are aligned to coding regions of the reference genome were specifically located the. These sequences were then translated to obtain the protein sequences of these SARS-CoV-2. These protein sequences wee then aligned to the respective reference protein sequences to identify variants.

[0584] The analysis identified 20 sites on the protein sequences that have a variant rate greater than 1%. These sites are shown in Table 1. In selecting T-cell epitopes, candidate epitopes that cross these variable sites were excluded.

[0585] CD8+ epitopes were predicted using our machine learning EDGE platform (see U.S. Pat. No. 10,055,540, herein incorporated by reference for all purposes), which was shown to be best-in-class [Bulik-Sullivan et al. (2018). Deep learning using tumor HLA peptide mass spectrometry datasets improves neoantigen identification. Nature Biotechnology 2018, 37(1), herein incorporated by reference for all purposes]. The model for predicting class I epitopes was recently trained on 507,502 peptides presented in Mass Spectrometry across 398 samples and covers 116 identified alleles, of which 112 alleles (Table 2, FIG. 7) are represented in the haplotype distribution dataset described below.

[0586] In order to generate a list of candidate CD8+ T-cell epitopes, the orf1ab protein was split at the cleavage sites shown in FIG. 2. Studies show that the spike protein harbors a furin-like cleavage motif at position 681-684, where the cleavage event occurs following position 684 [Wrapp et al. (2020). Cryo-EM structure of the 2019-nCoV spike in the prefusion conformation. Science, 367(6483), 1260-1263, Ou et al. (2020). Characterization of spike glycoprotein of SARS-CoV-2 on virus entry and its immune cross-reactivity with SARS-CoV. Nature Communications, 11(1), 1620]. The cleavage of the spike protein into S1 and S2 is thought to facilitate the cell entry contributing to the transmissibility of the virus. Accordingly, the Spike protein was split at the furin cleavage site for generating candidate CD8+ T-cell epitopes. All 8-11 mer peptides were then generated from the cleaved proteins and the other proteins, flanked by their native N-terminal and C-terminal 5-mers.

[0587] The EDGE machine learning model was run on these candidate epitopes for each HLA class I allele. That is, the presentation score of a candidate epitope is given an EDGE score for each HLA allele. Generally, the probability of a peptide being presented is influenced by the family of the protein containing the peptide, and the expression level of the protein. The EDGE model was also trained on human peptidome datasets. Given there is no equivalent protein family for SARS-CoV-2, for predicting the presentation of a given Sar-CoV-2 peptide, a random protein family was assigned to all peptides. Assigning the same protein family, albeit random, will have the same effect on all SARS-CoV-2 peptides. A high level of expression was also used (tpm=10). A list of candidate epitopes with the EDGE score of 0.001 and above for an HLA allele are shown in Table A, as well as cognate HLA alleles with a predicted EDGE score greater than 0.001, with each cognate pairing ranked as H (EDGE score >0.1), M (EDGE score between 0.01 and 0.1), and L (EDGE score <0.01).

[0588] In order to account for the different levels of expression of SARS-CoV-2 genes, the ratio of reported T-cell responses among genes from SARS-CoV-2 genome [Li et al. (2008) T Cell Responses to Whole SARS Coronavirus in Humans. The Journal of Immunology, 181(8), 5490-5500] was used as a proxy for the ratio of gene expression levels. The score of all epitopes from a SARS-CoV-2 gene was then scaled so that the ratio between the 99^{th} percentile of the epitopes in the selected gene and the 99^{th} percentile of the epitopes in the Spike gene followed the ratio reported in [Li et al. (2008). T Cell Responses to Whole SARS Coronavirus in Humans. The Journal of Immunology, 181(8), 5490-5500].

[0589] A set of candidate CD8+ epitopes was then selected by choosing those with the scaled EDGE score greater than or equal to a threshold of t=0.01. The threshold was selected from analysis of an HIV LANL dataset (data not shown) so that PPV for T-cell epitopes estimated to be 0.2 and recall is 0.5. The set sequences that are >=90% homologous to known SARs-CoV T-cell epitopes reported in IEDB [Vita et al. (2019). The Immune Epitope Database (IEDB): 2018 update. Nucleic Acids Research, 47(D1), D339-D343.] was also included similar to the approach described in Grifoni et al. [(2020). A Sequence Homology and Bioinformatic Approach Can Predict Candidate Targets for Immune Responses to SARS-CoV-2. Cell Host& Microbe, 27(4), 671-680.e2].

[0590] The set of candidate epitopes excluded those sequences that contained at least one of the sites that have a variable rate greater than 0.01, as mentioned above and shown in Table 1.

[0591] In order to maximize the coverage of the vaccine over the world population, allele frequencies of HLA-A, HLA-B and HLA-C genes over four major ethnic groups, namely European (EUR), African American (AFA), Asian and Pacific Islander (APA) and Hispanic (HIS) were obtained from the publicly available National Marrow Donor Program dataset [bioinformatics.bethematchclinical.org/hla-resources/haplotype-frequencies/high-resolution-hla-alleles-and-haplotypes-in-the-us-population]. Simulations were then performed to estimate the frequencies of the haplotypes made up by combination of these HLA alleles.

[0592] Cassette optimization proceeded as follows:

### Epitope Selection Definitions

[0593] Candidate epitope set E: set of candidate CD8+ epitopes with scaled EDGE score greater than or equal to a threshold of t=0.01
[0594] Population coverage criteria P: For each of the four ethnicity groups as described above (EUR/AFA/APA/HIS), 95% of the simulated people in that ethnic group have at least 30 candidate epitopes presented in their diplotype
[0595] Solution frame set F—all amino acid ranges in the current solution encapsulating the added candidate epitopes
   [0596] For each epitope added to the solution, the epitope and 5 flanking native amino acids on each end must be fully contained in a frame of F
   [0597] Each frame spans only protein region (including individual NSPs in orf1ab)

### Epitope Selection Method

[0598] Population coverage criteria P starts as calculated with all epitopes in the whole gene(s) initially added
[0599] If the population coverage criteria P is not satisfied, continually choose the amino acid frame f across SARS-CoV-2 proteome that most efficiently maximizes progress to P
   [0600] Defined as the highest ratio of additional population coverage C/additional amino acid bases added AA. (C/AA).
   [0601] All candidate frames are either a new 25aa frame (AA=25), or can overlap with frames in the existing solution F—in which case it can add any amount less than 25aa (AA<25)
   [0602] Additional population coverage C is the increase in epitope count from E for haplotypes with <20 covered epitopes, weighted (multiplied) by the haplotype's population frequency summed across all four ethnic groups
   [0603] 20 epitopes per haplotype is determined (experimentally chosen) to be an efficient proxy towards reaching the overall coverage criteria of 30 candidate epitopes per diplotype
   [0604] Add f to solution frame set F. Remove from E, candidate epitopes within f.
[0605] After frames are chosen, create the final set F:
   [0606] First merge overlapping frames, yielding contiguous sequences (i.e. epitope “hotspots”)
   [0607] Next ensure all frames are less than 50% of that frame's overall gene size. If frames are larger than this size, divide them into smaller (potentially overlapping) frames that are each smaller than this requirement. Additional more stringent size limitations can be tested
[0608] To illustrates the marginal value of larger cassette sizes, frame selection can continue past when P is satisfied—but does not affect the composition of the chosen cassette for the criteria P.

### Cassette Ordering

[0609] The frames in solution frame set F are ordered to minimize the EDGE score of junction epitopes (unintended epitopes not part of the solution, created by adjacent frames). Successive frames within a gene are also forbidden to immediately follow each other in the cassette (intra-gene restriction). In other words, intra-gene restriction requires that if there are two or more SARS-CoV-2 derived nucleic acid sequences encoding epitopes derived from the same SARS-CoV-2 gene, the two sequences are ordered such that a first nucleic acid sequence cannot be immediately followed by or linked to a second nucleic acid sequence if the second nucleic acid sequence follows first nucleic acid sequence in the corresponding SARS-CoV-2 gene. For example, if there are 3 frames within the same gene (f1, f2, f3 in increasing order of amino acid position)
[0610] The following cassette orderings are impossible:
   [0611] f1 immediately followed by f2
   [0612] f2 immediately followed by f3
   [0613] f1 immediately followed by f3
[0614] The following cassette orderings are possible:
   [0615] f3 immediately followed by f2
   [0616] f2 immediately followed by f1

### Cassette Ordering Method

[0617] Google optimization routing tools [developers.google.com/optimization/routing] are used to perform a traveling salesman optimization route, where the distance between each pair of frames in F is:
[0618] Infinite, if the frames are not allowed to follow each other in this order, according to the above intra-gene restriction
[0619] Otherwise the sum of junction epitope EDGE scores across all alleles, weighted by allele frequency in population

[0620] Route finding of the minimal path distance yields the optimal ordering of the frames in the cassette to minimize junctional epitopes and avoid successive frames within a gene.

### Results

[0621] The population coverage criteria P was calculated with all initial epitopes provided by the SARS-CoV-2 Spike protein (SEQ ID NO:59) split into S1 and S2. Applying the optimization algorithms above yielded a 594 amino acid cassette sequence having 18 epitope-encoding frames, as shown in Table 3A. Table C presents each of the additional epitopes contained in the cassette (not including the epitopes derived from the Spike protein). Empirically, the optimal frame set F was produced when the size threshold for all frames was set to less than 42% of that frame's overall gene size. The coverage of the designed cassette over four populations is shown in FIG. 5, with the first column providing the number of SARS-CoV-2 epitopes predicted to be presented and the second column providing the expected number of presented epitopes, based on a 0.2 PPV. Each row shows the protection coverage of each population if a certain number of epitopes is used.

[0622] Potential HLA-DRB, HLA-DQ, and HLA-DP MHC class II epitopes from the SARS-CoV-2 proteome were also predicted. The method described for generating candidate CD8/MHC class I epitopes was used to generate peptides with sizes between 9 and 20 amino acids. EDGE model was run for class II to compute EDGE score of each of these peptides against each identifiable allele (see, e.g., U.S. application Ser. No. 16/606,577 and international patent application PCT/US2020/021508, each herein incorporated by reference in their entirety for all purposes). The list of CD4 epitopes with EDGE score greater than 0.001 are presented in Table B, as well as cognate HLA alleles with a predicted EDGE score greater than 0.001, with each cognate pairing ranked as H (EDGE score >0.1), M (EDGE score between 0.01 and 0.1), and L (EDGE score <0.01). HLA-DQ and HLA-DP are referred to by their alpha and beta chains used in the analysis, while HLA-DR is referred to by its beta chain as the alpha chain is generally invariable in the human population, with HLA-DR peptide contact regions particularly invariant.

[0623] The peptides receiving a score of >0.02 contained in the optimized MHC I cassette frames determined above were then identified. The threshold of 0.02 was chosen because the model prediction has the PPV of 0.2 in predicting Mass Spectrometry data with prevalence ratio positive vs negatives of 1:100. FIG. 6A illustrates the number of predicted epitopes presented by each MHC class II allele examined. FIG. 6B shows the population coverage of MHC class II at the diploid level.

[0624] Additional cassettes are designed using the epitope prediction and frame ordering algorithms described above where the initial population coverage criteria P is calculated with all initial epitopes provided by SARS-CoV-2 Membrane (SEQ ID NO:61), SARS-CoV-2 Nucleocapsid (SEQ ID NO:62), SARS-CoV-2 Envelope (SEQ ID NO:63), or combinations (including combinations with SARS-CoV-2 spike) or sequence variants thereof.

TABLE 1
Identified SARS-CoV-2 Mutations (>1%)

| | | Reference | Alternate | Variable |
|---|---|---|---|---|
| Gene | Position | Amino Acid | Amino Acid | Rate |
| orf1ab | 265 | T | I | 0.12474 |
| orflab | 378 | V | I | 0.022349 |
| orflab | 392 | G | D | 0.015073 |
| orflab | 448 | D | deletion | 0.030146 |
| orflab | 739 | I | V | 0.011435 |
| orflab | 765 | P | S | 0.012474 |
| orflab | 876 | A | T | 0.015073 |
| orflab | 3353 | K | R | 0.023909 |
| orflab | 3606 | L | F | 0.130977 |
| orflab | 4715 | P | L | 0.448025 |
| orf1ab | 5828 | P | L | 0.193867 |
| orf1ab | 5865 | Y | C | 0.199584 |
| S | 614 | D | G | 0.439815 |
| ORF3a | 57 | Q | H | 0.150943 |
| ORF3a | 251 | G | V | 0.086003 |
| M | 3 | D | G | 0.013508 |
| M | 175 | T | M | 0.051416 |
| ORF8 | 84 | L | S | 0.267563 |
| N | 203 | R | K | 0.124507 |
| N | 204 | G | R | 0.124068 |

TABLE 2
List of Identifiable Class I alleles

| | | | | | | |
|---|---|---|---|---|---|---|
| HLA- | HLA- | HLA- | HLA- | HLA- | HLA- | HLA- |
| A*01:01 | A*25:01 | A*68:01 | B*15:13 | B*40:06 | B*55:02 | C*07:02 |
| HLA- | HLA- | HLA- | HLA- | HLA- | HLA- | HLA- |
| A*02:01 | A*26:01 | A*68:02 | B*18:01 | B*41:02 | B*56:01 | C*07:04 |
| HLA- | HLA- | HLA- | HLA- | HLA- | HLA- | HLA- |
| A*02:02 | A*26:02 | A*74:01 | B*27:02 | B*42:01 | B*57:01 | C*07:27 |
| HLA- | HLA- | HLA- | HLA- | HLA- | HLA- | HLA- |
| A*02:03 | A*26:03 | B*07:02 | B*27:05 | B*44:02 | B*57:03 | C*08:01 |
| HLA- | HLA- | HLA- | HLA- | HLA- | HLA- | HLA- |
| A*02:04 | A*29:01 | B*07:04 | B*35:01 | B*44:03 | B*58:01 | C*08:02 |
| HLA- | HLA- | HLA- | HLA- | HLA- | HLA- | HLA- |
| A*02:05 | A*29:02 | B*07:05 | B*35:02 | B*44:05 | B*58:02 | C*08:03 |
| HLA- | HLA- | HLA- | HLA- | HLA- | HLA- | HLA- |
| A*02:06 | A*30:01 | B*08:01 | B*35:03 | B*45:01 | C*01:02 | C*12:02 |
| HLA- | HLA- | HLA- | HLA- | HLA- | HLA- | HLA- |
| A*02:07 | A*30:02 | B*13:01 | B*35:08 | B*46:01 | C*02:02 | C*12:03 |
| HLA- | HLA- | HLA- | HLA- | HLA- | HLA- | HLA- |
| A*02:11 | A*31:01 | B*13:02 | B*35:12 | B*48:01 | C*03:02 | C*12:05 |
| HLA- | HLA- | HLA- | HLA- | HLA- | HLA- | HLA- |
| A*03:01 | A*32:01 | B*14:01 | B*37:01 | B*49:01 | C*03:03 | C*14:02 |
| HLA- | HLA- | HLA- | HLA- | HLA- | HLA- | HLA- |
| A*03:02 | A*33:01 | B*14:02 | B*38:01 | B*50:01 | C*03:04 | C*14:03 |
| HLA- | HLA- | HLA- | HLA- | HLA- | HLA- | HLA- |
| A*11:01 | A*33:03 | B*15:01 | B*38:02 | B*51:01 | C*04:01 | C*15:02 |
| HLA- | HLA- | HLA- | HLA- | HLA- | HLA- | HLA- |
| A*11:02 | A*34:01 | B*15:02 | B*39:01 | B*52:01 | C*04:03 | C*15:05 |
| HLA- | HLA- | HLA- | HLA- | HLA- | HLA- | HLA- |
| A*23:01 | A*34:02 | B*15:03 | B*39:06 | B*53:01 | C*05:01 | C*16:01 |
| HLA- | HLA- | HLA- | HLA- | HLA- | HLA- | HLA- |
| A*24:02 | A*36:01 | B*15:10 | B*40:01 | B*54:01 | C*06:02 | C*16:04 |
| HLA- | HLA- | HLA- | HLA- | HLA- | HLA- | HLA- |
| A*24:07 | A*66:01 | B*15:11 | B*40:02 | B*55:01 | C*07:01 | C*17:01 |

TABLE 3A
Cassette Epitope Frames in Conjunction with Spike Protein

| | | | | Amino Acid |
|---|---|---|---|---|
| Frame | Gene | Gene Start | Gene End | Length |
| 1 | M | 172 | 204 | 33 |
| 2 | orf1ab | 4154 | 4178 | 25 |
| 3 | N | 301 | 345 | 45 |
| 4 | N | 151 | 175 | 25 |
| 5 | N | 71 | 95 | 25 |
| 6 | ORF3a | 106 | 130 | 25 |
| 7 | orf1ab | 4419 | 4443 | 25 |
| 8 | N | 259 | 283 | 25 |
| 9 | orf1ab | 5371 | 5395 | 25 |
| 10 | M | 85 | 140 | 56 |
| 11 | N | 352 | 393 | 42 |
| 12 | orf1ab | 2580 | 2604 | 25 |
| 13 | ORF3a | 1 | 47 | 47 |
| 14 | M | 34 | 60 | 27 |
| 15 | ORF3a | 53 | 86 | 34 |
| 16 | orf1ab | 2794 | 2818 | 25 |
| 17 | ORF3a | 199 | 255 | 57 |
| 18 | E | 44 | 71 | 28 |

### XIV.B. SARS-CoV-2 Vaccine Design

[0625] A series of vaccines against SARS-CoV-2 were designed to produce a balanced immune response inducing both neutralizing antibodies (from B cells) as well as effector and memory CD8+ T cell responses for maximum efficacy. In general, neutralizing antibodies to viral surface proteins can serve to prevent viral entry into cells and virus epitope-specific CD8+ T cells kill virally-infected cells. In addition, vaccines against SARS-CoV-2 were designed to maximize the coverage of the vaccine across the world population, i.e., target most individuals (e.g., >95%) receive a large number (e.g., >=30) of candidate CD8+ epitopes across all major ancestry groups while minimizing our cassette sequence footprint.

### Antigens and Cassettes

[0626] Vaccines are constructed encoding the MHC epitope-encoding cassettes designed using the epitope prediction and frame ordering algorithms described above. An exemplary cassette (herein referred to as the Concatenated EDGE predicted SARS-CoV-2 MHC Class I Epitope Cassette or EDGE Predicted Epitopes (EPE)) was generated where the initial population coverage criteria P was calculated with all initial epitopes provided by SARS-CoV-2 Spike, as described above.

[0627] Vaccines are also designed encoding various full-length proteins, either alone or in combination, generally for the purposes of stimulating a B cell response. Full-length proteins include SARS-CoV-2 Spike (SEQ ID NO:59), SARS-CoV-2 Membrane (SEQ ID NO:61), SARS-CoV-2 Nucleocapsid (SEQ ID NO:62), and SARS-CoV-2 Envelope (SEQ ID NO:63), sequences of which are shown in Table 3B.

[0628] With respect to the Spike protein, initial analysis of prevalent SARS-CoV-2 variants (as described above, see Table 1) identified a Spike protein variant present in almost 44% of genomes. Subsequent analysis of the over 8000 SARS-CoV-2 complete genomes identified a dominant variant at position 614 where the wildtype amino acid aspartic (D) is mutated to glycine (G). The mutation, denotated as D614G, is found on 60.05% of genomes sequenced worldwide, and 70.46% and 58.49% of the sequences in Europe and North America, respectively (FIG. 4). Accordingly, Spike proteins are used that contain the prevalent D614G Spike variant, with reference to the reference Spike protein (SEQ ID NO:59). Omicron SARS-CoV-2 variants assessed include the D614G mutation. In addition, a modified Spike protein was engineered to bias the Spike protein to remain in a predominantly prefusion state, as the prefusion Spike state may be a better target for antibody-mediated neutralization of the virus. The following mutations were selected: R682V to disrupt the Furin cleavage site; R815N to disrupt cleavage site within S2, and K986P and V987P to interfere with the secondary structure of Spike. Accordingly, “modified” Spike proteins are used that contain one or more of the following mutations, with reference to the reference Spike protein (SEQ ID NO:59): a D614G mutation, a R682V mutation, a R815N mutation, a K986P mutation, or a V987P mutation. For reference, a modified Spike proving having all of the Spike mutations is shown in SEQ ID NO:60. Furin cleavage sites can also be disrupted by one or more (or each of) mutations to R682, R683, and R685, such as mutating 682-685 RRAR (SEQ ID NO: 125) to GSAS (SEQ ID NO: 126). Corresponding Omicron/B.1.1.529 Furin mutations are R679, R680, and R682; corresponding Omicron/B.1.1.529 BA5 subvariant Furin mutations are R677, R678, and R680. Corresponding Omicron/B.1.1.529 mutations that interfere with the secondary structure of Spike are K983P and V984P; corresponding Omicron/B.1.1.529 BA5 subvariant mutations that interfere with the secondary structure of Spike are K981P and V982P. Mutations to Omicron/B.1.1.529 are with reference to the native Omicron/B.1.1.529 Spike protein (SEQ ID NO:27977). Mutations to Omicron/B.1.1.529 BA5 subvariant are with reference to the native Omicron/B.1.1.529 BA5 subvariant Spike protein (SEQ ID NO:27979).

[0629] Various vaccine designs and their respective cassette nucleotide sequences are presented in more detail in Table 4. For SAM based vaccines, promoter and/or poly(A) signal sequences can be removed given cassettes are generally operably linked to the endogenous 26S promoter and poly(A) sequence provided by the vector backbone. Depending on the cassette features and configuration, translated proteins (e.g., those in Table 3B) may also include an additional sequence(s) related to the particular expression strategy, such as a 2A ribosome skipping sequence elements (or fragments thereof following translation) and additional 26S promoter sequences.

[0630] An antigen cassette including an Omicron/B.1.1.529 Spike variant was constructed (“SAM-Nuc-TCE11-SpikeB.1.1.529” SEQ ID NO: 27976) that includes: SARS-CoV-2 Spike protein encoded by Cool Tool optimized sequence version 1 (SEQ ID NO:79) with 37 Omicron mutations manually changed as applicable (see SEQ ID NO:27977); mutations disrupting the Furin cleavage site (679-682 RRAR [SEQ ID NO: 125] to GSAS [SEQ ID NO: 126]); and K983P and V984P to interfere with the secondary structure of Spike, with reference to the native Omicron Spike protein (SEQ ID NO:27977). An antigen cassette including an Omicron/B.1.1.529 BA5 subvariant Spike was constructed through replacing the nucleotide sequences encoding the Omicron/B.1.1.529 Spike in SEQ ID NO: 27976 with nucleotide sequences encoding a Omicron/B.1.1.529 BA5 subvariant Spike.

TABLE 3B
SARS-CoV-2 Proteins

| | | SEQ ID |
|---|---|---|
| Peptide | Amino Acid Sequence | NO: |
| Concatenated | TSRTLSYYKLGASQRVAGDSGFAAYSRYRIGNYCAAGTTQTACTDDNA | 57 |
| EDGE predicted | LAYYNTTKGGWPQIAQFAPSASAFFGMSRIGMEVTPSGTWLTYTGAIK | |
| SARS-CoV-2 | LDDKDPNPANNAAIVLQLPQGTTLPKGFYAEGGVPINTNSSPDDQIG | |
| MHC Class I | YYRRATRRIRLYLYALVYFLQSINFVRIIMRLWLCSTDVVYRAFDIY | |
| Epitope Cassette | NDKVAGFAKFLKTRQKRTATKAYNVTQAFGRRGPEQTQPYVCNAPG | |
| | CDVTDVTQLYLGGMSYYACLVGLMWLSYFIASFRLFARTRSMWSFN | |
| | PETNILLNVPLHGTILTRPLLESELVILLNKHIDAYKTFPPTEPKK | |
| | DKKKKADETQALPQRQKKQQTVTVGDSAEVAVKMFDAYVNTFSSTF | |
| | NVMDLFMRIFTIGTVTLKQGEIKDATPSDFVRATATIPIQASLPFG | |
| | WLILLQFAYANRNRFLYIIKLIFLWLLWPVLAVFQSASKIITLKKR | |
| | WQLALSKGVHFVCNLLLLHVMSKHTDFSSEIIGYKAIDGGVTRDCV | |
| | VLHSYFTSDYYQLYSTQLSTDTGVEHVTFFIYNKIVDEPEEHVQIH | |
| | TIDGSSGVCNIVNVSLVKPSFYVYSRVKNLNSSRVP | |
| Concatenated | MAGTSRTLSYYKLGASQRVAGDSGFAAYSRYRIGNYCAAGTTQTACT | 58 |
| EDGE predicted | DDNALAYYNTTKGGWPQIAQFAPSASAFFGMSRIGMEVTPSGTWLTY | |
| SARS-CoV-2 | TGAIKLDDKDPNPANNAAIVLQLPQGTTLPKGFYAEGGVPINTNSSP | |
| MHC Class I | DDQIGYYRRATRRIRLYLYALVYFLQSINFVRIIMRLWLCSTDVVYR | |
| Epitope Cassette | AFDIYNDKVAGFAKFLKTRQKRTATKAYNVTQAFGRRGPEQTQPYVC | |
| with N-term | NAPGCDVTDVTQLYLGGMSYYACLVGLMWLSYFIASFRLFARTRSMW | |
| leader (bold) | SFNPETNILLNVPLHGTILTRPLLESELVILLNKHIDAYKTFPPTEP | |
| and C-term | KKDKKKKADETQALPQRQKKQQTVTVGDSAEVAVKMFDAYVNTFSST | |
| Universal MHC | FNVMDLFMRIFTIGTVTLKQGEIKDATPSDFVRATATIPIQASLPFG | |
| Class II with | WLILLQFAYANRNRFLYIIKLIFLWLLWPVLAVFQSASKIITLKKRW | |
| GPGPG linkers | QLALSKGVHFVCNLLLLHVMSKHTDFSSEIIGYKAIDGGVTRDCVVL | |
| (SEQ ID NO: 56) | HSYFTSDYYQLYSTQLSTDTGVEHVTFFIYNKIVDEPEEHVQIHTID | |
| (bold italic) | GSSGVCNIVNVSLVKPSFYVYSRVKNLNSSRVPGPGPGAKFVAAWTL | |
| | KAAAGPGPGQYIKANSKFIGITELGPGPG | |
| SARS-CoV-2 | MFVFLVLLPLVSSQCVNLTTRTQLPPAYTNSFTRGVYYPDKVFRSSVL | 59 |
| Spike | HSTQDLFLPFFSNVTWFHAIHVSGTNGTKRFDNPVLPFNDGVYFASTE | |
| | KSNIIRGWIFGTTLDSKTQSLLIVNNATNVVIKVCEFQFCNDPFLGVYY | |
| | HKNNKSWMESEFRVYSSANNCTFEYVSQPFLMDLEGKQGNFKNLREFV | |
| | FKNIDGYFKIYSKHTPINLVRDLPQGFSALEPLVDLPIGINITRFQTL | |
| | LALHRSYLTPGDSSSGWTAGAAAYYVGYLQPRTFLLKYNENGTITDAV | |
| | DCALDPLSETKCTLKSFTVEKGIYQTSNFRVQPTESIVRFPNITNLCP | |
| | FGEVFNATRFASVYAWNRKRISNCVADYSVLYNSASFSTFKCYGVSPT | |
| | KLNDLCFTNVYADSFVIRGDEVRQIAPGQTGKIADYNYKLPDDFTGCV | |
| | IAWNSNNLDSKVGGNYNYLYRLFRKSNLKPFERDISTEIYQAGSTPCN | |
| | GVEGFNCYFPLQSYGFQPTNGVGYQPYRVVVLSFELLHAPATVCGPK | |
| | KSTNLVKNKCVNFNFNGLTGTGVLTESNKKFLPFQQFGRDIADTTDAV | |
| | RDPQTLEILDITPCSFGGVSVITPGTNTSNQVAVLYQDVNCTEVPVAI | |
| | HADQLTPTWRVYSTGSNVFQTRAGCLIGAEHVNNSYECDIPIGAGICA | |
| | SYQTQTNSPRRARSVASQSIIAYTMSLGAENSVAYSNNSIAIPTNFTI | |
| | SVTTEILPVSMTKTSVDCTMYICGDSTECSNLLLQYGSFCTQLNRALT | |
| | GIAVEQDKNTQEVFAQVKQIYKTPPIKDFGGFNFSQILPDPSKPSKRS | |
| | FIEDLLFNKVTLADAGFIKQYGDCLGDIAARDLICAQKFNGLTVLPPL | |
| | LTDEMIAQYTSALLAGTITSGWTFGAGAALQIPFAMQMAYRENGIGVT | |
| | QNVLYENQKLIANQFNSAIGKIQDSLSSTASALGKLQDVVNQNAQALN | |
| | TLVKQLSSNFGAISSVLNDILSRLDKVEAEVQIDRLITGRLQSLQTYV | |
| | TQQLIRAAEIRASANLAATKMSECVLGQSKRVDFCGKGYHLMSFPQSA | |
| | PHGVVFLHVTYVPAQEKNFTTAPAICHDGKAHFPREGVFVSNGTHWFV | |
| | TQRNFYEPQIITTDNTFVSGNCDVVIGIVNNTVYDPLQPELDSFKEEL | |
| | DKYFKNHTSPDVDLGDISGINASVVNIQKEIDRLNEVAKNLNESLIDL | |
| | QELGKYEQYIKWPWYIWLGFIAGLIAIVMVTIMLCCMTSCCSCLKGCC | |
| | SCGSCCKFDEDDSEPVLKGVKLHYT | |
| SARS-CoV-2 | MFVFLVLLPLVSSQCVNLTTRTQLPPAYTNSFTRGVYYPDKVFRSSVL | 60 |
| Modified Spike | HSTQDLFLPFFSNVTWFHAIHVSGTNGTKRFDNPVLPFNDGVYFASTE | |
| (Potential | KSNIIRGWIFGTTLDSKTQSLLIVNNATNVVIKVCEFQFCNDPFLGVY | |
| mutations in | YHKNNKSWMESEFRVYSSANNCTFEYVSQPFLMDLEGKQGNFKNLREF | |
| Bold italic | VFKNIDGYFKIYSKHTPINLVRDLPQGFSALEPLVDLPIGINITRFQT | |
| lowercase. | LLALHRSYLTPGDSSSGWTAGAAAYYVGYLQPRTFLLKYNENGTITDA | |
| modifications | VDCALDPLSETKCTLKSFTVEKGIYQTSNFRVQPTESIVRFPNITNLC | |
| may be in | PFGEVFNATRFASVYAWNRKRISNCVADYSVLYNSASFSTFKCYGVSP | |
| separate or | TKLNDLCFTNVYADSFVIRGDEVRQIAPGQTGKIADYNYKLPDDFTGC | |
| combined | VIAWNSNNLDSKVGGNYNYLYRLFRKSNLKPFERDISTEIYQAGSTPC | |
| constructs) | NGVEGFNCYFPLQSYGFQPTNGVGYQPYRVVVLSFELLHAPATVCGPK | |
| | KSTNLVKNKCVNFNFNGLTGTGVLTESNKKFLPFQQFGRDIADTTDAV | |
| | RDPQTLEILDITPCSFGGVSVITPGTNTSNQVAVLYQgVNCTEVPVAI | |
| | HADQLTPTWRVYSTGSNVFQTRAGCLIGAEHVNNSYECDIPIGAGICA | |
| | SYQTQTNSPvRARSVASQSIIAYTMSLGAENSVAYSNNSIAIPTNFTI | |
| | SVTTEILPVSMTKTSVDCTMYICGDSTECSNLLLQYGSFCTQLNRALT | |
| | GIAVEQDKNTQEVFAQVKQIYKTPPIKDFGGFNFSQILPDPSKPSKnS | |
| | FIEDLLFNKVTLADAGFIKQYGDCLGDIAARDLICAQKFNGLTVLPPL | |
| | LTDEMIAQYTSALLAGTITSGWTFGAGAALQIPFAMQMAYRENGIGVT | |
| | QNVLYENQKLIANQFNSAIGKIQDSLSSTASALGKLQDVVNQNAQALN | |
| | TLVKQLSSNFGAISSVLNDILSRLDppEAEVQIDRLITGRLQSLQTYV | |
| | TQQLIRAAEIRASANLAATKMSECVLGQSKRVDFCGKGYHLMSFPQSA | |
| | PHGVVFLHVTYVPAQEKNFTTAPAICHDGKAHFPREGVFVSNGTHWFV | |
| | TQRNFYEPQIITTDNTFVSGNCDVVIGIVNNTVYDPLQPELDSFKEEL | |
| | DKYFKNHTSPDVDLGDISGINASVVNIQKEIDRLNEVAKNLNESLIDL | |
| | QELGKYEQYIKWPWYIWLGFIAGLIAIVMVTIMLCCMTSCCSCLKGCC | |
| | SCGSCCKFDEDDSEPVLKGVKLHYT | |
| SARS-CoV-2 | MADSNGTITVEELKKLLEQWNLVIGFLFLTWICLLQFAYANRNRFLYI | 61 |
| Membrane | IKLIFLWLLWPVTLACFVLAAVYRINWITGGIAIAMACLVGLMWLSYF | |
| | IASFRLFARTRSMWSFNPETNILLNVPLHGTILTRPLLESELVIGAVI | |
| | LRGHLRIAGHHLGRCDIKDLPKEITVATSRTLSYYKLGASQRVAGDSG | |
| | FAAYSRYRIGNYKLNTDHSSSSDNIALLVQ | |
| SARS-CoV-2 | MSDNGPQNQRNAPRITFGGPSDSTGSNQNGERSGARSKQRRPQGLPN | 62 |
| Nucleocapsid | NTASWFTALTQHGKEDLKFPRGQGVPINTNSSPDDQIGYYRRATRRI | |
| | RGGDGKMKDLSPRWYFYYLGTGPEAGLPYGANKDGIIWVATEGALNT | |
| | PKDHIGTRNPANNAAIVLQLPQGTTLPKGFYAEGSRGGSQASSRSSS | |
| | RSRNSSRNSTPGSSRGTSPARMAGNGGDAALALLLLDRLNQLESKMS | |
| | GKGQQQQGQTVTKKSAAEASKKPRQKRTATKAYNVTQAFGRRGPEQT | |
| | QGNFGDQELIRQGTDYKHWPQIAQFAPSASAFFGMSRIGMEVTPSGT | |
| | WLTYTGAIKLDDKDPNFKDQVILLNKHIDAYKTFPPTEPKKDKKKKA | |
| | DETQALPQRQKKQQTVTLLPAADLDDFSKQLQQSMSSADSTQA | |
| SARS-CoV-2 | MYSFVSEETGTLIVNSVLLFLAFVVFLLVTLAILTALRLCAYCCNIV | 63 |
| Envelope | NVSLVKPSFYVYSRVKNLNSSRVPDLLV | |
| SARS-CoV-2 | MFVFLVLLPLVSSQCVNLTTRTQLPPAYTNSFTRGVYYPDKVFRSS | 27974 |
| Spike | VLHSTQDLFLPFFSNVTWFHVISGTNGTKRFDNPVLPFNDGVYFAS | |
| (B.1.1.529 | IEKSNIIRGWIFGTTLDSKTQSLLIVNNATNVVIKVCEFQFCNDPF | |
| “Omicron” | LDHKNNKSWMESEFRVYSSANNCTFEYVSQPFLMDLEGKQGNFKNL | |
| isolate; | REFVFKNIDSGYFKIYSKHTPIIVREPEDLPQGFSALEPLVDLPIG | |
| modified); | INITRFQTLLALHRYLTPGDSSSGWTAGAAAYYVGYLQPRTFLLKY | |
| Includes | NENGTITDAVDCALDPLSETKCTLKSFTVEKGIYQTSNFRVQPTES | |
| mutations 679- | IVRFPNITNLCPFDEVENATRFASVYAWNRKRISNCVADYSVLYNL | |
| 682 RRAR [SEQ | APFFTFKCYGVSPTKLNDLCFTNVYADSFVIRGDEVRQIAPGQTGN | |
| ID NO: 125] to | IADYNYKLPDDFTGCVIAWNSNKLDSKVSGNYNYLYRLFRKSNLKP | |
| GSAS [SEQ ID | FERDISTEIYQAGNKPCNGVAGENCYFPLKSYSFRPTYGVGHQPYR | |
| NO: 126], K983P | VVVLSFELLHAPATVCGPKKSTNLVKNKCVNFNFNGLKGTGVLTES | |
| and V984P | NKKFLPFQQFGRDIADTTDAVRDPQTLEILDITPCSFGGVSVITPG | |
| | TNTSNQVAVLYQGVNCTEVPVAIHADQLTPTWRVYSTGSNVFQTRA | |
| | GCLIGAEYVNNSYECDIPIGAGICASYQTQTKSHGSASSVASQSII | |
| | AYTMSLGAENSVAYSNNSIAIPTNFTISVTTEILPVSMTKTSVDCT | |
| | MYICGDSTECSNLLLQYGSFCTQLKRALTGIAVEQDKNTQEVFAQV | |
| | KQIYKTPPIKYFGGFNFSQILPDPSKPSKRSFIEDLLFNKVTLADA | |
| | GFIKQYGDCLGDIAARDLICAQKFKGLTVLPPLLTDEMIAQYTSAL | |
| | LAGTITSGWTFGAGAALQIPFAMQMAYRENGIGVTQNVLYENQKLI | |
| | ANQFNSAIGKIQDSLSSTASALGKLQDVVNHNAQALNTLVKQLSSK | |
| | FGAISSVLNDIFSRLDPPEAEVQIDRLITGRLQSLQTYVTQQLIRA | |
| | AEIRASANLAATKMSECVLGQSKRVDFCGKGYHLMSFPQSAPHGVV | |
| | FLHVTYVPAQEKNFTTAPAICHDGKAHFPREGVFVSNGTHWFVTQR | |
| | NFYEPQIITTDNTFVSGNCDVVIGIVNNTVYDPLQPELDSFKEELD | |
| | KYFKNHTSPDVDLGDISGINASVVNIQKEIDRLNEVAKNLNESLID | |
| | LQELGKYEQYIKWPWYIWLGFIAGLIAIVMVTIMLCCMTSCCSCLK | |
| | GCCSCGSCCKFDEDDSEPVLKGVKLHYT | |
| SARS-CoV-2 | MFVFLVLLPLVSSQCVNLTTRTQLPPAYTNSFTRGVYYPDKVFRSS | 27977 |
| Spike | VLHSTQDLFLPFFSNVTWFHVISGTNGTKRFDNPVLPFNDGVYFAS | |
| (B.1.1.529 | IEKSNIIRGWIFGTTLDSKTQSLLIVNNATNVVIKVCEFQFCNDPF | |
| “Omicron” | LDHKNNKSWMESEFRVYSSANNCTFEYVSQPFLMDLEGKQGNFKNL | |
| isolate native) | REFVFKNIDGYFKIYSKHTPIIVREPEDLPQGFSALEPLVDLPIGI | |
| | NITRFQTLLALHRSYLTPGDSSSGWTAGAAAYYVGYLQPRTFLLKY | |
| | NENGTITDAVDCALDPLSETKCTLKSFTVEKGIYQTSNFRVQPTES | |
| | IVRFPNITNLCPFDEVENATRFASVYAWNRKRISNCVADYSVLYNL | |
| | APFFTFKCYGVSPTKLNDLCFTNVYADSFVIRGDEVRQIAPGQTGN | |
| | IADYNYKLPDDFTGCVIAWNSNKLDSKVSGNYNYLYRLFRKSNLKP | |
| | FERDISTEIYQAGNKPCNGVAGENCYFPLKSYSFRPTYGVGHQPYR | |
| | VVVLSFELLHAPATVCGPKKSTNLVKNKCVNFNFNGLKGTGVLTES | |
| | NKKFLPFQQFGRDIADTTDAVRDPQTLEILDITPCSFGGVSVITPG | |
| | TNTSNQVAVLYQGVNCTEVPVAIHADQLTPTWRVYSTGSNVFQTRA | |
| | GCLIGAEYVNNSYECDIPIGAGICASYQTQTKSHRRARSVASQSII | |
| | AYTMSLGAENSVAYSNNSIAIPTNFTISVTTEILPVSMTKTSVDCT | |
| | MYICGDSTECSNLLLQYGSFCTQLKRALTGIAVEQDKNTQEVFAQV | |
| | KQIYKTPPIKYFGGFNFSQILPDPSKPSKRSFIEDLLFNKVTLADA | |
| | GFIKQYGDCLGDIAARDLICAQKFKGLTVLPPLLTDEMIAQYTSAL | |
| | LAGTITSGWTFGAGAALQIPFAMQMAYRENGIGVTQNVLYENQKLI | |
| | ANQFNSAIGKIQDSLSSTASALGKLQDVVNHNAQALNTLVKQLSSK | |
| | FGAISSVLNDIFSRLDKVEAEVQIDRLITGRLQSLQTYVTQQLIRA | |
| | AEIRASANLAATKMSECVLGQSKRVDFCGKGYHLMSFPQSAPHGVV | |
| | FLHVTYVPAQEKNFTTAPAICHDGKAHFPREGVFVSNGTHWFVTQR | |
| | NFYEPQIITTDNTFVSGNCDVVIGIVNNTVYDPLQPELDSFKEELD | |
| | KYFKNHTSPDVDLGDISGINASVVNIQKEIDRLNEVAKNLNESLID | |
| | LQELGKYEQYIKWPWYIWLGFIAGLIAIVMVTIMLCCMTSCCSCLK | |
| | GCCSCGSCCKFDEDDSEPVLKGVKLHYT | |
| Concatenated | MAGNVAFQTVKPGNFNKDFYDFAVSKGFFKEGSSGASQRVAGDSGF | |
| EDGE predicted | AAYSRYRIGNDGVPFVVSTGYHFRELGVYLTFYLTNDVSFLAHIQW | 27975 |
| SARS-CoV-2 | MVMFTPGLMWLSYFIASFRLFARTRSMFEYYHTTDPSFLGRYMSAL | |
| MHC Class I | NHTKKWKYPQISNEKQEILGTVSWNLREATTRQVVNVVTTKIALKT | |
| Epitope Cassette | LACFVLAAVYRINWITGPGPGAKFVAAWTLKAAAGPGPGQYIKANS | |
| “TCE11” with | KFIGITELGPGPG | |
| N-term leader | | |
| (bold) and C- | | |
| term Universal | | |
| MHC Class II | | |
| with GPGPG | | |
| linkers (SEQ ID | | |
| NO: 56) (bold | | |
| italic) | | |
| SARS-CoV-2 | MFVFLVLLPLVSSQCVNLITRTQSYTNSFTRGVYYPDKVFRSSVLHST | 27978 |
| Spike | QDLFLPFFSNVTWFHAISGTNGTKRFDNPVLPFNDGVYFASTEKSNIIR | |
| (B.1.1.529 | GWIFGTTLDSKTQSLLIVNNATNVVIKVCEFQFCNDPFLDVYYHKNNKS | |
| “Omicron” BA5 | WMESEFRVYSSANNCTFEYVSQPFLMDLEGKQGNFKNLREFVFKNIDG | |
| subvariant; | YFKIYSKHTPINLGRDLPQGFSALEPLVDLPIGINITRFQTLLALHRS | |
| modified); | YLTPGDSSSGWTAGAAAYYVGYLQPRTFLLKYNENGTITDAVDCALDP | |
| Includes | LSETKCTLKSFTVEKGIYQTSNFRVQPTESIVRFPNITNLCPFDEVEN | |
| mutations 677- | ATRFASVYAWNRKRISNCVADYSVLYNFAPFFAFKCYGVSPTKLNDL | |
| 680 RRAR [SEQ | CFTNVYADSFVIRGNEVSQIAPGQTGNIADYNYKLPDDFTGCVIAWNS | |
| ID NO: 125] to | NKLDSKVGGNYNYRYRLFRKSNLKPFERDISTEIYQAGNKPCNGVAG | |
| GSAS [SEQ ID | VNCYFPLQSYGFRPTYGVGHQPYRVVVLSFELLHAPATVCGPKKSTN | |
| NO: 126], K981P | LVKNKCVNFNFNGLTGTGVLTESNKKFLPFQQFGRDIADTTDAVRDP | |
| and V982P | QTLEILDITPCSFGGVSVITPGTNTSNQVAVLYQGVNCTEVPVAIHA | |
| | DQLTPTWRVYSTGSNVFQTRAGCLIGAEYVNNSYECDIPIGAGICAS | |
| | YQTQTKSHGSASSVASQSIIAYTMSLGAENSVAYSNNSIAIPTNFTI | |
| | SVTTEILPVSMTKTSVDCTMYICGDSTECSNLLLQYGSFCTQLKRAL | |
| | TGIAVEQDKNTQEVFAQVKQIYKTPPIKYFGGFNFSQILPDPSKPSK | |
| | RSFIEDLLENKVTLADAGFIKQYGDCLGDIAARDLICAQKENGLTVL | |
| | PPLLTDEMIAQYTSALLAGTITSGWTFGAGAALQIPFAMQMAYRENG | |
| | IGVTQNVLYENQKLIANQFNSAIGKIQDSLSSTASALGKLQDVVNHN | |
| | AQALNTLVKQLSSKFGAISSVLNDILSRLDPPEAEVQIDRLITGRLQ | |
| | SLQTYVTQQLIRAAEIRASANLAATKMSECVLGQSKRVDFCGKGYHL | |
| | MSFPQSAPHGVVFLHVTYVPAQEKNFTTAPAICHDGKAHFPREGVFV | |
| | SNGTHWFVTQRNFYEPQIITTDNTFVSGNCDVVIGIVNNTVYDPLQP | |
| | ELDSFKEELDKYFKNHTSPDVDLGDISGINASVVNIQKEIDRLNEVA | |
| | IKNLNESLIDLQELGKYEQYKWPWYIWLGFIAGLIAIVMVTIMLCCM | |
| | TSCCSCLKGCCSCGSCCKFDEDDSEPVLKGVKLHYT | |
| SARS-CoV-2 | MFVFLVLLPLVSSQCVNLITRTQSYTNSFTRGVYYPDKVFRSSVLH | 27979 |
| Spike | STQDLFLPFFSNVTWFHAISGTNGTKRFDNPVLPFNDGVYFASTEK | |
| (BA5 “Omicron” | SNIIRGWIFGTTLDSKTQSLLIVNNATNVVIKVCEFQFCNDPFLDV | |
| variant native) | YYHKNNKSWMESEFRVYSSANNCTFEYVSQPFLMDLEGKQGNFKNL | |
| | REFVFKNIDGYFKIYSKHTPINLGRDLPQGFSALEPLVDLPIGINI | |
| | TRFQTLLALHRSYLTPGDSSSGWTAGAAAYYVGYLQPRTFLLKYNE | |
| | NGTITDAVDCALDPLSETKCTLKSFTVEKGIYQTSNFRVQPTESIV | |
| | RFPNITNLCPFDEVENATRFASVYAWNRKRISNCVADYSVLYNFAP | |
| | FFAFKCYGVSPTKLNDLCFTNVYADSFVIRGNEVSQIAPGQTGNIA | |
| | DYNYKLPDDFTGCVIAWNSNKLDSKVGGNYNYRYRLFRKSNLKPFE | |
| | RDISTEIYQAGNKPCNGVAGVNCYFPLQSYGFRPTYGVGHQPYRVV | |
| | VLSFELLHAPATVCGPKKSTNLVKNKCVNFNFNGLTGTGVLTESNK | |
| | KFLPFQQFGRDIADTTDAVRDPQTLEILDITPCSFGGVSVITPGTN | |
| | TSNQVAVLYQGVNCTEVPVAIHADQLTPTWRVYSTGSNVFQTRAGC | |
| | LIGAEYVNNSYECDIPIGAGICASYQTQTKSHRRARSVASQSIIAY | |
| | TMSLGAENSVAYSNNSIAIPTNFTISVTTEILPVSMTKTSVDCTMY | |
| | ICGDSTECSNLLLQYGSFCTQLKRALTGIAVEQDKNTQEVFAQVKQ | |
| | IYKTPPIKYFGGFNFSQILPDPSKPSKRSFIEDLLENKVTLADAGF | |
| | IKQYGDCLGDIAARDLICAQKFNGLTVLPPLLTDEMIAQYTSALLA | |
| | GTITSGWTFGAGAALQIPFAMQMAYRENGIGVTQNVLYENQKLIAN | |
| | QFNSAIGKIQDSLSSTASALGKLQDVVNHNAQALNTLVKQLSSKFG | |
| | AISSVLNDILSRLDKVEAEVQIDRLITGRLQSLQTYVTQQLIRAAE | |
| | IRASANLAATKMSECVLGQSKRVDFCGKGYHLMSFPQSAPHGVVFL | |
| | HVTYVPAQEKNFTTAPAICHDGKAHFPREGVFVSNGTHWFVTQRNF | |
| | YEPQIITTDNTFVSGNCDVVIGIVNNTVYDPLQPELDSFKEELDKY | |
| | FKNHTSPDVDLGDISGINASVVNIQKEIDRLNEVAKNLNESLIDLQ | |
| | ELGKYEQYIKWPWYIWLGFIAGLIAIVMVTIMLCCMTSCCSCLKGC | |
| | CSCGSCCKFDEDDSEPVLKGVKLHYT | |

TABLE 4
SARS-CoV-2 Vaccine Designs

| Vector Insert | SEQ ID NO: |
|---|---|
| EDGE Predicted Epitopes (EPE): Concatenated EDGE predicted SARS- | 64 |
| CoV-2 MHC Class I Epitope Cassette with 5′ expression leader (bold) and 3′ | |
| Universal MHC Class II with GPGPG linkers (SEQ ID NO: 56) (bold italic) | |
| CMV-EPE-BGH | 65 |
| CMV-Spike (IDT)-T2A-membrane protein-SV40 | 66 |
| CMV-Spike (IDT)-T2A-membrane protein-BGH | 67 |
| CMV-Spike (IDT)-SV40-CMV-EPE-BGH | 68 |
| CMV-Spike (IDT)-SV40 | 69 |
| CMV-Modified Spike (IDT)-SV40 | 70 |
| CMV-Spike (IDT)-T2A-Envelope-SV40-CMV-nucleocapsid-T2A-membrane | 71 |
| protein-SV40 | |
| CMV-Spike (IDT)-SV40 -CMV-nucleocapsid-T2A-membrane protein-BGH | 72 |
| CMV-Spike (IDT)-T2A-envelope protein-T2A-membrane protein-SV40 | 73 |
| CMV-Spike (IDT)-T2A-envelope protein-T2A-membrane protein-SV40- | 74 |
| CMV-EPE-BGH | |
| SAM-Nuc-TCE11-SpikeB.1.1.529 sequence [GRT-R918] | 27976 |
| SAM-Nuc-TCE11-SpikeB.1.1.529 BA5 subisolate sequence [GRT-R920] | 27976 with Spike |
| | encoding sequences |
| | substituted with 27980 |
| SAM-N-TCE11-Spike beta (501Y.V2) [GRT-R912] | 27981 |
| SAM-TCE9-Spike beta (501Y.V2) [GRT-R914] | 27982 |
| SAM-SGP1-TCE5-SGP2-CTSpikeGF2P | 27983 |

[0631] A RNA alphavirus backbone for the antigen expression system was generated from a self-replicating Venezuelan Equine Encephalitis (VEE) virus (Kinney, 1986, Virology 152: 400-413) by deleting the structural proteins of VEE located 3′ of the 26S sub-genomic promoter (VEE sequences 7544 to 11,175 deleted; numbering based on Kinney et al 1986; SEQ ID NO:6). To generate the self-amplifying mRNA (“SAM”) vector, the deleted sequences are replaced by antigen sequences. A representative SAM vector containing 20 model antigens is “VEE-MAG25mer” (SEQ ID NO:4). The vectors featuring the antigen cassettes described having the MAG25mer cassette can be replaced by the SARS-CoV-2 cassettes and/or full-length proteins described herein.

### In Vitro Transcription to Generate SAM

[0632] For in vivo studies: SAM vectors were generated as “AU-SAM” vectors. A modified T7 RNA polymerase promoter (TAATACGACTCACTATA; SEQ ID NO: 120), which lacks the canonical 3′ dinucleotide GG, was added to the 5′ end of the SAM vector to generate the in vitro transcription template DNA (SEQ ID NO:77; 7544 to 11,175 deleted without an inserted antigen cassette). Reaction conditions are described below:
[0633] 1× transcription buffer (40 mM Tris-HCL [pH7.9], 10 mM dithiothreitol, 2 mM spermidine, 0.002% Triton X-100, and 27 mM magnesium chloride) using final concentrations of 1×T7 RNA polymerase mix (E2040S); 0.025 mg/mL DNA transcription template (linearized by restriction digest); 8 mM CleanCap Reagent AU (Cat. No. N-7114) and 10 mM each of ATP, cytidine triphosphate (CTP), GTP, and uridine triphosphate (UTP)
[0634] Transcription reactions were incubated at 37° C. for 2 hr and treated with final 2 U DNase I (AM2239)/0.001 mg DNA transcription template in DNase I buffer for 1 hr at 37° C.
[0635] SAM was purified by RNeasy Maxi (QIAGEN, 75162)

[0636] Alternatively to co-transcriptional addition of a 5′ cap structure, a 7-methylguanosine or a related 5′ cap structure can be enzymatically added following transcription using a vaccinia capping system (NEB Cat. No. M2080) containing mRNA 2′-O-methyltransferase and S-Adenosyl methionine.

### Adenoviral Vectors

[0637] A modified ChAdV68 vector (“chAd68-Empty-E4deleted” SEQ ID NO:75) for the antigen expression system was generated based on AC_000011.1 with E1 (nt 577 to 3403), E3 (nt 27,125-31,825), and E4 region (nt 34,916 to 35,642) sequences deleted and the corresponding ATCC VR-594 (Independently sequenced Full-Length VR-594 C68 SEQ ID NO:10) nucleotides substituted at five positions. The full-length ChAdV68 AC_000011.1 sequence with corresponding ATCC VR-594 nucleotides substituted at five positions is referred to as “ChAdV68.5WTnt” (SEQ ID NO:1). Antigen cassettes under the control of the CMV promoter/enhancer are inserted in place of deleted E1 sequences.

### Adenoviral Production in 293F Cells

[0638] ChAdV68 virus production are performed in 293F cells grown in 293 FreeStyle™ (ThermoFisher) media in an incubator at 8% CO₂. On the day of infection cells are diluted to 10⁶ cells per mL, with 98% viability and 400 mL are used per production run in 1 L Shake flasks (Corning). 4 mL of the tertiary viral stock with a target MOI of >3.3 is used per infection. The cells are incubated for 48-72 h until the viability was <70% as measured by Trypan blue. The infected cells are then harvested by centrifugation, full speed bench top centrifuge and washed in 1×PBS, re-centrifuged and then re-suspended in 20 mL of 10 mM Tris pH7.4. The cell pellet is lysed by freeze thawing 3× and clarified by centrifugation at 4,300×g for 5 minutes.

### Adenoviral Purification by CsCl Centrifugation

[0639] Viral DNA is purified by CsCl centrifugation. Two discontinuous gradient runs are performed. The first to purify virus from cellular components and the second to further refine separation from cellular components and separate defective from infectious particles.

[0640] 10 mL of 1.2 (26.8 g CsCl dissolved in 92 mL of 10 mM Tris pH 8.0) CsCl is added to polyallomer tubes. Then 8 mL of 1.4 CsCl (53 g CsCl dissolved in 87 mL of 10 mM Tris pH 8.0) is carefully added using a pipette delivering to the bottom of the tube. The clarified virus is carefully layered on top of the 1.2 layer. If needed more 10 mM Tris is added to balance the tubes. The tubes are then placed in a SW-32Ti rotor and centrifuged for 2 h 30 min at 10° C. The tube are then removed to a laminar flow cabinet and the virus band pulled using an 18 gauge needle and a 10 mL syringe. Care is taken not to remove contaminating host cell DNA and protein. The band is then diluted at least 2× with 10 mM Tris pH 8.0 and layered as before on a discontinuous gradient as described above. The run is performed as described before except that this time the run is performed overnight. The next day the band is pulled with care to avoid pulling any of the defective particle band. The virus is then dialyzed using a Slide-a-Lyzer™ Cassette (Pierce) against ARM buffer (20 mM Tris pH 8.0, 25 mM NaCl, 2.5% Glycerol). This is performed 3×, 1 h per buffer exchange. The virus is then aliquoted for storage at −80° C.

### Adenoviral Viral Assays

[0641] VP concentration is performed by using an OD 260 assay based on the extinction coefficient of 1.1×10¹² viral particles (VP) is equivalent to an Absorbance value of 1 at OD260 nm. Two dilutions (1:5 and 1:10) of adenovirus are made in a viral lysis buffer (0.1% SDS, 10 mM Tris pH 7.4, 1 mM EDTA). OD is measured in duplicate at both dilutions and the VP concentration/mL is measured by multiplying the OD260 value X dilution factor X 1.1×10¹²VP.

[0642] An infectious unit (IU) titer is calculated by a limiting dilution assay of the viral stock. The virus is initially diluted 100× in DMEM/5% NS/1×PS and then subsequently diluted using 10-fold dilutions down to 1×10⁻⁷. 100 μL of these dilutions are then added to 293A cells that were seeded at least an hour before at 3e5 cells/well of a 24 well plate. This is performed in duplicate. Plates are incubated for 48 h in a CO2 (5%) incubator at 37° C. The cells are then washed with 1×PBS and are then fixed with 100% cold methanol (−20° C.). The plates are then incubated at −20° C. for a minimum of 20 minutes. The wells are washed with 1×PBS then blocked in 1×PBS/0.1% BSA for 1 h at room temperature. A rabbit anti-Ad antibody (Abcam, Cambridge, MA) is added at 1:8,000 dilution in blocking buffer (0.25 ml per well) and incubated for 1 h at room temperature. The wells are washed 4× with 0.5 mL PBS per well. A HRP conjugated Goat anti-Rabbit antibody (Bethyl Labs, Montgomery Texas) diluted 1000× is added per well and incubated for 1 h prior to a final round of washing. 5 PBS washes are performed and the plates were developed using DAB (Diaminobenzidine tetrahydrochloride) substrate in Tris buffered saline (0.67 mg/mL DAB in 50 mM Tris pH 7.5, 150 mM NaCl) with 0.01% H₂O₂. Wells are developed for 5 min prior to counting. Cells are counted under a 10× objective using a dilution that gave between 4-40 stained cells per field of view. The field of view that is used was a 0.32 mm² grid of which there are equivalent to 625 per field of view on a 24 well plate. The number of infectious viruses/mL can be determined by the number of stained cells per grid multiplied by the number of grids per field of view multiplied by a dilution factor 10. Similarly, when working with GFP expressing cells florescent can be used rather than capsid staining to determine the number of GFP expressing virions per mL.

### XIV.C. Spike Protein Sequence Optimization

[0643] Various sequence-optimized nucleotide sequences encoding the Spike protein were evaluated in ChAdV68 vaccine vectors.

### Sequence-Optimization of Spike Sequence

[0644] The Spike nucleotide sequence from Wuhan Hu/1 (SEQ ID NO:78) was sequence-optimized by substituting synonymous codons such that the amino acid sequence was unaffected. An IDT algorithm was used for enhanced expression in humans and for reduced complexity to aid synthesis (see, e.g., SEQ ID NOs:66-74). The Spike sequence was additionally sequence-optimized using two additional algorithms; (1) a single sequence (SEQ ID NO:87) generated using SGI DNA (La Jolla, CA); (2) 6 sequences designated CT1, CT20, CT56, CT83, CT131, and CT 199 (SEQ ID NOs:79-84) generated using COOL (COOL algorithm generates multiple sequences and 6 were selected). The sequences of each are presented in Table 5.

[0645] Splicing events were identified in cDNA from 293A cells infected with ChAdV68 viruses or transfected with ChAdV68 genomic DNA. Specifically, total RNA from 10ₑ5-10ₑ6 cells was purified using Qiagen's RNeasy columns. Residual DNA was removed by DNAse treatment, and cDNA was produced using SuperScriptlV reverse transcriptase (Thermo). Subsequently, primers specific for the 5′ UTR and 3′ UTR of the Gritstone ChAdV68 cassette were used to generate PCR products, analyzed by agarose gel electrophoresis, gel-purified, and Sanger-sequenced to identify regions deleted by splicing.

[0646] Splice donor sites were removed by site-directed mutagenesis disrupting the nucleotide sequence motif while not disturbing the amino acid sequence. Mutagenesis was accomplished by incorporating above mutations into PCR primers, amplifying several fragments in parallel, and running a Gibson assembly on the fragments (overlapping by 30-60 nt). Optimized clone CT1-2C (SEQ ID NO:85) had Sanger sequence-identified splice donor motifs at NT385 and NT539 mutated, and clone IDT-4C (SEQ ID NO:86) had Sanger sequence-identified splice donor motifs at NT385, NT539, and predicted donor motifs at NT2003, and NT2473 mutated. Additionally, a possible polyadenylation site AATAAA at nt 445 was mutated to AAcAAA in IDT-4C clone.

[0647] The sequences described are presented in Table 5. SAM-Nuc-TCE11-SpikeB.1.1.529 (SEQ ID NO: 27976) includes a SARS-CoV-2 Spike protein encoded by Cool Tool optimized sequence version 1 (SEQ ID NO:79) with 37 Omicron mutations manually changed within the sequence, as applicable (see SEQ ID NO: 27977).

TABLE 5
Sequence-optimized Spike Sequences

| | | SEQ ID |
|---|---|---|
| Spike Sequence | Nucleic Acid Sequence | NO: |
| Spike Native; | atgtttgtttttcttgttttattgccactagtctctagtcagtgt | 78 |
| NC_045512.2 | gttaatcttacaaccagaactcaattaccccctgcatacactaat | |
| Severe acute | tctttcacacgtggtgtttattaccctgacaaagttttcagatcc | |
| respiratory | tcagttttacattcaactcaggacttgttcttacctttcttttcc | |
| syndrome | aatgttacttggttccatgctatacatgtctctgggaccaatggt | |
| coronavirus 2 | actaagaggtttgataaccctgtcctaccatttaatgatggtgtt | |
| isolate Wuhan- | tattttgcttccactgagaagtctaacataataagaggctggatt | |
| Hu-1 | tttggtactactttagattcgaagacccagtccctacttattgtt | |
| | aataacgctactaatgttgttattaaagtctgtgaatttcaattt | |
| | tgtaatgatccatttttgggtgtttattaccacaaaaacaacaaa | |
| | agttggatggaaagtgagttcagagtttattctagtgcgaataat | |
| | tgcacttttgaatatgtctctcagccttttcttatggaccttgaa | |
| | ggaaaacagggtaatttcaaaaatcttagggaatttgtgtttaag | |
| | aatattgatggttattttaaaatatattctaagcacacgcctatt | |
| | aatttagtgcgtgatctccctcagggtttttcggctttagaacca | |
| | ttggtagatttgccaataggtattaacatcactaggtttcaaact | |
| | ttacttgctttacatagaagttatttgactcctggtgattcttct | |
| | tcaggttggacagctggtgctgcagcttattatgtgggttatctt | |
| | caacctaggacttttctattaaaatataatgaaaatggaaccatt | |
| | acagatgctgtagactgtgcacttgaccctctctcagaaacaaag | |
| | tgtacgttgaaatccttcactgtagaaaaaggaatctatcaaact | |
| | tctaactttagagtccaaccaacagaatctattgttagatttcct | |
| | aatattacaaacttgtgcccttttggtgaagtttttaacgccacc | |
| | agatttgcatctgtttatgcttggaacaggaagagaatcagcaac | |
| | tgtgttgctgattattctgtcctatataattccgcatcattttcc | |
| | acttttaagtgttatggagtgtctcctactaaattaaatgatctc | |
| | tgctttactaatgtctatgcagattcatttgtaattagaggtgat | |
| | gaagtcagacaaatcgctccagggcaaactggaaagattgctgat | |
| | tataattataaattaccagatgattttacaggctgcgttatagct | |
| | tggaattctaacaatcttgattctaaggttggtggtaattataat | |
| | tacctgtatagattgtttaggaagtctaatctcaaaccttttgag | |
| | agagatatttcaactgaaatctatcaggccggtagcacaccttgt | |
| | aatggtgttgaaggttttaattgttactttcctttacaatcatat | |
| | ggtttccaacccactaatggtgttggttaccaaccatacagagta | |
| | gtagtactttcttttgaacttctacatgcaccagcaactgtttgt | |
| | ggacctaaaaagtctactaatttggttaaaaacaaatgtgtcaat | |
| | ttcaacttcaatggtttaacaggcacaggtgttcttactgagtct | |
| | aacaaaaagtttctgcctttccaacaatttggcagagacattgct | |
| | gacactactgatgctgtccgtgatccacagacacttgagattctt | |
| | gacattacaccatgttcttttggtggtgtcagtgttataacacca | |
| | ggaacaaatacttctaaccaggttgctgttctttatcaggatgtt | |
| | aactgcacagaagtccctgttgctattcatgcagatcaacttact | |
| | cctacttggcgtgtttattctacaggttctaatgtttttcaaaca | |
| | cgtgcaggctgtttaataggggctgaacatgtcaacaactcatat | |
| | gagtgtgacatacccattggtgcaggtatatgcgctagttatcag | |
| | actcagactaattctcctcggcgggcacgtagtgtagctagtcaa | |
| | tccatcattgcctacactatgtcacttggtgcagaaaattcagtt | |
| | gcttactctaataactctattgccatacccacaaattttactatt | |
| | agtgttaccacagaaattctaccagtgtctatgaccaagacatca | |
| | gtagattgtacaatgtacatttgtggtgattcaactgaatgcagc | |
| | aatcttttgttgcaatatggcagtttttgtacacaattaaaccgt | |
| | gctttaactggaatagctgttgaacaagacaaaaacacccaagaa | |
| | gtttttgcacaagtcaaacaaatttacaaaacaccaccaattaaa | |
| | gattttggtggttttaatttttcacaaatattaccagatccatca | |
| | aaaccaagcaagaggtcatttattgaagatctacttttcaacaaa | |
| | gtgacacttgcagatgctggcttcatcaaacaatatggtgattgc | |
| | cttggtgatattgctgctagagacctcatttgtgcacaaaagttt | |
| | aacggccttactgttttgccacctttgctcacagatgaaatgatt | |
| | gctcaatacacttctgcactgttagcgggtacaatcacttctggt | |
| | tggacctttggtgcaggtgctgcattacaaataccatttgctatg | |
| | caaatggcttataggtttaatggtattggagttacacagaatgtt | |
| | ctctatgagaaccaaaaattgattgccaaccaatttaatagtgct | |
| | attggcaaaattcaagactcactttcttccacagcaagtgcactt | |
| | ggaaaacttcaagatgtggtcaaccaaaatgcacaagctttaaac | |
| | acgcttgttaaacaacttagctccaattttggtgcaatttcaagt | |
| | gttttaaatgatatcctttcacgtcttgacaaagttgaggctgaa | |
| | gtgcaaattgataggttgatcacaggcagacttcaaagtttgcag | |
| | acatatgtgactcaacaattaattagagctgcagaaatcagagct | |
| | tctgctaatcttgctgctactaaaatgtcagagtgtgtacttgga | |
| | caatcaaaaagagttgatttttgtggaaagggctatcatcttatg | |
| | tccttccctcagtcagcacctcatggtgtagtcttcttgcatgtg | |
| | acttatgtccctgcacaagaaaagaacttcacaactgctcctgcc | |
| | atttgtcatgatggaaaagcacactttcctcgtgaaggtgtcttt | |
| | gtttcaaatggcacacactggtttgtaacacaaaggaatttttat | |
| | gaaccacaaatcattactacagacaacacatttgtgtctggtaac | |
| | tgtgatgttgtaataggaattgtcaacaacacagtttatgatcct | |
| | ttgcaacctgaattagactcattcaaggaggagttagataaatat | |
| | tttaagaatcatacatcaccagatgttgatttaggtgacatctct | |
| | ggcattaatgcttcagttgtaaacattcaaaaagaaattgaccgc | |
| | ctcaatgaggttgccaagaatttaaatgaatctctcatcgatctc | |
| | caagaacttggaaagtatgagcagtatataaaatggccatggtac | |
| | atttggctaggttttatagctggcttgattgccatagtaatggtg | |
| | acaattatgctttgctgtatgaccagttgctgtagttgtctcaag | |
| | ggctgttgttcttgtggatcctgctgcaaatttgatgaagacgac | |
| | tctgagccagtgctcaaaggagtcaaattacattacacataa | |
| Spike CT1 | ATGTTTGTCTTCCTGGTCTTGCTGCCGCTGGTGAGCAGCCAGTGC | 79 |
| Optimized | GTGAATCTCACCACCCGCACCCAGCTTCCACCTGCCTACACTAAC | |
| | AGCTTCACCCGAGGGGTGTATTACCCTGACAAGGTATTCCGGTCC | |
| | TCCGTCCTCCATAGCACGCAGGACCTTTTTCTGCCCTTCTTCTCA | |
| | AATGTGACATGGTTCCATGCCATTCACGTGAGCGGCACGAATGGA | |
| | ACGAAGCGCTTTGATAACCCCGTGCTGCCTTTCAATGACGGCGTC | |
| | TACTTCGCCTCCACTGAAAAGTCAAACATCATCCGGGGCTGGATC | |
| | TTTGGCACCACTCTTGATTCAAAGACCCAGTCACTGCTGATTGTG | |
| | AACAATGCTACAAACGTGGTTATCAAGGTGTGTGAGTTTCAGTTC | |
| | TGTAACGATCCATTTTTGGGAGTGTACTACCACAAGAACAACAAG | |
| | TCCTGGATGGAGTCTGAGTTCAGAGTGTATAGCTCTGCTAACAAC | |
| | TGCACCTTCGAGTACGTGTCCCAGCCTTTCCTTATGGACCTGGAA | |
| | GGCAAACAGGGCAATTTCAAAAACCTGAGAGAGTTCGTGTTTAAG | |
| | AACATTGACGGATACTTCAAAATTTATTCTAAGCACACACCAATT | |
| | AACTTAGTGCGGGACCTACCCCAAGGCTTTAGCGCCCTAGAGCCC | |
| | CTGGTTGACCTGCCCATTGGGATCAATATAACAAGGTTCCAAACT | |
| | CTACTGGCTCTGCATAGAAGTTATCTGACCCCAGGAGACAGCTCT | |
| | AGTGGTTGGACCGCCGGCGCAGCAGCCTACTATGTCGGGTACTTA | |
| | CAGCCACGCACGTTCCTTCTGAAGTACAATGAGAACGGGACAATC | |
| | ACTGACGCAGTAGACTGTGCACTGGACCCGCTAAGCGAGACTAAG | |
| | TGCACACTTAAATCCTTCACGGTGGAGAAAGGCATTTATCAGACC | |
| | TCTAACTTCAGGGTGCAGCCAACAGAAAGCATTGTGCGATTCCCA | |
| | AATATTACTAATCTTTGCCCTTTCGGGGAGGTCTTTAATGCAACT | |
| | AGATTCGCATCAGTCTATGCGTGGAACCGCAAACGCATTTCCAAT | |
| | TGTGTCGCAGACTACTCAGTGCTGTACAACTCTGCCTCTTTCAGT | |
| | ACGTTCAAGTGTTACGGAGTGTCACCCACTAAACTGAACGACCTG | |
| | TGCTTTACAAATGTCTACGCTGACTCCTTCGTGATTAGGGGAGAC | |
| | GAGGTGAGACAAATTGCCCCCGGACAGACTGGGAAGATTGCCGAC | |
| | TACAATTATAAGCTTCCTGATGATTTCACTGGCTGTGTTATTGCC | |
| | TGGAATAGTAACAATCTGGATAGCAAGGTGGGAGGCAACTATAAC | |
| | TACTTATATCGACTGTTTAGGAAGAGTAATCTGAAACCATTTGAG | |
| | CGGGATATTTCCACAGAAATTTACCAGGCCGGGAGCACACCATGT | |
| | AATGGGGTGGAGGGATTTAATTGTTACTTCCCACTCCAGAGCTAT | |
| | GGTTTCCAACCCACCAATGGAGTGGGTTACCAGCCCTATAGAGTC | |
| | GTGGTGCTTAGTTTTGAGCTGCTTCACGCCCCAGCAACCGTCTGC | |
| | GGTCCCAAAAAGTCGACCAATCTCGTGAAAAACAAATGCGTAAAC | |
| | TTCAACTTTAACGGCTTAACAGGAACCGGCGTGCTCACCGAAAGC | |
| | AACAAGAAATTCCTTCCATTTCAGCAATTCGGAAGGGACATCGCC | |
| | GACACAACAGACGCGGTGAGGGACCCACAGACTCTGGAGATACTG | |
| | GACATCACTCCTTGTTCGTTTGGGGGCGTCTCGGTCATCACACCC | |
| | GGGACTAATACTAGTAATCAGGTAGCAGTTTTATATCAAGGCGTC | |
| | AACTGTACCGAAGTACCTGTGGCCATACACGCTGATCAGCTAACG | |
| | CCAACATGGCGAGTCTATTCCACCGGCTCTAACGTTTTTCAGACC | |
| | AGGGCTGGGTGCCTGATAGGGGCAGAGCACGTCAATAATTCCTAT | |
| | GAGTGTGATATCCCCATAGGTGCGGGGATCTGTGCCAGCTATCAA | |
| | ACCCAAACCAATTCACCAAGGCGAGCACGGTCTGTGGCTTCTCAG | |
| | AGCATAATTGCATATACAATGTCACTGGGCGCTGAGAATAGCGTT | |
| | GCATACTCTAATAACAGCATAGCCATTCCCACGAACTTTACTATC | |
| | AGTGTGACAACCGAAATATTGCCAGTTTCGATGACCAAAACTAGC | |
| | GTGGATTGCACGATGTACATCTGTGGAGACTCTACCGAATGCAGC | |
| | AATCTGCTATTACAATATGGCAGCTTCTGTACACAGTTAAATCGA | |
| | GCCTTGACAGGCATCGCAGTGGAACAGGACAAAAATACTCAAGAG | |
| | GTGTTTGCACAGGTGAAGCAAATCTACAAAACGCCCCCCATTAAA | |
| | GATTTTGGCGGGTTCAATTTTTCACAAATTCTCCCCGACCCGTCT | |
| | AAGCCGAGTAAGCGGTCCTTCATCGAAGATCTGCTCTTTAACAAA | |
| | GTAACCCTCGCCGATGCCGGCTTTATTAAGCAGTATGGCGACTGC | |
| | CTGGGGGATATAGCCGCTCGTGACCTGATTTGCGCCCAGAAGTTC | |
| | AATGGTCTGACCGTGTTGCCTCCTTTATTGACCGATGAAATGATT | |
| | GCCCAGTACACTAGTGCCCTGCTGGCCGGCACTATCACGTCTGGG | |
| | TGGACCTTCGGAGCTGGTGCCGCCTTGCAGATACCTTTTGCAATG | |
| | CAGATGGCCTATAGGTTTAATGGTATCGGAGTGACTCAGAACGTA | |
| | CTGTACGAGAACCAGAAGCTCATCGCTAATCAATTTAACTCCGCT | |
| | ATCGGAAAAATCCAGGACAGCCTCTCTTCTACAGCTAGCGCTCTG | |
| | GGCAAACTGCAGGATGTCGTTAATCAGAATGCCCAGGCCCTGAAC | |
| | ACCTTGGTTAAACAACTATCTTCCAACTTCGGGGCCATATCCAGT | |
| | GTGTTGAATGATATTCTCTCCCGCTTGGATAAGGTGGAAGCTGAG | |
| | GTGCAGATCGATCGCTTGATCACCGGCAGACTGCAGTCCCTCCAG | |
| | ACATATGTAACTCAGCAGCTGATTAGAGCCGCCGAGATAAGGGCA | |
| | AGTGCGAATCTGGCTGCCACCAAGATGAGCGAATGTGTATTGGGC | |
| | CAGAGCAAACGAGTTGATTTTTGCGGTAAGGGGTATCATTTAATG | |
| | TCTTTCCCTCAATCCGCACCTCATGGCGTAGTTTTCCTGCATGTG | |
| | ACTTATGTCCCGGCTCAGGAGAAGAATTTTACCACAGCCCCCGCG | |
| | ATCTGCCATGACGGAAAGGCCCACTTCCCCCGGGAAGGCGTGTTT | |
| | GTATCCAATGGGACTCACTGGTTTGTCACTCAGCGAAATTTTTAT | |
| | GAACCACAGATCATCACCACTGACAACACATTTGTTAGTGGAAAC | |
| | TGCGATGTGGTCATCGGCATCGTGAATAACACTGTCTATGATCCA | |
| | CTGCAACCTGAACTGGATTCTTTTAAAGAGGAACTCGACAAGTAT | |
| | TTTAAAAACCACACTAGCCCTGACGTGGATCTCGGTGACATTTCT | |
| | GGCATCAACGCTAGCGTAGTGAACATTCAGAAAGAGATAGATAGA | |
| | CTTAATGAGGTGGCCAAGAACCTCAACGAAAGTCTGATCGACCTC | |
| | CAGGAACTGGGGAAATACGAGCAGTACATTAAATGGCCTTGGTAC | |
| | ATATGGCTGGGGTTCATTGCTGGGCTGATCGCAATAGTGATGGTG | |
| | ACCATAATGCTCTGTTGCATGACTAGCTGCTGCAGCTGCCTGAAG | |
| | GGCTGCTGTAGTTGTGGGTCATGTTGTAAGTTTGACGAAGATGAT | |
| | AGCGAGCCTGTCCTTAAAGGAGTGAAGCTCCACTACACCTAG | |
| Spike CT20 | See Sequence Listing | 80 |
| Optimized | | |
| Spike CT56 | See Sequence Listing | 81 |
| Optimized | | |
| Spike CT83 | See Sequence Listing | 82 |
| Optimized | | |
| Spike CT131 | See Sequence Listing | 83 |
| Optimized | | |
| Spike CT199 | See Sequence Listing | 84 |
| Optimized | | |
| Spike CT1-2C | ATGTTTGTCTTCCTGGTCTTGCTGCCGCTcGTGtctAGCCAGTGC | 85 |
| | GTGAATCTCACCACCCGCACCCAGCTTCCACCTGCCTACACTAAC | |
| | AGCTTCACCCGAGGGGTGTATTACCCTGACAAGGTATTCCGGTCC | |
| | TCCGTCCTCCATAGCACGCAGGACCTTTTTCTGCCCTTCTTCTCA | |
| | AATGTGACATGGTTCCATGCCATTCACGTGAGCGGCACGAATGGA | |
| | ACGAAGCGCTTTGATAACCCCGTGCTGCCTTTCAATGACGGCGTC | |
| | TACTTCGCCTCCACTGAAAAGTCAAACATCATCCGGGGCTGGATC | |
| | TTTGGCACCACTCTTGATTCAAAGACCCAGTCACTGCTGATTGTG | |
| | AACAATGCTACAAACGTGGTTATCAAaGTcTGcGAGTTTCAGTTC | |
| | TGTAACGATCCATTTTTGGGAGTGTACTACCACAAGAACAACAAG | |
| | TCCTGGATGGAGTCTGAGTTCAGAGTGTATAGCTCTGCTAACAAC | |
| | TGCACCTTCGAGTACGTGTCCCAGCCTTTCCTTATGGACCTGGAA | |
| | GGCAAACAGGGCAATTTCAAAAACCTGAGAGAGTTCGTGTTTAAG | |
| | AACATTGACGGATACTTCAAAATTTATTCTAAGCACACACCAATT | |
| | AACTTAGTGCGGGACCTACCCCAAGGCTTTAGCGCCCTAGAGCCC | |
| | CTGGTTGACCTGCCCATTGGGATCAATATAACAAGGTTCCAAACT | |
| | CTACTGGCTCTGCATAGAAGTTATCTGACCCCAGGAGACAGCTCT | |
| | AGTGGTTGGACCGCCGGCGCAGCAGCCTACTATGTCGGGTACTTA | |
| | CAGCCACGCACGTTCCTTCTGAAGTACAATGAGAACGGGACAATC | |
| | ACTGACGCAGTAGACTGTGCACTGGACCCGCTAAGCGAGACTAAG | |
| | TGCACACTTAAATCCTTCACGGTGGAGAAAGGCATTTATCAGACC | |
| | TCTAACTTCAGGGTGCAGCCAACAGAAAGCATTGTGCGATTCCCA | |
| | AATATTACTAATCTTTGCCCTTTCGGGGAGGTCTTTAATGCAACT | |
| | AGATTCGCATCAGTCTATGCGTGGAACCGCAAACGCATTTCCAAT | |
| | TGTGTCGCAGACTACTCAGTGCTGTACAACTCTGCCTCTTTCAGT | |
| | ACGTTCAAGTGTTACGGAGTGTCACCCACTAAACTGAACGACCTG | |
| | TGCTTTACAAATGTCTACGCTGACTCCTTCGTGATTAGGGGAGAC | |
| | GAGGTGAGACAAATTGCCCCCGGACAGACTGGGAAGATTGCCGAC | |
| | TACAATTATAAGCTTCCTGATGATTTCACTGGCTGTGTTATTGCC | |
| | TGGAATAGTAACAATCTGGATAGCAAGGTGGGAGGCAACTATAAC | |
| | TACTTATATCGACTGTTTAGGAAGAGTAATCTGAAACCATTTGAG | |
| | CGGGATATTTCCACAGAAATTTACCAGGCCGGGAGCACACCATGT | |
| | AATGGGGTGGAGGGATTTAATTGTTACTTCCCACTCCAGAGCTAT | |
| | GGTTTCCAACCCACCAATGGAGTGGGTTACCAGCCCTATAGAGTC | |
| | GTGGTGCTTAGTTTTGAGCTGCTTCACGCCCCAGCAACCGTCTGC | |
| | GGTCCCAAAAAGTCGACCAATCTCGTGAAAAACAAATGCGTAAAC | |
| | TTCAACTTTAACGGCTTAACAGGAACCGGCGTGCTCACCGAAAGC | |
| | AACAAGAAATTCCTTCCATTTCAGCAATTCGGAAGGGACATCGCC | |
| | GACACAACAGACGCcGTcAGGGACCCACAGACTCTGGAGATACTG | |
| | GACATCACTCCTTGTTCGTTTGGGGGCGTCTCGGTCATCACACCC | |
| | GGGACTAATACTAGTAATCAGGTAGCAGTTTTATATCAAGGCGTC | |
| | AACTGTACCGAAGTACCTGTGGCCATACACGCTGATCAGCTAACG | |
| | CCAACATGGCGAGTCTATTCCACCGGCTCTAACGTTTTTCAGACC | |
| | AGGGCTGGGTGCCTGATAGGGGCAGAGCACGTCAATAATTCCTAT | |
| | GAGTGTGATATCCCCATAGGTGCGGGGATCTGTGCCAGCTATCAA | |
| | ACCCAAACCAATTCACCAAGGCGAGCACGGTCTGTGGCTTCTCAG | |
| | AGCATAATTGCATATACAATGTCACTGGGCGCTGAGAATAGCGTT | |
| | GCATACTCTAATAACAGCATAGCCATTCCCACGAACTTTACTATC | |
| | AGTGTGACAACCGAAATATTGCCAGTTTCGATGACCAAAACTAGC | |
| | GTGGATTGCACGATGTACATCTGTGGAGACTCTACCGAATGCAGC | |
| | AATCTGCTATTACAATATGGCAGCTTCTGTACACAGTTAAATCGA | |
| | GCCTTGACAGGCATCGCAGTGGAACAGGACAAAAATACTCAAGAG | |
| | GTGTTTGCACAGGTGAAGCAAATCTACAAAACGCCCCCCATTAAA | |
| | GATTTTGGCGGGTTCAATTTTTCACAAATTCTCCCCGACCCGTCT | |
| | AAGCCGAGTAAGCGGTCCTTCATCGAAGATCTGCTCTTTAACAAA | |
| | GTAACCCTCGCCGATGCCGGCTTTATTAAGCAGTATGGCGACTGC | |
| | CTGGGGGATATAGCCGCTCGTGACCTGATTTGCGCCCAGAAGTTC | |
| | AATGGTCTGACCGTGTTGCCTCCTTTATTGACCGATGAAATGATT | |
| | GCCCAGTACACTAGTGCCCTGCTGGCCGGCACTATCACGTCTGGG | |
| | TGGACCTTCGGAGCTGGTGCCGCCTTGCAGATACCTTTTGCAATG | |
| | CAGATGGCCTATAGGTTTAATGGTATCGGAGTGACTCAGAACGTA | |
| | CTGTACGAGAACCAGAAGCTCATCGCTAATCAATTTAACTCCGCT | |
| | ATCGGAAAAATCCAGGACAGCCTCTCTTCTACAGCTAGCGCTCTG | |
| | GGCAAACTGCAGGATGTCGTTAATCAGAATGCCCAGGCCCTGAAC | |
| | ACCTTGGTTAAACAACTATCTTCCAACTTCGGGGCCATATCCAGT | |
| | GTGTTGAATGATATTCTCTCCCGCTTGGATAAGGTGGAAGCTGAG | |
| | GTGCAGATCGATCGCTTGATCACCGGCAGACTGCAGTCCCTCCAG | |
| | ACATATGTAACTCAGCAGCTGATTAGAGCCGCCGAGATAAGGGCA | |
| | AGTGCGAATCTGGCTGCCACCAAGATGAGCGAATGTGTATTGGGC | |
| | CAGAGCAAACGAGTTGATTTTTGCGGTAAGGGGTATCATTTAATG | |
| | TCTTTCCCTCAATCCGCACCTCATGGCGTAGTTTTCCTGCATGTG | |
| | ACTTATGTCCCGGCTCAGGAGAAGAATTTTACCACAGCCCCCGCG | |
| | ATCTGCCATGACGGAAAGGCCCACTTCCCCCGGGAAGGCGTGTTT | |
| | GTATCCAATGGGACTCACTGGTTTGTCACTCAGCGAAATTTTTAT | |
| | GAACCACAGATCATCACCACTGACAACACATTTGTTAGTGGAAAC | |
| | TGCGATGTGGTCATCGGCATCGTGAATAACACTGTCTATGATCCA | |
| | CTGCAACCTGAACTGGATTCTTTTAAAGAGGAACTCGACAAGTAT | |
| | TTTAAAAACCACACTAGCCCTGACGTGGATCTCGGTGACATTTCT | |
| | GGCATCAACGCTAGCGTAGTGAACATTCAGAAAGAGATAGATAGA | |
| | CTTAATGAGGTGGCCAAGAACCTCAACGAAAGTCTGATCGACCTC | |
| | CAGGAACTGGGGAAATACGAGCAGTACATTAAATGGCCTTGGTAC | |
| | ATATGGCTGGGGTTCATTGCTGGGCTGATCGCAATAGTGATGGTG | |
| | ACCATAATGCTCTGTTGCATGACTAGCTGCTGCAGCTGCCTGAAG | |
| | GGCTGCTGTAGTTGTGGGTCATGTTGTAAGTTTGACGAAGATGAT | |
| | AGCGAGCCTGTCCTTAAAGGAGTGAAGCTCCACTACACCTAG | |
| Spike IDT-4C | See Sequence Listing | 86 |
| Spike-SGI | See Sequence Listing | 87 |

### Cloning of Sequence-Optimized Spike Sequences

[0648] Each sequence-optimized Spike sequence was ordered as a set of 3 gBlocks from IDT with each gblock between 1300-1500 bp and overlapping with each other by approximately 100 nucleotides. The gBlocks comprising the 5′ and 3′ ends of the Spike sequence overlapped with the plasmid backbone by 100 nucleotides. The gblocks were assembled by a combination of PCR and Gibson assembly into a linearized pA68-E4_{d} AsisI/PmeI backbone to generate pA68-E4-sequence-optimized Spike clones. Clones were screened by PCR and clones of the correct size were then grown for plasmid production and sequencing by either NGS or Sanger sequencing. Once a correct clone was sequence confirmed, large scale plasmid production and purification was performed for transfection.

### Vector Production

[0649] pA68-E4-Spike plasmid DNA was digested with PacI and 2 ug DNA was transfected into 293F cells using TransIt Lenti transfection reagent. Five days post transfection, cells and media were harvested and a lysate generated by freeze-thawing at −80C and at 37 C. A fraction of the lysate was used to re-infect 30 mL of 293F cells and incubated for 48-72 h before harvesting. Lysate was generated by freeze-thawing at −80C and at 37 C and a fraction of the lysate was used to infect 400 mL of 293F cells seeded at 1e6 cells/mL. Next, 48-72 h later cells were harvested, lysed in 10 mM tris pH 8.0/0.1% Triton X-100 and freeze thawed 1× at 37 and −80C. The lysate was then clarified by centrifugation at 4300×g for 10 min prior to loading on a 1.2/1.4 CsCl gradient. The gradient was run for a minimum of 2 h before the bands were harvested diluted 2-4× in Tris and then rerun on a 1.35 CsCl gradient for at least 2 h. The viral bands were harvested and then dialyzed 3× in 1×ARM buffer. The virus infectious titer was determined by an immunostaining titer assay and the viral particle measured by Absorbance at A260 nm.

### Western Analysis

[0650] Samples for Spike expression analysis were either harvested at designated times post transfection or in the case of purified virus by setting up a controlled infection experiment with a known virus MOI and harvested at a specific time post infection, typically 24 to 48 h. 1e6 cells were typically harvested in 0.5 mL of SDS-PAGE loading buffer with 10% Beta-mercaptoethanol. Samples were boiled and run on 4-20% polyacrylamide gels under denaturing and reducing conditions. The gels were then blotted onto a PVDF membrane using a BioRad Rapid transfer device. The membrane was blocked for 2 h at room temperature in 5% Skim milk in TBST. The membrane was then probed with an anti-Spike S1 polyclonal (Sino Biologicals) or anti-Spike monoclonal antibody 1A9 (GeneTex; Cat. No. GTX632604) and incubated for 2 h. The membrane was then washed in PBST (5×) and the probed with a HRP-linked anti-mouse antibody (Bethyl labs) for 1 h. The membrane was washed as described above and then incubated with a chemiluminescent substrate ECL plus (ThermoFisher). The image was then captured using a Chemidoc (BioRad device).

### Results

[0651] Expression of Spike S2 protein was assessed during viral production in 293F cells with various Spike-encoding vectors. As shown in FIG. 8A, using vectors encoding IDT sequence-optimized Spike cassettes, Spike S2 protein was detected by Western blot using an anti-Spike S2 antibody (GeneTex) when expressed in a SAM vector (FIG. 8A, last lane) but not when expressed in a ChAdV68 vector (“CMV-Spike (IDT)”; SEQ ID NO:69) at two different MOIs and timepoints (FIG. 8A, lanes 1 and 7). Two clones engineered to express Spike variant D614G (“CMV-Spike (IDT)-D614G” SEQ ID NO:70) also did not express detectable levels of Spike protein by Western using the S2 antibody (FIG. 8A, lanes 2 and 3). Clones engineered to co-express the SARS-CoV-2 Membrane protein together with Spike (“CMV-Spike (IDT)-D614G-Mem” SEQ ID NO:66) or including a R682V mutations to disrupt the Furin cleavage site did not rescue the expression phenotype (FIG. 8A, lanes 4 and 5). In contrast, as shown in FIG. 8B, Spike S1 protein was detected for all IDT constructs, albeit at low levels, with the exception of the Furin R682V mutation in which no Spike S1 protein was detected.

[0652] To deconvolute if the expressions issues with the IDT sequence-optimized clones were specific to the S1 or S2 domains, vectors expressing only the S1 or S2 domains were also evaluated. As shown in FIG. 8C, a ChAdV68 vector encoding the IDT sequence-optimized Spike S1 protein alone demonstrated strong protein expression, in contrast to the lower expression observed with the full-length Spike vector (FIG. 8C, lanes 1 vs 2). As expected, no signal was observed for S1 with the vector encoding the S2 domain alone. In contrast, as shown in FIG. 8D, a ChAdV68 vector encoding the IDT sequence-optimized Spike S2 protein alone did not demonstrate observable protein expression, comparable to the absence of signal observed with the full-length Spike vector (FIG. 8D, lanes 1 and 3). Thus, the data indicate the IDT sequence-optimized Spike S2 exhibited poor expression, including impacting expression of the full-length Spike sequence.

[0653] To address protein expression, the SARS-CoV-2 Spike-encoding nucleotide sequence was sequence-optimized using additional sequence-optimization algorithms; (1) a single sequence (SEQ ID NO:87) generated using SGI DNA (La Jolla, CA); (2) 6 sequences designated CT1, CT20, CT56, CT83, CT131, and CT 199 (SEQ ID NOs:79-84) generated using COOL (COOL algorithm generates multiple sequences and 6 were selected). As shown in FIG. 8A and FIG. 8B, sequence-optimization with the COOL algorithm generated a sequence—CT1 (SEQ ID NO:79)—that demonstrated detectable expression using a ChAdV68 vector as assessed by Western using both an anti-S2 and anti-S1 antibody (FIG. 8A and FIG. 8B, each respective lane 6 “ChAd-Spike CT1-D614G”). The additional sequences generated using the COOL algorithm and the SGI algorithm were also assessed by Western. As shown in FIG. 9, the SGI clone and COOL sequence CT131 also demonstrated detectable levels of Spike protein by Western using an anti-S2 antibody (FIG. 9, lanes 3 and 6), while other COOL generated sequences did not generate detectable signals other than the control CT1 derived sequence (lane 2). Thus, the data indicate that specific sequence-optimizations improved expression of full-length SARS-CoV-2 Spike protein in ChAdV68 vectors.

[0654] SARS-CoV-2 is a cytoplasm-replicating positive-sense RNA virus encoding its own replication machinery, and as such SARS-CoV-2 mRNA are not naturally processed by splicing and nuclear-export machineries. As illustrated in FIG. 10A, to assess the role of splicing in SARS-CoV-2 Spike-encoding mRNA expressed from a ChAdV68 vector, primers were designed to amplify the Spike coding region. In the presence of mRNA splicing, amplicon sizes would be smaller than the expected full-length coding region. As shown in FIG. 10B, while PCR of the plasmid encoding the SARS-CoV-2 Spike cassette demonstrated the expected amplicon size (“Spike Plasmid” left panel, right column), PCR amplification of cDNA from infected 293 cells demonstrated two smaller amplicons indicating splicing of the mRNA transcript (“ChAd-Spike (IDT) cDNA” left panel, left column). In addition, the Spike coding sequence was split into S1 and S2 encoding sequences. As also shown in FIG. 10B, PCR amplification of S1 cDNA from infected 293 cells demonstrated the expected amplicon size (“SpikeS1” right panel, left column) indicating S1 was likely not undergoing undesired splicing while sequences in the S2 region may be influencing splicing.

[0655] The smaller amplicon sequences were analyzed and two splice donor sites were identified by Sanger sequencing. Three additional potential donor sites were predicted by further sequence analysis. The position and identity of the splice motif sequences are presented below (the nt triplets correspond to codons, numbering starts with reference to Spike ATG):

NT 385-:
AAG GTG TGT -> AAa GTc TGc
(identified by sequencing)
NT 539-:
AA GGT AAG C -> Ag GGc AAa C
(identified by sequencing)
NT 2003-:
CA GGT ATCT -> Ct GGa ATC T
(predicted)
NT 2473-:
AAG GTG ACC -> AAa GTc ACC
(predicted)
NT 3417-:
(SEQ ID NO: 123)
C CCC CTT CAG CCT GAA CTT GAT TCC->
(SEQ ID NO: 124)
T CCa CTg CAa CCT GAA CTT GAT agt

[0656] Selected splice donor sites were removed by site-directed mutagenesis disrupting the nucleotide sequence motif while not disturbing the amino acid sequence. COOL sequence-optimized clone CT1 was used as the reference sequence for clone CT1-2C (SEQ ID NO:85) having the sequence-identified splice donor motifs at NT385 and NT539 mutated. IDT sequence-optimized clone was used as the reference sequence for clone IDT-4C (SEQ ID NO:86) and had both sequence-identified and predicted splice donor motifs at NT385, NT539, NT2003, and NT2473 mutated, as well as a possible polyadenylation site AATAAA at NT445 mutated to AAcAAA. As shown in FIG. 9, Spike protein expression was detected by Western in the clone including the sequence-identified splice donor motifs (“CT1-2C” lane 2). Splicing was further assessed in the constructs by PCR analysis. As shown in FIG. 11, mutating the splice donor motifs and/or a potential polyA site alone did not prevent splicing indicating splicing potentially occurred from sub-dominant splice sites.

[0657] Given the identification of splicing events in the full-length Spike mRNA expressed from ChAdV68 vectors, additional constructs are generated and assessed for improved protein expression. Additional optimizations include constructs featuring exogenous nuclear export signals (e.g., Constitutive Transport Element (CTE), RNA Transport Element (RTE), or Woodchuck Posttranscriptional Regulatory Element (WPRE)) or the addition of an artificial intron through introduction of exogenous splice donor/branch/acceptor motif sequences to bias splicing, such as introducing a SV40 mini-intron (SEQ ID NO:88) between the CMV promoter and the Kozak sequence immediately upstream of the Spike gene. The identified and predicted splice donor motifs are also further evaluated in combination with additional sequence optimizations.

### XIV.D. SARS-CoV-2 Vaccine Efficacy Evaluation

[0658] Various SARS-CoV-2 vaccine designs, constructs, and dosing regimens were evaluated. The vaccines encoded various optimized versions of the Spike protein, selected predicted T cell epitopes (TCE), or a combination of Spike and TCE cassettes.

### Mouse Immunizations

[0659] All mouse studies were conducted at Murigenics under IACUC approved protocols. Balb/c mice (Envigo), 6-8 weeks old were used for all studies. Vaccines were stored at −80° C., thawed at room temperature on the day of immunization, and then diluted to 0.1 μg/mL with PBS and filtered through a 0.2 micron filter. Filtered formulations were stored at 4° C. and injected within 4 hours of preparation. All immunizations were bilateral intramuscular to the tibialis anterior, 2 injections of 50 μL each, 100 μL total.

### Non-Human Primate Immunizations

[0660] For SAM vaccines in Mamu-A*01 Indian rhesus macaques, SAM was administered as bilateral intramuscular injections into the quadriceps muscle at the indicated doses.

[0661] For ChAdV68 vaccines in Mamu-A*01 Indian rhesus macaques, ChAdV68 was administered bilaterally at the indicated doses (5×10¹¹ viral particles per injection).

### Immune Monitoring in Rhesus

[0662] For immune monitoring, 10-20 mL of blood was collected into vacutainer tubes containing heparin and maintained at room temperature until isolation. PBMCs were isolated by density gradient centrifugation using lymphocyte separation medium (LSM) and Leucosep separator tubes. PBMCs were stained with propidium iodide and viable cells counted using the Cytoflex LX (Beckman Coulter). Samples were then resuspended at 4×10⁶ cells/mL in RPMI complete (10% FBS).

### Splenocyte Isolation

[0663] For the evaluation of T-cell response, mouse spleens were extracted at various timepoints following immunization. Note that in some studies immunizations were staggered to enable spleens to be collected at the same time and compared. Spleens were collected and analyzed by IFNγ ELISpot and ICS. Spleens were suspended in RPMI complete (RPMI+10% FBS) and dissociated using the gentleMACS Dissociator (Miltenyi Biotec). Dissociated cells were filtered using a 40 m strainer and red blood cells were lysed with ACK lysing buffer (150 mM NH₄Cl, 10 mM KHCO₃, 0.1 mM EDTA). Following lysis, cells were filtered with a 30 μm strainer and resuspended in RPMI complete.

### Serum Collection in Mice

[0664] At various timepoints post immunization 200 μL of blood was drawn. Blood was centrifuged at 1000 g for 10 minutes at room temperature. Serum was collected and frozen at −80° C.

### S1 IgG MSD/ELISA

[0665] 96-well QuickPlex plates (Meso Scale Discovery, Rockville, MD) were coated with 50 μL of 1 μg/mL SARS-CoV-2 S1 (ACROBiosystems, Newark, DE), diluted in DPBS (Corning, Corning, NY), and incubated at 4° C. overnight. Wells were washed three times with agitation using 250 μL of PBS+0.05% Tween-20 (Teknova, Hollister, CA) and plates blocked with 150 μL Superblock PBS (Thermo Fisher Scientific, Waltham, MA) for 1 hour at room temperature on an orbital shaker. Test sera was diluted at appropriate series in 10% species-matched serum (Innovative Research, Novi, MI) and tested in single wells on each plate. Starting dilution 1:100, 3-fold dilutions, 11 dilutions per sample. Wells were washed and 50 μL of the diluted samples were added to wells and incubated for 1 hour at room temperature on an orbital shaker. Wells were washed and incubated with 25 μL of 1 μg/mL SULFO-TAG labeled anti-mouse antibody (MSD), diluted in DPBS+1% BSA (Sigma-Aldrich, St. Louis, MO), for 1 hour at room temperature on an orbital shaker. Wells were washed and 150 μL tripropylamine containing read buffer (MSD) added. Plates were run immediately using the QPlex SQ 120 (MSD) ECL plate reader. Endpoint titer is defined as the reciprocal dilution for each sample at which the signal is twice the background value, and is interpolated by fitting a line between the final two values that are greater than twice the background value. The background values is the average value (calculated for each plate) of the control wells containing 10% species-matched serum only.

### Antibody Titers

[0666] For antibody response monitoring, antibody titers, including neutralizing antibody titers, in the sera were determined as described in J. Yu et al. (Science 10.1126/science. Abc6284, 2020), herein incorporated by reference for all purposes.

### IFNγ ELISpot Analysis

[0667] IFNγ ELISpot assays were performed using pre-coated 96-well plates (MAbtech, Mouse IFNγ ELISpot PLUS, ALP) following manufacturer's protocol. Samples were stimulated overnight with various overlapping peptide pools (15 amino acids in length, 11 amino acid overlap), at a final concentration of 1 μg/mL per peptide. For Spike—eight different overlapping peptide pools spanning the SARS-CoV-2 Spike antigen (Genscript, 36-40 peptides per pool). Splenocytes were plated in duplicate at 1×10⁵ cells per well for each Spike pool, and 2.5×10⁴ cells per well (mixed with 7.5×10⁴ naïve cells) for Spike pools 2, 4, and 7. To measure response to the TCE cassette—one pool spanning Nucleocapsid protein (JPT, NCap-1, 102 peptides), one spanning Membrane protein (JPT, VME-1, 53 peptides), and one spanning the Orf3a regions encoded in the cassette (Genscript, 38 peptides). For TCE peptide pools, splenocytes were plated in duplicate at 2×10⁵ cells per well for each pool. Sequences for peptide pools are presented in Table D (SEQ ID NOS. 27180-27495), Table E (SEQ ID NOS. 27496-27603), and Table F (SEQ ID NOS. 27604-27939). A DMSO only control was plated for each sample and cell number. Following overnight incubation at 37° C., plates were washed with PBS and incubated with anti-monkey IFNγ mAb biotin (MAbtech) for two hours, followed by an additional wash and incubation with Streptavidin-ALP (MAbtech) for one hour. After final wash, plates were incubated for ten minutes with BCIP/NBT (MAbtech) to develop the immunospots. Spots were imaged and enumerated using an AID reader (Autoimmun Diagnostika). For data processing and analysis, samples with replicate well variability (Variability=Variance/(median+1)) greater than 10 and median greater than 10 were excluded. Spot values were adjusted based on the well saturation according to the formula:

AdjustedSpots=RawSpots+2*(RawSpots*Saturation/(100−Saturation)

Each sample was background corrected by subtracting the average value of the negative control peptide wells. Data is presented as spot forming colonies (SFC) per 1×10⁶ splenocytes. Wells with well saturation values greater than 35% were labeled as “too numerous to count” (TNTC) and excluded. For samples and peptides that were TNTC, the value measured with 2.5×10⁴ cells/well was used.

### Vaccine Constructs

[0668] The various sequences evaluated are as follows:
[0669] “IDTSpike_{g}”: SARS-CoV-2 Spike protein encoded by IDT optimized sequence (see SEQ ID NO:69) and including a D614G mutation with reference to SEQ ID NO:59 (see corresponding nucleotide mutation in SEQ ID NO:70); also referred to as “Spike V1”
[0670] “CTSpike_{g}”: SARS-CoV-2 Spike protein encoded by Cool Tool optimized sequence version 1 (SEQ ID NO:79) including a D614G mutation with reference to SEQ ID NO:59 (see corresponding nucleotide mutation in SEQ ID NO:70); also referred to as “Spike V2.” In versions referred to as “CTSpike_{D}” D614 is not altered.
[0671] “CTSpikeF2P_{g}”: SARS-CoV-2 Spike protein encoded by Cool Tool optimized sequence version 1 (SEQ ID NO:79) including a R682V to disrupt the Furin cleavage site (682-685 RRAR [SEQ ID NO: 125] to GSAS [SEQ ID NO: 126]); and K986P and V987P to interfere with the secondary structure of Spike with reference to the reference Spike protein (SEQ ID NO:59). The nucleotide sequence is shown in SEQ ID NO:89 and protein sequence shown in SEQ ID NO:90
[0672] “TCE5”: Selected CD8+ epitopes predicted by the EDGE platform to be presented on MHC molecules for SARS-CoV-2 proteins other than Spike. The 15 selected epitopes are presented along with their order in the cassette in Table 7. The nucleotide sequence is shown in SEQ ID NO:91 and protein sequence shown in SEQ ID NO:92. FIG. 12 shows the estimated protection across the four indicated populations for TCE5. All populations are estimated to have coverage above 95% up to at least the threshold of 7 epitopes (last column).
[0673] The SAM vector SAM-SGP1-TCE5-SGP2-CTSpike_{G}F2P is shown in SEQ ID NO:93
[0674] The ChAd vector ChAd-CMV-CTSpike_{G}F2P-CMV-TCE5 (EPE) is shown in SEQ ID NO: 114
[0675] Additional vectors and Spike variants were designed for evaluation as shown in SEQ ID NOs:109-113

TABLE 6
Encoded Spike Variants

CTSpikeF2Pg nucleotide (SEQ ID NO: 89);
Bold Italic Furin Mutation 682-685
RRAR (SEQ ID NO: 125) to GSAS
(SEQ ID NO: 126), Bold Lower Case K986P
and V987P
ATGTTTGTCTTCCTGGTCTTGCTGCCGCTGGTGAGCAGCCAGTGC
GTGAATCTCACCACCCGCACCCAGCTTCCACCTGCCTACACTAAC
AGCTTCACCCGAGGGGTGTATTACCCTGACAAGGTATTCCGGTCC
TCCGTCCTCCATAGCACGCAGGACCTTTTTCTGCCCTTCTTCTCA
AATGTGACATGGTTCCATGCCATTCACGTGAGCGGCACGAATGGA
ACGAAGCGCTTTGATAACCCCGTGCTGCCTTTCAATGACGGCGTC
TACTTCGCCTCCACTGAAAAGTCAAACATCATCCGGGGCTGGATC
TTTGGCACCACTCTTGATTCAAAGACCCAGTCACTGCTGATTGTG
AACAATGCTACAAACGTGGTTATCAAGGTGTGTGAGTTTCAGTTC
TGTAACGATCCATTTTTGGGAGTGTACTACCACAAGAACAACAAG
TCCTGGATGGAGTCTGAGTTCAGAGTGTATAGCTCTGCTAACAAC
TGCACCTTCGAGTACGTGTCCCAGCCTTTCCTTATGGACCTGGAA
GGCAAACAGGGCAATTTCAAAAACCTGAGAGAGTTCGTGTTTAAG
AACATTGACGGATACTTCAAAATTTATTCTAAGCACACACCAATT
AACTTAGTGCGGGACCTACCCCAAGGCTTTAGCGCCCTAGAGCCC
CTGGTTGACCTGCCCATTGGGATCAATATAACAAGGTTCCAAACT
CTACTGGCTCTGCATAGAAGTTATCTGACCCCAGGAGACAGCTCT
AGTGGTTGGACCGCCGGCGCAGCAGCCTACTATGTCGGGTACTTA
CAGCCACGCACGTTCCTTCTGAAGTACAATGAGAACGGGACAATC
ACTGACGCAGTAGACTGTGCACTGGACCCGCTAAGCGAGACTAAG
TGCACACTTAAATCCTTCACGGTGGAGAAAGGCATTTATCAGACC
TCTAACTTCAGGGTGCAGCCAACAGAAAGCATTGTGCGATTCCCA
AATATTACTAATCTTTGCCCTTTCGGGGAGGTCTTTAATGCAACT
AGATTCGCATCAGTCTATGCGTGGAACCGCAAACGCATTTCCAAT
TGTGTCGCAGACTACTCAGTGCTGTACAACTCTGCCTCTTTCAGT
ACGTTCAAGTGTTACGGAGTGTCACCCACTAAACTGAACGACCTG
TGCTTTACAAATGTCTACGCTGACTCCTTCGTGATTAGGGGAGAC
GAGGTGAGACAAATTGCCCCCGGACAGACTGGGAAGATTGCCGAC
TACAATTATAAGCTTCCTGATGATTTCACTGGCTGTGTTATTGCC
TGGAATAGTAACAATCTGGATAGCAAGGTGGGAGGCAACTATAAC
TACTTATATCGACTGTTTAGGAAGAGTAATCTGAAACCATTTGAG
CGGGATATTTCCACAGAAATTTACCAGGCCGGGAGCACACCATGT
AATGGGGTGGAGGGATTTAATTGTTACTTCCCACTCCAGAGCTAT
GGTTTCCAACCCACCAATGGAGTGGGTTACCAGCCCTATAGAGTC
GTGGTGCTTAGTTTTGAGCTGCTTCACGCCCCAGCAACCGTCTGC
GGTCCCAAAAAGTCGACCAATCTCGTGAAAAACAAATGCGTAAAC
TTCAACTTTAACGGCTTAACAGGAACCGGCGTGCTCACCGAAAGC
AACAAGAAATTCCTTCCATTTCAGCAATTCGGAAGGGACATCGCC
GACACAACAGACGCGGTGAGGGACCCACAGACTCTGGAGATACTG
GACATCACTCCTTGTTCGTTTGGGGGCGTCTCGGTCATCACACCC
GGGACTAATACTAGTAATCAGGTAGCAGTTTTATATCAAGGCGTC
AACTGTACCGAAGTACCTGTGGCCATACACGCTGATCAGCTAACG
CCAACATGGCGAGTCTATTCCACCGGCTCTAACGTTTTTCAGACC
AGGGCTGGGTGCCTGATAGGGGCAGAGCACGTCAATAATTCCTAT
GAGTGTGATATCCCCATAGGTGCGGGGATCTGTGCCAGCTATCAA
ACCCAAACCAATTCACCAgGGaGcGCAaGcTCTGTGGCTTCTCAG
AGCATAATTGCATATACAATGTCACTGGGCGCTGAGAATAGCGTT
GCATACTCTAATAACAGCATAGCCATTCCCACGAACTTTACTATC
AGTGTGACAACCGAAATATTGCCAGTTTCGATGACCAAAACTAGC
GTGGATTGCACGATGTACATCTGTGGAGACTCTACCGAATGCAGC
AATCTGCTATTACAATATGGCAGCTTCTGTACACAGTTAAATCGA
GCCTTGACAGGCATCGCAGTGGAACAGGACAAAAATACTCAAGAG
GTGTTTGCACAGGTGAAGCAAATCTACAAAACGCCCCCCATTAAA
GATTTTGGCGGGTTCAATTTTTCACAAATTCTCCCCGACCCGTCT
AAGCCGAGTAAGCGGTCCTTCATCGAAGATCTGCTCTTTAACAAA
GTAACCCTCGCCGATGCCGGCTTTATTAAGCAGTATGGCGACTGC
CTGGGGGATATAGCCGCTCGTGACCTGATTTGCGCCCAGAAGTTC
AATGGTCTGACCGTGTTGCCTCCTTTATTGACCGATGAAATGATT
GCCCAGTACACTAGTGCCCTGCTGGCCGGCACTATCACGTCTGGG
TGGACCTTCGGAGCTGGTGCCGCCTTGCAGATACCTTTTGCAATG
CAGATGGCCTATAGGTTTAATGGTATCGGAGTGACTCAGAACGTA
CTGTACGAGAACCAGAAGCTCATCGCTAATCAATTTAACTCCGCT
ATCGGAAAAATCCAGGACAGCCTCTCTTCTACAGCTAGCGCTCTG
GGCAAACTGCAGGATGTCGTTAATCAGAATGCCCAGGCCCTGAAC
ACCTTGGTTAAACAACTATCTTCCAACTTCGGGGCCATATCCAGT
GTGTTGAATGATATTCTCTCCCGCTTGGATccacctGAAGCTGAG
GTGCAGATCGATCGCTTGATCACCGGCAGACTGCAGTCCCTCCAG
ACATATGTAACTCAGCAGCTGATTAGAGCCGCCGAGATAAGGGCA
AGTGCGAATCTGGCTGCCACCAAGATGAGCGAATGTGTATTGGGC
CAGAGCAAACGAGTTGATTTTTGCGGTAAGGGGTATCATTTAATG
TCTTTCCCTCAATCCGCACCTCATGGCGTAGTTTTCCTGCATGTG
ACTTATGTCCCGGCTCAGGAGAAGAATTTTACCACAGCCCCCGCG
ATCTGCCATGACGGAAAGGCCCACTTCCCCCGGGAAGGCGTGTTT
GTATCCAATGGGACTCACTGGTTTGTCACTCAGCGAAATTTTTAT
GAACCACAGATCATCACCACTGACAACACATTTGTTAGTGGAAAC
TGCGATGTGGTCATCGGCATCGTGAATAACACTGTCTATGATCCA
CTGCAACCTGAACTGGATTCTTTTAAAGAGGAACTCGACAAGTAT
TTTAAAAACCACACTAGCCCTGACGTGGATCTCGGTGACATTTCT
GGCATCAACGCTAGCGTAGTGAACATTCAGAAAGAGATAGATAGA
CTTAATGAGGTGGCCAAGAACCTCAACGAAAGTCTGATCGACCTC
CAGGAACTGGGGAAATACGAGCAGTACATTAAATGGCCTTGGTAC
ATATGGCTGGGGTTCATTGCTGGGCTGATCGCAATAGTGATGGTG
ACCATAATGCTCTGTTGCATGACTAGCTGCTGCAGCTGCCTGAAG
GGCTGCTGTAGTTGTGGGTCATGTTGTAAGTTTGACGAAGATGAT
AGCGAGCCTGTCCTTAAAGGAGTGAAGCTCCACTACACCTAG
CTSpikeF2Pg amino acid (SEQ ID NO: 90);
Bold Italic Furin Mutation 682-685 RRAR
(SEQ ID NO: 125) to GSAS (SEQ ID NO: 126),
Bold Lower Case K986P and V987P
MFVFLVLLPLVSSQCVNLTTRTQLPPAYTNSFTRGVYYPDKVFRS
SVLHSTQDLFLPFFSNVTWFHAIHVSGTNGTKRFDNPVLPFNDGV
YFASTEKSNIIRGWIFGTTLDSKTQSLLIVNNATNVVIKVCEFQF
CNDPFLGVYYHKNNKSWMESEFRVYSSANNCTFEYVSQPFLMDLE
GKQGNFKNLREFVFKNIDGYFKIYSKHTPINLVRDLPQGFSALEP
LVDLPIGINITRFQTLLALHRSYLTPGDSSSGWTAGAAAYYVGYL
QPRTFLLKYNENGTITDAVDCALDPLSETKCTLKSFTVEKGIYQT
SNFRVQPTESIVRFPNITNLCPFGEVENATRFASVYAWNRKRISN
CVADYSVLYNSASFSTFKCYGVSPTKLNDLCFTNVYADSFVIRGD
EVRQIAPGQTGKIADYNYKLPDDFTGCVIAWNSNNLDSKVGGNYN
YLYRLFRKSNLKPFERDISTEIYQAGSTPCNGVEGENCYFPLQSY
GFQPTNGVGYQPYRVVVLSFELLHAPATVCGPKKSTNLVKNKCVN
FNFNGLTGTGVLTESNKKFLPFQQFGRDIADTTDAVRDPQTLEIL
DITPCSFGGVSVITPGTNTSNQVAVLYQGVNCTEVPVAIHADQLT
PTWRVYSTGSNVFQTRAGCLIGAEHVNNSYECDIPIGAGICASYQ
TQTNSPGSASSVASQSIIAYTMSLGAENSVAYSNNSIAIPTNFTI
SVTTEILPVSMTKTSVDCTMYICGDSTECSNLLLQYGSFCTQLNR
ALTGIAVEQDKNTQEVFAQVKQIYKTPPIKDFGGFNFSQILPDPS
KPSKRSFIEDLLFNKVTLADAGFIKQYGDCLGDIAARDLICAQKF
NGLTVLPPLLTDEMIAQYTSALLAGTITSGWTFGAGAALQIPFAM
QMAYRENGIGVTQNVLYENQKLIANQFNSAIGKIQDSLSSTASAL
GKLQDVVNQNAQALNTLVKQLSSNFGAISSVLNDILSRLDppEAE
VQIDRLITGRLQSLQTYVTQQLIRAAEIRASANLAATKMSECVLG
QSKRVDFCGKGYHLMSFPQSAPHGVVFLHVTYVPAQEKNFTTAPA
ICHDGKAHFPREGVFVSNGTHWFVTQRNFYEPQIITTDNTFVSGN
CDVVIGIVNNTVYDPLQPELDSFKEELDKYFKNHTSPDVDLGDIS
GINASVVNIQKEIDRLNEVAKNLNESLIDLQELGKYEQYIKWPWY
IWLGFIAGLIAIVMVTIMLCCMTSCCSCLKGCCSCGSCCKFDEDD
SEPVLKGVKLHYT*

TABLE 7
TCE5 Cassette (Order of Frames as Shown)

| | | | | SEQ | |
|---|---|---|---|---|---|
| | | Start | End | ID | |
| Frame | Gene | aa | aa | NO | Amino Acid Sequence |
| 1 | ORF3a | 102 | 152 | 94 | EAPFLYLYALVYFLQSINFVRIIMRLWLCWKCRSKNPLL |
| | | | | | YDANYFLCWHTN |
| 2 | ORF3a | 53 | 85 | 95 | LAVFQSASKIITLKKRWQLALSKGVHFVCNLLL |
| 3 | ORF3a | 13 | 55 | 96 | VTLKQGEIKDATPSDFVRATATIPIQASLPFGWLIVGVAL |
| | | | | | LAV |
| 4 | N | 40 | 94 | 97 | RRPQGLPNNTASWFTALTQHGKEDLKFPRGQGVPINTN |
| | | | | | SSPDDQIGYYRRATRRI |
| 5 | M | 84 | 102 | 98 | MACLVGLMWLSYFIASFRL |
| 6 | N | 369 | 408 | 99 | KKDKKKKADETQALPQRQKKQQTVTLLPAADLDDESK |
| | | | | | QLQ |
| 7 | N | 284 | 338 | 100 | GNFGDQELIRQGTDYKHWPQIAQFAPSASAFFGMSRIG |
| | | | | | MEVTPSGTWLTYTGAIK |
| 8 | ORF3a | 169 | 198 | 101 | ITSGDGTTSPISEHDYQIGGYTEKWESGVK |
| 9 | N | 233 | 282 | 102 | KMSGKGQQQQGQTVTKKSAAEASKKPRQKRTATKAY |
| | | | | | NVTQAFGRRGPEQT |
| 10 | M | 56 | 75 | 103 | LLWPVTLACFVLAAVYRINW |
| 11 | N | 346 | 375 | 104 | FKDQVILLNKHIDAYKTFPPTEPKKDKKKK |
| 12 | N | 205 | 239 | 105 | TSPARMAGNGGDAALALLLLDRLNQLESKMSGKGQ |
| 13 | N | 100 | 118 | 106 | KMKDLSPRWYFYYLGTGPE |
| 14 | ORF3a | 199 | 254 | 107 | DCVVLHSYFTSDYYQLYSTQLSTDTGVEHVTFFIYNKIV |
| | | | | | DEPEEHVQIHTIDGSSG |
| 15 | N | 129 | 174 | 108 | GIIWVATEGALNTPKDHIGTRNPANNAAIVLQLPQGTTL |
| | | | | | PKGFYAE |

TCE5 Nucleotide Sequence (SEQ ID NO: 91):
ATGGCTGGCGAGGCCCCCTTCCTTTACCTGTACGCCCTTGTGTAT
TTCCTGCAGAGCATCAATTTTGTGAGAATCATCATGAGGCTGTGG
CTTTGCTGGAAATGTAGGAGCAAGAACCCCCTGTTGTATGACGCC
AACTACTTTCTGTGTTGGCACACCAATCTCGCCGTGTTCCAGAGT
GCCTCTAAGATCATTACACTGAAAAAGCGGTGGCAGCTTGCACTT
TCTAAGGGAGTGCATTTCGTTTGCAACCTGCTCCTGGTGACACTC
AAGCAGGGGGAAATCAAAGACGCCACCCCTAGCGACTTCGTTAGA
GCCACTGCCACAATCCCAATCCAGGCTTCCCTGCCTTTCGGCTGG
CTTATCGTGGGTGTGGCACTGTTGGCTGTGCGGAGACCACAGGGA
CTGCCTAATAATACAGCTAGCTGGTTTACCGCTCTGACACAGCAT
GGCAAAGAAGACCTCAAGTTCCCTCGCGGTCAGGGGGTGCCTATT
AACACTAATAGCTCTCCAGACGACCAAATTGGGTATTACAGGCGC
GCCACAAGACGGATCATGGCCTGCTTAGTGGGGCTGATGTGGCTA
TCCTATTTTATTGCTAGCTTTCGCCTGAAGAAGGACAAGAAGAAG
AAAGCTGATGAGACCCAGGCACTGCCCCAGCGCCAAAAGAAGCAG
CAGACAGTCACACTGCTCCCTGCTGCAGACCTGGATGACTTCAGC
AAGCAGCTGCAGGGGAACTTTGGCGACCAGGAGCTGATTAGACAG
GGGACTGACTATAAGCATTGGCCTCAGATTGCTCAGTTCGCCCCA
AGTGCATCCGCCTTCTTCGGGATGTCACGAATAGGAATGGAAGTG
ACCCCTTCTGGGACATGGTTGACATACACCGGAGCAATCAAGATT
ACCTCCGGGGACGGTACCACGTCTCCTATTAGCGAACACGATTAT
CAGATAGGGGGATATACTGAGAAGTGGGAGTCCGGCGTCAAAAAG
ATGAGTGGGAAAGGCCAGCAGCAACAAGGCCAAACAGTTACTAAA
AAGTCTGCCGCAGAAGCTAGTAAAAAGCCTCGCCAGAAGCGGACA
GCCACCAAAGCTTACAATGTGACTCAGGCCTTCGGCCGCCGGGGG
CCTGAACAGACCCTCTTGTGGCCCGTTACCCTCGCATGTTTCGTG
CTTGCAGCTGTGTACAGGATCAATTGGTTTAAGGATCAGGTTATC
CTGTTGAACAAACATATAGATGCCTATAAGACATTCCCACCCACC
GAGCCAAAGAAAGATAAGAAAAAGAAAACTAGTCCTGCAAGGATG
GCCGGCAATGGAGGAGACGCAGCCTTAGCCCTGCTCTTACTCGAC
AGGCTGAACCAACTTGAGTCTAAAATGAGCGGTAAAGGGCAGAAG
ATGAAGGATCTGTCCCCAAGGTGGTATTTCTACTATCTGGGCACC
GGCCCTGAGGATTGTGTCGTCCTCCACTCATACTTCACTAGCGAT
TATTACCAGCTGTATAGTACACAATTATCTACCGACACAGGCGTC
GAGCACGTGACCTTCTTTATATACAATAAGATCGTGGATGAACCA
GAGGAGCATGTGCAGATCCACACTATTGATGGCTCTAGCGGGGGC
ATCATCTGGGTGGCAACAGAAGGAGCCCTCAACACCCCAAAGGAC
CATATCGGCACCAGGAATCCAGCCAACAATGCCGCCATTGTTCTG
CAGCTCCCTCAGGGCACTACTCTCCCTAAAGGCTTCTATGCTGAG
GGACCCGGACCAGGCGCCAAATTTGTTGCTGCTTGGACACTGAAA
GCTGCTGCTGGGCCCGGACCAGGCCAGTACATCAAGGCCAACTCT
AAGTTTATCGGCATCACCGAATTGGGACCTGGACCCGGCTAG
TCE5 Amino Acid Sequence (SEQ ID NO: 92):
MAGEAPFLYLYALVYFLQSINFVRIIMRLWLCWKCRSKNPLLYDA
NYFLCWHTNLAVFQSASKIITLKKRWQLALSKGVHFVCNLLLVTL
KQGEIKDATPSDFVRATATIPIQASLPFGWLIVGVALLAVRRPQG
LPNNTASWFTALTQHGKEDLKFPRGQGVPINTNSSPDDQIGYYRR
ATRRIMACLVGLMWLSYFIASFRLKKDKKKKADETQALPQRQKKQ
QTVTLLPAADLDDFSKQLQGNFGDQELIRQGTDYKHWPQIAQFAP
SASAFFGMSRIGMEVTPSGTWLTYTGAIKITSGDGTTSPISEHDY
QIGGYTEKWESGVKKMSGKGQQQQGQTVTKKSAAEASKKPRQKRT
ATKAYNVTQAFGRRGPEQTLLWPVTLACFVLAAVYRINWFKDQVI
LLNKHIDAYKTFPPTEPKKDKKKKTSPARMAGNGGDAALALLLLD
RLNQLESKMSGKGQKMKDLSPRWYFYYLGTGPEDCVVLHSYFTSD
YYQLYSTQLSTDTGVEHVTFFIYNKIVDEPEEHVQIHTIDGSSGG
IIWVATEGALNTPKDHIGTRNPANNAAIVLQLPQGTTLPKGFYAE
GPGPGAKFVAAWTLKAAAGPGPGQYIKANSKFIGITELGPGPG-

[0676] SAM-SGP1-TCE5-SGP2-CTSpike_{G}F2P Nucleotide Sequence in vitro transcription template DNA sequence (SEQ ID NO:93): (NT 1-17: T7 promoter; NT 62-7543: VEEV non-structural protein coding region; NT 7518-7560: SGP1; NT 7582-7587 and 9541-9546: Kozak sequence; NT 7588-9474: TCE5 cassette; NT 9480-9540: SGP2; NT 9547-13368: CTSpike Furin-2P).

[0677] ChAd-CMV-CTSpike_{G}F2P-CMV-TCE5 (EPE) Nucleotide Sequence (SEQ ID NO:114); See Sequence Listing.

### XIV.E. SARS-CoV-2 Vaccine Produces Responses to Various Spike Constructs

[0678] ChAd and SAM vaccine platforms encoding various versions of the SARS-CoV-2 Spike protein were assessed.

[0679] Versions of a Spike-encoding cassette featuring different sequence optimizations were assessed: “IDTSpike_{g}” (SEQ ID NO:69, also referred to as “Spike V1” or “v1”); “CTSpike_{g}”: (SEQ ID NO:79, also referred to as “Spike V2” or “v2”). As shown in FIG. 13, both ChAd (FIG. 13A) and SAM (FIG. 13B) vaccines produced detectable T cell responses (left panel), Spike-specific IgG antibodies (middle panel) and neutralizing antibodies (right panel). Notably, a ChAd vaccine encoding the CTSpike_{g} sequence version produced a 3-fold increased T cell response, 100-fold increased IgG production, and 60-fold increase in neutralizing antibody titer. Similarly, a SAM vaccine encoding the CTSpike_{g} sequence version produced an increased T cell response, 7-fold increase in IgG production, and 4-fold increase in neutralizing antibody titer. Accordingly, the data demonstrate sequence optimization of the Spike cassette produced an increased immune response across the multiple parameters assessed for each vaccine platform examined.

[0680] A version of a Spike-encoding cassette featuring modified Spike that includes removal of a furin site and addition of prolines in S2 domain was assessed: “CTSpikeF2P_{g}” (SEQ ID NO:89 and SEQ ID NO:90). As shown in FIG. 14, both ChAd (left panel) and SAM (right panel) vaccines encoding the F2P-modified Spike produced 5-fold and 20-fold Spike-specific IgG antibodies, respectively, relative to a corresponding “CTSpike_{g}” cassette that does not have the referenced modifications. Accordingly, the data demonstrate modification of the Spike cassette produced an increased antibody response for each vaccine platform examined.

### XIV.F. SARS-CoV-2 Vaccine Produces Responses to T Cell Epitopes

[0681] ChAd and SAM vaccine platforms encoding various a modified SARS-CoV-2 Spike protein and a T cell epitope (TCE) cassette encoding EDGE predicted epitopes (EPE) were assessed.

[0682] Both a modified Spike-encoding only cassette (“CTSpikeF2P_{g}” (SEQ ID NO:89) and modified Spike together with additional non-Spike T cell epitopes (ChAd SEQ ID NO:114; SAM SEQ ID NO:93; see Table 7 for “TCE5”), and immune responses assessed, as described above. As shown in FIG. 15, both ChAd (FIG. 15A) and SAM (FIG. 15B) each vaccine assessed produced detectable T cell responses to Spike (left panel), while vaccines including the TCE5 cassette also generally produced detectable T cell responses to the encoded T cell epitopes (right panel). Accordingly, the data demonstrate addition of a T cell epitope cassette led to broad T cell responses across the SARS-CoV-2 Genome for each vaccine platform examined.

### XIV.G. Order of Cassettes in SARS-CoV-2 Vaccine Influences Immune Response

[0683] SAM vaccine platforms encoding various orders of a modified SARS-CoV-2 Spike protein and a T cell epitope (TCE) cassette encoding EDGE predicted epitopes (EPE) were assessed.

[0684] As shown in FIG. 16, T cell responses to Spike (top panel), T cell responses to the encoded T cell epitopes (middle panel), and Spike-specific IgG antibodies (bottom panel) were produced when vaccinated with various constructs. In FIG. 16A, SAM constructs included “IDTSpike_{g}” (SEQ ID NO:69) alone (left columns), IDTSpike_{g} expressed from a first subgenomic promoter followed by TCE5 expressed from a second subgenomic promoter (middle columns), or TCE5 expressed from a first subgenomic promoter followed by IDTSpike_{g} expressed from a second subgenomic promoter (right columns), with immune responses assessed, as described above. In FIG. 16B, SAM constructs included “IDTSpike_{g}” (SEQ ID NO:69) alone (first column), IDTSpike_{g} expressed from a first subgenomic promoter followed by TCE6 or TCE7 expressed from a second subgenomic promoter (columns 2 and 4, respectively), or TCE6 or TCE7 expressed from a first subgenomic promoter followed by IDTSpike_{g} expressed from a second subgenomic promoter (columns 3 and 5, respectively), with immune responses assessed, as described above. In FIG. 16C, SAM constructs included “CTSpike_{g}” (SEQ ID NO:79) alone (first column), CTSpike_{g} expressed from a first subgenomic promoter followed by TCE5 or TCE8 expressed from a second subgenomic promoter (columns 2 and 4, respectively), or TCE5 or TCE8 expressed from a first subgenomic promoter followed by CTSpike_{g} expressed from a second subgenomic promoter (columns 3 and 5, respectively), with immune responses assessed, as described above. Generally, and in particular for Spike, T cell responses were increased when the respective epitopes were expressed from the second subgenomic promoter, including increased Spike-directed T cell responses relative to Spike alone. A similar trend was also observed generally observed with increased Spike-specific IgG titers when the Spike antigen was expressed from the second subgenomic promoter except, for potentially the CTSpike_{g} constructs. Accordingly, the data demonstrate sequence order of antigen cassettes in vaccine platforms influenced immune responses.

### XIV.H. Additional SARS-CoV-2 Vaccine Constructions

[0685] Vaccines were constructed to maximize the percentage of people getting predicted to achieve a total magnitude of greater than 1000 from validated epitopes. Briefly, magnitude was calculated across all validated epitopes in the starting proteins (e.g., Spike), as well as any added in the TCE cassettes according to the following with an expected approximate upper size limit of 600 amino acids beyond that of Spike: (1) An individual's magnitude is the sum of all epitope magnitudes across their respective diplotype alleles; (2) Each epitopes magnitude=(magnitude of response)×(Frequency of positive response/100), with values found in Tarke et al. (Comprehensive analysis of T cell immunodominance and immunoprevalence of SARS-CoV-2 epitopes in COVID-19 cases. Cell Rep Med. 2021 Feb. 16; 2(2):100204. doi: 10.1016/j.xcrm.2021.100204. Epub 2021 Jan. 26.), herein incorporated by reference for all purposes; (3) epitopes other than those from starting proteins that span mutations with >5% frequency were excluded (see Table 8 for all mutations >1% frequency either overall or in specific strains), though mutations are allowed in flanking regions; and (4) cassette order was chosen to minimize unintended junction epitopes across adjacent frames, as well as minimize consecutive frames in the same protein to reduce chance of functional protein fragments, as described above.

[0686] The following constructions were produced: (A) “TCE5”: Selected CD8+ epitopes predicted by the EDGE platform to be presented on MHC molecules for SARS-CoV-2 proteins other than Spike. The 15 selected epitopes are presented along with their order in the cassette in Table 7. The nucleotide sequence is shown in SEQ ID NO:91 and protein sequence shown in SEQ ID NO:92. FIG. 12 shows the estimated protection across the four indicated populations for TCE5. All populations are estimated to have coverage above 95% up to at least the threshold of 7 epitopes (last column); (B) “TCE10” starting with full Spike protein as the starting point and adding validated epitopes according to the above for a total size of 378 amino acids in addition to Spike (Table 9A, maps of epitopes covered in FIG. 17A-17F); (C) “TCE9” extended TCE10 and adding validated epitopes according to the above only if fully conserved between SARS and SARS-2 (e.g., as a pan-coronavirus vaccine), with certain frames extended (21 additional amino acids across all frames) to include additional predicted epitopes for alleles (i.e., not validated epitopes), for a total size of 556 amino acids in addition to Spike (Table 9B, maps of epitopes covered in FIG. 18A-18G); (C) “TCE11” starting with full Spike and Nucleocapsid proteins as the starting point and adding validated epitopes according to the above for a total size of 616 amino acids (197aa+full N) in addition to Spike (Table 9C, maps of epitopes covered in FIG. 19A-19D). Table 10A and Table 10B presents the magnitude coverage across various populations for each of TCE5, TCE9, TCE10, and TCE11 for SARS-CoV-2 and SARS/SARS-CoV-2 conserved epitopes, respectively. Notably, each of the vaccine constructs cover greater than 89% of each of the indicated populations with a validated response magnitude greater than 1000 and greater than 95% with a validated response magnitude greater than 100, while TCE9 covers greater than 74% of each of the indicated populations with a validated response magnitude greater than 1000 for epitopes conserved between SARS and SARS-2. FIG. 20 presents the percentages of shared candidate 9-mer epitope distribution between SARS-CoV-2 and SARS-CoV (left panel) and between SARS-CoV-2 and MERS (right panel), highlighting the significant number of conserved sequences outside of the Spike protein demonstrating the value of evaluating and including epitopes beyond those simply encoded by Spike, particularly with a goal of constructing a pan-coronavirus vaccine.

[0687] Omicron mutations were assessed for their impact on T-cell epitopes encoded by TCE5, TCE9, and TCE11. As shown in FIG. 27, Omicron mutations had minimal impact with 3, 2, and 0 epitopes impacted for TCE5, TCE9, and TCE11, respectively (representing 2.1%, 2.8%, and 0% of epitopes for each construct).

TABLE 8
Mutations > 1% frequency either overall or in specific strains

| Gene | Position | Strain | Frequency |
|---|---|---|---|
| M | 70 | b117 | 0.014 |
| M | 155 | N501Y_early | 0.048 |
| M | 162 | N501Y_early | 0.048 |
| N | 3 | b117 | 0.999 |
| N | 13 | N501Y_early | 0.016 |
| N | 14 | N501Y_early | 0.016 |
| N | 67 | | 0.028 |
| N | 80 | P1 | 1 |
| N | 81 | N501Y_early | 0.033 |
| N | 151 | | 0.011 |
| N | 194 | | 0.056 |
| N | 199 | | 0.041 |
| N | 203 | b117 | 1 |
| N | 204 | b117 | 1 |
| N | 205 | N501Y_early | 1 |
| N | 220 | | 0.218 |
| N | 234 | | 0.033 |
| N | 235 | b117 | 0.999 |
| N | 359 | N501Y_early | 0.016 |
| N | 365 | | 0.021 |
| N | 373 | N501Y_early | 0.016 |
| N | 376 | | 0.029 |
| N | 377 | | 0.018 |
| N | 398 | | 0.015 |
| ORF3a | 15 | b117 | 0.089 |
| ORF3a | 38 | | 0.011 |
| ORF3a | 57 | N501Y_early | 0.982 |
| ORF3a | 90 | b117 | 0.02 |
| ORF3a | 131 | N501Y_early | 0.036 |
| ORF3a | 171 | N501Y_early | 0.589 |
| ORF3a | 172 | | 0.039 |
| ORF3a | 202 | | 0.012 |
| ORF3a | 223 | | 0.016 |
| ORF3a | 251 | | 0.017 |
| ORF3a | 259 | N501Y_early | 0.018 |
| S | 5 | | 0.012 |
| S | 18 | N501Y_early | 0.381 |
| S | 54 | N501Y_early | 0.016 |
| S | 69 | b117 | 1 |
| S | 70 | b117 | 1 |
| S | 80 | N501Y_early | 1 |
| S | 98 | | 0.012 |
| S | 144 | b117 | 1 |
| S | 215 | N501Y_early | 1 |
| S | 222 | | 0.198 |
| S | 241 | N501Y_early | 1 |
| S | 242 | N501Y_early | 1 |
| S | 243 | N501Y_early | 1 |
| S | 246 | N501Y_early | 0.016 |
| S | 262 | | 0.011 |
| S | 316 | N501Y_early | 0.016 |
| S | 384 | N501Y_early | 0.016 |
| S | 417 | N501Y_early | 0.984 |
| S | 439 | | 0.017 |
| S | 477 | | 0.048 |
| S | 484 | N501Y_early | 1 |
| S | 501 | b117 | 1 |
| S | 570 | b117 | 1 |
| S | 614 | b117 | 1 |
| S | 681 | b117 | 1 |
| S | 682 | cleavage | 1 |
| S | 683 | cleavage | 1 |
| S | 685 | cleavage | 1 |
| S | 688 | N501Y_early | 0.016 |
| S | 701 | N501Y_early | 1 |
| S | 706 | b117 | 0.018 |
| S | 716 | b117 | 1 |
| S | 982 | b117 | 1 |
| S | 1078 | N501Y_early | 0.016 |
| S | 1117 | N501Y_early | 0.016 |
| S | 1118 | b117 | 1 |
| S | 1150 | N501Y_early | 0.016 |
| nsp12 | 4577 | | 0.026 |
| nsp12 | 4646 | | 0.01 |
| nsp12 | 4715 | | 0.885 |
| nsp12 | 4815 | | 0.011 |
| nsp12 | 5112 | | 0.016 |
| nsp12 | 5168 | | 0.025 |
| nsp13 | 5542 | | 0.025 |
| nsp13 | 5585 | | 0.026 |
| nsp13 | 5614 | | 0.022 |
| nsp13 | 5784 | | 0.027 |
| nsp13 | 5922 | | 0.017 |
| nsp14 | 6054 | | 0.024 |
| nsp14 | 6426 | | 0.011 |
| nsp15 | 6485 | | 0.015 |
| nsp16 | 7014 | | 0.028 |
| nsp2 | 265 | | 0.132 |
| nsp2 | 300 | | 0.042 |
| nsp3 | 1001 | | 0.059 |
| nsp3 | 1113 | | 0.011 |
| nsp3 | 1246 | | 0.011 |
| nsp3 | 1361 | | 0.01 |
| nsp3 | 1708 | | 0.058 |
| nsp3 | 2230 | | 0.058 |
| nsp3 | 2501 | | 0.02 |
| nsp3 | 2606 | | 0.011 |
| nsp4 | 3087 | | 0.025 |
| nsp5 | 3278 | | 0.016 |
| nsp5 | 3352 | | 0.034 |
| nsp5 | 3353 | | 0.013 |
| nsp5 | 3371 | | 0.013 |
| nsp6 | 3606 | | 0.056 |
| nsp6 | 3675 | | 0.064 |
| nsp6 | 3676 | | 0.064 |
| nsp6 | 3677 | | 0.064 |
| nsp6 | 3711 | | 0.015 |
| nsp7 | 3884 | | 0.01 |
| nsp9 | 4241 | | 0.016 |

TABLE 9A
TCE10 Cassette (Order of Frames as Shown)

| | Frame Start | Frame End | | SEQ |
|---|---|---|---|---|
| Gene | in Gene | in Gene | Frame sequence | ID NO: |
| N | 356 | 378 | HIDAYKTFPPTEPKKDKKKKADE | 27944 |
| ORF3a | 133 | 149 | CRSKNPLLYDANYFLCW | 27945 |
| nsp3 | 1632 | 1660 | FEYYHTTDPSFLGRYMSALNHTKKWKYPQ | 27946 |
| nsp3 | 1360 | 1377 | ISNEKQEILGTVSWNLRE | 27947 |
| M | 160 | 203 | DIKDLPKEITVATSRTLSYYKLGASQ | 27948 |
| | | | RVAGDSGFAAYSRYRIGN | |
| ORF3a | 29 | 52 | VRATATIPIQASLPFGWLIVGVAL | 27949 |
| nsp4 | 3111 | 3134 | YLTFYLTNDVSFLAHIQWMVMFTP | 27950 |
| M | 89 | 109 | GLMWLSYFIASFRLFARTRSM | 27951 |
| nsp12 | 4553 | 4571 | DWYDFVENPDILRVYANLG | 27952 |
| nsp3 | 1919 | 1935 | PYPNASFDNFKFVCDNI | 27953 |
| nsp12 | 4806 | 4826 | NFNKDFYDFAVSKGFFKEGSS | 27954 |
| nsp12 | 4728 | 4745 | DGVPFVVSTGYHFRELGV | 27955 |
| nsp4 | 2850 | 2876 | ACPLIAAVITREVGFVVPGLPGTILRT | 27956 |
| nsp3 | 2745 | 2761 | ATTRQVVNVVTTKIALK | 27957 |
| N | 318 | 337 | SRIGMEVTPSGTWLTYTGAI | 27958 |
| M | 61 | 77 | TLACFVLAAVYRINWIT | 27959 |
| N | 96 | 117 | GGDGKMKDLSPRWYFYYLGTGP | 27960 |

TABLE 9B
TCE9 Cassette (Order of Frames as Shown)

| | Frame Start | Frame End | | SEQ |
|---|---|---|---|---|
| Gene | in Gene | in Gene | Frame sequence | ID NO: |
| nsp12 | 4719 | 4745 | GPLVRKIFVDGVPFVVSTGYHFRELGV | 27961 |
| nsp4 | 3096 | 3134 | PVYSFLPGVYSVIYLYLTFYLTNDVSF | 27962 |
| | | | LAHIQWMVMFTP | |
| M | 89 | 109 | GLMWLSYFIASFRLFARTRSM | 27951 |
| nsp12 | 4888 | 4905 | NNLDKSAGFPFNKWGKAR | 27963 |
| nsp3 | 2745 | 2761 | ATTRQVVNVVTTKIALK | 27957 |
| M | 61 | 79 | TLACFVLAAVYRINWITGG | 27964 |
| nsp3 | 1919 | 1935 | PYPNASFDNFKFVCDNI | 27953 |
| nsp3 | 2676 | 2692 | TYNKVENMTPRDLGACI | 27965 |
| ORF3a | 29 | 52 | VRATATIPIQASLPFGWLIVGVAL | 27949 |
| nsp12 | 4806 | 4826 | NFNKDFYDFAVSKGFFKEGSS | 27954 |
| N | 96 | 117 | GGDGKMKDLSPRWYFYYLGTGP | 27960 |
| nsp12 | 5213 | 5234 | KQGDDYVYLPYPDPSRILGAGC | 27966 |
| N | 356 | 378 | HIDAYKTFPPTEPKKDKKKKADE | 27944 |
| ORF3a | 133 | 149 | CRSKNPLLYDANYFLCW | 27945 |
| nsp6 | 3643 | 3668 | SLATVAYFNMVYMPASWVMRIMTWLD | 27967 |
| nsp12 | 4529 | 4545 | GNCDTLKEILVTYNCCD | 27968 |
| nsp3 | 1630 | 1660 | EAFEYYHTTDPSFLGRYMSALNHTKKWKYPQ | 27969 |
| nsp3 | 1360 | 1377 | ISNEKQEILGTVSWNLRE | 27947 |
| M | 160 | 203 | DIKDLPKEITVATSRTLSYYKLGASQRVAGD | 27948 |
| | | | SGFAAYSRYRIGN | |
| N | 301 | 337 | WPQIAQFAPSASAFFGMSRIGMEVTPSGT | 27970 |
| | | | WLTYTGAI | |
| nsp12 | 4553 | 4571 | DWYDFVENPDILRVYANLG | 27952 |
| nsp4 | 2850 | 2909 | ACPLIAAVITREVGFVVPGLPGTILRTTNG | 27971 |
| | | | DFLHFLPRVFSAVGNICYTPSKLIEYTDFA | |

TABLE 9C
TCE11 Cassette (Order of Frames as Shown)

| | Frame | Frame | | SEQ |
|---|---|---|---|---|
| | Start | End | | ID |
| Gene | in Gene | in Gene | Frame sequence | NO: |
| nsp12 | 4896 | 4826 | NVAFQTVKPGNFNKDFYDF | 27972 |
| | | | AVSKGFFKEGSS | |
| M | 182 | 203 | GASQRVAGDSGFAAYSRYR | 27973 |
| | | | IGN | |
| nsp12 | 4728 | 4745 | DGVPFVVSTGYHFRELGV | 27955 |
| nsp4 | 3111 | 3134 | YLTFYLTNDVSFLAHIQWM | 27950 |
| | | | VMFTP | |
| M | 89 | 109 | GLMWLSYFIASFRLFART | 27951 |
| | | | RSM | |
| nsp3 | 1632 | 1660 | FEYYHTTDPSFLGRYMSA | 27946 |
| | | | LNHTKKWKYPQ | |
| nsp3 | 1360 | 1377 | ISNEKQEILGTVSWNLRE | 27947 |
| nsp3 | 2745 | 2761 | ATTRQVVNVVTTKIALK | 27957 |
| M | 61 | 77 | TLACFVLAAVYRINWIT | 27959 |

TABLE 10A
Population Coverages for SARS-CoV-2 Validated
Epitopes (Excluding mutations >5%)

| Cassette | Magnitude | Starting Protein(s) | AFA | API | EUR | HIS | Mean | Min |
|---|---|---|---|---|---|---|---|---|
| Spike | 1 | S | 0.95 | 0.89 | 1 | 0.98 | 0.95 | 0.89 |
| S + N + TCE11 | 1 | S, N | 0.97 | 0.95 | 1 | 0.99 | 0.98 | 0.95 |
| S + TCE10 | 1 | S | 0.97 | 0.95 | 1 | 0.99 | 0.98 | 0.95 |
| S + TCE9 | 1 | S | 0.97 | 0.95 | 1 | 0.99 | 0.98 | 0.95 |
| S + TCE5 | 1 | S | 0.95 | 0.95 | 1 | 0.98 | 0.97 | 0.95 |
| Spike | 100 | S | 0.92 | 0.86 | 1 | 0.96 | 0.93 | 0.86 |
| S + N + TCE11 | 100 | S, N | 0.95 | 0.95 | 1 | 0.99 | 0.97 | 0.95 |
| S + TCE10 | 100 | S | 0.95 | 0.95 | 1 | 0.99 | 0.97 | 0.95 |
| S + TCE9 | 100 | S | 0.95 | 0.95 | 1 | 0.99 | 0.97 | 0.95 |
| S + TCE5 | 100 | S | 0.92 | 0.94 | 1 | 0.97 | 0.96 | 0.92 |
| Spike | 1000 | S | 0.6 | 0.62 | 0.91 | 0.75 | 0.72 | 0.6 |
| S + N + TCE11 | 1000 | S, N | 0.89 | 0.92 | 1 | 0.96 | 0.94 | 0.89 |
| S + TCE10 | 1000 | S | 0.9 | 0.92 | 1 | 0.97 | 0.95 | 0.9 |
| S + TCE9 | 1000 | S | 0.9 | 0.92 | 1 | 0.97 | 0.95 | 0.9 |
| S + TCE5 | 1000 | S | 0.68 | 0.7 | 0.93 | 0.8 | 0.78 | 0.68 |
| Spike | 2000 | S | 0.39 | 0.49 | 0.73 | 0.56 | 0.54 | 0.39 |
| S + N + TCE11 | 2000 | S, N | 0.66 | 0.72 | 0.96 | 0.82 | 0.79 | 0.66 |
| S + TCE10 | 2000 | S | 0.72 | 0.73 | 0.96 | 0.85 | 0.81 | 0.72 |
| S + TCE9 | 2000 | S | 0.76 | 0.77 | 0.98 | 0.9 | 0.85 | 0.76 |
| S + TCE5 | 2000 | S | 0.49 | 0.54 | 0.81 | 0.66 | 0.62 | 0.49 |

TABLE 10B
Population Coverages for Validated Conserved Epitopes
between SARS and SARS-CoV-2 (Excluding mutations >5%)

| Cassette | Magnitude | Starting Protein(s) | AFA | API | EUR | HIS | Mean | Min |
|---|---|---|---|---|---|---|---|---|
| Spike | 1 | S | 0.74 | 0.82 | 0.98 | 0.91 | 0.87 | 0.74 |
| S + N + TCE11 | 1 | S, N | 0.89 | 0.93 | 1 | 0.97 | 0.95 | 0.89 |
| S + TCE10 | 1 | S | 0.94 | 0.93 | 1 | 0.97 | 0.96 | 0.93 |
| S + TCE9 | 1 | S | 0.94 | 0.93 | 0.99 | 0.97 | 0.96 | 0.93 |
| S + TCE5 | 1 | S | 0.87 | 0.91 | 0.99 | 0.95 | 0.93 | 0.87 |
| Spike | 100 | S | 0.74 | 0.78 | 0.98 | 0.89 | 0.85 | 0.74 |
| S + N + TCE11 | 100 | S, N | 0.89 | 0.91 | 0.99 | 0.95 | 0.94 | 0.89 |
| S + TCE10 | 100 | S | 0.94 | 0.93 | 0.99 | 0.97 | 0.96 | 0.93 |
| S + TCE9 | 100 | S | 0.94 | 0.92 | 0.99 | 0.97 | 0.96 | 0.92 |
| S + TCE5 | 100 | S | 0.86 | 0.88 | 0.98 | 0.93 | 0.91 | 0.86 |
| Spike | 1000 | S | 0.18 | 0.2 | 0.46 | 0.27 | 0.28 | 0.18 |
| S + N + TCE11 | 1000 | S, N | 0.49 | 0.67 | 0.76 | 0.62 | 0.63 | 0.49 |
| S + TCE10 | 1000 | S | 0.52 | 0.56 | 0.71 | 0.55 | 0.59 | 0.52 |
| S + TCE9 | 1000 | S | 0.74 | 0.81 | 0.92 | 0.84 | 0.83 | 0.74 |
| S + TCE5 | 1000 | S | 0.33 | 0.42 | 0.62 | 0.49 | 0.47 | 0.33 |
| Spike | 2000 | S | 0.01 | 0.03 | 0.08 | 0.03 | 0.04 | 0.01 |
| S + N + TCE11 | 2000 | S, N | 0.24 | 0.2 | 0.41 | 0.28 | 0.28 | 0.2 |
| S + TCE10 | 2000 | S | 0.2 | 0.15 | 0.34 | 0.17 | 0.21 | 0.15 |
| S + TCE9 | 2000 | S | 0.4 | 0.37 | 0.7 | 0.51 | 0.49 | 0.37 |
| S + TCE5 | 2000 | S | 0.21 | 0.11 | 0.34 | 0.24 | 0.22 | 0.11 |

### XIV.I. SARS-CoV-2 Prime-Boost Regimens Featuring Spike Proteins from Different SARS-CoV-2 Subtype Isolates Produces Responses to Spike in Non-Human Primates

[0688] ChAd and SAM vaccine platforms encoding different subtype isolates of the SARS-CoV-2 Spike protein were assessed in Indian rhesus macaques as part of homologous or heterologous prime/boost regimens, as shown in FIG. 21 and presented in Table 11.

TABLE 11
NHP Study Design for SARS-COV-2 Isolate Vaccine Regimens

| | Prime | Boost 1 | Boost 2 |
|---|---|---|---|
| Group # | (week 0) | (week 6 or 8) | (week 30) |
| 1 | SAM-S_{D614G}; | SAM-S_{D614G}; | ChAd-S_{B1351}-TCE5; |
| | 300 ug | 300 ug | 5e11 vp |
| 2 | SAM-S_{D614G}; | SAM-S_{D614G}; | SAM-TCE5-S_{B13519}; |
| | 30 ug | 30 ug | 30 ug |
| 5 | ChAd-S_{D614G}; | SAM-S_{D614G}; | SAM-TCE5-S_{B1351}; |
| | 1e12 vp | 100 ug | 30 ug |
| 6 | ChAd.S_{D614G}; | SAM-S_{D614G}; | ChAd-S_{B1351}-TCE5; |
| | 5e10 vp | 100 ug | 5e11 vp |

Prime: ChAdV - “CTSpike_{g}” (SEQ ID NO: 79); SAM - “IDTSpike_{g}” (SEQ ID NO: 69)
Boost 1: SAM - “IDTSpike_{g}” (SEQ ID NO: 69)
Boost 2: all CT-F2P versions of Spike variant B.1.351; TCE5 see Table 7

[0689] NHPs were first immunized with a priming dose of either a ChAd platform including a Spike-encoding cassette featuring “ChAd-S_{D614G}; CT” (SEQ ID NO:79) or a SAM platform including a Spike-encoding cassette featuring “SAM-S_{D614G}; IDT” (SEQ ID NO:69) at the indicated doses. NHPs were then administered a first boost at weeks 6 or 8 with the SAM platform including a Spike-encoding cassette featuring “SAM-S_{D614G}; IDT” at the indicated doses. NHPs were then administered a second boost at week 30 with either a ChAd platform including a B.1.351 Spike variant-encoding cassette featuring Cool Tool sequence optimization (“CT”) and the F2P modification described herein (“F2P”) [SEQ ID NO:112] or a SAM platform including the same B.1.351 Spike variant (each platform also included the TCE5 T cell epitope cassette, see Table 7, in the orientation shown). The ChAdV antigen cassette is shown in SEQ ID NO:113. NHPs were monitored over time, as described herein.

[0690] As shown in FIGS. 22A, 22B, 22C, and 22D, the various vaccine regimens (Groups 1, 2, 5, and 6, respectively) produced T cell responses across multiple Spike T cell epitope pools (top panels). T cell responses for individual NHPs directed to a single large Spike T cell epitope pool was heterogenous (middle panels and summarized in FIG. 23 top panel), with each boost generally producing an increased T cell response, including production of a robust response in some (e.g., two NHPs in Group 1 following Boost 2). Spike-specific IgG antibody titers were detected and increased following each boost (bottom panels and summarized in FIG. 23 bottom panel) in all five NHP animals assessed. T cell responses to the TCE5-encoded epitopes, though generally small, trended upwards following Boost 2 (the first administration of a vaccine including TCE5), with generally stronger responses with administration of the ChAdV platform vaccine (FIG. 23 middle panel). Accordingly, the data demonstrate a vaccine regimen including a boost with a Spike variant encoding vaccine produced T cell and antibody responses.

[0691] Antibody responses were further assessed for neutralizing antibody production to both the D614G pseudovirus and B.1.351 pseudovirus. As shown in FIG. 24, neutralizing antibody (Nab) titers against the D614G pseudovirus were detected following Boost 1 across the four groups, with Nab titers generally the same following Boost 2 (left panels). Following Boost 1, cross-neutralizing antibody titers against the B.1.351 pseudovirus, while detected, were distinctly lower than the Nab titer against the D614G pseudovirus (right panel, column 1). However, following administration of Boost 2 encoding the B.1.351 spike variant, Nab titers against the B.1.351 pseudovirus were noticeably increased (right panels, column 2), notably with similar Nab titer levels to that against the D614G pseudovirus following Boost 1. These results are further demonstrated in FIG. 25, comparing the relative Nab titer levels against each of the pseudoviruses illustrating the reduced cross-neutralizing capacity against the B.1.351 pseudovirus following Boost 1 (top panels) and rescuing of the same following Boost 2 (bottom panels) across each of the vaccine regimens assessed. FIG. 26 shows T cell responses (left panel) and Nab titer levels (right panel) for Rhesus macaques immunized twice with SAM encoding SARS-CoV-2 Spike antigen at a specified dose of either 30 μg or 300 μg, with 30 μg doses producing a more robust response.

[0692] The data demonstrate the various vaccine regimens produced both T cell and antibody responses against the encoded antigens in NHPs, notably demonstrating subsequent immunization with Spike variant encoding vaccines noticeably improved Nab titers against the respective variant pseudovirus.

### XIV.J. Omicron SARS-CoV-2 Vaccine Assessment

[0693] A phase 1, open-label, dose escalation, non-randomized study of homologous and heterologous prime-boost vaccination schedules to examine safety, tolerability, and immunogenicity of investigational Chimpanzee Adenovirus serotype 68 (ChAd) and/or self-amplifying mRNA (SAM) vectors expressing either Severe Acute Respiratory Syndrome Coronavirus 2 (SARS-CoV-2) spike alone, or spike plus additional SARS-CoV-2 T cell epitopes (TCE), such as epitopes presented in Tables A-F or T cell epitope cassettes described in Tables 7, 9A, 9B, or 9C, in healthy adult subjects is conducted. Assessment includes vaccine strategies including homologous SAM prime/SAM boost, homologous ChAd prime/ChAd boost and heterologous ChAd prime/SAM boost combinations.

[0694] The primary objective of this study is to assess the safety and tolerability of different doses of SAM-Nuc-TCE11-SpikeB.1.1.529 sequence (SEQ ID NO: 27976) when administered as prime and/or boost in healthy adult subjects including older adult subjects, e.g., administered in (i) a homologous SAM prime/boost vaccine regimen; (ii) following prior vaccination with a ChAdV68-based vaccine platform described herein; or (iii) following prior vaccination with a commercially available SARS-CoV-2 vaccine platform, including, but not limited to, Comirnaty® (BioNTech/Pfizer), mRNA-1273/SpikeVax® (Moderna), AZD1222/Covishield® (Oxford/AstraZeneca), or Ad26.COV2.S/JNJ-78436735 (Janssen/Johnson & Johnson).

[0695] ChAdV68 “Chimpanzee Adenovirus serotype 68”: a replication-defective, E1, E3 E4Orf2-4 deleted adenoviral vector based on chimpanzee adenovirus 68 (C68, 68/SAdV-25, originally designated as Pan 9), which belongs to the sub-group E adenovirus family. A single 0.5 mL or 1.0 mL intramuscular injection (depending on dose level) is administered in the deltoid muscle. When possible, the prime vaccine and boost vaccine is administered in different arms. ChAdV68 is administered at doses of 5×10\hat{ }10 or 1×10\hat{ }11 viral particles (or adjusted as determined during the study).

[0696] SAM-LNP “Self-Amplifying mRNA-Lipid Nanoparticles”: a SAM vector based on Venezuelan Equine Encephalitis Virus (VEEV). A single 0.5 mL intramuscular injection is administered in the deltoid muscle. When possible, the prime vaccine and boost vaccine is administered in different arms. The specific SAM construct assessed is SAM-Nuc-TCE11-SpikeB.1.1.529 sequence (SEQ ID NO: 27976) and is administered at doses of 1 mcg, 3 mcg, 10 mcg, 30 mcg, or 100 mcg (or adjusted as determined during the study).

[0697] The diluent used for this study is 0.9% Sodium Chloride Injection, USP, and is a sterile, nonpyrogenic, isotonic solution of sodium chloride and water for injection. Each milliliter (mL) contains sodium chloride 9 mg. It contains no bacteriostat, antimicrobial agent or added buffer and is supplied only in single-dose containers to dilute or dissolve drugs for injection. 0.308 mOsmol/mL (calc.). 0.9% Sodium Chloride Injection, USP contains no preservatives.

[0698] The following primary outcomes are assessed:
[0699] Frequency by grade of solicited local reactogenicity adverse events (AEs) [Time Frame: Through 7 days post each vaccination]
[0700] Frequency by grade of solicited systemic reactogenicity adverse events (AEs) [Time Frame: Through 7 days post each vaccination]
[0701] Frequency by grade of unsolicited adverse events (AEs) [Time Frame: Through 28 days post each vaccination]
[0702] Frequency of Adverse Events of Special Interest (AESIs) [Time Frame: Day 1 through Day 478]. Including potentially immune-mediated medical conditions (PIMMCs), medically attended adverse events (MAAEs), and new onset chronic medical conditions (NOCMCs)
[0703] Frequency of clinical safety laboratory adverse events by severity grade [Time Frame: Through 7 days post each vaccination]. Parameters to be evaluated include: white blood cell count (WBC), hemoglobin (HgB), platelets (PLT), alanine aminotransferase (ALT), aspartate aminotransferase (AST), alkaline phosphatase (ALP), total bilirubin (T Bili), creatine kinase (CK), and creatinine (Cr)
[0704] Frequency of Serious Adverse Events (SAEs) [Time Frame: Day 1 through Day 478]

[0705] The following secondary outcomes are assessed:
[0706] Geometric mean fold rise from baseline in titer measured by a SARS-CoV-2 neutralization assay, for wild-type virus and emergent viral strains [Time Frame: Day 1 through Day 478]
[0707] Geometric mean fold rise from baseline in titer of receptor-binding domain (RBD) specific Immunoglobulin G (IgG) [Time Frame: Day 1 through Day 478]. Measured by an Enzyme-Linked Immunosorbent Assay (ELISA), for RBD from wild-type virus and emergent viral strains
[0708] Geometric mean fold rise from baseline in titer of Spike-specific Immunoglobulin G (IgG) [Time Frame: Day 1 through Day 478]. Measured by an Enzyme-Linked Immunosorbent Assay (ELISA), for spike protein from wild-type virus and emergent viral strains
[0709] Geometric mean titer measured by a SARS-CoV-2 neutralization assay, for wild-type virus and emergent viral strains [Time Frame: Day 1 through Day 478]
[0710] Geometric mean titer of receptor-binding domain (RBD) specific Immunoglobulin G (IgG) [Time Frame: Day 1 through Day 478]. Measured by an Enzyme-Linked Immunosorbent Assay (ELISA), for RBD from wild-type virus and emergent viral strains
[0711] Geometric mean titer of Spike-specific Immunoglobulin G (IgG) [Time Frame: Day 1 through Day 478]. Measured by an Enzyme-Linked Immunosorbent Assay (ELISA), for spike protein from wild-type virus and emergent viral strains
[0712] Percent of cells expressing a cytokine by cell type (CD4+ or CD8+), cytokine set (Th1 or Th2 cytokine for CD4+ and CD8+ cytokine for CD8+ or other combinations of interest) and peptide pool (covering spike and T cell epitope regions) [Time Frame: Day 1 through Day 478]. As determined by ICS
[0713] Percentage of subjects who seroconverted, for RBD from wild-type virus and emergent viral strains [Time Frame: Day 1 through Day 478]. Seroconversion defined as a 4-fold change in receptor-binding domain (RBD) specific IgG from baseline measured by ELISA. Including against emergent viral strains, e.g., B.1.1.7., as assessed by a range of assays measuring total Spike-specific Immunoglobulin G (IgG) (Enzyme-Linked Immunosorbent Assay (ELISA)-based) and function (neutralization, receptor-binding domain (RBD) binding, or similar) in serum
[0714] Percentage of subjects who seroconverted, for spike protein from wild-type virus and emergent viral strains [Time Frame: Day 1 through Day 478]. Seroconversion defined as a 4-fold change in Spike-specific Immunoglobulin G (IgG) from baseline measured by an Enzyme-Linked Immunosorbent Assay (ELISA). Including against emergent viral strains, e.g., B.1.1.7., as assessed by a range of assays measuring total Spike-specific Immunoglobulin G (IgG) (Enzyme-Linked Immunosorbent Assay (ELISA)-based) and function (neutralization, receptor-binding domain (RBD) binding, or similar) in serum
[0715] Percentage of subjects who seroconverted, for wild-type virus and emergent viral strains [Time Frame: Day 1 through Day 478]. Seroconversion defined as a 4-fold change in titer from baseline measured by a SARS-CoV-2 neutralization assay. Including against emergent viral strains, e.g., B.1.1.7., as assessed by a range of assays measuring total Spike-specific Immunoglobulin G (IgG) (Enzyme-Linked Immunosorbent Assay (ELISA)-based) and function (neutralization, receptor-binding domain (RBD) binding, or similar) in serum
[0716] Rate of spot-forming cell per million cells by peptide pool (covering spike and T cell epitope regions) [Time Frame: Day 1 through Day 478]. As determined by interferon (IFN) gamma Enzyme Linked Immunospot Assay (ELISpot)
[0717] Responder status, derived from the intracellular cytokine staining (ICS) cell counts for each set of applicable cytokines and each peptide pool [Time Frame: Day 1 through Day 478]. Covering spike and T cell epitope regions
[0718] Responder status, determined by interferon (IFN) gamma Enzyme Linked Immunospot Assay (ELISpot) for each peptide pool [Time Frame: Day 1 through Day 478]. Covering spike and T cell epitope regions
[0719] Th1/Th2 cytokine balance of T cell response [Time Frame: Through 28 days post boost vaccination]. By measuring interleukin (IL) 2, tumor necrosis factor (TNF) alpha, IL-4, IL-10, and IL-13 using a multiplexed cytokine assay with Enzyme Linked Immunospot Assay (ELISpot) supernatants in a subset of subjects

### XIV.K. SARS-CoV-2 Vaccine Clinical Assessment in Rhesus Macaques

[0720] SARS-CoV-2 vaccines were assessed in Rhesus Macaques non-human primates (NHP).

### Methods

[0721] Vector Construction: The ChAd68 nucleotide sequence was based on the wild-type sequence obtained by MiSeq (Ilumina sequencing) of virus obtained from the ATCC (VR-594). The sequence of a E1 (578-3404 bp)/E3 deleted virus (2,125-31,825 bp) was assembled into pUC19 from VR-594-derived and synthetic (SGI-DNA) fragments. An E4 deletion between E4ORF2-4 was introduced by PCR. A CMV promoter/enhancer with an SV40 polyA was introduced into the E1 region and the spike gBlock sequences introduced by Gibson assembly (Codexis) and transformed into Stb14 (Thermo Fisher) cells. Error free clones were selected by PCR and sequencing and plasmid DNA prepared at the Maxi-prep scale (Machery-Nagel). Furin and proline spike mutations, 2P or 6P, were introduced into the spike protein by overlapping PCR extension using primers to introduce the specific mutations. The pA68-E4d-Spike plasmids were linearized, purified using a Nucleospin kit (Machery-Nagel) and transfected into 2 mL of 293F cells (0.5 mL/mL) using TransIT-Lenti (Mirus bio). The virus was amplified, harvested and re-infected into 30 mL of 293F cells for 48-72 h. Cells and media were harvested and used to infect 400 mL of 293F cells. Cells were harvested after 48 hours and lysed by a freeze/thaw step (−80° C./37° C.) in 10 mM Tris pH 8.0/0.1% Triton-X100, and then purified by two successive rounds of CsCl gradient centrifugation. Virus bands were purified and dialyzed 3× into 1×ARM buffer (10 mM Tris pH 8.0, 25 mM NaCl, 2.5% glycerol). Viral particle concentration was determined by the Absorbance 260 nm method post lysis in 0.1% SDS and the infectious unit (IU) titer was determined by immunostaining. Spike sequences were PCR amplified and cloned into PacI/BstBI sites of a pUC02-VEE vector. Capped SAM was synthesized in vitro using HiScribe T7 Quick High Yield RNA Synthesis Kit (New England Biolabs) and purified using a RNeasy Maxi Kit (Qiagen) according to the manufacturer's protocol. SAM was subsequently encapsulated in a lipid nanoparticle (LNP) using a self-assembly process in which an aqueous solution of SAM is rapidly mixed with a lipid mixture in ethanol. RNA encapsulation efficiency was measured using Ribogreen RNA quantitation reagent (Thermo Fisher) and confirmed to be >95% in all batches analyzed. SAMLNP was formulated into a buffer containing 5 mM Tris (pH 8.0), 10% sucrose, 10% maltose.

[0722] Intracellular Cytokine Staining: Freshly isolated splenocytes were resuspended at a density of 5×10⁶ cells/mL in complete RPMI and following an overnight rest at 4° C., 1×10⁶ cells per well were distributed into v-bottom 96-well plates. Cells were pelleted and resuspended in 100 μL of complete RPMI containing an overlapping peptide pool containing 316 peptides (each 15 amino acids in length, 11 amino acid overlap) spanning the SARS-CoV-2 spike antigen, at a final concentration of 0.5 μg/mL per peptide (Genscript). A second well with DMSO only was used as a negative control for each sample. After 1 hour of incubation at 37° C., Brefeldin A (Biolegend) was added to a final concentration of 5 μg/mL and cells were incubated for an additional 4 hours. Following stimulation, cells were washed with PBS and stained with fixable viability dye (eBioscience). Extracellular staining was performed in FACS buffer (PBS+2% FBS+2 mM EDTA) with the following antibodies: CD4 (GK1.5, Biolegend), CD8 (53-6.7, BD). Cells were then washed, fixed and permeabilized with the eBiosciences Fixation/Permeabilization Solution Kit. Intracellular staining was then performed in permeabilization buffer with the following antibodies: IFNγ (XMG21.2, Invitrogen), TNFα (MP6-XT22, eBiosciences), IL2 (JES6-5H4, eBiosciences), IL4 (11B11, Biolegend), IL10 (JES5-16E3, Biolegend). Samples were collected on a Cytoflex LX (Beckman Coulter). Analysis of flow cytometry data was performed using FlowJo software.

[0723] NHP Studies: Study was conducted in compliance with all relevant local, state and federal regulations and were approved by the Battelle Institutional Animal Care and Use Committee (IACUC). 30 Chinese-origin male and female rhesus macaques (M. mulatta) >2.5 years old were housed at Battelle (Columbus, Ohio). NHP were vaccinated with either ChAd-Spike(V2)-F2P (Group 1-5×10¹¹ VP, study day 0; Group 2-5×10¹¹ VP, study day 28), SAM-Spike(V2)-F2P (Group 1-30 μg, study day 42; Group 3-30 μg, study days 14 and 42; Group 4-10 μg, study days 14 and 42; Group 5-3 μg, study days 14 and 42), or PBS (Group 6, study days 0 and 42). All injections were bilateral intramuscular, 0.5 mL per leg (1 mL total) to the thigh. Note that immunizations were staggered to enable challenge immunization on study day 70 for all groups. Each group was divided into two sub-groups and study initiated one week apart, to enable two staggered challenge groups. Animals were challenged with SARS-CoV-2 (strain USA-WA1/2020) via the intratracheal (0.5 mL) and intranasal (0.25 mL per nostril) routes with a target dose of ˜1.6×10⁶ PFU (undiluted). Serum was collected using serum separator tubes and whole blood collected in cell preparation tubes and peripheral blood mononuclear cells isolated and cryopreserved in CryoStorCS solution (Sigma Aldrich).

[0724] ELISpot assays: IFNγ ELISpot assays were performed using pre-coated 96-well plates (Mabtech, Monkey IFNγ ELISPOT PLUS, ALP or Mouse IFNγ ELISPOT PLUS, ALP) following manufacturer's protocol. For NHP, frozen PBMCs were thawed at 37° C. and then rested overnight in RPMI+10% FBS. 1×10⁵ PBMCs were plated per well in triplicate with a single overlapping peptide pool spanning spike from the N to C terminus (GenScript, 15 amino acid length, 11 amino acid overlap, 314 peptides total) at final concentration of 1 ug/mL per peptide and incubated overnight at 37° C. in RPMI+10% FBS. For mouse studies, freshly isolated splenocytes were stimulated overnight with either two (˜120 peptides/each) or eight different overlapping peptide pools (36-40 peptides each) spanning the SARS-CoV-2 spike antigen, at a final concentration of 1 μg/mL per peptide (GenScript). Splenocytes were plated in duplicate at 1×10⁵ cells per well and 2.5×10⁴ cells per well (mixed with 7.5×10⁴ naïve cells) for each stimulus. DMSO only was used as a negative control for each sample. Plates were washed with PBS and then incubated with anti-monkey or anti-mouse IFNγ mAb biotin (Mabtech) for two hours, followed by an additional wash and incubation with Streptavidin-ALP (Mabtech) for one hour. After final wash, plates were incubated for ten minutes with BCIP/NBT (Mabtech) to develop the immunospots. Wells were imaged and spots enumerated using AID reader (Autoimmun Diagnostika). Samples with replicate well variability (Variability=Variance/(median+1) greater than 10 and median greater than 10 were excluded. Spot values were adjusted based on the well saturation according to the formula: AdjustedSpots=RawSpots+2*(RawSpots*Saturation/(100−Saturation). Each sample was background corrected by subtracting the average value of the negative control wells. Data was normalized to spot forming units (SFU) per 1×10⁶ cells by multiplying the corrected spot number by 1×10⁶/cell number plated. Data processing was performed using the R programming language and graphed using GraphPad Prism. Statistical analysis was performed in GraphPad Prism.

[0725] Pseudovirus Neutralization Assay: Mouse and human convalescent serum samples (courtesy of Helen Chu, University of Washington) were assessed by Nexelis (Laval, Quebec). NHP serum samples were assessed by Gritstone bio (Emeryville, CA) using the same pseudovirus, controls, reagents and protocol. Pseudotyped virus particles were made using a genetically modified Vesicular Stomatitis Virus from which the glycoprotein G was removed (VSVΔG). The VSVΔG virus was transduced in HEK293T cells previously transfected with the spike glycoprotein of the SARS-CoV-2 coronavirus (Wuhan strain) for which the last 19 amino acids of the cytoplasmic tail were removed (ΔCT). The generated pseudovirus particles (VSVΔG-Spike ΔCT) contain a luciferase reporter which can be quantified in relative luminescence units (RLU). Heatinactivated serum samples were serially diluted (7-serial 2-fold dilution) in a 96-well plate and a pre-determined amount of pseudotyped virus (corresponding to between approximately 75,000 and 300,000 RLU/well) was applied to the plate and incubated with serum/plasma to allow binding of the neutralization antibodies to the pseudotyped virus. After the incubation of the serum/plasma-pseudotyped virus complex, the serum/plasmapseudotyped virus complex was transferred to the plate containing Vero E6 cells (ATCC). Test plates were incubated at 37° C. with 5% C02 overnight. Luciferase substrate was added to the plates which were then read using a plate reader detecting luminescence. The intensity of the light being emitted is inversely proportional to the amount of anti-SARS-CoV-2 neutralizing Spike antibodies bound to the VSVΔG-Spike ΔCT particles. Each microplate was read using a luminescence microplate reader (SpectraMax). The dilution of serum required to achieve 50% neutralization (NT50) when compared to a non-neutralized pseudoparticle control was calculated for each sample dilution and the NT50 is interpolated from a linear regression using the two dilutions flanking the 50% neutralization.

[0726] Microneutralization Assay: The microneutralization assay was performed at Battelle Memorial Institute (Columbus, Ohio) to assess the neutralizing antibody titer in serum samples collected from NHPs following vaccination and post-challenge. The virus neutralization titer is expressed as the reciprocal value of the highest dilution of the serum which still inhibited virus replication. All serum samples were analyzed in duplicate. Briefly, 2-fold serial dilutions of heat-inactivated serum sample were pre-incubated with the virus for 60 minutes at 37° C. The virus/serum mixture was then added to a 90 to 100% confluent monolayer of Vero E6 cells (BEI, Cat. No. NR-596) in 96-well plates and incubated for two days at 37° C. with 5% C02. Following incubation, the inoculum was removed, and monolayers were incubated for 30 minutes in 80% cold acetone to allow cell fixation. Plates were incubated with anti-nucleocapsid protein primary antibody cocktail (clones HM1056 and HM1057) (EastCoast Bio, North Berwick, ME) for 60 minutes at 37° C. (Battelle Memorial Institute, Patent No. 63/041,551 Pending, 2020). The plates were washed and the secondary antibody (goat antimouse IgG Horse Radish Peroxidase (HRP) conjugate; Fitzgerald, North Acton, MA) was added to the wells, and the plates were incubated for 60 minutes at 37° C. After the plates were washed, the substrate was added, and the plates were incubated at 37° C. Stop solution was added, and the plates were read for optical density at 405 nm wavelength. Neutralizing activity is defined as at least 50% reduction in signal from the virus only (VC) wells relative to cells control (CC) wells following the formula [(average VC−average CC)/2]+average CC. The median neutralizing titer (MN50) was calculated using Spearman-Kärber analysis method.

[0727] S1 IgG ELISA: 96-well QuickPlex plates (Meso Scale Discovery, Rockville, MD) were coated with 50 μL of 1 μg/mL SARS-CoV-2 S1 (ACROBiosystems, Newark, DE), diluted in DPBS (Corning, Corning, NY), and incubated at 4° C. overnight. Wells were washed three times with agitation using 250 μL of PBS+0.05% Tween-20 (Teknova, Hollister, CA) and plates blocked with 150 μL Superblock PBS (Thermo Fisher Scientific, Waltham, MA) for 1 hour at room temperature on an orbital shaker. Test sera was diluted at appropriate series in 10% species-matched serum (Innovative Research, Novi, MI) and tested in single wells on each plate. Wells were washed and 50 μL of the diluted samples were added to wells and incubated for 1 hour at room temperature on an orbital shaker. Wells were washed and incubated with 25 μL of 1 μg/mL SULFO-TAG labeled anti-species antibody (MSD), diluted in DPBS+1% BSA (Sigma-Aldrich, St. Louis, MO), for 1 hour at room temperature on an orbital shaker. Wells were washed and 150 μL Read Buffer T (MSD) added. Plates were run immediately using the QPlex SQ 120 (MSD) ECL plate reader. For each sample, the endpoint titer was calculated as the reciprocal serum dilution at 2-fold the average background value for the plate, interpolated by a linear regression using the two highest dilutions that gave values greater than 2-fold the average background.

[0728] IFNα2α ELISA: NHP serum samples were analyzed for levels of IFNα2α using a MSD U-PLEX Biomarker assay (catalog number K15068L-2), according to the manufacturer's instructions. Analyte concentration (pg/mL) was calculated using serial dilutions of known standards. Each animal and timepoint was run in technical duplicates.

[0729] Viral RNA RT-qPCR (Nucleocapsid Protein (N1) Genomic Analysis): Briefly, RNA was isolated using the Indispin QIAcube HT Pathogen Kit (Indical Bioscience, Germany) on the QIAcube HT instrument (Qiagen, Germany). The isolated RNA was then evaluated in RT-qPCR using the TaqMan Fast Virus 1-step Master Mix (Thermo Fisher Scientific) on a QuantStudio Flex 6 Real-Time PCR System (Applied Biosystems; Foster City, CA). The primers and probe were specific to the SARS-CoV-2 nucleocapsid gene, corresponding to the N1 sequences from the Centers for Disease Control and Prevention (CDC) 2019-Novel Coronavirus (2019-nCoV) Real-Time RT-PCR Diagnostic Panel (www.cdc.gov/coronavirus/2019-ncov/lab/rt-pcr-panel-primer-probes.html) except that the probe quencher was modified to Non-Fluorescent Quencher-Minor Groove Binder (NFQMGB) (Thermo Fisher Scientific). A standard curve comprised of synthetic RNA containing the target sequence from SARS-CoV-2 isolate WA1 sequence (GenBank Accession Number MN985325.1) (Bio-Synthesis, Inc.; Lewisville, TX) was included on each PCR plate for absolute quantitation of SARS-CoV-2 RNA copies in each sample. Thermocycling conditions were as follows: Stage 1—50° C. for 5 min for one cycle; Stage 2—95° C. for 20 sec for one cycle; Stage 3—95° C. for 3 sec and 60° C. for 30 sec for 40 cycles. Data analysis was performed using the QuantStudio 6 software-generated values (total copies per well of each sample) and additional calculations to determine SARS-CoV-2 N1 copies per mL of fluid.

[0730] Viral RNA RT-qPCR (Envelope Protein (E) Subgenomic Analysis): Following isolation and evaluation using the N1 genomic assay, the isolated RNA was then evaluated as described above using primers and probes specific to the SARS-CoV-2 E gene based on previously described sequences, and the reverse primer and probe sequences previously described (Integrated DNA Technologies, Iowa). A standard curve comprised of synthetic RNA containing the target sequence from SARS-CoV-2 isolate WA1 sequence (GenBank Accession Number MN985325.1) (Bio-Synthesis, Inc.; Lewisville, TX) was included on each PCR plate for absolute quantitation of SARS-CoV-2 copies in each sample. Thermocycling conditions were as follows: Stage 1—50° C. for 5 min for one cycle; Stage 2—95° C. for 20 sec for one cycle; Stage 3—95° C. for 3 sec and 60° C. for 30 sec for 40 cycles. Data analysis was performed using the QuantStudio 6 software-generated values (total copies per well of each sample) and additional calculations to determine SARS-CoV-2 E gene subgenomic (Esg) RNA copies per mL of fluid.

### Results

[0731] Groups of 5 rhesus macaques were immunized intramuscularly twice with SAM-Spike(V2)-F2P (4-week interval) at either 3, 10 or 30 μg (FIG. 28A). Spike S1—specific IgG antibody titers were observed in some NHP following a single SAM immunization in a dose dependent manner and were increased to high levels in all NHP following a 2nd SAM immunization at all doses tested (GMT 8,880, 13,145 and 1,223 at 30, 10 and 3 μg, respectively, FIG. 28B). Spike-specific T cell responses, assessed by overnight IFNγ ELISpot using a single spike peptide pool, were detected at all dose levels following two immunizations (FIG. 28C). T cell response was significantly increased compared to unvaccinated control animals for all 3 dose groups (p<0.05 for all 3 dose groups by Mann-Whitney comparison of peak T cell values) and were not significantly different between the dose groups. ELISpot analysis demonstrated strong IFNγ, but minimal IL-4, responses one-week following the boost immunization in all vaccinated animals, indicating a TH1-biased response (FIG. 28D). Strong neutralizing antibody titers were detected following two immunizations of SAM by both a pseudovirus neutralization assay (PNA) and live virus microneutralization assay (MNA), which strictly correlated (FIG. 28E; FIG. 28F; FIG. 29). High and similar neutralizing antibody titers were detected in all NHP (10/10) at both the 30 and 10 μg dose level (NT50 GMT 2,180 and 2,590 2-weeks post boost by MNA), demonstrating comparable immune response with lower doses of SAM. Lowering the dose of SAM further to 3 μg resulted in overall lower, but clearly detectable neutralizing antibody titers in 5/5 NHP (by MNA) compared with the 10 and 30 μg dose (GMT 245 2-weeks post boost) (FIG. 28F). In addition, while potent spike-specific immune responses were observed at all dose levels, there was no increase in serum IFNα levels at 8 hours following each SAM immunization at doses ≤10 μg, suggesting that innate immune pathways are not activated at lower doses of SAM (FIG. 30).

[0732] At 4-weeks following the 2nd SAM immunization (week 8) (FIG. 28A), all rhesus macaques were challenged with ˜1.6×10⁶ plaque-forming units of SARS-CoV-2 (strain USA-WA1/2020), split equally between the intratracheal and intranasal routes. Consistent with previous studies of SARS-CoV-2 challenge in rhesus macaques, none of the vaccinated or control animals showed clinical signs of illness. Neutralizing antibody titers were detected in 3/5 phosphate buffered saline (PBS) injected (control) animals 2-weeks post challenge (NT50 GMT 53). An increase in titers was observed 1- or 2-weeks post challenge in all SAM vaccinated animals, to much higher levels than those observed in control animals (NT50 GMT 9,311, 15,180 and 6,570 for SAM at 30, 10, and 3 μg, respectively, at 2-weeks post challenge), indicating an anamnestic response (FIG. 28F). To assess protective efficacy provided by the vaccine, viral load was assessed by PCR in bronchial alveolar lavage (BAL) fluid, oropharyngeal swabs, and nasal swabs at various times post challenge. Both total genomic RNA and subgenomic RNA (sgRNA) were assessed to quantify input virus and replicating virus, respectively. Three days after challenge, only one of five animals at the 30 μg and 3 μg dose levels and zero of five animals in the 10 μg group had detectable subgenomic RNA in BAL fluid, as compared to five of five animals in the control group. By day 7, none of the animals in any vaccine treated group had detectable sgRNA in the BAL, as compared to 2/5 in the control group, demonstrating protection from viral replication at all dose levels (FIG. 31A). Comparison of peak viral titer for each animal between day 3 and day 10 post challenge by Mann-Whitney analysis demonstrated significant protection from viral replication at all dose levels compared to control animals (p=0.008(**), 0.008(**) and 0.016(*) at 30, 10 and 3 μg, respectively, FIG. 32). In the oropharyngeal swab at day 2, none of the animals in the 10 μg dose group had detectable sgRNA, compared to one of five in the 30 μg SAM group, three of five in the control group and 3 μg SAM group (FIG. 31B). On day 3, none of the animals in the SAM 10 μg dose group and two out of five in the SAM 30 and 3 μg groups had detectable sgRNA in nasal swabs, compared to four out of five in the control group (FIG. 31C), demonstrating significantly decreased viral replication in nasal swabs at the 30 and 10 μg dose levels (p=0.032(*), 0.008(**) and 0.222(ns), peak viral load for each animal between day 2 and day 10 post challenge compared to control by Mann-Whitney analysis, at 30, 10 and 3 μg, respectively, FIG. 32). Furthermore, total RNA levels were lower in BAL, oropharyngeal and nasal swabs in all SAM vaccinated animals compared to control animals, with improved viral clearance observed with the 30 and 10 μg of SAM compared with 3 μg SAM (FIG. 33A-C). Collectively, this data demonstrate protective immunity and efficacy in all SAM vaccinated animals, even at the lowest dose of 3 μg, with the 10 μg and 30 μg dose levels providing comparable and more effective protection, similar to what was previously described with mRNA vaccines at a dose of 100 μg.

[0733] Since many individuals have already been vaccinated with a SARS-CoV-2 specific adenovirus vaccine, the potency of the SAM vaccine was further explored in a ChAd/SAM heterologous prime/boost vaccine regimen (5×10¹¹ VP ChAd prime with 30 μg SAM boost, 6-week interval, FIG. 28A), which have been shown to generate potent and durable antigen-specific CD8+ T cell responses in ongoing oncology clinical trials (data not shown). Strong spike S1 IgG antibody titers were observed following a single ChAd immunization and were increased 2.5-fold following SAM boost immunization (GMT 6,847 at 6-weeks post prime and 16,798 2-weeks post boost) to similar titers as those observed following two SAM immunizations at the 30 and 10 μg dose levels (FIG. 28B). Strong spike-specific IFNγ, TH1 biased, T cell responses were detected 2-weeks after a single immunization of ChAd that were slightly higher than those observed after a single SAM immunization (at any dose), demonstrating the potency of the ChAd vaccine to rapidly drive high titer T cell responses (FIG. 28C, D). In addition, T cell responses were increased in 5/5 NHP following the SAM boost (30 μg) immunization to similar levels as those observed following two SAM immunizations (10 or 30 μg), demonstrating the potency of the SAM vaccine as either a boost vector post ChAd prime or as a homologous prime/boost vaccine regimen. Potent neutralizing antibody titers were detected in 10/10 NHP by both PNA and MNA assays following a single ChAd immunization (live virus MNA NT50 GMT 663 4-weeks post prime), again demonstrating the potency of the ChAd vaccine vector. Following SAM (30 μg) boost immunization, titers were increased 2.3-fold (NT50 GMT 2,309 2-weeks post boost), to similar levels as those observed following two doses of 30 or 10 μg SAM (FIG. 28E, F), demonstrating comparable potency of the heterologous and homologous prime/boost regimens after two vaccinations even at low doses of the SAM homologous prime/boost vaccination regimen. Rhesus macaques were challenged with SARS-CoV-2 at 4-weeks following the SAM boost immunization (week 10) and 6-weeks following ChAd prime for the ChAd single immunization group (FIG. 28A). A similar increase in neutralizing antibody titers was observed in both groups (FIG. 28F). Three days after the challenge, only one of five animals in the ChAd only and zero of five animals in the ChAd/SAM heterologous group had detectable subgenomic RNA in BAL fluid, as compared to five of five animals in the control group. By day 7, none of the animals in any vaccine treated group had detectable sgRNA in the BAL, as compared to 2/5 in the control group (FIG. 31A), demonstrating significantly decreased viral replication in the BAL for both a single ChAd immunization and heterologous prime/boost (p=0.032(*) and p=0.008(**), respectively, peak viral load for each animal between day 3 and day 10 post challenge compared to control by Mann-Whitney analysis, FIG. 32). On day 3, one out of five NHP in the heterologous prime/boost group had detectable sgRNA in the nasal swab, compared to four out of five in the ChAd only and control groups (FIG. 31C), demonstrating increased protective efficacy with heterologous prime/boost compared to a single ChAd immunization (p=0.012(*) with ChAd/SAM and p=0.158(ns) with ChAd only, peak viral load for each animal between day 2 and day 10 post challenge compared to control by Mann-Whitney analysis, FIG. 32). Collectively, these data demonstrate decreased viral replication and therapeutic benefit provided by the vaccines in all animals, with the 30 μg and 10 μg of SAM homologous prime/boost and the heterologous regimen providing complete protection and the 3 μg SAM homologous prime/boost offering slightly decreased immune response but clearly providing protection to animals challenged with live virus.

### XIV.L. Further SARS-CoV-2 Vaccine Clinical Assessment in Human Subjects

[0734] A clinical study was conducted in a Phase 1 trial to evaluate the safety, immunogenicity, and reactogenicity of a self-amplifying mRNA (samRNA) prophylactic vaccine boost against SARS-CoV-2 in previously vaccinated healthy adults 18 years and older. Specifically, vaccine candidate GRT-R910 (SAM-SGP1-TCE5-SGP2-CTSpike_{G}F2P (SEQ ID NO:27983)) was evaluated for improving and broadening the cell-mediated immune response (which includes genes outside of spike) and inducing immunity against more conserved genes and may be key to long-term, durable protection. A schematic of the vaccine construct and its coverage is shown in FIG. 34.

[0735] An open-label study (GO-009), conducted in the UK, of a self-amplifying mRNA (samRNA) vaccine encoding for wild type (WT) Spike (S) and highly conserved non-S CD8+ T cell epitopes (GRT-R910). A schematic of the cohorts for the clinical trial is shown in FIG. 35. A summary of the participant demographics in shown in FIG. 36.

[0736] GRT-R910 was administered as 1 or 2 boost vaccinations after prior vaccination with an authorized adenovirus or mRNA SARS-CoV-2 vaccine. The first two cohorts assessed 10 μg and 30 μg doses of GRT-R910 in older (≥60 years of age) adults who had received the primary ChAdOx1 series (AstraZeneca). Subsequent cohorts assessed two boost doses of 10 μg in older and younger adults who have received an adenovirus or mRNA vaccine. PBMC samples were collected for immunological assessment at different visits from day 1 up to day 365. The primary objectives were safety and reactogenicity and secondary objectives include cellular and humoral immunogenicity post-GRT-R910 vaccination(s).

[0737] Preliminary safety and reactogenicity from cohorts 1-4 (older adults) was assessed, with summaries shown as a comparison between 10 μg and 30 μg doses following dose 1 (FIG. 37 top panel) and dose 2 (FIG. 37 bottom panel), and broken down across cohorts (FIG. 38). For local reactogenicity events, events were transient in nature where the most common events were grade 1 or 2 injection site pain and tenderness with, with one subject in the 30 μg dose cohort having grade 3 events of injection site pain, tenderness, and local induration. For systemic reactogenicity events, events were transient in nature where where (1) in the 10 μg cohort, the most common events were grade 1 or 2 pyrexia, fatigue, and headache; (2) in the 30 μg cohort, the most common events were grade 1 or 2 pyrexia fatigue, headache, malaise, and nausea; and (3) one subject in the 30 μg cohort had events of grade 3 fatigue, malaise, and headache while an additional subject had an event of grade 3 fatigue. Overall, the results demonstrate the 10 μg and 30 μg doses were well tolerated in healthy adults (≥60 years old).

[0738] Initial immunogenicity data post the first boost data from cohorts 1-2 were assessed. As shown in FIG. 39, a single 10 μg samRNA boost stimulated a broad and potent nAb response against Wild Type, Beta, Delta, and Omicron variants of SARS-CoV-2 in healthy adults (≥60 years old). The nAb response against wild type was similar to previously reported values for a 100 μg of mRNA-1273 (Moderna) after a ChAdOx1 (AstraZeneca) primary series. As shown in FIG. 40, a single 10 μg samRNA boost also stimulated a broad anti-Spike IgG response against Wild Type, Beta, Delta, and Omicron variants of SARS-CoV-2 in healthy adults (≥60 years old). As shown in FIG. 41, comparing single doses of 10 μg or 30 μg samRNA resulted in similar titer levels for Spike IgG (top panel) and nAb (bottom panel). As shown in FIG. 42, comparing pre and post boost titer levels for single doses of 10 μg or 30 μg samRNA resulted in increased binding and neutralizing antibodies against WTD614G Spike and variants of concern Beta, Delta, and Omicron at 4 weeks for Spike IgG (top panel) and nAb (bottom panel). As shown in FIG. 43 and FIG. 44, neutralizing antibodies against multiple SARS-CoV-2 variants of interest persisted for at least 6 months following a single boost of 10 μg or 30 μg in healthy adults (≥60 years old) demonstrating a durable neutralizing antibody response.

[0739] T cell responses were also evaluated. As shown in FIG. 45, a single boost with the samRNA increased T cell responses against Spike and non-Spike T cell epitope (TCE) regions included in the vaccine 1-4 weeks after a single 10 μg or 30 μg dose. As shown in FIG. 46, samRNA boost demonstrated an increased and durable ex vivo Spike and TCE5 response both 4 weeks and 6 months post samRNA boost, including samRNA boosting Spike primed T-cells and priming TCE-specific T-cells. As shown in FIG. 47, T cell responses against Nucleocapsid, Membrane, and ORF3a were maintained for at least 6 months following a single dose of samRNA, both 10 μg and 30 μg doses. As shown in FIG. 48, a single boost of samRNA increased breadth of both Spike- and TCE-specific T cell responses relative to the baseline responses in previously vaccinated adults (≥60 years of age), as shown by an increased breadth of response to different T cell epitope pools. As shown in FIG. 49, there was no clear dose response for ex vivo Spike T cell responses between the 10 μg and 30 μg doses, while there were slightly higher post-IVS TCE5 T cell responses with the 30 μg samRNA dose. As shown in FIG. 50, the 10 μg and 30 μg doses demonstrated similar breadth in response against Nucleocapsid, Membrane, and ORF3a. As shown in FIG. 51, the Spike-specific T Cell responses following samRNA administration were Th1 biased, as demonstrated by driving IFNγ and IL-2, but not IL-4 responses. As shown in FIG. 52, a single 10 μg dose of samRNA stimulated CD8+ T cell responses to TCE and ORF3a OLP pools and a ORF3a minimal epitope pool, in particular that stimulation with a short (8-11 mer) ORF3a peptide pool stimulated IFNγ and TNFα responses in CD8+ T cells. As shown in FIG. 53, a single 10 μg dose of samRNA stimulated CD4+ T cell responses to TCE and ORF3a OLP peptide pools, in particular that stimulation with long (15mer) ORF3a peptide pool drove IFNg, TNFa, and IL-2 responses in CD4+ T cells. As shown in FIG. 54, T cell responses to Nucleocapsid and ORF3a components of TCE5 in pre-pandemic donors suggest pan-coronavirus elements of the vaccine, in particular ex vivo ELISpot had low or no response (not shown), short antigen-specific expansion revealed cross-reactive memory T cells to Nucleocapsid and ORF3a regions. As shown in FIG. 55, T cell responses to TCE5 components were detected both ex vivo (left panel) and post expansion (right panel) in convalescent donors, indicating the relevance of predicted T cell epitopes.

[0740] Overall, GRT-R910 (SAM-SGP1-TCE5-SGP2-CTSpike_{G}F2P) was well tolerated when administered after a primary series of adenovirus or mRNA SARS-CoV-2 vaccine in healthy older adults and GRT-R910 as a boost dose after a primary series of Vaxzevria stimulated durable, broadly cross-reactive anti-Spike antibody titers, as well as durable T cells targeting both Spike and non-Spike epitopes.

### XIV.M. Further SARS-CoV-2 Vaccine Clinical Assessment in Human Subjects

[0741] A Phase 1 SARS-CoV-2 vaccine study was designed to assess the safety and tolerability of GRT-R912 (N-TCE11-Spike-beta [SARS-CoV-2 “beta” is also referred to as 501Y.V2]; SEQ ID NO: 27981), GRT-R914 (TCE9-Spike-beta; SEQ ID NO: 27982), GRT-R918 (SAM-Nuc-TCE11-SpikeB.1.1.529 sequence; SEQ ID NO: 27976), and GRT-R920 (GRT-918 with Omicron Spike encoding sequences substituted with Omicron BA5 subisolate Spike encoding sequences) administered as prime and/or boost in healthy adult participants and people living with HIV. A schematic of the vaccine constructs and their coverage is shown in FIG. 56. A schematic of the cohorts for the clinical trial is shown in FIG. 57. A summary of the participant demographics in shown in FIG. 58. The study population skewed towards younger participants, with generally well-balanced covariates. Subjects with no history of SARS-CoV-2 infection or symptoms consistent with SARS-CoV-2 infection together AND a negative SARS-CoV-2 (N-specific) antibody test at pre-screening were considered SARS-CoV-2 naïve. Subjects with a history of confirmed SARS-CoV-2 infection OR a positive SARS-CoV-2 (N-specific) antibody test at pre-screening were considered SARS-CoV-2 convalescent.

[0742] Preliminary safety and reactogenicity was assessed for GRT-R914 (TCE9-Spike-beta; SEQ ID NO: 27982), with summaries shown for “naïve” participants following dose 1 (FIG. 59A) and dose 2 (FIG. 59B), and in “convalescent” participants following a single dose (FIG. 59C). The results show 3 μg, 10 μg, and 30 μg doses of GRT-R914 were well tolerated, with reactogenicity slightly higher at 30 μg dose compared to lower doses. In SARS-CoV-2 convalescent subjects: (1) The majority of local and systemic solicited AEs were grade 1 or grade 2 and transient in nature at all three-dose levels and resolved within eight days or less; (2) Grade 3 events occurred in one subject at the 10 μg dose level and lasted for one day; and grade 3 events occurred in two subjects at the 30 μg dose level, lasting for four and two days respectively; (4) At the 30 μg dose level, two solicited reactogenicity events continued as grade 1 AEs after vaccination day eight and resolved by day ten. In SARS-CoV-2 naive (negative N-Specific serology) subjects: (1) The majority of local and systemic solicited AEs were grade 1 or grade 2 and transient in nature at all three-dose levels and resolved within eight days or less Grade 3 reactogenicity events occurred in a single subject at first dose and lasted one day at 3 μg dose; (2) Grade 3 reactogenicity events occurred in two subjects at 30 μg and lasted one day and two days respectively; (3) At 10 μg dose, solicited reactogenicity events continued in two subjects as AEs after eight days of 2nd vaccination dose and resolved on day ten and day nine respectively.

[0743] Initial immunogenicity was also assessed for GRT-R914 (TCE9-Spike-beta; SEQ ID NO: 27982). As shown in FIG. 60, COVID-naïve participants demonstrated increased Spike nAb against Beta variant in all samRNA R914 dose levels assessed. As shown in FIG. 61, COVID-naïve participants demonstrated increased Spike nAb against Delta variant in all samRNA R914 dose levels assessed. As shown in FIG. 62, COVID-convalescent participants demonstrated increased Spike nAb against Beta variant in all samRNA R914 dose levels assessed. As shown in FIG. 63, COVID-convalescent participants demonstrated increased Spike nAb against Delta variant in all samRNA R914 dose levels assessed. As shown in FIG. 64, COVID-naïve participants demonstrated an increased trend of IgG against WT variant in all dose levels of 3 μg, 10 μg, and 30 μg samRNA R914. As shown in FIG. 65, COVID-convalescent participants demonstrated increased IgG against WT variant that was maintained until at least Day 57 following administration of 3 μg samRNA (Cohort A4), while the 10 μg samRNA dose (Cohort A5) did not maintain IgG at Day 57 in convalescent subjects. Summaries of statistics are shown for: nAb data against Beta variant (FIG. 66A); fold change against Beta variant (FIG. 66B); nAb data against Delta variant (FIG. 66C); fold change against Delta variant (FIG. 66D); IgG data against wild-type (FIG. 66E); fold change against wild-type (FIG. 66F).

[0744] Overall, the results demonstrate for the self-amplifying mRNA SARS-CoV-2 Spike-beta+ TCE-9 vaccine:
[0745] All dose levels tested (3 μg, 10 μg, and 30 μg) of GRT-R914 were well tolerated in vaccine-naïve subjects
   [0746] Reactogenicity was slightly increased at 30 μg dose level compared to 3 μg and 10 μg
   [0747] Mild and moderate AEs were transient in nature and largely resolved within 1-2 days after dosing
   [0748] No grade 4 or serious adverse events were observed
[0749] All dose levels were immunogenic in all cohorts, both SARS-CoV-2 naïve and convalescent subjects
[0750] A dose-response effect was observed, most notably between 3 μg and 10 μg, less clear between 10 and 30 μg
   [0751] Strong live virus neutralizing antibody (nAb) titers to beta variant Spike (contained within the vaccine) were broadly elicited—subjects with serological evidence of prior SARS-CoV-2 exposure generally exhibited superior nAb titers versus those with seronegative status
   [0752] Strong live virus nAb titers to delta variant virus were also broadly elicited

### Additional Sequences

[0753] The sequences referred to below in Tables A-F refer to sequences found in International Application publication number WO2021236854A1 and U.S. Provisional Application No. 63/277,105, each of which is hereby incorporated by reference for all purposes.

### Table A

[0754] Refer to SEQ ID NOS. 130-8195 in the Sequence Listing found in International Application publication number WO2021236854A1 and U.S. Provisional Application No. 63/277,105, each of which is hereby incorporated by reference for all purposes. Presented is each candidate MHC Class I epitope encoded by SARS-CoV-2 that was predicted to associate with a given HLA allele with an EDGE score >0.001. Each entry includes the candidate epitope sequence and cognate HLA alleles with a predicted EDGE score greater than 0.001, with each cognate pairing ranked as H (EDGE score >0.1), M (EDGE score between 0.01 and 0.1), and L (EDGE score <0.01). For example, the candidate epitope MESLVPGF (SEQ ID NO: 127) is predicted to pair with HLA-B*18:01, HLA-B*37:01, and HLA-B*07:05 with EDGE scores 0.019, 0.032, and 0.008, respectively. Accordingly, the entry for SEQ ID NO: 130 is “MESLVPGF: B18:01M; B37:01M; B07:05L.”

### Table B

[0755] Refer to SEQ ID NOS. 8196-26740 in the Sequence Listing found in International Application publication number WO2021236854A1 and U.S. Provisional Application No. 63/277,105, each of which is hereby incorporated by reference for all purposes. Presented is each candidate MHC Class II epitope encoded by SARS-CoV-2 that was predicted to associate with a given HLA allele with an EDGE score >0.001. Each entry includes the candidate epitope sequence and cognate HLA alleles with a predicted EDGE score greater than 0.001, with each cognate pairing ranked as H (EDGE score >0.1), M (EDGE score between 0.01 and 0.1), and L (EDGE score <0.01). For example, the candidate epitope VELVAELEGI (SEQ ID NO: 128) is predicted to pair with HLA-DQA1*03:02-B1*03:03, HLA-DRB1*11:02, HLA-DQA1*05:05-B1*03:19, and HLA-DPA1*01:03-B1*104:01 with EDGE scores 0.003145, 0.00328, 0.041097, and 0.011613, respectively. Accordingly, the entry for SEQ ID NO: 8219 is “VELVAELEGI: DQA1*03:02-B1*03:03L; DRB1*11:02L; DQA1*05:05-B1*03:19M; DPA1*01:03-B1*104:01M.” Only HLA-DQ and HLA-DP are referred to by their alpha and beta chains. HLA-DR is referred to only by its beta chain as the alpha chain is generally invariable in the human population, with HLA-DR peptide contact regions particularly invariant.

### Table C

[0756] Refer to SEQ ID NOS. 26741-27179 in the Sequence Listing found in International Application publication number WO2021236854A1 and U.S. Provisional Application No. 63/277,105, each of which is hereby incorporated by reference for all purposes. Presented are additional MHC Class I epitopes, other than those from the Spike protein, encoded within the optimized cassette that were predicted to associate with a given HLA allele with an EDGE score >0.001. The additional epitopes were determined by calculating population coverage criteria P with all initial epitopes provided by the SARS-CoV-2 Spike protein (SEQ ID NO:59) split into S1 and S2 and applying the optimization algorithms described herein.

### Table D

[0757] Refer to SEQ ID NOS. 27180-27495 in the Sequence Listing found in International Application publication number WO2021236854A1 and U.S. Provisional Application No. 63/277,105, each of which is hereby incorporated by reference for all purposes, for SARS-CoV-2 Spike overlapping peptide pools. Each entry includes the stimulatory peptide, SARS-CoV-2 protein source, peptide subpool information, and Table. For example, the stimulatory peptide MFVFLVLLPLVSSQC (SEQ ID NO: 27180) is derived from SARS-CoV-2 Spike protein (Wuhan D614G variant), included in subpool S_Wu_1_2, and found in Table D. Accordingly, the entry for SEQ ID NO. 27180 is “MFVFLVLLPLVSSQC: Spike Wuhan D614G; S_Wu_1_2; Table D”.

### Table E

[0758] Refer to SEQ ID NOS. 27496-27603 in the Sequence Listing found in International Application publication number WO2021236854A1 and U.S. Provisional Application No. 63/277,105, each of which is hereby incorporated by reference for all purposes, for TCE5-encoded overlapping peptide pools. Each entry includes the stimulatory peptide, SARS-CoV-2 protein source, peptide subpool information, and Table. For example, the stimulatory peptide LLWPVTLACFVLAAV (SEQ ID NO: 27496) is derived from SARS-CoV-2 Membrane protein, included in subpool OLP_Mem, and found in Table E. Accordingly, the entry for SEQ ID NO. 27496 is “LLWPVTLACFVLAAV: Membrane; OLP_Mem; Table E”.

### Table F

[0759] Refer to Sequence Listing, SEQ ID NOS. 27604-27939 in the Sequence Listing found in International Application publication number WO2021236854A1 and U.S. Provisional Application No. 63/277,105, each of which is hereby incorporated by reference for all purposes, for TCE5-encoded minimal epitope peptide pools. Each entry includes the stimulatory peptide, SARS-CoV-2 protein source, peptide subpool information, and Table. For example, the stimulatory peptide ALSKGVHFV (SEQ ID NO: 27604) is derived from SARS-CoV-2 ORF3a protein (frame 52-85), included in subpool Min_validated, and found in Table F. Accordingly, the entry for SEQ ID NO. 27604 is “ALSKGVHFV: ORF3a 52-85; Min_validated; Table F”.

[0760] Certain additional sequences for vectors, cassettes, and antibodies referred to herein are described below and referred to by SEQ ID NO.

Tremelimumab VL (SEQ ID NO: 16)
Tremelimumab VH (SEQ ID NO: 17)
Tremelimumab VH CDR1 (SEQ ID NO: 18)
Tremelimumab VH CDR2 (SEQ ID NO: 19)
Tremelimumab VH CDR3 (SEQ ID NO: 20)
Tremelimumab VL CDR1 (SEQ ID NO: 21)
Tremelimumab VL CDR2 (SEQ ID NO: 22)
Tremelimumab VL CDR3 (SEQ ID NO: 23)
Durvalumab (MEDI4736) VL (SEQ ID NO: 24)
MEDI4736 VH (SEQ ID NO: 25)
MEDI4736 VH CDR1 (SEQ ID NO: 26)
MEDI4736 VH CDR2 (SEQ ID NO: 27)
MEDI4736 VH CDR3 (SEQ ID NO: 28)
MEDI4736 VL CDR1 (SEQ ID NO: 29)
MEDI4736 VL CDR2 (SEQ ID NO: 30)
MEDI4736 VL CDR3 (SEQ ID NO: 31)
UbA76-25merPDTT nucleotide (SEQ ID NO: 32)
UbA76-25merPDTT polypeptide (SEQ ID NO: 33)
MAG-25merPDTT nucleotide (SEQ ID NO: 34)
MAG-25merPDTT polypeptide (SEQ ID NO: 35)
Ub7625merPDTT_NoSFL nucleotide (SEQ ID NO: 36)
Ub7625merPDTT_NoSFL polypeptide (SEQ ID NO: 37)
ChAdV68.5WTnt.MAG25mer (SEQ ID NO: 2); AC_000011.1 with E1 (nt 577 to 3403) and E3
(nt 27, 125-31 ,825) sequences deleted; corresponding ATCC VR-594 nucleotides substituted at
five positions; model neoantigen cassette under the control of the CMV promoter/enhancer
inserted in place of deleted E1; SV40 polyA 3′ of cassette
Venezuelan equine encephalitis virus [VEE (SEQ ID NO: 3) GenBank: L01442.2
VEE-MAG25mer (SEQ ID NO: 4); contains MAG-25merPDTT nucleotide (bases 30-1755)
Venezuelan equine encephalitis virus strain TC-83 [TC-83(SEQ ID NO: 5) GenBank: L01443.1
ATAGGCGGCGCATGAGAGAAGCCCAGACCAATTACCTACCCAAAATGGAGAAAGT
TCACGTTGACATCGAGGAAGACAGCCCATTCCTCAGAGCTTTGCAGCGGAGCTTCC
CGCAGTTTGAGGTAGAAGCCAAGCAGGTCACTGATAATGACCATGCTAATGCCAG
AGCGTTTTCGCATCTGGCTTCAAAACTGATCGAAACGGAGGTGGACCCATCCGACA
CGATCCTTGACATTGGAAGTGCGCCCGCCCGCAGAATGTATTCTAAGCACAAGTAT
CATTGTATCTGTCCGATGAGATGTGCGGAAGATCCGGACAGATTGTATAAGTATGC
AACTAAGCTGAAGAAAAACTGTAAGGAAATAACTGATAAGGAATTGGACAAGAAA
ATGAAGGAGCTCGCCGCCGTCATGAGCGACCCTGACCTGGAAACTGAGACTATGTG
CCTCCACGACGACGAGTCGTGTCGCTACGAAGGGCAAGTCGCTGTTTACCAGGATG
TATACGCGGTTGACGGACCGACAAGTCTCTATCACCAAGCCAATAAGGGAGTTAGA
GTCGCCTACTGGATAGGCTTTGACACCACCCCTTTTATGTTTAAGAACTTGGCTGGA
GCATATCCATCATACTCTACCAACTGGGCCGACGAAACCGTGTTAACGGCTCGTAA
CATAGGCCTATGCAGCTCTGACGTTATGGAGCGGTCACGTAGAGGGATGTCCATTC
TTAGAAAGAAGTATTTGAAACCATCCAACAATGTTCTATTCTCTGTTGGCTCGACCA
TCTACCACGAGAAGAGGGACTTACTGAGGAGCTGGCACCTGCCGTCTGTATTTCAC
TTACGTGGCAAGCAAAATTACACATGTCGGTGTGAGACTATAGTTAGTTGCGACGG
GTACGTCGTTAAAAGAATAGCTATCAGTCCAGGCCTGTATGGGAAGCCTTCAGGCT
ATGCTGCTACGATGCACCGCGAGGGATTCTTGTGCTGCAAAGTGACAGACACATTG
AACGGGGAGAGGGTCTCTTTTCCCGTGTGCACGTATGTGCCAGCTACATTGTGTGA
CCAAATGACTGGCATACTGGCAACAGATGTCAGTGCGGACGACGCGCAAAAACTG
CTGGTTGGGCTCAACCAGCGTATAGTCGTCAACGGTCGCACCCAGAGAAACACCAA
TACCATGAAAAATTACCTTTTGCCCGTAGTGGCCCAGGCATTTGCTAGGTGGGCAA
AGGAATATAAGGAAGATCAAGAAGATGAAAGGCCACTAGGACTACGAGATAGAC
AGTTAGTCATGGGGTGTTGTTGGGCTTTTAGAAGGCACAAGATAACATCTATTTAT
AAGCGCCCGGATACCCAAACCATCATCAAAGTGAACAGCGATTTCCACTCATTCGT
GCTGCCCAGGATAGGCAGTAACACATTGGAGATCGGGCTGAGAACAAGAATCAGG
AAAATGTTAGAGGAGCACAAGGAGCCGTCACCTCTCATTACCGCCGAGGACGTAC
AAGAAGCTAAGTGCGCAGCCGATGAGGCTAAGGAGGTGCGTGAAGCCGAGGAGTT
GCGCGCAGCTCTACCACCTTTGGCAGCTGATGTTGAGGAGCCCACTCTGGAAGCCG
ATGTCGACTTGATGTTACAAGAGGCTGGGGCCGGCTCAGTGGAGACACCTCGTGGC
TTGATAAAGGTTACCAGCTACGATGGCGAGGACAAGATCGGCTCTTACGCTGTGCT
TTCTCCGCAGGCTGTACTCAAGAGTGAAAAATTATCTTGCATCCACCCTCTCGCTGA
ACAAGTCATAGTGATAACACACTCTGGCCGAAAAGGGCGTTATGCCGTGGAACCAT
ACCATGGTAAAGTAGTGGTGCCAGAGGGACATGCAATACCCGTCCAGGACTTTCAA
GCTCTGAGTGAAAGTGCCACCATTGTGTACAACGAACGTGAGTTCGTAAACAGGTA
CCTGCACCATATTGCCACACATGGAGGAGCGCTGAACACTGATGAAGAATATTACA
AAACTGTCAAGCCCAGCGAGCACGACGGCGAATACCTGTACGACATCGACAGGAA
ACAGTGCGTCAAGAAAGAACTAGTCACTGGGCTAGGGCTCACAGGCGAGCTGGTG
GATCCTCCCTTCCATGAATTCGCCTACGAGAGTCTGAGAACACGACCAGCCGCTCC
TTACCAAGTACCAACCATAGGGGTGTATGGCGTGCCAGGATCAGGCAAGTCTGGCA
TCATTAAAAGCGCAGTCACCAAAAAAGATCTAGTGGTGAGCGCCAAGAAAGAAAA
CTGTGCAGAAATTATAAGGGACGTCAAGAAAATGAAAGGGCTGGACGTCAATGCC
AGAACTGTGGACTCAGTGCTCTTGAATGGATGCAAACACCCCGTAGAGACCCTGTA
TATTGACGAAGCTTTTGCTTGTCATGCAGGTACTCTCAGAGCGCTCATAGCCATTAT
AAGACCTAAAAAGGCAGTGCTCTGCGGGGATCCCAAACAGTGCGGTTTTTTTAACA
TGATGTGCCTGAAAGTGCATTTTAACCACGAGATTTGCACACAAGTCTTCCACAAA
AGCATCTCTCGCCGTTGCACTAAATCTGTGACTTCGGTCGTCTCAACCTTGTTTTAC
GACAAAAAAATGAGAACGACGAATCCGAAAGAGACTAAGATTGTGATTGACACTA
CCGGCAGTACCAAACCTAAGCAGGACGATCTCATTCTCACTTGTTTCAGAGGGTGG
GTGAAGCAGTTGCAAATAGATTACAAAGGCAACGAAATAATGACGGCAGCTGCCT
CTCAAGGGCTGACCCGTAAAGGTGTGTATGCCGTTCGGTACAAGGTGAATGAAAAT
CCTCTGTACGCACCCACCTCAGAACATGTGAACGTCCTACTGACCCGCACGGAGGA
CCGCATCGTGTGGAAAACACTAGCCGGCGACCCATGGATAAAAACACTGACTGCC
AAGTACCCTGGGAATTTCACTGCCACGATAGAGGAGTGGCAAGCAGAGCATGATG
CCATCATGAGGCACATCTTGGAGAGACCGGACCCTACCGACGTCTTCCAGAATAAG
GCAAACGTGTGTTGGGCCAAGGCTTTAGTGCCGGTGCTGAAGACCGCTGGCATAGA
CATGACCACTGAACAATGGAACACTGTGGATTATTTTGAAACGGACAAAGCTCACT
CAGCAGAGATAGTATTGAACCAACTATGCGTGAGGTTCTTTGGACTCGATCTGGAC
TCCGGTCTATTTTCTGCACCCACTGTTCCGTTATCCATTAGGAATAATCACTGGGAT
AACTCCCCGTCGCCTAACATGTACGGGCTGAATAAAGAAGTGGTCCGTCAGCTCTC
TCGCAGGTACCCACAACTGCCTCGGGCAGTTGCCACTGGAAGAGTCTATGACATGA
ACACTGGTACACTGCGCAATTATGATCCGCGCATAAACCTAGTACCTGTAAACAGA
AGACTGCCTCATGCTTTAGTCCTCCACCATAATGAACACCCACAGAGTGACTTTTCT
TCATTCGTCAGCAAATTGAAGGGCAGAACTGTCCTGGTGGTCGGGGAAAAGTTGTC
CGTCCCAGGCAAAATGGTTGACTGGTTGTCAGACCGGCCTGAGGCTACCTTCAGAG
CTCGGCTGGATTTAGGCATCCCAGGTGATGTGCCCAAATATGACATAATATTTGTT
AATGTGAGGACCCCATATAAATACCATCACTATCAGCAGTGTGAAGACCATGCCAT
TAAGCTTAGCATGTTGACCAAGAAAGCTTGTCTGCATCTGAATCCCGGCGGAACCT
GTGTCAGCATAGGTTATGGTTACGCTGACAGGGCCAGCGAAAGCATCATTGGTGCT
ATAGCGCGGCAGTTCAAGTTTTCCCGGGTATGCAAACCGAAATCCTCACTTGAAGA
GACGGAAGTTCTGTTTGTATTCATTGGGTACGATCGCAAGGCCCGTACGCACAATC
CTTACAAGCTTTCATCAACCTTGACCAACATTTATACAGGTTCCAGACTCCACGAA
GCCGGATGTGCACCCTCATATCATGTGGTGCGAGGGGATATTGCCACGGCCACCGA
AGGAGTGATTATAAATGCTGCTAACAGCAAAGGACAACCTGGCGGAGGGGTGTGC
GGAGCGCTGTATAAGAAATTCCCGGAAAGCTTCGATTTACAGCCGATCGAAGTAGG
AAAAGCGCGACTGGTCAAAGGTGCAGCTAAACATATCATTCATGCCGTAGGACCA
AACTTCAACAAAGTTTCGGAGGTTGAAGGTGACAAACAGTTGGCAGAGGCTTATG
AGTCCATCGCTAAGATTGTCAACGATAACAATTACAAGTCAGTAGCGATTCCACTG
TTGTCCACCGGCATCTTTTCCGGGAACAAAGATCGACTAACCCAATCATTGAACCA
TTTGCTGACAGCTTTAGACACCACTGATGCAGATGTAGCCATATACTGCAGGGACA
AGAAATGGGAAATGACTCTCAAGGAAGCAGTGGCTAGGAGAGAAGCAGTGGAGG
AGATATGCATATCCGACGACTCTTCAGTGACAGAACCTGATGCAGAGCTGGTGAGG
GTGCATCCGAAGAGTTCTTTGGCTGGAAGGAAGGGCTACAGCACAAGCGATGGCA
AAACTTTCTCATATTTGGAAGGGACCAAGTTTCACCAGGCGGCCAAGGATATAGCA
GAAATTAATGCCATGTGGCCCGTTGCAACGGAGGCCAATGAGCAGGTATGCATGTA
TATCCTCGGAGAAAGCATGAGCAGTATTAGGTCGAAATGCCCCGTCGAAGAGTCG
GAAGCCTCCACACCACCTAGCACGCTGCCTTGCTTGTGCATCCATGCCATGACTCC
AGAAAGAGTACAGCGCCTAAAAGCCTCACGTCCAGAACAAATTACTGTGTGCTCAT
CCTTTCCATTGCCGAAGTATAGAATCACTGGTGTGCAGAAGATCCAATGCTCCCAG
CCTATATTGTTCTCACCGAAAGTGCCTGCGTATATTCATCCAAGGAAGTATCTCGTG
GAAACACCACCGGTAGACGAGACTCCGGAGCCATCGGCAGAGAACCAATCCACAG
AGGGGACACCTGAACAACCACCACTTATAACCGAGGATGAGACCAGGACTAGAAC
GCCTGAGCCGATCATCATCGAAGAGGAAGAAGAGGATAGCATAAGTTTGCTGTCA
GATGGCCCGACCCACCAGGTGCTGCAAGTCGAGGCAGACATTCACGGGCCGCCCTC
TGTATCTAGCTCATCCTGGTCCATTCCTCATGCATCCGACTTTGATGTGGACAGTTT
ATCCATACTTGACACCCTGGAGGGAGCTAGCGTGACCAGCGGGGCAACGTCAGCC
GAGACTAACTCTTACTTCGCAAAGAGTATGGAGTTTCTGGCGCGACCGGTGCCTGC
GCCTCGAACAGTATTCAGGAACCCTCCACATCCCGCTCCGCGCACAAGAACACCGT
CACTTGCACCCAGCAGGGCCTGCTCGAGAACCAGCCTAGTTTCCACCCCGCCAGGC
GTGAATAGGGTGATCACTAGAGAGGAGCTCGAGGCGCTTACCCCGTCACGCACTCC
TAGCAGGTCGGTCTCGAGAACCAGCCTGGTCTCCAACCCGCCAGGCGTAAATAGGG
TGATTACAAGAGAGGAGTTTGAGGCGTTCGTAGCACAACAACAATGACGGTTTGAT
GCGGGTGCATACATCTTTTCCTCCGACACCGGTCAAGGGCATTTACAACAAAAATC
AGTAAGGCAAACGGTGCTATCCGAAGTGGTGTTGGAGAGGACCGAATTGGAGATT
TCGTATGCCCCGCGCCTCGACCAAGAAAAAGAAGAATTACTACGCAAGAAATTAC
AGTTAAATCCCACACCTGCTAACAGAAGCAGATACCAGTCCAGGAAGGTGGAGAA
CATGAAAGCCATAACAGCTAGACGTATTCTGCAAGGCCTAGGGCATTATTTGAAGG
CAGAAGGAAAAGTGGAGTGCTACCGAACCCTGCATCCTGTTCCTTTGTATTCATCT
AGTGTGAACCGTGCCTTTTCAAGCCCCAAGGTCGCAGTGGAAGCCTGTAACGCCAT
GTTGAAAGAGAACTTTCCGACTGTGGCTTCTTACTGTATTATTCCAGAGTACGATGC
CTATTTGGACATGGTTGACGGAGCTTCATGCTGCTTAGACACTGCCAGTTTTTGCCC
TGCAAAGCTGCGCAGCTTTCCAAAGAAACACTCCTATTTGGAACCCACAATACGAT
CGGCAGTGCCTTCAGCGATCCAGAACACGCTCCAGAACGTCCTGGCAGCTGCCACA
AAAAGAAATTGCAATGTCACGCAAATGAGAGAATTGCCCGTATTGGATTCGGCGG
CCTTTAATGTGGAATGCTTCAAGAAATATGCGTGTAATAATGAATATTGGGAAACG
TTTAAAGAAAACCCCATCAGGCTTACTGAAGAAAACGTGGTAAATTACATTACCAA
ATTAAAAGGACCAAAAGCTGCTGCTCTTTTTGCGAAGACACATAATTTGAATATGT
TGCAGGACATACCAATGGACAGGTTTGTAATGGACTTAAAGAGAGACGTGAAAGT
GACTCCAGGAACAAAACATACTGAAGAACGGCCCAAGGTACAGGTGATCCAGGCT
GCCGATCCGCTAGCAACAGCGTATCTGTGCGGAATCCACCGAGAGCTGGTTAGGAG
ATTAAATGCGGTCCTGCTTCCGAACATTCATACACTGTTTGATATGTCGGCTGAAGA
CTTTGACGCTATTATAGCCGAGCACTTCCAGCCTGGGGATTGTGTTCTGGAAACTG
ACATCGCGTCGTTTGATAAAAGTGAGGACGACGCCATGGCTCTGACCGCGTTAATG
ATTCTGGAAGACTTAGGTGTGGACGCAGAGCTGTTGACGCTGATTGAGGCGGCTTT
CGGCGAAATTTCATCAATACATTTGCCCACTAAAACTAAATTTAAATTCGGAGCCA
TGATGAAATCTGGAATGTTCCTCACACTGTTTGTGAACACAGTCATTAACATTGTAA
TCGCAAGCAGAGTGTTGAGAGAACGGCTAACCGGATCACCATGTGCAGCATTCATT
GGAGATGACAATATCGTGAAAGGAGTCAAATCGGACAAATTAATGGCAGACAGGT
GCGCCACCTGGTTGAATATGGAAGTCAAGATTATAGATGCTGTGGTGGGCGAGAA
AGCGCCTTATTTCTGTGGAGGGTTTATTTTGTGTGACTCCGTGACCGGCACAGCGTG
CCGTGTGGCAGACCCCCTAAAAAGGCTGTTTAAGCTTGGCAAACCTCTGGCAGCAG
ACGATGAACATGATGATGACAGGAGAAGGGCATTGCATGAAGAGTCAACACGCTG
GAACCGAGTGGGTATTCTTTCAGAGCTGTGCAAGGCAGTAGAATCAAGGTATGAA
ACCGTAGGAACTTCCATCATAGTTATGGCCATGACTACTCTAGCTAGCAGTGTTAA
ATCATTCAGCTACCTGAGAGGGGCCCCTATAACTCTCTACGGCTAACCTGAATGGA
CTACGACATAGTCTAGTCCGCCAAGATGTTCCCGTTCCAGCCAATGTATCCGATGC
AGCCAATGCCCTATCGCAACCCGTTCGCGGCCCCGCGCAGGCCCTGGTTCCCCAGA
ACCGACCCTTTTCTGGCGATGCAGGTGCAGGAATTAACCCGCTCGATGGCTAACCT
GACGTTCAAGCAACGCCGGGACGCGCCACCTGAGGGGCCATCCGCTAAGAAACCG
AAGAAGGAGGCCTCGCAAAAACAGAAAGGGGGAGGCCAAGGGAAGAAGAAGAAG
AACCAAGGGAAGAAGAAGGCTAAGACAGGGCCGCCTAATCCGAAGGCACAGAAT
GGAAACAAGAAGAAGACCAACAAGAAACCAGGCAAGAGACAGCGCATGGTCATG
AAATTGGAATCTGACAAGACGTTCCCAATCATGTTGGAAGGGAAGATAAACGGCT
ACGCTTGTGTGGTCGGAGGGAAGTTATTCAGGCCGATGCATGTGGAAGGCAAGATC
GACAACGACGTTCTGGCCGCGCTTAAGACGAAGAAAGCATCCAAATACGATCTTG
AGTATGCAGATGTGCCACAGAACATGCGGGCCGATACATTCAAATACACCCATGA
GAAACCCCAAGGCTATTACAGCTGGCATCATGGAGCAGTCCAATATGAAAATGGG
CGTTTCACGGTGCCGAAAGGAGTTGGGGCCAAGGGAGACAGCGGACGACCCATTC
TGGATAACCAGGGACGGGTGGTCGCTATTGTGCTGGGAGGTGTGAATGAAGGATCT
AGGACAGCCCTTTCAGTCGTCATGTGGAACGAGAAGGGAGTTACCGTGAAGTATAC
TCCGGAGAACTGCGAGCAATGGTCACTAGTGACCACCATGTGTCTGCTCGCCAATG
TGACGTTCCCATGTGCTCAACCACCAATTTGCTACGACAGAAAACCAGCAGAGACT
TTGGCCATGCTCAGCGTTAACGTTGACAACCCGGGCTACGATGAGCTGCTGGAAGC
AGCTGTTAAGTGCCCCGGAAGGAAAAGGAGATCCACCGAGGAGCTGTTTAATGAG
TATAAGCTAACGCGCCCTTACATGGCCAGATGCATCAGATGTGCAGTTGGGAGCTG
CCATAGTCCAATAGCAATCGAGGCAGTAAAGAGCGACGGGCACGACGGTTATGTT
AGACTTCAGACTTCCTCGCAGTATGGCCTGGATTCCTCCGGCAACTTAAAGGGCAG
GACCATGCGGTATGACATGCACGGGACCATTAAAGAGATACCACTACATCAAGTGT
CACTCTATACATCTCGCCCGTGTCACATTGTGGATGGGCACGGTTATTTCCTGCTTG
CCAGGTGCCCGGCAGGGGACTCCATCACCATGGAATTTAAGAAAGATTCCGTCAGA
CACTCCTGCTCGGTGCCGTATGAAGTGAAATTTAATCCTGTAGGCAGAGAACTCTA
TACTCATCCCCCAGAACACGGAGTAGAGCAAGCGTGCCAAGTCTACGCACATGATG
CACAGAACAGAGGAGCTTATGTCGAGATGCACCTCCCGGGCTCAGAAGTGGACAG
CAGTTTGGTTTCCTTGAGCGGCAGTTCAGTCACCGTGACACCTCCTGATGGGACTA
GCGCCCTGGTGGAATGCGAGTGTGGCGGCACAAAGATCTCCGAGACCATCAACAA
GACAAAACAGTTCAGCCAGTGCACAAAGAAGGAGCAGTGCAGAGCATATCGGCTG
CAGAACGATAAGTGGGTGTATAATTCTGACAAACTGCCCAAAGCAGCGGGAGCCA
CCTTAAAAGGAAAACTGCATGTCCCATTCTTGCTGGCAGACGGCAAATGCACCGTG
CCTCTAGCACCAGAACCTATGATAACCTTCGGTTTCAGATCAGTGTCACTGAAACT
GCACCCTAAGAATCCCACATATCTAATCACCCGCCAACTTGCTGATGAGCCTCACT
ACACGCACGAGCTCATATCTGAACCAGCTGTTAGGAATTTTACCGTCACCGAAAAA
GGGTGGGAGTTTGTATGGGGAAACCACCCGCCGAAAAGGTTTTGGGCACAGGAAA
CAGCACCCGGAAATCCACATGGGCTACCGCACGAGGTGATAACTCATTATTACCAC
AGATACCCTATGTCCACCATCCTGGGTTTGTCAATTTGTGCCGCCATTGCAACCGTT
TCCGTTGCAGCGTCTACCTGGCTGTTTTGCAGATCTAGAGTTGCGTGCCTAACTCCT
TACCGGCTAACACCTAACGCTAGGATACCATTTTGTCTGGCTGTGCTTTGCTGCGCC
CGCACTGCCCGGGCCGAGACCACCTGGGAGTCCTTGGATCACCTATGGAACAATAA
CCAACAGATGTTCTGGATTCAATTGCTGATCCCTCTGGCCGCCTTGATCGTAGTGAC
TCGCCTGCTCAGGTGCGTGTGCTGTGTCGTGCCTTTTTTAGTCATGGCCGGCGCCGC
AGGCGCCGGCGCCTACGAGCACGCGACCACGATGCCGAGCCAAGCGGGAATCTCG
TATAACACTATAGTCAACAGAGCAGGCTACGCACCACTCCCTATCAGCATAACACC
AACAAAGATCAAGCTGATACCTACAGTGAACTTGGAGTACGTCACCTGCCACTACA
AAACAGGAATGGATTCACCAGCCATCAAATGCTGCGGATCTCAGGAATGCACTCCA
ACTTACAGGCCTGATGAACAGTGCAAAGTCTTCACAGGGGTTTACCCGTTCATGTG
GGGTGGTGCATATTGCTTTTGCGACACTGAGAACACCCAAGTCAGCAAGGCCTACG
TAATGAAATCTGACGACTGCCTTGCGGATCATGCTGAAGCATATAAAGCGCACACA
GCCTCAGTGCAGGCGTTCCTCAACATCACAGTGGGAGAACACTCTATTGTGACTAC
CGTGTATGTGAATGGAGAAACTCCTGTGAATTTCAATGGGGTCAAAATAACTGCAG
GTCCGCTTTCCACAGCTTGGACACCCTTTGATCGCAAAATCGTGCAGTATGCCGGG
GAGATCTATAATTATGATTTTCCTGAGTATGGGGCAGGACAACCAGGAGCATTTGG
AGATATACAATCCAGAACAGTCTCAAGCTCTGATCTGTATGCCAATACCAACCTAG
TGCTGCAGAGACCCAAAGCAGGAGCGATCCACGTGCCATACACTCAGGCACCTTCG
GGTTTTGAGCAATGGAAGAAAGATAAAGCTCCATCATTGAAATTTACCGCCCCTTT
CGGATGCGAAATATATACAAACCCCATTCGCGCCGAAAACTGTGCTGTAGGGTCAA
TTCCATTAGCCTTTGACATTCCCGACGCCTTGTTCACCAGGGTGTCAGAAACACCGA
CACTTTCAGCGGCCGAATGCACTCTTAACGAGTGCGTGTATTCTTCCGACTTTGGTG
GGATCGCCACGGTCAAGTACTCGGCCAGCAAGTCAGGCAAGTGCGCAGTCCATGT
GCCATCAGGGACTGCTACCCTAAAAGAAGCAGCAGTCGAGCTAACCGAGCAAGGG
TCGGCGACTATCCATTTCTCGACCGCAAATATCCACCCGGAGTTCAGGCTCCAAAT
ATGCACATCATATGTTACGTGCAAAGGTGATTGTCACCCCCCGAAAGACCATATTG
TGACACACCCTCAGTATCACGCCCAAACATTTACAGCCGCGGTGTCAAAAACCGCG
TGGACGTGGTTAACATCCCTGCTGGGAGGATCAGCCGTAATTATTATAATTGGCTT
GGTGCTGGCTACTATTGTGGCCATGTACGTGCTGACCAACCAGAAACATAATTGAA
TACAGCAGCAATTGGCAAGCTGCTTACATAGAACTCGCGGCGATTGGCATGCCGCC
TTAAAATTTTTATTTTATTTTTCTTTTCTTTTCCGAATCGGATTTTGTTTTTAATATTT
C
VEE Delivery Vector (SEQ ID NO: 6); VEE genome with nucleotides 7544-11175 deleted
[alphavirus structural proteins removed
ATGggcggcgcatgagagaagcccagaccaattacctacccaaaATGGagaaagttcacgttgacatcgaggaagacagcccat
tcctcagagctttgcagcggagcttcccgcagtttgaggtagaagccaagcaggtcactgataatgaccatgctaatgccagagcgttttc
gcatctggcttcaaaactgatcgaaacggaggtggacccatccgacacgatccttgacattggaagtgcgcccgcccgcagaatgtattct
aagcacaagtatcattgtatctgtccgatgagatgtgcggaagatccggacagattgtataagtatgcaactaagctgaagaaaaactgtaa
ggaaataactgataaggaattggacaagaaaatgaaggagctcgccgccgtcatgagcgaccctgacctggaaactgagactatgtgcc
tccacgacgacgagtcgtgtcgctacgaagggcaagtcgctgtttaccaggatgtatacgcggttgacggaccgacaagtctctatcacc
aagccaataagggagttagagtcgcctactggataggctttgacaccaccccttttatgtttaagaacttggctggagcatatccatcatactc
taccaactgggccgacgaaaccgtgttaacggctcgtaacataggcctatgcagctctgacgttatggagcggtcacgtagagggatgtc
cattcttagaaagaagtatttgaaaccatccaacaatgttctattctctgttggctcgaccatctaccacgagaagagggacttactgaggag
ctggcacctgccgtctgtatttcacttacgtggcaagcaaaattacacatgtcggtgtgagactatagttagttgcgacgggtacgtcgttaa
aagaatagctatcagtccaggcctgtatgggaagccttcaggctatgctgctacgatgcaccgcgagggattcttgtgctgcaaagtgaca
gacacattgaacggggagagggtctcttttcccgtgtgcacgtatgtgccagctacattgtgtgaccaaatgactggcatactggcaacag
atgtcagtgcggacgacgcgcaaaaactgctggttgggctcaaccagcgtatagtcgtcaacggtcgcacccagagaaacaccaatacc
atgaaaaattaccttttgcccgtagtggcccaggcatttgctaggtgggcaaaggaatataaggaagatcaagaagatgaaaggccacta
ggactacgagatagacagttagtcatggggtgttgttgggcttttagaaggcacaagataacatctatttataagcgcccggatacccaaac
catcatcaaagtgaacagcgatttccactcattcgtgctgcccaggataggcagtaacacattggagatcgggctgagaacaagaatcag
gaaaatgttagaggagcacaaggagccgtcacctctcattaccgccgaggacgtacaagaagctaagtgcgcagccgatgaggctaag
gaggtgcgtgaagccgaggagttgcgcgcagctctaccacctttggcagctgatgttgaggagcccactctggaagccgatgtcgacttg
atgttacaagaggctggggccggctcagtggagacacctcgtggcttgataaaggttaccagctacgctggcgaggacaagatcggctc
ttacgctgtgctttctccgcaggctgtactcaagagtgaaaaattatcttgcatccaccctctcgctgaacaagtcatagtgataacacactct
ggccgaaaagggcgttatgccgtggaaccataccatggtaaagtagtggtgccagagggacatgcaatacccgtccaggactttcaagc
tctgagtgaaagtgccaccattgtgtacaacgaacgtgagttcgtaaacaggtacctgcaccatattgccacacatggaggagcgctgaac
actgatgaagaatattacaaaactgtcaagcccagcgagcacgacggcgaatacctgtacgacatcgacaggaaacagtgcgtcaagaa
agaactagtcactgggctagggctcacaggcgagctggtggatcctcccttccatgaattcgcctacgagagtctgagaacacgaccagc
cgctccttaccaagtaccaaccataggggtgtatggcgtgccaggatcaggcaagtctggcatcattaaaagcgcagtcaccaaaaaaga
tctagtggtgagcgccaagaaagaaaactgtgcagaaattataagggacgtcaagaaaatgaaagggctggacgtcaatgccagaactg
tggactcagtgctcttgaatggatgcaaacaccccgtagagaccctgtatattgacgaagcttttgcttgtcatgcaggtactctcagagcgc
tcatagccattataagacctaaaaaggcagtgctctgcggggatcccaaacagtgcggtttttttaacatgatgtgcctgaaagtgcattttaa
ccacgagatttgcacacaagtcttccacaaaagcatctctcgccgttgcactaaatctgtgacttcggtcgtctcaaccttgttttacgacaaa
aaaatgagaacgacgaatccgaaagagactaagattgtgattgacactaccggcagtaccaaacctaagcaggacgatctcattctcactt
gtttcagagggtgggtgaagcagttgcaaatagattacaaaggcaacgaaataatgacggcagctgcctctcaagggctgacccgtaaa
ggtgtgtatgccgttcggtacaaggtgaatgaaaatcctctgtacgcacccacctcagaacatgtgaacgtcctactgacccgcacggag
gaccgcatcgtgtggaaaacactagccggcgacccatggataaaaacactgactgccaagtaccctgggaatttcactgccacgataga
ggagtggcaagcagagcatgatgccatcatgaggcacatcttggagagaccggaccctaccgacgtcttccagaataaggcaaacgtgt
gttgggccaaggctttagtgccggtgctgaagaccgctggcatagacatgaccactgaacaatggaacactgtggattattttgaaacgga
caaagctcactcagcagagatagtattgaaccaactatgcgtgaggttctttggactcgatctggactccggtctattttctgcacccactgtt
ccgttatccattaggaataatcactgggataactccccgtcgcctaacatgtacgggctgaataaagaagtggtccgtcagctctctcgcag
gtacccacaactgcctcgggcagttgccactggaagagtctatgacatgaacactggtacactgcgcaattatgatccgcgcataaaccta
gtacctgtaaacagaagactgcctcatgctttagtcctccaccataatgaacacccacagagtgacttttcttcattcgtcagcaaattgaagg
gcagaactgtcctggtggtcggggaaaagttgtccgtcccaggcaaaatggttgactggttgtcagaccggcctgaggctaccttcagag
ctcggctggatttaggcatcccaggtgatgtgcccaaatatgacataatatttgttaatgtgaggaccccatataaataccatcactatcagca
gtgtgaagaccatgccattaagcttagcatgttgaccaagaaagcttgtctgcatctgaatcccggcggaacctgtgtcagcataggttatg
gttacgctgacagggccagcgaaagcatcattggtgctatagcgcggcagttcaagttttcccgggtatgcaaaccgaaatcctcacttga
agagacggaagttctgtttgtattcattgggtacgatcgcaaggcccgtacgcacaatccttacaagctttcatcaaccttgaccaacatttat
acaggttccagactccacgaagccggatgtgcaccctcatatcatgtggtgcgaggggatattgccacggccaccgaaggagtgattata
aatgctgctaacagcaaaggacaacctggcggaggggtgtgcggagcgctgtataagaaattcccggaaagcttcgatttacagccgat
cgaagtaggaaaagcgcgactggtcaaaggtgcagctaaacatatcattcatgccgtaggaccaaacttcaacaaagtttcggaggttga
aggtgacaaacagttggcagaggcttatgagtccatcgctaagattgtcaacgataacaattacaagtcagtagcgattccactgttgtcca
ccggcatcttttccgggaacaaagatcgactaacccaatcattgaaccatttgctgacagctttagacaccactgatgcagatgtagccatat
actgcagggacaagaaatgggaaatgactctcaaggaagcagtggctaggagagaagcagtggaggagatatgcatatccgacgactc
ttcagtgacagaacctgatgcagagctggtgagggtgcatccgaagagttctttggctggaaggaagggctacagcacaagcgatggca
aaactttctcatatttggaagggaccaagtttcaccaggcggccaaggatatagcagaaattaatgccatgtggcccgttgcaacggaggc
caatgagcaggtatgcatgtatatcctcggagaaagcatgagcagtattaggtcgaaatgccccgtcgaagagtcggaagcctccacacc
acctagcacgctgccttgcttgtgcatccatgccatgactccagaaagagtacagcgcctaaaagcctcacgtccagaacaaattactgtgt
gctcatcctttccattgccgaagtatagaatcactggtgtgcagaagatccaatgctcccagcctatattgttctcaccgaaagtgcctgcgta
tattcatccaaggaagtatctcgtggaaacaccaccggtagacgagactccggagccatcggcagagaaccaatccacagaggggaca
cctgaacaaccaccacttataaccgaggatgagaccaggactagaacgcctgagccgatcatcatcgaagaggaagaagaggatagca
taagtttgctgtcagatggcccgacccaccaggtgctgcaagtcgaggcagacattcacgggccgccctctgtatctagctcatcctggtc
cattcctcatgcatccgactttgatgtggacagtttatccatacttgacaccctggagggagctagcgtgaccagcggggcaacgtcagcc
gagactaactcttacttcgcaaagagtatggagtttctggcgcgaccggtgcctgcgcctcgaacagtattcaggaaccctccacatcccg
ctccgcgcacaagaacaccgtcacttgcacccagcagggcctgctcgagaaccagcctagtttccaccccgccaggcgtgaatagggt
gatcactagagaggagctcgaggcgcttaccccgtcacgcactcctagcaggtcggtctcgagaaccagcctggtctccaacccgccag
gcgtaaatagggtgattacaagagaggagtttgaggcgttcgtagcacaacaacaatgacggtttgatgcgggtgcatacatcttttcctcc
gacaccggtcaagggcatttacaacaaaaatcagtaaggcaaacggtgctatccgaagtggtgttggagaggaccgaattggagatttcg
tatgccccgcgcctcgaccaagaaaaagaagaattactacgcaagaaattacagttaaatcccacacctgctaacagaagcagataccag
tccaggaaggtggagaacatgaaagccataacagctagacgtattctgcaaggcctagggcattatttgaaggcagaaggaaaagtgga
gtgctaccgaaccctgcatcctgttcctttgtattcatctagtgtgaaccgtgccttttcaagccccaaggtcgcagtggaagcctgtaacgc
catgttgaaagagaactttccgactgtggcttcttactgtattattccagagtacgatgcctatttggacatggttgacggagcttcatgctgc
ttagacactgccagtttttgccctgcaaagctgcgcagctttccaaagaaacactcctatttggaacccacaatacgatcggcagtgccttcag
cgatccagaacacgctccagaacgtcctggcagctgccacaaaaagaaattgcaatgtcacgcaaatgagagaattgcccgtattggatt
cggcggcctttaatgtggaatgcttcaagaaatatgcgtgtaataatgaatattgggaaacgtttaaagaaaaccccatcaggcttactgaag
aaaacgtggtaaattacattaccaaattaaaaggaccaaaagctgctgctctttttgcgaagacacataatttgaatatgttgcaggacatacc
aatggacaggtttgtaatggacttaaagagagacgtgaaagtgactccaggaacaaaacatactgaagaacggcccaaggtacaggtga
tccaggctgccgatccgctagcaacagcgtatctgtgcggaatccaccgagagctggttaggagattaaatgcggtcctgcttccgaacat
tcatacactgtttgatatgtcggctgaagactttgacgctattatagccgagcacttccagcctggggattgtgttctggaaactgacatcgcg
tcgtttgataaaagtgaggacgacgccatggctctgaccgcgttaatgattctggaagacttaggtgtggacgcagagctgttgacgctgat
tgaggcggctttcggcgaaatttcatcaatacatttgcccactaaaactaaatttaaattcggagccatgatgaaatctggaatgttcctcaca
ctgtttgtgaacacagtcattaacattgtaatcgcaagcagagtgttgagagaacggctaaccggatcaccatgtgcagcattcattggaga
tgacaatatcgtgaaaggagtcaaatcggacaaattaatggcagacaggtgcgccacctggttgaatatggaagtcaagattatagatgct
gtggtgggcgagaaagcgccttatttctgtggagggtttattttgtgtgactccgtgaccggcacagcgtgccgtgtggcagaccccctaa
aaaggctgtttaagcttggcaaacctctggcagcagacgatgaacatgatgatgacaggagaagggcattgcatgaagagtcaacacgc
tggaaccgagtgggtattctttcagagctgtgcaaggcagtagaatcaaggtatgaaaccgtaggaacttccatcatagttatggccatgac
tactctagctagcagtgttaaatcattcagctacctgagaggggcccctataactctctacggcTAAcctgaatggactacgacgtatcac
gcccaaacatttacagccgcggtgtcaaaaaccgcgtggacgtggttaacatccctgctgggaggatcagccgtaattattataattggctt
ggtgctggctactattgtggccatgtacgtgctgaccaaccagaaacataattgaatacagcagcaattggcaagctgcttacatagaactc
gcggcgattggcatgccgccttaaaatttttattttattttttcttttcttttccgaatcggattttgtttttaatatttcAAAAAAAAAAAA
AAAAAAAAAAAAAAAAAAAAAAAAAAAAAAAAAAAAAAAAAAAAAAAAAAAAA
AAAAAAAAAAAAAAA
TC-83 Delivery Vector (SEQ ID NO: 7); TC-83 genome with nucleotides 7544-11175 deleted
[alphavirus structural proteins removed
ATAGGCGGCGCATGAGAGAAGCCCAGACCAATTACCTACCCAAAATGGAGAAAGT
TCACGTTGACATCGAGGAAGACAGCCCATTCCTCAGAGCTTTGCAGCGGAGCTTCC
CGCAGTTTGAGGTAGAAGCCAAGCAGGTCACTGATAATGACCATGCTAATGCCAG
AGCGTTTTCGCATCTGGCTTCAAAACTGATCGAAACGGAGGTGGACCCATCCGACA
CGATCCTTGACATTGGAAGTGCGCCCGCCCGCAGAATGTATTCTAAGCACAAGTAT
CATTGTATCTGTCCGATGAGATGTGCGGAAGATCCGGACAGATTGTATAAGTATGC
AACTAAGCTGAAGAAAAACTGTAAGGAAATAACTGATAAGGAATTGGACAAGAAA
ATGAAGGAGCTCGCCGCCGTCATGAGCGACCCTGACCTGGAAACTGAGACTATGTG
CCTCCACGACGACGAGTCGTGTCGCTACGAAGGGCAAGTCGCTGTTTACCAGGATG
TATACGCGGTTGACGGACCGACAAGTCTCTATCACCAAGCCAATAAGGGAGTTAGA
GTCGCCTACTGGATAGGCTTTGACACCACCCCTTTTATGTTTAAGAACTTGGCTGGA
GCATATCCATCATACTCTACCAACTGGGCCGACGAAACCGTGTTAACGGCTCGTAA
CATAGGCCTATGCAGCTCTGACGTTATGGAGCGGTCACGTAGAGGGATGTCCATTC
TTAGAAAGAAGTATTTGAAACCATCCAACAATGTTCTATTCTCTGTTGGCTCGACCA
TCTACCACGAGAAGAGGGACTTACTGAGGAGCTGGCACCTGCCGTCTGTATTTCAC
TTACGTGGCAAGCAAAATTACACATGTCGGTGTGAGACTATAGTTAGTTGCGACGG
GTACGTCGTTAAAAGAATAGCTATCAGTCCAGGCCTGTATGGGAAGCCTTCAGGCT
ATGCTGCTACGATGCACCGCGAGGGATTCTTGTGCTGCAAAGTGACAGACACATTG
AACGGGGAGAGGGTCTCTTTTCCCGTGTGCACGTATGTGCCAGCTACATTGTGTGA
CCAAATGACTGGCATACTGGCAACAGATGTCAGTGCGGACGACGCGCAAAAACTG
CTGGTTGGGCTCAACCAGCGTATAGTCGTCAACGGTCGCACCCAGAGAAACACCAA
TACCATGAAAAATTACCTTTTGCCCGTAGTGGCCCAGGCATTTGCTAGGTGGGCAA
AGGAATATAAGGAAGATCAAGAAGATGAAAGGCCACTAGGACTACGAGATAGAC
AGTTAGTCATGGGGTGTTGTTGGGCTTTTAGAAGGCACAAGATAACATCTATTTAT
AAGCGCCCGGATACCCAAACCATCATCAAAGTGAACAGCGATTTCCACTCATTCGT
GCTGCCCAGGATAGGCAGTAACACATTGGAGATCGGGCTGAGAACAAGAATCAGG
AAAATGTTAGAGGAGCACAAGGAGCCGTCACCTCTCATTACCGCCGAGGACGTAC
AAGAAGCTAAGTGCGCAGCCGATGAGGCTAAGGAGGTGCGTGAAGCCGAGGAGTT
GCGCGCAGCTCTACCACCTTTGGCAGCTGATGTTGAGGAGCCCACTCTGGAAGCCG
ATGTCGACTTGATGTTACAAGAGGCTGGGGCCGGCTCAGTGGAGACACCTCGTGGC
TTGATAAAGGTTACCAGCTACGATGGCGAGGACAAGATCGGCTCTTACGCTGTGCT
TTCTCCGCAGGCTGTACTCAAGAGTGAAAAATTATCTTGCATCCACCCTCTCGCTGA
ACAAGTCATAGTGATAACACACTCTGGCCGAAAAGGGCGTTATGCCGTGGAACCAT
ACCATGGTAAAGTAGTGGTGCCAGAGGGACATGCAATACCCGTCCAGGACTTTCAA
GCTCTGAGTGAAAGTGCCACCATTGTGTACAACGAACGTGAGTTCGTAAACAGGTA
CCTGCACCATATTGCCACACATGGAGGAGCGCTGAACACTGATGAAGAATATTACA
AAACTGTCAAGCCCAGCGAGCACGACGGCGAATACCTGTACGACATCGACAGGAA
ACAGTGCGTCAAGAAAGAACTAGTCACTGGGCTAGGGCTCACAGGCGAGCTGGTG
GATCCTCCCTTCCATGAATTCGCCTACGAGAGTCTGAGAACACGACCAGCCGCTCC
TTACCAAGTACCAACCATAGGGGTGTATGGCGTGCCAGGATCAGGCAAGTCTGGCA
TCATTAAAAGCGCAGTCACCAAAAAAGATCTAGTGGTGAGCGCCAAGAAAGAAAA
CTGTGCAGAAATTATAAGGGACGTCAAGAAAATGAAAGGGCTGGACGTCAATGCC
AGAACTGTGGACTCAGTGCTCTTGAATGGATGCAAACACCCCGTAGAGACCCTGTA
TATTGACGAAGCTTTTGCTTGTCATGCAGGTACTCTCAGAGCGCTCATAGCCATTAT
AAGACCTAAAAAGGCAGTGCTCTGCGGGGATCCCAAACAGTGCGGTTTTTTTAACA
TGATGTGCCTGAAAGTGCATTTTAACCACGAGATTTGCACACAAGTCTTCCACAAA
AGCATCTCTCGCCGTTGCACTAAATCTGTGACTTCGGTCGTCTCAACCTTGTTTTAC
GACAAAAAAATGAGAACGACGAATCCGAAAGAGACTAAGATTGTGATTGACACTA
CCGGCAGTACCAAACCTAAGCAGGACGATCTCATTCTCACTTGTTTCAGAGGGTGG
GTGAAGCAGTTGCAAATAGATTACAAAGGCAACGAAATAATGACGGCAGCTGCCT
CTCAAGGGCTGACCCGTAAAGGTGTGTATGCCGTTCGGTACAAGGTGAATGAAAAT
CCTCTGTACGCACCCACCTCAGAACATGTGAACGTCCTACTGACCCGCACGGAGGA
CCGCATCGTGTGGAAAACACTAGCCGGCGACCCATGGATAAAAACACTGACTGCC
AAGTACCCTGGGAATTTCACTGCCACGATAGAGGAGTGGCAAGCAGAGCATGATG
CCATCATGAGGCACATCTTGGAGAGACCGGACCCTACCGACGTCTTCCAGAATAAG
GCAAACGTGTGTTGGGCCAAGGCTTTAGTGCCGGTGCTGAAGACCGCTGGCATAGA
CATGACCACTGAACAATGGAACACTGTGGATTATTTTGAAACGGACAAAGCTCACT
CAGCAGAGATAGTATTGAACCAACTATGCGTGAGGTTCTTTGGACTCGATCTGGAC
TCCGGTCTATTTTCTGCACCCACTGTTCCGTTATCCATTAGGAATAATCACTGGGAT
AACTCCCCGTCGCCTAACATGTACGGGCTGAATAAAGAAGTGGTCCGTCAGCTCTC
TCGCAGGTACCCACAACTGCCTCGGGCAGTTGCCACTGGAAGAGTCTATGACATGA
ACACTGGTACACTGCGCAATTATGATCCGCGCATAAACCTAGTACCTGTAAACAGA
AGACTGCCTCATGCTTTAGTCCTCCACCATAATGAACACCCACAGAGTGACTTTTCT
TCATTCGTCAGCAAATTGAAGGGCAGAACTGTCCTGGTGGTCGGGGAAAAGTTGTC
CGTCCCAGGCAAAATGGTTGACTGGTTGTCAGACCGGCCTGAGGCTACCTTCAGAG
CTCGGCTGGATTTAGGCATCCCAGGTGATGTGCCCAAATATGACATAATATTTGTT
AATGTGAGGACCCCATATAAATACCATCACTATCAGCAGTGTGAAGACCATGCCAT
TAAGCTTAGCATGTTGACCAAGAAAGCTTGTCTGCATCTGAATCCCGGCGGAACCT
GTGTCAGCATAGGTTATGGTTACGCTGACAGGGCCAGCGAAAGCATCATTGGTGCT
ATAGCGCGGCAGTTCAAGTTTTCCCGGGTATGCAAACCGAAATCCTCACTTGAAGA
GACGGAAGTTCTGTTTGTATTCATTGGGTACGATCGCAAGGCCCGTACGCACAATC
CTTACAAGCTTTCATCAACCTTGACCAACATTTATACAGGTTCCAGACTCCACGAA
GCCGGATGTGCACCCTCATATCATGTGGTGCGAGGGGATATTGCCACGGCCACCGA
AGGAGTGATTATAAATGCTGCTAACAGCAAAGGACAACCTGGCGGAGGGGTGTGC
GGAGCGCTGTATAAGAAATTCCCGGAAAGCTTCGATTTACAGCCGATCGAAGTAGG
AAAAGCGCGACTGGTCAAAGGTGCAGCTAAACATATCATTCATGCCGTAGGACCA
AACTTCAACAAAGTTTCGGAGGTTGAAGGTGACAAACAGTTGGCAGAGGCTTATG
AGTCCATCGCTAAGATTGTCAACGATAACAATTACAAGTCAGTAGCGATTCCACTG
TTGTCCACCGGCATCTTTTCCGGGAACAAAGATCGACTAACCCAATCATTGAACCA
TTTGCTGACAGCTTTAGACACCACTGATGCAGATGTAGCCATATACTGCAGGGACA
AGAAATGGGAAATGACTCTCAAGGAAGCAGTGGCTAGGAGAGAAGCAGTGGAGG
AGATATGCATATCCGACGACTCTTCAGTGACAGAACCTGATGCAGAGCTGGTGAGG
GTGCATCCGAAGAGTTCTTTGGCTGGAAGGAAGGGCTACAGCACAAGCGATGGCA
AAACTTTCTCATATTTGGAAGGGACCAAGTTTCACCAGGCGGCCAAGGATATAGCA
GAAATTAATGCCATGTGGCCCGTTGCAACGGAGGCCAATGAGCAGGTATGCATGTA
TATCCTCGGAGAAAGCATGAGCAGTATTAGGTCGAAATGCCCCGTCGAAGAGTCG
GAAGCCTCCACACCACCTAGCACGCTGCCTTGCTTGTGCATCCATGCCATGACTCC
AGAAAGAGTACAGCGCCTAAAAGCCTCACGTCCAGAACAAATTACTGTGTGCTCAT
CCTTTCCATTGCCGAAGTATAGAATCACTGGTGTGCAGAAGATCCAATGCTCCCAG
CCTATATTGTTCTCACCGAAAGTGCCTGCGTATATTCATCCAAGGAAGTATCTCGTG
GAAACACCACCGGTAGACGAGACTCCGGAGCCATCGGCAGAGAACCAATCCACAG
AGGGGACACCTGAACAACCACCACTTATAACCGAGGATGAGACCAGGACTAGAAC
GCCTGAGCCGATCATCATCGAAGAGGAAGAAGAGGATAGCATAAGTTTGCTGTCA
GATGGCCCGACCCACCAGGTGCTGCAAGTCGAGGCAGACATTCACGGGCCGCCCTC
TGTATCTAGCTCATCCTGGTCCATTCCTCATGCATCCGACTTTGATGTGGACAGTTT
ATCCATACTTGACACCCTGGAGGGAGCTAGCGTGACCAGCGGGGCAACGTCAGCC
GAGACTAACTCTTACTTCGCAAAGAGTATGGAGTTTCTGGCGCGACCGGTGCCTGC
GCCTCGAACAGTATTCAGGAACCCTCCACATCCCGCTCCGCGCACAAGAACACCGT
CACTTGCACCCAGCAGGGCCTGCTCGAGAACCAGCCTAGTTTCCACCCCGCCAGGC
GTGAATAGGGTGATCACTAGAGAGGAGCTCGAGGCGCTTACCCCGTCACGCACTCC
TAGCAGGTCGGTCTCGAGAACCAGCCTGGTCTCCAACCCGCCAGGCGTAAATAGGG
TGATTACAAGAGAGGAGTTTGAGGCGTTCGTAGCACAACAACAATGACGGTTTGAT
GCGGGTGCATACATCTTTTCCTCCGACACCGGTCAAGGGCATTTACAACAAAAATC
AGTAAGGCAAACGGTGCTATCCGAAGTGGTGTTGGAGAGGACCGAATTGGAGATT
TCGTATGCCCCGCGCCTCGACCAAGAAAAAGAAGAATTACTACGCAAGAAATTAC
AGTTAAATCCCACACCTGCTAACAGAAGCAGATACCAGTCCAGGAAGGTGGAGAA
CATGAAAGCCATAACAGCTAGACGTATTCTGCAAGGCCTAGGGCATTATTTGAAGG
CAGAAGGAAAAGTGGAGTGCTACCGAACCCTGCATCCTGTTCCTTTGTATTCATCT
AGTGTGAACCGTGCCTTTTCAAGCCCCAAGGTCGCAGTGGAAGCCTGTAACGCCAT
GTTGAAAGAGAACTTTCCGACTGTGGCTTCTTACTGTATTATTCCAGAGTACGATGC
CTATTTGGACATGGTTGACGGAGCTTCATGCTGCTTAGACACTGCCAGTTTTTGCCC
TGCAAAGCTGCGCAGCTTTCCAAAGAAACACTCCTATTTGGAACCCACAATACGAT
CGGCAGTGCCTTCAGCGATCCAGAACACGCTCCAGAACGTCCTGGCAGCTGCCACA
AAAAGAAATTGCAATGTCACGCAAATGAGAGAATTGCCCGTATTGGATTCGGCGG
CCTTTAATGTGGAATGCTTCAAGAAATATGCGTGTAATAATGAATATTGGGAAACG
TTTAAAGAAAACCCCATCAGGCTTACTGAAGAAAACGTGGTAAATTACATTACCAA
ATTAAAAGGACCAAAAGCTGCTGCTCTTTTTGCGAAGACACATAATTTGAATATGT
TGCAGGACATACCAATGGACAGGTTTGTAATGGACTTAAAGAGAGACGTGAAAGT
GACTCCAGGAACAAAACATACTGAAGAACGGCCCAAGGTACAGGTGATCCAGGCT
GCCGATCCGCTAGCAACAGCGTATCTGTGCGGAATCCACCGAGAGCTGGTTAGGAG
ATTAAATGCGGTCCTGCTTCCGAACATTCATACACTGTTTGATATGTCGGCTGAAGA
CTTTGACGCTATTATAGCCGAGCACTTCCAGCCTGGGGATTGTGTTCTGGAAACTG
ACATCGCGTCGTTTGATAAAAGTGAGGACGACGCCATGGCTCTGACCGCGTTAATG
ATTCTGGAAGACTTAGGTGTGGACGCAGAGCTGTTGACGCTGATTGAGGCGGCTTT
CGGCGAAATTTCATCAATACATTTGCCCACTAAAACTAAATTTAAATTCGGAGCCA
TGATGAAATCTGGAATGTTCCTCACACTGTTTGTGAACACAGTCATTAACATTGTAA
TCGCAAGCAGAGTGTTGAGAGAACGGCTAACCGGATCACCATGTGCAGCATTCATT
GGAGATGACAATATCGTGAAAGGAGTCAAATCGGACAAATTAATGGCAGACAGGT
GCGCCACCTGGTTGAATATGGAAGTCAAGATTATAGATGCTGTGGTGGGCGAGAA
AGCGCCTTATTTCTGTGGAGGGTTTATTTTGTGTGACTCCGTGACCGGCACAGCGTG
CCGTGTGGCAGACCCCCTAAAAAGGCTGTTTAAGCTTGGCAAACCTCTGGCAGCAG
ACGATGAACATGATGATGACAGGAGAAGGGCATTGCATGAAGAGTCAACACGCTG
GAACCGAGTGGGTATTCTTTCAGAGCTGTGCAAGGCAGTAGAATCAAGGTATGAA
ACCGTAGGAACTTCCATCATAGTTATGGCCATGACTACTCTAGCTAGCAGTGTTAA
ATCATTCAGCTACCTGAGAGGGGCCCCTATAACTCTCTACGGCTAACCTGAATGGA
CTACGACATAGTCTAGTCCGCCAAGATGTTCCCGTTCCAGCCAATGTATCCGATGC
AGCCAATGCCCTATCGCAACCCGTTCGCGGCCCCGCGCAGGCCCTGGTTCCCCAGA
ACCGACCCTTTTCTGGCGATGCAGGTGCAGGAATTAACCCGCTCGATGGCTAACCT
GACGTTCAAGCAACGCCGGGACGCGCCACCTGAGGGGCCATCCGCTAAGAAACCG
AAGAAGGAGGCCTCGCAAAAACAGAAAGGGGGAGGCCAAGGGAAGAAGAAGAAG
AACCAAGGGAAGAAGAAGGCTAAGACAGGGCCGCCTAATCCGAAGGCACAGAAT
GGAAACAAGAAGAAGACCAACAAGAAACCAGGCAAGAGACAGCGCATGGTCATG
AAATTGGAATCTGACAAGACGTTCCCAATCATGTTGGAAGGGAAGATAAACGGCT
ACGCTTGTGTGGTCGGAGGGAAGTTATTCAGGCCGATGCATGTGGAAGGCAAGATC
GACAACGACGTTCTGGCCGCGCTTAAGACGAAGAAAGCATCCAAATACGATCTTG
AGTATGCAGATGTGCCACAGAACATGCGGGCCGATACATTCAAATACACCCATGA
GAAACCCCAAGGCTATTACAGCTGGCATCATGGAGCAGTCCAATATGAAAATGGG
CGTTTCACGGTGCCGAAAGGAGTTGGGGCCAAGGGAGACAGCGGACGACCCATTC
TGGATAACCAGGGACGGGTGGTCGCTATTGTGCTGGGAGGTGTGAATGAAGGATCT
AGGACAGCCCTTTCAGTCGTCATGTGGAACGAGAAGGGAGTTACCGTGAAGTATAC
TCCGGAGAACTGCGAGCAATGGTCACTAGTGACCACCATGTGTCTGCTCGCCAATG
TGACGTTCCCATGTGCTCAACCACCAATTTGCTACGACAGAAAACCAGCAGAGACT
TTGGCCATGCTCAGCGTTAACGTTGACAACCCGGGCTACGATGAGCTGCTGGAAGC
AGCTGTTAAGTGCCCCGGAAGGAAAAGGAGATCCACCGAGGAGCTGTTTAATGAG
TATAAGCTAACGCGCCCTTACATGGCCAGATGCATCAGATGTGCAGTTGGGAGCTG
CCATAGTCCAATAGCAATCGAGGCAGTAAAGAGCGACGGGCACGACGGTTATGTT
AGACTTCAGACTTCCTCGCAGTATGGCCTGGATTCCTCCGGCAACTTAAAGGGCAG
GACCATGCGGTATGACATGCACGGGACCATTAAAGAGATACCACTACATCAAGTGT
CACTCTATACATCTCGCCCGTGTCACATTGTGGATGGGCACGGTTATTTCCTGCTTG
CCAGGTGCCCGGCAGGGGACTCCATCACCATGGAATTTAAGAAAGATTCCGTCAGA
CACTCCTGCTCGGTGCCGTATGAAGTGAAATTTAATCCTGTAGGCAGAGAACTCTA
TACTCATCCCCCAGAACACGGAGTAGAGCAAGCGTGCCAAGTCTACGCACATGATG
CACAGAACAGAGGAGCTTATGTCGAGATGCACCTCCCGGGCTCAGAAGTGGACAG
CAGTTTGGTTTCCTTGAGCGGCAGTTCAGTCACCGTGACACCTCCTGATGGGACTA
GCGCCCTGGTGGAATGCGAGTGTGGCGGCACAAAGATCTCCGAGACCATCAACAA
GACAAAACAGTTCAGCCAGTGCACAAAGAAGGAGCAGTGCAGAGCATATCGGCTG
CAGAACGATAAGTGGGTGTATAATTCTGACAAACTGCCCAAAGCAGCGGGAGCCA
CCTTAAAAGGAAAACTGCATGTCCCATTCTTGCTGGCAGACGGCAAATGCACCGTG
CCTCTAGCACCAGAACCTATGATAACCTTCGGTTTCAGATCAGTGTCACTGAAACT
GCACCCTAAGAATCCCACATATCTAATCACCCGCCAACTTGCTGATGAGCCTCACT
ACACGCACGAGCTCATATCTGAACCAGCTGTTAGGAATTTTACCGTCACCGAAAAA
GGGTGGGAGTTTGTATGGGGAAACCACCCGCCGAAAAGGTTTTGGGCACAGGAAA
CAGCACCCGGAAATCCACATGGGCTACCGCACGAGGTGATAACTCATTATTACCAC
AGATACCCTATGTCCACCATCCTGGGTTTGTCAATTTGTGCCGCCATTGCAACCGTT
TCCGTTGCAGCGTCTACCTGGCTGTTTTGCAGATCTAGAGTTGCGTGCCTAACTCCT
TACCGGCTAACACCTAACGCTAGGATACCATTTTGTCTGGCTGTGCTTTGCTGCGCC
CGCACTGCCCGGGCCGAGACCACCTGGGAGTCCTTGGATCACCTATGGAACAATAA
CCAACAGATGTTCTGGATTCAATTGCTGATCCCTCTGGCCGCCTTGATCGTAGTGAC
TCGCCTGCTCAGGTGCGTGTGCTGTGTCGTGCCTTTTTTAGTCATGGCCGGCGCCGC
AGGCGCCGGCGCCTACGAGCACGCGACCACGATGCCGAGCCAAGCGGGAATCTCG
TATAACACTATAGTCAACAGAGCAGGCTACGCACCACTCCCTATCAGCATAACACC
AACAAAGATCAAGCTGATACCTACAGTGAACTTGGAGTACGTCACCTGCCACTACA
AAACAGGAATGGATTCACCAGCCATCAAATGCTGCGGATCTCAGGAATGCACTCCA
ACTTACAGGCCTGATGAACAGTGCAAAGTCTTCACAGGGGTTTACCCGTTCATGTG
GGGTGGTGCATATTGCTTTTGCGACACTGAGAACACCCAAGTCAGCAAGGCCTACG
TAATGAAATCTGACGACTGCCTTGCGGATCATGCTGAAGCATATAAAGCGCACACA
GCCTCAGTGCAGGCGTTCCTCAACATCACAGTGGGAGAACACTCTATTGTGACTAC
CGTGTATGTGAATGGAGAAACTCCTGTGAATTTCAATGGGGTCAAAATAACTGCAG
GTCCGCTTTCCACAGCTTGGACACCCTTTGATCGCAAAATCGTGCAGTATGCCGGG
GAGATCTATAATTATGATTTTCCTGAGTATGGGGCAGGACAACCAGGAGCATTTGG
AGATATACAATCCAGAACAGTCTCAAGCTCTGATCTGTATGCCAATACCAACCTAG
TGCTGCAGAGACCCAAAGCAGGAGCGATCCACGTGCCATACACTCAGGCACCTTCG
GGTTTTGAGCAATGGAAGAAAGATAAAGCTCCATCATTGAAATTTACCGCCCCTTT
CGGATGCGAAATATATACAAACCCCATTCGCGCCGAAAACTGTGCTGTAGGGTCAA
TTCCATTAGCCTTTGACATTCCCGACGCCTTGTTCACCAGGGTGTCAGAAACACCGA
CACTTTCAGCGGCCGAATGCACTCTTAACGAGTGCGTGTATTCTTCCGACTTTGGTG
GGATCGCCACGGTCAAGTACTCGGCCAGCAAGTCAGGCAAGTGCGCAGTCCATGT
GCCATCAGGGACTGCTACCCTAAAAGAAGCAGCAGTCGAGCTAACCGAGCAAGGG
TCGGCGACTATCCATTTCTCGACCGCAAATATCCACCCGGAGTTCAGGCTCCAAAT
ATGCACATCATATGTTACGTGCAAAGGTGATTGTCACCCCCCGAAAGACCATATTG
TGACACACCCTCAGTATCACGCCCAAACATTTACAGCCGCGGTGTCAAAAACCGCG
TGGACGTGGTTAACATCCCTGCTGGGAGGATCAGCCGTAATTATTATAATTGGCTT
GGTGCTGGCTACTATTGTGGCCATGTACGTGCTGACCAACCAGAAACATAATTGAA
TACAGCAGCAATTGGCAAGCTGCTTACATAGAACTCGCGGCGATTGGCATGCCGCC
TTAAAATTTTTATTTTATTTTTCTTTTCTTTTCCGAATCGGATTTTGTTTTTAATATTT
C
VEE Production Vector (SEQ ID NO: 8); VEE genome with nucleotides 7544-11175 deleted,
plus 5′ T7-promoter, plus 3′ restriction sites
TAATACGACTCACTATAGGATGggcggcgcatgagagaagcccagaccaattacctacccaaaATGGagaaa
gttcacgttgacatcgaggaagacagcccattcctcagagctttgcagcggagcttcccgcagtttgaggtagaagccaagcaggtcact
gataatgaccatgctaatgccagagcgttttcgcatctggcttcaaaactgatcgaaacggaggtggacccatccgacacgatccttgacat
tggaagtgcgcccgcccgcagaatgtattctaagcacaagtatcattgtatctgtccgatgagatgtgcggaagatccggacagattgtata
agtatgcaactaagctgaagaaaaactgtaaggaaataactgataaggaattggacaagaaaatgaaggagctcgccgccgtcatgagc
gaccctgacctggaaactgagactatgtgcctccacgacgacgagtcgtgtcgctacgaagggcaagtcgctgtttaccaggatgtatac
gcggttgacggaccgacaagtctctatcaccaagccaataagggagttagagtcgcctactggataggctttgacaccaccccttttatgttt
aagaacttggctggagcatatccatcatactctaccaactgggccgacgaaaccgtgttaacggctcgtaacataggcctatgcagctctg
acgttatggagcggtcacgtagagggatgtccattcttagaaagaagtatttgaaaccatccaacaatgttctattctctgttggctcgaccat
ctaccacgagaagagggacttactgaggagctggcacctgccgtctgtatttcacttacgtggcaagcaaaattacacatgtcggtgtgag
actatagttagttgcgacgggtacgtcgttaaaagaatagctatcagtccaggcctgtatgggaagccttcaggctatgctgctacgatgca
ccgcgagggattcttgtgctgcaaagtgacagacacattgaacggggagagggtctcttttcccgtgtgcacgtatgtgccagctacattgt
gtgaccaaatgactggcatactggcaacagatgtcagtgcggacgacgcgcaaaaactgctggttgggctcaaccagcgtatagtcgtc
aacggtcgcacccagagaaacaccaataccatgaaaaattaccttttgcccgtagtggcccaggcatttgctaggtgggcaaaggaatat
aaggaagatcaagaagatgaaaggccactaggactacgagatagacagttagtcatggggtgttgttgggcttttagaaggcacaagata
acatctatttataagcgcccggatacccaaaccatcatcaaagtgaacagcgatttccactcattcgtgctgcccaggataggcagtaacac
attggagatcgggctgagaacaagaatcaggaaaatgttagaggagcacaaggagccgtcacctctcattaccgccgaggacgtacaa
gaagctaagtgcgcagccgatgaggctaaggaggtgcgtgaagccgaggagttgcgcgcagctctaccacctttggcagctgatgttga
ggagcccactctggaagccgatgtcgacttgatgttacaagaggctggggccggctcagtggagacacctcgtggcttgataaaggttac
cagctacgctggcgaggacaagatcggctcttacgctgtgctttctccgcaggctgtactcaagagtgaaaaattatcttgcatccaccctct
cgctgaacaagtcatagtgataacacactctggccgaaaagggcgttatgccgtggaaccataccatggtaaagtagtggtgccagagg
gacatgcaatacccgtccaggactttcaagctctgagtgaaagtgccaccattgtgtacaacgaacgtgagttcgtaaacaggtacctgca
ccatattgccacacatggaggagcgctgaacactgatgaagaatattacaaaactgtcaagcccagcgagcacgacggcgaatacctgt
acgacatcgacaggaaacagtgcgtcaagaaagaactagtcactgggctagggctcacaggcgagctggtggatcctcccttccatgaa
ttcgcctacgagagtctgagaacacgaccagccgctccttaccaagtaccaaccataggggtgtatggcgtgccaggatcaggcaagtct
ggcatcattaaaagcgcagtcaccaaaaaagatctagtggtgagcgccaagaaagaaaactgtgcagaaattataagggacgtcaagaa
aatgaaagggctggacgtcaatgccagaactgtggactcagtgctcttgaatggatgcaaacaccccgtagagaccctgtatattgacga
agcttttgcttgtcatgcaggtactctcagagcgctcatagccattataagacctaaaaaggcagtgctctgcggggatcccaaacagtgcg
gtttttttaacatgatgtgcctgaaagtgcattttaaccacgagatttgcacacaagtcttccacaaaagcatctctcgccgttgcactaaatc
tgtgacttcggtcgtctcaaccttgttttacgacaaaaaaatgagaacgacgaatccgaaagagactaagattgtgattgacactaccggcagt
accaaacctaagcaggacgatctcattctcacttgtttcagagggtgggtgaagcagttgcaaatagattacaaaggcaacgaaataatga
cggcagctgcctctcaagggctgacccgtaaaggtgtgtatgccgttcggtacaaggtgaatgaaaatcctctgtacgcacccacctcag
aacatgtgaacgtcctactgacccgcacggaggaccgcatcgtgtggaaaacactagccggcgacccatggataaaaacactgactgc
caagtaccctgggaatttcactgccacgatagaggagtggcaagcagagcatgatgccatcatgaggcacatcttggagagaccggacc
ctaccgacgtcttccagaataaggcaaacgtgtgttgggccaaggctttagtgccggtgctgaagaccgctggcatagacatgaccactg
aacaatggaacactgtggattattttgaaacggacaaagctcactcagcagagatagtattgaaccaactatgcgtgaggttctttggactcg
atctggactccggtctattttctgcacccactgttccgttatccattaggaataatcactgggataactccccgtcgcctaacatgtacgggct
gaataaagaagtggtccgtcagctctctcgcaggtacccacaactgcctcgggcagttgccactggaagagtctatgacatgaacactgg
tacactgcgcaattatgatccgcgcataaacctagtacctgtaaacagaagactgcctcatgctttagtcctccaccataatgaacacccaca
gagtgacttttcttcattcgtcagcaaattgaagggcagaactgtcctggtggtcggggaaaagttgtccgtcccaggcaaaatggttgact
ggttgtcagaccggcctgaggctaccttcagagctcggctggatttaggcatcccaggtgatgtgcccaaatatgacataatatttgttaatg
tgaggaccccatataaataccatcactatcagcagtgtgaagaccatgccattaagcttagcatgttgaccaagaaagcttgtctgcatctga
atcccggcggaacctgtgtcagcataggttatggttacgctgacagggccagcgaaagcatcattggtgctatagcgcggcagttcaagtt
ttcccgggtatgcaaaccgaaatcctcacttgaagagacggaagttctgtttgtattcattgggtacgatcgcaaggcccgtacgcacaatc
cttacaagctttcatcaaccttgaccaacatttatacaggttccagactccacgaagccggatgtgcaccctcatatcatgtggtgcgaggg
gatattgccacggccaccgaaggagtgattataaatgctgctaacagcaaaggacaacctggcggaggggtgtgcggagcgctgtataa
gaaattcccggaaagcttcgatttacagccgatcgaagtaggaaaagcgcgactggtcaaaggtgcagctaaacatatcattcatgccgta
ggaccaaacttcaacaaagtttcggaggttgaaggtgacaaacagttggcagaggcttatgagtccatcgctaagattgtcaacgataaca
attacaagtcagtagcgattccactgttgtccaccggcatcttttccgggaacaaagatcgactaacccaatcattgaaccatttgctgacag
ctttagacaccactgatgcagatgtagccatatactgcagggacaagaaatgggaaatgactctcaaggaagcagtggctaggagagaa
gcagtggaggagatatgcatatccgacgactcttcagtgacagaacctgatgcagagctggtgagggtgcatccgaagagttctttggct
ggaaggaagggctacagcacaagcgatggcaaaactttctcatatttggaagggaccaagtttcaccaggggccaaggatatagcaga
aattaatgccatgtggcccgttgcaacggaggccaatgagcaggtatgcatgtatatcctcggagaaagcatgagcagtattaggtcgaaa
tgccccgtcgaagagtcggaagcctccacaccacctagcacgctgccttgcttgtgcatccatgccatgactccagaaagagtacagcgc
ctaaaagcctcacgtccagaacaaattactgtgtgctcatcctttccattgccgaagtatagaatcactggtgtgcagaagatccaatgctcc
cagcctatattgttctcaccgaaagtgcctgcgtatattcatccaaggaagtatctcgtggaaacaccaccggtagacgagactccggagc
catcggcagagaaccaatccacagaggggacacctgaacaaccaccacttataaccgaggatgagaccaggactagaacgcctgagc
cgatcatcatcgaagaggaagaagaggatagcataagtttgctgtcagatggcccgacccaccaggtgctgcaagtcgaggcagacatt
cacgggccgccctctgtatctagctcatcctggtccattcctcatgcatccgactttgatgtggacagtttatccatacttgacaccctggagg
gagctagcgtgaccagcggggcaacgtcagccgagactaactcttacttcgcaaagagtatggagtttctggcgcgaccggtgcctgcg
cctcgaacagtattcaggaaccctccacatcccgctccgcgcacaagaacaccgtcacttgcacccagcagggcctgctcgagaaccag
cctagtttccaccccgccaggcgtgaatagggtgatcactagagaggagctcgaggcgcttaccccgtcacgcactcctagcaggtcgg
tctcgagaaccagcctggtctccaacccgccaggcgtaaatagggtgattacaagagaggagtttgaggcgttcgtagcacaacaacaat
gacggtttgatgcgggtgcatacatcttttcctccgacaccggtcaagggcatttacaacaaaaatcagtaaggcaaacggtgctatccga
agtggtgttggagaggaccgaattggagatttcgtatgccccgcgcctcgaccaagaaaaagaagaattactacgcaagaaattacagtt
aaatcccacacctgctaacagaagcagataccagtccaggaaggtggagaacatgaaagccataacagctagacgtattctgcaaggcc
tagggcattatttgaaggcagaaggaaaagtggagtgctaccgaaccctgcatcctgttcctttgtattcatctagtgtgaaccgtgccttttc
aagccccaaggtcgcagtggaagcctgtaacgccatgttgaaagagaactttccgactgtggcttcttactgtattattccagagtacgatg
cctatttggacatggttgacggagcttcatgctgcttagacactgccagtttttgccctgcaaagctgcgcagctttccaaagaaacactccta
tttggaacccacaatacgatcggcagtgccttcagcgatccagaacacgctccagaacgtcctggcagctgccacaaaaagaaattgcaa
tgtcacgcaaatgagagaattgcccgtattggattcggcggcctttaatgtggaatgcttcaagaaatatgcgtgtaataatgaatattggga
aacgtttaaagaaaaccccatcaggcttactgaagaaaacgtggtaaattacattaccaaattaaaaggaccaaaagctgctgctctttttgc
gaagacacataatttgaatatgttgcaggacataccaatggacaggtttgtaatggacttaaagagagacgtgaaagtgactccaggaaca
aaacatactgaagaacggcccaaggtacaggtgatccaggctgccgatccgctagcaacagcgtatctgtgcggaatccaccgagagct
ggttaggagattaaatgcggtcctgcttccgaacattcatacactgtttgatatgtcggctgaagactttgacgctattatagccgagcacttc
cagcctggggattgtgttctggaaactgacatcgcgtcgtttgataaaagtgaggacgacgccatggctctgaccgcgttaatgattctgga
agacttaggtgtggacgcagagctgttgacgctgattgaggcggctttcggcgaaatttcatcaatacatttgcccactaaaactaaatttaa
attcggagccatgatgaaatctggaatgttcctcacactgtttgtgaacacagtcattaacattgtaatcgcaagcagagtgttgagagaacg
gctaaccggatcaccatgtgcagcattcattggagatgacaatatcgtgaaaggagtcaaatcggacaaattaatggcagacaggtgcgc
cacctggttgaatatggaagtcaagattatagatgctgtggtgggcgagaaagcgccttatttctgtggagggtttattttgtgtgactccgtg
accggcacagcgtgccgtgtggcagaccccctaaaaaggctgtttaagcttggcaaacctctggcagcagacgatgaacatgatgatga
caggagaagggcattgcatgaagagtcaacacgctggaaccgagtgggtattctttcagagctgtgcaaggcagtagaatcaaggtatg
aaaccgtaggaacttccatcatagttatggccatgactactctagctagcagtgttaaatcattcagctacctgagaggggcccctataactc
tctacggcTAAcctgaatggactacgacgtatcacgcccaaacatttacagccgcggtgtcaaaaaccgcgtggacgtggttaacatcc
ctgctgggaggatcagccgtaattattataattggcttggtgctggctactattgtggccatgtacgtgctgaccaaccagaaacataattga
atacagcagcaattggcaagctgcttacatagaactcgcggcgattggcatgccgccttaaaatttttattttattttttttttcttttccgaa
tcggattttgtttttaatatttcAAAAAAAAAAAAAAAAAAAAAAAAAAAAAAAAAAAAAAAAAAA
AAAAAAAAAAAAAAAAAAAAAAAAAAAAAAAAAAAAA
TC-83 Production Vector (SEQ ID NO: 9); TC-83 genome with nucleotides 7544-11175
deleted, plus 5′ T7-promoter, plus 3′ restriction sites
ATAGGCGGCGCATGAGAGAAGCCCAGACCAATTACCTACCCAAAATGGAGAAAGT
TCACGTTGACATCGAGGAAGACAGCCCATTCCTCAGAGCTTTGCAGCGGAGCTTCC
CGCAGTTTGAGGTAGAAGCCAAGCAGGTCACTGATAATGACCATGCTAATGCCAG
AGCGTTTTCGCATCTGGCTTCAAAACTGATCGAAACGGAGGTGGACCCATCCGACA
CGATCCTTGACATTGGAAGTGCGCCCGCCCGCAGAATGTATTCTAAGCACAAGTAT
CATTGTATCTGTCCGATGAGATGTGCGGAAGATCCGGACAGATTGTATAAGTATGC
AACTAAGCTGAAGAAAAACTGTAAGGAAATAACTGATAAGGAATTGGACAAGAAA
ATGAAGGAGCTCGCCGCCGTCATGAGCGACCCTGACCTGGAAACTGAGACTATGTG
CCTCCACGACGACGAGTCGTGTCGCTACGAAGGGCAAGTCGCTGTTTACCAGGATG
TATACGCGGTTGACGGACCGACAAGTCTCTATCACCAAGCCAATAAGGGAGTTAGA
GTCGCCTACTGGATAGGCTTTGACACCACCCCTTTTATGTTTAAGAACTTGGCTGGA
GCATATCCATCATACTCTACCAACTGGGCCGACGAAACCGTGTTAACGGCTCGTAA
CATAGGCCTATGCAGCTCTGACGTTATGGAGCGGTCACGTAGAGGGATGTCCATTC
TTAGAAAGAAGTATTTGAAACCATCCAACAATGTTCTATTCTCTGTTGGCTCGACCA
TCTACCACGAGAAGAGGGACTTACTGAGGAGCTGGCACCTGCCGTCTGTATTTCAC
TTACGTGGCAAGCAAAATTACACATGTCGGTGTGAGACTATAGTTAGTTGCGACGG
GTACGTCGTTAAAAGAATAGCTATCAGTCCAGGCCTGTATGGGAAGCCTTCAGGCT
ATGCTGCTACGATGCACCGCGAGGGATTCTTGTGCTGCAAAGTGACAGACACATTG
AACGGGGAGAGGGTCTCTTTTCCCGTGTGCACGTATGTGCCAGCTACATTGTGTGA
CCAAATGACTGGCATACTGGCAACAGATGTCAGTGCGGACGACGCGCAAAAACTG
CTGGTTGGGCTCAACCAGCGTATAGTCGTCAACGGTCGCACCCAGAGAAACACCAA
TACCATGAAAAATTACCTTTTGCCCGTAGTGGCCCAGGCATTTGCTAGGTGGGCAA
AGGAATATAAGGAAGATCAAGAAGATGAAAGGCCACTAGGACTACGAGATAGAC
AGTTAGTCATGGGGTGTTGTTGGGCTTTTAGAAGGCACAAGATAACATCTATTTAT
AAGCGCCCGGATACCCAAACCATCATCAAAGTGAACAGCGATTTCCACTCATTCGT
GCTGCCCAGGATAGGCAGTAACACATTGGAGATCGGGCTGAGAACAAGAATCAGG
AAAATGTTAGAGGAGCACAAGGAGCCGTCACCTCTCATTACCGCCGAGGACGTAC
AAGAAGCTAAGTGCGCAGCCGATGAGGCTAAGGAGGTGCGTGAAGCCGAGGAGTT
GCGCGCAGCTCTACCACCTTTGGCAGCTGATGTTGAGGAGCCCACTCTGGAAGCCG
ATGTCGACTTGATGTTACAAGAGGCTGGGGCCGGCTCAGTGGAGACACCTCGTGGC
TTGATAAAGGTTACCAGCTACGATGGCGAGGACAAGATCGGCTCTTACGCTGTGCT
TTCTCCGCAGGCTGTACTCAAGAGTGAAAAATTATCTTGCATCCACCCTCTCGCTGA
ACAAGTCATAGTGATAACACACTCTGGCCGAAAAGGGCGTTATGCCGTGGAACCAT
ACCATGGTAAAGTAGTGGTGCCAGAGGGACATGCAATACCCGTCCAGGACTTTCAA
GCTCTGAGTGAAAGTGCCACCATTGTGTACAACGAACGTGAGTTCGTAAACAGGTA
CCTGCACCATATTGCCACACATGGAGGAGCGCTGAACACTGATGAAGAATATTACA
AAACTGTCAAGCCCAGCGAGCACGACGGCGAATACCTGTACGACATCGACAGGAA
ACAGTGCGTCAAGAAAGAACTAGTCACTGGGCTAGGGCTCACAGGCGAGCTGGTG
GATCCTCCCTTCCATGAATTCGCCTACGAGAGTCTGAGAACACGACCAGCCGCTCC
TTACCAAGTACCAACCATAGGGGTGTATGGCGTGCCAGGATCAGGCAAGTCTGGCA
TCATTAAAAGCGCAGTCACCAAAAAAGATCTAGTGGTGAGCGCCAAGAAAGAAAA
CTGTGCAGAAATTATAAGGGACGTCAAGAAAATGAAAGGGCTGGACGTCAATGCC
AGAACTGTGGACTCAGTGCTCTTGAATGGATGCAAACACCCCGTAGAGACCCTGTA
TATTGACGAAGCTTTTGCTTGTCATGCAGGTACTCTCAGAGCGCTCATAGCCATTAT
AAGACCTAAAAAGGCAGTGCTCTGCGGGGATCCCAAACAGTGCGGTTTTTTTAACA
TGATGTGCCTGAAAGTGCATTTTAACCACGAGATTTGCACACAAGTCTTCCACAAA
AGCATCTCTCGCCGTTGCACTAAATCTGTGACTTCGGTCGTCTCAACCTTGTTTTAC
GACAAAAAAATGAGAACGACGAATCCGAAAGAGACTAAGATTGTGATTGACACTA
CCGGCAGTACCAAACCTAAGCAGGACGATCTCATTCTCACTTGTTTCAGAGGGTGG
GTGAAGCAGTTGCAAATAGATTACAAAGGCAACGAAATAATGACGGCAGCTGCCT
CTCAAGGGCTGACCCGTAAAGGTGTGTATGCCGTTCGGTACAAGGTGAATGAAAAT
CCTCTGTACGCACCCACCTCAGAACATGTGAACGTCCTACTGACCCGCACGGAGGA
CCGCATCGTGTGGAAAACACTAGCCGGCGACCCATGGATAAAAACACTGACTGCC
AAGTACCCTGGGAATTTCACTGCCACGATAGAGGAGTGGCAAGCAGAGCATGATG
CCATCATGAGGCACATCTTGGAGAGACCGGACCCTACCGACGTCTTCCAGAATAAG
GCAAACGTGTGTTGGGCCAAGGCTTTAGTGCCGGTGCTGAAGACCGCTGGCATAGA
CATGACCACTGAACAATGGAACACTGTGGATTATTTTGAAACGGACAAAGCTCACT
CAGCAGAGATAGTATTGAACCAACTATGCGTGAGGTTCTTTGGACTCGATCTGGAC
TCCGGTCTATTTTCTGCACCCACTGTTCCGTTATCCATTAGGAATAATCACTGGGAT
AACTCCCCGTCGCCTAACATGTACGGGCTGAATAAAGAAGTGGTCCGTCAGCTCTC
TCGCAGGTACCCACAACTGCCTCGGGCAGTTGCCACTGGAAGAGTCTATGACATGA
ACACTGGTACACTGCGCAATTATGATCCGCGCATAAACCTAGTACCTGTAAACAGA
AGACTGCCTCATGCTTTAGTCCTCCACCATAATGAACACCCACAGAGTGACTTTTCT
TCATTCGTCAGCAAATTGAAGGGCAGAACTGTCCTGGTGGTCGGGGAAAAGTTGTC
CGTCCCAGGCAAAATGGTTGACTGGTTGTCAGACCGGCCTGAGGCTACCTTCAGAG
CTCGGCTGGATTTAGGCATCCCAGGTGATGTGCCCAAATATGACATAATATTTGTT
AATGTGAGGACCCCATATAAATACCATCACTATCAGCAGTGTGAAGACCATGCCAT
TAAGCTTAGCATGTTGACCAAGAAAGCTTGTCTGCATCTGAATCCCGGCGGAACCT
GTGTCAGCATAGGTTATGGTTACGCTGACAGGGCCAGCGAAAGCATCATTGGTGCT
ATAGCGCGGCAGTTCAAGTTTTCCCGGGTATGCAAACCGAAATCCTCACTTGAAGA
GACGGAAGTTCTGTTTGTATTCATTGGGTACGATCGCAAGGCCCGTACGCACAATC
CTTACAAGCTTTCATCAACCTTGACCAACATTTATACAGGTTCCAGACTCCACGAA
GCCGGATGTGCACCCTCATATCATGTGGTGCGAGGGGATATTGCCACGGCCACCGA
AGGAGTGATTATAAATGCTGCTAACAGCAAAGGACAACCTGGCGGAGGGGTGTGC
GGAGCGCTGTATAAGAAATTCCCGGAAAGCTTCGATTTACAGCCGATCGAAGTAGG
AAAAGCGCGACTGGTCAAAGGTGCAGCTAAACATATCATTCATGCCGTAGGACCA
AACTTCAACAAAGTTTCGGAGGTTGAAGGTGACAAACAGTTGGCAGAGGCTTATG
AGTCCATCGCTAAGATTGTCAACGATAACAATTACAAGTCAGTAGCGATTCCACTG
TTGTCCACCGGCATCTTTTCCGGGAACAAAGATCGACTAACCCAATCATTGAACCA
TTTGCTGACAGCTTTAGACACCACTGATGCAGATGTAGCCATATACTGCAGGGACA
AGAAATGGGAAATGACTCTCAAGGAAGCAGTGGCTAGGAGAGAAGCAGTGGAGG
AGATATGCATATCCGACGACTCTTCAGTGACAGAACCTGATGCAGAGCTGGTGAGG
GTGCATCCGAAGAGTTCTTTGGCTGGAAGGAAGGGCTACAGCACAAGCGATGGCA
AAACTTTCTCATATTTGGAAGGGACCAAGTTTCACCAGGCGGCCAAGGATATAGCA
GAAATTAATGCCATGTGGCCCGTTGCAACGGAGGCCAATGAGCAGGTATGCATGTA
TATCCTCGGAGAAAGCATGAGCAGTATTAGGTCGAAATGCCCCGTCGAAGAGTCG
GAAGCCTCCACACCACCTAGCACGCTGCCTTGCTTGTGCATCCATGCCATGACTCC
AGAAAGAGTACAGCGCCTAAAAGCCTCACGTCCAGAACAAATTACTGTGTGCTCAT
CCTTTCCATTGCCGAAGTATAGAATCACTGGTGTGCAGAAGATCCAATGCTCCCAG
CCTATATTGTTCTCACCGAAAGTGCCTGCGTATATTCATCCAAGGAAGTATCTCGTG
GAAACACCACCGGTAGACGAGACTCCGGAGCCATCGGCAGAGAACCAATCCACAG
AGGGGACACCTGAACAACCACCACTTATAACCGAGGATGAGACCAGGACTAGAAC
GCCTGAGCCGATCATCATCGAAGAGGAAGAAGAGGATAGCATAAGTTTGCTGTCA
GATGGCCCGACCCACCAGGTGCTGCAAGTCGAGGCAGACATTCACGGGCCGCCCTC
TGTATCTAGCTCATCCTGGTCCATTCCTCATGCATCCGACTTTGATGTGGACAGTTT
ATCCATACTTGACACCCTGGAGGGAGCTAGCGTGACCAGCGGGGCAACGTCAGCC
GAGACTAACTCTTACTTCGCAAAGAGTATGGAGTTTCTGGCGCGACCGGTGCCTGC
GCCTCGAACAGTATTCAGGAACCCTCCACATCCCGCTCCGCGCACAAGAACACCGT
CACTTGCACCCAGCAGGGCCTGCTCGAGAACCAGCCTAGTTTCCACCCCGCCAGGC
GTGAATAGGGTGATCACTAGAGAGGAGCTCGAGGCGCTTACCCCGTCACGCACTCC
TAGCAGGTCGGTCTCGAGAACCAGCCTGGTCTCCAACCCGCCAGGCGTAAATAGGG
TGATTACAAGAGAGGAGTTTGAGGCGTTCGTAGCACAACAACAATGACGGTTTGAT
GCGGGTGCATACATCTTTTCCTCCGACACCGGTCAAGGGCATTTACAACAAAAATC
AGTAAGGCAAACGGTGCTATCCGAAGTGGTGTTGGAGAGGACCGAATTGGAGATT
TCGTATGCCCCGCGCCTCGACCAAGAAAAAGAAGAATTACTACGCAAGAAATTAC
AGTTAAATCCCACACCTGCTAACAGAAGCAGATACCAGTCCAGGAAGGTGGAGAA
CATGAAAGCCATAACAGCTAGACGTATTCTGCAAGGCCTAGGGCATTATTTGAAGG
CAGAAGGAAAAGTGGAGTGCTACCGAACCCTGCATCCTGTTCCTTTGTATTCATCT
AGTGTGAACCGTGCCTTTTCAAGCCCCAAGGTCGCAGTGGAAGCCTGTAACGCCAT
GTTGAAAGAGAACTTTCCGACTGTGGCTTCTTACTGTATTATTCCAGAGTACGATGC
CTATTTGGACATGGTTGACGGAGCTTCATGCTGCTTAGACACTGCCAGTTTTTGCCC
TGCAAAGCTGCGCAGCTTTCCAAAGAAACACTCCTATTTGGAACCCACAATACGAT
CGGCAGTGCCTTCAGCGATCCAGAACACGCTCCAGAACGTCCTGGCAGCTGCCACA
AAAAGAAATTGCAATGTCACGCAAATGAGAGAATTGCCCGTATTGGATTCGGCGG
CCTTTAATGTGGAATGCTTCAAGAAATATGCGTGTAATAATGAATATTGGGAAACG
TTTAAAGAAAACCCCATCAGGCTTACTGAAGAAAACGTGGTAAATTACATTACCAA
ATTAAAAGGACCAAAAGCTGCTGCTCTTTTTGCGAAGACACATAATTTGAATATGT
TGCAGGACATACCAATGGACAGGTTTGTAATGGACTTAAAGAGAGACGTGAAAGT
GACTCCAGGAACAAAACATACTGAAGAACGGCCCAAGGTACAGGTGATCCAGGCT
GCCGATCCGCTAGCAACAGCGTATCTGTGCGGAATCCACCGAGAGCTGGTTAGGAG
ATTAAATGCGGTCCTGCTTCCGAACATTCATACACTGTTTGATATGTCGGCTGAAGA
CTTTGACGCTATTATAGCCGAGCACTTCCAGCCTGGGGATTGTGTTCTGGAAACTG
ACATCGCGTCGTTTGATAAAAGTGAGGACGACGCCATGGCTCTGACCGCGTTAATG
ATTCTGGAAGACTTAGGTGTGGACGCAGAGCTGTTGACGCTGATTGAGGCGGCTTT
CGGCGAAATTTCATCAATACATTTGCCCACTAAAACTAAATTTAAATTCGGAGCCA
TGATGAAATCTGGAATGTTCCTCACACTGTTTGTGAACACAGTCATTAACATTGTAA
TCGCAAGCAGAGTGTTGAGAGAACGGCTAACCGGATCACCATGTGCAGCATTCATT
GGAGATGACAATATCGTGAAAGGAGTCAAATCGGACAAATTAATGGCAGACAGGT
GCGCCACCTGGTTGAATATGGAAGTCAAGATTATAGATGCTGTGGTGGGCGAGAA
AGCGCCTTATTTCTGTGGAGGGTTTATTTTGTGTGACTCCGTGACCGGCACAGCGTG
CCGTGTGGCAGACCCCCTAAAAAGGCTGTTTAAGCTTGGCAAACCTCTGGCAGCAG
ACGATGAACATGATGATGACAGGAGAAGGGCATTGCATGAAGAGTCAACACGCTG
GAACCGAGTGGGTATTCTTTCAGAGCTGTGCAAGGCAGTAGAATCAAGGTATGAA
ACCGTAGGAACTTCCATCATAGTTATGGCCATGACTACTCTAGCTAGCAGTGTTAA
ATCATTCAGCTACCTGAGAGGGGCCCCTATAACTCTCTACGGCTAACCTGAATGGA
CTACGACGTATCACGCCCAAACATTTACAGCCGCGGTGTCAAAAACCGCGTGGACG
TGGTTAACATCCCTGCTGGGAGGATCAGCCGTAATTATTATAATTGGCTTGGTGCTG
GCTACTATTGTGGCCATGTACGTGCTGACCAACCAGAAACATAATTGAATACAGCA
GCAATTGGCAAGCTGCTTACATAGAACTCGCGGCGATTGGCATGCCGCCTTAAAAT
TTTTATTTTATTTTTCTTTTCTTTTCCGAATCGGATTTTGTTTTTAATATTTCAAAAAA
AAAAAAAAAAAAAAAAAAAAAAAAAAAAAAAAAAAAAAAAAAAAAAAAAAAAA
AAAAAAAAAAAAAAAAAAAAA
VEE-UbAAY (SEQ ID NO: 14); VEE delivery vector with MHC class I mouse tumor epitopes
SIINFEKL (SEQ ID NO: 129) and AH1-A5 inserted
VEE-Luciferase (SEQ ID NO: 15); VEE delivery vector with luciferase gene inserted at 7545
ubiquitin (SEQ ID NO: 38) >UbG76 0-228
Ubiquitin A76 (SEQ ID NO: 39) >UbA76 0-228
HLA-A2 (MHC class I) signal peptide (SEQ ID NO: 40) >MHC SignalPep 0-78
HLA-A2 (MHC class I) Trans Membrane domain (SEQ ID NO: 41) >HLA A2 TM Domain 0-201
IgK Leader Seq (SEQ ID NO: 42) >IgK Leader Seq 0-60
Human DC-Lamp (SEQ ID NO: 43) >HumanDCLAMP 0-3178
Mouse LAMP1 (SEQ ID NO: 44) >MouseLamp1 0-1858
Human Lamp1 cDNA (SEQ ID NO: 45) >Human Lamp1 0-2339
Tetanus toxoid nulceic acid sequence (SEQ ID NO: 46)
Tetanus toxoid amino acid sequence (SEQ ID NO: 47)
PADRE nulceotide sequence (SEQ ID NO: 48)
PADRE amino acid sequence (SEQ ID NO: 49)
WPRE (SEQ ID NO: 50) >WPRE 0-593
IRES (SEQ ID NO: 51) >eGFP_IRES_SEAP_Insert 1746-2335
GFP (SEQ ID NO: 52)
SEAP (SEQ ID NO: 53)
Firefly Luciferase (SEQ ID NO: 54)
FMDV 2A (SEQ ID NO: 55)
GPGPG linker (SEQ ID NO: 56)
chAd68-Empty-E4deleted (SEQ ID NO: 75): AC_000011.1 with E1 (nt 577 to 3403), E3 (nt
27,125-31, 825), and E4 region (nt 34, 916 to 35,642) sequences deleted and the corresponding
ATCC VR-594 (Independently sequenced Full-Length VR-594 C68 SEQ ID NO: 10)
nucleotides substituted at five positions
NC_045512.2 Severe acute respiratory syndrome coronavirus 2 isolate Wuhan-Hu-1, complete
genome (SEQ ID NO: 76)
SAM in vitro transcription template DNA (SEQ ID NO: 77); VEE genome with nucleotides
7544-11175 deleted, plus minimal 5′ T7-promoter
TAATACGACTCACTATAATGggcggcgcatgagagaagcccagaccaattacctacccaaaATGGagaaagttca
cgttgacatcgaggaagacagcccattcctcagagctttgcagcggagcttcccgcagtttgaggtagaagccaagcaggtcactgataa
tgaccatgctaatgccagagcgttttcgcatctggcttcaaaactgatcgaaacggaggtggacccatccgacacgatccttgacattgga
agtgcgcccgcccgcagaatgtattctaagcacaagtatcattgtatctgtccgatgagatgtgcggaagatccggacagattgtataagta
tgcaactaagctgaagaaaaactgtaaggaaataactgataaggaattggacaagaaaatgaaggagctcgccgccgtcatgagcgacc
ctgacctggaaactgagactatgtgcctccacgacgacgagtcgtgtcgctacgaagggcaagtcgctgtttaccaggatgtatacgcgg
ttgacggaccgacaagtctctatcaccaagccaataagggagttagagtcgcctactggataggctttgacaccaccccttttatgtttaaga
acttggctggagcatatccatcatactctaccaactgggccgacgaaaccgtgttaacggctcgtaacataggcctatgcagctctgacgtt
atggagcggtcacgtagagggatgtccattcttagaaagaagtatttgaaaccatccaacaatgttctattctctgttggctcgaccatctacc
acgagaagagggacttactgaggagctggcacctgccgtctgtatttcacttacgtggcaagcaaaattacacatgtcggtgtgagactat
agttagttgcgacgggtacgtcgttaaaagaatagctatcagtccaggcctgtatgggaagccttcaggctatgctgctacgatgcaccgc
gagggattcttgtgctgcaaagtgacagacacattgaacggggagagggtctcttttcccgtgtgcacgtatgtgccagctacattgtgtga
ccaaatgactggcatactggcaacagatgtcagtgcggacgacgcgcaaaaactgctggttgggctcaaccagcgtatagtcgtcaacg
gtcgcacccagagaaacaccaataccatgaaaaattaccttttgcccgtagtggcccaggcatttgctaggtgggcaaaggaatataagg
aagatcaagaagatgaaaggccactaggactacgagatagacagttagtcatggggtgttgttgggcttttagaaggcacaagataacatc
tatttataagcgcccggatacccaaaccatcatcaaagtgaacagcgatttccactcattcgtgctgcccaggataggcagtaacacattgg
agatcgggctgagaacaagaatcaggaaaatgttagaggagcacaaggagccgtcacctctcattaccgccgaggacgtacaagaagc
taagtgcgcagccgatgaggctaaggaggtgcgtgaagccgaggagttgcgcgcagctctaccacctttggcagctgatgttgaggagc
ccactctggaagccgatgtcgacttgatgttacaagaggctggggccggctcagtggagacacctcgtggcttgataaaggttaccagct
acgctggcgaggacaagatcggctcttacgctgtgctttctccgcaggctgtactcaagagtgaaaaattatcttgcatccaccctctcgctg
aacaagtcatagtgataacacactctggccgaaaagggcgttatgccgtggaaccataccatggtaaagtagtggtgccagagggacat
gcaatacccgtccaggactttcaagctctgagtgaaagtgccaccattgtgtacaacgaacgtgagttcgtaaacaggtacctgcaccatat
tgccacacatggaggagcgctgaacactgatgaagaatattacaaaactgtcaagcccagcgagcacgacggcgaatacctgtacgac
atcgacaggaaacagtgcgtcaagaaagaactagtcactgggctagggctcacaggcgagctggtggatcctcccttccatgaattcgcc
tacgagagtctgagaacacgaccagccgctccttaccaagtaccaaccataggggtgtatggcgtgccaggatcaggcaagtctggcat
cattaaaagcgcagtcaccaaaaaagatctagtggtgagcgccaagaaagaaaactgtgcagaaattataagggacgtcaagaaaatga
aagggctggacgtcaatgccagaactgtggactcagtgctcttgaatggatgcaaacaccccgtagagaccctgtatattgacgaagctttt
gcttgtcatgcaggtactctcagagcgctcatagccattataagacctaaaaaggcagtgctctgcggggatcccaaacagtgcggttttttt
aacatgatgtgcctgaaagtgcattttaaccacgagatttgcacacaagtcttccacaaaagcatctctcgccgttgcactaaatctgtgactt
cggtcgtctcaaccttgttttacgacaaaaaaatgagaacgacgaatccgaaagagactaagattgtgattgacactaccggcagtaccaa
acctaagcaggacgatctcattctcacttgtttcagaggggggtgaagcagttgcaaatagattacaaaggcaacgaaataatgacggca
gctgcctctcaagggctgacccgtaaaggtgtgtatgccgttcggtacaaggtgaatgaaaatcctctgtacgcacccacctcagaacatg
tgaacgtcctactgacccgcacggaggaccgcatcgtgtggaaaacactagccggcgacccatggataaaaacactgactgccaagta
ccctgggaatttcactgccacgatagaggagtggcaagcagagcatgatgccatcatgaggcacatcttggagagaccggaccctaccg
acgtcttccagaataaggcaaacgtgtgttgggccaaggctttagtgccggtgctgaagaccgctggcatagacatgaccactgaacaat
ggaacactgtggattattttgaaacggacaaagctcactcagcagagatagtattgaaccaactatgcgtgaggttctttggactcgatctgg
actccggtctattttctgcacccactgttccgttatccattaggaataatcactgggataactccccgtcgcctaacatgtacgggctgaataa
agaagtggtccgtcagctctctcgcaggtacccacaactgcctcgggcagttgccactggaagagtctatgacatgaacactggtacact
gcgcaattatgatccgcgcataaacctagtacctgtaaacagaagactgcctcatgctttagtcctccaccataatgaacacccacagagtg
acttttcttcattcgtcagcaaattgaagggcagaactgtcctggtggtcggggaaaagttgtccgtcccaggcaaaatggttgactggttgt
cagaccggcctgaggctaccttcagagctcggctggatttaggcatcccaggtgatgtgcccaaatatgacataatatttgttaatgtgagg
accccatataaataccatcactatcagcagtgtgaagaccatgccattaagcttagcatgttgaccaagaaagcttgtctgcatctgaatccc
ggcggaacctgtgtcagcataggttatggttacgctgacagggccagcgaaagcatcattggtgctatagcgcggcagttcaagttttccc
gggtatgcaaaccgaaatcctcacttgaagagacggaagttctgtttgtattcattgggtacgatcgcaaggcccgtacgcacaatccttac
aagctttcatcaaccttgaccaacatttatacaggttccagactccacgaagccggatgtgcaccctcatatcatgtggtgcgaggggatatt
gccacggccaccgaaggagtgattataaatgctgctaacagcaaaggacaacctggcggaggggtgtgcggagcgctgtataagaaat
tcccggaaagcttcgatttacagccgatcgaagtaggaaaagcgcgactggtcaaaggtgcagctaaacatatcattcatgccgtaggac
caaacttcaacaaagtttcggaggttgaaggtgacaaacagttggcagaggcttatgagtccatcgctaagattgtcaacgataacaattac
aagtcagtagcgattccactgttgtccaccggcatcttttccgggaacaaagatcgactaacccaatcattgaaccatttgctgacagcttta
gacaccactgatgcagatgtagccatatactgcagggacaagaaatgggaaatgactctcaaggaagcagtggctaggagagaagcag
tggaggagatatgcatatccgacgactcttcagtgacagaacctgatgcagagctggtgagggtgcatccgaagagttctttggctggaa
ggaagggctacagcacaagcgatggcaaaactttctcatatttggaagggaccaagtttcaccaggggccaaggatatagcagaaatta
atgccatgtggcccgttgcaacggaggccaatgagcaggtatgcatgtatatcctcggagaaagcatgagcagtattaggtcgaaatgcc
ccgtcgaagagtcggaagcctccacaccacctagcacgctgccttgcttgtgcatccatgccatgactccagaaagagtacagcgcctaa
aagcctcacgtccagaacaaattactgtgtgctcatcctttccattgccgaagtatagaatcactggtgtgcagaagatccaatgctcccagc
ctatattgttctcaccgaaagtgcctgcgtatattcatccaaggaagtatctcgtggaaacaccaccggtagacgagactccggagccatcg
gcagagaaccaatccacagaggggacacctgaacaaccaccacttataaccgaggatgagaccaggactagaacgcctgagccgatc
atcatcgaagaggaagaagaggatagcataagtttgctgtcagatggcccgacccaccaggtgctgcaagtcgaggcagacattcacgg
gccgccctctgtatctagctcatcctggtccattcctcatgcatccgactttgatgtggacagtttatccatacttgacaccctggagggagct
agcgtgaccagcggggcaacgtcagccgagactaactcttacttcgcaaagagtatggagtttctggcgcgaccggtgcctgcgcctcg
aacagtattcaggaaccctccacatcccgctccgcgcacaagaacaccgtcacttgcacccagcagggcctgctcgagaaccagcctag
tttccaccccgccaggcgtgaatagggtgatcactagagaggagctcgaggcgcttaccccgtcacgcactcctagcaggtcggtctcg
agaaccagcctggtctccaacccgccaggcgtaaatagggtgattacaagagaggagtttgaggcgttcgtagcacaacaacaatgacg
gtttgatgcgggtgcatacatcttttcctccgacaccggtcaagggcatttacaacaaaaatcagtaaggcaaacggtgctatccgaagtgg
tgttggagaggaccgaattggagatttcgtatgccccgcgcctcgaccaagaaaaagaagaattactacgcaagaaattacagttaaatcc
cacacctgctaacagaagcagataccagtccaggaaggtggagaacatgaaagccataacagctagacgtattctgcaaggcctaggg
cattatttgaaggcagaaggaaaagtggagtgctaccgaaccctgcatcctgttcctttgtattcatctagtgtgaaccgtgccttttcaagcc
ccaaggtcgcagtggaagcctgtaacgccatgttgaaagagaactttccgactgtggcttcttactgtattattccagagtacgatgcctattt
ggacatggttgacggagcttcatgctgcttagacactgccagtttttgccctgcaaagctgcgcagctttccaaagaaacactcctatttgga
acccacaatacgatcggcagtgccttcagcgatccagaacacgctccagaacgtcctggcagctgccacaaaaagaaattgcaatgtca
cgcaaatgagagaattgcccgtattggattcggcggcctttaatgtggaatgcttcaagaaatatgcgtgtaataatgaatattgggaaacgt
ttaaagaaaaccccatcaggcttactgaagaaaacgtggtaaattacattaccaaattaaaaggaccaaaagctgctgctctttttgcgaaga
cacataatttgaatatgttgcaggacataccaatggacaggtttgtaatggacttaaagagagacgtgaaagtgactccaggaacaaaacat
actgaagaacggcccaaggtacaggtgatccaggctgccgatccgctagcaacagcgtatctgtgcggaatccaccgagagctggttag
gagattaaatgcggtcctgcttccgaacattcatacactgtttgatatgtcggctgaagactttgacgctattatagccgagcacttccagcct
ggggattgtgttctggaaactgacatcgcgtcgtttgataaaagtgaggacgacgccatggctctgaccgcgttaatgattctggaagactt
aggtgtggacgcagagctgttgacgctgattgaggcggctttcggcgaaatttcatcaatacatttgcccactaaaactaaatttaaattcgg
agccatgatgaaatctggaatgttcctcacactgtttgtgaacacagtcattaacattgtaatcgcaagcagagtgttgagagaacggctaac
cggatcaccatgtgcagcattcattggagatgacaatatcgtgaaaggagtcaaatcggacaaattaatggcagacaggtgcgccacctg
gttgaatatggaagtcaagattatagatgctgtggtgggcgagaaagcgccttatttctgtggagggtttattttgtgtgactccgtgaccggc
acagcgtgccgtgtggcagaccccctaaaaaggctgtttaagcttggcaaacctctggcagcagacgatgaacatgatgatgacaggag
aagggcattgcatgaagagtcaacacgctggaaccgagtgggtattctttcagagctgtgcaaggcagtagaatcaaggtatgaaaccgt
aggaacttccatcatagttatggccatgactactctagctagcagtgttaaatcattcagctacctgagaggggcccctataactctctacgg
cTAAcctgaatggactacgacgTatcacgcccaaacatttacagccgcggtgtcaaaaaccgcgtggacgtggttaacatccctgctg
ggaggatcagccgtaattattataattggcttggtgctggctactattgtggccatgtacgtgctgaccaaccagaaacataattgaatacag
cagcaattggcaagctgcttacatagaactcgcggcgattggcatgccgccttaaaatttttattttattttttcttttcttttccgaatcgg
attttgtttttaatatttcAAAAAAAAAAAAAAAAAAAAAAAAAAAAAAAAAAAAAAAAAAAAAAA
AAAAAAAAAAAAAAAAAAAAAAAAAAAAAAAAA
SV40 mini-intron (SEQ ID NO: 88)
CMV-CTSpike-FurinMT2P-T2A-E-T2A-M-SV40-CMV-EPE-BGH Nucleotide sequence (SEQ
ID NO: 109)
VOC 202012/01 B.1.1.7 UK Spike variant Amino Acid Sequence (SEQ ID NO: 110)
MFVFLVLLPLVSSQCVNLTTRTQLPPAYTNSFTRGVYYPDKVFRSSVLHSTQDLFLPFFS
NVTWFHAISGTNGTKRFDNPVLPFNDGVYFASTEKSNIIRGWIFGTTLDSKTQSLLIVNN
ATNVVIKVCEFQFCNDPFLGVYHKNNKSWMESEFRVYSSANNCTFEYVSQPFLMDLE
GKQGNFKNLREFVFKNIDGYFKIYSKHTPINLVRDLPQGFSALEPLVDLPIGINITRFQTL
LALHRSYLTPGDSSSGWTAGAAAYYVGYLQPRTFLLKYNENGTITDAVDCALDPLSET
KCTLKSFTVEKGIYQTSNFRVQPTESIVRFPNITNLCPFGEVENATRFASVYAWNRKRIS
NCVADYSVLYNSASFSTFKCYGVSPTKLNDLCFTNVYADSFVIRGDEVRQIAPGQTGKI
ADYNYKLPDDFTGCVIAWNSNNLDSKVGGNYNYLYRLFRKSNLKPFERDISTEIYQAG
STPCNGVEGFNCYFPLQSYGFQPTYGVGYQPYRVVVLSFELLHAPATVCGPKKSTNLV
KNKCVNFNFNGLTGTGVLTESNKKFLPFQQFGRDIDDTTDAVRDPQTLEILDITPCSFG
GVSVITPGTNTSNQVAVLYQGVNCTEVPVAIHADQLTPTWRVYSTGSNVFQTRAGCLI
GAEHVNNSYECDIPIGAGICASYQTQTNSHGSASSVASQSIIAYTMSLGAENSVAYSNNS
IAIPINFTISVTTEILPVSMTKTSVDCTMYICGDSTECSNLLLQYGSFCTQLNRALTGIAVE
QDKNTQEVFAQVKQIYKTPPIKDFGGFNFSQILPDPSKPSKRSFIEDLLFNKVTLADAGFI
KQYGDCLGDIAARDLICAQKFNGLTVLPPLLTDEMIAQYTSALLAGTITSGWTFGAGA
ALQIPFAMQMAYRFNGIGVTQNVLYENQKLIANQFNSAIGKIQDSLSSTASALGKLQDV
VNQNAQALNTLVKQLSSNFGAISSVLNDILARLDPPEAEVQIDRLITGRLQSLQTYVTQ
QLIRAAEIRASANLAATKMSECVLGQSKRVDFCGKGYHLMSFPQSAPHGVVFLHVTYV
PAQEKNFTTAPAICHDGKAHFPREGVFVSNGTHWFVTQRNFYEPQIITTHNTFVSGNCD
VVIGIVNNTVYDPLQPELDSFKEELDKYFKNHTSPDVDLGDISGINASVVNIQKEIDRLN
EVAKNLNESLIDLQELGKYEQYIKWPWYIWLGFIAGLIAIVMVTIMLCCMTSCCSCLKG
CCSCGSCCKFDEDDSEPVLKGVKLHYT*
CMV-B117Spike-FurinMT2P-SV40-CMV-EPE-BGH (SEQ ID NO: 111)
B.1.351 Spike-FurinMt Amino Acid sequence (South African Spike Variant; Beta variant;
501Y.V2) (SEQ ID NO: 112)
MFVFLVLLPLVSSQCVNFTTRTQLPPAYTNSFTRGVYYPDKVFRSSVLHSTQDLFLPFFS
NVTWFHAIHVSGTNGTKRFANPVLPFNDGVYFASTEKSNIIRGWIFGTTLDSKTQSLLIV
NNATNVVIKVCEFQFCNDPFLGVYYHKNNKSWMESEFRVYSSANNCTFEYVSQPFLM
DLEGKQGNFKNLREFVFKNIDGYFKIYSKHTPINLVRGLPQGFSALEPLVDLPIGINITRF
QTLHISYLTPGDSSSGWTAGAAAYYVGYLQPRTFLLKYNENGTITDAVDCALDPLSET
KCTLKSFTVEKGIYQTSNFRVQPTESIVRFPNITNLCPFGEVENATRFASVYAWNRKRIS
NCVADYSVLYNSASFSTFKCYGVSPTKLNDLCFTNVYADSFVIRGDEVRQIAPGQTGNI
ADYNYKLPDDFTGCVIAWNSNNLDSKVGGNYNYLYRLFRKSNLKPFERDISTEIYQAG
STPCNGVKGFNCYFPLQSYGFQPTYGVGYQPYRVVVLSFELLHAPATVCGPKKSTNLV
KNKCVNFNFNGLTGTGVLTESNKKFLPFQQFGRDIADTTDAVRDPQTLEILDITPCSFG
GVSVITPGTNTSNQVAVLYQGVNCTEVPVAIHADQLTPTWRVYSTGSNVFQTRAGCLI
GAEHVNNSYECDIPIGAGICASYQTQTNSPGSASSVASQSIIAYTMSLGVENSVAYSNNS
IAIPTNFTISVTTEILPVSMTKTSVDCTMYICGDSTECSNLLLQYGSFCTQLNRALTGIAV
EQDKNTQEVFAQVKQIYKTPPIKDFGGFNFSQILPDPSKPSKRSFIEDLLENKVTLADAG
FIKQYGDCLGDIAARDLICAQKFNGLTVLPPLLTDEMIAQYTSALLAGTITSGWTFGAG
AALQIPFAMQMAYRFNGIGVTQNVLYENQKLIANQFNSAIGKIQDSLSSTASALGKLQD
VVNQNAQALNTLVKQLSSNFGAISSVLNDILSRLDPPEAEVQIDRLITGRLQSLQTYVTQ
QLIRAAEIRASANLAATKMSECVLGQSKRVDFCGKGYHLMSFPQSAPHGVVFLHVTYV
PAQEKNFTTAPAICHDGKAHFPREGVFVSNGTHWFVTQRNFYEPQIITTDNTFVSGNCD
VVIGIVNNTVYDPLQPELDSFKEELDKYFKNHTSPDVDLGDISGINASVVNIQKEIDRLN
EVAKNLNESLIDLQELGKYEQYIKWPWYIWLGFIAGLIAIVMVTIMLCCMTSCCSCLKG
CCSCGSCCKFDEDDSEPVLKGVKLHYT
CMV-B.1351Spike-FurinMt-2P-CMV-TCE5-BGH (SEQ ID NO: 113); B.1.351 Spike sequence
based on CT1 sequence optimization with relevant variant mutations replaced with COOL
codons
SAM-Nuc-TCE11-Spike B.1.1.529 samRNA (SEQ ID NO: 27976); “RT-R918”:
26S sub-genomic promoter 7513-7536; Nucleocapsid 7571-8827; T2A linker 8840-8905;
TCE11 (including GPGPG linkers and both PADRE and Tetanus Toxoid universal MHC class
II epitopes)
8906-9637; 26S sub-genomic promoter 9659-9682; B.1.1.529 (Omicron Spike) 9714-13, 526;
PolyA 13, 813-13, 932; sequence optimized based on CT1 sequence optimization with relevant
variant mutations replaced with COOL codons; Spike modified with mutations 679-682 RRAR
[SEQ ID NO: 125] to GSAS [SEQ ID NO: 126], K983P and V984P
atgggcggcgcatgagagaagcccagaccaattacctacccaaaatggagaaagttcacgttgacatcgaggaagacagcccattcctc
agagctttgcagcggagcttcccgcagtttgaggtagaagccaagcaggtcactgataatgaccatgctaatgccagagcgttttcgcatc
tggcttcaaaactgatcgaaacggaggtggacccatccgacacgatccttgacattggaagtgcgcccgcccgcagaatgtattctaagc
acaagtatcattgtatctgtccgatgagatgtgcggaagatccggacagattgtataagtatgcaactaagctgaagaaaaactgtaaggaa
ataactgataaggaattggacaagaaaatgaaggagctcgccgccgtcatgagcgaccctgacctggaaactgagactatgtgcctcca
cgacgacgagtcgtgtcgctacgaagggcaagtcgctgtttaccaggatgtatacgcggttgacggaccgacaagtctctatcaccaagc
caataagggagttagagtcgcctactggataggctttgacaccaccccttttatgtttaagaacttggctggagcatatccatcatactctacc
aactgggccgacgaaaccgtgttaacggctcgtaacataggcctatgcagctctgacgttatggagcggtcacgtagagggatgtccatt
cttagaaagaagtatttgaaaccatccaacaatgttctattctctgttggctcgaccatctaccacgagaagagggacttactgaggagctgg
cacctgccgtctgtatttcacttacgtggcaagcaaaattacacatgtcggtgtgagactatagttagttgcgacgggtacgtcgttaaaaga
atagctatcagtccaggcctgtatgggaagccttcaggctatgctgctacgatgcaccgcgagggattcttgtgctgcaaagtgacagaca
cattgaacggggagagggtctcttttcccgtgtgcacgtatgtgccagctacattgtgtgaccaaatgactggcatactggcaacagatgtc
agtgcggacgacgcgcaaaaactgctggttgggctcaaccagcgtatagtcgtcaacggtcgcacccagagaaacaccaataccatga
aaaattaccttttgcccgtagtggcccaggcatttgctaggtgggcaaaggaatataaggaagatcaagaagatgaaaggccactaggac
tacgagatagacagttagtcatggggtgttgttgggcttttagaaggcacaagataacatctatttataagcgcccggatacccaaaccatca
tcaaagtgaacagcgatttccactcattcgtgctgcccaggataggcagtaacacattggagatcgggctgagaacaagaatcaggaaaa
tgttagaggagcacaaggagccgtcacctctcattaccgccgaggacgtacaagaagctaagtgcgcagccgatgaggctaaggaggt
gcgtgaagccgaggagttgcgcgcagctctaccacctttggcagctgatgttgaggagcccactctggaagccgatgtcgacttgatgtta
caagaggctggggccggctcagtggagacacctcgtggcttgataaaggttaccagctacgctggcgaggacaagatcggctcttacgc
tgtgctttctccgcaggctgtactcaagagtgaaaaattatcttgcatccaccctctcgctgaacaagtcatagtgataacacactctggccg
aaaagggcgttatgccgtggaaccataccatggtaaagtagtggtgccagagggacatgcaatacccgtccaggactttcaagctctgag
tgaaagtgccaccattgtgtacaacgaacgtgagttcgtaaacaggtacctgcaccatattgccacacatggaggagcgctgaacactgat
gaagaatattacaaaactgtcaagcccagcgagcacgacggcgaatacctgtacgacatcgacaggaaacagtgcgtcaagaaagaac
tagtcactgggctagggctcacaggcgagctggtggatcctcccttccatgaattcgcctacgagagtctgagaacacgaccagccgctc
cttaccaagtaccaaccataggggtgtatggcgtgccaggatcaggcaagtctggcatcattaaaagcgcagtcaccaaaaaagatctag
tggtgagcgccaagaaagaaaactgtgcagaaattataagggacgtcaagaaaatgaaagggctggacgtcaatgccagaactgtgga
ctcagtgctcttgaatggatgcaaacaccccgtagagaccctgtatattgacgaagcttttgcttgtcatgcaggtactctcagagcgctcat
agccattataagacctaaaaaggcagtgctctgcggggatcccaaacagtgcggtttttttaacatgatgtgcctgaaagtgcattttaacca
cgagatttgcacacaagtcttccacaaaagcatctctcgccgttgcactaaatctgtgacttcggtcgtctcaaccttgttttacgacaaaaaa
atgagaacgacgaatccgaaagagactaagattgtgattgacactaccggcagtaccaaacctaagcaggacgatctcattctcacttgttt
cagagggtgggtgaagcagttgcaaatagattacaaaggcaacgaaataatgacggcagctgcctctcaagggctgacccgtaaaggt
gtgtatgccgttcggtacaaggtgaatgaaaatcctctgtacgcacccacctcagaacatgtgaacgtcctactgacccgcacggaggac
cgcatcgtgtggaaaacactagccggcgacccatggataaaaacactgactgccaagtaccctgggaatttcactgccacgatagagga
gtggcaagcagagcatgatgccatcatgaggcacatcttggagagaccggaccctaccgacgtcttccagaataaggcaaacgtgtgtt
gggccaaggctttagtgccggtgctgaagaccgctggcatagacatgaccactgaacaatggaacactgtggattattttgaaacggaca
aagctcactcagcagagatagtattgaaccaactatgcgtgaggttctttggactcgatctggactccggtctattttctgcacccactgttcc
gttatccattaggaataatcactgggataactccccgtcgcctaacatgtacgggctgaataaagaagtggtccgtcagctctctcgcaggt
acccacaactgcctcgggcagttgccactggaagagtctatgacatgaacactggtacactgcgcaattatgatccgcgcataaacctagt
acctgtaaacagaagactgcctcatgctttagtcctccaccataatgaacacccacagagtgacttttcttcattcgtcagcaaattgaaggg
cagaactgtcctggtggtcggggaaaagttgtccgtcccaggcaaaatggttgactggttgtcagaccggcctgaggctaccttcagagct
cggctggatttaggcatcccaggtgatgtgcccaaatatgacataatatttgttaatgtgaggaccccatataaataccatcactatcagcagt
gtgaagaccatgccattaagcttagcatgttgaccaagaaagcttgtctgcatctgaatcccggcggaacctgtgtcagcataggttatggtt
acgctgacagggccagcgaaagcatcattggtgctatagcgcggcagttcaagttttcccgggtatgcaaaccgaaatcctcacttgaag
agacggaagttctgtttgtattcattgggtacgatcgcaaggcccgtacgcacaatccttacaagctttcatcaaccttgaccaacatttatac
aggttccagactccacgaagccggatgtgcaccctcatatcatgtggtgcgaggggatattgccacggccaccgaaggagtgattataaa
tgctgctaacagcaaaggacaacctggcggaggggtgtgcggagcgctgtataagaaattcccggaaagcttcgatttacagccgatcg
aagtaggaaaagcgcgactggtcaaaggtgcagctaaacatatcattcatgccgtaggaccaaacttcaacaaagtttcggaggttgaag
gtgacaaacagttggcagaggcttatgagtccatcgctaagattgtcaacgataacaattacaagtcagtagcgattccactgttgtccacc
ggcatcttttccgggaacaaagatcgactaacccaatcattgaaccatttgctgacagctttagacaccactgatgcagatgtagccatatac
tgcagggacaagaaatgggaaatgactctcaaggaagcagtggctaggagagaagcagtggaggagatatgcatatccgacgactctt
cagtgacagaacctgatgcagagctggtgagggtgcatccgaagagttctttggctggaaggaagggctacagcacaagcgatggcaa
aactttctcatatttggaagggaccaagtttcaccaggcggccaaggatatagcagaaattaatgccatgtggcccgttgcaacggaggcc
aatgagcaggtatgcatgtatatcctcggagaaagcatgagcagtattaggtcgaaatgccccgtcgaagagtcggaagcctccacacca
cctagcacgctgccttgcttgtgcatccatgccatgactccagaaagagtacagcgcctaaaagcctcacgtccagaacaaattactgtgt
gctcatcctttccattgccgaagtatagaatcactggtgtgcagaagatccaatgctcccagcctatattgttctcaccgaaagtgcctgcgta
tattcatccaaggaagtatctcgtggaaacaccaccggtagacgagactccggagccatcggcagagaaccaatccacagaggggaca
cctgaacaaccaccacttataaccgaggatgagaccaggactagaacgcctgagccgatcatcatcgaagaggaagaagaggatagca
taagtttgctgtcagatggcccgacccaccaggtgctgcaagtcgaggcagacattcacgggccgccctctgtatctagctcatcctggtc
cattcctcatgcatccgactttgatgtggacagtttatccatacttgacaccctggagggagctagcgtgaccagcggggcaacgtcagcc
gagactaactcttacttcgcaaagagtatggagtttctggcgcgaccggtgcctgcgcctcgaacagtattcaggaaccctccacatcccg
ctccgcgcacaagaacaccgtcacttgcacccagcagggcctgctcgagaaccagcctagtttccaccccgccaggcgtgaatagggt
gatcactagagaggagctcgaggcgcttaccccgtcacgcactcctagcaggtcggtctcgagaaccagcctggtctccaacccgccag
gcgtaaatagggtgattacaagagaggagtttgaggcgttcgtagcacaacaacaatgacggtttgatgcgggtgcatacatcttttcctcc
gacaccggtcaagggcatttacaacaaaaatcagtaaggcaaacggtgctatccgaagtggtgttggagaggaccgaattggagatttcg
tatgccccgcgcctcgaccaagaaaaagaagaattactacgcaagaaattacagttaaatcccacacctgctaacagaagcagataccag
tccaggaaggtggagaacatgaaagccataacagctagacgtattctgcaaggcctagggcattatttgaaggcagaaggaaaagtgga
gtgctaccgaaccctgcatcctgttcctttgtattcatctagtgtgaaccgtgccttttcaagccccaaggtcgcagtggaagcctgtaacgc
catgttgaaagagaactttccgactgtggcttcttactgtattattccagagtacgatgcctatttggacatggttgacggagcttcatgctgc
ttagacactgccagtttttgccctgcaaagctgcgcagctttccaaagaaacactcctatttggaacccacaatacgatcggcagtgccttcag
cgatccagaacacgctccagaacgtcctggcagctgccacaaaaagaaattgcaatgtcacgcaaatgagagaattgcccgtattggatt
cggcggcctttaatgtggaatgcttcaagaaatatgcgtgtaataatgaatattgggaaacgtttaaagaaaaccccatcaggcttactgaag
aaaacgtggtaaattacattaccaaattaaaaggaccaaaagctgctgctctttttgcgaagacacataatttgaatatgttgcaggacatacc
aatggacaggtttgtaatggacttaaagagagacgtgaaagtgactccaggaacaaaacatactgaagaacggcccaaggtacaggtga
tccaggctgccgatccgctagcaacagcgtatctgtgcggaatccaccgagagctggttaggagattaaatgcggtcctgcttccgaacat
tcatacactgtttgatatgtcggctgaagactttgacgctattatagccgagcacttccagcctggggattgtgttctggaaactgacatcgcg
tcgtttgataaaagtgaggacgacgccatggctctgaccgcgttaatgattctggaagacttaggtgtggacgcagagctgttgacgctgat
tgaggcggctttcggcgaaatttcatcaatacatttgcccactaaaactaaatttaaattcggagccatgatgaaatctggaatgttcctcaca
ctgtttgtgaacacagtcattaacattgtaatcgcaagcagagtgttgagagaacggctaaccggatcaccatgtgcagcattcattggaga
tgacaatatcgtgaaaggagtcaaatcggacaaattaatggcagacaggtgcgccacctggttgaatatggaagtcaagattatagatgct
gtggtgggcgagaaagcgccttatttctgtggagggtttattttgtgtgactccgtgaccggcacagcgtgccgtgtggcagaccccctaa
aaaggctgtttaagcttggcaaacctctggcagcagacgatgaacatgatgatgacaggagaagggcattgcatgaagagtcaacacgc
tggaaccgagtgggtattctttcagagctgtgcaaggcagtagaatcaaggtatgaaaccgtaggaacttccatcatagttatggccatgac
tactctagctagcagtgttaaatcattcagctacctgagaggggcccctataactctctacggctaacctgaatggactacgactctagaata
gtctttaattaagccaccATGTCAGATAATGGGCCTCAGAACCAGCGGAATGCCCCCAGGA
TCACGTTCGGTGGGCCTTCAGATTCAACTGGAAGCAATCAGAACGGGGAAAG
ATCCGGTGCAAGGTCCAAGCAACGCCGACCCCAGGGATTGCCTAATAATACA
GCAAGTTGGTTTACTGCACTGACCCAACACGGGAAAGAGGACCTTAAATTTCC
GCGGGGGCAAGGAGTACCTATAAACACTAATAGCAGCCCCGATGACCAAATT
GGGTACTACCGCAGAGCAACCCGGCGAATCAGAGGGGGTGACGGTAAGATGA
AGGACCTCTCCCCCAGGTGGTACTTCTACTATTTGGGAACGGGGCCAGAAGCC
GGACTGCCCTACGGCGCAAAAAAGACGGTATAATATGGGTCGCCACTGAGGG
CGCTCTGAATACGCCAAAAGATCACATTGGTACTAGAAACCCGGCGAACAATG
CGGCAATTGTGCTTCAGCTCCCTCAAGGAACAACGTTGCCAAAAGGATTTTAC
GCAGAGGGATCACGGGGGGGTTCCCAGGCTAGTTCTCGCAGTTCCTCAAGGA
GTCGAAATTCCAGTAGGAACTCAACCCCAGGCTCAAGCCGCGGGACTTCACCT
GCAAGAATGGCCGGTAACGGGGGAGACGCTGCTTTGGCTCTTCTTCTCCTTGA
TCGCCTTAATCAGCTTGAGTCTAAGATGTCTGGTAAAGGCCAACAGCAACAAG
GACAGACGGTAACGAAAAAATCCGCCGCCGAGGCCTCTAAAAAACCGAGACA
AAAACGGACTGCTACGAAAGCGTATAACGTCACTCAGGCTTTTGGTAGGCGG
GGCCCGGAACAAACCCAGGGTAATTTTGGCGATCAGGAACTGATTAGACAAG
GCACCGACTACAAGCACTGGCCTCAGATCGCGCAGTTTGCACCCTCCGCTTCA
GCGTTCTTCGGGATGTCACGCATCGGGATGGAGGTTACACCGAGTGGAACAT
GGCTGACATATACTGGTGCAATcAAGCTGGACGACAAGGATCCCAACTTCAAA
GATCAAGTTATACTCCTCAACAAACATATCGATGCGTATAAGACATTCCCCCC
GACGGAACCCAAAAAAGATAAAAAAAAGAAGGCCGACGAGACCCAAGCCCTC
CCACAACGACAAAAGAAACAACAAACAGTAACACTGCTCCCAGCCGCAGACTT
GGATGATTTCTCCAAACAGTTGCAGCAATCTATGAGTTCAGCCGATAGTACTC
AGGCCGGCGGTTCTGGAGGTGTCCGTGCTGAAGGACGCGGGTCCCTTCTCACCTGC
GGCGACGTTGAGGAAAACCCTGGCCCTATGGCTGGCAACGTAGCTTTCCAGACCGT
GAAGCCGGGAAATTTCAACAAGGACTTCTACGACTTCGCCGTCAGCAAGGGATTCT
TTAAAGAAGGAAGCTCCGGTGCCAGTCAGAGAGTCGCCGGCGACTCAGGCTTTGCC
GCGTATAGCCGATATCGGATTGGCAATGACGGTGTCCCGTTCGTGGTCTCGACCGG
ATATCACTTCCGTGAACTAGGGGTATATCTGACCTTCTACTTGACGAACGACGTGTC
GTTCCTAGCGCATATTCAATGGATGGTCATGTTCACGCCAGGCTTAATGTGGCTGTC
TTATTTCATCGCCTCTTTTAGACTGTTCGCTAGGACAAGGAGCATGTTTGAGTATTA
CCACACTACTGACCCCAGTTTTCTAGGACGCTACATGAGTGCTTTGAATCATACCA
AGAAGTGGAAATACCCACAGATTTCCAATGAGAAGCAGGAGATCCTTGGAACAGT
TAGTTGGAATTTGAGGGAAGCCACGACGAGACAGGTTGTGAACGTGGTTACGACA
AAAATCGCACTGAAGACACTAGCCTGCTTCGTGCTGGCCGCCGTTTACCGCATCAA
TTGGATTACCGGACCCGGACCAGGCGCCAAATTTGTTGCTGCTTGGACACTGAAAG
CTGCTGCTGGGCCCGGACCAGGCCAGTACATCAAGGCCAACTCTAAGTTTATCGGC
ATCACCGAATTGGGACCTGGACCCGGCTAGTGAttcgaaGggcccctataactctctacggctaacctga
atggactacgacatagtctagtccgccaaggccaccATGTTTGTCTTCCTGGTCTTGCTGCCGCTGGTGAGC
AGCCAGTGCGTGAATCTCACCACCCGCACCCAGCTTCCACCTGCCTACACTAACAGCTTC
ACCCGAGGGGTGTATTACCCTGACAAGGTATTCCGGTCCTCCGTCCTCCATAGCACGCA
GGACCTTTTTCTGCCCTTCTTCTCAAATGTGACATGGTTCCATGtgATTAGCGGCACGAAT
GGAACGAAGCGCTTTGATAACCCCGTGCTGCCTTTCAATGACGGCGTCTACTTCGCCTCC
AtTGAAAAGTCAAACATCATCCGGGGCTGGATCTTTGGCACCACTCTTGATTCAAAGACCC
AGTCACTGCTGATTGTGAACAATGCTACAAACGTGGTTATCAAGGTGTGTGAGTTTCAGTT
CTGTAACGATCCATTTTTGGacCACAAGAACAACAAGTCCTGGATGGAGTCTGAGTTCAGA
GTGTATAGCTCTGCTAACAACTGCACCTTCGAGTACGTGTCCCAGCCTTTCCTTATGGAC
CTGGAAGGCAAACAGGGCAATTTCAAAAACCTGAGAGAGTTCGTGTTTAAGAACATTGAC
GGATACTTCAAAATTTATTCTAAGCACACACCAATTaTtGTGCGGgagccagagGACCTACCCC
AAGGCTTTAGCGCCCTAGAGCCCCTGGTTGACCTGCCCATTGGGATCAATATAACAAGGT
TCCAAACTCTACTGGCTCTGCATAGAAGTTATCTGACCCCAGGAGACAGCTCTAGTGGTT
GGACCGCCGGCGCAGCAGCCTACTATGTCGGGTACTTACAGCCACGCACGTTCCTTCTG
AAGTACAATGAGAACGGGACAATCACTGACGCAGTAGACTGTGCACTGGACCCGCTAAG
CGAGACTAAGTGCACACTTAAATCCTTCACGGTGGAGAAAGGCATTTATCAGACCTCTAA
CTTCAGGGTGCAGCCAACAGAAAGCATTGTGCGATTCCCAAATATTACTAATCTTTGCCCT
TTCGacGAGGTCTTTAATGCAACTAGATTCGCATCAGTCTATGCGTGGAACCGCAAACGCA
TTTCCAATTGTGTCGCAGACTACTCAGTGCTGTACAACctgGCCcCTTTCttTACGTTCAAGT
GTTACGGAGTGTCACCCACTAAACTGAACGACCTGTGCTTTACAAATGTCTACGCTGACT
CCTTCGTGATTAGGGGAGACGAGGTGAGACAAATTGCCCCCGGACAGACTGGGAAcATT
GCCGACTACAATTATAAGCTTCCTGATGATTTCACTGGCTGTGTTATTGCCTGGAATAGTA
ACAAgCTGGATAGCAAGGTGaGcGGCAACTATAACTACTTATATCGACTGTTTAGGAAGAG
TAATCTGAAACCATTTGAGCGGGATATTTCCACAGAAATTTACCAGGCCGGGAaCAaACCA
TGTAATGGGGTGGccGGATTTAATTGTTACTTCCCACTCaAGAGCTATaGTTTCCgACCCAC
CtATGGAGTGGGTcACCAGCCCTATAGAGTCGTGGTGCTTAGTTTTGAGCTGCTTCACGC
CCCAGCAACCGTCTGCGGTCCCAAAAAGTCGACCAATCTCGTGAAAAACAAATGCGTAAA
CTTCAACTTTAACGGCTTAAaAGGAACCGGCGTGCTCACCGAAAGCAACAAGAAATTCCT
TCCATTTCAGCAATTCGGAAGGGACATCGCCGACACAACAGACGCGGTGAGGGACCCAC
AGACTCTGGAGATACTGGACATCACTCCTTGTTCGTTTGGGGGCGTCTCGGTCATCACAC
CCGGGACTAATACTAGTAATCAGGTAGCAGTTTTATATCAAGGCGTCAACTGTACCGAAG
TACCTGTGGCCATACACGCTGATCAGCTAACGCCAACATGGCGAGTCTATTCCACCGGCT
CTAACGTTTTTCAGACCAGGGCTGGGTGCCTGATAGGGGCAGAGtAtGTCAATAATTCCTA
TGAGTGTGATATCCCCATAGGTGCGGGGATCTGTGCCAGCTATCAAACCCAAACCAAaTC
ACacgGGaGcGCAaGcTCTGTGGCTTCTCAGAGCATAATTGCATATACAATGTCACTGGGC
GCTGAGAATAGCGTTGCATACTCTAATAACAGCATAGCCATTCCCACGAACTTTACTATCA
GTGTGACAACCGAAATATTGCCAGTTTCGATGACCAAAACTAGCGTGGATTGCACGATGT
ACATCTGTGGAGACTCTACCGAATGCAGCAATCTGCTATTACAATATGGCAGCTTCTGTAC
ACAGTTAAAgCGAGCCTTGACAGGCATCGCAGTGGAACAGGACAAAAATACTCAAGAGGT
GTTTGCACAGGTGAAGCAAATCTACAAAACGCCCCCCATTAAAtATTTTGGCGGGTTCAAT
TTTTCACAAATTCTCCCCGACCCGTCTAAGCCGAGTAAGCGGTCCTTCATCGAAGATCTG
CTCTTTAACAAAGTAACCCTCGCCGATGCCGGCTTTATTAAGCAGTATGGCGACTGCCTG
GGGGATATAGCCGCTCGTGACCTGATTTGCGCCCAGAAGTTCAAaGGTCTGACCGTGTT
GCCTCCTTTATTGACCGATGAAATGATTGCCCAGTACACTAGTGCCCTGCTGGCCGGCAC
TATCACGTCTGGGTGGACCTTCGGAGCTGGTGCCGCCTTGCAGATACCTTTTGCAATGCA
GATGGCCTATAGGTTTAATGGTATCGGAGTGACTCAGAACGTACTGTACGAGAACCAGAA
GCTCATCGCTAATCAATTTAACTCCGCTATCGGAAAAATCCAGGACAGCCTCTCTTCTACA
GCTAGCGCTCTGGGCAAACTGCAGGATGTCGTTAATCAtAATGCCCAGGCCCTGAACACC
TTGGTTAAACAACTATCTTCCAAaTTCGGGGCCATATCCAGTGTGTTGAATGATATTTTCTC
CCGCTTGGATccacctGAAGCTGAGGTGCAGATCGATCGCTTGATCACCGGCAGACTGCAG
TCCCTCCAGACATATGTAACTCAGCAGCTGATTAGAGCCGCCGAGATAAGGGCAAGTGC
GAATCTGGCTGCCACCAAGATGAGCGAATGTGTATTGGGCCAGAGCAAACGAGTTGATTT
TTGCGGTAAGGGGTATCATTTAATGTCTTTCCCTCAATCCGCACCTCATGGCGTAGTTTTC
CTGCATGTGACTTATGTCCCGGCTCAGGAGAAGAATTTTACCACAGCCCCCGCGATCTGC
CATGACGGAAAGGCCCACTTCCCCCGGGAAGGCGTGTTTGTATCCAATGGGACTCACTG
GTTTGTCACTCAGCGAAATTTTTATGAACCACAGATCATCACCACTGACAACACATTTGTT
AGTGGAAACTGCGATGTGGTCATCGGCATCGTGAATAACACTGTCTATGATCCACTGCAA
CCTGAACTGGATTCTTTTAAAGAGGAACTCGACAAGTATTTTAAAAACCACACTAGCCCTG
ACGTGGATCTCGGTGACATTTCTGGCATCAACGCTAGCGTAGTGAACATTCAGAAAGAGA
TAGATAGACTTAATGAGGTGGCCAAGAACCTCAACGAAAGTCTGATCGACCTCCAGGAAC
TGGGGAAATACGAGCAGTACATTAAATGGCCTTGGTACATATGGCTGGGGTTCATTGCTG
GGCTGATCGCAATAGTGATGGTGACCATAATGCTCTGTTGCATGACTAGCTGCTGCAGCT
GCCTGAAGGGCTGCTGTAGTTGTGGGTCATGTTGTAAGTTTGACGAAGATGATAGCGAG
CCTGTCCTTAAAGGAGTGAAGCTCCACTACACCTAGTAAttcgaacggccgtatcacgcccaaacatttac
agccgcggtgtcaaaaaccgcgtggacgtggttaacatccctgctgggaggatcagccgtaattattataattggcttggtgctggctacta
ttgtggccatgtacgtgctgaccaaccagaaacataattgaatacagcagcaattggcaagctgcttacatagaactcgcggcgattggca
tgccgccttaaaatttttattttattttttcttttcttttccgaatcggattttgtttttaatatttcaaaaaaaaaaaaaaaaaaaaaaaaaa
aaaaaaaaaaaaaaaaaaaaaaaaaaaaaaaaaaaaaaaaaaaaaaaaaaaaaaaaaaaaaaaaaaaaaaaaaaaaaaaaaaaaaaaaaaaaa
a
SARS-COV-2 Spike Nucleotide Sequence (SEQ ID NO: 27980)
(BA5 “Omicron” variant; modified); Includes mutations 679-682 RRAR [SEQ ID NO: 125] to
GSAS [SEQ ID NO: 126], K983P and V984P; sequence optimized based on CT1 sequence
optimization with relevant variant mutations replaced with COOL codons;
ATGTTTGTCTTCCTGGTCTTGCTGCCGCTcGTGtctAGCCAGTGCGTGAATCTCAtCAC
CCGCACCCAGtccTACACTAACAGCTTCACCCGAGGGGTGTATTACCCTGACAAGGT
ATTCCGGTCCTCCGTCCTCCATAGCACGCAGGACCTTTTTCTGCCCTTCTTCTCAAA
TGTGACATGGTTCCATGCCATTAGCGGCACGAATGGAACGAAGCGCTTTGATAACC
CCGTGCTGCCTTTCAATGACGGCGTCTACTTCGCCTCCACTGAAAAGTCAAACATC
ATCCGGGGCTGGATCTTTGGCACCACTCTTGATTCAAAGACCCAGTCACTGCTGATT
GTGAACAATGCTACAAACGTGGTTATCAAGGTGTGTGAGTTTCAGTTCTGTAACGA
TCCATTTTTGGatGTGTACTACCACAAGAACAACAAGTCCTGGATGGAGTCTGAGTT
CAGAGTGTATAGCTCTGCTAACAACTGCACCTTCGAGTACGTGTCCCAGCCTTTCCT
TATGGACCTGGAAGGCAAACAGGGCAATTTCAAAAACCTGAGAGAGTTCGTGTTTA
AGAACATTGACGGATACTTCAAAATTTATTCTAAGCACACACCAATTAACTTAGgtC
GGGACCTACCCCAAGGCTTTAGCGCCCTAGAGCCCCTGGTTGACCTGCCCATTGGG
ATCAATATAACAAGGTTCCAAACTCTACTGGCTCTGCATAGAAGTTATCTGACCCC
AGGAGACAGCTCTAGTGGTTGGACCGCCGGCGCAGCAGCCTACTATGTCGGGTACT
TACAGCCACGCACGTTCCTTCTGAAGTACAATGAGAACGGGACAATCACTGACGCA
GTAGACTGTGCACTGGACCCGCTAAGCGAGACTAAGTGCACACTTAAATCCTTCAC
GGTGGAGAAAGGCATTTATCAGACCTCTAACTTCAGGGTGCAGCCAACAGAAAGC
ATTGTGCGATTCCCAAATATTACTAATCTTTGCCCTTTCGacGAGGTCTTTAATGCAA
CTAGATTCGCATCAGTCTATGCGTGGAACCGCAAACGCATTTCCAATTGTGTCGCA
GACTACTCAGTGCTGTACAACT(TGCCCCTTTCttTgCGTTCAAGTGTTACGGAGTGTC
ACCCACTAAACTGAACGACCTGTGCTTTACAAATGTCTACGCTGACTCCTTCGTGAT
TAGGGGAaACGAGGTGAGtCAAATTGCCCCCGGACAGACTGGGAAcATTGCCGACT
ACAATTATAAGCTTCCTGATGATTTCACTGGCTGTGTTATTGCCTGGAATAGTAACA
AgCTGGATAGCAAGGTGGGAGGCAACTATAACTACaggTATCGACTGTTTAGGAAGA
GTAATCTGAAACCATTTGAGCGGGATATTTCCACAGAAATTTACCAGGCCGGGAaC
AaACCATGTAATGGGGTGGccGGAgtcAATTGTTACTTCCCACTCCaGAGCTATGGTTT
CagACCCACCtATGGAGTGGGTcACCAGCCCTATAGAGTCGTGGTGCTTAGTTTTGAG
CTGCTTCACGCCCCAGCAACCGTCTGCGGTCCCAAAAAGTCGACCAATCTCGTGAA
AAACAAATGCGTAAACTTCAACTTTAACGGCTTAACAGGAACCGGCGTGCTCACCG
AAAGCAACAAGAAATTCCTTCCATTTCAGCAATTCGGAAGGGACATCGCCGACACA
ACAGACGCGGTGAGGGACCCACAGACTCTGGAGATACTGGACATCACTCCTTGTTC
GTTTGGGGGCGTCTCGGTCATCACACCCGGGACTAATACTAGTAATCAGGTAGCAG
TTTTATATCAAGGCGTCAACTGTACCGAAGTACCTGTGGCCATACACGCTGATCAG
CTAACGCCAACATGGCGAGTCTATTCCACCGGCTCTAACGTTTTTCAGACCAGGGC
TGGGTGCCTGATAGGGGCAGAGtAtGTCAATAATTCCTATGAGTGTGATATCCCCAT
AGGTGCGGGGATCTGTGCCAGCTATCAAACCCAAACCAAaTCACacgGGaGcGCAaGc
TCTGTGGCTTCTCAGAGCATAATTGCATATACAATGTCACTGGGCGCTGAGAATAG
CGTTGCATACTCTAATAACAGCATAGCCATTCCCACGAACTTTACTATCAGTGTGAC
AACCGAAATATTGCCAGTTTCGATGACCAAAACTAGCGTGGATTGCACGATGTACA
TCTGTGGAGACTCTACCGAATGCAGCAATCTGCTATTACAATATGGCAGCTTCTGT
ACACAGTTAAAgCGAGCCTTGACAGGCATCGCAGTGGAACAGGACAAAAATACTC
AAGAGGTGTTTGCACAGGTGAAGCAAATCTACAAAACGCCCCCCATTAAAtATTTT
GGCGGGTTCAATTTTTCACAAATTCTCCCCGACCCGTCTAAGCCGAGTAAGCGGTC
CTTCATCGAAGATCTGCTCTTTAACAAAGTAACCCTCGCCGATGCCGGCTTTATTAA
GCAGTATGGCGACTGCCTGGGGGATATAGCCGCTCGTGACCTGATTTGCGCCCAGA
AGTTCAATGGTCTGACCGTGTTGCCTCCTTTATTGACCGATGAAATGATTGCCCAGT
ACACTAGTGCCCTGCTGGCCGGCACTATCACGTCTGGGTGGACCTTCGGAGCTGGT
GCCGCCTTGCAGATACCTTTTGCAATGCAGATGGCCTATAGGTTTAATGGTATCGG
AGTGACTCAGAACGTACTGTACGAGAACCAGAAGCTCATCGCTAATCAATTTAACT
CCGCTATCGGAAAAATCCAGGACAGCCTCTCTTCTACAGCTAGCGCTCTGGGCAAA
CTGCAGGATGTCGTTAATCAtAATGCCCAGGCCCTGAACACCTTGGTTAAACAACTA
TCTTCCAAgTTCGGGGCCATATCCAGTGTGTTGAATGATATTCTCTCCCGCTTGGATc
cacctGAAGCTGAGGTGCAGATCGATCGCTTGATCACCGGCAGACTGCAGTCCCTCCA
GACATATGTAACTCAGCAGCTGATTAGAGCCGCCGAGATAAGGGCAAGTGCGAAT
CTGGCTGCCACCAAGATGAGCGAATGTGTATTGGGCCAGAGCAAACGAGTTGATTT
TTGCGGTAAGGGGTATCATTTAATGTCTTTCCCTCAATCCGCACCTCATGGCGTAGT
TTTCCTGCATGTGACTTATGTCCCGGCTCAGGAGAAGAATTTTACCACAGCCCCCGC
GATCTGCCATGACGGAAAGGCCCACTTCCCCCGGGAAGGCGTGTTTGTATCCAATG
GGACTCACTGGTTTGTCACTCAGCGAAATTTTTATGAACCACAGATCATCACCACT
GACAACACATTTGTTAGTGGAAACTGCGATGTGGTCATCGGCATCGTGAATAACAC
TGTCTATGATCCACTGCAACCTGAACTGGATTCTTTTAAAGAGGAACTCGACAAGT
ATTTTAAAAACCACACTAGCCCTGACGTGGATCTCGGTGACATTTCTGGCATCAAC
GCTAGCGTAGTGAACATTCAGAAAGAGATAGATAGACTTAATGAGGTGGCCAAGA
ACCTCAACGAAAGTCTGATCGACCTCCAGGAACTGGGGAAATACGAGCAGTACAT
TAAATGGCCTTGGTACATATGGCTGGGGTTCATTGCTGGGCTGATCGCAATAGTGA
TGGTGACCATAATGCTCTGTTGCATGACTAGCTGCTGCAGCTGCCTGAAGGGCTGC
TGTAGTTGTGGGTCATGTTGTAAGTTTGACGAAGATGATAGCGAGCCTGTCCTTAA
AGGAGTGAAGCTCCACTACACCTAGTAA
SAM-N-TCE11-Spike-beta samRNA; SEQ ID NO: 27981; “GRT-R912”
atgggggcgcatgagagaagcccagaccaattacctacccaaaatggagaaagttcacgttgacatcgaggaagacagcccattcctc
agagctttgcagcggagcttcccgcagtttgaggtagaagccaagcaggtcactgataatgaccatgctaatgccagagcgttttcgcatc
tggcttcaaaactgatcgaaacggaggtggacccatccgacacgatccttgacattggaagtgcgcccgcccgcagaatgtattctaagc
acaagtatcattgtatctgtccgatgagatgtgcggaagatccggacagattgtataagtatgcaactaagctgaagaaaaactgtaaggaa
ataactgataaggaattggacaagaaaatgaaggagctcgccgccgtcatgagcgaccctgacctggaaactgagactatgtgcctcca
cgacgacgagtcgtgtcgctacgaagggcaagtcgctgtttaccaggatgtatacgcggttgacggaccgacaagtctctatcaccaagc
caataagggagttagagtcgcctactggataggctttgacaccaccccttttatgtttaagaacttggctggagcatatccatcatactctacc
aactgggccgacgaaaccgtgttaacggctcgtaacataggcctatgcagctctgacgttatggagcggtcacgtagagggatgtccatt
cttagaaagaagtatttgaaaccatccaacaatgttctattctctgttggctcgaccatctaccacgagaagagggacttactgaggagctgg
cacctgccgtctgtatttcacttacgtggcaagcaaaattacacatgtcggtgtgagactatagttagttgcgacgggtacgtcgttaaaaga
atagctatcagtccaggcctgtatgggaagccttcaggctatgctgctacgatgcaccgcgagggattcttgtgctgcaaagtgacagaca
cattgaacggggagagggtctcttttcccgtgtgcacgtatgtgccagctacattgtgtgaccaaatgactggcatactggcaacagatgtc
agtgcggacgacgcgcaaaaactgctggttgggctcaaccagcgtatagtcgtcaacggtcgcacccagagaaacaccaataccatga
aaaattaccttttgcccgtagtggcccaggcatttgctaggtgggcaaaggaatataaggaagatcaagaagatgaaaggccactaggac
tacgagatagacagttagtcatggggtgttgttgggcttttagaaggcacaagataacatctatttataagcgcccggatacccaaaccatca
tcaaagtgaacagcgatttccactcattcgtgctgcccaggataggcagtaacacattggagatcgggctgagaacaagaatcaggaaaa
tgttagaggagcacaaggagccgtcacctctcattaccgccgaggacgtacaagaagctaagtgcgcagccgatgaggctaaggaggt
gcgtgaagccgaggagttgcgcgcagctctaccacctttggcagctgatgttgaggagcccactctggaagccgatgtcgacttgatgtta
caagaggctggggccggctcagtggagacacctcgtggcttgataaaggttaccagctacgctggcgaggacaagatcggctcttacgc
tgtgctttctccgcaggctgtactcaagagtgaaaaattatcttgcatccaccctctcgctgaacaagtcatagtgataacacactctggccg
aaaagggcgttatgccgtggaaccataccatggtaaagtagtggtgccagagggacatgcaatacccgtccaggactttcaagctctgag
tgaaagtgccaccattgtgtacaacgaacgtgagttcgtaaacaggtacctgcaccatattgccacacatggaggagcgctgaacactgat
gaagaatattacaaaactgtcaagcccagcgagcacgacggcgaatacctgtacgacatcgacaggaaacagtgcgtcaagaaagaac
tagtcactgggctagggctcacaggcgagctggtggatcctcccttccatgaattcgcctacgagagtctgagaacacgaccagccgctc
cttaccaagtaccaaccataggggtgtatggcgtgccaggatcaggcaagtctggcatcattaaaagcgcagtcaccaaaaaagatctag
tggtgagcgccaagaaagaaaactgtgcagaaattataagggacgtcaagaaaatgaaagggctggacgtcaatgccagaactgtgga
ctcagtgctcttgaatggatgcaaacaccccgtagagaccctgtatattgacgaagcttttgcttgtcatgcaggtactctcagagcgctcat
agccattataagacctaaaaaggcagtgctctgcggggatcccaaacagtgcggtttttttaacatgatgtgcctgaaagtgcattttaacca
cgagatttgcacacaagtcttccacaaaagcatctctcgccgttgcactaaatctgtgacttcggtcgtctcaaccttgttttacgacaaaaaa
atgagaacgacgaatccgaaagagactaagattgtgattgacactaccggcagtaccaaacctaagcaggacgatctcattctcacttgttt
cagagggtgggtgaagcagttgcaaatagattacaaaggcaacgaaataatgacggcagctgcctctcaagggctgacccgtaaaggt
gtgtatgccgttcggtacaaggtgaatgaaaatcctctgtacgcacccacctcagaacatgtgaacgtcctactgacccgcacggaggac
cgcatcgtgtggaaaacactagccggcgacccatggataaaaacactgactgccaagtaccctgggaatttcactgccacgatagagga
gtggcaagcagagcatgatgccatcatgaggcacatcttggagagaccggaccctaccgacgtcttccagaataaggcaaacgtgtgtt
gggccaaggctttagtgccggtgctgaagaccgctggcatagacatgaccactgaacaatggaacactgtggattattttgaaacggaca
aagctcactcagcagagatagtattgaaccaactatgcgtgaggttctttggactcgatctggactccggtctattttctgcacccactgttcc
gttatccattaggaataatcactgggataactccccgtcgcctaacatgtacgggctgaataaagaagtggtccgtcagctctctcgcaggt
acccacaactgcctcgggcagttgccactggaagagtctatgacatgaacactggtacactgcgcaattatgatccgcgcataaacctagt
acctgtaaacagaagactgcctcatgctttagtcctccaccataatgaacacccacagagtgacttttcttcattcgtcagcaaattgaaggg
cagaactgtcctggtggtcggggaaaagttgtccgtcccaggcaaaatggttgactggttgtcagaccggcctgaggctaccttcagagct
cggctggatttaggcatcccaggtgatgtgcccaaatatgacataatatttgttaatgtgaggaccccatataaataccatcactatcagcagt
gtgaagaccatgccattaagcttagcatgttgaccaagaaagcttgtctgcatctgaatcccggcggaacctgtgtcagcataggttatggtt
acgctgacagggccagcgaaagcatcattggtgctatagcgcggcagttcaagttttcccgggtatgcaaaccgaaatcctcacttgaag
agacggaagttctgtttgtattcattgggtacgatcgcaaggcccgtacgcacaatccttacaagctttcatcaaccttgaccaacatttatac
aggttccagactccacgaagccggatgtgcaccctcatatcatgtggtgcgaggggatattgccacggccaccgaaggagtgattataaa
tgctgctaacagcaaaggacaacctggcggaggggtgtgcggagcgctgtataagaaattcccggaaagcttcgatttacagccgatcg
aagtaggaaaagcgcgactggtcaaaggtgcagctaaacatatcattcatgccgtaggaccaaacttcaacaaagtttcggaggttgaag
gtgacaaacagttggcagaggcttatgagtccatcgctaagattgtcaacgataacaattacaagtcagtagcgattccactgttgtccacc
ggcatcttttccgggaacaaagatcgactaacccaatcattgaaccatttgctgacagctttagacaccactgatgcagatgtagccatatac
tgcagggacaagaaatgggaaatgactctcaaggaagcagtggctaggagagaagcagtggaggagatatgcatatccgacgactctt
cagtgacagaacctgatgcagagctggtgagggtgcatccgaagagttctttggctggaaggaagggctacagcacaagcgatggcaa
aactttctcatatttggaagggaccaagtttcaccaggcggccaaggatatagcagaaattaatgccatgtggcccgttgcaacggaggcc
aatgagcaggtatgcatgtatatcctcggagaaagcatgagcagtattaggtcgaaatgccccgtcgaagagtcggaagcctccacacca
cctagcacgctgccttgcttgtgcatccatgccatgactccagaaagagtacagcgcctaaaagcctcacgtccagaacaaattactgtgt
gctcatcctttccattgccgaagtatagaatcactggtgtgcagaagatccaatgctcccagcctatattgttctcaccgaaagtgcctgcgta
tattcatccaaggaagtatctcgtggaaacaccaccggtagacgagactccggagccatcggcagagaaccaatccacagaggggaca
cctgaacaaccaccacttataaccgaggatgagaccaggactagaacgcctgagccgatcatcatcgaagaggaagaagaggatagca
taagtttgctgtcagatggcccgacccaccaggtgctgcaagtcgaggcagacattcacgggccgccctctgtatctagctcatcctggtc
cattcctcatgcatccgactttgatgtggacagtttatccatacttgacaccctggagggagctagcgtgaccagcggggcaacgtcagcc
gagactaactcttacttcgcaaagagtatggagtttctggcgcgaccggtgcctgcgcctcgaacagtattcaggaaccctccacatcccg
ctccgcgcacaagaacaccgtcacttgcacccagcagggcctgctcgagaaccagcctagtttccaccccgccaggcgtgaatagggt
gatcactagagaggagctcgaggcgcttaccccgtcacgcactcctagcaggtcggtctcgagaaccagcctggtctccaacccgccag
gcgtaaatagggtgattacaagagaggagtttgaggcgttcgtagcacaacaacaatgacggtttgatgcgggtgcatacatcttttcctcc
gacaccggtcaagggcatttacaacaaaaatcagtaaggcaaacggtgctatccgaagtggtgttggagaggaccgaattggagatttcg
tatgccccgcgcctcgaccaagaaaaagaagaattactacgcaagaaattacagttaaatcccacacctgctaacagaagcagataccag
tccaggaaggtggagaacatgaaagccataacagctagacgtattctgcaaggcctagggcattatttgaaggcagaaggaaaagtgga
gtgctaccgaaccctgcatcctgttcctttgtattcatctagtgtgaaccgtgccttttcaagccccaaggtcgcagtggaagcctgtaacgc
catgttgaaagagaactttccgactgtggcttcttactgtattattccagagtacgatgcctatttggacatggttgacggagcttcatgctg
cttagacactgccagtttttgccctgcaaagctgcgcagctttccaaagaaacactcctatttggaacccacaatacgatcggcagtgccttca
gcgatccagaacacgctccagaacgtcctggcagctgccacaaaaagaaattgcaatgtcacgcaaatgagagaattgcccgtattggatt
cggcggcctttaatgtggaatgcttcaagaaatatgcgtgtaataatgaatattgggaaacgtttaaagaaaaccccatcaggcttactgaag
aaaacgtggtaaattacattaccaaattaaaaggaccaaaagctgctgctctttttgcgaagacacataatttgaatatgttgcaggacatacc
aatggacaggtttgtaatggacttaaagagagacgtgaaagtgactccaggaacaaaacatactgaagaacggcccaaggtacaggtga
tccaggctgccgatccgctagcaacagcgtatctgtgcggaatccaccgagagctggttaggagattaaatgcggtcctgcttccgaacat
tcatacactgtttgatatgtcggctgaagactttgacgctattatagccgagcacttccagcctggggattgtgttctggaaactgacatcgcg
tcgtttgataaaagtgaggacgacgccatggctctgaccgcgttaatgattctggaagacttaggtgtggacgcagagctgttgacgctgat
tgaggcggctttcggcgaaatttcatcaatacatttgcccactaaaactaaatttaaattcggagccatgatgaaatctggaatgttcctcaca
ctgtttgtgaacacagtcattaacattgtaatcgcaagcagagtgttgagagaacggctaaccggatcaccatgtgcagcattcattggaga
tgacaatatcgtgaaaggagtcaaatcggacaaattaatggcagacaggtgcgccacctggttgaatatggaagtcaagattatagatgct
gtggtgggcgagaaagcgccttatttctgtggagggtttattttgtgtgactccgtgaccggcacagcgtgccgtgtggcagaccccctaa
aaaggctgtttaagcttggcaaacctctggcagcagacgatgaacatgatgatgacaggagaagggcattgcatgaagagtcaacacgc
tggaaccgagtgggtattctttcagagctgtgcaaggcagtagaatcaaggtatgaaaccgtaggaacttccatcatagttatggccatgac
tactctagctagcagtgttaaatcattcagctacctgagaggggcccctataactctctacggctaacctgaatggactacgactctagaata
gtctttaattaaGCCACCATGTCAGATAATGGGCCTCAGAACCAGCGGAATGCCCCCAGGA
TCACGTTCGGTGGGCCTTCAGATTCAACTGGAAGCAATCAGAACGGGGAAAGATCC
GGTGCAAGGTCCAAGCAACGCCGACCCCAGGGATTGCCTAATAATACAGCAAGTT
GGTTTACTGCACTGACCCAACACGGGAAAGAGGACCTTAAATTTCCGCGGGGGCA
AGGAGTACCTATAAACACTAATAGCAGCCCCGATGACCAAATTGGGTACTACCGCA
GAGCAACCCGGCGAATCAGAGGGGGTGACGGTAAGATGAAGGACCTCTCCCCCAG
GTGGTACTTCTACTATTTGGGAACGGGGCCAGAAGCCGGACTGCCCTACGGCGCAA
AcAAAGACGGTATAATATGGGTCGCCACTGAGGGCGCTCTGAATACGCCAAAAGAT
CACATTGGTACTAGAAACCCGGCGAACAATGCGGCAATTGTGCTTCAGCTCCCTCA
AGGAACAACGTTGCCAAAAGGATTTTACGCAGAGGGATCACGGGGGGGTTCCCAG
GCTAGTTCTCGCAGTTCCTCAAGGAGTCGAAATTCCAGTAGGAAcTCAACCCCAGG
CTCAAGCCGCGGGACTTCACCTGCAAGAATGGCCGGTAACGGGGGAGACGCTGCT
TTGGCTCTTCTTCTCCTTGATCGCCTTAATCAGCTTGAGTCTAAGATGTCTGGTAAA
GGCCAACAGCAACAAGGACAGACGGTAACGAAAAAATCCGCCGCCGAGGCCTCTA
AAAAACCGAGACAAAAACGGACTGCTACGAAAGCGTATAACGTCACTCAGGCTTT
TGGTAGGCGGGGCCCGGAACAAACCCAGGGTAATTTTGGCGATCAGGAACTGATT
AGACAAGGCACCGACTACAAGCACTGGCCTCAGATCGCGCAGTTTGCACCCTCCGC
TTCAGCGTTCTTCGGGATGTCACGCATCGGGATGGAGGTTACACCGAGTGGAACAT
GGCTGACATATACTGGTGCAATcAAGCTGGACGACAAGGATCCCAACTTCAAAGAT
CAAGTTATACTCCTCAACAAACATATCGATGCGTATAAGACATTCCCCCCGACGGA
ACCCAAAAAAGATAAAAAAAAGAAGGCCGACGAGACCCAAGCCCTCCCACAACG
ACAAAAGAAACAACAAACAGTAACACTGCTCCCAGCCGCAGACTTGGATGATTTCT
CCAAACAGTTGCAGCAATCTATGAGTTCAGCCGATAGTACTCAGGCCGGCGGTTCT
GGAGGTGTCCGTGCTGAAGGACGCGGGTCCCTTCTCACCTGCGGCGACGTTGAGGA
AAACCCTGGCCCTATGGCTGGCAACGTAGCTTTCCAGACCGTGAAGCCGGGAAATT
TCAACAAGGACTTCTACGACTTCGCCGTCAGCAAGGGATTCTTTAAAGAAGGAAGC
TCCGGTGCCAGTCAGAGAGTCGCCGGCGACTCAGGCTTTGCCGCGTATAGCCGATA
TCGGATTGGCAATGACGGTGTCCCGTTCGTGGTCTCGACCGGATATCACTTCCGTG
AACTAGGGGTATATCTGACCTTCTACTTGACGAACGACGTGTCGTTCCTAGCGCAT
ATTCAATGGATGGTCATGTTCACGCCAGGCTTAATGTGGCTGTCTTATTTCATCGCC
TCTTTTAGACTGTTCGCTAGGACAAGGAGCATGTTTGAGTATTACCACACTACTGAC
CCCAGTTTTCTAGGACGCTACATGAGTGCTTTGAATCATACCAAGAAGTGGAAATA
CCCACAGATTTCCAATGAGAAGCAGGAGATCCTTGGAACAGTTAGTTGGAATTTGA
GGGAAGCCACGACGAGACAGGTTGTGAACGTGGTTACGACAAAAATCGCACTGAA
GACACTAGCCTGCTTCGTGCTGGCCGCCGTTTACCGCATCAATTGGATTACCGGAC
CCGGACCAGGCGCCAAATTTGTTGCTGCTTGGACACTGAAAGCTGCTGCTGGGCCC
GGACCAGGCCAGTACATCAAGGCCAACTCTAAGTTTATCGGCATCACCGAATTGGG
ACCTGGACCCGGCTAGTGAttcgaagggcccctataactctctacggctaacctgaatggactacgacatagtctagtcc
gccaagGCCACCATGTTTGTCTTCCTGGTCTTGCTGCCGCTGGTGAGCAGCCAGTGCGT
GAATTTCACCACCCGCACCCAGCTTCCACCTGCCTACACTAACAGCTTCACCCGAGG
GGTGTATTACCCTGACAAGGTATTCCGGTCCTCCGTCCTCCATAGCACGCAGGACC
TTTTTCTGCCCTTCTTCTCAAATGTGACATGGTTCCATGCCATTCACGTGAGCGGCA
CGAATGGAACGAAGCGCTTTGcTAACCCCGTGCTGCCTTTCAATGACGGCGTCTACT
TCGCCTCCACTGAAAAGTCAAACATCATCCGGGGCTGGATCTTTGGCACCACTCTT
GATTCAAAGACCCAGTCACTGCTGATTGTGAACAATGCTACAAACGTGGTTATCAA
GGTGTGTGAGTTTCAGTTCTGTAACGATCCATTTTTGGGAGTGTACTACCACAAGA
ACAACAAGTCCTGGATGGAGTCTGAGTTCAGAGTGTATAGCTCTGCTAACAACTGC
ACCTTCGAGTACGTGTCCCAGCCTTTCCTTATGGACCTGGAAGGCAAACAGGGCAA
TTTCAAAAACCTGAGAGAGTTCGTGTTTAAGAACATTGACGGATACTTCAAAATTT
ATTCTAAGCACACACCAATTAACTTAGTGCGGGgCCTACCCCAAGGCTTTAGCGCC
CTAGAGCCCCTGGTTGACCTGCCCATTGGGATCAATATAACAAGGTTCCAAACTCT
ACATAtAAGTTATCTGACCCCAGGAGACAGCTCTAGTGGTTGGACCGCCGGCGCAG
CAGCCTACTATGTCGGGTACTTACAGCCACGCACGTTCCTTCTGAAGTACAATGAG
AACGGGACAATCACTGACGCAGTAGACTGTGCACTGGACCCGCTAAGCGAGACTA
AGTGCACACTTAAATCCTTCACGGTGGAGAAAGGCATTTATCAGACCTCTAACTTC
AGGGTGCAGCCAACAGAAAGCATTGTGCGATTCCCAAATATTACTAATCTTTGCCC
TTTCGGGGAGGTCTTTAATGCAACTAGATTCGCATCAGTCTATGCGTGGAACCGCA
AACGCATTTCCAATTGTGTCGCAGACTACTCAGTGCTGTACAACTCTGCCTCTTTCA
GTACGTTCAAGTGTTACGGAGTGTCACCCACTAAACTGAACGACCTGTGCTTTACA
AATGTCTACGCTGACTCCTTCGTGATTAGGGGAGACGAGGTGAGACAAATTGCCCC
CGGACAGACTGGGAAtATTGCCGACTACAATTATAAGCTTCCTGATGATTTCACTGG
CTGTGTTATTGCCTGGAATAGTAACAATCTGGATAGCAAGGTGGGAGGCAACTATA
ACTACTTATATCGACTGTTTAGGAAGAGTAATCTGAAACCATTTGAGCGGGATATT
TCCACAGAAATTTACCAGGCCGGGAGCACACCATGTAATGGGGTGaAGGGATTTAA
TTGTTACTTCCCACTCCAGAGCTATGGTTTCCAACCCACCtATGGAGTGGGTTACCA
GCCCTATAGAGTCGTGGTGCTTAGTTTTGAGCTGCTTCACGCCCCAGCAACCGTCTG
CGGTCCCAAAAAGTCGACCAATCTCGTGAAAAACAAATGCGTAAACTTCAACTTTA
ACGGCTTAACAGGAACCGGCGTGCTCACCGAAAGCAACAAGAAATTCCTTCCATTT
CAGCAATTCGGAAGGGACATCGCCGACACAACAGACGCGGTGAGGGACCCACAGA
CTCTGGAGATACTGGACATCACTCCTTGTTCGTTTGGGGGCGTCTCGGTCATCACAC
CCGGGACTAATACTAGTAATCAGGTAGCAGTTTTATATCAAGGCGTCAACTGTACC
GAAGTACCTGTGGCCATACACGCTGATCAGCTAACGCCAACATGGCGAGTCTATTC
CACCGGCTCTAACGTTTTTCAGACCAGGGCTGGGTGCCTGATAGGGGCAGAGCACG
TCAATAATTCCTATGAGTGTGATATCCCCATAGGTGCGGGGATCTGTGCCAGCTAT
CAAACCCAAACCAATTCACCAgGGaGcGCAaGcTCTGTGGCTTCTCAGAGCATAATTG
CATATACAATGTCACTGGGCGTGAGAATAGCGTTGCATACTCTAATAACAGCATA
GCCATTCCCACGAACTTTACTATCAGTGTGACAACCGAAATATTGCCAGTTTCGAT
GACCAAAACTAGCGTGGATTGCACGATGTACATCTGTGGAGACTCTACCGAATGCA
GCAATCTGCTATTACAATATGGCAGCTTCTGTACACAGTTAAATCGAGCCTTGACA
GGCATCGCAGTGGAACAGGACAAAAATACTCAAGAGGTGTTTGCACAGGTGAAGC
AAATCTACAAAACGCCCCCCATTAAAGATTTTGGCGGGTTCAATTTTTCACAAATTC
TCCCCGACCCGTCTAAGCCGAGTAAGCGGTCCTTCATCGAAGATCTGCTCTTTAAC
AAAGTAACCCTCGCCGATGCCGGCTTTATTAAGCAGTATGGCGACTGCCTGGGGGA
TATAGCCGCTCGTGACCTGATTTGCGCCCAGAAGTTCAATGGTCTGACCGTGTTGCC
TCCTTTATTGACCGATGAAATGATTGCCCAGTACACTAGTGCCCTGCTGGCCGGCA
CTATCACGTCTGGGTGGACCTTCGGAGCTGGTGCCGCCTTGCAGATACCTTTTGCAA
TGCAGATGGCCTATAGGTTTAATGGTATCGGAGTGACTCAGAACGTACTGTACGAG
AACCAGAAGCTCATCGCTAATCAATTTAACTCCGCTATCGGAAAAATCCAGGACAG
CCTCTCTTCTACAGCTAGCGCTCTGGGCAAACTGCAGGATGTCGTTAATCAGAATG
CCCAGGCCCTGAACACCTTGGTTAAACAACTATCTTCCAACTTCGGGGCCATATCC
AGTGTGTTGAATGATATTCTCTCCCGCTTGGATccacctGAAGCTGAGGTGCAGATCGA
TCGCTTGATCACCGGCAGACTGCAGTCCCTCCAGACATATGTAACTCAGCAGCTGA
TTAGAGCCGCCGAGATAAGGGCAAGTGCGAATCTGGCTGCCACCAAGATGAGCGA
ATGTGTATTGGGCCAGAGCAAACGAGTTGATTTTTGCGGTAAGGGGTATCATTTAA
TGTCTTTCCCTCAATCCGCACCTCATGGCGTAGTTTTCCTGCATGTGACTTATGTCCC
GGCTCAGGAGAAGAATTTTACCACAGCCCCCGCGATCTGCCATGACGGAAAGGCC
CACTTCCCCCGGGAAGGCGTGTTTGTATCCAATGGGACTCACTGGTTTGTCACTCAG
CGAAATTTTTATGAACCACAGATCATCACCACTGACAACACATTTGTTAGTGGAAA
CTGCGATGTGGTCATCGGCATCGTGAATAACACTGTCTATGATCCACTGCAACCTG
AACTGGATTCTTTTAAAGAGGAACTCGACAAGTATTTTAAAAACCACACTAGCCCT
GACGTGGATCTCGGTGACATTTCTGGCATCAACGCTAGCGTAGTGAACATTCAGAA
AGAGATAGATAGACTTAATGAGGTGGCCAAGAACCTCAACGAAAGTCTGATCGAC
CTCCAGGAACTGGGGAAATACGAGCAGTACATTAAATGGCCTTGGTACATATGGCT
GGGGTTCATTGCTGGGCTGATCGCAATAGTGATGGTGACCATAATGCTCTGTTGCA
TGACTAGCTGCTGCAGCTGCCTGAAGGGCTGCTGTAGTTGTGGGTCATGTTGTAAG
TTTGACGAAGATGATAGCGAGCCTGTCCTTAAAGGAGTGAAGCTCCACTACACCTA
GTAAttcgaacggccgtatcacgcccaaacatttacagccgcggtgtcaaaaaccgcgtggacgtggttaacatccctgctgggagg
atcagccgtaattattataattggcttggtgctggctactattgtggccatgtacgtgctgaccaaccagaaacataattgaatacagcagcaa
ttggcaagctgcttacatagaactcgcggcgattggcatgccgccttaaaatttttattttattttttcttttttttccgaatcggattttgtt
tttaatatttcaaaaaaaaaaaaaaaaaaaaaaaaaaaaaaaaaaaaaaaaaaaaaaaaaaaaaaaaaaaaaaaaaaaaaaaaaaaaaaaa
SAM-TCE9-Spike-beta samRNA; SEQ ID NO: 27982 (TCE9 in bold; Spike in italic); “GRT-
R914”
atgggcggcgcatgagagaagcccagaccaattacctacccaaaatggagaaagttcacgttgacatcgaggaagacagcccattcctc
agagctttgcagcggagcttcccgcagtttgaggtagaagccaagcaggtcactgataatgaccatgctaatgccagagcgttttcgcatc
tggcttcaaaactgatcgaaacggaggtggacccatccgacacgatccttgacattggaagtgcgcccgcccgcagaatgtattctaagc
acaagtatcattgtatctgtccgatgagatgtgcggaagatccggacagattgtataagtatgcaactaagctgaagaaaaactgtaaggaa
ataactgataaggaattggacaagaaaatgaaggagctcgccgccgtcatgagcgaccctgacctggaaactgagactatgtgcctcca
cgacgacgagtcgtgtcgctacgaagggcaagtcgctgtttaccaggatgtatacgcggttgacggaccgacaagtctctatcaccaagc
caataagggagttagagtcgcctactggataggctttgacaccaccccttttatgtttaagaacttggctggagcatatccatcatactctacc
aactgggccgacgaaaccgtgttaacggctcgtaacataggcctatgcagctctgacgttatggagcggtcacgtagagggatgtccatt
cttagaaagaagtatttgaaaccatccaacaatgttctattctctgttggctcgaccatctaccacgagaagagggacttactgaggagctgg
cacctgccgtctgtatttcacttacgtggcaagcaaaattacacatgtcggtgtgagactatagttagttgcgacgggtacgtcgttaaaaga
atagctatcagtccaggcctgtatgggaagccttcaggctatgctgctacgatgcaccgcgagggattcttgtgctgcaaagtgacagaca
cattgaacggggagagggtctcttttcccgtgtgcacgtatgtgccagctacattgtgtgaccaaatgactggcatactggcaacagatgtc
agtgcggacgacgcgcaaaaactgctggttgggctcaaccagcgtatagtcgtcaacggtcgcacccagagaaacaccaataccatga
aaaattaccttttgcccgtagtggcccaggcatttgctaggtgggcaaaggaatataaggaagatcaagaagatgaaaggccactaggac
tacgagatagacagttagtcatggggtgttgttgggcttttagaaggcacaagataacatctatttataagcgcccggatacccaaaccatca
tcaaagtgaacagcgatttccactcattcgtgctgcccaggataggcagtaacacattggagatcgggctgagaacaagaatcaggaaaa
tgttagaggagcacaaggagccgtcacctctcattaccgccgaggacgtacaagaagctaagtgcgcagccgatgaggctaaggaggt
gcgtgaagccgaggagttgcgcgcagctctaccacctttggcagctgatgttgaggagcccactctggaagccgatgtcgacttgatgtta
caagaggctggggccggctcagtggagacacctcgtggcttgataaaggttaccagctacgctggcgaggacaagatcggctcttacgc
tgtgctttctccgcaggctgtactcaagagtgaaaaattatcttgcatccaccctctcgctgaacaagtcatagtgataacacactctggccg
aaaagggcgttatgccgtggaaccataccatggtaaagtagtggtgccagagggacatgcaatacccgtccaggactttcaagctctgag
tgaaagtgccaccattgtgtacaacgaacgtgagttcgtaaacaggtacctgcaccatattgccacacatggaggagcgctgaacactgat
gaagaatattacaaaactgtcaagcccagcgagcacgacggcgaatacctgtacgacatcgacaggaaacagtgcgtcaagaaagaac
tagtcactgggctagggctcacaggcgagctggtggatcctcccttccatgaattcgcctacgagagtctgagaacacgaccagccgctc
cttaccaagtaccaaccataggggtgtatggcgtgccaggatcaggcaagtctggcatcattaaaagcgcagtcaccaaaaaagatctag
tggtgagcgccaagaaagaaaactgtgcagaaattataagggacgtcaagaaaatgaaagggctggacgtcaatgccagaactgtgga
ctcagtgctcttgaatggatgcaaacaccccgtagagaccctgtatattgacgaagcttttgcttgtcatgcaggtactctcagagcgctcat
agccattataagacctaaaaaggcagtgctctgcggggatcccaaacagtgcggtttttttaacatgatgtgcctgaaagtgcattttaacca
cgagatttgcacacaagtcttccacaaaagcatctctcgccgttgcactaaatctgtgacttcggtcgtctcaaccttgttttacgacaaaaaa
atgagaacgacgaatccgaaagagactaagattgtgattgacactaccggcagtaccaaacctaagcaggacgatctcattctcacttgttt
cagaggggggtgaagcagttgcaaatagattacaaaggcaacgaaataatgacggcagctgcctctcaagggctgacccgtaaaggt
gtgtatgccgttcggtacaaggtgaatgaaaatcctctgtacgcacccacctcagaacatgtgaacgtcctactgacccgcacggaggac
cgcatcgtgtggaaaacactagccggcgacccatggataaaaacactgactgccaagtaccctgggaatttcactgccacgatagagga
gtggcaagcagagcatgatgccatcatgaggcacatcttggagagaccggaccctaccgacgtcttccagaataaggcaaacgtgtgtt
gggccaaggctttagtgccggtgctgaagaccgctggcatagacatgaccactgaacaatggaacactgtggattattttgaaacggaca
aagctcactcagcagagatagtattgaaccaactatgcgtgaggttctttggactcgatctggactccggtctattttctgcacccactgttcc
gttatccattaggaataatcactgggataactccccgtcgcctaacatgtacgggctgaataaagaagtggtccgtcagctctctcgcaggt
acccacaactgcctcgggcagttgccactggaagagtctatgacatgaacactggtacactgcgcaattatgatccgcgcataaacctagt
acctgtaaacagaagactgcctcatgctttagtcctccaccataatgaacacccacagagtgacttttcttcattcgtcagcaaattgaaggg
cagaactgtcctggtggtcggggaaaagttgtccgtcccaggcaaaatggttgactggttgtcagaccggcctgaggctaccttcagagct
cggctggatttaggcatcccaggtgatgtgcccaaatatgacataatatttgttaatgtgaggaccccatataaataccatcactatcagcagt
gtgaagaccatgccattaagcttagcatgttgaccaagaaagcttgtctgcatctgaatcccggcggaacctgtgtcagcataggttatggtt
acgctgacagggccagcgaaagcatcattggtgctatagcgcggcagttcaagttttcccgggtatgcaaaccgaaatcctcacttgaag
agacggaagttctgtttgtattcattgggtacgatcgcaaggcccgtacgcacaatccttacaagctttcatcaaccttgaccaacatttatac
aggttccagactccacgaagccggatgtgcaccctcatatcatgtggtgcgaggggatattgccacggccaccgaaggagtgattataaa
tgctgctaacagcaaaggacaacctggcggaggggtgtgcggagcgctgtataagaaattcccggaaagcttcgatttacagccgatcg
aagtaggaaaagcgcgactggtcaaaggtgcagctaaacatatcattcatgccgtaggaccaaacttcaacaaagtttcggaggttgaag
gtgacaaacagttggcagaggcttatgagtccatcgctaagattgtcaacgataacaattacaagtcagtagcgattccactgttgtccacc
ggcatcttttccgggaacaaagatcgactaacccaatcattgaaccatttgctgacagctttagacaccactgatgcagatgtagccatatac
tgcagggacaagaaatgggaaatgactctcaaggaagcagtggctaggagagaagcagtggaggagatatgcatatccgacgactctt
cagtgacagaacctgatgcagagctggtgagggtgcatccgaagagttctttggctggaaggaagggctacagcacaagcgatggcaa
aactttctcatatttggaagggaccaagtttcaccaggcggccaaggatatagcagaaattaatgccatgtggcccgttgcaacggaggcc
aatgagcaggtatgcatgtatatcctcggagaaagcatgagcagtattaggtcgaaatgccccgtcgaagagtcggaagcctccacacca
cctagcacgctgccttgcttgtgcatccatgccatgactccagaaagagtacagcgcctaaaagcctcacgtccagaacaaattactgtgt
gctcatcctttccattgccgaagtatagaatcactggtgtgcagaagatccaatgctcccagcctatattgttctcaccgaaagtgcctgcgta
tattcatccaaggaagtatctcgtggaaacaccaccggtagacgagactccggagccatcggcagagaaccaatccacagaggggaca
cctgaacaaccaccacttataaccgaggatgagaccaggactagaacgcctgagccgatcatcatcgaagaggaagaagaggatagca
taagtttgctgtcagatggcccgacccaccaggtgctgcaagtcgaggcagacattcacgggccgccctctgtatctagctcatcctggtc
cattcctcatgcatccgactttgatgtggacagtttatccatacttgacaccctggagggagctagcgtgaccagcggggcaacgtcagcc
gagactaactcttacttcgcaaagagtatggagtttctggcgcgaccggtgcctgcgcctcgaacagtattcaggaaccctccacatcccg
ctccgcgcacaagaacaccgtcacttgcacccagcagggcctgctcgagaaccagcctagtttccaccccgccaggcgtgaatagggt
gatcactagagaggagctcgaggcgcttaccccgtcacgcactcctagcaggtcggtctcgagaaccagcctggtctccaacccgccag
gcgtaaatagggtgattacaagagaggagtttgaggcgttcgtagcacaacaacaatgacggtttgatgcgggtgcatacatcttttcctcc
gacaccggtcaagggcatttacaacaaaaatcagtaaggcaaacggtgctatccgaagtggtgttggagaggaccgaattggagatttcg
tatgccccgcgcctcgaccaagaaaaagaagaattactacgcaagaaattacagttaaatcccacacctgctaacagaagcagataccag
tccaggaaggtggagaacatgaaagccataacagctagacgtattctgcaaggcctagggcattatttgaaggcagaaggaaaagtgga
gtgctaccgaaccctgcatcctgttcctttgtattcatctagtgtgaaccgtgccttttcaagccccaaggtcgcagtggaagcctgtaacgc
catgttgaaagagaactttccgactgtggcttcttactgtattattccagagtacgatgcctatttggacatggttgacggagcttcatgctgc
ttagacactgccagtttttgccctgcaaagctgcgcagctttccaaagaaacactcctatttggaacccacaatacgatcggcagtgccttcag
cgatccagaacacgctccagaacgtcctggcagctgccacaaaaagaaattgcaatgtcacgcaaatgagagaattgcccgtattggatt
cggcggcctttaatgtggaatgcttcaagaaatatgcgtgtaataatgaatattgggaaacgtttaaagaaaaccccatcaggcttactgaag
aaaacgtggtaaattacattaccaaattaaaaggaccaaaagctgctgctctttttgcgaagacacataatttgaatatgttgcaggacatacc
aatggacaggtttgtaatggacttaaagagagacgtgaaagtgactccaggaacaaaacatactgaagaacggcccaaggtacaggtga
tccaggctgccgatccgctagcaacagcgtatctgtgcggaatccaccgagagctggttaggagattaaatgcggtcctgcttccgaacat
tcatacactgtttgatatgtcggctgaagactttgacgctattatagccgagcacttccagcctggggattgtgttctggaaactgacatcgcg
tcgtttgataaaagtgaggacgacgccatggctctgaccgcgttaatgattctggaagacttaggtgtggacgcagagctgttgacgctgat
tgaggcggctttcggcgaaatttcatcaatacatttgcccactaaaactaaatttaaattcggagccatgatgaaatctggaatgttcctcaca
ctgtttgtgaacacagtcattaacattgtaatcgcaagcagagtgttgagagaacggctaaccggatcaccatgtgcagcattcattggaga
tgacaatatcgtgaaaggagtcaaatcggacaaattaatggcagacaggtgcgccacctggttgaatatggaagtcaagattatagatgct
gtggtgggcgagaaagcgccttatttctgtggagggtttattttgtgtgactccgtgaccggcacagcgtgccgtgtggcagaccccctaa
aaaggctgtttaagcttggcaaacctctggcagcagacgatgaacatgatgatgacaggagaagggcattgcatgaagagtcaacacgc
tggaaccgagtgggtattctttcagagctgtgcaaggcagtagaatcaaggtatgaaaccgtaggaacttccatcatagttatggccatgac
tactctagctagcagtgttaaatcattcagctacctgagaggggcccctataactctctacggctaacctgaatggactacgactctagaata
gtctttaattaaGCCACCATGGCTGGCGGTCCCCTGGTGAGAAAAATCTTCGTAGACGG
AGTGCCATTTGTGGTGTCTACCGGCTACCACTTTAGAGAGCTGGGGGTGCCCG
TCTACTCTTTCCTGCCTGGCGTCTACAGCGTCATTTATCTGTATCTCACCTTCT
ACCTGACAAATGATGTGAGTTTCCTGGCCCACATCCAGTGGATGGTCATGTTT
ACTCCTGGACTGATGTGGCTCAGCTACTTTATCGCGAGCTTTAGGCTCTTCGC
CCGCACGAGGTCCATGAATAATTTGGACAAGTCCGCTGGGTTCCCTTTCAACA
AATGGGGAAAGGCCCGGGCCACCACTCGTCAAGTTGTGAACGTCGTGACCAC
CAAAATTGCTCTGAAGACACTAGCCTGCTTCGTGCTGGCCGCCGTGTATAGAA
TCAACTGGATCACCGGAGGCCCATACCCTAATGCATCCTTCGATAACTTCAAG
TTTGTCTGTGACAACATTACCTACAACAAGGTGGAGAATATGACCCCACGCGA
TCTCGGCGCATGCATCGTGAGGGCTACCGCTACAATCCCCATCCAGGCCTCTC
TGCCATTCGGCTGGCTGATCGTGGGTGTGGCCCTGAACTTTAATAAAGACTTC
TATGACTTCGCCGTCTCTAAGGGGTTTTTCAAGGAGGGCTCATCTGGAGGCGA
TGGCAAGATGAAGGACCTGTCTCCTCGCTGGTACTTTTACTACCTGGGAACCG
GACCCAAACAGGGCGACGATTACGTCTATTTGCCTTACCCTGACCCTAGCAGA
ATCTTGGGCGCTGGATGCCACATCGATGCCTATAAGACATTTCCCCCTACGGA
GCCCAAGAAGGACAAAAAGAAGAAAGCAGACGAGTGTCGGAGCAAAAACCCC
CTGCTGTACGATGCCAATTACTTCCTGTGCTGGAGCCTCGCTACCGTGGCATA
TTTTAACATGGTATACATGCCCGCCTCTTGGGTGATGAGGATCATGACCTGGC
TTGACGGCAATTGCGATACATTGAAGGAAATTCTGGTGACCTATAACTGCTGC
GACGAGGCTTTTGAATACTACCACACAACCGATCCAAGTTTTCTTGGCAGATA
TATGAGCGCCTTGAACCACACTAAGAAGTGGAAGTACCCCCAGATCTCCAACG
AAAAGCAGGAGATTCTCGGAACCGTGTCCTGGAATCTGCGCGAGGATATTAAA
GACCTGCCTAAGGAGATCACTGTGGCCACCTCCAGAACCCTGTCCTATTACAA
GCTGGGAGCTTCACAGAGGGTGGCCGGAGATAGCGGGTTCGCCGCCTATAGC
CGGTACAGGATCGGCAACTGGCCTCAGATCGCCCAGTTTGCTCCCAGCGCCTC
AGCCTTCTTCGGAATGTCCCGCATCGGGATGGAAGTGACTCCTTCCGGAACTT
GGCTCACATACACCGGCGCTATTGATTGGTACGATTTCGTTGAGAATCCTGAC
ATCCTGCGGGTCTATGCCAACCTGGGCGCCTGCCCTCTCATTGCAGCCGTGAT
CACCAGGGAAGTTGGCTTTGTAGTGCCAGGATTACCGGGCACAATTCTGAGAA
CAACCAATGGAGACTTTCTGCACTTCCTTCCCCGGGTGTTCAGTGCTGTTGGA
AACATCTGCTACACCCCTTCTAAACTGATTGAGTACACAGATTTTGCCGGACC
CGGACCAGGCGCCAAATTTGTTGCTGCTTGGACACTGAAAGCTGCTGCTGGG
CCCGGACCAGGCCAGTACATCAAGGCCAACTCTAAGTTTATCGGCATCACCGA
ATTGGGACCTGGACCCGGCTAGTGAttcgaagggcccctataactctctacggctaacctgaatggactacga
catagtctagtccgccaagGCCACCATGTTTGTCTTCCTGGTCTTGCTGCCGCTGGTGAGCAGCCA
GTGCGTGAATTCACCACCCGCACCCAGCTTCCACCTGCCTACACTAACAGCTTCACCCG
AGGGGTGTATTACCCTGACAAGGTATTCCGGTCCTCCGTCCTCCATAGCACGCAGGACC
TTTTTCTGCCCTTCTTCTCAAATGTGACATGGTTCCATGCCATTCACGTGAGCGGCACGAA
TGGAACGAAGCGCTTTGcTAACCCCGTGCTGCCTTTCAATGACGGCGTCTACTTCGCCTC
CACTGAAAAGTCAAACATCATCCGGGGCTGGATCTTTGGCACCACTCTTGATTCAAAGAC
CCAGTCACTGCTGATTGTGAACAATGCTACAAACGTGGTTATCAAGGTGTGTGAGTTTCA
GTTCTGTAACGATCCATTTTTGGGAGTGTACTACCACAAGAACAACAAGTCCTGGATGGA
GTCTGAGTTCAGAGTGTATAGCTCTGCTAACAACTGCACCTTCGAGTACGTGTCCCAGCC
TTTCCTTATGGACCTGGAAGGCAAACAGGGCAATTTCAAAAACCTGAGAGAGTTCGTGTT
TAAGAACATTGACGGATACTTCAAAATTTATTCTAAGCACACACCAATTAACTTAGTGCGG
GgCCTACCCCAAGGCTTTAGCGCCCTAGAGCCCCTGGTTGACCTGCCCATTGGGATCAA
TATAACAAGGTTCCAAACTCTACATAtAAGTTATCTGACCCCAGGAGACAGCTCTAGTGGT
TGGACCGCCGGCGCAGCAGCCTACTATGTCGGGTACTTACAGCCACGCACGTTCCTTCT
GAAGTACAATGAGAACGGGACAATCACTGACGCAGTAGACTGTGCACTGGACCCGCTAA
GCGAGACTAAGTGCACACTTAAATCCTTCACGGTGGAGAAAGGCATTTATCAGACCTCTA
ACTTCAGGGTGCAGCCAACAGAAAGCATTGTGCGATTCCCAAATATTACTAATCTTTGCCC
TTTCGGGGAGGTCTTTAATGCAACTAGATTCGCATCAGTCTATGCGTGGAACCGCAAACG
CATTTCCAATTGTGTCGCAGACTACTCAGTGCTGTACAACTCTGCCTCTTTCAGTACGTTC
AAGTGTTACGGAGTGTCACCCACTAAACTGAACGACCTGTGCTTTACAAATGTCTACGCT
GACTCCTTCGTGATTAGGGGAGACGAGGTGAGACAAATTGCCCCCGGACAGACTGGGAA
tATTGCCGACTACAATTATAAGCTTCCTGATGATTTCACTGGCTGTGTTATTGCCTGGAATA
GTAACAATCTGGATAGCAAGGTGGGAGGCAACTATAACTACTTATATCGACTGTTTAGGA
AGAGTAATCTGAAACCATTTGAGCGGGATATTTCCACAGAAATTTACCAGGCCGGGAGCA
CACCATGTAATGGGGTGaAGGGATTTAATTGTTACTTCCCACTCCAGAGCTATGGTTTCCA
ACCCACCTATGGAGTGGGTTACCAGCCCTATAGAGTCGTGGTGCTTAGTTTTGAGCTGCT
TCACGCCCCAGCAACCGTCTGCGGTCCCAAAAAGTCGACCAATCTCGTGAAAAACAAATG
CGTAAACTTCAACTTTAACGGCTTAACAGGAACCGGCGTGCTCACCGAAAGCAACAAGAA
ATTCCTTCCATTTCAGCAATTCGGAAGGGACATCGCCGACACAACAGACGCGGTGAGGG
ACCCACAGACTCTGGAGATACTGGACATCACTCCTTGTTCGTTTGGGGGCGTCTCGGTCA
TCACACCCGGGACTAATACTAGTAATCAGGTAGCAGTTTTATATCAAGGCGTCAACTGTAC
CGAAGTACCTGTGGCCATACACGCTGATCAGCTAACGCCAACATGGCGAGTCTATTCCAC
CGGCTCTAACGTTTTTCAGACCAGGGCTGGGTGCCTGATAGGGGCAGAGCACGTCAATA
ATTCCTATGAGTGTGATATCCCCATAGGTGCGGGGATCTGTGCCAGCTATCAAACCCAAA
CCAATTCACCAgGGaGcGCAaGcTCTGTGGCTTCTCAGAGCATAATTGCATATACAATGTCA
CTGGGCGtTGAGAATAGCGTTGCATACTCTAATAACAGCATAGCCATTCCCACGAACTTTA
CTATCAGTGTGACAACCGAAATATTGCCAGTTTCGATGACCAAAACTAGCGTGGATTGCA
CGATGTACATCTGTGGAGACTCTACCGAATGCAGCAATCTGCTATTACAATATGGCAGCT
TCTGTACACAGTTAAATCGAGCCTTGACAGGCATCGCAGTGGAACAGGACAAAAATACTC
AAGAGGTGTTTGCACAGGTGAAGCAAATCTACAAAACGCCCCCCATTAAAGATTTTGGCG
GGTTCAATTTTTCACAAATTCTCCCCGACCCGTCTAAGCCGAGTAAGCGGTCCTTCATCG
AAGATCTGCTCTTTAACAAAGTAACCCTCGCCGATGCCGGCTTTATTAAGCAGTATGGCG
ACTGCCTGGGGGATATAGCCGCTCGTGACCTGATTTGCGCCCAGAAGTTCAATGGTCTG
ACCGTGTTGCCTCCTTTATTGACCGATGAAATGATTGCCCAGTACACTAGTGCCCTGCTG
GCCGGCACTATCACGTCTGGGTGGACCTTCGGAGCTGGTGCCGCCTTGCAGATACCTTT
TGCAATGCAGATGGCCTATAGGTTTAATGGTATCGGAGTGACTCAGAACGTACTGTACGA
GAACCAGAAGCTCATCGCTAATCAATTTAACTCCGCTATCGGAAAAATCCAGGACAGCCT
CTCTTCTACAGCTAGCGCTCTGGGCAAACTGCAGGATGTCGTTAATCAGAATGCCCAGGC
CCTGAACACCTTGGTTAAACAACTATCTTCCAACTTCGGGGCCATATCCAGTGTGTTGAAT
GATATTCTCTCCCGCTTGGATccacctGAAGCTGAGGTGCAGATCGATCGCTTGATCACCGG
CAGACTGCAGTCCCTCCAGACATATGTAACTCAGCAGCTGATTAGAGCCGCCGAGATAA
GGGCAAGTGCGAATCTGGCTGCCACCAAGATGAGCGAATGTGTATTGGGCCAGAGCAAA
CGAGTTGATTTTTGCGGTAAGGGGTATCATTTAATGTCTTTCCCTCAATCCGCACCTCATG
GCGTAGTTTTCCTGCATGTGACTTATGTCCCGGCTCAGGAGAAGAATTTTACCACAGCCC
CCGCGATCTGCCATGACGGAAAGGCCCACTTCCCCCGGGAAGGCGTGTTTGTATCCAAT
GGGACTCACTGGTTTGTCACTCAGCGAAATTTTTATGAACCACAGATCATCACCACTGACA
ACACATTTGTTAGTGGAAACTGCGATGTGGTCATCGGCATCGTGAATAACACTGTCTATG
ATCCACTGCAACCTGAACTGGATTCTTTTAAAGAGGAACTCGACAAGTATTTTAAAAACCA
CACTAGCCCTGACGTGGATCTCGGTGACATTTCTGGCATCAACGCTAGCGTAGTGAACAT
TCAGAAAGAGATAGATAGACTTAATGAGGTGGCCAAGAACCTCAACGAAAGTCTGATCGA
CCTCCAGGAACTGGGGAAATACGAGCAGTACATTAAATGGCCTTGGTACATATGGCTGG
GGTTCATTGCTGGGCTGATCGCAATAGTGATGGTGACCATAATGCTCTGTTGCATGACTA
GCTGCTGCAGCTGCCTGAAGGGCTGCTGTAGTTGTGGGTCATGTTGTAAGTTTGACGAA
GATGATAGCGAGCCTGTCCTTAAAGGAGTGAAGCTCCACTACACCTAGTAAttcgaacggccgt
atcacgcccaaacatttacagccgcggtgtcaaaaaccgcgtggacgtggttaacatccctgctgggaggatcagccgtaattattataatt
gGCTTGGTGCTGGCTACTATTgtggccaTGTACGTGCTGACCAACCAGAAACAtaattgaatac
agcagcaattggcaagctgCTTACATAGAACTCGCGGCGattggcatgccgccttaaaatttttattttattttttcttttctttt
ccgaatcggattttgtttttaatatttcaaaaaaaaaaaaaaaaaaaaaaaaaaaaaaaaaaaaaaaaaaaaaaaaaaaaaaaaaaaaaaa
aaaaaaaaaaaaaaaaa
SAM-SGP1-TCE5-SGP2-CTSpikeGF2P Nucleotide Sequence in vitro transcription
template DNA sequence (SEQ ID NO: 93): (NT 1-17: T7 promoter; NT 62-7543: VEEV non-
structural protein coding region; NT 7518-7560: SGP1; NT 7582-7587 and 9541-9546: Kozak
sequence; NT 7588-9474: TCE5 cassette; NT 9480-9540: SGP2; NT 9547-13368: CTSpike
Furin-2P)
taatacgactcactataatgggcggcgcatgagagaagcccagaccaattacctacccaaaatggagaaagttcacgttgacatcgagga
agacagcccattcctcagagctttgcagcggagcttcccgcagtttgaggtagaagccaagcaggtcactgataatgaccatgctaatgcc
agagcgttttcgcatctggcttcaaaactgatcgaaacggaggtggacccatccgacacgatccttgacattggaagtgcgcccgcccgc
agaatgtattctaagcacaagtatcattgtatctgtccgatgagatgtgcggaagatccggacagattgtataagtatgcaactaagctgaag
aaaaactgtaaggaaataactgataaggaattggacaagaaaatgaaggagctcgccgccgtcatgagcgaccctgacctggaaactga
gactatgtgcctccacgacgacgagtcgtgtcgctacgaagggcaagtcgctgtttaccaggatgtatacgcggttgacggaccgacaag
tctctatcaccaagccaataagggagttagagtcgcctactggataggctttgacaccaccccttttatgtttaagaacttggctggagcatat
ccatcatactctaccaactgggccgacgaaaccgtgttaacggctcgtaacataggcctatgcagctctgacgttatggagcggtcacgta
gagggatgtccattcttagaaagaagtatttgaaaccatccaacaatgttctattctctgttggctcgaccatctaccacgagaagagggactt
actgaggagctggcacctgccgtctgtatttcacttacgtggcaagcaaaattacacatgtcggtgtgagactatagttagttgcgacgggt
acgtcgttaaaagaatagctatcagtccaggcctgtatgggaagccttcaggctatgctgctacgatgcaccgcgagggattcttgtgctgc
aaagtgacagacacattgaacggggagagggtctcttttcccgtgtgcacgtatgtgccagctacattgtgtgaccaaatgactggcatact
ggcaacagatgtcagtgcggacgacgcgcaaaaactgctggttgggctcaaccagcgtatagtcgtcaacggtcgcacccagagaaac
accaataccatgaaaaattaccttttgcccgtagtggcccaggcatttgctaggtgggcaaaggaatataaggaagatcaagaagatgaaa
ggccactaggactacgagatagacagttagtcatggggtgttgttgggcttttagaaggcacaagataacatctatttataagcgcccggat
acccaaaccatcatcaaagtgaacagcgatttccactcattcgtgctgcccaggataggcagtaacacattggagatcgggctgagaaca
agaatcaggaaaatgttagaggagcacaaggagccgtcacctctcattaccgccgaggacgtacaagaagctaagtgcgcagccgatg
aggctaaggaggtgcgtgaagccgaggagttgcgcgcagctctaccacctttggcagctgatgttgaggagcccactctggaagccgat
gtcgacttgatgttacaagaggctggggccggctcagtggagacacctcgtggcttgataaaggttaccagctacgctggcgaggacaa
gatcggctcttacgctgtgctttctccgcaggctgtactcaagagtgaaaaattatcttgcatccaccctctcgctgaacaagtcatagtgata
acacactctggccgaaaagggcgttatgccgtggaaccataccatggtaaagtagtggtgccagagggacatgcaatacccgtccagga
ctttcaagctctgagtgaaagtgccaccattgtgtacaacgaacgtgagttcgtaaacaggtacctgcaccatattgccacacatggagga
gcgctgaacactgatgaagaatattacaaaactgtcaagcccagcgagcacgacggcgaatacctgtacgacatcgacaggaaacagt
gcgtcaagaaagaactagtcactgggctagggctcacaggcgagctggtggatcctcccttccatgaattcgcctacgagagtctgagaa
cacgaccagccgctccttaccaagtaccaaccataggggtgtatggcgtgccaggatcaggcaagtctggcatcattaaaagcgcagtc
accaaaaaagatctagtggtgagcgccaagaaagaaaactgtgcagaaattataagggacgtcaagaaaatgaaagggctggacgtca
atgccagaactgtggactcagtgctcttgaatggatgcaaacaccccgtagagaccctgtatattgacgaagcttttgcttgtcatgcaggta
ctctcagagcgctcatagccattataagacctaaaaaggcagtgctctgcggggatcccaaacagtgcggtttttttaacatgatgtgcctga
aagtgcattttaaccacgagatttgcacacaagtcttccacaaaagcatctctcgccgttgcactaaatctgtgacttcggtcgtctcaacctt
gttttacgacaaaaaaatgagaacgacgaatccgaaagagactaagattgtgattgacactaccggcagtaccaaacctaagcaggacg
atctcattctcacttgtttcagagggtgggtgaagcagttgcaaatagattacaaaggcaacgaaataatgacggcagctgcctctcaaggg
ctgacccgtaaaggtgtgtatgccgttcggtacaaggtgaatgaaaatcctctgtacgcacccacctcagaacatgtgaacgtcctactgac
ccgcacggaggaccgcatcgtgtggaaaacactagccggcgacccatggataaaaacactgactgccaagtaccctgggaatttcactg
ccacgatagaggagtggcaagcagagcatgatgccatcatgaggcacatcttggagagaccggaccctaccgacgtcttccagaataa
ggcaaacgtgtgttgggccaaggctttagtgccggtgctgaagaccgctggcatagacatgaccactgaacaatggaacactgtggatta
ttttgaaacggacaaagctcactcagcagagatagtattgaaccaactatgcgtgaggttctttggactcgatctggactccggtctattttct
gcacccactgttccgttatccattaggaataatcactgggataactccccgtcgcctaacatgtacgggctgaataaagaagtggtccgtca
gctctctcgcaggtacccacaactgcctcgggcagttgccactggaagagtctatgacatgaacactggtacactgcgcaattatgatccg
cgcataaacctagtacctgtaaacagaagactgcctcatgctttagtcctccaccataatgaacacccacagagtgacttttcttcattcgtca
gcaaattgaagggcagaactgtcctggtggtcggggaaaagttgtccgtcccaggcaaaatggttgactggttgtcagaccggcctgag
gctaccttcagagctcggctggatttaggcatcccaggtgatgtgcccaaatatgacataatatttgttaatgtgaggaccccatataaatacc
atcactatcagcagtgtgaagaccatgccattaagcttagcatgttgaccaagaaagcttgtctgcatctgaatcccggcggaacctgtgtc
agcataggttatggttacgctgacagggccagcgaaagcatcattggtgctatagcgcggcagttcaagttttcccgggtatgcaaaccga
aatcctcacttgaagagacggaagttctgtttgtattcattgggtacgatcgcaaggcccgtacgcacaatccttacaagctttcatcaacctt
gaccaacatttatacaggttccagactccacgaagccggatgtgcaccctcatatcatgtggtgcgaggggatattgccacggccaccga
aggagtgattataaatgctgctaacagcaaaggacaacctggcggaggggtgtgcggagcgctgtataagaaattcccggaaagcttcg
atttacagccgatcgaagtaggaaaagcgcgactggtcaaaggtgcagctaaacatatcattcatgccgtaggaccaaacttcaacaaagt
ttcggaggttgaaggtgacaaacagttggcagaggcttatgagtccatcgctaagattgtcaacgataacaattacaagtcagtagcgattc
cactgttgtccaccggcatcttttccgggaacaaagatcgactaacccaatcattgaaccatttgctgacagctttagacaccact gatgcag
atgtagccatatactgcagggacaagaaatgggaaatgactctcaaggaagcagtggctaggagagaagcagtggaggagatatgcat
atccgacgactcttcagtgacagaacctgatgcagagctggtgagggtgcatccgaagagttctttggctggaaggaagggctacagca
caagcgatggcaaaactttctcatatttggaagggaccaagtttcaccaggcggccaaggatatagcagaaattaatgccatgtggcccgt
tgcaacggaggccaatgagcaggtatgcatgtatatcctcggagaaagcatgagcagtattaggtcgaaatgccccgtcgaagagtcgg
aagcctccacaccacctagcacgctgccttgcttgtgcatccatgccatgactccagaaagagtacagcgcctaaaagcctcacgtccag
aacaaattactgtgtgctcatcctttccattgccgaagtatagaatcactggtgtgcagaagatccaatgctcccagcctatattgttctcacc
gaaagtgcctgcgtatattcatccaaggaagtatctcgtggaaacaccaccggtagacgagactccggagccatcggcagagaaccaatc
cacagaggggacacctgaacaaccaccacttataaccgaggatgagaccaggactagaacgcctgagccgatcatcatcgaagagga
agaagaggatagcataagtttgctgtcagatggcccgacccaccaggtgctgcaagtcgaggcagacattcacgggccgccctctgtat
ctagctcatcctggtccattcctcatgcatccgactttgatgtggacagtttatccatacttgacaccctggagggagctagcgtgaccagcg
gggcaacgtcagccgagactaactcttacttcgcaaagagtatggagtttctggcgcgaccggtgcctgcgcctcgaacagtattcagga
accctccacatcccgctccgcgcacaagaacaccgtcacttgcacccagcagggcctgctcgagaaccagcctagtttccaccccgcca
ggcgtgaatagggtgatcactagagaggagctcgaggcgcttaccccgtcacgcactcctagcaggtcggtctcgagaaccagcctggt
ctccaacccgccaggcgtaaatagggtgattacaagagaggagtttgaggcgttcgtagcacaacaacaatgacggtttgatgcgggtgc
atacatcttttcctccgacaccggtcaagggcatttacaacaaaaatcagtaaggcaaacggtgctatccgaagtggtgttggagaggacc
gaattggagatttcgtatgccccgcgcctcgaccaagaaaaagaagaattactacgcaagaaattacagttaaatcccacacctgctaaca
gaagcagataccagtccaggaaggtggagaacatgaaagccataacagctagacgtattctgcaaggcctagggcattatttgaaggca
gaaggaaaagtggagtgctaccgaaccctgcatcctgttcctttgtattcatctagtgtgaaccgtgccttttcaagccccaaggtcgcagtg
gaagcctgtaacgccatgttgaaagagaactttccgactgtggcttcttactgtattattccagagtacgatgcctatttggacatggttgacg
gagcttcatgctgcttagacactgccagtttttgccctgcaaagctgcgcagctttccaaagaaacactcctatttggaacccacaatacgat
cggcagtgccttcagcgatccagaacacgctccagaacgtcctggcagctgccacaaaaagaaattgcaatgtcacgcaaatgagagaa
ttgcccgtattggattcggcggcctttaatgtggaatgcttcaagaaatatgcgtgtaataatgaatattgggaaacgtttaaagaaaacccca
tcaggcttactgaagaaaacgtggtaaattacattaccaaattaaaaggaccaaaagctgctgctctttttgcgaagacacataatttgaatat
gttgcaggacataccaatggacaggtttgtaatggacttaaagagagacgtgaaagtgactccaggaacaaaacatactgaagaacggc
ccaaggtacaggtgatccaggctgccgatccgctagcaacagcgtatctgtgcggaatccaccgagagctggttaggagattaaatgcg
gtcctgcttccgaacattcatacactgtttgatatgtcggctgaagactttgacgctattatagccgagcacttccagcctggggattgtgttct
ggaaactgacatcgcgtcgtttgataaaagtgaggacgacgccatggctctgaccgcgttaatgattctggaagacttaggtgtggacgca
gagctgttgacgctgattgaggcggctttcggcgaaatttcatcaatacatttgcccactaaaactaaatttaaattcggagccatgatgaaat
ctggaatgttcctcacactgtttgtgaacacagtcattaacattgtaatcgcaagcagagtgttgagagaacggctaaccggatcaccatgtg
cagcattcattggagatgacaatatcgtgaaaggagtcaaatcggacaaattaatggcagacaggtgcgccacctggttgaatatggaagt
caagattatagatgctgtggtgggcgagaaagcgccttatttctgtggagggtttattttgtgtgactccgtgaccggcacagcgtgccgtgt
ggcagaccccctaaaaaggctgtttaagcttggcaaacctctggcagcagacgatgaacatgatgatgacaggagaagggcattgcatg
aagagtcaacacgctggaaccgagtgggtattctttcagagctgtgcaaggcagtagaatcaaggtatgaaaccgtaggaacttccatcat
agttatggccatgactactctagctagcagtgttaaatcattcagctacctgagaggggcccctataactctctacggctaacctgaatggac
tacgactctagaatagtctttaattaagccaccatggctggcgaggcccccttcctttacctgtacgcccttgtgtatttcctgcagagcatca
attttgtgagaatcatcatgaggctgtggctttgctggaaatgtaggagcaagaaccccctgttgtatgacgccaactactttctgtgttggca
caccaatctcgccgtgttccagagtgcctctaagatcattacactgaaaaagcggtggcagcttgcactttctaagggagtgcatttcgtttgc
aacctgctcctggtgacactcaagcagggggaaatcaaagacgccacccctagcgacttcgttagagccactgccacaatcccaatcca
ggcttccctgcctttcggctggcttatcgtgggtgtggcactgttggctgtgcggagaccacagggactgcctaataatacagctagctggt
ttaccgctctgacacagcatggcaaagaagacctcaagttccctcgcggtcagggggtgcctattaacactaatagctctccagacgacca
aattgggtattacaggcgcgccacaagacggatcatggcctgcttagtggggctgatgtggctatcctattttattgctagctttcgcctgaa
gaaggacaagaagaagaaagctgatgagacccaggcactgccccagcgccaaaagaagcagcagacagtcacactgctccctgctg
cagacctggatgacttcagcaagcagctgcaggggaactttggcgaccaggagctgattagacaggggactgactataagcattggcct
cagattgctcagttcgccccaagtgcatccgccttcttcgggatgtcacgaataggaatggaagtgaccccttctgggacatggttgacata
caccggagcaatcaagattacctccggggacggtaccacgtctcctattagcgaacacgattatcagatagggggatatactgagaagtg
ggagtccggcgtcaaaaagatgagtgggaaaggccagcagcaacaaggccaaacagttactaaaaagtctgccgcagaagctagtaa
aaagcctcgccagaagcggacagccaccaaagcttacaatgtgactcaggccttcggccgccgggggcctgaacagaccctcttgtgg
cccgttaccctcgcatgtttcgtgcttgcagctgtgtacaggatcaattggtttaaggatcaggttatcctgttgaacaaacatatagatgcct
ataagacattcccacccaccgagccaaagaaagataagaaaaagaaaactagtcctgcaaggatggccggcaatggaggagacgcagc
cttagccctgctcttactcgacaggctgaaccaacttgagtctaaaatgagcggtaaagggcagaagatgaaggatctgtccccaaggtg
gtatttctactatctgggcaccggccctgaggattgtgtcgtcctccactcatacttcactagcgattattaccagctgtatagtacacaatta
tctaccgacacaggcgtcgagcacgtgaccttctttatatacaataagatcgtggatgaaccagaggagcatgtgcagatccacactattgat
ggctctagcgggggcatcatctgggtggcaacagaaggagccctcaacaccccaaaggaccatatcggcaccaggaatccagccaac
aatgccgccattgttctgcagctccctcagggcactactctccctaaaggcttctatgctgagggacccggaccaggcgccaaatttgttgc
tgcttggacactgaaagctgctgctgggcccggaccaggccagtacatcaaggccaactctaagtttatcggcatcaccgaattgggacc
tggacccggctagtgattgggcccctataactctctacggctaacctgaatggactacgacatagtctagtccgccaaggccaccatgtttg
tcttcctggtcttgctgccgctggtgagcagccagtgcgtgaatctcaccacccgcacccagcttccacctgcctacactaacagcttcacc
cgaggggtgtattaccctgacaaggtattccggtcctccgtcctccatagcacgcaggacctttttctgcccttcttctcaaatgtgacatggt
tccatgccattcacgtgagcggcacgaatggaacgaagcgctttgataaccccgtgctgcctttcaatgacggcgtctacttcgcctccact
gaaaagtcaaacatcatccggggctggatctttggcaccactcttgattcaaagacccagtcactgctgattgtgaacaatgctacaaacgt
ggttatcaaggtgtgtgagtttcagttctgtaacgatccatttttgggagtgtactaccacaagaacaacaagtcctggatggagtctgagttc
agagtgtatagctctgctaacaactgcaccttcgagtacgtgtcccagcctttccttatggacctggaaggcaaacagggcaatttcaaaaa
cctgagagagttcgtgtttaagaacattgacggatacttcaaaatttattctaagcacacaccaattaacttagtgcgggacctaccccaagg
ctttagcgccctagagcccctggttgacctgcccattgggatcaatataacaaggttccaaactctactggctctgcatagaagttatctgac
cccaggagacagctctagtggttggaccgccggcgcagcagcctactatgtcgggtacttacagccacgcacgttccttctgaagtacaa
tgagaacgggacaatcactgacgcagtagactgtgcactggacccgctaagcgagactaagtgcacacttaaatccttcacggtggaga
aaggcatttatcagacctctaacttcagggtgcagccaacagaaagcattgtgcgattcccaaatattactaatctttgccctttcggggaggt
ctttaatgcaactagattcgcatcagtctatgcgtggaaccgcaaacgcatttccaattgtgtcgcagactactcagtgctgtacaactctgcc
tctttcagtacgttcaagtgttacggagtgtcacccactaaactgaacgacctgtgctttacaaatgtctacgctgactccttcgtgattaggg
gagacgaggtgagacaaattgcccccggacagactgggaagattgccgactacaattataagcttcctgatgatttcactggctgtgttattg
cctggaatagtaacaatctggatagcaaggtgggaggcaactataactacttatatcgactgtttaggaagagtaatctgaaaccatttgagc
gggatatttccacagaaatttaccaggccgggagcacaccatgtaatggggggagggatttaattgttacttcccactccagagctatggtt
tccaacccaccaatggagtgggttaccagccctatagagtcgtggtgcttagttttgagctgcttcacgccccagcaaccgtctgcggtccc
aaaaagtcgaccaatctcgtgaaaaacaaatgcgtaaacttcaactttaacggcttaacaggaaccggcgtgctcaccgaaagcaacaag
aaattccttccatttcagcaattcggaagggacatcgccgacacaacagacgcggtgagggacccacagactctggagatactggacatc
actccttgttcgtttgggggcgtctcggtcatcacacccgggactaatactagtaatcaggtagcagttttatatcaaggcgtcaactgtaccg
aagtacctgtggccatacacgctgatcagctaacgccaacatggcgagtctattccaccggctctaacgtttttcagaccagggctgggtg
cctgataggggcagagcacgtcaataattcctatgagtgtgatatccccataggtgcggggatctgtgccagctatcaaacccaaaccaat
tcaccagggagcgcaagctctgtggcttctcagagcataattgcatatacaatgtcactgggcgctgagaatagcgttgcatactctaataa
cagcatagccattcccacgaactttactatcagtgtgacaaccgaaatattgccagtttcgatgaccaaaactagcgtggattgcacgatgta
catctgtggagactctaccgaatgcagcaatctgctattacaatatggcagcttctgtacacagttaaatcgagccttgacaggcatcgcagt
ggaacaggacaaaaatactcaagaggtgtttgcacaggtgaagcaaatctacaaaacgccccccattaaagattttgggggttcaattttt
cacaaattctccccgacccgtctaagccgagtaagcggtccttcatcgaagatctgctctttaacaaagtaaccctcgccgatgccggcttt
attaagcagtatggcgactgcctgggggatatagccgctcgtgacctgatttgcgcccagaagttcaatggtctgaccgtgttgcctccttta
ttgaccgatgaaatgattgcccagtacactagtgccctgctggccggcactatcacgtctgggtggaccttcggagctggtgccgccttgc
agataccttttgcaatgcagatggcctataggtttaatggtatcggagtgactcagaacgtactgtacgagaaccagaagctcatcgctaatc
aatttaactccgctatcggaaaaatccaggacagcctctcttctacagctagcgctctgggcaaactgcaggatgtcgttaatcagaatgcc
caggccctgaacaccttggttaaacaactatcttccaacttcggggccatatccagtgtgttgaatgatattctctcccgcttggatccacctg
aagctgaggtgcagatcgatcgcttgatcaccggcagactgcagtccctccagacatatgtaactcagcagctgattagagccgccgaga
taagggcaagtgcgaatctggctgccaccaagatgagcgaatgtgtattgggccagagcaaacgagttgatttttgcggtaaggggtatc
atttaatgtctttccctcaatccgcacctcatggcgtagttttcctgcatgtgacttatgtcccggctcaggagaagaattttaccacagcccc
cgcgatctgccatgacggaaaggcccacttcccccgggaaggcgtgtttgtatccaatgggactcactggtttgtcactcagcgaaatttttat
gaaccacagatcatcaccactgacaacacatttgttagtggaaactgcgatgtggtcatcggcatcgtgaataacactgtctatgatccactg
caacctgaactggattcttttaaagaggaactcgacaagtattttaaaaaccacactagccctgacgtggatctcggtgacatttctggcatc
aacgctagcgtagtgaacattcagaaagagatagatagacttaatgaggtggccaagaacctcaacgaaagtctgatcgacctccaggaa
ctggggaaatacgagcagtacattaaatggccttggtacatatggctggggttcattgctgggctgatcgcaatagtgatggtgaccataat
gctctgttgcatgactagctgctgcagctgcctgaagggctgctgtagttgtgggtcatgttgtaagtttgacgaagatgatagcgagcctgt
ccttaaaggagtgaagctccactacacctagtaacgaacggccgtatcacgcccaaacatttacagccgcggtgtcaaaaaccgcgtgg
acgtggttaacatccctgctgggaggatcagccgtaattattataattggcttggtgctggctactattgtggccatgtacgtgctgaccaacc
agaaacataattgaatacagcagcaattggcaagctgcttacatagaactcgcggcgattggcatgccgccttaaaatttttattttatttttt
cttttcttttccgaatcggattttgtttttaatatttcaaaaaaaaaaaaaaaaaaaaaaaaaaaaaaaaaaaaaaaaaaaaaaaaaaaaaaaa
aaaaaaaaaaaaaaaaaaaaaaaatacgtagtttaaac
SAM-SGP1-TCE5-SGP2-CTSpikeGF2P Nucleotide Sequence samRNA (SEQ ID
NO: 27983); GRT-910: samRNA produced from SEQ ID NO: 93
atgggcggcgcatgagagaagcccagaccaattacctacccaaaatggagaaagttcacgttgacatcgaggaagacagcccattcctc
agagctttgcagcggagcttcccgcagtttgaggtagaagccaagcaggtcactgataatgaccatgctaatgccagagcgttttcgcatc
tggcttcaaaactgatcgaaacggaggtggacccatccgacacgatccttgacattggaagtgcgcccgcccgcagaatgtattctaagc
acaagtatcattgtatctgtccgatgagatgtgcggaagatccggacagattgtataagtatgcaactaagctgaagaaaaactgtaaggaa
ataactgataaggaattggacaagaaaatgaaggagctcgccgccgtcatgagcgaccctgacctggaaactgagactatgtgcctcca
cgacgacgagtcgtgtcgctacgaagggcaagtcgctgtttaccaggatgtatacgcggttgacggaccgacaagtctctatcaccaagc
caataagggagttagagtcgcctactggataggctttgacaccaccccttttatgtttaagaacttggctggagcatatccatcatactctacc
aactgggccgacgaaaccgtgttaacggctcgtaacataggcctatgcagctctgacgttatggagcggtcacgtagagggatgtccatt
cttagaaagaagtatttgaaaccatccaacaatgttctattctctgttggctcgaccatctaccacgagaagagggacttactgaggagctgg
cacctgccgtctgtatttcacttacgtggcaagcaaaattacacatgtcggtgtgagactatagttagttgcgacgggtacgtcgttaaaaga
atagctatcagtccaggcctgtatgggaagccttcaggctatgctgctacgatgcaccgcgagggattcttgtgctgcaaagtgacagaca
cattgaacggggagagggtctcttttcccgtgtgcacgtatgtgccagctacattgtgtgaccaaatgactggcatactggcaacagatgtc
agtgcggacgacgcgcaaaaactgctggttgggctcaaccagcgtatagtcgtcaacggtcgcacccagagaaacaccaataccatga
aaaattaccttttgcccgtagtggcccaggcatttgctaggtgggcaaaggaatataaggaagatcaagaagatgaaaggccactaggac
tacgagatagacagttagtcatggggtgttgttgggcttttagaaggcacaagataacatctatttataagcgcccggatacccaaaccatca
tcaaagtgaacagcgatttccactcattcgtgctgcccaggataggcagtaacacattggagatcgggctgagaacaagaatcaggaaaa
tgttagaggagcacaaggagccgtcacctctcattaccgccgaggacgtacaagaagctaagtgcgcagccgatgaggctaaggaggt
gcgtgaagccgaggagttgcgcgcagctctaccacctttggcagctgatgttgaggagcccactctggaagccgatgtcgacttgatgtta
caagaggctggggccggctcagtggagacacctcgtggcttgataaaggttaccagctacgctggcgaggacaagatcggctcttacgc
tgtgctttctccgcaggctgtactcaagagtgaaaaattatcttgcatccaccctctcgctgaacaagtcatagtgataacacactctggccg
aaaagggcgttatgccgtggaaccataccatggtaaagtagtggtgccagagggacatgcaatacccgtccaggactttcaagctctgag
tgaaagtgccaccattgtgtacaacgaacgtgagttcgtaaacaggtacctgcaccatattgccacacatggaggagcgctgaacactgat
gaagaatattacaaaactgtcaagcccagcgagcacgacggcgaatacctgtacgacatcgacaggaaacagtgcgtcaagaaagaac
tagtcactgggctagggctcacaggcgagctggtggatcctcccttccatgaattcgcctacgagagtctgagaacacgaccagccgctc
cttaccaagtaccaaccataggggtgtatggcgtgccaggatcaggcaagtctggcatcattaaaagcgcagtcaccaaaaaagatctag
tggtgagcgccaagaaagaaaactgtgcagaaattataagggacgtcaagaaaatgaaagggctggacgtcaatgccagaactgtgga
ctcagtgctcttgaatggatgcaaacaccccgtagagaccctgtatattgacgaagcttttgcttgtcatgcaggtactctcagagcgctcat
agccattataagacctaaaaaggcagtgctctgcggggatcccaaacagtgcggtttttttaacatgatgtgcctgaaagtgcattttaacca
cgagatttgcacacaagtcttccacaaaagcatctctcgccgttgcactaaatctgtgacttcggtcgtctcaaccttgttttacgacaaaaaa
atgagaacgacgaatccgaaagagactaagattgtgattgacactaccggcagtaccaaacctaagcaggacgatctcattctcacttgttt
cagagggtgggtgaagcagttgcaaatagattacaaaggcaacgaaataatgacggcagctgcctctcaagggctgacccgtaaaggt
gtgtatgccgttcggtacaaggtgaatgaaaatcctctgtacgcacccacctcagaacatgtgaacgtcctactgacccgcacggaggac
cgcatcgtgtggaaaacactagccggcgacccatggataaaaacactgactgccaagtaccctgggaatttcactgccacgatagagga
gtggcaagcagagcatgatgccatcatgaggcacatcttggagagaccggaccctaccgacgtcttccagaataaggcaaacgtgtgtt
gggccaaggctttagtgccggtgctgaagaccgctggcatagacatgaccactgaacaatggaacactgtggattattttgaaacggaca
aagctcactcagcagagatagtattgaaccaactatgcgtgaggttctttggactcgatctggactccggtctattttctgcacccactgttcc
gttatccattaggaataatcactgggataactccccgtcgcctaacatgtacgggctgaataaagaagtggtccgtcagctctctcgcaggt
acccacaactgcctcgggcagttgccactggaagagtctatgacatgaacactggtacactgcgcaattatgatccgcgcataaacctagt
acctgtaaacagaagactgcctcatgctttagtcctccaccataatgaacacccacagagtgacttttcttcattcgtcagcaaattgaaggg
cagaactgtcctggtggtcggggaaaagttgtccgtcccaggcaaaatggttgactggttgtcagaccggcctgaggctaccttcagagct
cggctggatttaggcatcccaggtgatgtgcccaaatatgacataatatttgttaatgtgaggaccccatataaataccatcactatcagcagt
gtgaagaccatgccattaagcttagcatgttgaccaagaaagcttgtctgcatctgaatcccggcggaacctgtgtcagcataggttatggtt
acgctgacagggccagcgaaagcatcattggtgctatagcgcggcagttcaagttttcccgggtatgcaaaccgaaatcctcacttgaag
agacggaagttctgtttgtattcattgggtacgatcgcaaggcccgtacgcacaatccttacaagctttcatcaaccttgaccaacatttatac
aggttccagactccacgaagccggatgtgcaccctcatatcatgtggtgcgaggggatattgccacggccaccgaaggagtgattataaa
tgctgctaacagcaaaggacaacctggcggaggggtgtgcggagcgctgtataagaaattcccggaaagcttcgatttacagccgatcg
aagtaggaaaagcgcgactggtcaaaggtgcagctaaacatatcattcatgccgtaggaccaaacttcaacaaagtttcggaggttgaag
gtgacaaacagttggcagaggcttatgagtccatcgctaagattgtcaacgataacaattacaagtcagtagcgattccactgttgtccacc
ggcatcttttccgggaacaaagatcgactaacccaatcattgaaccatttgctgacagctttagacaccactgatgcagatgtagccatatac
tgcagggacaagaaatgggaaatgactctcaaggaagcagtggctaggagagaagcagtggaggagatatgcatatccgacgactctt
cagtgacagaacctgatgcagagctggtgagggtgcatccgaagagttctttggctggaaggaagggctacagcacaagcgatggcaa
aactttctcatatttggaagggaccaagtttcaccaggcggccaaggatatagcagaaattaatgccatgtggcccgttgcaacggaggcc
aatgagcaggtatgcatgtatatcctcggagaaagcatgagcagtattaggtcgaaatgccccgtcgaagagtcggaagcctccacacca
cctagcacgctgccttgcttgtgcatccatgccatgactccagaaagagtacagcgcctaaaagcctcacgtccagaacaaattactgtgt
gctcatcctttccattgccgaagtatagaatcactggtgtgcagaagatccaatgctcccagcctatattgttctcaccgaaagtgcctgcgta
tattcatccaaggaagtatctcgtggaaacaccaccggtagacgagactccggagccatcggcagagaaccaatccacagaggggaca
cctgaacaaccaccacttataaccgaggatgagaccaggactagaacgcctgagccgatcatcatcgaagaggaagaagaggatagca
taagtttgctgtcagatggcccgacccaccaggtgctgcaagtcgaggcagacattcacgggccgccctctgtatctagctcatcctggtc
cattcctcatgcatccgactttgatgtggacagtttatccatacttgacaccctggagggagctagcgtgaccagcggggcaacgtcagcc
gagactaactcttacttcgcaaagagtatggagtttctggcgcgaccggtgcctgcgcctcgaacagtattcaggaaccctccacatcccg
ctccgcgcacaagaacaccgtcacttgcacccagcagggcctgctcgagaaccagcctagtttccaccccgccaggcgtgaatagggt
gatcactagagaggagctcgaggcgcttaccccgtcacgcactcctagcaggtcggtctcgagaaccagcctggtctccaacccgccag
gcgtaaatagggtgattacaagagaggagtttgaggcgttcgtagcacaacaacaatgacggtttgatgcgggtgcatacatcttttcctcc
gacaccggtcaagggcatttacaacaaaaatcagtaaggcaaacggtgctatccgaagtggtgttggagaggaccgaattggagatttcg
tatgccccgcgcctcgaccaagaaaaagaagaattactacgcaagaaattacagttaaatcccacacctgctaacagaagcagataccag
tccaggaaggtggagaacatgaaagccataacagctagacgtattctgcaaggcctagggcattatttgaaggcagaaggaaaagtgga
gtgctaccgaaccctgcatcctgttcctttgtattcatctagtgtgaaccgtgccttttcaagccccaaggtcgcagtggaagcctgtaacgc
catgttgaaagagaactttccgactgtggcttcttactgtattattccagagtacgatgcctatttggacatggttgacggagcttcatgctgc
ttagacactgccagtttttgccctgcaaagctgcgcagctttccaaagaaacactcctatttggaacccacaatacgatcggcagtgccttcag
cgatccagaacacgctccagaacgtcctggcagctgccacaaaaagaaattgcaatgtcacgcaaatgagagaattgcccgtattggatt
cggcggcctttaatgtggaatgcttcaagaaatatgcgtgtaataatgaatattgggaaacgtttaaagaaaaccccatcaggcttactgaag
aaaacgtggtaaattacattaccaaattaaaaggaccaaaagctgctgctctttttgcgaagacacataatttgaatatgttgcaggacatacc
aatggacaggtttgtaatggacttaaagagagacgtgaaagtgactccaggaacaaaacatactgaagaacggcccaaggtacaggtga
tccaggctgccgatccgctagcaacagcgtatctgtgcggaatccaccgagagctggttaggagattaaatgcggtcctgcttccgaacat
tcatacactgtttgatatgtcggctgaagactttgacgctattatagccgagcacttccagcctggggattgtgttctggaaactgacatcgcg
tcgtttgataaaagtgaggacgacgccatggctctgaccgcgttaatgattctggaagacttaggtgtggacgcagagctgttgacgctgat
tgaggcggctttcggcgaaatttcatcaatacatttgcccactaaaactaaatttaaattcggagccatgatgaaatctggaatgttcctcaca
ctgtttgtgaacacagtcattaacattgtaatcgcaagcagagtgttgagagaacggctaaccggatcaccatgtgcagcattcattggaga
tgacaatatcgtgaaaggagtcaaatcggacaaattaatggcagacaggtgcgccacctggttgaatatggaagtcaagattatagatgct
gtggtgggcgagaaagcgccttatttctgtggagggtttattttgtgtgactccgtgaccggcacagcgtgccgtgtggcagaccccctaa
aaaggctgtttaagcttggcaaacctctggcagcagacgatgaacatgatgatgacaggagaagggcattgcatgaagagtcaacacgc
tggaaccgagtgggtattctttcagagctgtgcaaggcagtagaatcaaggtatgaaaccgtaggaacttccatcatagttatggccatgac
tactctagctagcagtgttaaatcattcagctacctgagaggggcccctataactctctacggctaacctgaatggactacgactctagaata
gtctttaattaagccaccatggctggcgaggcccccttcctttacctgtacgcccttgtgtatttcctgcagagcatcaattttgtgagaatca
tcatgaggctgtggctttgctggaaatgtaggagcaagaaccccctgttgtatgacgccaactactttctgtgttggcacaccaatctcgccgt
gttccagagtgcctctaagatcattacactgaaaaagcggtggcagcttgcactttctaagggagtgcatttcgtttgcaacctgctcctggtg
acactcaagcagggggaaatcaaagacgccacccctagcgacttcgttagagccactgccacaatcccaatccaggcttccctgcctttcg
gctggcttatcgtgggtgtggcactgttggctgtgcggagaccacagggactgcctaataatacagctagctggtttaccgctctgacaca
gcatggcaaagaagacctcaagttccctcgcggtcagggggtgcctattaacactaatagctctccagacgaccaaattgggtattacagg
cgcgccacaagacggatcatggcctgcttagtggggctgatgtggctatcctattttattgctagctttcgcctgaagaaggacaagaagaa
gaaagctgatgagacccaggcactgccccagcgccaaaagaagcagcagacagtcacactgctccctgctgcagacctggatgacttc
agcaagcagctgcaggggaactttggcgaccaggagctgattagacaggggactgactataagcattggcctcagattgctcagttcgcc
ccaagtgcatccgccttcttcgggatgtcacgaataggaatggaagtgaccccttctgggacatggttgacatacaccggagcaatcaag
attacctccggggacggtaccacgtctcctattagcgaacacgattatcagatagggggatatactgagaagtgggagtccggcgtcaaa
aagatgagtgggaaaggccagcagcaacaaggccaaacagttactaaaaagtctgccgcagaagctagtaaaaagcctcgccagaag
cggacagccaccaaagcttacaatgtgactcaggccttcggccgccgggggcctgaacagaccctcttgtggcccgttaccctcgcatgt
ttcgtgcttgcagctgtgtacaggatcaattggtttaaggatcaggttatcctgttgaacaaacatatagatgcctataagacattcccaccca
ccgagccaaagaaagataagaaaaagaaaactagtcctgcaaggatggccggcaatggaggagacgcagccttagccctgctcttact
cgacaggctgaaccaacttgagtctaaaatgagcggtaaagggcagaagatgaaggatctgtccccaaggtggtatttctactatctgggc
accggccctgaggattgtgtcgtcctccactcatacttcactagcgattattaccagctgtatagtacacaattatctaccgacacaggcgtc
gagcacgtgaccttctttatatacaataagatcgtggatgaaccagaggagcatgtgcagatccacactattgatggctctagcgggggca
tcatctgggtggcaacagaaggagccctcaacaccccaaaggaccatatcggcaccaggaatccagccaacaatgccgccattgttctg
cagctccctcagggcactactctccctaaaggcttctatgctgagggacccggaccaggcgccaaatttgttgctgcttggacactgaaag
ctgctgctgggcccggaccaggccagtacatcaaggccaactctaagtttatcggcatcaccgaattgggacctggacccggctagtgat
tgggcccctataactctctacggctaacctgaatggactacgacatagtctagtccgccaaggccaccatgtttgtcttcctggtcttgctgcc
gctggtgagcagccagtgcgtgaatctcaccacccgcacccagcttccacctgcctacactaacagcttcacccgaggggtgtattaccct
gacaaggtattccggtcctccgtcctccatagcacgcaggacctttttctgcccttcttctcaaatgtgacatggttccatgccattcacgtga
gcggcacgaatggaacgaagcgctttgataaccccgtgctgcctttcaatgacggcgtctacttcgcctccactgaaaagtcaaacatcat
ccggggctggatctttggcaccactcttgattcaaagacccagtcactgctgattgtgaacaatgctacaaacgtggttatcaaggtgtgtga
gtttcagttctgtaacgatccatttttgggagtgtactaccacaagaacaacaagtcctggatggagtctgagttcagagtgtatagctctgct
aacaactgcaccttcgagtacgtgtcccagcctttccttatggacctggaaggcaaacagggcaatttcaaaaacctgagagagttcgtgtt
taagaacattgacggatacttcaaaatttattctaagcacacaccaattaacttagtgcgggacctaccccaaggctttagcgccctagagcc
cctggttgacctgcccattgggatcaatataacaaggttccaaactctactggctctgcatagaagttatctgaccccaggagacagctcta
gtggttggaccgccggcgcagcagcctactatgtcgggtacttacagccacgcacgttccttctgaagtacaatgagaacgggacaatca
ctgacgcagtagactgtgcactggacccgctaagcgagactaagtgcacacttaaatccttcacggtggagaaaggcatttatcagacctc
taacttcagggtgcagccaacagaaagcattgtgcgattcccaaatattactaatctttgccctttcggggaggtctttaatgcaactagattc
gcatcagtctatgcgtggaaccgcaaacgcatttccaattgtgtcgcagactactcagtgctgtacaactctgcctctttcagtacgttcaagt
gttacggagtgtcacccactaaactgaacgacctgtgctttacaaatgtctacgctgactccttcgtgattaggggagacgaggtgagacaa
attgcccccggacagactgggaagattgccgactacaattataagcttcctgatgatttcactggctgtgttattgcctggaatagtaacaatc
tggatagcaaggtgggaggcaactataactacttatatcgactgtttaggaagagtaatctgaaaccatttgagcgggatatttccacagaa
atttaccaggccgggagcacaccatgtaatggggggagggatttaattgttacttcccactccagagctatggtttccaacccaccaatgg
agtgggttaccagccctatagagtcgtggtgcttagttttgagctgcttcacgccccagcaaccgtctgcggtcccaaaaagtcgaccaatc
tcgtgaaaaacaaatgcgtaaacttcaactttaacggcttaacaggaaccggcgtgctcaccgaaagcaacaagaaattccttccatttcag
caattcggaagggacatcgccgacacaacagacgcggtgagggacccacagactctggagatactggacatcactccttgttcgtttgg
gggcgtctcggtcatcacacccgggactaatactagtaatcaggtagcagttttatatcaaggcgtcaactgtaccgaagtacctgtggcca
tacacgctgatcagctaacgccaacatggcgagtctattccaccggctctaacgtttttcagaccagggctgggtgcctgataggggcaga
gcacgtcaataattcctatgagtgtgatatccccataggtgcggggatctgtgccagctatcaaacccaaaccaattcaccagggagcgca
agctctgtggcttctcagagcataattgcatatacaatgtcactgggcgctgagaatagcgttgcatactctaataacagcatagccattccc
acgaactttactatcagtgtgacaaccgaaatattgccagtttcgatgaccaaaactagcgtggattgcacgatgtacatctgtggagactct
accgaatgcagcaatctgctattacaatatggcagcttctgtacacagttaaatcgagccttgacaggcatcgcagtggaacaggacaaaa
atactcaagaggtgtttgcacaggtgaagcaaatctacaaaacgccccccattaaagattttggcgggttcaatttttcacaaattctccccga
cccgtctaagccgagtaagcggtccttcatcgaagatctgctctttaacaaagtaaccctcgccgatgccggctttattaagcagtatggcg
actgcctgggggatatagccgctcgtgacctgatttgcgcccagaagttcaatggtctgaccgtgttgcctcctttattgaccgatgaaatga
ttgcccagtacactagtgccctgctggccggcactatcacgtctgggtggaccttcggagctggtgccgccttgcagataccttttgcaatg
cagatggcctataggtttaatggtatcggagtgactcagaacgtactgtacgagaaccagaagctcatcgctaatcaatttaactccgctatc
ggaaaaatccaggacagcctctcttctacagctagcgctctgggcaaactgcaggatgtcgttaatcagaatgcccaggccctgaacacc
ttggttaaacaactatcttccaacttcggggccatatccagtgtgttgaatgatattctctcccgcttggatccacctgaagctgaggtgcaga
tcgatcgcttgatcaccggcagactgcagtccctccagacatatgtaactcagcagctgattagagccgccgagataagggcaagtgcga
atctggctgccaccaagatgagcgaatgtgtattgggccagagcaaacgagttgatttttgcggtaaggggtatcatttaatgtctttccctca
atccgcacctcatggcgtagttttcctgcatgtgacttatgtcccggctcaggagaagaattttaccacagcccccgcgatctgccatgacg
gaaaggcccacttcccccgggaaggcgtgtttgtatccaatgggactcactggtttgtcactcagcgaaatttttatgaaccacagatcatca
ccactgacaacacatttgttagtggaaactgcgatgtggtcatcggcatcgtgaataacactgtctatgatccactgcaacctgaactggatt
cttttaaagaggaactcgacaagtattttaaaaaccacactagccctgacgtggatctcggtgacatttctggcatcaacgctagcgtagtga
acattcagaaagagatagatagacttaatgaggtggccaagaacctcaacgaaagtctgatcgacctccaggaactggggaaatacgag
cagtacattaaatggccttggtacatatggctggggttcattgctgggctgatcgcaatagtgatggtgaccataatgctctgttgcatgacta
gctgctgcagctgcctgaagggctgctgtagttgtgggtcatgttgtaagtttgacgaagatgatagcgagcctgtccttaaaggagtgaag
ctccactacacctagtaacgaacggccgtatcacgcccaaacatttacagccgcggtgtcaaaaaccgcgtggacgtggttaacatccct
gctgggaggatcagccgtaattattataattggcttggtgctggctactattgtggccatgtacgtgctgaccaaccagaaacataattgaat
acagcagcaattggcaagctgcttacatagaactcgcggcgattggcatgccgccttaaaatttttattttattttttcttttcttttccgaat
cggattttgtttttaatatttcaaaaaaaaaaaaaaaaaaaaaaaaaaaaaaaaaaaaaaaaaaaaaaaaaaaaaaaaaaaaaaaaaaaaaaaa
aaaaaaaa

### REFERENCES

[0761] 1. Desrichard, A., Snyder, A. & Chan, T. A. Cancer Neoantigens and Applications for Immunotherapy. Clin. Cancer Res. Off, J. Am. Assoc. Cancer Res. (2015). doi:10.1158/1078-0432.CCR-14-3175
[0762] 2. Schumacher, T. N. & Schreiber, R. D. Neoantigens in cancer immunotherapy. Science 348, 69-74 (2015).
[0763] 3. Gubin, M. M., Artyomov, M. N., Mardis, E. R. & Schreiber, R. D. Tumor neoantigens: building a framework for personalized cancer immunotherapy. J. Clin. Invest. 125, 3413-3421 (2015).
[0764] 4. Rizvi, N. A. et al. Cancer immunology. Mutational landscape determines sensitivity to PD-1 blockade in non-small cell lung cancer. Science 348, 124-128 (2015).
[0765] 5. Snyder, A. et al. Genetic basis for clinical response to CTLA-4 blockade in melanoma. N. Engl. J. Med. 371, 2189-2199 (2014).
[0766] 6. Carreno, B. M. et al. Cancer immunotherapy. A dendritic cell vaccine increases the breadth and diversity of melanoma neoantigen-specific T cells. Science 348, 803-808 (2015).
[0767] 7. Tran, E. et al. Cancer immunotherapy based on mutation-specific CD4+ T cells in a patient with epithelial cancer. Science 344, 641-645 (2014).
[0768] 8. Hacohen, N. & Wu, C. J.-Y. United States Patent Application: 20110293637—COMPOSITIONS AND METHODS OF IDENTIFYING TUMOR SPECIFIC NEOANTIGENS. (A1). at ppftl.uspto.gov/netacgi/nph-Parser?Sect1=PTO1&Sect2=HITOFF&d=PG01&p=1&u=/netahtml/PTO/srchnum.html&r=1&f=G&1=50&s1=20110293637.PGNR.>
[0769] 9. Lundegaard, C., Hoof, I., Lund, O. & Nielsen, M. State of the art and challenges in sequence based T-cell epitope prediction. Immunome Res. 6 Suppl 2, S3 (2010).
[0770] 10. Yadav, M. et al. Predicting immunogenic tumour mutations by combining mass spectrometry and exome sequencing. Nature 515, 572-576 (2014).
[0771] 11. Bassani-Sternberg, M., Pletscher-Frankild, S., Jensen, L. J. & Mann, M. Mass spectrometry of human leukocyte antigen class I peptidomes reveals strong effects of protein abundance and turnover on antigen presentation. Mol. Cell. Proteomics MCP 14, 658-673 (2015).
[0772] 12. Van Allen, E. M. et al. Genomic correlates of response to CTLA-4 blockade in metastatic melanoma. Science 350, 207-211 (2015).
[0773] 13. Yoshida, K. & Ogawa, S. Splicing factor mutations and cancer. Wiley Interdiscip. Rev. RNA 5, 445-459 (2014).
[0774] 14. Cancer Genome Atlas Research Network. Comprehensive molecular profiling of lung adenocarcinoma. Nature 511, 543-550 (2014).
[0775] 15. Rajasagi, M. et al. Systematic identification of personal tumor-specific neoantigens in chronic lymphocytic leukemia. Blood 124, 453-462 (2014).
[0776] 16. Downing, S. R. et al. U.S. patent application 0,120,208,706—OPTIMIZATION OF MULTIGENE ANALYSIS OF TUMOR SAMPLES. (A1). at appft1.uspto.gov/netacgi/nph-Parser?Sect1=PTO1&Sect2=HITOFF&d=PG01&p=1&u=/netahtml/PTO/srchnum.html&r=1&f=G&l=50&s1=20120208706.PGNR.
[0777] 17. Target Capture for NextGen Sequencing—IDT. at www.idtdna.com/pages/products/nextgen/target-capture
[0778] 18. Shukla, S. A. et al. Comprehensive analysis of cancer-associated somatic mutations in class I HLA genes. Nat. Biotechnol. 33, 1152-1158 (2015).
[0779] 19. Cieslik, M. et al. The use of exome capture RNA-seq for highly degraded RNA with application to clinical cancer sequencing. Genome Res. 25, 1372-1381 (2015).
[0780] 20. Bodini, M. et al. The hidden genomic landscape of acute myeloid leukemia: subclonal structure revealed by undetected mutations. Blood 125, 600-605 (2015).
[0781] 21. Saunders, C. T. et al. Strelka: accurate somatic small-variant calling from sequenced tumor-normal sample pairs. Bioinforma. Oxf. Engl. 28, 1811-1817 (2012).
[0782] 22. Cibulskis, K. et al. Sensitive detection of somatic point mutations in impure and heterogeneous cancer samples. Nat. Biotechnol. 31, 213-219 (2013).
[0783] 23. Wilkerson, M. D. et al. Integrated RNA and DNA sequencing improves mutation detection in low purity tumors. Nucleic Acids Res. 42, e107 (2014).
[0784] 24. Mose, L. E., Wilkerson, M. D., Hayes, D. N., Perou, C. M. & Parker, J. S. ABRA: improved coding indel detection via assembly-based realignment. Bioinforma. Oxf Engl. 30, 2813-2815 (2014).
[0785] 25. Ye, K., Schulz, M. H., Long, Q., Apweiler, R. & Ning, Z. Pindel: a pattern growth approach to detect break points of large deletions and medium sized insertions from paired-end short reads. Bioinforma. Oxf Engl. 25, 2865-2871 (2009).
[0786] 26. Lam, H. Y. K. et al. Nucleotide-resolution analysis of structural variants using BreakSeq and a breakpoint library. Nat. Biotechnol. 28, 47-55 (2010).
[0787] 27. Frampton, G. M. et al. Development and validation of a clinical cancer genomic profiling test based on massively parallel DNA sequencing. Nat. Biotechnol. 31, 1023-1031 (2013).
[0788] 28. Boegel, S. et al. HLA typing from RNA-Seq sequence reads. Genome Med. 4, 102 (2012).
[0789] 29. Liu, C. et al. ATHLATES: accurate typing of human leukocyte antigen through exome sequencing. Nucleic Acids Res. 41, e142 (2013).
[0790] 30. Mayor, N. P. et al. HLA Typing for the Next Generation. PloS One 10, e0127153 (2015).
[0791] 31. Roy, C. K., Olson, S., Graveley, B. R., Zamore, P. D. & Moore, M. J. Assessing long-distance RNA sequence connectivity via RNA-templated DNA-DNA ligation. eLife 4, (2015).
[0792] 32. Song, L. & Florea, L. CLASS: constrained transcript assembly of RNA-seq reads. BMC Bioinformatics 14 Suppl 5, S14 (2013).
[0793] 33. Maretty, L., Sibbesen, J. A. & Krogh, A. Bayesian transcriptome assembly. Genome Biol. 15, 501 (2014).
[0794] 34. Pertea, M. et al. StringTie enables improved reconstruction of a transcriptome from RNA-seq reads. Nat. Biotechnol. 33, 290-295 (2015).
[0795] 35. Roberts, A., Pimentel, H., Trapnell, C. & Pachter, L. Identification of novel transcripts in annotated genomes using RNA-Seq. Bioinforma. Oxf. Engl. (2011). doi:10.1093/bioinformatics/btr355
[0796] 36. Vitting-Seerup, K., Porse, B. T., Sandelin, A. & Waage, J. spliceR: an R package for classification of alternative splicing and prediction of coding potential from RNA-seq data. BMC Bioinformatics 15, 81 (2014).
[0797] 37. Rivas, M. A. et al. Human genomics. Effect of predicted protein-truncating genetic variants on the human transcriptome. Science 348, 666-669 (2015).
[0798] 38. Skelly, D. A., Johansson, M., Madeoy, J., Wakefield, J. & Akey, J. M. A powerful and flexible statistical framework for testing hypotheses of allele-specific gene expression from RNA-seq data. Genome Res. 21, 1728-1737 (2011).
[0799] 39. Anders, S., Pyl, P. T. & Huber, W. HTSeq—a Python framework to work with high-throughput sequencing data. Bioinforma. Oxf Engl. 31, 166-169 (2015).
[0800] 40. Furney, S. J. et al. SF3B1 mutations are associated with alternative splicing in uveal melanoma. Cancer Discov. (2013). doi:10.1158/2159-8290.CD-13-0330
[0801] 41. Zhou, Q. et al. A chemical genetics approach for the functional assessment of novel cancer genes. Cancer Res. (2015). doi:10.1158/0008-5472.CAN-14-2930
[0802] 42. Maguire, S. L. et al. SF3B1 mutations constitute a novel therapeutic target in breast cancer. J. Pathol. 235, 571-580 (2015).
[0803] 43. Carithers, L. J. et al. A Novel Approach to High-Quality Postmortem Tissue Procurement: The GTEx Project. Biopreservation Biobanking 13, 311-319 (2015).
[0804] 44. Xu, G. et al. RNA CoMPASS: a dual approach for pathogen and host transcriptome analysis of RNA-seq datasets. PloS One 9, e89445 (2014).
[0805] 45. Andreatta, M. & Nielsen, M. Gapped sequence alignment using artificial neural networks: application to the MHC class I system. Bioinforma. Oxf Engl. (2015). doi:10.1093/bioinformatics/btv639
[0806] 46. Jorgensen, K. W., Rasmussen, M., Buus, S. & Nielsen, M. NetMHCstab—predicting stability of peptide-MHC-I complexes; impacts for cytotoxic T lymphocyte epitope discovery. Immunology 141, 18-26 (2014).
[0807] 47. Larsen, M. V. et al. An integrative approach to CTL epitope prediction: a combined algorithm integrating MHC class I binding, TAP transport efficiency, and proteasomal cleavage predictions. Eur. J. Immunol. 35, 2295-2303 (2005).
[0808] 48. Nielsen, M., Lundegaard, C., Lund, O. & Keşmir, C. The role of the proteasome in generating cytotoxic T-cell epitopes: insights obtained from improved predictions of proteasomal cleavage. Immunogenetics 57, 33-41 (2005).
[0809] 49. Boisvert, F.-M. et al. A Quantitative Spatial Proteomics Analysis of Proteome Turnover in Human Cells. Mol. Cell. Proteomics 11, M111.011429-M111.011429 (2012).
[0810] 50. Duan, F. et al. Genomic and bioinformatic profiling of mutational neoepitopes reveals new rules to predict anticancer immunogenicity. J. Exp. Med. 211, 2231-2248 (2014).
[0811] 51. Janeway's Immunobiology: 9780815345312: Medicine & Health Science Books @Amazon.com. at www.amazon.com/Janeways-Immunobiology-Kenneth-Murphy/dp/0815345313
[0812] 52. Calis, J. J. A. et al. Properties of MHC Class I Presented Peptides That Enhance Immunogenicity. PLoS Comput. Biol. 9, e1003266 (2013).
[0813] 53. Zhang, J. et al. Intratumor heterogeneity in localized lung adenocarcinomas delineated by multiregion sequencing. Science 346, 256-259 (2014)
[0814] 54. Walter, M. J. et al. Clonal architecture of secondary acute myeloid leukemia. N. Engl. J. Med. 366, 1090-1098 (2012).
[0815] 55. Hunt D F, Henderson R A, Shabanowitz J, Sakaguchi K, Michel H, Sevilir N, Cox A L, Appella E, Engelhard V H. Characterization of peptides bound to the class I MHC molecule HLA-A2.1 by mass spectrometry. Science 1992. 255: 1261-1263.
[0816] 56. Zarling A L, Polefrone J M, Evans A M, Mikesh L M, Shabanowitz J, Lewis S T, Engelhard V H, Hunt D F. Identification of class I MHC-associated phosphopeptides as targets for cancer immunotherapy. Proc Natl Acad Sci USA. 2006 Oct. 3; 103(40):14889-94.
[0817] 57. Bassani-Sternberg M, Pletscher-Frankild S, Jensen L J, Mann M. Mass spectrometry of human leukocyte antigen class I peptidomes reveals strong effects of protein abundance and turnover on antigen presentation. Mol Cell Proteomics. 2015 March; 14(3):658-73. doi: 10.1074/mcp.M114.042812.
[0818] 58. Abelin J G, Trantham P D, Penny S A, Patterson A M, Ward S T, Hildebrand W H, Cobbold M, Bai D L, Shabanowitz J, Hunt D F. Complementary IMAC enrichment methods for HLA-associated phosphopeptide identification by mass spectrometry. Nat Protoc. 2015 September; 10(9):1308-18. doi: 10.1038/nprot.2015.086. Epub 2015 Aug. 6
[0819] 59. Barnstable C J, Bodmer W F, Brown G, Galfre G, Milstein C, Williams A F, Ziegler A. Production of monoclonal antibodies to group A erythrocytes, HLA and other human cell surface antigens-new tools for genetic analysis. Cell. 1978 May; 14(1):9-20.
[0820] 60. Goldman J M, Hibbin J, Kearney L, Orchard K, Th'ng K H. HLA-DR monoclonal antibodies inhibit the proliferation of normal and chronic granulocytic leukaemia myeloid progenitor cells. Br J Haematol. 1982 November; 52(3):411-20.
[0821] 61. Eng J K, Jahan T A, Hoopmann M R. Comet: an open-source MS/MS sequence database search tool. Proteomics. 2013 January; 13(1):22-4. doi: 10.1002/pmic.201200439. Epub 2012 Dec. 4.
[0822] 62. Eng J K, Hoopmann M R, Jahan T A, Egertson J D, Noble W S, MacCoss M J. A deeper look into Comet—implementation and features. J Am Soc Mass Spectrom. 2015 November; 26(11):1865-74. doi: 10.1007/s13361-015-1179-x. Epub 2015 Jun. 27.
[0823] 63. Lukas Käll, Jesse Canterbury, Jason Weston, William Stafford Noble and Michael J. MacCoss. Semi-supervised learning for peptide identification from shotgun proteomics datasets. Nature Methods 4:923-925, November 2007
[0824] 64. Lukas Käll, John D. Storey, Michael J. MacCoss and William Stafford Noble. Assigning confidence measures to peptides identified by tandem mass spectrometry. Journal of Proteome Research, 7(1):29-34, January 2008
[0825] 65. Lukas Käll, John D. Storey and William Stafford Noble. Nonparametric estimation of posterior error probabilities associated with peptides identified by tandem mass spectrometry. Bioinformatics, 24(16):i42-i48, August 2008
[0826] 66. Kinney R M, B J Johnson, V L Brown, D W Trent. Nucleotide Sequence of the 26 S mRNA of the Virulent Trinidad Donkey Strain of Venezuelan Equine Encephalitis Virus and Deduced Sequence of the Encoded Structural Proteins. Virology 152 (2), 400-413. 1986 Jul. 30.
[0827] 67. Jill E Slansky, Frédérique M Rattis, Lisa F Boyd, Tarek Fahmy, Elizabeth M Jaffee, Jonathan P Schneck, David H Margulies, Drew M Pardoll. Enhanced Antigen-Specific Antitumor Immunity with Altered Peptide Ligands that Stabilize the MHC-Peptide-TCR Complex. Immunity, Volume 13, Issue 4, 1 Oct. 2000, Pages 529-538.
[0828] 68. A Y Huang, P H Gulden, A S Woods, M C Thomas, C D Tong, W Wang, V H Engelhard, G Pasternack, R Cotter, D Hunt, D M Pardoll, and E M Jaffee. The immunodominant major histocompatibility complex class I-restricted antigen of a murine colon tumor derives from an endogenous retroviral gene product. Proc Natl Acad Sci USA.; 93(18): 9730-9735, 1996 Sep. 3.
[0829] 69. JOHNSON, BARBARA J. B., RICHARD M. KINNEY, CRYSTLE L. KOST AND DENNIS W. TRENT. Molecular Determinants of Alphavirus Neurovirulence: Nucleotide and Deduced Protein Sequence Changes during Attenuation of Venezuelan Equine Encephalitis Virus. J Gen Virol 67:1951-1960, 1986.
[0830] 70. Aarnoudse, C. A., Krüse, M., Konopitzky, R., Brouwenstijn, N., and Schrier, P. I. (2002). TCR reconstitution in Jurkat reporter cells facilitates the identification of novel tumor antigens by cDNA expression cloning. Int J Cancer 99, 7-13.
[0831] 71. Alexander, J., Sidney, J., Southwood, S., Ruppert, J., Oseroff, C., Maewal, A., Snoke, K., Serra, H. M., Kubo, R. T., and Sette, A. (1994). Development of high potency universal DR-restricted helper epitopes by modification of high affinity DR-blocking peptides. Immunity 1, 751-761.
[0832] 72. Banu, N., Chia, A., Ho, Z. Z., Garcia, A. T., Paravasivam, K., Grotenbreg, G. M., Bertoletti, A., and Gehring, A. J. (2014). Building and optimizing a virus-specific T cell receptor library for targeted immunotherapy in viral infections. Scientific Reports 4, 4166.
[0833] 73. Cornet, S., Miconnet, I., Menez, J., Lemonnier, F., and Kosmatopoulos, K. (2006). Optimal organization of a polypeptide-based candidate cancer vaccine composed of cryptic tumor peptides with enhanced immunogenicity. Vaccine 24, 2102-2109.
[0834] 74. Depla, E., van der Aa, A., Livingston, B. D., Crimi, C., Allosery, K., de Brabandere, V., Krakover, J., Murthy, S., Huang, M., Power, S., et al. (2008). Rational design of a multiepitope vaccine encoding T-lymphocyte epitopes for treatment of chronic hepatitis B virus infections. Journal of Virology 82, 435-450.
[0835] 75. Ishioka, G. Y., Fikes, J., Hermanson, G., Livingston, B., Crimi, C., Qin, M., del Guercio, M. F., Oseroff, C., Dahlberg, C., Alexander, J., et al. (1999). Utilization of MHC class I transgenic mice for development of minigene DNA vaccines encoding multiple HLA-restricted CTL epitopes. J Immunol 162, 3915-3925.
[0836] 76. Janetzki, S., Price, L., Schroeder, H., Britten, C. M., Welters, M. J. P., and Hoos, A. (2015). Guidelines for the automated evaluation of Elispot assays. Nat Protoc 10, 1098-1115.
[0837] 77. Lyons, G. E., Moore, T., Brasic, N., Li, M., Roszkowski, J. J., and Nishimura, M. I. (2006). Influence of human CD8 on antigen recognition by T-cell receptor-transduced cells. Cancer Res 66, 11455-11461.
[0838] 78. Nagai, K., Ochi, T., Fujiwara, H., An, J., Shirakata, T., Mineno, J., Kuzushima, K., Shiku, H., Melenhorst, J. J., Gostick, E., et al. (2012). Aurora kinase A-specific T-cell receptor gene transfer redirects T lymphocytes to display effective antileukemia reactivity. Blood 119, 368-376.
[0839] 79. Panina-Bordignon, P., Tan, A., Termijtelen, A., Demotz, S., Corradin, G., and Lanzavecchia, A. (1989). Universally immunogenic T cell epitopes: promiscuous binding to human MHC class II and promiscuous recognition by T cells. Eur J Immunol 19, 2237-2242.
[0840] 80. Vitiello, A., Marchesini, D., Furze, J., Sherman, L. A., and Chesnut, R. W. (1991). Analysis of the HLA-restricted influenza-specific cytotoxic T lymphocyte response in transgenic mice carrying a chimeric human-mouse class I major histocompatibility complex. J Exp Med 173, 1007-1015.
[0841] 81. Yachi, P. P., Ampudia, J., Zal, T., and Gascoigne, N. R. J. (2006). Altered peptide ligands induce delayed CD8-T cell receptor interaction—a role for CD8 in distinguishing antigen quality. Immunity 25, 203-211.
[0842] 82. Pushko P, Parker M, Ludwig G V, Davis N L, Johnston R E, Smith J F. Replicon-helper systems from attenuated Venezuelan equine encephalitis virus: expression of heterologous genes in vitro and immunization against heterologous pathogens in vivo. Virology. 1997 Dec. 22; 239(2):389-401.
[0843] 83. Strauss, J H and E G Strauss. The alphaviruses: gene expression, replication, and evolution. Microbiol Rev. 1994 September; 58(3): 491-562.
[0844] 84. Rhême C, Ehrengruber M U, Grandgirard D. Alphaviral cytotoxicity and its implication in vector development. Exp Physiol. 2005 January; 90(1):45-52. Epub 2004 Nov. 12.
[0845] 85. Riley, Michael K. II, and Wilfred Vermerris. Recent Advances in Nanomaterials for Gene Delivery—A Review. Nanomaterials 2017, 7(5), 94.
[0846] 86. Frolov I, Hardy R, Rice C M. Cis-acting RNA elements at the 5′ end of Sindbis virus genome RNA regulate minus- and plus-strand RNA synthesis. RNA. 2001 November; 7(11):1638-51.
[0847] 87. Jose J, Snyder J E, Kuhn R J. A structural and functional perspective of alphavirus replication and assembly. Future Microbiol. 2009 September; 4(7):837-56.
[0848] 88. Bo Li and C. olin N. Dewey. RSEM: accurate transcript quantification from RNA-Seq data with or without a reference genome. BMC Bioinformatics, 12:323, August 2011
[0849] 89. Hillary Pearson, Tariq Daouda, Diana Paola Granados, Chantal Durette, Eric Bonneil, Mathieu Courcelles, Anja Rodenbrock, Jean-Philippe Laverdure, Caroline Côté, Sylvie Mader, Sébastien Lemieux, Pierre Thibault, and Claude Perreault. MHC class I-associated peptides derive from selective regions of the human genome. The Journal of Clinical Investigation, 2016,
[0850] 90. Juliane Liepe, Fabio Marino, John Sidney, Anita Jeko, Daniel E. Bunting, Alessandro Sette, Peter M. Kloetzel, Michael P. H. Stumpf, Albert J. R. Heck, Michele Mishto. A large fraction of HLA class I ligands are proteasome-generated spliced peptides. Science, 21, October 2016.
[0851] 91. Mommen G P., Marino, F., Meiring H D., Poelen, M C., van Gaans-van den Brink, J A., Mohammed S., Heck A J., and van Els C A. Sampling From the Proteome to the Human Leukocyte Antigen-D R (HLA-D R) Ligandome Proceeds Via High Specificity. Mol Cell Proteomics 15(4): 1412-1423, April 2016.
[0852] 92. Sebastian Kreiter, Mathias Vormehr, Niels van de Roemer, Mustafa Diken, Martin Löwer, Jan Diekmann, Sebastian Boegel, Barbara Schrërs, Fulvia Vascotto, John C. Castle, Arbel D. Tadmor, Stephen P. Schoenberger, Christoph Huber, Özlem Tureci, and Ugur Sahin. Mutant MHC class II epitopes drive therapeutic immune responses to caner. Nature 520, 692-696, April 2015.
[0853] 93. Tran E., Turcotte S., Gros A., Robbins P. F., Lu Y. C., Dudley M. E., Wunderlich J. R., Somerville R. P., Hogan K., Hinrichs C. S., Parkhurst M. R., Yang J. C., Rosenberg S. A. Cancer immunotherapy based on mutation-specific CD4+ T cells in a patient with epithelial cancer. Science 344(6184) 641-645, May 2014.
[0854] 94. Andreatta M., Karosiene E., Rasmussen M., Stryhn A., Buus S., Nielsen M. Accurate pan-specific prediction of peptide-MHC class II binding affinity with improved binding core identification. Immunogenetics 67(11-12) 641-650, November 2015.
[0855] 95. Nielsen, M., Lund, O. NN-align. An artificial neural network-based alignment algorithm for MHC class I I peptide binding prediction. BMC Bioinformatics 10:296, September 2009.
[0856] 96. Nielsen, M., Lundegaard, C., Lund, O. Prediction of MHC class II binding affinity using SMM-align, a novel stabilization matrix alignment method. BMC Bioinformatics 8:238, July 2007.
[0857] 97. Zhang, J., et al. PEAKS D B: de novo sequencing assisted database search for sensitive and accurate peptide identification. Molecular & Cellular Proteomics. 11(4):1-8. Jan. 2, 2012.
[0858] 98. Jensen, Kamilla Kjaergaard, et al. “Improved Methods for Prediting Peptide Binding Affinity to MHC Class II Molecules.” Immunology, 2018, doi:10.1111/imm.12889.
[0859] 99. Carter, S. L., Cibulskis, K., Helman, E., McKenna, A., Shen, H., Zack, T., Laird, P. W., Onofrio, R. C., Winckler, W., Weir, B. A., et al. (2012). Absolute quantification of somatic DNA alterations in human cancer. Nat. Biotechnol. 30, 413-421
[0860] 100. McGranahan, N., Rosenthal, R., Hiley, C. T., Rowan, A. J., Watkins, T. B. K., Wilson, G. A., Birkbak, N. J., Veeriah, S., Van Loo, P., Herrero, J., et al. (2017). Allele-Specific HLA Loss and Immune Escape in Lung Cancer Evolution. Cell 171, 1259-1271.e11.
[0861] 101. Shukla, S. A., Rooney, M. S., Rajasagi, M., Tiao, G., Dixon, P. M., Lawrence, M. S., Stevens, J., Lane, W. J., Dellagatta, J. L., Steelman, S., et al. (2015). Comprehensive analysis of cancer-associated somatic mutations in class I HLA genes. Nat. Biotechnol. 33, 1152-1158.
[0862] 102. Van Loo, P., Nordgard, S. H., Lingjærde, O. C., Russnes, H. G., Rye, I. H., Sun, W., Weigman, V. J., Marynen, P., Zetterberg, A., Naume, B., et al. (2010). Allele-specific copy number analysis of tumors. Proc. Natl. Acad. Sci. U.S.A 107, 16910-16915.
[0863] 103. Van Loo, P., Nordgard, S. H., Lingjorde, O. C., Russnes, H. G., Rye, I. H., Sun, W., Weigman, V. J., Marynen, P., Zetterberg, A., Naume, B., et al. (2010). Allele-specific copy number analysis of tumors. Proc. Natl. Acad. Sci. U.S.A 107, 16910-16915.

The application's sequence listing, which the Patent Office published only in electronic form, follows.

SEQUENCE LISTING (27983 sequences)

SEQ ID NO: 1 - DNA, 36519 bp, synthetic construct
  source 1..36519: mol_type = other DNA
ccatcttcaataatatacctcaaactttttgtgcgcgttaatatgcaaatgaggcgtttgaatttggggaggaagggcggtgattggtcgagggatgagcgaccgttaggggcggggcgagtgacgttttgatgacgtggttgcgaggaggagccagtttgcaagttctcgtgggaaaagtgacgtcaaacgaggtgtggtttgaacacggaaatactcaattttcccgcgctctctgacaggaaatgaggtgtttctgggcggatgcaagtgaaaacgggccattttcgcgcgaaaactgaatgaggaagtgaaaatctgagtaatttcgcgtttatggcagggaggagtatttgccgagggccgagtagactttgaccgattacgtgggggtttcgattaccgtgtttttcacctaaatttccgcgtacggtgtcaaagtccggtgtttttacgtaggtgtcagctgatcgccagggtatttaaacctgcgctctccagtcaagaggccactcttgagtgccagcgagaagagttttctcctccgcgccgcgagtcagatctacactttgaaagatgaggcacctgagagacctgcccgatgagaaaatcatcatcgcttccgggaacgagattctggaactggtggtaaatgccatgatgggcgacgaccctccggagccccccaccccatttgagacaccttcgctgcacgatttgtatgatctggaggtggatgtgcccgaggacgatcccaatgaggaggcggtaaatgatttttttagcgatgccgcgctgctagctgccgaggaggcttcgagctctagctcagacagcgactcttcactgcatacccctagacccggcagaggtgagaaaaagatccccgagcttaaaggggaagagatggacttgcgctgctatgaggaatgcttgcccccgagcgatgatgaggacgagcaggcgatccagaacgcagcgagccagggagtgcaagccgccagcgagagctttgcgctggactgcccgcctctgcccggacacggctgtaagtcttgtgaatttcatcgcatgaatactggagataaagctgtgttgtgtgcactttgctatatgagagcttacaaccattgtgtttacagtaagtgtgattaagttgaactttagagggaggcagagagcagggtgactgggcgatgactggtttatttatgtatatatgttctttatataggtcccgtctctgacgcagatgatgagacccccactacaaagtccacttcgtcacccccagaaattggcacatctccacctgagaatattgttagaccagttcctgttagagccactgggaggagagcagctgtggaatgtttggatgacttgctacagggtggggttgaacctttggacttgtgtacccggaaacgccccaggcactaagtgccacacatgtgtgtttacttgaggtgatgtcagtatttatagggtgtggagtgcaataaaaaatgtgttgactttaagtgcgtggtttatgactcaggggtggggactgtgagtatataagcaggtgcagacctgtgtggttagctcagagcggcatggagatttggacggtcttggaagactttcacaagactagacagctgctagagaacgcctcgaacggagtctcttacctgtggagattctgcttcggtggcgacctagctaggctagtctacagggccaaacaggattatagtgaacaatttgaggttattttgagagagtgttctggtctttttgacgctcttaacttgggccatcagtctcactttaaccagaggatttcgagagcccttgattttactactcctggcagaaccactgcagcagtagccttttttgcttttattcttgacaaatggagtcaagaaacccatttcagcagggattaccagctggatttcttagcagtagctttgtggagaacatggaagtgccagcgcctgaatgcaatctccggctacttgccggtacagccgctagacactctgaggatcctgaatctccaggagagtcccagggcacgccaacgtcgccagcagcagcagcaggaggaggatcaagaagagaacccgagagccggcctggaccctccggcggaggaggaggagtagctgacctgtttcctgaactgcgccgggtgctgactaggtcttcgagtggtcgggagagggggattaagcgggagaggcatgatgagactaatcacagaactgaactgactgtgggtctgatgagtcgcaagcgcccagaaacagtgtggtggcatgaggtgcagtcgactggcacagatgaggtgtcggtgatgcatgagaggttttctctagaacaagtcaagacttgttggttagagcctgaggatgattgggaggtagccatcaggaattatgccaagctggctctgaggccagacaagaagtacaagattactaagctgataaatatcagaaatgcctgctacatctcagggaatggggctgaagtggagatctgtctccaggaaagggtggctttcagatgctgcatgatgaatatgtacccgggagtggtgggcatggatggggttacctttatgaacatgaggttcaggggagatgggtataatggcacggtctttatggccaataccaagctgacagtccatggctgctccttctttgggtttaataacacctgcatcgaggcctggggtcaggtcggtgtgaggggctgcagtttttcagccaactggatgggggtcgtgggcaggaccaagagtatgctgtccgtgaagaaatgcttgtttgagaggtgccacctgggggtgatgagcgagggcgaagccagaatccgccactgcgcctctaccgagacgggctgctttgtgctgtgcaagggcaatgctaagatcaagcataatatgatctgtggagcctcggacgagcgcggctaccagatgctgacctgcgccggcgggaacagccatatgctggccaccgtacatgtggcttcccatgctcgcaagccctggcccgagttcgagcacaatgtcatgaccaggtgcaatatgcatctggggtcccgccgaggcatgttcatgccctaccagtgcaacctgaattatgtgaaggtgctgctggagcccgatgccatgtccagagtgagcctgacgggggtgtttgacatgaatgtggaggtgtggaagattctgagatatgatgaatccaagaccaggtgccgagcctgcgagtgcggagggaagcatgccaggttccagcccgtgtgtgtggatgtgacggaggacctgcgacccgatcatttggtgttgccctgcaccgggacggagttcggttccagcggggaagaatctgactagagtgagtagtgttctggggcgggggaggacctgcatgagggccagaataactgaaatctgtgcttttctgtgtgttgcagcagcatgagcggaagcggctcctttgagggaggggtattcagcccttatctgacggggcgtctcccctcctgggcgggagtgcgtcagaatgtgatgggatccacggtggacggccggcccgtgcagcccgcgaactcttcaaccctgacctatgcaaccctgagctcttcgtcgttggacgcagctgccgccgcagctgctgcatctgccgccagcgccgtgcgcggaatggccatgggcgccggctactacggcactctggtggccaactcgagttccaccaataatcccgccagcctgaacgaggagaagctgttgctgctgatggcccagctcgaggccttgacccagcgcctgggcgagctgacccagcaggtggctcagctgcaggagcagacgcgggccgcggttgccacggtgaaatccaaataaaaaatgaatcaataaataaacggagacggttgttgattttaacacagagtctgaatctttatttgatttttcgcgcgcggtaggccctggaccaccggtctcgatcattgagcacccggtggatcttttccaggacccggtagaggtgggcttggatgttgaggtacatgggcatgagcccgtcccgggggtggaggtagctccattgcagggcctcgtgctcgggggtggtgttgtaaatcacccagtcatagcaggggcgcagggcatggtgttgcacaatatctttgaggaggagactgatggccacgggcagccctttggtgtaggtgtttacaaatctgttgagctgggagggatgcatgcggggggagatgaggtgcatcttggcctggatcttgagattggcgatgttaccgcccagatcccgcctggggttcatgttgtgcaggaccaccagcacggtgtatccggtgcacttggggaatttatcatgcaacttggaagggaaggcgtgaaagaatttggcgacgcctttgtgcccgcccaggttttccatgcactcatccatgatgatggcgatgggcccgtgggcggcggcctgggcaaagacgtttcgggggtcggacacatcatagttgtggtcctgggtgaggtcatcataggccattttaatgaatttggggcggagggtgccggactgggggacaaaggtaccctcgatcccgggggcgtagttcccctcacagatctgcatctcccaggctttgagctcggagggggggatcatgtccacctgcggggcgataaagaacacggtttccggggcgggggagatgagctgggccgaaagcaagttccggagcagctgggacttgccgcagccggtggggccgtagatgaccccgatgaccggctgcaggtggtagttgagggagagacagctgccgtcctcccggaggaggggggccacctcgttcatcatctcgcgcacgtgcatgttctcgcgcaccagttccgccaggaggcgctctccccccagggataggagctcctggagcgaggcgaagtttttcagcggcttgagtccgtcggccatgggcattttggagagggtttgttgcaagagttccaggcggtcccagagctcggtgatgtgctctacggcatctcgatccagcagacctcctcgtttcgcgggttgggacggctgcgggagtagggcaccagacgatgggcgtccagcgcagccagggtccggtccttccagggtcgcagcgtccgcgtcagggtggtctccgtcacggtgaaggggtgcgcgccgggctgggcgcttgcgagggtgcgcttcaggctcatccggctggtcgaaaaccgctcccgatcggcgccctgcgcgtcggccaggtagcaattgaccatgagttcgtagttgagcgcctcggccgcgtggcctttggcgcggagcttacctttggaagtctgcccgcaggcgggacagaggagggacttgagggcgtagagcttgggggcgaggaagacggactcgggggcgtaggcgtccgcgccgcagtgggcgcagacggtctcgcactccacgagccaggtgaggtcgggctggtcggggtcaaaaaccagtttcccgccgttctttttgatgcgtttcttacctttggtctccatgagctcgtgtccccgctgggtgacaaagaggctgtccgtgtccccgtagaccgactttatgggccggtcctcgagcggtgtgccgcggtcctcctcgtagaggaaccccgcccactccgagacgaaagcccgggtccaggccagcacgaaggaggccacgtgggacgggtagcggtcgttgtccaccagcgggtccaccttttccagggtatgcaaacacatgtccccctcgtccacatccaggaaggtgattggcttgtaagtgtaggccacgtgaccgggggtcccggccgggggggtataaaagggtgcgggtccctgctcgtcctcactgtcttccggatcgctgtccaggagcgccagctgttggggtaggtattccctctcgaaggcgggcatgacctcggcactcaggttgtcagtttctagaaacgaggaggatttgatattgacggtgccggcggagatgcctttcaagagcccctcgtccatctggtcagaaaagacgatctttttgttgtcgagcttggtggcgaaggagccgtagagggcgttggagaggagcttggcgatggagcgcatggtctggtttttttccttgtcggcgcgctccttggcggcgatgttgagctgcacgtactcgcgcgccacgcacttccattcggggaagacggtggtcagctcgtcgggcacgattctgacctgccagccccgattatgcagggtgatgaggtccacactggtggccacctcgccgcgcaggggctcattagtccagcagaggcgtccgcccttgcgcgagcagaaggggggcagggggtccagcatgacctcgtcgggggggtcggcatcgatggtgaagatgccgggcaggaggtcggggtcaaagtagctgatggaagtggccagatcgtccagggcagcttgccattcgcgcacggccagcgcgcgctcgtagggactgaggggcgtgccccagggcatgggatgggtaagcgcggaggcgtacatgccgcagatgtcgtagacgtagaggggctcctcgaggatgccgatgtaggtggggtagcagcgccccccgcggatgctggcgcgcacgtagtcatacagctcgtgcgagggggcgaggagccccgggcccaggttggtgcgactgggcttttcggcgcggtagacgatctggcggaaaatggcatgcgagttggaggagatggtgggcctttggaagatgttgaagtgggcgtggggcagtccgaccgagtcgcggatgaagtgggcgtaggagtcttgcagcttggcgacgagctcggcggtgactaggacgtccagagcgcagtagtcgagggtctcctggatgatgtcatacttgagctgtcccttttgtttccacagctcgcggttgagaaggaactcttcgcggtccttccagtactcttcgagggggaacccgtcctgatctgcacggtaagagcctagcatgtagaactggttgacggccttgtaggcgcagcagcccttctccacggggagggcgtaggcctgggcggccttgcgcagggaggtgtgcgtgagggcgaaagtgtccctgaccatgaccttgaggaactggtgcttgaagtcgatatcgtcgcagcccccctgctcccagagctggaagtccgtgcgcttcttgtaggcggggttgggcaaagcgaaagtaacatcgttgaagaggatcttgcccgcgcggggcataaagttgcgagtgatgcggaaaggttggggcacctcggcccggttgttgatgacctgggcggcgagcacgatctcgtcgaagccgttgatgttgtggcccacgatgtagagttccacgaatcgcggacggcccttgacgtggggcagtttcttgagctcctcgtaggtgagctcgtcggggtcgctgagcccgtgctgctcgagcgcccagtcggcgagatgggggttggcgcggaggaaggaagtccagagatccacggccagggcggtttgcagacggtcccggtactgacggaactgctgcccgacggccattttttcgggggtgacgcagtagaaggtgcgggggtccccgtgccagcgatcccatttgagctggagggcgagatcgagggcgagctcgacgagccggtcgtccccggagagtttcatgaccagcatgaaggggacgagctgcttgccgaaggaccccatccaggtgtaggtttccacatcgtaggtgaggaagagcctttcggtgcgaggatgcgagccgatggggaagaactggatctcctgccaccaattggaggaatggctgttgatgtgatggaagtagaaatgccgacggcgcgccgaacactcgtgcttgtgtttatacaagcggccacagtgctcgcaacgctgcacgggatgcacgtgctgcacgagctgtacctgagttcctttgacgaggaatttcagtgggaagtggagtcgtggcgcctgcatctcgtgctgtactacgtcgtggtggtcggcctggccctcttctgcctcgatggtggtcatgctgacgagcccgcgcgggaggcaggtccagacctcggcgcgagcgggtcggagagcgaggacgagggcgcgcaggccggagctgtccagggtcctgagacgctgcggagtcaggtcagtgggcagcggcggcgcgcggttgacttgcaggagtttttccagggcgcgcgggaggtccagatggtacttgatctccaccgcgccattggtggcgacgtcgatggcttgcagggtcccgtgcccctggggtgtgaccaccgtcccccgtttcttcttgggcggctggggcgacgggggcggtgcctcttccatggttagaagcggcggcgaggacgcgcgccgggcggcaggggcggctcggggcccggaggcaggggcggcaggggcacgtcggcgccgcgcgcgggtaggttctggtactgcgcccggagaagactggcgtgagcgacgacgcgacggttgacgtcctggatctgacgcctctgggtgaaggccacgggacccgtgagtttgaacctgaaagagagttcgacagaatcaatctcggtatcgttgacggcggcctgccgcaggatctcttgcacgtcgcccgagttgtcctggtaggcgatctcggtcatgaactgctcgatctcctcctcttgaaggtctccgcggccggcgcgctccacggtggccgcgaggtcgttggagatgcggcccatgagctgcgagaaggcgttcatgcccgcctcgttccagacgcggctgtagaccacgacgccctcgggatcgcgggcgcgcatgaccacctgggcgaggttgagctccacgtggcgcgtgaagaccgcgtagttgcagaggcgctggtagaggtagttgagcgtggtggcgatgtgctcggtgacgaagaaatacatgatccagcggcggagcggcatctcgctgacgtcgcccagcgcctccaaacgttccatggcctcgtaaaagtccacggcgaagttgaaaaactgggagttgcgcgccgagacggtcaactcctcctccagaagacggatgagctcggcgatggtggcgcgcacctcgcgctcgaaggcccccgggagttcctccacttcctcttcttcctcctccactaacatctcttctacttcctcctcaggcggcagtggtggcgggggagggggcctgcgtcgccggcggcgcacgggcagacggtcgatgaagcgctcgatggtctcgccgcgccggcgtcgcatggtctcggtgacggcgcgcccgtcctcgcggggccgcagcgtgaagacgccgccgcgcatctccaggtggccgggggggtccccgttgggcagggagagggcgctgacgatgcatcttatcaattgccccgtagggactccgcgcaaggacctgagcgtctcgagatccacgggatctgaaaaccgctgaacgaaggcttcgagccagtcgcagtcgcaaggtaggctgagcacggtttcttctggcgggtcatgttggttgggagcggggcgggcgatgctgctggtgatgaagttgaaataggcggttctgagacggcggatggtggcgaggagcaccaggtctttgggcccggcttgctggatgcgcagacggtcggccatgccccaggcgtggtcctgacacctggccaggtccttgtagtagtcctgcatgagccgctccacgggcacctcctcctcgcccgcgcggccgtgcatgcgcgtgagcccgaagccgcgctggggctggacgagcgccaggtcggcgacgacgcgctcggcgaggatggcttgctggatctgggtgagggtggtctggaagtcatcaaagtcgacgaagcggtggtaggctccggtgttgatggtgtaggagcagttggccatgacggaccagttgacggtctggtggcccggacgcacgagctcgtggtacttgaggcgcgagtaggcgcgcgtgtcgaagatgtagtcgttgcaggtgcgcaccaggtactggtagccgatgaggaagtgcggcggcggctggcggtagagcggccatcgctcggtggcgggggcgccgggcgcgaggtcctcgagcatggtgcggtggtagccgtagatgtacctggacatccaggtgatgccggcggcggtggtggaggcgcgcgggaactcgcggacgcggttccagatgttgcgcagcggcaggaagtagttcatggtgggcacggtctggcccgtgaggcgcgcgcagtcgtggatgctctatacgggcaaaaacgaaagcggtcagcggctcgactccgtggcctggaggctaagcgaacgggttgggctgcgcgtgtaccccggttcgaatctcgaatcaggctggagccgcagctaacgtggtattggcactcccgtctcgacccaagcctgcaccaaccctccaggatacggaggcgggtcgttttgcaacttttttttggaggccggatgagactagtaagcgcggaaagcggccgaccgcgatggctcgctgccgtagtctggagaagaatcgccagggttgcgttgcggtgtgccccggttcgaggccggccggattccgcggctaacgagggcgtggctgccccgtcgtttccaagaccccatagccagccgacttctccagttacggagcgagcccctcttttgttttgtttgtttttgccagatgcatcccgtactgcggcagatgcgcccccaccaccctccaccgcaacaacagccccctccacagccggcgcttctgcccccgccccagcagcaacttccagccacgaccgccgcggccgccgtgagcggggctggacagagttatgatcaccagctggccttggaagagggcgaggggctggcgcgcctgggggcgtcgtcgccggagcggcacccgcgcgtgcagatgaaaagggacgctcgcgaggcctacgtgcccaagcagaacctgttcagagacaggagcggcgaggagcccgaggagatgcgcgcggcccggttccacgcggggcgggagctgcggcgcggcctggaccgaaagagggtgctgagggacgaggatttcgaggcggacgagctgacggggatcagccccgcgcgcgcgcacgtggccgcggccaacctggtcacggcgtacgagcagaccgtgaaggaggagagcaacttccaaaaatccttcaacaaccacgtgcgcaccctgatcgcgcgcgaggaggtgaccctgggcctgatgcacctgtgggacctgctggaggccatcgtgcagaaccccaccagcaagccgctgacggcgcagctgttcctggtggtgcagcatagtcgggacaacgaagcgttcagggaggcgctgctgaatatcaccgagcccgagggccgctggctcctggacctggtgaacattctgcagagcatcgtggtgcaggagcgcgggctgccgctgtccgagaagctggcggccatcaacttctcggtgctgagtttgggcaagtactacgctaggaagatctacaagaccccgtacgtgcccatagacaaggaggtgaagatcgacgggttttacatgcgcatgaccctgaaagtgctgaccctgagcgacgatctgggggtgtaccgcaacgacaggatgcaccgtgcggtgagcgccagcaggcggcgcgagctgagcgaccaggagctgatgcatagtctgcagcgggccctgaccggggccgggaccgagggggagagctactttgacatgggcgcggacctgcactggcagcccagccgccgggccttggaggcggcggcaggaccctacgtagaagaggtggacgatgaggtggacgaggagggcgagtacctggaagactgatggcgcgaccgtatttttgctagatgcaacaacaacagccacctcctgatcccgcgatgcgggcggcgctgcagagccagccgtccggcattaactcctcggacgattggacccaggccatgcaacgcatcatggcgctgacgacccgcaaccccgaagcctttagacagcagccccaggccaaccggctctcggccatcctggaggccgtggtgccctcgcgctccaaccccacgcacgagaaggtcctggccatcgtgaacgcgctggtggagaacaaggccatccgcggcgacgaggccggcctggtgtacaacgcgctgctggagcgcgtggcccgctacaacagcaccaacgtgcagaccaacctggaccgcatggtgaccgacgtgcgcgaggccgtggcccagcgcgagcggttccaccgcgagtccaacctgggatccatggtggcgctgaacgccttcctcagcacccagcccgccaacgtgccccggggccaggaggactacaccaacttcatcagcgccctgcgcctgatggtgaccgaggtgccccagagcgaggtgtaccagtccgggccggactacttcttccagaccagtcgccagggcttgcagaccgtgaacctgagccaggctttcaagaacttgcagggcctgtggggcgtgcaggccccggtcggggaccgcgcgacggtgtcgagcctgctgacgccgaactcgcgcctgctgctgctgctggtggcccccttcacggacagcggcagcatcaaccgcaactcgtacctgggctacctgattaacctgtaccgcgaggccatcggccaggcgcacgtggacgagcagacctaccaggagatcacccacgtgagccgcgccctgggccaggacgacccgggcaacctggaagccaccctgaactttttgctgaccaaccggtcgcagaagatcccgccccagtacgcgctcagcaccgaggaggagcgcatcctgcgttacgtgcagcagagcgtgggcctgttcctgatgcaggagggggccacccccagcgccgcgctcgacatgaccgcgcgcaacatggagcccagcatgtacgccagcaaccgcccgttcatcaataaactgatggactacttgcatcgggcggccgccatgaactctgactatttcaccaacgccatcctgaatccccactggctcccgccgccggggttctacacgggcgagtacgacatgcccgaccccaatgacgggttcctgtgggacgatgtggacagcagcgtgttctccccccgaccgggtgctaacgagcgccccttgtggaagaaggaaggcagcgaccgacgcccgtcctcggcgctgtccggccgcgagggtgctgccgcggcggtgcccgaggccgccagtcctttcccgagcttgcccttctcgctgaacagtatccgcagcagcgagctgggcaggatcacgcgcccgcgcttgctgggcgaagaggagtacttgaatgactcgctgttgagacccgagcgggagaagaacttccccaataacgggatagaaagcctggtggacaagatgagccgctggaagacgtatgcgcaggagcacagggacgatccccgggcgtcgcagggggccacgagccggggcagcgccgcccgtaaacgccggtggcacgacaggcagcggggacagatgtgggacgatgaggactccgccgacgacagcagcgtgttggacttgggtgggagtggtaacccgttcgctcacctgcgcccccgtatcgggcgcatgatgtaagagaaaccgaaaataaatgatactcaccaaggccatggcgaccagcgtgcgttcgtttcttctctgttgttgttgtatctagtatgatgaggcgtgcgtacccggagggtcctcctccctcgtacgagagcgtgatgcagcaggcgatggcggcggcggcgatgcagcccccgctggaggctccttacgtgcccccgcggtacctggcgcctacggaggggcggaacagcattcgttactcggagctggcacccttgtacgataccacccggttgtacctggtggacaacaagtcggcggacatcgcctcgctgaactaccagaacgaccacagcaacttcctgaccaccgtggtgcagaacaatgacttcacccccacggaggccagcacccagaccatcaactttgacgagcgctcgcggtggggcggccagctgaaaaccatcatgcacaccaacatgcccaacgtgaacgagttcatgtacagcaacaagttcaaggcgcgggtgatggtctcccgcaagacccccaatggggtgacagtgacagaggattatgatggtagtcaggatgagctgaagtatgaatgggtggaatttgagctgcccgaaggcaacttctcggtgaccatgaccatcgacctgatgaacaacgccatcatcgacaattacttggcggtggggcggcagaacggggtgctggagagcgacatcggcgtgaagttcgacactaggaacttcaggctgggctgggaccccgtgaccgagctggtcatgcccggggtgtacaccaacgaggctttccatcccgatattgtcttgctgcccggctgcggggtggacttcaccgagagccgcctcagcaacctgctgggcattcgcaagaggcagcccttccaggaaggcttccagatcatgtacgaggatctggaggggggcaacatccccgcgctcctggatgtcgacgcctatgagaaaagcaaggaggatgcagcagctgaagcaactgcagccgtagctaccgcctctaccgaggtcaggggcgataattttgcaagcgccgcagcagtggcagcggccgaggcggctgaaaccgaaagtaagatagtcattcagccggtggagaaggatagcaagaacaggagctacaacgtactaccggacaagataaacaccgcctaccgcagctggtacctagcctacaactatggcgaccccgagaagggcgtgcgctcctggacgctgctcaccacctcggacgtcacctgcggcgtggagcaagtctactggtcgctgcccgacatgatgcaagacccggtcaccttccgctccacgcgtcaagttagcaactacccggtggtgggcgccgagctcctgcccgtctactccaagagcttcttcaacgagcaggccgtctactcgcagcagctgcgcgccttcacctcgcttacgcacgtcttcaaccgcttccccgagaaccagatcctcgtccgcccgcccgcgcccaccattaccaccgtcagtgaaaacgttcctgctctcacagatcacgggaccctgccgctgcgcagcagtatccggggagtccagcgcgtgaccgttactgacgccagacgccgcacctgcccctacgtctacaaggccctgggcatagtcgcgccgcgcgtcctctcgagccgcaccttctaaatgtccattctcatctcgcccagtaataacaccggttggggcctgcgcgcgcccagcaagatgtacggaggcgctcgccaacgctccacgcaacaccccgtgcgcgtgcgcgggcacttccgcgctccctggggcgccctcaagggccgcgtgcggtcgcgcaccaccgtcgacgacgtgatcgaccaggtggtggccgacgcgcgcaactacacccccgccgccgcgcccgtctccaccgtggacgccgtcatcgacagcgtggtggccgacgcgcgccggtacgcccgcgccaagagccggcggcggcgcatcgcccggcggcaccggagcacccccgccatgcgcgcggcgcgagccttgctgcgcagggccaggcgcacgggacgcagggccatgctcagggcggccagacgcgcggcttcaggcgccagcgccggcaggacccggagacgcgcggccacggcggcggcagcggccatcgccagcatgtcccgcccgcggcgagggaacgtgtactgggtgcgcgacgccgccaccggtgtgcgcgtgcccgtgcgcacccgcccccctcgcacttgaagatgttcacttcgcgatgttgatgtgtcccagcggcgaggaggatgtccaagcgcaaattcaaggaagagatgctccaggtcatcgcgcctgagatctacggccctgcggtggtgaaggaggaaagaaagccccgcaaaatcaagcgggtcaaaaaggacaaaaaggaagaagaaagtgatgtggacggattggtggagtttgtgcgcgagttcgccccccggcggcgcgtgcagtggcgcgggcggaaggtgcaaccggtgctgagacccggcaccaccgtggtcttcacgcccggcgagcgctccggcaccgcttccaagcgctcctacgacgaggtgtacggggatgatgatattctggagcaggcggccgagcgcctgggcgagtttgcttacggcaagcgcagccgttccgcaccgaaggaagaggcggtgtccatcccgctggaccacggcaaccccacgccgagcctcaagcccgtgaccttgcagcaggtgctgccgaccgcggcgccgcgccgggggttcaagcgcgagggcgaggatctgtaccccaccatgcagctgatggtgcccaagcgccagaagctggaagacgtgctggagaccatgaaggtggacccggacgtgcagcccgaggtcaaggtgcggcccatcaagcaggtggccccgggcctgggcgtgcagaccgtggacatcaagattcccacggagcccatggaaacgcagaccgagcccatgatcaagcccagcaccagcaccatggaggtgcagacggatccctggatgccatcggctcctagtcgaagaccccggcgcaagtacggcgcggccagcctgctgatgcccaactacgcgctgcatccttccatcatccccacgccgggctaccgcggcacgcgcttctaccgcggtcataccagcagccgccgccgcaagaccaccactcgccgccgccgtcgccgcaccgccgctgcaaccacccctgccgccctggtgcggagagtgtaccgccgcggccgcgcacctctgaccctgccgcgcgcgcgctaccacccgagcatcgccatttaaactttcgcctgctttgcagatcaatggccctcacatgccgccttcgcgttcccattacgggctaccgaggaagaaaaccgcgccgtagaaggctggcggggaacgggatgcgtcgccaccaccaccggcggcggcgcgccatcagcaagcggttggggggaggcttcctgcccgcgctgatccccatcatcgccgcggcgatcggggcgatccccggcattgcttccgtggcggtgcaggcctctcagcgccactgagacacacttggaaacatcttgtaataaaccaatggactctgacgctcctggtcctgtgatgtgttttcgtagacagatggaagacatcaatttttcgtccctggctccgcgacacggcacgcggccgttcatgggcacctggagcgacatcggcaccagccaactgaacgggggcgccttcaattggagcagtctctggagcgggcttaagaatttcgggtccacgcttaaaacctatggcagcaaggcgtggaacagcaccacagggcaggcgctgagggataagctgaaagagcagaacttccagcagaaggtggtcgatgggctcgcctcgggcatcaacggggtggtggacctggccaaccaggccgtgcagcggcagatcaacagccgcctggacccggtgccgcccgccggctccgtggagatgccgcaggtggaggaggagctgcctcccctggacaagcggggcgagaagcgaccccgccccgatgcggaggagacgctgctgacgcacacggacgagccgcccccgtacgaggaggcggtgaaactgggtctgcccaccacgcggcccatcgcgcccctggccaccggggtgctgaaacccgaaaagcccgcgaccctggacttgcctcctccccagccttcccgcccctctacagtggctaagcccctgccgccggtggccgtggcccgcgcgcgacccgggggcaccgcccgccctcatgcgaactggcagagcactctgaacagcatcgtgggtctgggagtgcagagtgtgaagcgccgccgctgctattaaacctaccgtagcgcttaacttgcttgtctgtgtgtgtatgtattatgtcgccgccgccgctgtccaccagaaggaggagtgaagaggcgcgtcgccgagttgcaagatggccaccccatcgatgctgccccagtgggcgtacatgcacatcgccggacaggacgcttcggagtacctgagtccgggtctggtgcagtttgcccgcgccacagacacctacttcagtctggggaacaagtttaggaaccccacggtggcgcccacgcacgatgtgaccaccgaccgcagccagcggctgacgctgcgcttcgtgcccgtggaccgcgaggacaacacctactcgtacaaagtgcgctacacgctggccgtgggcgacaaccgcgtgctggacatggccagcacctactttgacatccgcggcgtgctggatcggggccctagcttcaaaccctactccggcaccgcctacaacagtctggcccccaagggagcacccaacacttgtcagtggacatataaagccgatggtgaaactgccacagaaaaaacctatacatatggaaatgcacccgtgcagggcattaacatcacaaaagatggtattcaacttggaactgacaccgatgatcagccaatctacgcagataaaacctatcagcctgaacctcaagtgggtgatgctgaatggcatgacatcactggtactgatgaaaagtatggaggcagagctcttaagcctgataccaaaatgaagccttgttatggttcttttgccaagcctactaataaagaaggaggtcaggcaaatgtgaaaacaggaacaggcactactaaagaatatgacatagacatggctttctttgacaacagaagtgcggctgctgctggcctagctccagaaattgttttgtatactgaaaatgtggatttggaaactccagatacccatattgtatacaaagcaggcacagatgacagcagctcttctattaatttgggtcagcaagccatgcccaacagacctaactacattggtttcagagacaactttatcgggctcatgtactacaacagcactggcaatatgggggtgctggccggtcaggcttctcagctgaatgctgtggttgacttgcaagacagaaacaccgagctgtcctaccagctcttgcttgactctctgggtgacagaacccggtatttcagtatgtggaatcaggcggtggacagctatgatcctgatgtgcgcattattgaaaatcatggtgtggaggatgaacttcccaactattgtttccctctggatgctgttggcagaacagatacttatcagggaattaaggctaatggaactgatcaaaccacatggaccaaagatgacagtgtcaatgatgctaatgagataggcaagggtaatccattcgccatggaaatcaacatccaagccaacctgtggaggaacttcctctacgccaacgtggccctgtacctgcccgactcttacaagtacacgccggccaatgttaccctgcccaccaacaccaacacctacgattacatgaacggccgggtggtggcgccctcgctggtggactcctacatcaacatcggggcgcgctggtcgctggatcccatggacaacgtgaaccccttcaaccaccaccgcaatgcggggctgcgctaccgctccatgctcctgggcaacgggcgctacgtgcccttccacatccaggtgccccagaaatttttcgccatcaagagcctcctgctcctgcccgggtcctacacctacgagtggaacttccgcaaggacgtcaacatgatcctgcagagctccctcggcaacgacctgcgcacggacggggcctccatctccttcaccagcatcaacctctacgccaccttcttccccatggcgcacaacacggcctccacgctcgaggccatgctgcgcaacgacaccaacgaccagtccttcaacgactacctctcggcggccaacatgctctaccccatcccggccaacgccaccaacgtgcccatctccatcccctcgcgcaactgggccgccttccgcggctggtccttcacgcgtctcaagaccaaggagacgccctcgctgggctccgggttcgacccctacttcgtctactcgggctccatcccctacctcgacggcaccttctacctcaaccacaccttcaagaaggtctccatcaccttcgactcctccgtcagctggcccggcaacgaccggctcctgacgcccaacgagttcgaaatcaagcgcaccgtcgacggcgagggctacaacgtggcccagtgcaacatgaccaaggactggttcctggtccagatgctggcccactacaacatcggctaccagggcttctacgtgcccgagggctacaaggaccgcatgtactccttcttccgcaacttccagcccatgagccgccaggtggtggacgaggtcaactacaaggactaccaggccgtcaccctggcctaccagcacaacaactcgggcttcgtcggctacctcgcgcccaccatgcgccagggccagccctaccccgccaactacccctacccgctcatcggcaagagcgccgtcaccagcgtcacccagaaaaagttcctctgcgacagggtcatgtggcgcatccccttctccagcaacttcatgtccatgggcgcgctcaccgacctcggccagaacatgctctatgccaactccgcccacgcgctagacatgaatttcgaagtcgaccccatggatgagtccacccttctctatgttgtcttcgaagtcttcgacgtcgtccgagtgcaccagccccaccgcggcgtcatcgaggccgtctacctgcgcacccccttctcggccggtaacgccaccacctaagctcttgcttcttgcaagccatggccgcgggctccggcgagcaggagctcagggccatcatccgcgacctgggctgcgggccctacttcctgggcaccttcgataagcgcttcccgggattcatggccccgcacaagctggcctgcgccatcgtcaacacggccggccgcgagaccgggggcgagcactggctggccttcgcctggaacccgcgctcgaacacctgctacctcttcgaccccttcgggttctcggacgagcgcctcaagcagatctaccagttcgagtacgagggcctgctgcgccgcagcgccctggccaccgaggaccgctgcgtcaccctggaaaagtccacccagaccgtgcagggtccgcgctcggccgcctgcgggctcttctgctgcatgttcctgcacgccttcgtgcactggcccgaccgccccatggacaagaaccccaccatgaacttgctgacgggggtgcccaacggcatgctccagtcgccccaggtggaacccaccctgcgccgcaaccaggaggcgctctaccgcttcctcaactcccactccgcctactttcgctcccaccgcgcgcgcatcgagaaggccaccgccttcgaccgcatgaatcaagacatgtaaaccgtgtgtgtatgttaaatgtctttaataaacagcactttcatgttacacatgcatctgagatgatttatttagaaatcgaaagggttctgccgggtctcggcatggcccgcgggcagggacacgttgcggaactggtacttggccagccacttgaactcggggatcagcagtttgggcagcggggtgtcggggaaggagtcggtccacagcttccgcgtcagttgcagggcgcccagcaggtcgggcgcggagatcttgaaatcgcagttgggacccgcgttctgcgcgcgggagttgcggtacacggggttgcagcactggaacaccatcagggccgggtgcttcacgctcgccagcaccgtcgcgtcggtgatgctctccacgtcgaggtcctcggcgttggccatcccgaagggggtcatcttgcaggtctgccttcccatggtgggcacgcacccgggcttgtggttgcaatcgcagtgcagggggatcagcatcatctgggcctggtcggcgttcatccccgggtacatggccttcatgaaagcctccaattgcctgaacgcctgctgggccttggctccctcggtgaagaagaccccgcaggacttgctagagaactggttggtggcgcacccggcgtcgtgcacgcagcagcgcgcgtcgttgttggccagctgcaccacgctgcgcccccagcggttctgggtgatcttggcccggtcggggttctccttcagcgcgcgctgcccgttctcgctcgccacatccatctcgatcatgtgctccttctggatcatggtggtcccgtgcaggcaccgcagcttgccctcggcctcggtgcacccgtgcagccacagcgcgcacccggtgcactcccagttcttgtgggcgatctgggaatgcgcgtgcacgaagccctgcaggaagcggcccatcatggtggtcagggtcttgttgctagtgaaggtcagcggaatgccgcggtgctcctcgttgatgtacaggtggcagatgcggcggtacacctcgccctgctcgggcatcagctggaagttggctttcaggtcggtctccacgcggtagcggtccatcagcatagtcatgatttccatacccttctcccaggccgagacgatgggcaggctcatagggttcttcaccatcatcttagcgctagcagccgcggccagggggtcgctctcgtccagggtctcaaagctccgcttgccgtccttctcggtgatccgcaccggggggtagctgaagcccacggccgccagctcctcctcggcctgtctttcgtcctcgctgtcctggctgacgtcctgcaggaccacatgcttggtcttgcggggtttcttcttgggcggcagcggcggcggagatgttggagatggcgagggggagcgcgagttctcgctcaccactactatctcttcctcttcttggtccgaggccacgcggcggtaggtatgtctcttcgggggcagaggcggaggcgacgggctctcgccgccgcgacttggcggatggctggcagagccccttccgcgttcgggggtgcgctcccggcggcgctctgactgacttcctccgcggccggccattgtgttctcctagggaggaacaacaagcatggagactcagccatcgccaacctcgccatctgcccccaccgccgacgagaagcagcagcagcagaatgaaagcttaaccgccccgccgcccagccccgccacctccgacgcggccgtcccagacatgcaagagatggaggaatccatcgagattgacctgggctatgtgacgcccgcggagcacgaggaggagctggcagtgcgcttttcacaagaagagatacaccaagaacagccagagcaggaagcagagaatgagcagagtcaggctgggctcgagcatgacggcgactacctccacctgagcgggggggaggacgcgctcatcaagcatctggcccggcaggccaccatcgtcaaggatgcgctgctcgaccgcaccgaggtgcccctcagcgtggaggagctcagccgcgcctacgagttgaacctcttctcgccgcgcgtgccccccaagcgccagcccaatggcacctgcgagcccaacccgcgcctcaacttctacccggtcttcgcggtgcccgaggccctggccacctaccacatctttttcaagaaccaaaagatccccgtctcctgccgcgccaaccgcacccgcgccgacgcccttttcaacctgggtcccggcgcccgcctacctgatatcgcctccttggaagaggttcccaagatcttcgagggtctgggcagcgacgagactcgggccgcgaacgctctgcaaggagaaggaggagagcatgagcaccacagcgccctggtcgagttggaaggcgacaacgcgcggctggcggtgctcaaacgcacggtcgagctgacccatttcgcctacccggctctgaacctgccccccaaagtcatgagcgcggtcatggaccaggtgctcatcaagcgcgcgtcgcccatctccgaggacgagggcatgcaagactccgaggagggcaagcccgtggtcagcgacgagcagctggcccggtggctgggtcctaatgctagtccccagagtttggaagagcggcgcaaactcatgatggccgtggtcctggtgaccgtggagctggagtgcctgcgccgcttcttcgccgacgcggagaccctgcgcaaggtcgaggagaacctgcactacctcttcaggcacgggttcgtgcgccaggcctgcaagatctccaacgtggagctgaccaacctggtctcctacatgggcatcttgcacgagaaccgcctggggcagaacgtgctgcacaccaccctgcgcggggaggcccggcgcgactacatccgcgactgcgtctacctctacctctgccacacctggcagacgggcatgggcgtgtggcagcagtgtctggaggagcagaacctgaaagagctctgcaagctcctgcagaagaacctcaagggtctgtggaccgggttcgacgagcgcaccaccgcctcggacctggccgacctcattttccccgagcgcctcaggctgacgctgcgcaacggcctgcccgactttatgagccaaagcatgttgcaaaactttcgctctttcatcctcgaacgctccggaatcctgcccgccacctgctccgcgctgccctcggacttcgtgccgctgaccttccgcgagtgccccccgccgctgtggagccactgctacctgctgcgcctggccaactacctggcctaccactcggacgtgatcgaggacgtcagcggcgagggcctgctcgagtgccactgccgctgcaacctctgcacgccgcaccgctccctggcctgcaacccccagctgctgagcgagacccagatcatcggcaccttcgagttgcaagggcccagcgaaggcgagggttcagccgccaaggggggtctgaaactcaccccggggctgtggacctcggcctacttgcgcaagttcgtgcccgaggactaccatcccttcgagatcaggttctacgaggaccaatcccatccgcccaaggccgagctgtcggcctgcgtcatcacccagggggcgatcctggcccaattgcaagccatccagaaatcccgccaagaattcttgctgaaaaagggccgcggggtctacctcgacccccagaccggtgaggagctcaaccccggcttcccccaggatgccccgaggaaacaagaagctgaaagtggagctgccgcccgtggaggatttggaggaagactgggagaacagcagtcaggcagaggaggaggagatggaggaagactgggacagcactcaggcagaggaggacagcctgcaagacagtctggaggaagacgaggaggaggcagaggaggaggtggaagaagcagccgccgccagaccgtcgtcctcggcgggggagaaagcaagcagcacggataccatctccgctccgggtcggggtcccgctcgaccacacagtagatgggacgagaccggacgattcccgaaccccaccacccagaccggtaagaaggagcggcagggatacaagtcctggcgggggcacaaaaacgccatcgtctcctgcttgcaggcctgcgggggcaacatctccttcacccggcgctacctgctcttccaccgcggggtgaactttccccgcaacatcttgcattactaccgtcacctccacagcccctactacttccaagaagaggcagcagcagcagaaaaagaccagcagaaaaccagcagctagaaaatccacagcggcggcagcaggtggactgaggatcgcggcgaacgagccggcgcaaacccgggagctgaggaaccggatctttcccaccctctatgccatcttccagcagagtcgggggcaggagcaggaactgaaagtcaagaaccgttctctgcgctcgctcacccgcagttgtctgtatcacaagagcgaagaccaacttcagcgcactctcgaggacgccgaggctctcttcaacaagtactgcgcgctcactcttaaagagtagcccgcgcccgcccagtcgcagaaaaaggcgggaattacgtcacctgtgcccttcgccctagccgcctccacccatcatcatgagcaaagagattcccacgccttacatgtggagctaccagccccagatgggcctggccgccggtgccgcccaggactactccacccgcatgaattggctcagcgccgggcccgcgatgatctcacgggtgaatgacatccgcgcccaccgaaaccagatactcctagaacagtcagcgctcaccgccacgccccgcaatcacctcaatccgcgtaattggcccgccgccctggtgtaccaggaaattccccagcccacgaccgtactacttccgcgagacgcccaggccgaagtccagctgactaactcaggtgtccagctggcgggcggcgccaccctgtgtcgtcaccgccccgctcagggtataaagcggctggtgatccggggcagaggcacacagctcaacgacgaggtggtgagctcttcgctgggtctgcgacctgacggagtcttccaactcgccggatcggggagatcttccttcacgcctcgtcaggccgtcctgactttggagagttcgtcctcgcagccccgctcgggtggcatcggcactctccagttcgtggaggagttcactccctcggtctacttcaaccccttctccggctcccccggccactacccggacgagttcatcccgaacttcgacgccatcagcgagtcggtggacggctacgattgaatgtcccatggtggcgcagctgacctagctcggcttcgacacctggaccactgccgccgcttccgctgcttcgctcgggatctcgccgagtttgcctactttgagctgcccgaggagcaccctcagggcccggcccacggagtgcggatcgtcgtcgaagggggcctcgactcccacctgcttcggatcttcagccagcgtccgatcctggtcgagcgcgagcaaggacagacccttctgactctgtactgcatctgcaaccaccccggcctgcatgaaagtctttgttgtctgctgtgtactgagtataataaaagctgagatcagcgactactccggacttccgtgtgttcctgaatccatcaaccagtctttgttcttcaccgggaacgagaccgagctccagctccagtgtaagccccacaagaagtacctcacctggctgttccagggctccccgatcgccgttgtcaaccactgcgacaacgacggagtcctgctgagcggccctgccaaccttactttttccacccgcagaagcaagctccagctcttccaacccttcctccccgggacctatcagtgcgtctcgggaccctgccatcacaccttccacctgatcccgaataccacagcgtcgctccccgctactaacaaccaaactaacctccaccaacgccaccgtcgcgacctttctgaatctaatactaccacccacaccggaggtgagctccgaggtcaaccaacctctgggatttactacggcccctgggaggtggttgggttaatagcgctaggcctagttgcgggtgggcttttggttctctgctacctatacctcccttgctgttcgtacttagtggtgctgtgttgctggtttaagaaatggggaagatcaccctagtgagctgcggtgcgctggtggcggtgttgctttcgattgtgggactgggcggtgcggctgtagtgaaggagaaggccgatccctgcttgcatttcaatcccaacaaatgccagctgagttttcagcccgatggcaatcggtgcgcggtactgatcaagtgcggatgggaatgcgagaacgtgagaatcgagtacaataacaagactcggaacaatactctcgcgtccgtgtggcagcccggggaccccgagtggtacaccgtctctgtccccggtgctgacggctccccgcgcaccgtgaataatactttcatttttgcgcacatgtgcgacacggtcatgtggatgagcaagcagtacgatatgtggccccccacgaaggagaacatcgtggtcttctccatcgcttacagcctgtgcacggcgctaatcaccgctatcgtgtgcctgagcattcacatgctcatcgctattcgccccagaaataatgccgaaaaagaaaaacagccataacgttttttttcacacctttttcagaccatggcctctgttaaatttttgcttttatttgccagtctcattgccgtcattcatggaatgagtaatgagaaaattactatttacactggcactaatcacacattgaaaggtccagaaaaagccacagaagtttcatggtattgttattttaatgaatcagatgtatctactgaactctgtggaaacaataacaaaaaaaatgagagcattactctcatcaagtttcaatgtggatctgacttaaccctaattaacatcactagagactatgtaggtatgtattatggaactacagcaggcatttcggacatggaattttatcaagtttctgtgtctgaacccaccacgcctagaatgaccacaaccacaaaaactacacctgttaccactatgcagctcactaccaataacatttttgccatgcgtcaaatggtcaacaatagcactcaacccaccccacccagtgaggaaattcccaaatccatgattggcattattgttgctgtagtggtgtgcatgttgatcatcgccttgtgcatggtgtactatgccttctgctacagaaagcacagactgaacgacaagctggaacacttactaagtgttgaattttaattttttagaaccatgaagatcctaggccttttaattttttctatcattacctctgctctatgcaattctgacaatgaggacgttactgtcgttgtcggatcaaattatacactgaaaggtccagcgaagggtatgctttcgtggtattgctattttggatctgacactacagaaactgaattatgcaatcttaagaatggcaaaattcaaaattctaaaattaacaattatatatgcaatggtactgatctgatactcctcaatatcacgaaatcatatgctggcagttacacctgccctggagatgatgctgacagtatgattttttacaaagtaactgttgttgatcccactactccacctccacccaccacaactactcacaccacacacacagatcaaaccgcagcagaggaggcagcaaagttagccttgcaggtccaagacagttcatttgttggcattacccctacacctgatcagcggtgtccggggctgctagtcagcggcattgtcggtgtgctttcgggattagcagtcataatcatctgcatgttcatttttgcttgctgctatagaaggctttaccgacaaaaatcagacccactgctgaacctctatgtttaattttttccagagtcatgaaggcagttagcgctctagttttttgttctttgattggcattgttttttgcaatcctattcctaaagttagctttattaaagatgtgaatgttactgaggggggcaatgtgacactggtaggtgtagagggtgctgaaaacaccacctggacaaaataccacctcaatgggtggaaagatatttgcaattggagtgtattagtttatacatgtgagggagttaatcttaccattgtcaatgccacctcagctcaaaatggtagaattcaaggacaaagtgtcagtgtatctaatgggtattttacccaacatacttttatctatgacgttaaagtcataccactgcctacgcctagcccacctagcactaccacacagacaacccacactacacagacaaccacatacagtacattaaatcagcctaccaccactacagcagcagaggttgccagctcgtctggggtccgagtggcatttttgatgtgggccccatctagcagtcccactgctagtaccaatgagcagactactgaatttttgtccactgtcgagagccacaccacagctacctccagtgccttctctagcaccgccaatctctcctcgctttcctctacaccaatcagtcccgctactactcctagccccgctcctcttcccactcccctgaagcaaacagacggcggcatgcaatggcagatcaccctgctcattgtgatcgggttggtcatcctggccgtgttgctctactacatcttctgccgccgcattcccaacgcgcaccgcaagccggtctacaagcccatcattgtcgggcagccggagccgcttcaggtggaagggggtctaaggaatcttctcttctcttttacagtatggtgattgaactatgattcctagacaattcttgatcactattcttatctgcctcctccaagtctgtgccaccctcgctctggtggccaacgccagtccagactgtattgggcccttcgcctcctacgtgctctttgccttcaccacctgcatctgctgctgtagcatagtctgcctgcttatcaccttcttccagttcattgactggatctttgtgcgcatcgcctacctgcgccaccacccccagtaccgcgaccagcgagtggcgcggctgctcaggctcctctgataagcatgcgggctctgctacttctcgcgcttctgctgttagtgctcccccgtcccgtcgacccccggtcccccacccagtcccccgaggaggtccgcaaatgcaaattccaagaaccctggaaattcctcaaatgctaccgccaaaaatcagacatgcatcccagctggatcatgatcattgggatcgtgaacattctggcctgcaccctcatctcctttgtgatttacccctgctttgactttggttggaactcgccagaggcgctctatctcccgcctgaacctgacacaccaccacagcaacctcaggcacacgcactaccaccactacagcctaggccacaatacatgcccatattagactatgaggccgagccacagcgacccatgctccccgctattagttacttcaatctaaccggcggagatgactgacccactggccaacaacaacgtcaacgaccttctcctggacatggacggccgcgcctcggagcagcgactcgcccaacttcgcattcgccagcagcaggagagagccgtcaaggagctgcaggatgcggtggccatccaccagtgcaagagaggcatcttctgcctggtgaaacaggccaagatctcctacgaggtcactccaaacgaccatcgcctctcctacgagctcctgcagcagcgccagaagttcacctgcctggtcggagtcaaccccatcgtcatcacccagcagtctggcgataccaaggggtgcatccactgctcctgcgactcccccgactgcgtccacactctgatcaagaccctctgcggcctccgcgacctcctccccatgaactaatcacccccttatccagtgaaataaagatcatattgatgatgattttacagaaataaaaaataatcatttgatttgaaataaagatacaatcatattgatgatttgagtttaacaaaaaaataaagaatcacttacttgaaatctgataccaggtctctgtccatgttttctgccaacaccacttcactcccctcttcccagctctggtactgcaggccccggcgggctgcaaacttcctccacacgctgaaggggatgtcaaattcctcctgtccctcaatcttcattttatcttctatcagatgtccaaaaagcgcgtccgggtggatgatgacttcgaccccgtctacccctacgatgcagacaacgcaccgaccgtgcccttcatcaacccccccttcgtctcttcagatggattccaagagaagcccctgggggtgttgtccctgcgactggccgaccccgtcaccaccaagaacggggaaatcaccctcaagctgggagagggggtggacctcgattcctcgggaaaactcatctccaacacggccaccaaggccgccgcccctctcagtttttccaacaacaccatttcccttaacatggatcaccccttttacactaaagatggaaaattatccttacaagtttctccaccattaaatatactgagaacaagcattctaaacacactagctttaggttttggatcaggtttaggactccgtggctctgccttggcagtacagttagtctctccacttacatttgatactgatggaaacataaagcttaccttagacagaggtttgcatgttacaacaggagatgcaattgaaagcaacataagctgggctaaaggtttaaaatttgaagatggagccatagcaaccaacattggaaatgggttagagtttggaagcagtagtacagaaacaggtgttgatgatgcttacccaatccaagttaaacttggatctggccttagctttgacagtacaggagccataatggctggtaacaaagaagacgataaactcactttgtggacaacacctgatccatcaccaaactgtcaaatactcgcagaaaatgatgcaaaactaacactttgcttgactaaatgtggtagtcaaatactggccactgtgtcagtcttagttgtaggaagtggaaacctaaaccccattactggcaccgtaagcagtgctcaggtgtttctacgttttgatgcaaacggtgttcttttaacagaacattctacactaaaaaaatactgggggtataggcagggagatagcatagatggcactccatataccaatgctgtaggattcatgcccaatttaaaagcttatccaaagtcacaaagttctactactaaaaataatatagtagggcaagtatacatgaatggagatgtttcaaaacctatgcttctcactataaccctcaatggtactgatgacagcaacagtacatattcaatgtcattttcatacacctggactaatggaagctatgttggagcaacatttggggctaactcttataccttctcatacatcgcccaagaatgaacactgtatcccaccctgcatgccaacccttcccaccccactctgtggaacaaactctgaaacacaaaataaaataaagttcaagtgttttattgattcaacagttttacaggattcgagcagttatttttcctccaccctcccaggacatggaatacaccaccctctccccccgcacagccttgaacatctgaatgccattggtgatggacatgcttttggtctccacgttccacacagtttcagagcgagccagtctcgggtcggtcagggagatgaaaccctccgggcactcccgcatctgcacctcacagctcaacagctgaggattgtcctcggtggtcgggatcacggttatctggaagaagcagaagagcggcggtgggaatcatagtccgcgaacgggatcggccggtggtgtcgcatcaggccccgcagcagtcgctgccgccgccgctccgtcaagctgctgctcagggggtccgggtccagggactccctcagcatgatgcccacggccctcagcatcagtcgtctggtgcggcgggcgcagcagcgcatgcggatctcgctcaggtcgctgcagtacgtgcaacacagaaccaccaggttgttcaacagtccatagttcaacacgctccagccgaaactcatcgcgggaaggatgctacccacgtggccgtcgtaccagatcctcaggtaaatcaagtggtgccccctccagaacacgctgcccacgtacatgatctccttgggcatgtggcggttcaccacctcccggtaccacatcaccctctggttgaacatgcagccccggatgatcctgcggaaccacagggccagcaccgccccgcccgccatgcagcgaagagaccccgggtcccggcaatggcaatggaggacccaccgctcgtacccgtggatcatctgggagctgaacaagtctatgttggcacagcacaggcatatgctcatgcatctcttcagcactctcaactcctcgggggtcaaaaccatatcccagggcacggggaactcttgcaggacagcgaaccccgcagaacagggcaatcctcgcacagaacttacattgtgcatggacagggtatcgcaatcaggcagcaccgggtgatcctccaccagagaagcgcgggtctcggtctcctcacagcgtggtaagggggccggccgatacgggtgatggcgggacgcggctgatcgtgttcgcgaccgtgtcatgatgcagttgctttcggacattttcgtacttgctgtagcagaacctggtccgggcgctgcacaccgatcgccggcggcggtctcggcgcttggaacgctcggtgttgaaattgtaaaacagccactctctcagaccgtgcagcagatctagggcctcaggagtgatgaagatcccatcatgcctgatggctctgatcacatcgaccaccgtggaatgggccagacccagccagatgatgcaattttgttgggtttcggtgacggcgggggagggaagaacaggaagaaccatgattaacttttaatccaaacggtctcggagtacttcaaaatgaagatcgcggagatggcacctctcgcccccgctgtgttggtggaaaataacagccaggtcaaaggtgatacggttctcgagatgttccacggtggcttccagcaaagcctccacgcgcacatccagaaacaagacaatagcgaaagcgggagggttctctaattcctcaatcatcatgttacactcctgcaccatccccagataattttcatttttccagccttgaatgattcgaactagttcctgaggtaaatccaagccagccatgataaagagctcgcgcagagcgccctccaccggcattcttaagcacaccctcataattccaagatattctgctcctggttcacctgcagcagattgacaagcggaatatcaaaatctctgccgcgatccctgagctcctccctcagcaataactgtaagtactctttcatatcctctccgaaatttttagccataggaccaccaggaataagattagggcaagccacagtacagataaaccgaagtcctccccagtgagcattgccaaatgcaagactgctataagcatgctggctagacccggtgatatcttccagataactggacagaaaatcgcccaggcaatttttaagaaaatcaacaaaagaaaaatcctccaggtggacgtttagagcctcgggaacaacgatgaagtaaatgcaagcggtgcgttccagcatggttagttagctgatctgtagaaaaaacaaaaatgaacattaaaccatgctagcctggcgaacaggtgggtaaatcgttctctccagcaccaggcaggccacggggtctccggcgcgaccctcgtaaaaattgtcgctatgattgaaaaccatcacagagagacgttcccggtggccggcgtgaatgattcgacaagatgaatacacccccggaacattggcgtccgcgagtgaaaaaaagcgcccgaggaagcaataaggcactacaatgctcagtctcaagtccagcaaagcgatgccatgcggatgaagcacaaaattctcaggtgcgtacaaaatgtaattactcccctcctgcacaggcagcaaagcccccgatccctccaggtacacatacaaagcctcagcgtccatagcttaccgagcagcagcacacaacaggcgcaagagtcagagaaaggctgagctctaacctgtccacccgctctctgctcaatatatagcccagatctacactgacgtaaaggccaaagtctaaaaatacccgccaaataatcacacacgcccagcacacgcccagaaaccggtgacacactcaaaaaaatacgcgcacttcctcaaacgcccaaaactgccgtcatttccgggttcccacgctacgtcatcaaaacacgactttcaaattccgtcgaccgttaaaaacgtcacccgccccgcccctaacggtcgcccgtctctcagccaatcagcgccccgcatccccaaattcaaacacctcatttgcatattaacgcgcacaaaaagtttgaggtatattattgatgatgg

SEQ ID NO: 2 - DNA, 31588 bp, synthetic construct
  source 1..31588: mol_type = other DNA
ccatcttcaataatatacctcaaactttttgtgcgcgttaatatgcaaatgaggcgtttgaatttggggaggaagggcggtgattggtcgagggatgagcgaccgttaggggcggggcgagtgacgttttgatgacgtggttgcgaggaggagccagtttgcaagttctcgtgggaaaagtgacgtcaaacgaggtgtggtttgaacacggaaatactcaattttcccgcgctctctgacaggaaatgaggtgtttctgggcggatgcaagtgaaaacgggccattttcgcgcgaaaactgaatgaggaagtgaaaatctgagtaatttcgcgtttatggcagggaggagtatttgccgagggccgagtagactttgaccgattacgtgggggtttcgattaccgtgtttttcacctaaatttccgcgtacggtgtcaaagtccggtgtttttacgtaggtgtcagctgatcgccagggtatttaaacctgcgctctccagtcaagaggccactcttgagtgccagcgagaagagttttctcctccgcgccgcgagtcagatctacactttgaaagtagggataacagggtaatgacattgattattgactagttgttaatagtaatcaattacggggtcattagttcatagcccatatatggagttccgcgttacataacttacggtaaatggcccgcctggctgaccgcccaacgacccccgcccattgacgtcaataatgacgtatgttcccatagtaacgccaatagggactttccattgacgtcaatgggtggagtatttacggtaaactgcccacttggcagtacatcaagtgtatcatatgccaagtccgccccctattgacgtcaatgacggtaaatggcccgcctggcattatgcccagtacatgaccttacgggactttcctacttggcagtacatctacgtattagtcatcgctattaccatggtgatgcggttttggcagtacaccaatgggcgtggatagcggtttgactcacggggatttccaagtctccaccccattgacgtcaatgggagtttgttttggcaccaaaatcaacgggactttccaaaatgtcgtaataaccccgccccgttgacgcaaatgggcggtaggcgtgtacggtgggaggtctatataagcagagctcgtttagtgaaccgtcagatcgcctggaacgccatccacgctgttttgacctccatagaagacagcgatcgcgccaccatggccgggatgttccaggcactgtccgaaggctgcacaccctatgatattaaccagatgctgaatgtcctgggagaccaccaggtctctggcctggagcagctggagagcatcatcaacttcgagaagctgaccgagtggacaagctccaatgtgatgcctatcctgtccccactgaccaagggcatcctgggcttcgtgtttaccctgacagtgccttctgagcggggcctgtcttgcatcagcgaggcagacgcaaccacaccagagtccgccaatctgggcgaggagatcctgtctcagctgtacctgtggccccgggtgacatatcactccccttcttacgcctatcaccagttcgagcggagagccaagtacaagagacacttcccaggctttggccagtctctgctgttcggctaccccgtgtacgtgttcggcgattgcgtgcagggcgactgggatgccatccggtttagatactgcgcaccacctggatatgcactgctgaggtgtaacgacaccaattattccgccctgctggcagtgggcgccctggagggccctcgcaatcaggattggctgggcgtgccaaggcagctggtgacacgcatgcaggccatccagaacgcaggcctgtgcaccctggtggcaatgctggaggagacaatcttctggctgcaggcctttctgatggccctgaccgacagcggccccaagacaaacatcatcgtggattcccagtacgtgatgggcatctccaagccttctttccaggagtttgtggactgggagaacgtgagcccagagctgaattccaccgatcagccattctggcaggcaggaatcctggcaaggaacctggtgcctatggtggccacagtgcagggccagaatctgaagtaccagggccagagcctggtcatcagcgcctccatcatcgtgtttaacctgctggagctggagggcgactatcgggacgatggcaacgtgtgggtgcacaccccactgagccccagaacactgaacgcctgggtgaaggccgtggaggagaagaagggcatcccagtgcacctggagctggcctccatgaccaatatggagctgatgtctagcatcgtgcaccagcaggtgaggacatacggacccgtgttcatgtgcctgggaggcctgctgaccatggtggcaggagccgtgtggctgacagtgcgggtgctggagctgttcagagccgcccagctggccaacgatgtggtgctgcagatcatggagctgtgcggagcagcctttcgccaggtgtgccacaccacagtgccatggcccaatgcctccctgacccccaagtggaacaatgagacaacacagcctcagatcgccaactgtagcgtgtacgacttcttcgtgtggctgcactactatagcgtgagggataccctgtggccccgcgtgacataccacatgaataagtacgcctatcacatgctggagaggcgcgccaagtataagagaggccctggcccaggcgcaaagtttgtggcagcatggaccctgaaggccgccgccggccccggccccggccagtatatcaaggctaacagtaagttcattggaatcacagagctgggacccggacctggataatgagtttaaactcccatttaaatgtgagggttaatgcttcgagcagacatgataagatacattgatgagtttggacaaaccacaactagaatgcagtgaaaaaaatgctttatttgtgaaatttgtgatgctattgctttatttgtaaccattataagctgcaataaacaagttaacaacaacaattgcattcattttatgtttcaggttcagggggagatgtgggaggttttttaaagcaagtaaaacctctacaaatgtggtaaaataactataacggtcctaaggtagcgagtgagtagtgttctggggcgggggaggacctgcatgagggccagaataactgaaatctgtgcttttctgtgtgttgcagcagcatgagcggaagcggctcctttgagggaggggtattcagcccttatctgacggggcgtctcccctcctgggcgggagtgcgtcagaatgtgatgggatccacggtggacggccggcccgtgcagcccgcgaactcttcaaccctgacctatgcaaccctgagctcttcgtcgttggacgcagctgccgccgcagctgctgcatctgccgccagcgccgtgcgcggaatggccatgggcgccggctactacggcactctggtggccaactcgagttccaccaataatcccgccagcctgaacgaggagaagctgttgctgctgatggcccagctcgaggccttgacccagcgcctgggcgagctgacccagcaggtggctcagctgcaggagcagacgcgggccgcggttgccacggtgaaatccaaataaaaaatgaatcaataaataaacggagacggttgttgattttaacacagagtctgaatctttatttgatttttcgcgcgcggtaggccctggaccaccggtctcgatcattgagcacccggtggatcttttccaggacccggtagaggtgggcttggatgttgaggtacatgggcatgagcccgtcccgggggtggaggtagctccattgcagggcctcgtgctcgggggtggtgttgtaaatcacccagtcatagcaggggcgcagggcatggtgttgcacaatatctttgaggaggagactgatggccacgggcagccctttggtgtaggtgtttacaaatctgttgagctgggagggatgcatgcggggggagatgaggtgcatcttggcctggatcttgagattggcgatgttaccgcccagatcccgcctggggttcatgttgtgcaggaccaccagcacggtgtatccggtgcacttggggaatttatcatgcaacttggaagggaaggcgtgaaagaatttggcgacgcctttgtgcccgcccaggttttccatgcactcatccatgatgatggcgatgggcccgtgggcggcggcctgggcaaagacgtttcgggggtcggacacatcatagttgtggtcctgggtgaggtcatcataggccattttaatgaatttggggcggagggtgccggactgggggacaaaggtaccctcgatcccgggggcgtagttcccctcacagatctgcatctcccaggctttgagctcggagggggggatcatgtccacctgcggggcgataaagaacacggtttccggggcgggggagatgagctgggccgaaagcaagttccggagcagctgggacttgccgcagccggtggggccgtagatgaccccgatgaccggctgcaggtggtagttgagggagagacagctgccgtcctcccggaggaggggggccacctcgttcatcatctcgcgcacgtgcatgttctcgcgcaccagttccgccaggaggcgctctccccccagggataggagctcctggagcgaggcgaagtttttcagcggcttgagtccgtcggccatgggcattttggagagggtttgttgcaagagttccaggcggtcccagagctcggtgatgtgctctacggcatctcgatccagcagacctcctcgtttcgcgggttgggacggctgcgggagtagggcaccagacgatgggcgtccagcgcagccagggtccggtccttccagggtcgcagcgtccgcgtcagggtggtctccgtcacggtgaaggggtgcgcgccgggctgggcgcttgcgagggtgcgcttcaggctcatccggctggtcgaaaaccgctcccgatcggcgccctgcgcgtcggccaggtagcaattgaccatgagttcgtagttgagcgcctcggccgcgtggcctttggcgcggagcttacctttggaagtctgcccgcaggcgggacagaggagggacttgagggcgtagagcttgggggcgaggaagacggactcgggggcgtaggcgtccgcgccgcagtgggcgcagacggtctcgcactccacgagccaggtgaggtcgggctggtcggggtcaaaaaccagtttcccgccgttctttttgatgcgtttcttacctttggtctccatgagctcgtgtccccgctgggtgacaaagaggctgtccgtgtccccgtagaccgactttatgggccggtcctcgagcggtgtgccgcggtcctcctcgtagaggaaccccgcccactccgagacgaaagcccgggtccaggccagcacgaaggaggccacgtgggacgggtagcggtcgttgtccaccagcgggtccaccttttccagggtatgcaaacacatgtccccctcgtccacatccaggaaggtgattggcttgtaagtgtaggccacgtgaccgggggtcccggccgggggggtataaaagggtgcgggtccctgctcgtcctcactgtcttccggatcgctgtccaggagcgccagctgttggggtaggtattccctctcgaaggcgggcatgacctcggcactcaggttgtcagtttctagaaacgaggaggatttgatattgacggtgccggcggagatgcctttcaagagcccctcgtccatctggtcagaaaagacgatctttttgttgtcgagcttggtggcgaaggagccgtagagggcgttggagaggagcttggcgatggagcgcatggtctggtttttttccttgtcggcgcgctccttggcggcgatgttgagctgcacgtactcgcgcgccacgcacttccattcggggaagacggtggtcagctcgtcgggcacgattctgacctgccagccccgattatgcagggtgatgaggtccacactggtggccacctcgccgcgcaggggctcattagtccagcagaggcgtccgcccttgcgcgagcagaaggggggcagggggtccagcatgacctcgtcgggggggtcggcatcgatggtgaagatgccgggcaggaggtcggggtcaaagtagctgatggaagtggccagatcgtccagggcagcttgccattcgcgcacggccagcgcgcgctcgtagggactgaggggcgtgccccagggcatgggatgggtaagcgcggaggcgtacatgccgcagatgtcgtagacgtagaggggctcctcgaggatgccgatgtaggtggggtagcagcgccccccgcggatgctggcgcgcacgtagtcatacagctcgtgcgagggggcgaggagccccgggcccaggttggtgcgactgggcttttcggcgcggtagacgatctggcggaaaatggcatgcgagttggaggagatggtgggcctttggaagatgttgaagtgggcgtggggcagtccgaccgagtcgcggatgaagtgggcgtaggagtcttgcagcttggcgacgagctcggcggtgactaggacgtccagagcgcagtagtcgagggtctcctggatgatgtcatacttgagctgtcccttttgtttccacagctcgcggttgagaaggaactcttcgcggtccttccagtactcttcgagggggaacccgtcctgatctgcacggtaagagcctagcatgtagaactggttgacggccttgtaggcgcagcagcccttctccacggggagggcgtaggcctgggcggccttgcgcagggaggtgtgcgtgagggcgaaagtgtccctgaccatgaccttgaggaactggtgcttgaagtcgatatcgtcgcagcccccctgctcccagagctggaagtccgtgcgcttcttgtaggcggggttgggcaaagcgaaagtaacatcgttgaagaggatcttgcccgcgcggggcataaagttgcgagtgatgcggaaaggttggggcacctcggcccggttgttgatgacctgggcggcgagcacgatctcgtcgaagccgttgatgttgtggcccacgatgtagagttccacgaatcgcggacggcccttgacgtggggcagtttcttgagctcctcgtaggtgagctcgtcggggtcgctgagcccgtgctgctcgagcgcccagtcggcgagatgggggttggcgcggaggaaggaagtccagagatccacggccagggcggtttgcagacggtcccggtactgacggaactgctgcccgacggccattttttcgggggtgacgcagtagaaggtgcgggggtccccgtgccagcgatcccatttgagctggagggcgagatcgagggcgagctcgacgagccggtcgtccccggagagtttcatgaccagcatgaaggggacgagctgcttgccgaaggaccccatccaggtgtaggtttccacatcgtaggtgaggaagagcctttcggtgcgaggatgcgagccgatggggaagaactggatctcctgccaccaattggaggaatggctgttgatgtgatggaagtagaaatgccgacggcgcgccgaacactcgtgcttgtgtttatacaagcggccacagtgctcgcaacgctgcacgggatgcacgtgctgcacgagctgtacctgagttcctttgacgaggaatttcagtgggaagtggagtcgtggcgcctgcatctcgtgctgtactacgtcgtggtggtcggcctggccctcttctgcctcgatggtggtcatgctgacgagcccgcgcgggaggcaggtccagacctcggcgcgagcgggtcggagagcgaggacgagggcgcgcaggccggagctgtccagggtcctgagacgctgcggagtcaggtcagtgggcagcggcggcgcgcggttgacttgcaggagtttttccagggcgcgcgggaggtccagatggtacttgatctccaccgcgccattggtggcgacgtcgatggcttgcagggtcccgtgcccctggggtgtgaccaccgtcccccgtttcttcttgggcggctggggcgacgggggcggtgcctcttccatggttagaagcggcggcgaggacgcgcgccgggcggcaggggcggctcggggcccggaggcaggggcggcaggggcacgtcggcgccgcgcgcgggtaggttctggtactgcgcccggagaagactggcgtgagcgacgacgcgacggttgacgtcctggatctgacgcctctgggtgaaggccacgggacccgtgagtttgaacctgaaagagagttcgacagaatcaatctcggtatcgttgacggcggcctgccgcaggatctcttgcacgtcgcccgagttgtcctggtaggcgatctcggtcatgaactgctcgatctcctcctcttgaaggtctccgcggccggcgcgctccacggtggccgcgaggtcgttggagatgcggcccatgagctgcgagaaggcgttcatgcccgcctcgttccagacgcggctgtagaccacgacgccctcgggatcgcgggcgcgcatgaccacctgggcgaggttgagctccacgtggcgcgtgaagaccgcgtagttgcagaggcgctggtagaggtagttgagcgtggtggcgatgtgctcggtgacgaagaaatacatgatccagcggcggagcggcatctcgctgacgtcgcccagcgcctccaaacgttccatggcctcgtaaaagtccacggcgaagttgaaaaactgggagttgcgcgccgagacggtcaactcctcctccagaagacggatgagctcggcgatggtggcgcgcacctcgcgctcgaaggcccccgggagttcctccacttcctcttcttcctcctccactaacatctcttctacttcctcctcaggcggcagtggtggcgggggagggggcctgcgtcgccggcggcgcacgggcagacggtcgatgaagcgctcgatggtctcgccgcgccggcgtcgcatggtctcggtgacggcgcgcccgtcctcgcggggccgcagcgtgaagacgccgccgcgcatctccaggtggccgggggggtccccgttgggcagggagagggcgctgacgatgcatcttatcaattgccccgtagggactccgcgcaaggacctgagcgtctcgagatccacgggatctgaaaaccgctgaacgaaggcttcgagccagtcgcagtcgcaaggtaggctgagcacggtttcttctggcgggtcatgttggttgggagcggggcgggcgatgctgctggtgatgaagttgaaataggcggttctgagacggcggatggtggcgaggagcaccaggtctttgggcccggcttgctggatgcgcagacggtcggccatgccccaggcgtggtcctgacacctggccaggtccttgtagtagtcctgcatgagccgctccacgggcacctcctcctcgcccgcgcggccgtgcatgcgcgtgagcccgaagccgcgctggggctggacgagcgccaggtcggcgacgacgcgctcggcgaggatggcttgctggatctgggtgagggtggtctggaagtcatcaaagtcgacgaagcggtggtaggctccggtgttgatggtgtaggagcagttggccatgacggaccagttgacggtctggtggcccggacgcacgagctcgtggtacttgaggcgcgagtaggcgcgcgtgtcgaagatgtagtcgttgcaggtgcgcaccaggtactggtagccgatgaggaagtgcggcggcggctggcggtagagcggccatcgctcggtggcgggggcgccgggcgcgaggtcctcgagcatggtgcggtggtagccgtagatgtacctggacatccaggtgatgccggcggcggtggtggaggcgcgcgggaactcgcggacgcggttccagatgttgcgcagcggcaggaagtagttcatggtgggcacggtctggcccgtgaggcgcgcgcagtcgtggatgctctatacgggcaaaaacgaaagcggtcagcggctcgactccgtggcctggaggctaagcgaacgggttgggctgcgcgtgtaccccggttcgaatctcgaatcaggctggagccgcagctaacgtggtattggcactcccgtctcgacccaagcctgcaccaaccctccaggatacggaggcgggtcgttttgcaacttttttttggaggccggatgagactagtaagcgcggaaagcggccgaccgcgatggctcgctgccgtagtctggagaagaatcgccagggttgcgttgcggtgtgccccggttcgaggccggccggattccgcggctaacgagggcgtggctgccccgtcgtttccaagaccccatagccagccgacttctccagttacggagcgagcccctcttttgttttgtttgtttttgccagatgcatcccgtactgcggcagatgcgcccccaccaccctccaccgcaacaacagccccctccacagccggcgcttctgcccccgccccagcagcaacttccagccacgaccgccgcggccgccgtgagcggggctggacagagttatgatcaccagctggccttggaagagggcgaggggctggcgcgcctgggggcgtcgtcgccggagcggcacccgcgcgtgcagatgaaaagggacgctcgcgaggcctacgtgcccaagcagaacctgttcagagacaggagcggcgaggagcccgaggagatgcgcgcggcccggttccacgcggggcgggagctgcggcgcggcctggaccgaaagagggtgctgagggacgaggatttcgaggcggacgagctgacggggatcagccccgcgcgcgcgcacgtggccgcggccaacctggtcacggcgtacgagcagaccgtgaaggaggagagcaacttccaaaaatccttcaacaaccacgtgcgcaccctgatcgcgcgcgaggaggtgaccctgggcctgatgcacctgtgggacctgctggaggccatcgtgcagaaccccaccagcaagccgctgacggcgcagctgttcctggtggtgcagcatagtcgggacaacgaagcgttcagggaggcgctgctgaatatcaccgagcccgagggccgctggctcctggacctggtgaacattctgcagagcatcgtggtgcaggagcgcgggctgccgctgtccgagaagctggcggccatcaacttctcggtgctgagtttgggcaagtactacgctaggaagatctacaagaccccgtacgtgcccatagacaaggaggtgaagatcgacgggttttacatgcgcatgaccctgaaagtgctgaccctgagcgacgatctgggggtgtaccgcaacgacaggatgcaccgtgcggtgagcgccagcaggcggcgcgagctgagcgaccaggagctgatgcatagtctgcagcgggccctgaccggggccgggaccgagggggagagctactttgacatgggcgcggacctgcactggcagcccagccgccgggccttggaggcggcggcaggaccctacgtagaagaggtggacgatgaggtggacgaggagggcgagtacctggaagactgatggcgcgaccgtatttttgctagatgcaacaacaacagccacctcctgatcccgcgatgcgggcggcgctgcagagccagccgtccggcattaactcctcggacgattggacccaggccatgcaacgcatcatggcgctgacgacccgcaaccccgaagcctttagacagcagccccaggccaaccggctctcggccatcctggaggccgtggtgccctcgcgctccaaccccacgcacgagaaggtcctggccatcgtgaacgcgctggtggagaacaaggccatccgcggcgacgaggccggcctggtgtacaacgcgctgctggagcgcgtggcccgctacaacagcaccaacgtgcagaccaacctggaccgcatggtgaccgacgtgcgcgaggccgtggcccagcgcgagcggttccaccgcgagtccaacctgggatccatggtggcgctgaacgccttcctcagcacccagcccgccaacgtgccccggggccaggaggactacaccaacttcatcagcgccctgcgcctgatggtgaccgaggtgccccagagcgaggtgtaccagtccgggccggactacttcttccagaccagtcgccagggcttgcagaccgtgaacctgagccaggctttcaagaacttgcagggcctgtggggcgtgcaggccccggtcggggaccgcgcgacggtgtcgagcctgctgacgccgaactcgcgcctgctgctgctgctggtggcccccttcacggacagcggcagcatcaaccgcaactcgtacctgggctacctgattaacctgtaccgcgaggccatcggccaggcgcacgtggacgagcagacctaccaggagatcacccacgtgagccgcgccctgggccaggacgacccgggcaacctggaagccaccctgaactttttgctgaccaaccggtcgcagaagatcccgccccagtacgcgctcagcaccgaggaggagcgcatcctgcgttacgtgcagcagagcgtgggcctgttcctgatgcaggagggggccacccccagcgccgcgctcgacatgaccgcgcgcaacatggagcccagcatgtacgccagcaaccgcccgttcatcaataaactgatggactacttgcatcgggcggccgccatgaactctgactatttcaccaacgccatcctgaatccccactggctcccgccgccggggttctacacgggcgagtacgacatgcccgaccccaatgacgggttcctgtgggacgatgtggacagcagcgtgttctccccccgaccgggtgctaacgagcgccccttgtggaagaaggaaggcagcgaccgacgcccgtcctcggcgctgtccggccgcgagggtgctgccgcggcggtgcccgaggccgccagtcctttcccgagcttgcccttctcgctgaacagtatccgcagcagcgagctgggcaggatcacgcgcccgcgcttgctgggcgaagaggagtacttgaatgactcgctgttgagacccgagcgggagaagaacttccccaataacgggatagaaagcctggtggacaagatgagccgctggaagacgtatgcgcaggagcacagggacgatccccgggcgtcgcagggggccacgagccggggcagcgccgcccgtaaacgccggtggcacgacaggcagcggggacagatgtgggacgatgaggactccgccgacgacagcagcgtgttggacttgggtgggagtggtaacccgttcgctcacctgcgcccccgtatcgggcgcatgatgtaagagaaaccgaaaataaatgatactcaccaaggccatggcgaccagcgtgcgttcgtttcttctctgttgttgttgtatctagtatgatgaggcgtgcgtacccggagggtcctcctccctcgtacgagagcgtgatgcagcaggcgatggcggcggcggcgatgcagcccccgctggaggctccttacgtgcccccgcggtacctggcgcctacggaggggcggaacagcattcgttactcggagctggcacccttgtacgataccacccggttgtacctggtggacaacaagtcggcggacatcgcctcgctgaactaccagaacgaccacagcaacttcctgaccaccgtggtgcagaacaatgacttcacccccacggaggccagcacccagaccatcaactttgacgagcgctcgcggtggggcggccagctgaaaaccatcatgcacaccaacatgcccaacgtgaacgagttcatgtacagcaacaagttcaaggcgcgggtgatggtctcccgcaagacccccaatggggtgacagtgacagaggattatgatggtagtcaggatgagctgaagtatgaatgggtggaatttgagctgcccgaaggcaacttctcggtgaccatgaccatcgacctgatgaacaacgccatcatcgacaattacttggcggtggggcggcagaacggggtgctggagagcgacatcggcgtgaagttcgacactaggaacttcaggctgggctgggaccccgtgaccgagctggtcatgcccggggtgtacaccaacgaggctttccatcccgatattgtcttgctgcccggctgcggggtggacttcaccgagagccgcctcagcaacctgctgggcattcgcaagaggcagcccttccaggaaggcttccagatcatgtacgaggatctggaggggggcaacatccccgcgctcctggatgtcgacgcctatgagaaaagcaaggaggatgcagcagctgaagcaactgcagccgtagctaccgcctctaccgaggtcaggggcgataattttgcaagcgccgcagcagtggcagcggccgaggcggctgaaaccgaaagtaagatagtcattcagccggtggagaaggatagcaagaacaggagctacaacgtactaccggacaagataaacaccgcctaccgcagctggtacctagcctacaactatggcgaccccgagaagggcgtgcgctcctggacgctgctcaccacctcggacgtcacctgcggcgtggagcaagtctactggtcgctgcccgacatgatgcaagacccggtcaccttccgctccacgcgtcaagttagcaactacccggtggtgggcgccgagctcctgcccgtctactccaagagcttcttcaacgagcaggccgtctactcgcagcagctgcgcgccttcacctcgcttacgcacgtcttcaaccgcttccccgagaaccagatcctcgtccgcccgcccgcgcccaccattaccaccgtcagtgaaaacgttcctgctctcacagatcacgggaccctgccgctgcgcagcagtatccggggagtccagcgcgtgaccgttactgacgccagacgccgcacctgcccctacgtctacaaggccctgggcatagtcgcgccgcgcgtcctctcgagccgcaccttctaaatgtccattctcatctcgcccagtaataacaccggttggggcctgcgcgcgcccagcaagatgtacggaggcgctcgccaacgctccacgcaacaccccgtgcgcgtgcgcgggcacttccgcgctccctggggcgccctcaagggccgcgtgcggtcgcgcaccaccgtcgacgacgtgatcgaccaggtggtggccgacgcgcgcaactacacccccgccgccgcgcccgtctccaccgtggacgccgtcatcgacagcgtggtggccgacgcgcgccggtacgcccgcgccaagagccggcggcggcgcatcgcccggcggcaccggagcacccccgccatgcgcgcggcgcgagccttgctgcgcagggccaggcgcacgggacgcagggccatgctcagggcggccagacgcgcggcttcaggcgccagcgccggcaggacccggagacgcgcggccacggcggcggcagcggccatcgccagcatgtcccgcccgcggcgagggaacgtgtactgggtgcgcgacgccgccaccggtgtgcgcgtgcccgtgcgcacccgcccccctcgcacttgaagatgttcacttcgcgatgttgatgtgtcccagcggcgaggaggatgtccaagcgcaaattcaaggaagagatgctccaggtcatcgcgcctgagatctacggccctgcggtggtgaaggaggaaagaaagccccgcaaaatcaagcgggtcaaaaaggacaaaaaggaagaagaaagtgatgtggacggattggtggagtttgtgcgcgagttcgccccccggcggcgcgtgcagtggcgcgggcggaaggtgcaaccggtgctgagacccggcaccaccgtggtcttcacgcccggcgagcgctccggcaccgcttccaagcgctcctacgacgaggtgtacggggatgatgatattctggagcaggcggccgagcgcctgggcgagtttgcttacggcaagcgcagccgttccgcaccgaaggaagaggcggtgtccatcccgctggaccacggcaaccccacgccgagcctcaagcccgtgaccttgcagcaggtgctgccgaccgcggcgccgcgccgggggttcaagcgcgagggcgaggatctgtaccccaccatgcagctgatggtgcccaagcgccagaagctggaagacgtgctggagaccatgaaggtggacccggacgtgcagcccgaggtcaaggtgcggcccatcaagcaggtggccccgggcctgggcgtgcagaccgtggacatcaagattcccacggagcccatggaaacgcagaccgagcccatgatcaagcccagcaccagcaccatggaggtgcagacggatccctggatgccatcggctcctagtcgaagaccccggcgcaagtacggcgcggccagcctgctgatgcccaactacgcgctgcatccttccatcatccccacgccgggctaccgcggcacgcgcttctaccgcggtcataccagcagccgccgccgcaagaccaccactcgccgccgccgtcgccgcaccgccgctgcaaccacccctgccgccctggtgcggagagtgtaccgccgcggccgcgcacctctgaccctgccgcgcgcgcgctaccacccgagcatcgccatttaaactttcgcctgctttgcagatcaatggccctcacatgccgccttcgcgttcccattacgggctaccgaggaagaaaaccgcgccgtagaaggctggcggggaacgggatgcgtcgccaccaccaccggcggcggcgcgccatcagcaagcggttggggggaggcttcctgcccgcgctgatccccatcatcgccgcggcgatcggggcgatccccggcattgcttccgtggcggtgcaggcctctcagcgccactgagacacacttggaaacatcttgtaataaaccaatggactctgacgctcctggtcctgtgatgtgttttcgtagacagatggaagacatcaatttttcgtccctggctccgcgacacggcacgcggccgttcatgggcacctggagcgacatcggcaccagccaactgaacgggggcgccttcaattggagcagtctctggagcgggcttaagaatttcgggtccacgcttaaaacctatggcagcaaggcgtggaacagcaccacagggcaggcgctgagggataagctgaaagagcagaacttccagcagaaggtggtcgatgggctcgcctcgggcatcaacggggtggtggacctggccaaccaggccgtgcagcggcagatcaacagccgcctggacccggtgccgcccgccggctccgtggagatgccgcaggtggaggaggagctgcctcccctggacaagcggggcgagaagcgaccccgccccgatgcggaggagacgctgctgacgcacacggacgagccgcccccgtacgaggaggcggtgaaactgggtctgcccaccacgcggcccatcgcgcccctggccaccggggtgctgaaacccgaaaagcccgcgaccctggacttgcctcctccccagccttcccgcccctctacagtggctaagcccctgccgccggtggccgtggcccgcgcgcgacccgggggcaccgcccgccctcatgcgaactggcagagcactctgaacagcatcgtgggtctgggagtgcagagtgtgaagcgccgccgctgctattaaacctaccgtagcgcttaacttgcttgtctgtgtgtgtatgtattatgtcgccgccgccgctgtccaccagaaggaggagtgaagaggcgcgtcgccgagttgcaagatggccaccccatcgatgctgccccagtgggcgtacatgcacatcgccggacaggacgcttcggagtacctgagtccgggtctggtgcagtttgcccgcgccacagacacctacttcagtctggggaacaagtttaggaaccccacggtggcgcccacgcacgatgtgaccaccgaccgcagccagcggctgacgctgcgcttcgtgcccgtggaccgcgaggacaacacctactcgtacaaagtgcgctacacgctggccgtgggcgacaaccgcgtgctggacatggccagcacctactttgacatccgcggcgtgctggatcggggccctagcttcaaaccctactccggcaccgcctacaacagtctggcccccaagggagcacccaacacttgtcagtggacatataaagccgatggtgaaactgccacagaaaaaacctatacatatggaaatgcacccgtgcagggcattaacatcacaaaagatggtattcaacttggaactgacaccgatgatcagccaatctacgcagataaaacctatcagcctgaacctcaagtgggtgatgctgaatggcatgacatcactggtactgatgaaaagtatggaggcagagctcttaagcctgataccaaaatgaagccttgttatggttcttttgccaagcctactaataaagaaggaggtcaggcaaatgtgaaaacaggaacaggcactactaaagaatatgacatagacatggctttctttgacaacagaagtgcggctgctgctggcctagctccagaaattgttttgtatactgaaaatgtggatttggaaactccagatacccatattgtatacaaagcaggcacagatgacagcagctcttctattaatttgggtcagcaagccatgcccaacagacctaactacattggtttcagagacaactttatcgggctcatgtactacaacagcactggcaatatgggggtgctggccggtcaggcttctcagctgaatgctgtggttgacttgcaagacagaaacaccgagctgtcctaccagctcttgcttgactctctgggtgacagaacccggtatttcagtatgtggaatcaggcggtggacagctatgatcctgatgtgcgcattattgaaaatcatggtgtggaggatgaacttcccaactattgtttccctctggatgctgttggcagaacagatacttatcagggaattaaggctaatggaactgatcaaaccacatggaccaaagatgacagtgtcaatgatgctaatgagataggcaagggtaatccattcgccatggaaatcaacatccaagccaacctgtggaggaacttcctctacgccaacgtggccctgtacctgcccgactcttacaagtacacgccggccaatgttaccctgcccaccaacaccaacacctacgattacatgaacggccgggtggtggcgccctcgctggtggactcctacatcaacatcggggcgcgctggtcgctggatcccatggacaacgtgaaccccttcaaccaccaccgcaatgcggggctgcgctaccgctccatgctcctgggcaacgggcgctacgtgcccttccacatccaggtgccccagaaatttttcgccatcaagagcctcctgctcctgcccgggtcctacacctacgagtggaacttccgcaaggacgtcaacatgatcctgcagagctccctcggcaacgacctgcgcacggacggggcctccatctccttcaccagcatcaacctctacgccaccttcttccccatggcgcacaacacggcctccacgctcgaggccatgctgcgcaacgacaccaacgaccagtccttcaacgactacctctcggcggccaacatgctctaccccatcccggccaacgccaccaacgtgcccatctccatcccctcgcgcaactgggccgccttccgcggctggtccttcacgcgtctcaagaccaaggagacgccctcgctgggctccgggttcgacccctacttcgtctactcgggctccatcccctacctcgacggcaccttctacctcaaccacaccttcaagaaggtctccatcaccttcgactcctccgtcagctggcccggcaacgaccggctcctgacgcccaacgagttcgaaatcaagcgcaccgtcgacggcgagggctacaacgtggcccagtgcaacatgaccaaggactggttcctggtccagatgctggcccactacaacatcggctaccagggcttctacgtgcccgagggctacaaggaccgcatgtactccttcttccgcaacttccagcccatgagccgccaggtggtggacgaggtcaactacaaggactaccaggccgtcaccctggcctaccagcacaacaactcgggcttcgtcggctacctcgcgcccaccatgcgccagggccagccctaccccgccaactacccctacccgctcatcggcaagagcgccgtcaccagcgtcacccagaaaaagttcctctgcgacagggtcatgtggcgcatccccttctccagcaacttcatgtccatgggcgcgctcaccgacctcggccagaacatgctctatgccaactccgcccacgcgctagacatgaatttcgaagtcgaccccatggatgagtccacccttctctatgttgtcttcgaagtcttcgacgtcgtccgagtgcaccagccccaccgcggcgtcatcgaggccgtctacctgcgcacccccttctcggccggtaacgccaccacctaagctcttgcttcttgcaagccatggccgcgggctccggcgagcaggagctcagggccatcatccgcgacctgggctgcgggccctacttcctgggcaccttcgataagcgcttcccgggattcatggccccgcacaagctggcctgcgccatcgtcaacacggccggccgcgagaccgggggcgagcactggctggccttcgcctggaacccgcgctcgaacacctgctacctcttcgaccccttcgggttctcggacgagcgcctcaagcagatctaccagttcgagtacgagggcctgctgcgccgcagcgccctggccaccgaggaccgctgcgtcaccctggaaaagtccacccagaccgtgcagggtccgcgctcggccgcctgcgggctcttctgctgcatgttcctgcacgccttcgtgcactggcccgaccgccccatggacaagaaccccaccatgaacttgctgacgggggtgcccaacggcatgctccagtcgccccaggtggaacccaccctgcgccgcaaccaggaggcgctctaccgcttcctcaactcccactccgcctactttcgctcccaccgcgcgcgcatcgagaaggccaccgccttcgaccgcatgaatcaagacatgtaaaccgtgtgtgtatgttaaatgtctttaataaacagcactttcatgttacacatgcatctgagatgatttatttagaaatcgaaagggttctgccgggtctcggcatggcccgcgggcagggacacgttgcggaactggtacttggccagccacttgaactcggggatcagcagtttgggcagcggggtgtcggggaaggagtcggtccacagcttccgcgtcagttgcagggcgcccagcaggtcgggcgcggagatcttgaaatcgcagttgggacccgcgttctgcgcgcgggagttgcggtacacggggttgcagcactggaacaccatcagggccgggtgcttcacgctcgccagcaccgtcgcgtcggtgatgctctccacgtcgaggtcctcggcgttggccatcccgaagggggtcatcttgcaggtctgccttcccatggtgggcacgcacccgggcttgtggttgcaatcgcagtgcagggggatcagcatcatctgggcctggtcggcgttcatccccgggtacatggccttcatgaaagcctccaattgcctgaacgcctgctgggccttggctccctcggtgaagaagaccccgcaggacttgctagagaactggttggtggcgcacccggcgtcgtgcacgcagcagcgcgcgtcgttgttggccagctgcaccacgctgcgcccccagcggttctgggtgatcttggcccggtcggggttctccttcagcgcgcgctgcccgttctcgctcgccacatccatctcgatcatgtgctccttctggatcatggtggtcccgtgcaggcaccgcagcttgccctcggcctcggtgcacccgtgcagccacagcgcgcacccggtgcactcccagttcttgtgggcgatctgggaatgcgcgtgcacgaagccctgcaggaagcggcccatcatggtggtcagggtcttgttgctagtgaaggtcagcggaatgccgcggtgctcctcgttgatgtacaggtggcagatgcggcggtacacctcgccctgctcgggcatcagctggaagttggctttcaggtcggtctccacgcggtagcggtccatcagcatagtcatgatttccatacccttctcccaggccgagacgatgggcaggctcatagggttcttcaccatcatcttagcgctagcagccgcggccagggggtcgctctcgtccagggtctcaaagctccgcttgccgtccttctcggtgatccgcaccggggggtagctgaagcccacggccgccagctcctcctcggcctgtctttcgtcctcgctgtcctggctgacgtcctgcaggaccacatgcttggtcttgcggggtttcttcttgggcggcagcggcggcggagatgttggagatggcgagggggagcgcgagttctcgctcaccactactatctcttcctcttcttggtccgaggccacgcggcggtaggtatgtctcttcgggggcagaggcggaggcgacgggctctcgccgccgcgacttggcggatggctggcagagccccttccgcgttcgggggtgcgctcccggcggcgctctgactgacttcctccgcggccggccattgtgttctcctagggaggaacaacaagcatggagactcagccatcgccaacctcgccatctgcccccaccgccgacgagaagcagcagcagcagaatgaaagcttaaccgccccgccgcccagccccgccacctccgacgcggccgtcccagacatgcaagagatggaggaatccatcgagattgacctgggctatgtgacgcccgcggagcacgaggaggagctggcagtgcgcttttcacaagaagagatacaccaagaacagccagagcaggaagcagagaatgagcagagtcaggctgggctcgagcatgacggcgactacctccacctgagcgggggggaggacgcgctcatcaagcatctggcccggcaggccaccatcgtcaaggatgcgctgctcgaccgcaccgaggtgcccctcagcgtggaggagctcagccgcgcctacgagttgaacctcttctcgccgcgcgtgccccccaagcgccagcccaatggcacctgcgagcccaacccgcgcctcaacttctacccggtcttcgcggtgcccgaggccctggccacctaccacatctttttcaagaaccaaaagatccccgtctcctgccgcgccaaccgcacccgcgccgacgcccttttcaacctgggtcccggcgcccgcctacctgatatcgcctccttggaagaggttcccaagatcttcgagggtctgggcagcgacgagactcgggccgcgaacgctctgcaaggagaaggaggagagcatgagcaccacagcgccctggtcgagttggaaggcgacaacgcgcggctggcggtgctcaaacgcacggtcgagctgacccatttcgcctacccggctctgaacctgccccccaaagtcatgagcgcggtcatggaccaggtgctcatcaagcgcgcgtcgcccatctccgaggacgagggcatgcaagactccgaggagggcaagcccgtggtcagcgacgagcagctggcccggtggctgggtcctaatgctagtccccagagtttggaagagcggcgcaaactcatgatggccgtggtcctggtgaccgtggagctggagtgcctgcgccgcttcttcgccgacgcggagaccctgcgcaaggtcgaggagaacctgcactacctcttcaggcacgggttcgtgcgccaggcctgcaagatctccaacgtggagctgaccaacctggtctcctacatgggcatcttgcacgagaaccgcctggggcagaacgtgctgcacaccaccctgcgcggggaggcccggcgcgactacatccgcgactgcgtctacctctacctctgccacacctggcagacgggcatgggcgtgtggcagcagtgtctggaggagcagaacctgaaagagctctgcaagctcctgcagaagaacctcaagggtctgtggaccgggttcgacgagcgcaccaccgcctcggacctggccgacctcattttccccgagcgcctcaggctgacgctgcgcaacggcctgcccgactttatgagccaaagcatgttgcaaaactttcgctctttcatcctcgaacgctccggaatcctgcccgccacctgctccgcgctgccctcggacttcgtgccgctgaccttccgcgagtgccccccgccgctgtggagccactgctacctgctgcgcctggccaactacctggcctaccactcggacgtgatcgaggacgtcagcggcgagggcctgctcgagtgccactgccgctgcaacctctgcacgccgcaccgctccctggcctgcaacccccagctgctgagcgagacccagatcatcggcaccttcgagttgcaagggcccagcgaaggcgagggttcagccgccaaggggggtctgaaactcaccccggggctgtggacctcggcctacttgcgcaagttcgtgcccgaggactaccatcccttcgagatcaggttctacgaggaccaatcccatccgcccaaggccgagctgtcggcctgcgtcatcacccagggggcgatcctggcccaattgcaagccatccagaaatcccgccaagaattcttgctgaaaaagggccgcggggtctacctcgacccccagaccggtgaggagctcaaccccggcttcccccaggatgccccgaggaaacaagaagctgaaagtggagctgccgcccgtggaggatttggaggaagactgggagaacagcagtcaggcagaggaggaggagatggaggaagactgggacagcactcaggcagaggaggacagcctgcaagacagtctggaggaagacgaggaggaggcagaggaggaggtggaagaagcagccgccgccagaccgtcgtcctcggcgggggagaaagcaagcagcacggataccatctccgctccgggtcggggtcccgctcgaccacacagtagatgggacgagaccggacgattcccgaaccccaccacccagaccggtaagaaggagcggcagggatacaagtcctggcgggggcacaaaaacgccatcgtctcctgcttgcaggcctgcgggggcaacatctccttcacccggcgctacctgctcttccaccgcggggtgaactttccccgcaacatcttgcattactaccgtcacctccacagcccctactacttccaagaagaggcagcagcagcagaaaaagaccagcagaaaaccagcagctagaaaatccacagcggcggcagcaggtggactgaggatcgcggcgaacgagccggcgcaaacccgggagctgaggaaccggatctttcccaccctctatgccatcttccagcagagtcgggggcaggagcaggaactgaaagtcaagaaccgttctctgcgctcgctcacccgcagttgtctgtatcacaagagcgaagaccaacttcagcgcactctcgaggacgccgaggctctcttcaacaagtactgcgcgctcactcttaaagagtagcccgcgcccgcccagtcgcagaaaaaggcgggaattacgtcacctgtgcccttcgccctagccgcctccacccatcatcatgagcaaagagattcccacgccttacatgtggagctaccagccccagatgggcctggccgccggtgccgcccaggactactccacccgcatgaattggctcagcgccgggcccgcgatgatctcacgggtgaatgacatccgcgcccaccgaaaccagatactcctagaacagtcagcgctcaccgccacgccccgcaatcacctcaatccgcgtaattggcccgccgccctggtgtaccaggaaattccccagcccacgaccgtactacttccgcgagacgcccaggccgaagtccagctgactaactcaggtgtccagctggcgggcggcgccaccctgtgtcgtcaccgccccgctcagggtataaagcggctggtgatccggggcagaggcacacagctcaacgacgaggtggtgagctcttcgctgggtctgcgacctgacggagtcttccaactcgccggatcggggagatcttccttcacgcctcgtcaggccgtcctgactttggagagttcgtcctcgcagccccgctcgggtggcatcggcactctccagttcgtggaggagttcactccctcggtctacttcaaccccttctccggctcccccggccactacccggacgagttcatcccgaacttcgacgccatcagcgagtcggtggacggctacgattgaaactaatcacccccttatccagtgaaataaagatcatattgatgatgattttacagaaataaaaaataatcatttgatttgaaataaagatacaatcatattgatgatttgagtttaacaaaaaaataaagaatcacttacttgaaatctgataccaggtctctgtccatgttttctgccaacaccacttcactcccctcttcccagctctggtactgcaggccccggcgggctgcaaacttcctccacacgctgaaggggatgtcaaattcctcctgtccctcaatcttcattttatcttctatcagatgtccaaaaagcgcgtccgggtggatgatgacttcgaccccgtctacccctacgatgcagacaacgcaccgaccgtgcccttcatcaacccccccttcgtctcttcagatggattccaagagaagcccctgggggtgttgtccctgcgactggccgaccccgtcaccaccaagaacggggaaatcaccctcaagctgggagagggggtggacctcgattcctcgggaaaactcatctccaacacggccaccaaggccgccgcccctctcagtttttccaacaacaccatttcccttaacatggatcaccccttttacactaaagatggaaaattatccttacaagtttctccaccattaaatatactgagaacaagcattctaaacacactagctttaggttttggatcaggtttaggactccgtggctctgccttggcagtacagttagtctctccacttacatttgatactgatggaaacataaagcttaccttagacagaggtttgcatgttacaacaggagatgcaattgaaagcaacataagctgggctaaaggtttaaaatttgaagatggagccatagcaaccaacattggaaatgggttagagtttggaagcagtagtacagaaacaggtgttgatgatgcttacccaatccaagttaaacttggatctggccttagctttgacagtacaggagccataatggctggtaacaaagaagacgataaactcactttgtggacaacacctgatccatcaccaaactgtcaaatactcgcagaaaatgatgcaaaactaacactttgcttgactaaatgtggtagtcaaatactggccactgtgtcagtcttagttgtaggaagtggaaacctaaaccccattactggcaccgtaagcagtgctcaggtgtttctacgttttgatgcaaacggtgttcttttaacagaacattctacactaaaaaaatactgggggtataggcagggagatagcatagatggcactccatataccaatgctgtaggattcatgcccaatttaaaagcttatccaaagtcacaaagttctactactaaaaataatatagtagggcaagtatacatgaatggagatgtttcaaaacctatgcttctcactataaccctcaatggtactgatgacagcaacagtacatattcaatgtcattttcatacacctggactaatggaagctatgttggagcaacatttggggctaactcttataccttctcatacatcgcccaagaatgaacactgtatcccaccctgcatgccaacccttcccaccccactctgtggaacaaactctgaaacacaaaataaaataaagttcaagtgttttattgattcaacagttttacaggattcgagcagttatttttcctccaccctcccaggacatggaatacaccaccctctccccccgcacagccttgaacatctgaatgccattggtgatggacatgcttttggtctccacgttccacacagtttcagagcgagccagtctcgggtcggtcagggagatgaaaccctccgggcactcccgcatctgcacctcacagctcaacagctgaggattgtcctcggtggtcgggatcacggttatctggaagaagcagaagagcggcggtgggaatcatagtccgcgaacgggatcggccggtggtgtcgcatcaggccccgcagcagtcgctgccgccgccgctccgtcaagctgctgctcagggggtccgggtccagggactccctcagcatgatgcccacggccctcagcatcagtcgtctggtgcggcgggcgcagcagcgcatgcggatctcgctcaggtcgctgcagtacgtgcaacacagaaccaccaggttgttcaacagtccatagttcaacacgctccagccgaaactcatcgcgggaaggatgctacccacgtggccgtcgtaccagatcctcaggtaaatcaagtggtgccccctccagaacacgctgcccacgtacatgatctccttgggcatgtggcggttcaccacctcccggtaccacatcaccctctggttgaacatgcagccccggatgatcctgcggaaccacagggccagcaccgccccgcccgccatgcagcgaagagaccccgggtcccggcaatggcaatggaggacccaccgctcgtacccgtggatcatctgggagctgaacaagtctatgttggcacagcacaggcatatgctcatgcatctcttcagcactctcaactcctcgggggtcaaaaccatatcccagggcacggggaactcttgcaggacagcgaaccccgcagaacagggcaatcctcgcacagaacttacattgtgcatggacagggtatcgcaatcaggcagcaccgggtgatcctccaccagagaagcgcgggtctcggtctcctcacagcgtggtaagggggccggccgatacgggtgatggcgggacgcggctgatcgtgttcgcgaccgtgtcatgatgcagttgctttcggacattttcgtacttgctgtagcagaacctggtccgggcgctgcacaccgatcgccggcggcggtctcggcgcttggaacgctcggtgttgaaattgtaaaacagccactctctcagaccgtgcagcagatctagggcctcaggagtgatgaagatcccatcatgcctgatggctctgatcacatcgaccaccgtggaatgggccagacccagccagatgatgcaattttgttgggtttcggtgacggcgggggagggaagaacaggaagaaccatgattaacttttaatccaaacggtctcggagtacttcaaaatgaagatcgcggagatggcacctctcgcccccgctgtgttggtggaaaataacagccaggtcaaaggtgatacggttctcgagatgttccacggtggcttccagcaaagcctccacgcgcacatccagaaacaagacaatagcgaaagcgggagggttctctaattcctcaatcatcatgttacactcctgcaccatccccagataattttcatttttccagccttgaatgattcgaactagttcctgaggtaaatccaagccagccatgataaagagctcgcgcagagcgccctccaccggcattcttaagcacaccctcataattccaagatattctgctcctggttcacctgcagcagattgacaagcggaatatcaaaatctctgccgcgatccctgagctcctccctcagcaataactgtaagtactctttcatatcctctccgaaatttttagccataggaccaccaggaataagattagggcaagccacagtacagataaaccgaagtcctccccagtgagcattgccaaatgcaagactgctataagcatgctggctagacccggtgatatcttccagataactggacagaaaatcgcccaggcaatttttaagaaaatcaacaaaagaaaaatcctccaggtggacgtttagagcctcgggaacaacgatgaagtaaatgcaagcggtgcgttccagcatggttagttagctgatctgtagaaaaaacaaaaatgaacattaaaccatgctagcctggcgaacaggtgggtaaatcgttctctccagcaccaggcaggccacggggtctccggcgcgaccctcgtaaaaattgtcgctatgattgaaaaccatcacagagagacgttcccggtggccggcgtgaatgattcgacaagatgaatacacccccggaacattggcgtccgcgagtgaaaaaaagcgcccgaggaagcaataaggcactacaatgctcagtctcaagtccagcaaagcgatgccatgcggatgaagcacaaaattctcaggtgcgtacaaaatgtaattactcccctcctgcacaggcagcaaagcccccgatccctccaggtacacatacaaagcctcagcgtccatagcttaccgagcagcagcacacaacaggcgcaagagtcagagaaaggctgagctctaacctgtccacccgctctctgctcaatatatagcccagatctacactgacgtaaaggccaaagtctaaaaatacccgccaaataatcacacacgcccagcacacgcccagaaaccggtgacacactcaaaaaaatacgcgcacttcctcaaacgcccaaaactgccgtcatttccgggttcccacgctacgtcatcaaaacacgactttcaaattccgtcgaccgttaaaaacgtcacccgccccgcccctaacggtcgcccgtctctcagccaatcagcgccccgcatccccaaattcaaacacctcatttgcatattaacgcgcacaaaaagtttgagg

SEQ ID NO: 3 - DNA, 11447 bp, Venezuelan equine encephalitis virus
  source 1..11447: mol_type = genomic DNA
atgggcggcgcatgagagaagcccagaccaattacctacccaaaatggagaaagttcacgttgacatcgaggaagacagcccattcctcagagctttgcagcggagcttcccgcagtttgaggtagaagccaagcaggtcactgataatgaccatgctaatgccagagcgttttcgcatctggcttcaaaactgatcgaaacggaggtggacccatccgacacgatccttgacattggaagtgcgcccgcccgcagaatgtattctaagcacaagtatcattgtatctgtccgatgagatgtgcggaagatccggacagattgtataagtatgcaactaagctgaagaaaaactgtaaggaaataactgataaggaattggacaagaaaatgaaggagctcgccgccgtcatgagcgaccctgacctggaaactgagactatgtgcctccacgacgacgagtcgtgtcgctacgaagggcaagtcgctgtttaccaggatgtatacgcggttgacggaccgacaagtctctatcaccaagccaataagggagttagagtcgcctactggataggctttgacaccaccccttttatgtttaagaacttggctggagcatatccatcatactctaccaactgggccgacgaaaccgtgttaacggctcgtaacataggcctatgcagctctgacgttatggagcggtcacgtagagggatgtccattcttagaaagaagtatttgaaaccatccaacaatgttctattctctgttggctcgaccatctaccacgagaagagggacttactgaggagctggcacctgccgtctgtatttcacttacgtggcaagcaaaattacacatgtcggtgtgagactatagttagttgcgacgggtacgtcgttaaaagaatagctatcagtccaggcctgtatgggaagccttcaggctatgctgctacgatgcaccgcgagggattcttgtgctgcaaagtgacagacacattgaacggggagagggtctcttttcccgtgtgcacgtatgtgccagctacattgtgtgaccaaatgactggcatactggcaacagatgtcagtgcggacgacgcgcaaaaactgctggttgggctcaaccagcgtatagtcgtcaacggtcgcacccagagaaacaccaataccatgaaaaattaccttttgcccgtagtggcccaggcatttgctaggtgggcaaaggaatataaggaagatcaagaagatgaaaggccactaggactacgagatagacagttagtcatggggtgttgttgggcttttagaaggcacaagataacatctatttataagcgcccggatacccaaaccatcatcaaagtgaacagcgatttccactcattcgtgctgcccaggataggcagtaacacattggagatcgggctgagaacaagaatcaggaaaatgttagaggagcacaaggagccgtcacctctcattaccgccgaggacgtacaagaagctaagtgcgcagccgatgaggctaaggaggtgcgtgaagccgaggagttgcgcgcagctctaccacctttggcagctgatgttgaggagcccactctggaagccgatgtcgacttgatgttacaagaggctggggccggctcagtggagacacctcgtggcttgataaaggttaccagctacgctggcgaggacaagatcggctcttacgctgtgctttctccgcaggctgtactcaagagtgaaaaattatcttgcatccaccctctcgctgaacaagtcatagtgataacacactctggccgaaaagggcgttatgccgtggaaccataccatggtaaagtagtggtgccagagggacatgcaatacccgtccaggactttcaagctctgagtgaaagtgccaccattgtgtacaacgaacgtgagttcgtaaacaggtacctgcaccatattgccacacatggaggagcgctgaacactgatgaagaatattacaaaactgtcaagcccagcgagcacgacggcgaatacctgtacgacatcgacaggaaacagtgcgtcaagaaagaactagtcactgggctagggctcacaggcgagctggtggatcctcccttccatgaattcgcctacgagagtctgagaacacgaccagccgctccttaccaagtaccaaccataggggtgtatggcgtgccaggatcaggcaagtctggcatcattaaaagcgcagtcaccaaaaaagatctagtggtgagcgccaagaaagaaaactgtgcagaaattataagggacgtcaagaaaatgaaagggctggacgtcaatgccagaactgtggactcagtgctcttgaatggatgcaaacaccccgtagagaccctgtatattgacgaagcttttgcttgtcatgcaggtactctcagagcgctcatagccattataagacctaaaaaggcagtgctctgcggggatcccaaacagtgcggtttttttaacatgatgtgcctgaaagtgcattttaaccacgagatttgcacacaagtcttccacaaaagcatctctcgccgttgcactaaatctgtgacttcggtcgtctcaaccttgttttacgacaaaaaaatgagaacgacgaatccgaaagagactaagattgtgattgacactaccggcagtaccaaacctaagcaggacgatctcattctcacttgtttcagagggtgggtgaagcagttgcaaatagattacaaaggcaacgaaataatgacggcagctgcctctcaagggctgacccgtaaaggtgtgtatgccgttcggtacaaggtgaatgaaaatcctctgtacgcacccacctcagaacatgtgaacgtcctactgacccgcacggaggaccgcatcgtgtggaaaacactagccggcgacccatggataaaaacactgactgccaagtaccctgggaatttcactgccacgatagaggagtggcaagcagagcatgatgccatcatgaggcacatcttggagagaccggaccctaccgacgtcttccagaataaggcaaacgtgtgttgggccaaggctttagtgccggtgctgaagaccgctggcatagacatgaccactgaacaatggaacactgtggattattttgaaacggacaaagctcactcagcagagatagtattgaaccaactatgcgtgaggttctttggactcgatctggactccggtctattttctgcacccactgttccgttatccattaggaataatcactgggataactccccgtcgcctaacatgtacgggctgaataaagaagtggtccgtcagctctctcgcaggtacccacaactgcctcgggcagttgccactggaagagtctatgacatgaacactggtacactgcgcaattatgatccgcgcataaacctagtacctgtaaacagaagactgcctcatgctttagtcctccaccataatgaacacccacagagtgacttttcttcattcgtcagcaaattgaagggcagaactgtcctggtggtcggggaaaagttgtccgtcccaggcaaaatggttgactggttgtcagaccggcctgaggctaccttcagagctcggctggatttaggcatcccaggtgatgtgcccaaatatgacataatatttgttaatgtgaggaccccatataaataccatcactatcagcagtgtgaagaccatgccattaagcttagcatgttgaccaagaaagcttgtctgcatctgaatcccggcggaacctgtgtcagcataggttatggttacgctgacagggccagcgaaagcatcattggtgctatagcgcggcagttcaagttttcccgggtatgcaaaccgaaatcctcacttgaagagacggaagttctgtttgtattcattgggtacgatcgcaaggcccgtacgcacaatccttacaagctttcatcaaccttgaccaacatttatacaggttccagactccacgaagccggatgtgcaccctcatatcatgtggtgcgaggggatattgccacggccaccgaaggagtgattataaatgctgctaacagcaaaggacaacctggcggaggggtgtgcggagcgctgtataagaaattcccggaaagcttcgatttacagccgatcgaagtaggaaaagcgcgactggtcaaaggtgcagctaaacatatcattcatgccgtaggaccaaacttcaacaaagtttcggaggttgaaggtgacaaacagttggcagaggcttatgagtccatcgctaagattgtcaacgataacaattacaagtcagtagcgattccactgttgtccaccggcatcttttccgggaacaaagatcgactaacccaatcattgaaccatttgctgacagctttagacaccactgatgcagatgtagccatatactgcagggacaagaaatgggaaatgactctcaaggaagcagtggctaggagagaagcagtggaggagatatgcatatccgacgactcttcagtgacagaacctgatgcagagctggtgagggtgcatccgaagagttctttggctggaaggaagggctacagcacaagcgatggcaaaactttctcatatttggaagggaccaagtttcaccaggcggccaaggatatagcagaaattaatgccatgtggcccgttgcaacggaggccaatgagcaggtatgcatgtatatcctcggagaaagcatgagcagtattaggtcgaaatgccccgtcgaagagtcggaagcctccacaccacctagcacgctgccttgcttgtgcatccatgccatgactccagaaagagtacagcgcctaaaagcctcacgtccagaacaaattactgtgtgctcatcctttccattgccgaagtatagaatcactggtgtgcagaagatccaatgctcccagcctatattgttctcaccgaaagtgcctgcgtatattcatccaaggaagtatctcgtggaaacaccaccggtagacgagactccggagccatcggcagagaaccaatccacagaggggacacctgaacaaccaccacttataaccgaggatgagaccaggactagaacgcctgagccgatcatcatcgaagaggaagaagaggatagcataagtttgctgtcagatggcccgacccaccaggtgctgcaagtcgaggcagacattcacgggccgccctctgtatctagctcatcctggtccattcctcatgcatccgactttgatgtggacagtttatccatacttgacaccctggagggagctagcgtgaccagcggggcaacgtcagccgagactaactcttacttcgcaaagagtatggagtttctggcgcgaccggtgcctgcgcctcgaacagtattcaggaaccctccacatcccgctccgcgcacaagaacaccgtcacttgcacccagcagggcctgctcgagaaccagcctagtttccaccccgccaggcgtgaatagggtgatcactagagaggagctcgaggcgcttaccccgtcacgcactcctagcaggtcggtctcgagaaccagcctggtctccaacccgccaggcgtaaatagggtgattacaagagaggagtttgaggcgttcgtagcacaacaacaatgacggtttgatgcgggtgcatacatcttttcctccgacaccggtcaagggcatttacaacaaaaatcagtaaggcaaacggtgctatccgaagtggtgttggagaggaccgaattggagatttcgtatgccccgcgcctcgaccaagaaaaagaagaattactacgcaagaaattacagttaaatcccacacctgctaacagaagcagataccagtccaggaaggtggagaacatgaaagccataacagctagacgtattctgcaaggcctagggcattatttgaaggcagaaggaaaagtggagtgctaccgaaccctgcatcctgttcctttgtattcatctagtgtgaaccgtgccttttcaagccccaaggtcgcagtggaagcctgtaacgccatgttgaaagagaactttccgactgtggcttcttactgtattattccagagtacgatgcctatttggacatggttgacggagcttcatgctgcttagacactgccagtttttgccctgcaaagctgcgcagctttccaaagaaacactcctatttggaacccacaatacgatcggcagtgccttcagcgatccagaacacgctccagaacgtcctggcagctgccacaaaaagaaattgcaatgtcacgcaaatgagagaattgcccgtattggattcggcggcctttaatgtggaatgcttcaagaaatatgcgtgtaataatgaatattgggaaacgtttaaagaaaaccccatcaggcttactgaagaaaacgtggtaaattacattaccaaattaaaaggaccaaaagctgctgctctttttgcgaagacacataatttgaatatgttgcaggacataccaatggacaggtttgtaatggacttaaagagagacgtgaaagtgactccaggaacaaaacatactgaagaacggcccaaggtacaggtgatccaggctgccgatccgctagcaacagcgtatctgtgcggaatccaccgagagctggttaggagattaaatgcggtcctgcttccgaacattcatacactgtttgatatgtcggctgaagactttgacgctattatagccgagcacttccagcctggggattgtgttctggaaactgacatcgcgtcgtttgataaaagtgaggacgacgccatggctctgaccgcgttaatgattctggaagacttaggtgtggacgcagagctgttgacgctgattgaggcggctttcggcgaaatttcatcaatacatttgcccactaaaactaaatttaaattcggagccatgatgaaatctggaatgttcctcacactgtttgtgaacacagtcattaacattgtaatcgcaagcagagtgttgagagaacggctaaccggatcaccatgtgcagcattcattggagatgacaatatcgtgaaaggagtcaaatcggacaaattaatggcagacaggtgcgccacctggttgaatatggaagtcaagattatagatgctgtggtgggcgagaaagcgccttatttctgtggagggtttattttgtgtgactccgtgaccggcacagcgtgccgtgtggcagaccccctaaaaaggctgtttaagcttggcaaacctctggcagcagacgatgaacatgatgatgacaggagaagggcattgcatgaagagtcaacacgctggaaccgagtgggtattctttcagagctgtgcaaggcagtagaatcaaggtatgaaaccgtaggaacttccatcatagttatggccatgactactctagctagcagtgttaaatcattcagctacctgagaggggcccctataactctctacggctaacctgaatggactacgacatagtctagtccgccaagatgttcccgttccagccaatgtatccgatgcagccaatgccctatcgcaacccgttcgcggccccgcgcaggccctggttccccagaaccgacccttttctggcgatgcaggtgcaggaattaacccgctcgatggctaacctgacgttcaagcaacgccgggacgcgccacctgaggggccatccgctaagaaaccgaagaaggaggcctcgcaaaaacagaaagggggaggccaagggaagaagaagaagaaccaagggaagaagaaggctaagacagggccgcctaatccgaaggcacagaatggaaacaagaagaagaccaacaagaaaccaggcaagagacagcgcatggtcatgaaattggaatctgacaagacgttcccaatcatgttggaagggaagataaacggctacgcttgtgtggtcggagggaagttattcaggccgatgcatgtggaaggcaagatcgacaacgacgttctggccgcgcttaagacgaagaaagcatccaaatacgatcttgagtatgcagatgtgccacagaacatgcgggccgatacattcaaatacacccatgagaaaccccaaggctattacagctggcatcatggagcagtccaatatgaaaatgggcgtttcacggtgccgaaaggagttggggccaagggagacagcggacgacccattctggataaccagggacgggtggtcgctattgtgctgggaggtgtgaatgaaggatctaggacagccctttcagtcgtcatgtggaacgagaagggagttaccgtgaagtatactccggagaactgcgagcaatggtcactagtgaccaccatgtgtctgctcgccaatgtgacgttcccatgtgctcaaccaccaatttgctacgacagaaaaccagcagagactttggccatgctcagcgttaacgttgacaacccgggctacgatgagctgctggaagcagctgttaagtgccccggaaggaaaaggagatccaccgaggagctgtttaaggagtataagctaacgcgcccttacatggccagatgcatcagatgtgcagttgggagctgccatagtccaatagcaatcgaggcagtaaagagcgacgggcacgacggttatgttagacttcagacttcctcgcagtatggcctggattcctccggcaacttaaagggcaggaccatgcggtatgacatgcacgggaccattaaagagataccactacatcaagtgtcactccatacatctcgcccgtgtcacattgtggatgggcacggttatttcctgcttgccaggtgcccggcaggggactccatcaccatggaatttaagaaagattccgtcacacactcctgctcggtgccgtatgaagtgaaatttaatcctgtaggcagagaactctatactcatcccccagaacacggagtagagcaagcgtgccaagtctacgcacatgatgcacagaacagaggagcttatgtcgagatgcacctcccgggctcagaagtggacagcagtttggtttccttgagcggcagttcagtcaccgtgacacctcctgttgggactagcgccctggtggaatgcgagtgtggcggcacaaagatctccgagaccatcaacaagacaaaacagttcagccagtgcacaaagaaggagcagtgcagagcatatcggctgcagaacgataagtgggtgtataattctgacaaactgcccaaagcagcgggagccaccttaaaaggaaaactgcatgtcccattcttgctggcagacggcaaatgcaccgtgcctctagcaccagaacctatgataacctttggtttcagatcagtgtcactgaaactgcaccctaagaatcccacatatctaaccacccgccaacttgctgatgagcctcactacacgcacgagctcatatctgaaccagctgttaggaattttaccgtcaccgaaaaagggtgggagtttgtatggggaaaccacccgccgaaaaggttttgggcacaggaaacagcacccggaaatccacatgggctaccgcacgaggtgataactcattattaccacagataccctatgtccaccatcctgggtttgtcaatttgtgccgccattgcaaccgtttccgttgcagcgtctacctggctgttttgcagatctagagttgcgtgcctaactccttaccggctaacacctaacgctaggataccattttgtctggctgtgctttgctgcgcccgcactgcccgggccgagaccacctgggagtccttggatcacctatggaacaataaccaacagatgttctggattcaattgctgatccctctggccgccttgatcgtagtgactcgcctgctcaggtgcgtgtgctgtgtcgtgccttttttagtcatggccggcgccgcaggcgccggcgcctacgagcacgcgaccacgatgccgagccaagcgggaatctcgtataacactatagtcaacagagcaggctacgcaccactccctatcagcataacaccaacaaagatcaagctgatacctacagtgaacttggagtacgtcacctgccactacaaaacaggaatggattcaccagccatcaaatgctgcggatctcaggaatgcactccaacttacaggcctgatgaacagtgcaaagtcttcacaggggtttacccgttcatgtggggtggtgcatattgcttttgcgacactgagaacacccaagtcagcaaggcctacgtaatgaaatctgacgactgccttgcggatcatgctgaagcatataaagcgcacacagcctcagtgcaggcgttcctcaacatcacagtgggagaacactctattgtgactaccgtgtatgtgaatggagaaactcctgtgaatttcaatggggtcaaattaactgcaggtccgctttccacagcttggacaccctttgatcgcaaaatcgtgcagtatgccggggagatctataattatgattttcctgagtatggggcaggacaaccaggagcatttggagatatacaatccagaacagtctcaagctcagatctgtatgccaataccaacctagtgctgcagagacccaaagcaggagcgatccacgtgccatacactcaggcaccttcgggttttgagcaatggaagaaagataaagctccatcattgaaatttaccgcccctttcggatgcgaaatatatacaaaccccattcgcgccgaaaactgtgctgtagggtcaattccattagcctttgacattcccgacgccttgttcaccagggtgtcagaaacaccgacactttcagcggccgaatgcactcttaacgagtgcgtgtattcttccgactttggtgggatcgccacggtcaagtactcggccagcaagtcaggcaagtgcgcagtccatgtgccatcagggactgctaccctaaaagaagcagcagtcgagctaaccgagcaagggtcggcgactatccatttctcgaccgcaaatatccacccggagttcaggctccaaatatgcacatcatatgttacgtgcaaaggtgattgtcaccccccgaaagaccatattgtgacacaccctcagtatcacgcccaaacatttacagccgcggtgtcaaaaaccgcgtggacgtggttaacatccctgctgggaggatcagccgtaattattataattggcttggtgctggctactattgtggccatgtacgtgctgaccaaccagaaacataattgaatacagcagcaattggcaagctgcttacatagaactcgcggcgattggcatgccgccttaaaatttttattttattttttcttttcttttccgaatcggattttgtttttaatatttc

SEQ ID NO: 4 - DNA, 9577 bp, synthetic construct
  source 1..9577: mol_type = other DNA
atgggcggcgcatgagagaagcccagaccaattacctacccaaaatggagaaagttcacgttgacatcgaggaagacagcccattcctcagagctttgcagcggagcttcccgcagtttgaggtagaagccaagcaggtcactgataatgaccatgctaatgccagagcgttttcgcatctggcttcaaaactgatcgaaacggaggtggacccatccgacacgatccttgacattggaagtgcgcccgcccgcagaatgtattctaagcacaagtatcattgtatctgtccgatgagatgtgcggaagatccggacagattgtataagtatgcaactaagctgaagaaaaactgtaaggaaataactgataaggaattggacaagaaaatgaaggagctcgccgccgtcatgagcgaccctgacctggaaactgagactatgtgcctccacgacgacgagtcgtgtcgctacgaagggcaagtcgctgtttaccaggatgtatacgcggttgacggaccgacaagtctctatcaccaagccaataagggagttagagtcgcctactggataggctttgacaccaccccttttatgtttaagaacttggctggagcatatccatcatactctaccaactgggccgacgaaaccgtgttaacggctcgtaacataggcctatgcagctctgacgttatggagcggtcacgtagagggatgtccattcttagaaagaagtatttgaaaccatccaacaatgttctattctctgttggctcgaccatctaccacgagaagagggacttactgaggagctggcacctgccgtctgtatttcacttacgtggcaagcaaaattacacatgtcggtgtgagactatagttagttgcgacgggtacgtcgttaaaagaatagctatcagtccaggcctgtatgggaagccttcaggctatgctgctacgatgcaccgcgagggattcttgtgctgcaaagtgacagacacattgaacggggagagggtctcttttcccgtgtgcacgtatgtgccagctacattgtgtgaccaaatgactggcatactggcaacagatgtcagtgcggacgacgcgcaaaaactgctggttgggctcaaccagcgtatagtcgtcaacggtcgcacccagagaaacaccaataccatgaaaaattaccttttgcccgtagtggcccaggcatttgctaggtgggcaaaggaatataaggaagatcaagaagatgaaaggccactaggactacgagatagacagttagtcatggggtgttgttgggcttttagaaggcacaagataacatctatttataagcgcccggatacccaaaccatcatcaaagtgaacagcgatttccactcattcgtgctgcccaggataggcagtaacacattggagatcgggctgagaacaagaatcaggaaaatgttagaggagcacaaggagccgtcacctctcattaccgccgaggacgtacaagaagctaagtgcgcagccgatgaggctaaggaggtgcgtgaagccgaggagttgcgcgcagctctaccacctttggcagctgatgttgaggagcccactctggaagccgatgtcgacttgatgttacaagaggctggggccggctcagtggagacacctcgtggcttgataaaggttaccagctacgctggcgaggacaagatcggctcttacgctgtgctttctccgcaggctgtactcaagagtgaaaaattatcttgcatccaccctctcgctgaacaagtcatagtgataacacactctggccgaaaagggcgttatgccgtggaaccataccatggtaaagtagtggtgccagagggacatgcaatacccgtccaggactttcaagctctgagtgaaagtgccaccattgtgtacaacgaacgtgagttcgtaaacaggtacctgcaccatattgccacacatggaggagcgctgaacactgatgaagaatattacaaaactgtcaagcccagcgagcacgacggcgaatacctgtacgacatcgacaggaaacagtgcgtcaagaaagaactagtcactgggctagggctcacaggcgagctggtggatcctcccttccatgaattcgcctacgagagtctgagaacacgaccagccgctccttaccaagtaccaaccataggggtgtatggcgtgccaggatcaggcaagtctggcatcattaaaagcgcagtcaccaaaaaagatctagtggtgagcgccaagaaagaaaactgtgcagaaattataagggacgtcaagaaaatgaaagggctggacgtcaatgccagaactgtggactcagtgctcttgaatggatgcaaacaccccgtagagaccctgtatattgacgaagcttttgcttgtcatgcaggtactctcagagcgctcatagccattataagacctaaaaaggcagtgctctgcggggatcccaaacagtgcggtttttttaacatgatgtgcctgaaagtgcattttaaccacgagatttgcacacaagtcttccacaaaagcatctctcgccgttgcactaaatctgtgacttcggtcgtctcaaccttgttttacgacaaaaaaatgagaacgacgaatccgaaagagactaagattgtgattgacactaccggcagtaccaaacctaagcaggacgatctcattctcacttgtttcagagggtgggtgaagcagttgcaaatagattacaaaggcaacgaaataatgacggcagctgcctctcaagggctgacccgtaaaggtgtgtatgccgttcggtacaaggtgaatgaaaatcctctgtacgcacccacctcagaacatgtgaacgtcctactgacccgcacggaggaccgcatcgtgtggaaaacactagccggcgacccatggataaaaacactgactgccaagtaccctgggaatttcactgccacgatagaggagtggcaagcagagcatgatgccatcatgaggcacatcttggagagaccggaccctaccgacgtcttccagaataaggcaaacgtgtgttgggccaaggctttagtgccggtgctgaagaccgctggcatagacatgaccactgaacaatggaacactgtggattattttgaaacggacaaagctcactcagcagagatagtattgaaccaactatgcgtgaggttctttggactcgatctggactccggtctattttctgcacccactgttccgttatccattaggaataatcactgggataactccccgtcgcctaacatgtacgggctgaataaagaagtggtccgtcagctctctcgcaggtacccacaactgcctcgggcagttgccactggaagagtctatgacatgaacactggtacactgcgcaattatgatccgcgcataaacctagtacctgtaaacagaagactgcctcatgctttagtcctccaccataatgaacacccacagagtgacttttcttcattcgtcagcaaattgaagggcagaactgtcctggtggtcggggaaaagttgtccgtcccaggcaaaatggttgactggttgtcagaccggcctgaggctaccttcagagctcggctggatttaggcatcccaggtgatgtgcccaaatatgacataatatttgttaatgtgaggaccccatataaataccatcactatcagcagtgtgaagaccatgccattaagcttagcatgttgaccaagaaagcttgtctgcatctgaatcccggcggaacctgtgtcagcataggttatggttacgctgacagggccagcgaaagcatcattggtgctatagcgcggcagttcaagttttcccgggtatgcaaaccgaaatcctcacttgaagagacggaagttctgtttgtattcattgggtacgatcgcaaggcccgtacgcacaatccttacaagctttcatcaaccttgaccaacatttatacaggttccagactccacgaagccggatgtgcaccctcatatcatgtggtgcgaggggatattgccacggccaccgaaggagtgattataaatgctgctaacagcaaaggacaacctggcggaggggtgtgcggagcgctgtataagaaattcccggaaagcttcgatttacagccgatcgaagtaggaaaagcgcgactggtcaaaggtgcagctaaacatatcattcatgccgtaggaccaaacttcaacaaagtttcggaggttgaaggtgacaaacagttggcagaggcttatgagtccatcgctaagattgtcaacgataacaattacaagtcagtagcgattccactgttgtccaccggcatcttttccgggaacaaagatcgactaacccaatcattgaaccatttgctgacagctttagacaccactgatgcagatgtagccatatactgcagggacaagaaatgggaaatgactctcaaggaagcagtggctaggagagaagcagtggaggagatatgcatatccgacgactcttcagtgacagaacctgatgcagagctggtgagggtgcatccgaagagttctttggctggaaggaagggctacagcacaagcgatggcaaaactttctcatatttggaagggaccaagtttcaccaggcggccaaggatatagcagaaattaatgccatgtggcccgttgcaacggaggccaatgagcaggtatgcatgtatatcctcggagaaagcatgagcagtattaggtcgaaatgccccgtcgaagagtcggaagcctccacaccacctagcacgctgccttgcttgtgcatccatgccatgactccagaaagagtacagcgcctaaaagcctcacgtccagaacaaattactgtgtgctcatcctttccattgccgaagtatagaatcactggtgtgcagaagatccaatgctcccagcctatattgttctcaccgaaagtgcctgcgtatattcatccaaggaagtatctcgtggaaacaccaccggtagacgagactccggagccatcggcagagaaccaatccacagaggggacacctgaacaaccaccacttataaccgaggatgagaccaggactagaacgcctgagccgatcatcatcgaagaggaagaagaggatagcataagtttgctgtcagatggcccgacccaccaggtgctgcaagtcgaggcagacattcacgggccgccctctgtatctagctcatcctggtccattcctcatgcatccgactttgatgtggacagtttatccatacttgacaccctggagggagctagcgtgaccagcggggcaacgtcagccgagactaactcttacttcgcaaagagtatggagtttctggcgcgaccggtgcctgcgcctcgaacagtattcaggaaccctccacatcccgctccgcgcacaagaacaccgtcacttgcacccagcagggcctgctcgagaaccagcctagtttccaccccgccaggcgtgaatagggtgatcactagagaggagctcgaggcgcttaccccgtcacgcactcctagcaggtcggtctcgagaaccagcctggtctccaacccgccaggcgtaaatagggtgattacaagagaggagtttgaggcgttcgtagcacaacaacaatgacggtttgatgcgggtgcatacatcttttcctccgacaccggtcaagggcatttacaacaaaaatcagtaaggcaaacggtgctatccgaagtggtgttggagaggaccgaattggagatttcgtatgccccgcgcctcgaccaagaaaaagaagaattactacgcaagaaattacagttaaatcccacacctgctaacagaagcagataccagtccaggaaggtggagaacatgaaagccataacagctagacgtattctgcaaggcctagggcattatttgaaggcagaaggaaaagtggagtgctaccgaaccctgcatcctgttcctttgtattcatctagtgtgaaccgtgccttttcaagccccaaggtcgcagtggaagcctgtaacgccatgttgaaagagaactttccgactgtggcttcttactgtattattccagagtacgatgcctatttggacatggttgacggagcttcatgctgcttagacactgccagtttttgccctgcaaagctgcgcagctttccaaagaaacactcctatttggaacccacaatacgatcggcagtgccttcagcgatccagaacacgctccagaacgtcctggcagctgccacaaaaagaaattgcaatgtcacgcaaatgagagaattgcccgtattggattcggcggcctttaatgtggaatgcttcaagaaatatgcgtgtaataatgaatattgggaaacgtttaaagaaaaccccatcaggcttactgaagaaaacgtggtaaattacattaccaaattaaaaggaccaaaagctgctgctctttttgcgaagacacataatttgaatatgttgcaggacataccaatggacaggtttgtaatggacttaaagagagacgtgaaagtgactccaggaacaaaacatactgaagaacggcccaaggtacaggtgatccaggctgccgatccgctagcaacagcgtatctgtgcggaatccaccgagagctggttaggagattaaatgcggtcctgcttccgaacattcatacactgtttgatatgtcggctgaagactttgacgctattatagccgagcacttccagcctggggattgtgttctggaaactgacatcgcgtcgtttgataaaagtgaggacgacgccatggctctgaccgcgttaatgattctggaagacttaggtgtggacgcagagctgttgacgctgattgaggcggctttcggcgaaatttcatcaatacatttgcccactaaaactaaatttaaattcggagccatgatgaaatctggaatgttcctcacactgtttgtgaacacagtcattaacattgtaatcgcaagcagagtgttgagagaacggctaaccggatcaccatgtgcagcattcattggagatgacaatatcgtgaaaggagtcaaatcggacaaattaatggcagacaggtgcgccacctggttgaatatggaagtcaagattatagatgctgtggtgggcgagaaagcgccttatttctgtggagggtttattttgtgtgactccgtgaccggcacagcgtgccgtgtggcagaccccctaaaaaggctgtttaagcttggcaaacctctggcagcagacgatgaacatgatgatgacaggagaagggcattgcatgaagagtcaacacgctggaaccgagtgggtattctttcagagctgtgcaaggcagtagaatcaaggtatgaaaccgtaggaacttccatcatagttatggccatgactactctagctagcagtgttaaatcattcagctacctgagaggggcccctataactctctacggctaacctgaatggactacgactctagaatagtctttaattaagccaccatggcaggcatgtttcaggcgctgagcgaaggctgcaccccgtatgatattaaccagatgctgaacgtgctgggcgatcatcaggtctcaggccttgagcagcttgagagtataatcaactttgaaaaactgactgaatggaccagttctaatgttatgcctatcctgtctcctctgacaaagggcatcctgggcttcgtgtttaccctgaccgtgccttctgagagaggacttagctgcattagcgaagcggatgcgaccaccccggaaagcgcgaacctgggcgaagaaattctgagccagctgtatctttggccaagggtgacctaccattcccctagttatgcttaccaccaatttgaaagacgagccaaatataaaagacacttccccggctttggccagagcctgctgtttggctaccctgtgtacgtgttcggcgattgcgtgcagggcgattgggatgcgattcgctttcgctattgcgcgccgccgggctatgcgctgctgcgctgcaacgataccaactatagcgctctgctggctgtgggggccctagaaggacccaggaatcaggactggcttggtgtcccaagacaacttgtaactcggatgcaggctattcagaatgccggcctgtgtaccctggtggccatgctggaagagacaatcttctggctgcaagcgtttctgatggcgctgaccgatagcggcccgaaaaccaacattattgtggatagccagtatgtgatgggcattagcaaaccgagctttcaggaatttgtggattgggaaaacgtgagcccggaactgaacagcaccgatcagccgttttggcaagccggaatcctggccagaaatctggtgcctatggtggccacagtgcagggccagaacctgaagtaccagggtcagtcactagtcatctctgcttctatcattgtcttcaacctgctggaactggaaggtgattatcgagatgatggcaacgtgtgggtgcataccccgctgagcccgcgcaccctgaacgcgtgggtgaaagcggtggaagaaaaaaaaggtattccagttcacctagagctggccagtatgaccaacatggagctcatgagcagtattgtgcatcagcaggtcagaacatacggccccgtgttcatgtgtctcggcggactgcttacaatggtggctggtgctgtgtggctgacagtgcgagtgctcgagctgttccgggccgcgcagctggccaacgacgtggtcctccagatcatggagctttgtggtgcagcgtttcgccaggtgtgccataccaccgtgccgtggccgaacgcgagcctgaccccgaaatggaacaacgaaaccacccagccccagatcgccaactgcagcgtgtatgacttttttgtgtggctccattattattctgttcgagacacactttggccaagggtgacctaccatatgaacaaatatgcgtatcatatgctggaaagacgagccaaatataaaagaggaccaggacctggcgctaaatttgtggccgcctggacactgaaagccgctgctggtcctggacctggccagtacatcaaggccaacagcaagttcatcggcatcaccgaactcggacccggaccaggctgatgattcgaacggccgtatcacgcccaaacatttacagccgcggtgtcaaaaaccgcgtggacgtggttaacatccctgctgggaggatcagccgtaattattataattggcttggtgctggctactattgtggccatgtacgtgctgaccaaccagaaacataattgaatacagcagcaattggcaagctgcttacatagaactcgcggcgattggcatgccgccttaaaatttttattttattttttcttttcttttccgaatcggattttgtttttaatatttcaaaaaaaaaaaaaaaaaaaaaaaaaaaaaaaaaaaaaaaaaaaaaaaaaaaaaaaaaaaaaaaaaaaaaaaaaaaaaaaa

SEQ ID NO: 5 - DNA, 11447 bp, Venezuelan equine encephalitis virus; identical to SEQ ID NO: 3
  source 1..11447: mol_type = genomic DNA

SEQ ID NO: 6 - DNA, 7894 bp, synthetic construct
  source 1..7894: mol_type = other DNA
atgggcggcgcatgagagaagcccagaccaattacctacccaaaatggagaaagttcacgttgacatcgaggaagacagcccattcctcagagctttgcagcggagcttcccgcagtttgaggtagaagccaagcaggtcactgataatgaccatgctaatgccagagcgttttcgcatctggcttcaaaactgatcgaaacggaggtggacccatccgacacgatccttgacattggaagtgcgcccgcccgcagaatgtattctaagcacaagtatcattgtatctgtccgatgagatgtgcggaagatccggacagattgtataagtatgcaactaagctgaagaaaaactgtaaggaaataactgataaggaattggacaagaaaatgaaggagctcgccgccgtcatgagcgaccctgacctggaaactgagactatgtgcctccacgacgacgagtcgtgtcgctacgaagggcaagtcgctgtttaccaggatgtatacgcggttgacggaccgacaagtctctatcaccaagccaataagggagttagagtcgcctactggataggctttgacaccaccccttttatgtttaagaacttggctggagcatatccatcatactctaccaactgggccgacgaaaccgtgttaacggctcgtaacataggcctatgcagctctgacgttatggagcggtcacgtagagggatgtccattcttagaaagaagtatttgaaaccatccaacaatgttctattctctgttggctcgaccatctaccacgagaagagggacttactgaggagctggcacctgccgtctgtatttcacttacgtggcaagcaaaattacacatgtcggtgtgagactatagttagttgcgacgggtacgtcgttaaaagaatagctatcagtccaggcctgtatgggaagccttcaggctatgctgctacgatgcaccgcgagggattcttgtgctgcaaagtgacagacacattgaacggggagagggtctcttttcccgtgtgcacgtatgtgccagctacattgtgtgaccaaatgactggcatactggcaacagatgtcagtgcggacgacgcgcaaaaactgctggttgggctcaaccagcgtatagtcgtcaacggtcgcacccagagaaacaccaataccatgaaaaattaccttttgcccgtagtggcccaggcatttgctaggtgggcaaaggaatataaggaagatcaagaagatgaaaggccactaggactacgagatagacagttagtcatggggtgttgttgggcttttagaaggcacaagataacatctatttataagcgcccggatacccaaaccatcatcaaagtgaacagcgatttccactcattcgtgctgcccaggataggcagtaacacattggagatcgggctgagaacaagaatcaggaaaatgttagaggagcacaaggagccgtcacctctcattaccgccgaggacgtacaagaagctaagtgcgcagccgatgaggctaaggaggtgcgtgaagccgaggagttgcgcgcagctctaccacctttggcagctgatgttgaggagcccactctggaagccgatgtcgacttgatgttacaagaggctggggccggctcagtggagacacctcgtggcttgataaaggttaccagctacgctggcgaggacaagatcggctcttacgctgtgctttctccgcaggctgtactcaagagtgaaaaattatcttgcatccaccctctcgctgaacaagtcatagtgataacacactctggccgaaaagggcgttatgccgtggaaccataccatggtaaagtagtggtgccagagggacatgcaatacccgtccaggactttcaagctctgagtgaaagtgccaccattgtgtacaacgaacgtgagttcgtaaacaggtacctgcaccatattgccacacatggaggagcgctgaacactgatgaagaatattacaaaactgtcaagcccagcgagcacgacggcgaatacctgtacgacatcgacaggaaacagtgcgtcaagaaagaactagtcactgggctagggctcacaggcgagctggtggatcctcccttccatgaattcgcctacgagagtctgagaacacgaccagccgctccttaccaagtaccaaccataggggtgtatggcgtgccaggatcaggcaagtctggcatcattaaaagcgcagtcaccaaaaaagatctagtggtgagcgccaagaaagaaaactgtgcagaaattataagggacgtcaagaaaatgaaagggctggacgtcaatgccagaactgtggactcagtgctcttgaatggatgcaaacaccccgtagagaccctgtatattgacgaagcttttgcttgtcatgcaggtactctcagagcgctcatagccattataagacctaaaaaggcagtgctctgcggggatcccaaacagtgcggtttttttaacatgatgtgcctgaaagtgcattttaaccacgagatttgcacacaagtcttccacaaaagcatctctcgccgttgcactaaatctgtgacttcggtcgtctcaaccttgttttacgacaaaaaaatgagaacgacgaatccgaaagagactaagattgtgattgacactaccggcagtaccaaacctaagcaggacgatctcattctcacttgtttcagagggtgggtgaagcagttgcaaatagattacaaaggcaacgaaataatgacggcagctgcctctcaagggctgacccgtaaaggtgtgtatgccgttcggtacaaggtgaatgaaaatcctctgtacgcacccacctcagaacatgtgaacgtcctactgacccgcacggaggaccgcatcgtgtggaaaacactagccggcgacccatggataaaaacactgactgccaagtaccctgggaatttcactgccacgatagaggagtggcaagcagagcatgatgccatcatgaggcacatcttggagagaccggaccctaccgacgtcttccagaataaggcaaacgtgtgttgggccaaggctttagtgccggtgctgaagaccgctggcatagacatgaccactgaacaatggaacactgtggattattttgaaacggacaaagctcactcagcagagatagtattgaaccaactatgcgtgaggttctttggactcgatctggactccggtctattttctgcacccactgttccgttatccattaggaataatcactgggataactccccgtcgcctaacatgtacgggctgaataaagaagtggtccgtcagctctctcgcaggtacccacaactgcctcgggcagttgccactggaagagtctatgacatgaacactggtacactgcgcaattatgatccgcgcataaacctagtacctgtaaacagaagactgcctcatgctttagtcctccaccataatgaacacccacagagtgacttttcttcattcgtcagcaaattgaagggcagaactgtcctggtggtcggggaaaagttgtccgtcccaggcaaaatggttgactggttgtcagaccggcctgaggctaccttcagagctcggctggatttaggcatcccaggtgatgtgcccaaatatgacataatatttgttaatgtgaggaccccatataaataccatcactatcagcagtgtgaagaccatgccattaagcttagcatgttgaccaagaaagcttgtctgcatctgaatcccggcggaacctgtgtcagcataggttatggttacgctgacagggccagcgaaagcatcattggtgctatagcgcggcagttcaagttttcccgggtatgcaaaccgaaatcctcacttgaagagacggaagttctgtttgtattcattgggtacgatcgcaaggcccgtacgcacaatccttacaagctttcatcaaccttgaccaacatttatacaggttccagactccacgaagccggatgtgcaccctcatatcatgtggtgcgaggggatattgccacggccaccgaaggagtgattataaatgctgctaacagcaaaggacaacctggcggaggggtgtgcggagcgctgtataagaaattcccggaaagcttcgatttacagccgatcgaagtaggaaaagcgcgactggtcaaaggtgcagctaaacatatcattcatgccgtaggaccaaacttcaacaaagtttcggaggttgaaggtgacaaacagttggcagaggcttatgagtccatcgctaagattgtcaacgataacaattacaagtcagtagcgattccactgttgtccaccggcatcttttccgggaacaaagatcgactaacccaatcattgaaccatttgctgacagctttagacaccactgatgcagatgtagccatatactgcagggacaagaaatgggaaatgactctcaaggaagcagtggctaggagagaagcagtggaggagatatgcatatccgacgactcttcagtgacagaacctgatgcagagctggtgagggtgcatccgaagagttctttggctggaaggaagggctacagcacaagcgatggcaaaactttctcatatttggaagggaccaagtttcaccaggcggccaaggatatagcagaaattaatgccatgtggcccgttgcaacggaggccaatgagcaggtatgcatgtatatcctcggagaaagcatgagcagtattaggtcgaaatgccccgtcgaagagtcggaagcctccacaccacctagcacgctgccttgcttgtgcatccatgccatgactccagaaagagtacagcgcctaaaagcctcacgtccagaacaaattactgtgtgctcatcctttccattgccgaagtatagaatcactggtgtgcagaagatccaatgctcccagcctatattgttctcaccgaaagtgcctgcgtatattcatccaaggaagtatctcgtggaaacaccaccggtagacgagactccggagccatcggcagagaaccaatccacagaggggacacctgaacaaccaccacttataaccgaggatgagaccaggactagaacgcctgagccgatcatcatcgaagaggaagaagaggatagcataagtttgctgtcagatggcccgacccaccaggtgctgcaagtcgaggcagacattcacgggccgccctctgtatctagctcatcctggtccattcctcatgcatccgactttgatgtggacagtttatccatacttgacaccctggagggagctagcgtgaccagcggggcaacgtcagccgagactaactcttacttcgcaaagagtatggagtttctggcgcgaccggtgcctgcgcctcgaacagtattcaggaaccctccacatcccgctccgcgcacaagaacaccgtcacttgcacccagcagggcctgctcgagaaccagcctagtttccaccccgccaggcgtgaatagggtgatcactagagaggagctcgaggcgcttaccccgtcacgcactcctagcaggtcggtctcgagaaccagcctggtctccaacccgccaggcgtaaatagggtgattacaagagaggagtttgaggcgttcgtagcacaacaacaatgacggtttgatgcgggtgcatacatcttttcctccgacaccggtcaagggcatttacaacaaaaatcagtaaggcaaacggtgctatccgaagtggtgttggagaggaccgaattggagatttcgtatgccccgcgcctcgaccaagaaaaagaagaattactacgcaagaaattacagttaaatcccacacctgctaacagaagcagataccagtccaggaaggtggagaacatgaaagccataacagctagacgtattctgcaaggcctagggcattatttgaaggcagaaggaaaagtggagtgctaccgaaccctgcatcctgttcctttgtattcatctagtgtgaaccgtgccttttcaagccccaaggtcgcagtggaagcctgtaacgccatgttgaaagagaactttccgactgtggcttcttactgtattattccagagtacgatgcctatttggacatggttgacggagcttcatgctgcttagacactgccagtttttgccctgcaaagctgcgcagctttccaaagaaacactcctatttggaacccacaatacgatcggcagtgccttcagcgatccagaacacgctccagaacgtcctggcagctgccacaaaaagaaattgcaatgtcacgcaaatgagagaattgcccgtattggattcggcggcctttaatgtggaatgcttcaagaaatatgcgtgtaataatgaatattgggaaacgtttaaagaaaaccccatcaggcttactgaagaaaacgtggtaaattacattaccaaattaaaaggaccaaaagctgctgctctttttgcgaagacacataatttgaatatgttgcaggacataccaatggacaggtttgtaatggacttaaagagagacgtgaaagtgactccaggaacaaaacatactgaagaacggcccaaggtacaggtgatccaggctgccgatccgctagcaacagcgtatctgtgcggaatccaccgagagctggttaggagattaaatgcggtcctgcttccgaacattcatacactgtttgatatgtcggctgaagactttgacgctattatagccgagcacttccagcctggggattgtgttctggaaactgacatcgcgtcgtttgataaaagtgaggacgacgccatggctctgaccgcgttaatgattctggaagacttaggtgtggacgcagagctgttgacgctgattgaggcggctttcggcgaaatttcatcaatacatttgcccactaaaactaaatttaaattcggagccatgatgaaatctggaatgttcctcacactgtttgtgaacacagtcattaacattgtaatcgcaagcagagtgttgagagaacggctaaccggatcaccatgtgcagcattcattggagatgacaatatcgtgaaaggagtcaaatcggacaaattaatggcagacaggtgcgccacctggttgaatatggaagtcaagattatagatgctgtggtgggcgagaaagcgccttatttctgtggagggtttattttgtgtgactccgtgaccggcacagcgtgccgtgtggcagaccccctaaaaaggctgtttaagcttggcaaacctctggcagcagacgatgaacatgatgatgacaggagaagggcattgcatgaagagtcaacacgctggaaccgagtgggtattctttcagagctgtgcaaggcagtagaatcaaggtatgaaaccgtaggaacttccatcatagttatggccatgactactctagctagcagtgttaaatcattcagctacctgagaggggcccctataactctctacggctaacctgaatggactacgactatcacgcccaaacatttacagccgcggtgtcaaaaaccgcgtggacgtggttaacatccctgctgggaggatcagccgtaattattataattggcttggtgctggctactattgtggccatgtacgtgctgaccaaccagaaacataattgaatacagcagcaattggcaagctgcttacatagaactcgcggcgattggcatgccgccttaaaatttttattttattttttcttttcttttccgaatcggattttgtttttaatatttcaaaaaaaaaaaaaaaaaaaaaaaaaaaaaaaaaaaaaaaaaaaaaaaaaaaaaaaaaaaaaaaaaaaaaaaaaaaaaaaa

SEQ ID NO: 7 - DNA, 7893 bp, synthetic construct
  source 1..7893: mol_type = other DNA
ataggcggcgcatgagagaagcccagaccaattacctacccaaaatggagaaagttcacgttgacatcgaggaagacagcccattcctcagagctttgcagcggagcttcccgcagtttgaggtagaagccaagcaggtcactgataatgaccatgctaatgccagagcgttttcgcatctggcttcaaaactgatcgaaacggaggtggacccatccgacacgatccttgacattggaagtgcgcccgcccgcagaatgtattctaagcacaagtatcattgtatctgtccgatgagatgtgcggaagatccggacagattgtataagtatgcaactaagctgaagaaaaactgtaaggaaataactgataaggaattggacaagaaaatgaaggagctcgccgccgtcatgagcgaccctgacctggaaactgagactatgtgcctccacgacgacgagtcgtgtcgctacgaagggcaagtcgctgtttaccaggatgtatacgcggttgacggaccgacaagtctctatcaccaagccaataagggagttagagtcgcctactggataggctttgacaccaccccttttatgtttaagaacttggctggagcatatccatcatactctaccaactgggccgacgaaaccgtgttaacggctcgtaacataggcctatgcagctctgacgttatggagcggtcacgtagagggatgtccattcttagaaagaagtatttgaaaccatccaacaatgttctattctctgttggctcgaccatctaccacgagaagagggacttactgaggagctggcacctgccgtctgtatttcacttacgtggcaagcaaaattacacatgtcggtgtgagactatagttagttgcgacgggtacgtcgttaaaagaatagctatcagtccaggcctgtatgggaagccttcaggctatgctgctacgatgcaccgcgagggattcttgtgctgcaaagtgacagacacattgaacggggagagggtctcttttcccgtgtgcacgtatgtgccagctacattgtgtgaccaaatgactggcatactggcaacagatgtcagtgcggacgacgcgcaaaaactgctggttgggctcaaccagcgtatagtcgtcaacggtcgcacccagagaaacaccaataccatgaaaaattaccttttgcccgtagtggcccaggcatttgctaggtgggcaaaggaatataaggaagatcaagaagatgaaaggccactaggactacgagatagacagttagtcatggggtgttgttgggcttttagaaggcacaagataacatctatttataagcgcccggatacccaaaccatcatcaaagtgaacagcgatttccactcattcgtgctgcccaggataggcagtaacacattggagatcgggctgagaacaagaatcaggaaaatgttagaggagcacaaggagccgtcacctctcattaccgccgaggacgtacaagaagctaagtgcgcagccgatgaggctaaggaggtgcgtgaagccgaggagttgcgcgcagctctaccacctttggcagctgatgttgaggagcccactctggaagccgatgtcgacttgatgttacaagaggctggggccggctcagtggagacacctcgtggcttgataaaggttaccagctacgatggcgaggacaagatcggctcttacgctgtgctttctccgcaggctgtactcaagagtgaaaaattatcttgcatccaccctctcgctgaacaagtcatagtgataacacactctggccgaaaagggcgttatgccgtggaaccataccatggtaaagtagtggtgccagagggacatgcaatacccgtccaggactttcaagctctgagtgaaagtgccaccattgtgtacaacgaacgtgagttcgtaaacaggtacctgcaccatattgccacacatggaggagcgctgaacactgatgaagaatattacaaaactgtcaagcccagcgagcacgacggcgaatacctgtacgacatcgacaggaaacagtgcgtcaagaaagaactagtcactgggctagggctcacaggcgagctggtggatcctcccttccatgaattcgcctacgagagtctgagaacacgaccagccgctccttaccaagtaccaaccataggggtgtatggcgtgccaggatcaggcaagtctggcatcattaaaagcgcagtcaccaaaaaagatctagtggtgagcgccaagaaagaaaactgtgcagaaattataagggacgtcaagaaaatgaaagggctggacgtcaatgccagaactgtggactcagtgctcttgaatggatgcaaacaccccgtagagaccctgtatattgacgaagcttttgcttgtcatgcaggtactctcagagcgctcatagccattataagacctaaaaaggcagtgctctgcggggatcccaaacagtgcggtttttttaacatgatgtgcctgaaagtgcattttaaccacgagatttgcacacaagtcttccacaaaagcatctctcgccgttgcactaaatctgtgacttcggtcgtctcaaccttgttttacgacaaaaaaatgagaacgacgaatccgaaagagactaagattgtgattgacactaccggcagtaccaaacctaagcaggacgatctcattctcacttgtttcagagggtgggtgaagcagttgcaaatagattacaaaggcaacgaaataatgacggcagctgcctctcaagggctgacccgtaaaggtgtgtatgccgttcggtacaaggtgaatgaaaatcctctgtacgcacccacctcagaacatgtgaacgtcctactgacccgcacggaggaccgcatcgtgtggaaaacactagccggcgacccatggataaaaacactgactgccaagtaccctgggaatttcactgccacgatagaggagtggcaagcagagcatgatgccatcatgaggcacatcttggagagaccggaccctaccgacgtcttccagaataaggcaaacgtgtgttgggccaaggctttagtgccggtgctgaagaccgctggcatagacatgaccactgaacaatggaacactgtggattattttgaaacggacaaagctcactcagcagagatagtattgaaccaactatgcgtgaggttctttggactcgatctggactccggtctattttctgcacccactgttccgttatccattaggaataatcactgggataactccccgtcgcctaacatgtacgggctgaataaagaagtggtccgtcagctctctcgcaggtacccacaactgcctcgggcagttgccactggaagagtctatgacatgaacactggtacactgcgcaattatgatccgcgcataaacctagtacctgtaaacagaagactgcctcatgctttagtcctccaccataatgaacacccacagagtgacttttcttcattcgtcagcaaattgaagggcagaactgtcctggtggtcggggaaaagttgtccgtcccaggcaaaatggttgactggttgtcagaccggcctgaggctaccttcagagctcggctggatttaggcatcccaggtgatgtgcccaaatatgacataatatttgttaatgtgaggaccccatataaataccatcactatcagcagtgtgaagaccatgccattaagcttagcatgttgaccaagaaagcttgtctgcatctgaatcccggcggaacctgtgtcagcataggttatggttacgctgacagggccagcgaaagcatcattggtgctatagcgcggcagttcaagttttcccgggtatgcaaaccgaaatcctcacttgaagagacggaagttctgtttgtattcattgggtacgatcgcaaggcccgtacgcacaatccttacaagctttcatcaaccttgaccaacatttatacaggttccagactccacgaagccggatgtgcaccctcatatcatgtggtgcgaggggatattgccacggccaccgaaggagtgattataaatgctgctaacagcaaaggacaacctggcggaggggtgtgcggagcgctgtataagaaattcccggaaagcttcgatttacagccgatcgaagtaggaaaagcgcgactggtcaaaggtgcagctaaacatatcattcatgccgtaggaccaaacttcaacaaagtttcggaggttgaaggtgacaaacagttggcagaggcttatgagtccatcgctaagattgtcaacgataacaattacaagtcagtagcgattccactgttgtccaccggcatcttttccgggaacaaagatcgactaacccaatcattgaaccatttgctgacagctttagacaccactgatgcagatgtagccatatactgcagggacaagaaatgggaaatgactctcaaggaagcagtggctaggagagaagcagtggaggagatatgcatatccgacgactcttcagtgacagaacctgatgcagagctggtgagggtgcatccgaagagttctttggctggaaggaagggctacagcacaagcgatggcaaaactttctcatatttggaagggaccaagtttcaccaggcggccaaggatatagcagaaattaatgccatgtggcccgttgcaacggaggccaatgagcaggtatgcatgtatatcctcggagaaagcatgagcagtattaggtcgaaatgccccgtcgaagagtcggaagcctccacaccacctagcacgctgccttgcttgtgcatccatgccatgactccagaaagagtacagcgcctaaaagcctcacgtccagaacaaattactgtgtgctcatcctttccattgccgaagtatagaatcactggtgtgcagaagatccaatgctcccagcctatattgttctcaccgaaagtgcctgcgtatattcatccaaggaagtatctcgtggaaacaccaccggtagacgagactccggagccatcggcagagaaccaatccacagaggggacacctgaacaaccaccacttataaccgaggatgagaccaggactagaacgcctgagccgatcatcatcgaagaggaagaagaggatagcataagtttgctgtcagatggcccgacccaccaggtgctgcaagtcgaggcagacattcacgggccgccctctgtatctagctcatcctggtccattcctcatgcatccgactttgatgtggacagtttatccatacttgacaccctggagggagctagcgtgaccagcggggcaacgtcagccgagactaactcttacttcgcaaagagtatggagtttctggcgcgaccggtgcctgcgcctcgaacagtattcaggaaccctccacatcccgctccgcgcacaagaacaccgtcacttgcacccagcagggcctgctcgagaaccagcctagtttccaccccgccaggcgtgaatagggtgatcactagagaggagctcgaggcgcttaccccgtcacgcactcctagcaggtcggtctcgagaaccagcctggtctccaacccgccaggcgtaaatagggtgattacaagagaggagtttgaggcgttcgtagcacaacaacaatgacggtttgatgcgggtgcatacatcttttcctccgacaccggtcaagggcatttacaacaaaaatcagtaaggcaaacggtgctatccgaagtggtgttggagaggaccgaattggagatttcgtatgccccgcgcctcgaccaagaaaaagaagaattactacgcaagaaattacagttaaatcccacacctgctaacagaagcagataccagtccaggaaggtggagaacatgaaagccataacagctagacgtattctgcaaggcctagggcattatttgaaggcagaaggaaaagtggagtgctaccgaaccctgcatcctgttcctttgtattcatctagtgtgaaccgtgccttttcaagccccaaggtcgcagtggaagcctgtaacgccatgttgaaagagaactttccgactgtggcttcttactgtattattccagagtacgatgcctatttggacatggttgacggagcttcatgctgcttagacactgccagtttttgccctgcaaagctgcgcagctttccaaagaaacactcctatttggaacccacaatacgatcggcagtgccttcagcgatccagaacacgctccagaacgtcctggcagctgccacaaaaagaaattgcaatgtcacgcaaatgagagaattgcccgtattggattcggcggcctttaatgtggaatgcttcaagaaatatgcgtgtaataatgaatattgggaaacgtttaaagaaaaccccatcaggcttactgaagaaaacgtggtaaattacattaccaaattaaaaggaccaaaagctgctgctctttttgcgaagacacataatttgaatatgttgcaggacataccaatggacaggtttgtaatggacttaaagagagacgtgaaagtgactccaggaacaaaacatactgaagaacggcccaaggtacaggtgatccaggctgccgatccgctagcaacagcgtatctgtgcggaatccaccgagagctggttaggagattaaatgcggtcctgcttccgaacattcatacactgtttgatatgtcggctgaagactttgacgctattatagccgagcacttccagcctggggattgtgttctggaaactgacatcgcgtcgtttgataaaagtgaggacgacgccatggctctgaccgcgttaatgattctggaagacttaggtgtggacgcagagctgttgacgctgattgaggcggctttcggcgaaatttcatcaatacatttgcccactaaaactaaatttaaattcggagccatgatgaaatctggaatgttcctcacactgtttgtgaacacagtcattaacattgtaatcgcaagcagagtgttgagagaacggctaaccggatcaccatgtgcagcattcattggagatgacaatatcgtgaaaggagtcaaatcggacaaattaatggcagacaggtgcgccacctggttgaatatggaagtcaagattatagatgctgtggtgggcgagaaagcgccttatttctgtggagggtttattttgtgtgactccgtgaccggcacagcgtgccgtgtggcagaccccctaaaaaggctgtttaagcttggcaaacctctggcagcagacgatgaacatgatgatgacaggagaagggcattgcatgaagagtcaacacgctggaaccgagtgggtattctttcagagctgtgcaaggcagtagaatcaaggtatgaaaccgtaggaacttccatcatagttatggccatgactactctagctagcagtgttaaatcattcagctacctgagaggggcccctataactctctacggctaacctgaatggactacgactatcacgcccaaacatttacagccgcggtgtcaaaaaccgcgtggacgtggttaacatccctgctgggaggatcagccgtaattattataattggcttggtgctggctactattgtggccatgtacgtgctgaccaaccagaaacataattgaatacagcagcaattggcaagctgcttacatagaactcgcggcgattggcatgccgccttaaaatttttattttatttttcttttcttttccgaatcggattttgtttttaatatttcaaaaaaaaaaaaaaaaaaaaaaaaaaaaaaaaaaaaaaaaaaaaaaaaaaaaaaaaaaaaaaaaaaaaaaaaaaaaaaaa

SEQ ID NO: 8 - DNA, 7927 bp, synthetic construct
  source 1..7927: mol_type = other DNA
taatacgactcactataggatgggcggcgcatgagagaagcccagaccaattacctacccaaaatggagaaagttcacgttgacatcgaggaagacagcccattcctcagagctttgcagcggagcttcccgcagtttgaggtagaagccaagcaggtcactgataatgaccatgctaatgccagagcgttttcgcatctggcttcaaaactgatcgaaacggaggtggacccatccgacacgatccttgacattggaagtgcgcccgcccgcagaatgtattctaagcacaagtatcattgtatctgtccgatgagatgtgcggaagatccggacagattgtataagtatgcaactaagctgaagaaaaactgtaaggaaataactgataaggaattggacaagaaaatgaaggagctcgccgccgtcatgagcgaccctgacctggaaactgagactatgtgcctccacgacgacgagtcgtgtcgctacgaagggcaagtcgctgtttaccaggatgtatacgcggttgacggaccgacaagtctctatcaccaagccaataagggagttagagtcgcctactggataggctttgacaccaccccttttatgtttaagaacttggctggagcatatccatcatactctaccaactgggccgacgaaaccgtgttaacggctcgtaacataggcctatgcagctctgacgttatggagcggtcacgtagagggatgtccattcttagaaagaagtatttgaaaccatccaacaatgttctattctctgttggctcgaccatctaccacgagaagagggacttactgaggagctggcacctgccgtctgtatttcacttacgtggcaagcaaaattacacatgtcggtgtgagactatagttagttgcgacgggtacgtcgttaaaagaatagctatcagtccaggcctgtatgggaagccttcaggctatgctgctacgatgcaccgcgagggattcttgtgctgcaaagtgacagacacattgaacggggagagggtctcttttcccgtgtgcacgtatgtgccagctacattgtgtgaccaaatgactggcatactggcaacagatgtcagtgcggacgacgcgcaaaaactgctggttgggctcaaccagcgtatagtcgtcaacggtcgcacccagagaaacaccaataccatgaaaaattaccttttgcccgtagtggcccaggcatttgctaggtgggcaaaggaatataaggaagatcaagaagatgaaaggccactaggactacgagatagacagttagtcatggggtgttgttgggcttttagaaggcacaagataacatctatttataagcgcccggatacccaaaccatcatcaaagtgaacagcgatttccactcattcgtgctgcccaggataggcagtaacacattggagatcgggctgagaacaagaatcaggaaaatgttagaggagcacaaggagccgtcacctctcattaccgccgaggacgtacaagaagctaagtgcgcagccgatgaggctaaggaggtgcgtgaagccgaggagttgcgcgcagctctaccacctttggcagctgatgttgaggagcccactctggaagccgatgtcgacttgatgttacaagaggctggggccggctcagtggagacacctcgtggcttgataaaggttaccagctacgctggcgaggacaagatcggctcttacgctgtgctttctccgcaggctgtactcaagagtgaaaaattatcttgcatccaccctctcgctgaacaagtcatagtgataacacactctggccgaaaagggcgttatgccgtggaaccataccatggtaaagtagtggtgccagagggacatgcaatacccgtccaggactttcaagctctgagtgaaagtgccaccattgtgtacaacgaacgtgagttcgtaaacaggtacctgcaccatattgccacacatggaggagcgctgaacactgatgaagaatattacaaaactgtcaagcccagcgagcacgacggcgaatacctgtacgacatcgacaggaaacagtgcgtcaagaaagaactagtcactgggctagggctcacaggcgagctggtggatcctcccttccatgaattcgcctacgagagtctgagaacacgaccagccgctccttaccaagtaccaaccataggggtgtatggcgtgccaggatcaggcaagtctggcatcattaaaagcgcagtcaccaaaaaagatctagtggtgagcgccaagaaagaaaactgtgcagaaattataagggacgtcaagaaaatgaaagggctggacgtcaatgccagaactgtggactcagtgctcttgaatggatgcaaacaccccgtagagaccctgtatattgacgaagcttttgcttgtcatgcaggtactctcagagcgctcatagccattataagacctaaaaaggcagtgctctgcggggatcccaaacagtgcggtttttttaacatgatgtgcctgaaagtgcattttaaccacgagatttgcacacaagtcttccacaaaagcatctctcgccgttgcactaaatctgtgacttcggtcgtctcaaccttgttttacgacaaaaaaatgagaacgacgaatccgaaagagactaagattgtgattgacactaccggcagtaccaaacctaagcaggacgatctcattctcacttgtttcagagggtgggtgaagcagttgcaaatagattacaaaggcaacgaaataatgacggcagctgcctctcaagggctgacccgtaaaggtgtgtatgccgttcggtacaaggtgaatgaaaatcctctgtacgcacccacctcagaacatgtgaacgtcctactgacccgcacggaggaccgcatcgtgtggaaaacactagccggcgacccatggataaaaacactgactgccaagtaccctgggaatttcactgccacgatagaggagtggcaagcagagcatgatgccatcatgaggcacatcttggagagaccggaccctaccgacgtcttccagaataaggcaaacgtgtgttgggccaaggctttagtgccggtgctgaagaccgctggcatagacatgaccactgaacaatggaacactgtggattattttgaaacggacaaagctcactcagcagagatagtattgaaccaactatgcgtgaggttctttggactcgatctggactccggtctattttctgcacccactgttccgttatccattaggaataatcactgggataactccccgtcgcctaacatgtacgggctgaataaagaagtggtccgtcagctctctcgcaggtacccacaactgcctcgggcagttgccactggaagagtctatgacatgaacactggtacactgcgcaattatgatccgcgcataaacctagtacctgtaaacagaagactgcctcatgctttagtcctccaccataatgaacacccacagagtgacttttcttcattcgtcagcaaattgaagggcagaactgtcctggtggtcggggaaaagttgtccgtcccaggcaaaatggttgactggttgtcagaccggcctgaggctaccttcagagctcggctggatttaggcatcccaggtgatgtgcccaaatatgacataatatttgttaatgtgaggaccccatataaataccatcactatcagcagtgtgaagaccatgccattaagcttagcatgttgaccaagaaagcttgtctgcatctgaatcccggcggaacctgtgtcagcataggttatggttacgctgacagggccagcgaaagcatcattggtgctatagcgcggcagttcaagttttcccgggtatgcaaaccgaaatcctcacttgaagagacggaagttctgtttgtattcattgggtacgatcgcaaggcccgtacgcacaatccttacaagctttcatcaaccttgaccaacatttatacaggttccagactccacgaagccggatgtgcaccctcatatcatgtggtgcgaggggatattgccacggccaccgaaggagtgattataaatgctgctaacagcaaaggacaacctggcggaggggtgtgcggagcgctgtataagaaattcccggaaagcttcgatttacagccgatcgaagtaggaaaagcgcgactggtcaaaggtgcagctaaacatatcattcatgccgtaggaccaaacttcaacaaagtttcggaggttgaaggtgacaaacagttggcagaggcttatgagtccatcgctaagattgtcaacgataacaattacaagtcagtagcgattccactgttgtccaccggcatcttttccgggaacaaagatcgactaacccaatcattgaaccatttgctgacagctttagacaccactgatgcagatgtagccatatactgcagggacaagaaatgggaaatgactctcaaggaagcagtggctaggagagaagcagtggaggagatatgcatatccgacgactcttcagtgacagaacctgatgcagagctggtgagggtgcatccgaagagttctttggctggaaggaagggctacagcacaagcgatggcaaaactttctcatatttggaagggaccaagtttcaccaggcggccaaggatatagcagaaattaatgccatgtggcccgttgcaacggaggccaatgagcaggtatgcatgtatatcctcggagaaagcatgagcagtattaggtcgaaatgccccgtcgaagagtcggaagcctccacaccacctagcacgctgccttgcttgtgcatccatgccatgactccagaaagagtacagcgcctaaaagcctcacgtccagaacaaattactgtgtgctcatcctttccattgccgaagtatagaatcactggtgtgcagaagatccaatgctcccagcctatattgttctcaccgaaagtgcctgcgtatattcatccaaggaagtatctcgtggaaacaccaccggtagacgagactccggagccatcggcagagaaccaatccacagaggggacacctgaacaaccaccacttataaccgaggatgagaccaggactagaacgcctgagccgatcatcatcgaagaggaagaagaggatagcataagtttgctgtcagatggcccgacccaccaggtgctgcaagtcgaggcagacattcacgggccgccctctgtatctagctcatcctggtccattcctcatgcatccgactttgatgtggacagtttatccatacttgacaccctggagggagctagcgtgaccagcggggcaacgtcagccgagactaactcttacttcgcaaagagtatggagtttctggcgcgaccggtgcctgcgcctcgaacagtattcaggaaccctccacatcccgctccgcgcacaagaacaccgtcacttgcacccagcagggcctgctcgagaaccagcctagtttccaccccgccaggcgtgaatagggtgatcactagagaggagctcgaggcgcttaccccgtcacgcactcctagcaggtcggtctcgagaaccagcctggtctccaacccgccaggcgtaaatagggtgattacaagagaggagtttgaggcgttcgtagcacaacaacaatgacggtttgatgcgggtgcatacatcttttcctccgacaccggtcaagggcatttacaacaaaaatcagtaaggcaaacggtgctatccgaagtggtgttggagaggaccgaattggagatttcgtatgccccgcgcctcgaccaagaaaaagaagaattactacgcaagaaattacagttaaatcccacacctgctaacagaagcagataccagtccaggaaggtggagaacatgaaagccataacagctagacgtattctgcaaggcctagggcattatttgaaggcagaaggaaaagtggagtgctaccgaaccctgcatcctgttcctttgtattcatctagtgtgaaccgtgccttttcaagccccaaggtcgcagtggaagcctgtaacgccatgttgaaagagaactttccgactgtggcttcttactgtattattccagagtacgatgcctatttggacatggttgacggagcttcatgctgcttagacactgccagtttttgccctgcaaagctgcgcagctttccaaagaaacactcctatttggaacccacaatacgatcggcagtgccttcagcgatccagaacacgctccagaacgtcctggcagctgccacaaaaagaaattgcaatgtcacgcaaatgagagaattgcccgtattggattcggcggcctttaatgtggaatgcttcaagaaatatgcgtgtaataatgaatattgggaaacgtttaaagaaaaccccatcaggcttactgaagaaaacgtggtaaattacattaccaaattaaaaggaccaaaagctgctgctctttttgcgaagacacataatttgaatatgttgcaggacataccaatggacaggtttgtaatggacttaaagagagacgtgaaagtgactccaggaacaaaacatactgaagaacggcccaaggtacaggtgatccaggctgccgatccgctagcaacagcgtatctgtgcggaatccaccgagagctggttaggagattaaatgcggtcctgcttccgaacattcatacactgtttgatatgtcggctgaagactttgacgctattatagccgagcacttccagcctggggattgtgttctggaaactgacatcgcgtcgtttgataaaagtgaggacgacgccatggctctgaccgcgttaatgattctggaagacttaggtgtggacgcagagctgttgacgctgattgaggcggctttcggcgaaatttcatcaatacatttgcccactaaaactaaatttaaattcggagccatgatgaaatctggaatgttcctcacactgtttgtgaacacagtcattaacattgtaatcgcaagcagagtgttgagagaacggctaaccggatcaccatgtgcagcattcattggagatgacaatatcgtgaaaggagtcaaatcggacaaattaatggcagacaggtgcgccacctggttgaatatggaagtcaagattatagatgctgtggtgggcgagaaagcgccttatttctgtggagggtttattttgtgtgactccgtgaccggcacagcgtgccgtgtggcagaccccctaaaaaggctgtttaagcttggcaaacctctggcagcagacgatgaacatgatgatgacaggagaagggcattgcatgaagagtcaacacgctggaaccgagtgggtattctttcagagctgtgcaaggcagtagaatcaaggtatgaaaccgtaggaacttccatcatagttatggccatgactactctagctagcagtgttaaatcattcagctacctgagaggggcccctataactctctacggctaacctgaatggactacgactatcacgcccaaacatttacagccgcggtgtcaaaaaccgcgtggacgtggttaacatccctgctgggaggatcagccgtaattattataattggcttggtgctggctactattgtggccatgtacgtgctgaccaaccagaaacataattgaatacagcagcaattggcaagctgcttacatagaactcgcggcgattggcatgccgccttaaaatttttattttattttttcttttcttttccgaatcggattttgtttttaatatttcaaaaaaaaaaaaaaaaaaaaaaaaaaaaaaaaaaaaaaaaaaaaaaaaaaaaaaaaaaaaaaaaaaaaaaaaaaaaaaaatacgtagtttaaac

SEQ ID NO: 9 - DNA, 7926 bp, synthetic construct
  source 1..7926: mol_type = other DNA
taatacgactcactataggataggcggcgcatgagagaagcccagaccaattacctacccaaaatggagaaagttcacgttgacatcgaggaagacagcccattcctcagagctttgcagcggagcttcccgcagtttgaggtagaagccaagcaggtcactgataatgaccatgctaatgccagagcgttttcgcatctggcttcaaaactgatcgaaacggaggtggacccatccgacacgatccttgacattggaagtgcgcccgcccgcagaatgtattctaagcacaagtatcattgtatctgtccgatgagatgtgcggaagatccggacagattgtataagtatgcaactaagctgaagaaaaactgtaaggaaataactgataaggaattggacaagaaaatgaaggagctcgccgccgtcatgagcgaccctgacctggaaactgagactatgtgcctccacgacgacgagtcgtgtcgctacgaagggcaagtcgctgtttaccaggatgtatacgcggttgacggaccgacaagtctctatcaccaagccaataagggagttagagtcgcctactggataggctttgacaccaccccttttatgtttaagaacttggctggagcatatccatcatactctaccaactgggccgacgaaaccgtgttaacggctcgtaacataggcctatgcagctctgacgttatggagcggtcacgtagagggatgtccattcttagaaagaagtatttgaaaccatccaacaatgttctattctctgttggctcgaccatctaccacgagaagagggacttactgaggagctggcacctgccgtctgtatttcacttacgtggcaagcaaaattacacatgtcggtgtgagactatagttagttgcgacgggtacgtcgttaaaagaatagctatcagtccaggcctgtatgggaagccttcaggctatgctgctacgatgcaccgcgagggattcttgtgctgcaaagtgacagacacattgaacggggagagggtctcttttcccgtgtgcacgtatgtgccagctacattgtgtgaccaaatgactggcatactggcaacagatgtcagtgcggacgacgcgcaaaaactgctggttgggctcaaccagcgtatagtcgtcaacggtcgcacccagagaaacaccaataccatgaaaaattaccttttgcccgtagtggcccaggcatttgctaggtgggcaaaggaatataaggaagatcaagaagatgaaaggccactaggactacgagatagacagttagtcatggggtgttgttgggcttttagaaggcacaagataacatctatttataagcgcccggatacccaaaccatcatcaaagtgaacagcgatttccactcattcgtgctgcccaggataggcagtaacacattggagatcgggctgagaacaagaatcaggaaaatgttagaggagcacaaggagccgtcacctctcattaccgccgaggacgtacaagaagctaagtgcgcagccgatgaggctaaggaggtgcgtgaagccgaggagttgcgcgcagctctaccacctttggcagctgatgttgaggagcccactctggaagccgatgtcgacttgatgttacaagaggctggggccggctcagtggagacacctcgtggcttgataaaggttaccagctacgatggcgaggacaagatcggctcttacgctgtgctttctccgcaggctgtactcaagagtgaaaaattatcttgcatccaccctctcgctgaacaagtcatagtgataacacactctggccgaaaagggcgttatgccgtggaaccataccatggtaaagtagtggtgccagagggacatgcaatacccgtccaggactttcaagctctgagtgaaagtgccaccattgtgtacaacgaacgtgagttcgtaaacaggtacctgcaccatattgccacacatggaggagcgctgaacactgatgaagaatattacaaaactgtcaagcccagcgagcacgacggcgaatacctgtacgacatcgacaggaaacagtgcgtcaagaaagaactagtcactgggctagggctcacaggcgagctggtggatcctcccttccatgaattcgcctacgagagtctgagaacacgaccagccgctccttaccaagtaccaaccataggggtgtatggcgtgccaggatcaggcaagtctggcatcattaaaagcgcagtcaccaaaaaagatctagtggtgagcgccaagaaagaaaactgtgcagaaattataagggacgtcaagaaaatgaaagggctggacgtcaatgccagaactgtggactcagtgctcttgaatggatgcaaacaccccgtagagaccctgtatattgacgaagcttttgcttgtcatgcaggtactctcagagcgctcatagccattataagacctaaaaaggcagtgctctgcggggatcccaaacagtgcggtttttttaacatgatgtgcctgaaagtgcattttaaccacgagatttgcacacaagtcttccacaaaagcatctctcgccgttgcactaaatctgtgacttcggtcgtctcaaccttgttttacgacaaaaaaatgagaacgacgaatccgaaagagactaagattgtgattgacactaccggcagtaccaaacctaagcaggacgatctcattctcacttgtttcagagggtgggtgaagcagttgcaaatagattacaaaggcaacgaaataatgacggcagctgcctctcaagggctgacccgtaaaggtgtgtatgccgttcggtacaaggtgaatgaaaatcctctgtacgcacccacctcagaacatgtgaacgtcctactgacccgcacggaggaccgcatcgtgtggaaaacactagccggcgacccatggataaaaacactgactgccaagtaccctgggaatttcactgccacgatagaggagtggcaagcagagcatgatgccatcatgaggcacatcttggagagaccggaccctaccgacgtcttccagaataaggcaaacgtgtgttgggccaaggctttagtgccggtgctgaagaccgctggcatagacatgaccactgaacaatggaacactgtggattattttgaaacggacaaagctcactcagcagagatagtattgaaccaactatgcgtgaggttctttggactcgatctggactccggtctattttctgcacccactgttccgttatccattaggaataatcactgggataactccccgtcgcctaacatgtacgggctgaataaagaagtggtccgtcagctctctcgcaggtacccacaactgcctcgggcagttgccactggaagagtctatgacatgaacactggtacactgcgcaattatgatccgcgcataaacctagtacctgtaaacagaagactgcctcatgctttagtcctccaccataatgaacacccacagagtgacttttcttcattcgtcagcaaattgaagggcagaactgtcctggtggtcggggaaaagttgtccgtcccaggcaaaatggttgactggttgtcagaccggcctgaggctaccttcagagctcggctggatttaggcatcccaggtgatgtgcccaaatatgacataatatttgttaatgtgaggaccccatataaataccatcactatcagcagtgtgaagaccatgccattaagcttagcatgttgaccaagaaagcttgtctgcatctgaatcccggcggaacctgtgtcagcataggttatggttacgctgacagggccagcgaaagcatcattggtgctatagcgcggcagttcaagttttcccgggtatgcaaaccgaaatcctcacttgaagagacggaagttctgtttgtattcattgggtacgatcgcaaggcccgtacgcacaatccttacaagctttcatcaaccttgaccaacatttatacaggttccagactccacgaagccggatgtgcaccctcatatcatgtggtgcgaggggatattgccacggccaccgaaggagtgattataaatgctgctaacagcaaaggacaacctggcggaggggtgtgcggagcgctgtataagaaattcccggaaagcttcgatttacagccgatcgaagtaggaaaagcgcgactggtcaaaggtgcagctaaacatatcattcatgccgtaggaccaaacttcaacaaagtttcggaggttgaaggtgacaaacagttggcagaggcttatgagtccatcgctaagattgtcaacgataacaattacaagtcagtagcgattccactgttgtccaccggcatcttttccgggaacaaagatcgactaacccaatcattgaaccatttgctgacagctttagacaccactgatgcagatgtagccatatactgcagggacaagaaatgggaaatgactctcaaggaagcagtggctaggagagaagcagtggaggagatatgcatatccgacgactcttcagtgacagaacctgatgcagagctggtgagggtgcatccgaagagttctttggctggaaggaagggctacagcacaagcgatggcaaaactttctcatatttggaagggaccaagtttcaccaggcggccaaggatatagcagaaattaatgccatgtggcccgttgcaacggaggccaatgagcaggtatgcatgtatatcctcggagaaagcatgagcagtattaggtcgaaatgccccgtcgaagagtcggaagcctccacaccacctagcacgctgccttgcttgtgcatccatgccatgactccagaaagagtacagcgcctaaaagcctcacgtccagaacaaattactgtgtgctcatcctttccattgccgaagtatagaatcactggtgtgcagaagatccaatgctcccagcctatattgttctcaccgaaagtgcctgcgtatattcatccaaggaagtatctcgtggaaacaccaccggtagacgagactccggagccatcggcagagaaccaatccacagaggggacacctgaacaaccaccacttataaccgaggatgagaccaggactagaacgcctgagccgatcatcatcgaagaggaagaagaggatagcataagtttgctgtcagatggcccgacccaccaggtgctgcaagtcgaggcagacattcacgggccgccctctgtatctagctcatcctggtccattcctcatgcatccgactttgatgtggacagtttatccatacttgacaccctggagggagctagcgtgaccagcggggcaacgtcagccgagactaactcttacttcgcaaagagtatggagtttctggcgcgaccggtgcctgcgcctcgaacagtattcaggaaccctccacatcccgctccgcgcacaagaacaccgtcacttgcacccagcagggcctgctcgagaaccagcctagtttccaccccgccaggcgtgaatagggtgatcactagagaggagctcgaggcgcttaccccgtcacgcactcctagcaggtcggtctcgagaaccagcctggtctccaacccgccaggcgtaaatagggtgattacaagagaggagtttgaggcgttcgtagcacaacaacaatgacggtttgatgcgggtgcatacatcttttcctccgacaccggtcaagggcatttacaacaaaaatcagtaaggcaaacggtgctatccgaagtggtgttggagaggaccgaattggagatttcgtatgccccgcgcctcgaccaagaaaaagaagaattactacgcaagaaattacagttaaatcccacacctgctaacagaagcagataccagtccaggaaggtggagaacatgaaagccataacagctagacgtattctgcaaggcctagggcattatttgaaggcagaaggaaaagtggagtgctaccgaaccctgcatcctgttcctttgtattcatctagtgtgaaccgtgccttttcaagccccaaggtcgcagtggaagcctgtaacgccatgttgaaagagaactttccgactgtggcttcttactgtattattccagagtacgatgcctatttggacatggttgacggagcttcatgctgcttagacactgccagtttttgccctgcaaagctgcgcagctttccaaagaaacactcctatttggaacccacaatacgatcggcagtgccttcagcgatccagaacacgctccagaacgtcctggcagctgccacaaaaagaaattgcaatgtcacgcaaatgagagaattgcccgtattggattcggcggcctttaatgtggaatgcttcaagaaatatgcgtgtaataatgaatattgggaaacgtttaaagaaaaccccatcaggcttactgaagaaaacgtggtaaattacattaccaaattaaaaggaccaaaagctgctgctctttttgcgaagacacataatttgaatatgttgcaggacataccaatggacaggtttgtaatggacttaaagagagacgtgaaagtgactccaggaacaaaacatactgaagaacggcccaaggtacaggtgatccaggctgccgatccgctagcaacagcgtatctgtgcggaatccaccgagagctggttaggagattaaatgcggtcctgcttccgaacattcatacactgtttgatatgtcggctgaagactttgacgctattatagccgagcacttccagcctggggattgtgttctggaaactgacatcgcgtcgtttgataaaagtgaggacgacgccatggctctgaccgcgttaatgattctggaagacttaggtgtggacgcagagctgttgacgctgattgaggcggctttcggcgaaatttcatcaatacatttgcccactaaaactaaatttaaattcggagccatgatgaaatctggaatgttcctcacactgtttgtgaacacagtcattaacattgtaatcgcaagcagagtgttgagagaacggctaaccggatcaccatgtgcagcattcattggagatgacaatatcgtgaaaggagtcaaatcggacaaattaatggcagacaggtgcgccacctggttgaatatggaagtcaagattatagatgctgtggtgggcgagaaagcgccttatttctgtggagggtttattttgtgtgactccgtgaccggcacagcgtgccgtgtggcagaccccctaaaaaggctgtttaagcttggcaaacctctggcagcagacgatgaacatgatgatgacaggagaagggcattgcatgaagagtcaacacgctggaaccgagtgggtattctttcagagctgtgcaaggcagtagaatcaaggtatgaaaccgtaggaacttccatcatagttatggccatgactactctagctagcagtgttaaatcattcagctacctgagaggggcccctataactctctacggctaacctgaatggactacgactatcacgcccaaacatttacagccgcggtgtcaaaaaccgcgtggacgtggttaacatccctgctgggaggatcagccgtaattattataattggcttggtgctggctactattgtggccatgtacgtgctgaccaaccagaaacataattgaatacagcagcaattggcaagctgcttacatagaactcgcggcgattggcatgccgccttaaaatttttattttatttttcttttcttttccgaatcggattttgtttttaatatttcaaaaaaaaaaaaaaaaaaaaaaaaaaaaaaaaaaaaaaaaaaaaaaaaaaaaaaaaaaaaaaaaaaaaaaaaaaaaaaaatacgtagtttaaac

SEQ ID NO: 10 - DNA, 36519 bp, synthetic construct
  source 1..36519: mol_type = other DNA
ccatcttcaataatatacctcaaactttttgtgcgcgttaatatgcaaatgaggcgtttgaatttggggaggaagggcggtgattggtcgagggatgagcgaccgttaggggcggggcgagtgacgttttgatgacgtggttgcgaggaggagccagtttgcaagttctcgtgggaaaagtgacgtcaaacgaggtgtggtttgaacacggaaatactcaattttcccgcgctctctgacaggaaatgaggtgtttctgggcggatgcaagtgaaaacgggccattttcgcgcgaaaactgaatgaggaagtgaaaatctgagtaatttcgcgtttatggcagggaggagtatttgccgagggccgagtagactttgaccgattacgtgggggtttcgattaccgtgtttttcacctaaatttccgcgtacggtgtcaaagtccggtgtttttacgtaggtgtcagctgatcgccagggtatttaaacctgcgctctccagtcaagaggccactcttgagtgccagcgagaagagttttctcctccgcgccgcgagtcagatctacactttgaaagatgaggcacctgagagacctgcccgatgagaaaatcatcatcgcttccgggaacgagattctggaactggtggtaaatgccatgatgggcgacgaccctccggagccccccaccccatttgagacaccttcgctgcacgatttgtatgatctggaggtggatgtgcccgaggacgatcccaatgaggaggcggtaaatgatttttttagcgatgccgcgctgctagctgccgaggaggcttcgagctctagctcagacagcgactcttcactgcatacccctagacccggcagaggtgagaaaaagatccccgagcttaaaggggaagagatggacttgcgctgctatgaggaatgcttgcccccgagcgatgatgaggacgagcaggcgatccagaacgcagcgagccagggagtgcaagccgccagcgagagctttgcgctggactgcccgcctctgcccggacacggctgtaagtcttgtgaatttcatcgcatgaatactggagataaagctgtgttgtgtgcactttgctatatgagagcttacaaccattgtgtttacagtaagtgtgattaagttgaactttagagggaggcagagagcagggtgactgggcgatgactggtttatttatgtatatatgttctttatataggtcccgtctctgacgcagatgatgagacccccactacaaagtccacttcgtcacccccagaaattggcacatctccacctgagaatattgttagaccagttcctgttagagccactgggaggagagcagctgtggaatgtttggatgacttgctacagggtggggttgaacctttggacttgtgtacccggaaacgccccaggcactaagtgccacacatgtgtgtttacttgaggtgatgtcagtatttatagggtgtggagtgcaataaaaaatgtgttgactttaagtgcgtggtttatgactcaggggtggggactgtgagtatataagcaggtgcagacctgtgtggttagctcagagcggcatggagatttggacggtcttggaagactttcacaagactagacagctgctagagaacgcctcgaacggagtctcttacctgtggagattctgcttcggtggcgacctagctaggctagtctacagggccaaacaggattatagtgaacaatttgaggttattttgagagagtgttctggtctttttgacgctcttaacttgggccatcagtctcactttaaccagaggatttcgagagcccttgattttactactcctggcagaaccactgcagcagtagccttttttgcttttattcttgacaaatggagtcaagaaacccatttcagcagggattaccagctggatttcttagcagtagctttgtggagaacatggaagtgccagcgcctgaatgcaatctccggctacttgccggtacagccgctagacactctgaggatcctgaatctccaggagagtcccagggcacgccaacgtcgccagcagcagcagcaggaggaggatcaagaagagaacccgagagccggcctggaccctccggcggaggaggaggagtagctgacctgtttcctgaactgcgccgggtgctgactaggtcttcgagtggtcgggagagggggattaagcgggagaggcatgatgagactaatcacagaactgaactgactgtgggtctgatgagtcgcaagcgcccagaaacagtgtggtggcatgaggtgcagtcgactggcacagatgaggtgtcggtgatgcatgagaggttttctctagaacaagtcaagacttgttggttagagcctgaggatgattgggaggtagccatcaggaattatgccaagctggctctgaggccagacaagaagtacaagattactaagctgataaatatcagaaatgcctgctacatctcagggaatggggctgaagtggagatctgtctccaggaaagggtggctttcagatgctgcatgatgaatatgtacccgggagtggtgggcatggatggggttacctttatgaacatgaggttcaggggagatgggtataatggcacggtctttatggccaataccaagctgacagtccatggctgctccttctttgggtttaataacacctgcatcgaggcctggggtcaggtcggtgtgaggggctgcagtttttcagccaactggatgggggtcgtgggcaggaccaagagtatgctgtccgtgaagaaatgcttgtttgagaggtgccacctgggggtgatgagcgagggcgaagccagaatccgccactgcgcctctaccgagacgggctgctttgtgctgtgcaagggcaatgctaagatcaagcataatatgatctgtggagcctcggacgagcgcggctaccagatgctgacctgcgccggcgggaacagccatatgctggccaccgtacatgtggcttcccatgctcgcaagccctggcccgagttcgagcacaatgtcatgaccaggtgcaatatgcatctggggtcccgccgaggcatgttcatgccctaccagtgcaacctgaattatgtgaaggtgctgctggagcccgatgccatgtccagagtgagcctgacgggggtgtttgacatgaatgtggaggtgtggaagattctgagatatgatgaatccaagaccaggtgccgagcctgcgagtgcggagggaagcatgccaggttccagcccgtgtgtgtggatgtgacggaggacctgcgacccgatcatttggtgttgccctgcaccgggacggagttcggttccagcggggaagaatctgactagagtgagtagtgttctggggcgggggaggacctgcatgagggccagaataactgaaatctgtgcttttctgtgtgttgcagcagcatgagcggaagcggctcctttgagggaggggtattcagcccttatctgacggggcgtctcccctcctgggcgggagtgcgtcagaatgtgatgggatccacggtggacggccggcccgtgcagcccgcgaactcttcaaccctgacctatgcaaccctgagctcttcgtcgttggacgcagctgccgccgcagctgctgcatctgccgccagcgccgtgcgcggaatggccatgggcgccggctactacggcactctggtggccaactcgagttccaccaataatcccgccagcctgaacgaggagaagctgttgctgctgatggcccagctcgaggccttgacccagcgcctgggcgagctgacccagcaggtggctcagctgcaggagcagacgcgggccgcggttgccacggtgaaatccaaataaaaaatgaatcaataaataaacggagacggttgttgattttaacacagagtctgaatctttatttgatttttcgcgcgcggtaggccctggaccaccggtctcgatcattgagcacccggtggatcttttccaggacccggtagaggtgggcttggatgttgaggtacatgggcatgagcccgtcccgggggtggaggtagctccattgcagggcctcgtgctcgggggtggtgttgtaaatcacccagtcatagcaggggcgcagggcatggtgttgcacaatatctttgaggaggagactgatggccacgggcagccctttggtgtaggtgtttacaaatctgttgagctgggagggatgcatgcggggggagatgaggtgcatcttggcctggatcttgagattggcgatgttaccgcccagatcccgcctggggttcatgttgtgcaggaccaccagcacggtgtatccggtgcacttggggaatttatcatgcaacttggaagggaaggcgtgaaagaatttggcgacgcctttgtgcccgcccaggttttccatgcactcatccatgatgatggcgatgggcccgtgggcggcggcctgggcaaagacgtttcgggggtcggacacatcatagttgtggtcctgggtgaggtcatcataggccattttaatgaatttggggcggagggtgccggactgggggacaaaggtaccctcgatcccgggggcgtagttcccctcacagatctgcatctcccaggctttgagctcggagggggggatcatgtccacctgcggggcgataaagaacacggtttccggggcgggggagatgagctgggccgaaagcaagttccggagcagctgggacttgccgcagccggtggggccgtagatgaccccgatgaccggctgcaggtggtagttgagggagagacagctgccgtcctcccggaggaggggggccacctcgttcatcatctcgcgcacgtgcatgttctcgcgcaccagttccgccaggaggcgctctccccccagggataggagctcctggagcgaggcgaagtttttcagcggcttgagtccgtcggccatgggcattttggagagggtttgttgcaagagttccaggcggtcccagagctcggtgatgtgctctacggcatctcgatccagcagacctcctcgtttcgcgggttgggacggctgcgggagtagggcaccagacgatgggcgtccagcgcagccagggtccggtccttccagggtcgcagcgtccgcgtcagggtggtctccgtcacggtgaaggggtgcgcgccgggctgggcgcttgcgagggtgcgcttcaggctcatccggctggtcgaaaaccgctcccgatcggcgccctgcgcgtcggccaggtagcaattgaccatgagttcgtagttgagcgcctcggccgcgtggcctttggcgcggagcttacctttggaagtctgcccgcaggcgggacagaggagggacttgagggcgtagagcttgggggcgaggaagacggactcgggggcgtaggcgtccgcgccgcagtgggcgcagacggtctcgcactccacgagccaggtgaggtcgggctggtcggggtcaaaaaccagtttcccgccgttctttttgatgcgtttcttacctttggtctccatgagctcgtgtccccgctgggtgacaaagaggctgtccgtgtccccgtagaccgactttatgggccggtcctcgagcggtgtgccgcggtcctcctcgtagaggaaccccgcccactccgagacgaaagcccgggtccaggccagcacgaaggaggccacgtgggacgggtagcggtcgttgtccaccagcgggtccaccttttccagggtatgcaaacacatgtccccctcgtccacatccaggaaggtgattggcttgtaagtgtaggccacgtgaccgggggtcccggccgggggggtataaaagggtgcgggtccctgctcgtcctcactgtcttccggatcgctgtccaggagcgccagctgttggggtaggtattccctctcgaaggcgggcatgacctcggcactcaggttgtcagtttctagaaacgaggaggatttgatattgacggtgccggcggagatgcctttcaagagcccctcgtccatctggtcagaaaagacgatctttttgttgtcgagcttggtggcgaaggagccgtagagggcgttggagaggagcttggcgatggagcgcatggtctggtttttttccttgtcggcgcgctccttggcggcgatgttgagctgcacgtactcgcgcgccacgcacttccattcggggaagacggtggtcagctcgtcgggcacgattctgacctgccagccccgattatgcagggtgatgaggtccacactggtggccacctcgccgcgcaggggctcattagtccagcagaggcgtccgcccttgcgcgagcagaaggggggcagggggtccagcatgacctcgtcgggggggtcggcatcgatggtgaagatgccgggcaggaggtcggggtcaaagtagctgatggaagtggccagatcgtccagggcagcttgccattcgcgcacggccagcgcgcgctcgtagggactgaggggcgtgccccagggcatgggatgggtaagcgcggaggcgtacatgccgcagatgtcgtagacgtagaggggctcctcgaggatgccgatgtaggtggggtagcagcgccccccgcggatgctggcgcgcacgtagtcatacagctcgtgcgagggggcgaggagccccgggcccaggttggtgcgactgggcttttcggcgcggtagacgatctggcggaaaatggcatgcgagttggaggagatggtgggcctttggaagatgttgaagtgggcgtggggcagtccgaccgagtcgcggatgaagtgggcgtaggagtcttgcagcttggcgacgagctcggcggtgactaggacgtccagagcgcagtagtcgagggtctcctggatgatgtcatacttgagctgtcccttttgtttccacagctcgcggttgagaaggaactcttcgcggtccttccagtactcttcgagggggaacccgtcctgatctgcacggtaagagcctagcatgtagaactggttgacggccttgtaggcgcagcagcccttctccacggggagggcgtaggcctgggcggccttgcgcagggaggtgtgcgtgagggcgaaagtgtccctgaccatgaccttgaggaactggtgcttgaagtcgatatcgtcgcagcccccctgctcccagagctggaagtccgtgcgcttcttgtaggcggggttgggcaaagcgaaagtaacatcgttgaagaggatcttgcccgcgcggggcataaagttgcgagtgatgcggaaaggttggggcacctcggcccggttgttgatgacctgggcggcgagcacgatctcgtcgaagccgttgatgttgtggcccacgatgtagagttccacgaatcgcggacggcccttgacgtggggcagtttcttgagctcctcgtaggtgagctcgtcggggtcgctgagcccgtgctgctcgagcgcccagtcggcgagatgggggttggcgcggaggaaggaagtccagagatccacggccagggcggtttgcagacggtcccggtactgacggaactgctgcccgacggccattttttcgggggtgacgcagtagaaggtgcgggggtccccgtgccagcgatcccatttgagctggagggcgagatcgagggcgagctcgacgagccggtcgtccccggagagtttcatgaccagcatgaaggggacgagctgcttgccgaaggaccccatccaggtgtaggtttccacatcgtaggtgaggaagagcctttcggtgcgaggatgcgagccgatggggaagaactggatctcctgccaccaattggaggaatggctgttgatgtgatggaagtagaaatgccgacggcgcgccgaacactcgtgcttgtgtttatacaagcggccacagtgctcgcaacgctgcacgggatgcacgtgctgcacgagctgtacctgagttcctttgacgaggaatttcagtgggaagtggagtcgtggcgcctgcatctcgtgctgtactacgtcgtggtggtcggcctggccctcttctgcctcgatggtggtcatgctgacgagcccgcgcgggaggcaggtccagacctcggcgcgagcgggtcggagagcgaggacgagggcgcgcaggccggagctgtccagggtcctgagacgctgcggagtcaggtcagtgggcagcggcggcgcgcggttgacttgcaggagtttttccagggcgcgcgggaggtccagatggtacttgatctccaccgcgccattggtggcgacgtcgatggcttgcagggtcccgtgcccctggggtgtgaccaccgtcccccgtttcttcttgggcggctggggcgacgggggcggtgcctcttccatggttagaagcggcggcgaggacgcgcgccgggcggcaggggcggctcggggcccggaggcaggggcggcaggggcacgtcggcgccgcgcgcgggtaggttctggtactgcgcccggagaagactggcgtgagcgacgacgcgacggttgacgtcctggatctgacgcctctgggtgaaggccacgggacccgtgagtttgaacctgaaagagagttcgacagaatcaatctcggtatcgttgacggcggcctgccgcaggatctcttgcacgtcgcccgagttgtcctggtaggcgatctcggtcatgaactgctcgatctcctcctcttgaaggtctccgcggccggcgcgctccacggtggccgcgaggtcgttggagatgcggcccatgagctgcgagaaggcgttcatgcccgcctcgttccagacgcggctgtagaccacgacgccctcgggatcgcgggcgcgcatgaccacctgggcgaggttgagctccacgtggcgcgtgaagaccgcgtagttgcagaggcgctggtagaggtagttgagcgtggtggcgatgtgctcggtgacgaagaaatacatgatccagcggcggagcggcatctcgctgacgtcgcccagcgcctccaaacgttccatggcctcgtaaaagtccacggcgaagttgaaaaactgggagttgcgcgccgagacggtcaactcctcctccagaagacggatgagctcggcgatggtggcgcgcacctcgcgctcgaaggcccccgggagttcctccacttcctcttcttcctcctccactaacatctcttctacttcctcctcaggcggcagtggtggcgggggagggggcctgcgtcgccggcggcgcacgggcagacggtcgatgaagcgctcgatggtctcgccgcgccggcgtcgcatggtctcggtgacggcgcgcccgtcctcgcggggccgcagcgtgaagacgccgccgcgcatctccaggtggccgggggggtccccgttgggcagggagagggcgctgacgatgcatcttatcaattgccccgtagggactccgcgcaaggacctgagcgtctcgagatccacgggatctgaaaaccgctgaacgaaggcttcgagccagtcgcagtcgcaaggtaggctgagcacggtttcttctggcgggtcatgttggttgggagcggggcgggcgatgctgctggtgatgaagttgaaataggcggttctgagacggcggatggtggcgaggagcaccaggtctttgggcccggcttgctggatgcgcagacggtcggccatgccccaggcgtggtcctgacacctggccaggtccttgtagtagtcctgcatgagccgctccacgggcacctcctcctcgcccgcgcggccgtgcatgcgcgtgagcccgaagccgcgctggggctggacgagcgccaggtcggcgacgacgcgctcggcgaggatggcttgctggatctgggtgagggtggtctggaagtcatcaaagtcgacgaagcggtggtaggctccggtgttgatggtgtaggagcagttggccatgacggaccagttgacggtctggtggcccggacgcacgagctcgtggtacttgaggcgcgagtaggcgcgcgtgtcgaagatgtagtcgttgcaggtgcgcaccaggtactggtagccgatgaggaagtgcggcggcggctggcggtagagcggccatcgctcggtggcgggggcgccgggcgcgaggtcctcgagcatggtgcggtggtagccgtagatgtacctggacatccaggtgatgccggcggcggtggtggaggcgcgcgggaactcgcggacgcggttccagatgttgcgcagcggcaggaagtagttcatggtgggcacggtctggcccgtgaggcgcgcgcagtcgtggatgctctatacgggcaaaaacgaaagcggtcagcggctcgactccgtggcctggaggctaagcgaacgggttgggctgcgcgtgtaccccggttcgaatctcgaatcaggctggagccgcagctaacgtggtattggcactcccgtctcgacccaagcctgcaccaaccctccaggatacggaggcgggtcgttttgcaacttttttttggaggccggatgagactagtaagcgcggaaagcggccgaccgcgatggctcgctgccgtagtctggagaagaatcgccagggttgcgttgcggtgtgccccggttcgaggccggccggattccgcggctaacgagggcgtggctgccccgtcgtttccaagaccccatagccagccgacttctccagttacggagcgagcccctcttttgttttgtttgtttttgccagatgcatcccgtactgcggcagatgcgcccccaccaccctccaccgcaacaacagccccctccacagccggcgcttctgcccccgccccagcagcaacttccagccacgaccgccgcggccgccgtgagcggggctggacagagttatgatcaccagctggccttggaagagggcgaggggctggcgcgcctgggggcgtcgtcgccggagcggcacccgcgcgtgcagatgaaaagggacgctcgcgaggcctacgtgcccaagcagaacctgttcagagacaggagcggcgaggagcccgaggagatgcgcgcggcccggttccacgcggggcgggagctgcggcgcggcctggaccgaaagagggtgctgagggacgaggatttcgaggcggacgagctgacggggatcagccccgcgcgcgcgcacgtggccgcggccaacctggtcacggcgtacgagcagaccgtgaaggaggagagcaacttccaaaaatccttcaacaaccacgtgcgcaccctgatcgcgcgcgaggaggtgaccctgggcctgatgcacctgtgggacctgctggaggccatcgtgcagaaccccaccagcaagccgctgacggcgcagctgttcctggtggtgcagcatagtcgggacaacgaagcgttcagggaggcgctgctgaatatcaccgagcccgagggccgctggctcctggacctggtgaacattctgcagagcatcgtggtgcaggagcgcgggctgccgctgtccgagaagctggcggccatcaacttctcggtgctgagtttgggcaagtactacgctaggaagatctacaagaccccgtacgtgcccatagacaaggaggtgaagatcgacgggttttacatgcgcatgaccctgaaagtgctgaccctgagcgacgatctgggggtgtaccgcaacgacaggatgcaccgtgcggtgagcgccagcaggcggcgcgagctgagcgaccaggagctgatgcatagtctgcagcgggccctgaccggggccgggaccgagggggagagctactttgacatgggcgcggacctgcactggcagcccagccgccgggccttggaggcggcggcaggaccctacgtagaagaggtggacgatgaggtggacgaggagggcgagtacctggaagactgatggcgcgaccgtatttttgctagatgcaacaacaacagccacctcctgatcccgcgatgcgggcggcgctgcagagccagccgtccggcattaactcctcggacgattggacccaggccatgcaacgcatcatggcgctgacgacccgcaaccccgaagcctttagacagcagccccaggccaaccggctctcggccatcctggaggccgtggtgccctcgcgctccaaccccacgcacgagaaggtcctggccatcgtgaacgcgctggtggagaacaaggccatccgcggcgacgaggccggcctggtgtacaacgcgctgctggagcgcgtggcccgctacaacagcaccaacgtgcagaccaacctggaccgcatggtgaccgacgtgcgcgaggccgtggcccagcgcgagcggttccaccgcgagtccaacctgggatccatggtggcgctgaacgccttcctcagcacccagcccgccaacgtgccccggggccaggaggactacaccaacttcatcagcgccctgcgcctgatggtgaccgaggtgccccagagcgaggtgtaccagtccgggccggactacttcttccagaccagtcgccagggcttgcagaccgtgaacctgagccaggctttcaagaacttgcagggcctgtggggcgtgcaggccccggtcggggaccgcgcgacggtgtcgagcctgctgacgccgaactcgcgcctgctgctgctgctggtggcccccttcacggacagcggcagcatcaaccgcaactcgtacctgggctacctgattaacctgtaccgcgaggccatcggccaggcgcacgtggacgagcagacctaccaggagatcacccacgtgagccgcgccctgggccaggacgacccgggcaacctggaagccaccctgaactttttgctgaccaaccggtcgcagaagatcccgccccagtacgcgctcagcaccgaggaggagcgcatcctgcgttacgtgcagcagagcgtgggcctgttcctgatgcaggagggggccacccccagcgccgcgctcgacatgaccgcgcgcaacatggagcccagcatgtacgccagcaaccgcccgttcatcaataaactgatggactacttgcatcgggcggccgccatgaactctgactatttcaccaacgccatcctgaatccccactggctcccgccgccggggttctacacgggcgagtacgacatgcccgaccccaatgacgggttcctgtgggacgatgtggacagcagcgtgttctccccccgaccgggtgctaacgagcgccccttgtggaagaaggaaggcagcgaccgacgcccgtcctcggcgctgtccggccgcgagggtgctgccgcggcggtgcccgaggccgccagtcctttcccgagcttgcccttctcgctgaacagtatccgcagcagcgagctgggcaggatcacgcgcccgcgcttgctgggcgaagaggagtacttgaatgactcgctgttgagacccgagcgggagaagaacttccccaataacgggatagaaagcctggtggacaagatgagccgctggaagacgtatgcgcaggagcacagggacgatccccgggcgtcgcagggggccacgagccggggcagcgccgcccgtaaacgccggtggcacgacaggcagcggggacagatgtgggacgatgaggactccgccgacgacagcagcgtgttggacttgggtgggagtggtaacccgttcgctcacctgcgcccccgtatcgggcgcatgatgtaagagaaaccgaaaataaatgatactcaccaaggccatggcgaccagcgtgcgttcgtttcttctctgttgttgttgtatctagtatgatgaggcgtgcgtacccggagggtcctcctccctcgtacgagagcgtgatgcagcaggcgatggcggcggcggcgatgcagcccccgctggaggctccttacgtgcccccgcggtacctggcgcctacggaggggcggaacagcattcgttactcggagctggcacccttgtacgataccacccggttgtacctggtggacaacaagtcggcggacatcgcctcgctgaactaccagaacgaccacagcaacttcctgaccaccgtggtgcagaacaatgacttcacccccacggaggccagcacccagaccatcaactttgacgagcgctcgcggtggggcggccagctgaaaaccatcatgcacaccaacatgcccaacgtgaacgagttcatgtacagcaacaagttcaaggcgcgggtgatggtctcccgcaagacccccaatggggtgacagtgacagaggattatgatggtagtcaggatgagctgaagtatgaatgggtggaatttgagctgcccgaaggcaacttctcggtgaccatgaccatcgacctgatgaacaacgccatcatcgacaattacttggcggtggggcggcagaacggggtgctggagagcgacatcggcgtgaagttcgacactaggaacttcaggctgggctgggaccccgtgaccgagctggtcatgcccggggtgtacaccaacgaggctttccatcccgatattgtcttgctgcccggctgcggggtggacttcaccgagagccgcctcagcaacctgctgggcattcgcaagaggcagcccttccaggaaggcttccagatcatgtacgaggatctggaggggggcaacatccccgcgctcctggatgtcgacgcctatgagaaaagcaaggaggatgcagcagctgaagcaactgcagccgtagctaccgcctctaccgaggtcaggggcgataattttgcaagcgccgcagcagtggcagcggccgaggcggctgaaaccgaaagtaagatagtcattcagccggtggagaaggatagcaagaacaggagctacaacgtactaccggacaagataaacaccgcctaccgcagctggtacctagcctacaactatggcgaccccgagaagggcgtgcgctcctggacgctgctcaccacctcggacgtcacctgcggcgtggagcaagtctactggtcgctgcccgacatgatgcaagacccggtcaccttccgctccacgcgtcaagttagcaactacccggtggtgggcgccgagctcctgcccgtctactccaagagcttcttcaacgagcaggccgtctactcgcagcagctgcgcgccttcacctcgcttacgcacgtcttcaaccgcttccccgagaaccagatcctcgtccgcccgcccgcgcccaccattaccaccgtcagtgaaaacgttcctgctctcacagatcacgggaccctgccgctgcgcagcagtatccggggagtccagcgcgtgaccgttactgacgccagacgccgcacctgcccctacgtctacaaggccctgggcatagtcgcgccgcgcgtcctctcgagccgcaccttctaaatgtccattctcatctcgcccagtaataacaccggttggggcctgcgcgcgcccagcaagatgtacggaggcgctcgccaacgctccacgcaacaccccgtgcgcgtgcgcgggcacttccgcgctccctggggcgccctcaagggccgcgtgcggtcgcgcaccaccgtcgacgacgtgatcgaccaggtggtggccgacgcgcgcaactacacccccgccgccgcgcccgtctccaccgtggacgccgtcatcgacagcgtggtggccgacgcgcgccggtacgcccgcgccaagagccggcggcggcgcatcgcccggcggcaccggagcacccccgccatgcgcgcggcgcgagccttgctgcgcagggccaggcgcacgggacgcagggccatgctcagggcggccagacgcgcggcttcaggcgccagcgccggcaggacccggagacgcgcggccacggcggcggcagcggccatcgccagcatgtcccgcccgcggcgagggaacgtgtactgggtgcgcgacgccgccaccggtgtgcgcgtgcccgtgcgcacccgcccccctcgcacttgaagatgttcacttcgcgatgttgatgtgtcccagcggcgaggaggatgtccaagcgcaaattcaaggaagagatgctccaggtcatcgcgcctgagatctacggccctgcggtggtgaaggaggaaagaaagccccgcaaaatcaagcgggtcaaaaaggacaaaaaggaagaagaaagtgatgtggacggattggtggagtttgtgcgcgagttcgccccccggcggcgcgtgcagtggcgcgggcggaaggtgcaaccggtgctgagacccggcaccaccgtggtcttcacgcccggcgagcgctccggcaccgcttccaagcgctcctacgacgaggtgtacggggatgatgatattctggagcaggcggccgagcgcctgggcgagtttgcttacggcaagcgcagccgttccgcaccgaaggaagaggcggtgtccatcccgctggaccacggcaaccccacgccgagcctcaagcccgtgaccttgcagcaggtgctgccgaccgcggcgccgcgccgggggttcaagcgcgagggcgaggatctgtaccccaccatgcagctgatggtgcccaagcgccagaagctggaagacgtgctggagaccatgaaggtggacccggacgtgcagcccgaggtcaaggtgcggcccatcaagcaggtggccccgggcctgggcgtgcagaccgtggacatcaagattcccacggagcccatggaaacgcagaccgagcccatgatcaagcccagcaccagcaccatggaggtgcagacggatccctggatgccatcggctcctagtcgaagaccccggcgcaagtacggcgcggccagcctgctgatgcccaactacgcgctgcatccttccatcatccccacgccgggctaccgcggcacgcgcttctaccgcggtcataccagcagccgccgccgcaagaccaccactcgccgccgccgtcgccgcaccgccgctgcaaccacccctgccgccctggtgcggagagtgtaccgccgcggccgcgcacctctgaccctgccgcgcgcgcgctaccacccgagcatcgccatttaaactttcgcctgctttgcagatcaatggccctcacatgccgccttcgcgttcccattacgggctaccgaggaagaaaaccgcgccgtagaaggctggcggggaacgggatgcgtcgccaccaccaccggcggcggcgcgccatcagcaagcggttggggggaggcttcctgcccgcgctgatccccatcatcgccgcggcgatcggggcgatccccggcattgcttccgtggcggtgcaggcctctcagcgccactgagacacacttggaaacatcttgtaataaaccaatggactctgacgctcctggtcctgtgatgtgttttcgtagacagatggaagacatcaatttttcgtccctggctccgcgacacggcacgcggccgttcatgggcacctggagcgacatcggcaccagccaactgaacgggggcgccttcaattggagcagtctctggagcgggcttaagaatttcgggtccacgcttaaaacctatggcagcaaggcgtggaacagcaccacagggcaggcgctgagggataagctgaaagagcagaacttccagcagaaggtggtcgatgggctcgcctcgggcatcaacggggtggtggacctggccaaccaggccgtgcagcggcagatcaacagccgcctggacccggtgccgcccgccggctccgtggagatgccgcaggtggaggaggagctgcctcccctggacaagcggggcgagaagcgaccccgccccgatgcggaggagacgctgctgacgcacacggacgagccgcccccgtacgaggaggcggtgaaactgggtctgcccaccacgcggcccatcgcgcccctggccaccggggtgctgaaacccgaaaagcccgcgaccctggacttgcctcctccccagccttcccgcccctctacagtggctaagcccctgccgccggtggccgtggcccgcgcgcgacccgggggcaccgcccgccctcatgcgaactggcagagcactctgaacagcatcgtgggtctgggagtgcagagtgtgaagcgccgccgctgctattaaacctaccgtagcgcttaacttgcttgtctgtgtgtgtatgtattatgtcgccgccgccgctgtccaccagaaggaggagtgaagaggcgcgtcgccgagttgcaagatggccaccccatcgatgctgccccagtgggcgtacatgcacatcgccggacaggacgcttcggagtacctgagtccgggtctggtgcagtttgcccgcgccacagacacctacttcagtctggggaacaagtttaggaaccccacggtggcgcccacgcacgatgtgaccaccgaccgcagccagcggctgacgctgcgcttcgtgcccgtggaccgcgaggacaacacctactcgtacaaagtgcgctacacgctggccgtgggcgacaaccgcgtgctggacatggccagcacctactttgacatccgcggcgtgctggatcggggccctagcttcaaaccctactccggcaccgcctacaacagtctggcccccaagggagcacccaacacttgtcagtggacatataaagccgatggtgaaactgccacagaaaaaacctatacatatggaaatgcacccgtgcagggcattaacatcacaaaagatggtattcaacttggaactgacaccgatgatcagccaatctacgcagataaaacctatcagcctgaacctcaagtgggtgatgctgaatggcatgacatcactggtactgatgaaaagtatggaggcagagctcttaagcctgataccaaaatgaagccttgttatggttcttttgccaagcctactaataaagaaggaggtcaggcaaatgtgaaaacaggaacaggcactactaaagaatatgacatagacatggctttctttgacaacagaagtgcggctgctgctggcctagctccagaaattgttttgtatactgaaaatgtggatttggaaactccagatacccatattgtatacaaagcaggcacagatgacagcagctcttctattaatttgggtcagcaagccatgcccaacagacctaactacattggtttcagagacaactttatcgggctcatgtactacaacagcactggcaatatgggggtgctggccggtcaggcttctcagctgaatgctgtggttgacttgcaagacagaaacaccgagctgtcctaccagctcttgcttgactctctgggtgacagaacccggtatttcagtatgtggaatcaggcggtggacagctatgatcctgatgtgcgcattattgaaaatcatggtgtggaggatgaacttcccaactattgtttccctctggatgctgttggcagaacagatacttatcagggaattaaggctaatggaactgatcaaaccacatggaccaaagatgacagtgtcaatgatgctaatgagataggcaagggtaatccattcgccatggaaatcaacatccaagccaacctgtggaggaacttcctctacgccaacgtggccctgtacctgcccgactcttacaagtacacgccggccaatgttaccctgcccaccaacaccaacacctacgattacatgaacggccgggtggtggcgccctcgctggtggactcctacatcaacatcggggcgcgctggtcgctggatcccatggacaacgtgaaccccttcaaccaccaccgcaatgcggggctgcgctaccgctccatgctcctgggcaacgggcgctacgtgcccttccacatccaggtgccccagaaatttttcgccatcaagagcctcctgctcctgcccgggtcctacacctacgagtggaacttccgcaaggacgtcaacatgatcctgcagagctccctcggcaacgacctgcgcacggacggggcctccatctccttcaccagcatcaacctctacgccaccttcttccccatggcgcacaacacggcctccacgctcgaggccatgctgcgcaacgacaccaacgaccagtccttcaacgactacctctcggcggccaacatgctctaccccatcccggccaacgccaccaacgtgcccatctccatcccctcgcgcaactgggccgccttccgcggctggtccttcacgcgtctcaagaccaaggagacgccctcgctgggctccgggttcgacccctacttcgtctactcgggctccatcccctacctcgacggcaccttctacctcaaccacaccttcaagaaggtctccatcaccttcgactcctccgtcagctggcccggcaacgaccggctcctgacgcccaacgagttcgaaatcaagcgcaccgtcgacggcgagggctacaacgtggcccagtgcaacatgaccaaggactggttcctggtccagatgctggcccactacaacatcggctaccagggcttctacgtgcccgagggctacaaggaccgcatgtactccttcttccgcaacttccagcccatgagccgccaggtggtggacgaggtcaactacaaggactaccaggccgtcaccctggcctaccagcacaacaactcgggcttcgtcggctacctcgcgcccaccatgcgccagggccagccctaccccgccaactacccctacccgctcatcggcaagagcgccgtcaccagcgtcacccagaaaaagttcctctgcgacagggtcatgtggcgcatccccttctccagcaacttcatgtccatgggcgcgctcaccgacctcggccagaacatgctctatgccaactccgcccacgcgctagacatgaatttcgaagtcgaccccatggatgagtccacccttctctatgttgtcttcgaagtcttcgacgtcgtccgagtgcaccagccccaccgcggcgtcatcgaggccgtctacctgcgcacccccttctcggccggtaacgccaccacctaagctcttgcttcttgcaagccatggccgcgggctccggcgagcaggagctcagggccatcatccgcgacctgggctgcgggccctacttcctgggcaccttcgataagcgcttcccgggattcatggccccgcacaagctggcctgcgccatcgtcaacacggccggccgcgagaccgggggcgagcactggctggccttcgcctggaacccgcgctcgaacacctgctacctcttcgaccccttcgggttctcggacgagcgcctcaagcagatctaccagttcgagtacgagggcctgctgcgccgcagcgccctggccaccgaggaccgctgcgtcaccctggaaaagtccacccagaccgtgcagggtccgcgctcggccgcctgcgggctcttctgctgcatgttcctgcacgccttcgtgcactggcccgaccgccccatggacaagaaccccaccatgaacttgctgacgggggtgcccaacggcatgctccagtcgccccaggtggaacccaccctgcgccgcaaccaggaggcgctctaccgcttcctcaactcccactccgcctactttcgctcccaccgcgcgcgcatcgagaaggccaccgccttcgaccgcatgaatcaagacatgtaaaccgtgtgtgtatgttaaatgtctttaataaacagcactttcatgttacacatgcatctgagatgatttatttagaaatcgaaagggttctgccgggtctcggcatggcccgcgggcagggacacgttgcggaactggtacttggccagccacttgaactcggggatcagcagtttgggcagcggggtgtcggggaaggagtcggtccacagcttccgcgtcagttgcagggcgcccagcaggtcgggcgcggagatcttgaaatcgcagttgggacccgcgttctgcgcgcgggagttgcggtacacggggttgcagcactggaacaccatcagggccgggtgcttcacgctcgccagcaccgtcgcgtcggtgatgctctccacgtcgaggtcctcggcgttggccatcccgaagggggtcatcttgcaggtctgccttcccatggtgggcacgcacccgggcttgtggttgcaatcgcagtgcagggggatcagcatcatctgggcctggtcggcgttcatccccgggtacatggccttcatgaaagcctccaattgcctgaacgcctgctgggccttggctccctcggtgaagaagaccccgcaggacttgctagagaactggttggtggcgcacccggcgtcgtgcacgcagcagcgcgcgtcgttgttggccagctgcaccacgctgcgcccccagcggttctgggtgatcttggcccggtcggggttctccttcagcgcgcgctgcccgttctcgctcgccacatccatctcgatcatgtgctccttctggatcatggtggtcccgtgcaggcaccgcagcttgccctcggcctcggtgcacccgtgcagccacagcgcgcacccggtgcactcccagttcttgtgggcgatctgggaatgcgcgtgcacgaagccctgcaggaagcggcccatcatggtggtcagggtcttgttgctagtgaaggtcagcggaatgccgcggtgctcctcgttgatgtacaggtggcagatgcggcggtacacctcgccctgctcgggcatcagctggaagttggctttcaggtcggtctccacgcggtagcggtccatcagcatagtcatgatttccatacccttctcccaggccgagacgatgggcaggctcatagggttcttcaccatcatcttagcgctagcagccgcggccagggggtcgctctcgtccagggtctcaaagctccgcttgccgtccttctcggtgatccgcaccggggggtagctgaagcccacggccgccagctcctcctcggcctgtctttcgtcctcgctgtcctggctgacgtcctgcaggaccacatgcttggtcttgcggggtttcttcttgggcggcagcggcggcggagatgttggagatggcgagggggagcgcgagttctcgctcaccactactatctcttcctcttcttggtccgaggccacgcggcggtaggtatgtctcttcgggggcagaggcggaggcgacgggctctcgccgccgcgacttggcggatggctggcagagccccttccgcgttcgggggtgcgctcccggcggcgctctgactgacttcctccgcggccggccattgtgttctcctagggaggaacaacaagcatggagactcagccatcgccaacctcgccatctgcccccaccgccgacgagaagcagcagcagcagaatgaaagcttaaccgccccgccgcccagccccgccacctccgacgcggccgtcccagacatgcaagagatggaggaatccatcgagattgacctgggctatgtgacgcccgcggagcacgaggaggagctggcagtgcgcttttcacaagaagagatacaccaagaacagccagagcaggaagcagagaatgagcagagtcaggctgggctcgagcatgacggcgactacctccacctgagcgggggggaggacgcgctcatcaagcatctggcccggcaggccaccatcgtcaaggatgcgctgctcgaccgcaccgaggtgcccctcagcgtggaggagctcagccgcgcctacgagttgaacctcttctcgccgcgcgtgccccccaagcgccagcccaatggcacctgcgagcccaacccgcgcctcaacttctacccggtcttcgcggtgcccgaggccctggccacctaccacatctttttcaagaaccaaaagatccccgtctcctgccgcgccaaccgcacccgcgccgacgcccttttcaacctgggtcccggcgcccgcctacctgatatcgcctccttggaagaggttcccaagatcttcgagggtctgggcagcgacgagactcgggccgcgaacgctctgcaaggagaaggaggagagcatgagcaccacagcgccctggtcgagttggaaggcgacaacgcgcggctggcggtgctcaaacgcacggtcgagctgacccatttcgcctacccggctctgaacctgccccccaaagtcatgagcgcggtcatggaccaggtgctcatcaagcgcgcgtcgcccatctccgaggacgagggcatgcaagactccgaggagggcaagcccgtggtcagcgacgagcagctggcccggtggctgggtcctaatgctagtccccagagtttggaagagcggcgcaaactcatgatggccgtggtcctggtgaccgtggagctggagtgcctgcgccgcttcttcgccgacgcggagaccctgcgcaaggtcgaggagaacctgcactacctcttcaggcacgggttcgtgcgccaggcctgcaagatctccaacgtggagctgaccaacctggtctcctacatgggcatcttgcacgagaaccgcctggggcagaacgtgctgcacaccaccctgcgcggggaggcccggcgcgactacatccgcgactgcgtctacctctacctctgccacacctggcagacgggcatgggcgtgtggcagcagtgtctggaggagcagaacctgaaagagctctgcaagctcctgcagaagaacctcaagggtctgtggaccgggttcgacgagcgcaccaccgcctcggacctggccgacctcattttccccgagcgcctcaggctgacgctgcgcaacggcctgcccgactttatgagccaaagcatgttgcaaaactttcgctctttcatcctcgaacgctccggaatcctgcccgccacctgctccgcgctgccctcggacttcgtgccgctgaccttccgcgagtgccccccgccgctgtggagccactgctacctgctgcgcctggccaactacctggcctaccactcggacgtgatcgaggacgtcagcggcgagggcctgctcgagtgccactgccgctgcaacctctgcacgccgcaccgctccctggcctgcaacccccagctgctgagcgagacccagatcatcggcaccttcgagttgcaagggcccagcgaaggcgagggttcagccgccaaggggggtctgaaactcaccccggggctgtggacctcggcctacttgcgcaagttcgtgcccgaggactaccatcccttcgagatcaggttctacgaggaccaatcccatccgcccaaggccgagctgtcggcctgcgtcatcacccagggggcgatcctggcccaattgcaagccatccagaaatcccgccaagaattcttgctgaaaaagggccgcggggtctacctcgacccccagaccggtgaggagctcaaccccggcttcccccaggatgccccgaggaaacaagaagctgaaagtggagctgccgcccgtggaggatttggaggaagactgggagaacagcagtcaggcagaggaggaggagatggaggaagactgggacagcactcaggcagaggaggacagcctgcaagacagtctggaggaagacgaggaggaggcagaggaggaggtggaagaagcagccgccgccagaccgtcgtcctcggcgggggagaaagcaagcagcacggataccatctccgctccgggtcggggtcccgctcgaccacacagtagatgggacgagaccggacgattcccgaaccccaccacccagaccggtaagaaggagcggcagggatacaagtcctggcgggggcacaaaaacgccatcgtctcctgcttgcaggcctgcgggggcaacatctccttcacccggcgctacctgctcttccaccgcggggtgaactttccccgcaacatcttgcattactaccgtcacctccacagcccctactacttccaagaagaggcagcagcagcagaaaaagaccagcagaaaaccagcagctagaaaatccacagcggcggcagcaggtggactgaggatcgcggcgaacgagccggcgcaaacccgggagctgaggaaccggatctttcccaccctctatgccatcttccagcagagtcgggggcaggagcaggaactgaaagtcaagaaccgttctctgcgctcgctcacccgcagttgtctgtatcacaagagcgaagaccaacttcagcgcactctcgaggacgccgaggctctcttcaacaagtactgcgcgctcactcttaaagagtagcccgcgcccgcccagtcgcagaaaaaggcgggaattacgtcacctgtgcccttcgccctagccgcctccacccatcatcatgagcaaagagattcccacgccttacatgtggagctaccagccccagatgggcctggccgccggtgccgcccaggactactccacccgcatgaattggctcagcgccgggcccgcgatgatctcacgggtgaatgacatccgcgcccaccgaaaccagatactcctagaacagtcagcgctcaccgccacgccccgcaatcacctcaatccgcgtaattggcccgccgccctggtgtaccaggaaattccccagcccacgaccgtactacttccgcgagacgcccaggccgaagtccagctgactaactcaggtgtccagctggcgggcggcgccaccctgtgtcgtcaccgccccgctcagggtataaagcggctggtgatccggggcagaggcacacagctcaacgacgaggtggtgagctcttcgctgggtctgcgacctgacggagtcttccaactcgccggatcggggagatcttccttcacgcctcgtcaggccgtcctgactttggagagttcgtcctcgcagccccgctcgggtggcatcggcactctccagttcgtggaggagttcactccctcggtctacttcaaccccttctccggctcccccggccactacccggacgagttcatcccgaacttcgacgccatcagcgagtcggtggacggctacgattgaatgtcccatggtggcgcagctgacctagctcggcttcgacacctggaccactgccgccgcttccgctgcttcgctcgggatctcgccgagtttgcctactttgagctgcccgaggagcaccctcagggcccggcccacggagtgcggatcgtcgtcgaagggggcctcgactcccacctgcttcggatcttcagccagcgtccgatcctggtcgagcgcgagcaaggacagacccttctgactctgtactgcatctgcaaccaccccggcctgcatgaaagtctttgttgtctgctgtgtactgagtataataaaagctgagatcagcgactactccggacttccgtgtgttcctgaatccatcaaccagtctttgttcttcaccgggaacgagaccgagctccagctccagtgtaagccccacaagaagtacctcacctggctgttccagggctccccgatcgccgttgtcaaccactgcgacaacgacggagtcctgctgagcggccctgccaaccttactttttccacccgcagaagcaagctccagctcttccaacccttcctccccgggacctatcagtgcgtctcgggaccctgccatcacaccttccacctgatcccgaataccacagcgtcgctccccgctactaacaaccaaactaacctccaccaacgccaccgtcgcgacctttctgaatctaatactaccacccacaccggaggtgagctccgaggtcaaccaacctctgggatttactacggcccctgggaggtggttgggttaatagcgctaggcctagttgcgggtgggcttttggttctctgctacctatacctcccttgctgttcgtacttagtggtgctgtgttgctggtttaagaaatggggaagatcaccctagtgagctgcggtgcgctggtggcggtgttgctttcgattgtgggactgggcggtgcggctgtagtgaaggagaaggccgatccctgcttgcatttcaatcccaacaaatgccagctgagttttcagcccgatggcaatcggtgcgcggtactgatcaagtgcggatgggaatgcgagaacgtgagaatcgagtacaataacaagactcggaacaatactctcgcgtccgtgtggcagcccggggaccccgagtggtacaccgtctctgtccccggtgctgacggctccccgcgcaccgtgaataatactttcatttttgcgcacatgtgcgacacggtcatgtggatgagcaagcagtacgatatgtggccccccacgaaggagaacatcgtggtcttctccatcgcttacagcctgtgcacggcgctaatcaccgctatcgtgtgcctgagcattcacatgctcatcgctattcgccccagaaataatgccgaaaaagaaaaacagccataacgttttttttcacacctttttcagaccatggcctctgttaaatttttgcttttatttgccagtctcattgccgtcattcatggaatgagtaatgagaaaattactatttacactggcactaatcacacattgaaaggtccagaaaaagccacagaagtttcatggtattgttattttaatgaatcagatgtatctactgaactctgtggaaacaataacaaaaaaaatgagagcattactctcatcaagtttcaatgtggatctgacttaaccctaattaacatcactagagactatgtaggtatgtattatggaactacagcaggcatttcggacatggaattttatcaagtttctgtgtctgaacccaccacgcctagaatgaccacaaccacaaaaactacacctgttaccactatgcagctcactaccaataacatttttgccatgcgtcaaatggtcaacaatagcactcaacccaccccacccagtgaggaaattcccaaatccatgattggcattattgttgctgtagtggtgtgcatgttgatcatcgccttgtgcatggtgtactatgccttctgctacagaaagcacagactgaacgacaagctggaacacttactaagtgttgaattttaattttttagaaccatgaagatcctaggccttttaattttttctatcattacctctgctctatgcaattctgacaatgaggacgttactgtcgttgtcggatcaaattatacactgaaaggtccagcgaagggtatgctttcgtggtattgctattttggatctgacactacagaaactgaattatgcaatcttaagaatggcaaaattcaaaattctaaaattaacaattatatatgcaatggtactgatctgatactcctcaatatcacgaaatcatatgctggcagttacacctgccctggagatgatgctgacagtatgattttttacaaagtaactgttgttgatcccactactccacctccacccaccacaactactcacaccacacacacagatcaaaccgcagcagaggaggcagcaaagttagccttgcaggtccaagacagttcatttgttggcattacccctacacctgatcagcggtgtccggggctgctagtcagcggcattgtcggtgtgctttcgggattagcagtcataatcatctgcatgttcatttttgcttgctgctatagaaggctttaccgacaaaaatcagacccactgctgaacctctatgtttaattttttccagagtcatgaaggcagttagcgctctagttttttgttctttgattggcattgttttttgcaatcctattcctaaagttagctttattaaagatgtgaatgttactgaggggggcaatgtgacactggtaggtgtagagggtgctgaaaacaccacctggacaaaataccacctcaatgggtggaaagatatttgcaattggagtgtattagtttatacatgtgagggagttaatcttaccattgtcaatgccacctcagctcaaaatggtagaattcaaggacaaagtgtcagtgtatctaatgggtattttacccaacatacttttatctatgacgttaaagtcataccactgcctacgcctagcccacctagcactaccacacagacaacccacactacacagacaaccacatacagtacattaaatcagcctaccaccactacagcagcagaggttgccagctcgtctggggtccgagtggcatttttgatgttggccccatctagcagtcccactgctagtaccaatgagcagactactgaatttttgtccactgtcgagagccacaccacagctacctccagtgccttctctagcaccgccaatctctcctcgctttcctctacaccaatcagtcccgctactactcctagccccgctcctcttcccactcccctgaagcaaacagacggcggcatgcaatggcagatcaccctgctcattgtgatcgggttggtcatcctggccgtgttgctctactacatcttctgccgccgcattcccaacgcgcaccgcaagccggtctacaagcccatcattgtcgggcagccggagccgcttcaggtggaagggggtctaaggaatcttctcttctcttttacagtatggtgattgaactatgattcctagacaattcttgatcactattcttatctgcctcctccaagtctgtgccaccctcgctctggtggccaacgccagtccagactgtattgggcccttcgcctcctacgtgctctttgccttcaccacctgcatctgctgctgtagcatagtctgcctgcttatcaccttcttccagttcattgactggatctttgtgcgcatcgcctacctgcgccaccacccccagtaccgcgaccagcgagtggcgcggctgctcaggctcctctgataagcatgcgggctctgctacttctcgcgcttctgctgttagtgctcccccgtcccgtcgacccccggtcccccacccagtcccccgaggaggtccgcaaatgcaaattccaagaaccctggaaattcctcaaatgctaccgccaaaaatcagacatgcatcccagctggatcatgatcattgggatcgtgaacattctggcctgcaccctcatctcctttgtgatttacccctgctttgactttggttggaactcgccagaggcgctctatctcccgcctgaacctgacacaccaccacagcaacctcaggcacacgcactaccaccactacagcctaggccacaatacatgcccatattagactatgaggccgagccacagcgacccatgctccccgctattagttacttcaatctaaccggcggagatgactgacccactggccaacaacaacgtcaacgaccttctcctggacatggacggccgcgcctcggagcagcgactcgcccaacttcgcattcgccagcagcaggagagagccgtcaaggagctgcaggatgcggtggccatccaccagtgcaagagaggcatcttctgcctggtgaaacaggccaagatctcctacgaggtcactccaaacgaccatcgcctctcctacgagctcctgcagcagcgccagaagttcacctgcctggtcggagtcaaccccatcgtcatcacccagcagtctggcgataccaaggggtgcatccactgctcctgcgactcccccgactgcgtccacactctgatcaagaccctctgcggcctccgcgacctcctccccatgaactaatcacccccttatccagtgaaataaagatcatattgatgatgattttacagaaataaaaaataatcatttgatttgaaataaagatacaatcatattgatgatttgagtttaacaaaaaaataaagaatcacttacttgaaatctgataccaggtctctgtccatgttttctgccaacaccacttcactcccctcttcccagctctggtactgcaggccccggcgggctgcaaacttcctccacacgctgaaggggatgtcaaattcctcctgtccctcaatcttcattttatcttctatcagatgtccaaaaagcgcgtccgggtggatgatgacttcgaccccgtctacccctacgatgcagacaacgcaccgaccgtgcccttcatcaacccccccttcgtctcttcagatggattccaagagaagcccctgggggtgttgtccctgcgactggccgaccccgtcaccaccaagaacggggaaatcaccctcaagctgggagagggggtggacctcgattcctcgggaaaactcatctccaacacggccaccaaggccgccgcccctctcagtttttccaacaacaccatttcccttaacatggatcaccccttttacactaaagatggaaaattatccttacaagtttctccaccattaaatatactgagaacaagcattctaaacacactagctttaggttttggatcaggtttaggactccgtggctctgccttggcagtacagttagtctctccacttacatttgatactgatggaaacataaagcttaccttagacagaggtttgcatgttacaacaggagatgcaattgaaagcaacataagctgggctaaaggtttaaaatttgaagatggagccatagcaaccaacattggaaatgggttagagtttggaagcagtagtacagaaacaggtgttgatgatgcttacccaatccaagttaaacttggatctggccttagctttgacagtacaggagccataatggctggtaacaaagaagacgataaactcactttgtggacaacacctgatccatcaccaaactgtcaaatactcgcagaaaatgatgcaaaactaacactttgcttgactaaatgtggtagtcaaatactggccactgtgtcagtcttagttgtaggaagtggaaacctaaaccccattactggcaccgtaagcagtgctcaggtgtttctacgttttgatgcaaacggtgttcttttaacagaacattctacactaaaaaaatactgggggtataggcagggagatagcatagatggcactccatataccaatgctgtaggattcatgcccaatttaaaagcttatccaaagtcacaaagttctactactaaaaataatatagtagggcaagtatacatgaatggagatgtttcaaaacctatgcttctcactataaccctcaatggtactgatgacagcaacagtacatattcaatgtcattttcatacacctggactaatggaagctatgttggagcaacatttggggctaactcttataccttctcatacatcgcccaagaatgaacactgtatcccaccctgcatgccaacccttcccaccccactctgtggaacaaactctgaaacacaaaataaaataaagttcaagtgttttattgattcaacagttttacaggattcgagcagttatttttcctccaccctcccaggacatggaatacaccaccctctccccccgcacagccttgaacatctgaatgccattggtgatggacatgcttttggtctccacgttccacacagtttcagagcgagccagtctcgggtcggtcagggagatgaaaccctccgggcactcccgcatctgcacctcacagctcaacagctgaggattgtcctcggtggtcgggatcacggttatctggaagaagcagaagagcggcggtgggaatcatagtccgcgaacgggatcggccggtggtgtcgcatcaggccccgcagcagtcgctgccgccgccgctccgtcaagctgctgctcagggggtccgggtccagggactccctcagcatgatgcccacggccctcagcatcagtcgtctggtgcggcgggcgcagcagcgcatgcggatctcgctcaggtcgctgcagtacgtgcaacacagaaccaccaggttgttcaacagtccatagttcaacacgctccagccgaaactcatcgcgggaaggatgctacccacgtggccgtcgtaccagatcctcaggtaaatcaagtggtgccccctccagaacacgctgcccacgtacatgatctccttgggcatgtggcggttcaccacctcccggtaccacatcaccctctggttgaacatgcagccccggatgatcctgcggaaccacagggccagcaccgccccgcccgccatgcagcgaagagaccccgggtcccggcaatggcaatggaggacccaccgctcgtacccgtggatcatctgggagctgaacaagtctatgttggcacagcacaggcatatgctcatgcatctcttcagcactctcaactcctcgggggtcaaaaccatatcccagggcacggggaactcttgcaggacagcgaaccccgcagaacagggcaatcctcgcacagaacttacattgtgcatggacagggtatcgcaatcaggcagcaccgggtgatcctccaccagagaagcgcgggtctcggtctcctcacagcgtggtaagggggccggccgatacgggtgatggcgggacgcggctgatcgtgttcgcgaccgtgtcatgatgcagttgctttcggacattttcgtacttgctgtagcagaacctggtccgggcgctgcacaccgatcgccggcggcggtctcggcgcttggaacgctcggtgttgaaattgtaaaacagccactctctcagaccgtgcagcagatctagggcctcaggagtgatgaagatcccatcatgcctgatggctctgatcacatcgaccaccgtggaatgggccagacccagccagatgatgcaattttgttgggtttcggtgacggcgggggagggaagaacaggaagaaccatgattaacttttaatccaaacggtctcggagtacttcaaaatgaagatcgcggagatggcacctctcgcccccgctgtgttggtggaaaataacagccaggtcaaaggtgatacggttctcgagatgttccacggtggcttccagcaaagcctccacgcgcacatccagaaacaagacaatagcgaaagcgggagggttctctaattcctcaatcatcatgttacactcctgcaccatccccagataattttcatttttccagccttgaatgattcgaactagttcctgaggtaaatccaagccagccatgataaagagctcgcgcagagcgccctccaccggcattcttaagcacaccctcataattccaagatattctgctcctggttcacctgcagcagattgacaagcggaatatcaaaatctctgccgcgatccctgagctcctccctcagcaataactgtaagtactctttcatatcctctccgaaatttttagccataggaccaccaggaataagattagggcaagccacagtacagataaaccgaagtcctccccagtgagcattgccaaatgcaagactgctataagcatgctggctagacccggtgatatcttccagataactggacagaaaatcgcccaggcaatttttaagaaaatcaacaaaagaaaaatcctccaggtggacgtttagagcctcgggaacaacgatgaagtaaatgcaagcggtgcgttccagcatggttagttagctgatctgtagaaaaaacaaaaatgaacattaaaccatgctagcctggcgaacaggtgggtaaatcgttctctccagcaccaggcaggccacggggtctccggcgcgaccctcgtaaaaattgtcgctatgattgaaaaccatcacagagagacgttcccggtggccggcgtgaatgattcgacaagatgaatacacccccggaacattggcgtccgcgagtgaaaaaaagcgcccgaggaagcaataaggcactacaatgctcagtctcaagtccagcaaagcgatgccatgcggatgaagcacaaaattctcaggtgcgtacaaaatgtaattactcccctcctgcacaggcagcaaagcccccgatccctccaggtacacatacaaagcctcagcgtccatagcttaccgagcagcagcacacaacaggcgcaagagtcagagaaaggctgagctctaacctgtccacccgctctctgctcaatatatagcccagatctacactgacgtaaaggccaaagtctaaaaatacccgccaaataatcacacacgcccagcacacgcccagaaaccggtgacacactcaaaaaaatacgcgcacttcctcaaacgcccaaaactgccgtcatttccgggttcccacgctacgtcatcaaaacacgactttcaaattccgtcgaccgttaaaaacgtcacccgccccgcccctaacggtcgcccgtctctcagccaatcagcgccccgcatccccaaattcaaacacctcatttgcatattaacgcgcacaaaaagtttgaggtatattattgatgatgg

SEQ ID NO: 11 - DNA, 31867 bp, synthetic construct
  source 1..31867: mol_type = other DNA
ccatcttcaataatatacctcaaactttttgtgcgcgttaatatgcaaatgaggcgtttgaatttggggaggaagggcggtgattggtcgagggatgagcgaccgttaggggcggggcgagtgacgttttgatgacgtggttgcgaggaggagccagtttgcaagttctcgtgggaaaagtgacgtcaaacgaggtgtggtttgaacacggaaatactcaattttcccgcgctctctgacaggaaatgaggtgtttctgggcggatgcaagtgaaaacgggccattttcgcgcgaaaactgaatgaggaagtgaaaatctgagtaatttcgcgtttatggcagggaggagtatttgccgagggccgagtagactttgaccgattacgtgggggtttcgattaccgtgtttttcacctaaatttccgcgtacggtgtcaaagtccggtgtttttacgtaggtgtcagctgatcgccagggtatttaaacctgcgctctccagtcaagaggccactcttgagtgccagcgagaagagttttctcctccgcgccgcgagtcagatctacactttgaaagtagggataacagggtaatgacattgattattgactagttgttaatagtaatcaattacggggtcattagttcatagcccatatatggagttccgcgttacataacttacggtaaatggcccgcctggctgaccgcccaacgacccccgcccattgacgtcaataatgacgtatgttcccatagtaacgccaatagggactttccattgacgtcaatgggtggagtatttacggtaaactgcccacttggcagtacatcaagtgtatcatatgccaagtccgccccctattgacgtcaatgacggtaaatggcccgcctggcattatgcccagtacatgaccttacgggactttcctacttggcagtacatctacgtattagtcatcgctattaccatggtgatgcggttttggcagtacaccaatgggcgtggatagcggtttgactcacggggatttccaagtctccaccccattgacgtcaatgggagtttgttttggcaccaaaatcaacgggactttccaaaatgtcgtaataaccccgccccgttgacgcaaatgggcggtaggcgtgtacggtgggaggtctatataagcagagctcgtttagtgaaccgtcagatcgcctggaacgccatccacgctgttttgacctccatagaagacagcgatcgcgccaccatggtgagcaagggcgaggagctgttcaccggggtggtgcccatcctggtcgagctggacggcgacgtaaacggccacaagttcagcgtgtccggcgagggcgagggcgatgccacctacggcaagctgaccctgaagttcatctgcaccaccggcaagctgcccgtgccctggcccaccctcgtgaccaccctgacctacggcgtgcagtgcttcagccgctaccccgaccacatgaagcagcacgacttcttcaagtccgccatgcccgaaggctacgtccaggagcgcaccatcttcttcaaggacgacggcaactacaagacccgcgccgaggtgaagttcgagggcgacaccctggtgaaccgcatcgagctgaagggcatcgacttcaaggaggacggcaacatcctggggcacaagctggagtacaactacaacagccacaacgtctatatcatggccgacaagcagaagaacggcatcaaggtgaacttcaagatccgccacaacatcgaggacggcagcgtgcagctcgccgaccactaccagcagaacacccccatcggcgacggccccgtgctgctgcccgacaaccactacctgagcacccagtccgccctgagcaaagaccccaacgagaagcgcgatcacatggtcctgctggagttcgtgaccgccgccgggatcactctcggcatggacgagctttacaagtagtgagtttaaactcccatttaaatgtgagggttaatgcttcgagcagacatgataagatacattgatgagtttggacaaaccacaactagaatgcagtgaaaaaaatgctttatttgtgaaatttgtgatgctattgctttatttgtaaccattataagctgcaataaacaagttaacaacaacaattgcattcattttatgtttcaggttcagggggagatgtgggaggttttttaaagcaagtaaaacctctacaaatgtggtaaaataactataacggtcctaaggtagcgagtgagtagtgttctggggcgggggaggacctgcatgagggccagaataactgaaatctgtgcttttctgtgtgttgcagcagcatgagcggaagcggctcctttgagggaggggtattcagcccttatctgacggggcgtctcccctcctgggcgggagtgcgtcagaatgtgatgggatccacggtggacggccggcccgtgcagcccgcgaactcttcaaccctgacctatgcaaccctgagctcttcgtcgttggacgcagctgccgccgcagctgctgcatctgccgccagcgccgtgcgcggaatggccatgggcgccggctactacggcactctggtggccaactcgagttccaccaataatcccgccagcctgaacgaggagaagctgttgctgctgatggcccagctcgaggccttgacccagcgcctgggcgagctgacccagcaggtggctcagctgcaggagcagacgcgggccgcggttgccacggtgaaatccaaataaaaaatgaatcaataaataaacggagacggttgttgattttaacacagagtctgaatctttatttgatttttcgcgcgcggtaggccctggaccaccggtctcgatcattgagcacccggtggatcttttccaggacccggtagaggtgggcttggatgttgaggtacatgggcatgagcccgtcccgggggtggaggtagctccattgcagggcctcgtgctcgggggtggtgttgtaaatcacccagtcatagcaggggcgcagggcatggtgttgcacaatatctttgaggaggagactgatggccacgggcagccctttggtgtaggtgtttacaaatctgttgagctgggagggatgcatgcggggggagatgaggtgcatcttggcctggatcttgagattggcgatgttaccgcccagatcccgcctggggttcatgttgtgcaggaccaccagcacggtgtatccggtgcacttggggaatttatcatgcaacttggaagggaaggcgtgaaagaatttggcgacgcctttgtgcccgcccaggttttccatgcactcatccatgatgatggcgatgggcccgtgggcggcggcctgggcaaagacgtttcgggggtcggacacatcatagttgtggtcctgggtgaggtcatcataggccattttaatgaatttggggcggagggtgccggactgggggacaaaggtaccctcgatcccgggggcgtagttcccctcacagatctgcatctcccaggctttgagctcggagggggggatcatgtccacctgcggggcgataaagaacacggtttccggggcgggggagatgagctgggccgaaagcaagttccggagcagctgggacttgccgcagccggtggggccgtagatgaccccgatgaccggctgcaggtggtagttgagggagagacagctgccgtcctcccggaggaggggggccacctcgttcatcatctcgcgcacgtgcatgttctcgcgcaccagttccgccaggaggcgctctccccccagggataggagctcctggagcgaggcgaagtttttcagcggcttgagtccgtcggccatgggcattttggagagggtttgttgcaagagttccaggcggtcccagagctcggtgatgtgctctacggcatctcgatccagcagacctcctcgtttcgcgggttgggacggctgcgggagtagggcaccagacgatgggcgtccagcgcagccagggtccggtccttccagggtcgcagcgtccgcgtcagggtggtctccgtcacggtgaaggggtgcgcgccgggctgggcgcttgcgagggtgcgcttcaggctcatccggctggtcgaaaaccgctcccgatcggcgccctgcgcgtcggccaggtagcaattgaccatgagttcgtagttgagcgcctcggccgcgtggcctttggcgcggagcttacctttggaagtctgcccgcaggcgggacagaggagggacttgagggcgtagagcttgggggcgaggaagacggactcgggggcgtaggcgtccgcgccgcagtgggcgcagacggtctcgcactccacgagccaggtgaggtcgggctggtcggggtcaaaaaccagtttcccgccgttctttttgatgcgtttcttacctttggtctccatgagctcgtgtccccgctgggtgacaaagaggctgtccgtgtccccgtagaccgactttatgggccggtcctcgagcggtgtgccgcggtcctcctcgtagaggaaccccgcccactccgagacgaaagcccgggtccaggccagcacgaaggaggccacgtgggacgggtagcggtcgttgtccaccagcgggtccaccttttccagggtatgcaaacacatgtccccctcgtccacatccaggaaggtgattggcttgtaagtgtaggccacgtgaccgggggtcccggccgggggggtataaaagggtgcgggtccctgctcgtcctcactgtcttccggatcgctgtccaggagcgccagctgttggggtaggtattccctctcgaaggcgggcatgacctcggcactcaggttgtcagtttctagaaacgaggaggatttgatattgacggtgccggcggagatgcctttcaagagcccctcgtccatctggtcagaaaagacgatctttttgttgtcgagcttggtggcgaaggagccgtagagggcgttggagaggagcttggcgatggagcgcatggtctggtttttttccttgtcggcgcgctccttggcggcgatgttgagctgcacgtactcgcgcgccacgcacttccattcggggaagacggtggtcagctcgtcgggcacgattctgacctgccagccccgattatgcagggtgatgaggtccacactggtggccacctcgccgcgcaggggctcattagtccagcagaggcgtccgcccttgcgcgagcagaaggggggcagggggtccagcatgacctcgtcgggggggtcggcatcgatggtgaagatgccgggcaggaggtcggggtcaaagtagctgatggaagtggccagatcgtccagggcagcttgccattcgcgcacggccagcgcgctctcgtagggactgaggggcgtgccccagggcatgggatgggtaagcgcggaggcgtacatgccgcagatgtcgtagacgtagaggggctcctcgaggatgccgatgtaggtggggtagcagcgccccccgcggatgctggcgcgcacgtagtcatacagctcgtgcgagggggcgaggagccccgggcccaggttggtgcgactgggcttttcggcgcggtagacgatctggcggaaaatggcatgcgagttggaggagatggtgggcctttggaagatgttgaagtgggcgtggggcagtccgaccgagtcgcggatgaagtgggcgtaggagtcttgcagcttggcgacgagctcggcggtgactaggacgtccagagcgcagtagtcgagggtctcctggatgatgtcatacttgagctgtcccttttgtttccacagctcgcggttgagaaggaactcttcgcggtccttccagtactcttcgagggggaacccgtcctgatctgcacggtaagagcctagcatgtagaactggttgacggccttgtaggcgcagcagcccttctccacggggagggcgtaggcctgggcggccttgcgcagggaggtgtgcgtgagggcgaaagtgtccctgaccatgaccttgaggaactggtgcttgaagtcgatatcgtcgcagcccccctgctcccagagctggaagtccgtgcgcttcttgtaggcggggttgggcaaagcgaaagtaacatcgttgaagaggatcttgcccgcgcggggcataaagttgcgagtgatgcggaaaggttggggcacctcggcccggttgttgatgacctgggcggcgagcacgatctcgtcgaagccgttgatgttgtggcccacgatgtagagttccacgaatcgcggacggcccttgacgtggggcagtttcttgagctcctcgtaggtgagctcgtcggggtcgctgagcccgtgctgctcgagcgcccagtcggcgagatgggggttggcgcggaggaaggaagtccagagatccacggccagggcggtttgcagacggtcccggtactgacggaactgctgcccgacggccattttttcgggggtgacgcagtagaaggtgcgggggtccccgtgccagcgatcccatttgagctggagggcgagatcgagggcgagctcgacgagccggtcgtccccggagagtttcatgaccagcatgaaggggacgagctgcttgccgaaggaccccatccaggtgtaggtttccacatcgtaggtgaggaagagcctttcggtgcgaggatgcgagccgatggggaagaactggatctcctgccaccaattggaggaatggctgttgatgtgatggaagtagaaatgccgacggcgcgccgaacactcgtgcttgtgtttatacaagcggccacagtgctcgcaacgctgcacgggatgcacgtgctgcacgagctgtacctgagttcctttgacgaggaatttcagtgggaagtggagtcgtggcgcctgcatctcgtgctgtactacgtcgtggtggtcggcctggccctcttctgcctcgatggtggtcatgctgacgagcccgcgcgggaggcaggtccagacctcggcgcgagcgggtcggagagcgaggacgagggcgcgcaggccggagctgtccagggtcctgagacgctgcggagtcaggtcagtgggcagcggcggcgcgcggttgacttgcaggagtttttccagggcgcgcgggaggtccagatggtacttgatctccaccgcgccattggtggcgacgtcgatggcttgcagggtcccgtgcccctggggtgtgaccaccgtcccccgtttcttcttgggcggctggggcgacgggggcggtgcctcttccatggttagaagcggcggcgaggacgcgcgccgggcggcaggggcggctcggggcccggaggcaggggcggcaggggcacgtcggcgccgcgcgcgggtaggttctggtactgcgcccggagaagactggcgtgagcgacgacgcgacggttgacgtcctggatctgacgcctctgggtgaaggccacgggacccgtgagtttgaacctgaaagagagttcgacagaatcaatctcggtatcgttgacggcggcctgccgcaggatctcttgcacgtcgcccgagttgtcctggtaggcgatctcggtcatgaactgctcgatctcctcctcttgaaggtctccgcggccggcgcgctccacggtggccgcgaggtcgttggagatgcggcccatgagctgcgagaaggcgttcatgcccgcctcgttccagacgcggctgtagaccacgacgccctcgggatcgcgggcgcgcatgaccacctgggcgaggttgagctccacgtggcgcgtgaagaccgcgtagttgcagaggcgctggtagaggtagttgagcgtggtggcgatgtgctcggtgacgaagaaatacatgatccagcggcggagcggcatctcgctgacgtcgcccagcgcctccaaacgttccatggcctcgtaaaagtccacggcgaagttgaaaaactgggagttgcgcgccgagacggtcaactcctcctccagaagacggatgagctcggcgatggtggcgcgcacctcgcgctcgaaggcccccgggagttcctccacttcctcttcttcctcctccactaacatctcttctacttcctcctcaggcggcagtggtggcgggggagggggcctgcgtcgccggcggcgcacgggcagacggtcgatgaagcgctcgatggtctcgccgcgccggcgtcgcatggtctcggtgacggcgcgcccgtcctcgcggggccgcagcgtgaagacgccgccgcgcatctccaggtggccgggggggtccccgttgggcagggagagggcgctgacgatgcatcttatcaattgccccgtagggactccgcgcaaggacctgagcgtctcgagatccacgggatctgaaaaccgctgaacgaaggcttcgagccagtcgcagtcgcaaggtaggctgagcacggtttcttctggcgggtcatgttggttgggagcggggcgggcgatgctgctggtgatgaagttgaaataggcggttctgagacggcggatggtggcgaggagcaccaggtctttgggcccggcttgctggatgcgcagacggtcggccatgccccaggcgtggtcctgacacctggccaggtccttgtagtagtcctgcatgagccgctccacgggcacctcctcctcgcccgcgcggccgtgcatgcgcgtgagcccgaagccgcgctggggctggacgagcgccaggtcggcgacgacgcgctcggcgaggatggcttgctggatctgggtgagggtggtctggaagtcatcaaagtcgacgaagcggtggtaggctccggtgttgatggtgtaggagcagttggccatgacggaccagttgacggtctggtggcccggacgcacgagctcgtggtacttgaggcgcgagtaggcgcgcgtgtcgaagatgtagtcgttgcaggtgcgcaccaggtactggtagccgatgaggaagtgcggcggcggctggcggtagagcggccatcgctcggtggcgggggcgccgggcgcgaggtcctcgagcatggtgcggtggtagccgtagatgtacctggacatccaggtgatgccggcggcggtggtggaggcgcgcgggaactcgcggacgcggttccagatgttgcgcagcggcaggaagtagttcatggtgggcacggtctggcccgtgaggcgcgcgcagtcgtggatgctctatacgggcaaaaacgaaagcggtcagcggctcgactccgtggcctggaggctaagcgaacgggttgggctgcgcgtgtaccccggttcgaatctcgaatcaggctggagccgcagctaacgtggtattggcactcccgtctcgacccaagcctgcaccaaccctccaggatacggaggcgggtcgttttgcaacttttttttggaggccggatgagactagtaagcgcggaaagcggccgaccgcgatggctcgctgccgtagtctggagaagaatcgccagggttgcgttgcggtgtgccccggttcgaggccggccggattccgcggctaacgagggcgtggctgccccgtcgtttccaagaccccatagccagccgacttctccagttacggagcgagcccctcttttgttttgtttgtttttgccagatgcatcccgtactgcggcagatgcgcccccaccaccctccaccgcaacaacagccccctccacagccggcgcttctgcccccgccccagcagcaacttccagccacgaccgccgcggccgccgtgagcggggctggacagagttatgatcaccagctggccttggaagagggcgaggggctggcgcgcctgggggcgtcgtcgccggagcggcacccgcgcgtgcagatgaaaagggacgctcgcgaggcctacgtgcccaagcagaacctgttcagagacaggagcggcgaggagcccgaggagatgcgcgcggcccggttccacgcggggcgggagctgcggcgcggcctggaccgaaagagggtgctgagggacgaggatttcgaggcggacgagctgacggggatcagccccgcgcgcgcgcacgtggccgcggccaacctggtcacggcgtacgagcagaccgtgaaggaggagagcaacttccaaaaatccttcaacaaccacgtgcgcaccctgatcgcgcgcgaggaggtgaccctgggcctgatgcacctgtgggacctgctggaggccatcgtgcagaaccccaccagcaagccgctgacggcgcagctgttcctggtggtgcagcatagtcgggacaacgaagcgttcagggaggcgctgctgaatatcaccgagcccgagggccgctggctcctggacctggtgaacattctgcagagcatcgtggtgcaggagcgcgggctgccgctgtccgagaagctggcggccatcaacttctcggtgctgagtttgggcaagtactacgctaggaagatctacaagaccccgtacgtgcccatagacaaggaggtgaagatcgacgggttttacatgcgcatgaccctgaaagtgctgaccctgagcgacgatctgggggtgtaccgcaacgacaggatgcaccgtgcggtgagcgccagcaggcggcgcgagctgagcgaccaggagctgatgcatagtctgcagcgggccctgaccggggccgggaccgagggggagagctactttgacatgggcgcggacctgcactggcagcccagccgccgggccttggaggcggcggcaggaccctacgtagaagaggtggacgatgaggtggacgaggagggcgagtacctggaagactgatggcgcgaccgtatttttgctagatgcaacaacaacagccacctcctgatcccgcgatgcgggcggcgctgcagagccagccgtccggcattaactcctcggacgattggacccaggccatgcaacgcatcatggcgctgacgacccgcaaccccgaagcctttagacagcagccccaggccaaccggctctcggccatcctggaggccgtggtgccctcgcgctccaaccccacgcacgagaaggtcctggccatcgtgaacgcgctggtggagaacaaggccatccgcggcgacgaggccggcctggtgtacaacgcgctgctggagcgcgtggcccgctacaacagcaccaacgtgcagaccaacctggaccgcatggtgaccgacgtgcgcgaggccgtggcccagcgcgagcggttccaccgcgagtccaacctgggatccatggtggcgctgaacgccttcctcagcacccagcccgccaacgtgccccggggccaggaggactacaccaacttcatcagcgccctgcgcctgatggtgaccgaggtgccccagagcgaggtgtaccagtccgggccggactacttcttccagaccagtcgccagggcttgcagaccgtgaacctgagccaggctttcaagaacttgcagggcctgtggggcgtgcaggccccggtcggggaccgcgcgacggtgtcgagcctgctgacgccgaactcgcgcctgctgctgctgctggtggcccccttcacggacagcggcagcatcaaccgcaactcgtacctgggctacctgattaacctgtaccgcgaggccatcggccaggcgcacgtggacgagcagacctaccaggagatcacccacgtgagccgcgccctgggccaggacgacccgggcaacctggaagccaccctgaactttttgctgaccaaccggtcgcagaagatcccgccccagtacgcgctcagcaccgaggaggagcgcatcctgcgttacgtgcagcagagcgtgggcctgttcctgatgcaggagggggccacccccagcgccgcgctcgacatgaccgcgcgcaacatggagcccagcatgtacgccagcaaccgcccgttcatcaataaactgatggactacttgcatcgggcggccgccatgaactctgactatttcaccaacgccatcctgaatccccactggctcccgccgccggggttctacacgggcgagtacgacatgcccgaccccaatgacgggttcctgtgggacgatgtggacagcagcgtgttctccccccgaccgggtgctaacgagcgccccttgtggaagaaggaaggcagcgaccgacgcccgtcctcggcgctgtccggccgcgagggtgctgccgcggcggtgcccgaggccgccagtcctttcccgagcttgcccttctcgctgaacagtatccgcagcagcgagctgggcaggatcacgcgcccgcgcttgctgggcgaagaggagtacttgaatgactcgctgttgagacccgagcgggagaagaacttccccaataacgggatagaaagcctggtggacaagatgagccgctggaagacgtatgcgcaggagcacagggacgatccccgggcgtcgcagggggccacgagccggggcagcgccgcccgtaaacgccggtggcacgacaggcagcggggacagatgtgggacgatgaggactccgccgacgacagcagcgtgttggacttgggtgggagtggtaacccgttcgctcacctgcgcccccgtatcgggcgcatgatgtaagagaaaccgaaaataaatgatactcaccaaggccatggcgaccagcgtgcgttcgtttcttctctgttgttgttgtatctagtatgatgaggcgtgcgtacccggagggtcctcctccctcgtacgagagcgtgatgcagcaggcgatggcggcggcggcgatgcagcccccgctggaggctccttacgtgcccccgcggtacctggcgcctacggaggggcggaacagcattcgttactcggagctggcacccttgtacgataccacccggttgtacctggtggacaacaagtcggcggacatcgcctcgctgaactaccagaacgaccacagcaacttcctgaccaccgtggtgcagaacaatgacttcacccccacggaggccagcacccagaccatcaactttgacgagcgctcgcggtggggcggccagctgaaaaccatcatgcacaccaacatgcccaacgtgaacgagttcatgtacagcaacaagttcaaggcgcgggtgatggtctcccgcaagacccccaatggggtgacagtgacagaggattatgatggtagtcaggatgagctgaagtatgaatgggtggaatttgagctgcccgaaggcaacttctcggtgaccatgaccatcgacctgatgaacaacgccatcatcgacaattacttggcggtggggcggcagaacggggtgctggagagcgacatcggcgtgaagttcgacactaggaacttcaggctgggctgggaccccgtgaccgagctggtcatgcccggggtgtacaccaacgaggctttccatcccgatattgtcttgctgcccggctgcggggtggacttcaccgagagccgcctcagcaacctgctgggcattcgcaagaggcagcccttccaggaaggcttccagatcatgtacgaggatctggaggggggcaacatccccgcgctcctggatgtcgacgcctatgagaaaagcaaggaggatgcagcagctgaagcaactgcagccgtagctaccgcctctaccgaggtcaggggcgataattttgcaagcgccgcagcagtggcagcggccgaggcggctgaaaccgaaagtaagatagtcattcagccggtggagaaggatagcaagaacaggagctacaacgtactaccggacaagataaacaccgcctaccgcagctggtacctagcctacaactatggcgaccccgagaagggcgtgcgctcctggacgctgctcaccacctcggacgtcacctgcggcgtggagcaagtctactggtcgctgcccgacatgatgcaagacccggtcaccttccgctccacgcgtcaagttagcaactacccggtggtgggcgccgagctcctgcccgtctactccaagagcttcttcaacgagcaggccgtctactcgcagcagctgcgcgccttcacctcgcttacgcacgtcttcaaccgcttccccgagaaccagatcctcgtccgcccgcccgcgcccaccattaccaccgtcagtgaaaacgttcctgctctcacagatcacgggaccctgccgctgcgcagcagtatccggggagtccagcgcgtgaccgttactgacgccagacgccgcacctgcccctacgtctacaaggccctgggcatagtcgcgccgcgcgtcctctcgagccgcaccttctaaatgtccattctcatctcgcccagtaataacaccggttggggcctgcgcgcgcccagcaagatgtacggaggcgctcgccaacgctccacgcaacaccccgtgcgcgtgcgcgggcacttccgcgctccctggggcgccctcaagggccgcgtgcggtcgcgcaccaccgtcgacgacgtgatcgaccaggtggtggccgacgcgcgcaactacacccccgccgccgcgcccgtctccaccgtggacgccgtcatcgacagcgtggtggccgacgcgcgccggtacgcccgcgccaagagccggcggcggcgcatcgcccggcggcaccggagcacccccgccatgcgcgcggcgcgagccttgctgcgcagggccaggcgcacgggacgcagggccatgctcagggcggccagacgcgcggcttcaggcgccagcgccggcaggacccggagacgcgcggccacggcggcggcagcggccatcgccagcatgtcccgcccgcggcgagggaacgtgtactgggtgcgcgacgccgccaccggtgtgcgcgtgcccgtgcgcacccgcccccctcgcacttgaagatgttcacttcgcgatgttgatgtgtcccagcggcgaggaggatgtccaagcgcaaattcaaggaagagatgctccaggtcatcgcgcctgagatctacggccctgcggtggtgaaggaggaaagaaagccccgcaaaatcaagcgggtcaaaaaggacaaaaaggaagaagaaagtgatgtggacggattggtggagtttgtgcgcgagttcgccccccggcggcgcgtgcagtggcgcgggcggaaggtgcaaccggtgctgagacccggcaccaccgtggtcttcacgcccggcgagcgctccggcaccgcttccaagcgctcctacgacgaggtgtacggggatgatgatattctggagcaggcggccgagcgcctgggcgagtttgcttacggcaagcgcagccgttccgcaccgaaggaagaggcggtgtccatcccgctggaccacggcaaccccacgccgagcctcaagcccgtgaccttgcagcaggtgctgccgaccgcggcgccgcgccgggggttcaagcgcgagggcgaggatctgtaccccaccatgcagctgatggtgcccaagcgccagaagctggaagacgtgctggagaccatgaaggtggacccggacgtgcagcccgaggtcaaggtgcggcccatcaagcaggtggccccgggcctgggcgtgcagaccgtggacatcaagattcccacggagcccatggaaacgcagaccgagcccatgatcaagcccagcaccagcaccatggaggtgcagacggatccctggatgccatcggctcctagtcgaagaccccggcgcaagtacggcgcggccagcctgctgatgcccaactacgcgctgcatccttccatcatccccacgccgggctaccgcggcacgcgcttctaccgcggtcataccagcagccgccgccgcaagaccaccactcgccgccgccgtcgccgcaccgccgctgcaaccacccctgccgccctggtgcggagagtgtaccgccgcggccgcgcacctctgaccctgccgcgcgcgcgctaccacccgagcatcgccatttaaactttcgcctgctttgcagatcaatggccctcacatgccgccttcgcgttcccattacgggctaccgaggaagaaaaccgcgccgtagaaggctggcggggaacgggatgcgtcgccaccaccaccggcggcggcgcgccatcagcaagcggttggggggaggcttcctgcccgcgctgatccccatcatcgccgcggcgatcggggcgatccccggcattgcttccgtggcggtgcaggcctctcagcgccactgagacacacttggaaacatcttgtaataaaccaatggactctgacgctcctggtcctgtgatgtgttttcgtagacagatggaagacatcaatttttcgtccctggctccgcgacacggcacgcggccgttcatgggcacctggagcgacatcggcaccagccaactgaacgggggcgccttcaattggagcagtctctggagcgggcttaagaatttcgggtccacgcttaaaacctatggcagcaaggcgtggaacagcaccacagggcaggcgctgagggataagctgaaagagcagaacttccagcagaaggtggtcgatgggctcgcctcgggcatcaacggggtggtggacctggccaaccaggccgtgcagcggcagatcaacagccgcctggacccggtgccgcccgccggctccgtggagatgccgcaggtggaggaggagctgcctcccctggacaagcggggcgagaagcgaccccgccccgatgcggaggagacgctgctgacgcacacggacgagccgcccccgtacgaggaggcggtgaaactgggtctgcccaccacgcggcccatcgcgcccctggccaccggggtgctgaaacccgaaaagcccgcgaccctggacttgcctcctccccagccttcccgcccctctacagtggctaagcccctgccgccggtggccgtggcccgcgcgcgacccgggggcaccgcccgccctcatgcgaactggcagagcactctgaacagcatcgtgggtctgggagtgcagagtgtgaagcgccgccgctgctattaaacctaccgtagcgcttaacttgcttgtctgtgtgtgtatgtattatgtcgccgccgccgctgtccaccagaaggaggagtgaagaggcgcgtcgccgagttgcaagatggccaccccatcgatgctgccccagtgggcgtacatgcacatcgccggacaggacgcttcggagtacctgagtccgggtctggtgcagtttgcccgcgccacagacacctacttcagtctggggaacaagtttaggaaccccacggtggcgcccacgcacgatgtgaccaccgaccgcagccagcggctgacgctgcgcttcgtgcccgtggaccgcgaggacaacacctactcgtacaaagtgcgctacacgctggccgtgggcgacaaccgcgtgctggacatggccagcacctactttgacatccgcggcgtgctggatcggggccctagcttcaaaccctactccggcaccgcctacaacagtctggcccccaagggagcacccaacacttgtcagtggacatataaagccgatggtgaaactgccacagaaaaaacctatacatatggaaatgcacccgtgcagggcattaacatcacaaaagatggtattcaacttggaactgacaccgatgatcagccaatctacgcagataaaacctatcagcctgaacctcaagtgggtgatgctgaatggcatgacatcactggtactgatgaaaagtatggaggcagagctcttaagcctgataccaaaatgaagccttgttatggttcttttgccaagcctactaataaagaaggaggtcaggcaaatgtgaaaacaggaacaggcactactaaagaatatgacatagacatggctttctttgacaacagaagtgcggctgctgctggcctagctccagaaattgttttgtatactgaaaatgtggatttggaaactccagatacccatattgtatacaaagcaggcacagatgacagcagctcttctattaatttgggtcagcaagccatgcccaacagacctaactacattggtttcagagacaactttatcgggctcatgtactacaacagcactggcaatatgggggtgctggccggtcaggcttctcagctgaatgctgtggttgacttgcaagacagaaacaccgagctgtcctaccagctcttgcttgactctctgggtgacagaacccggtatttcagtatgtggaatcaggcggtggacagctatgatcctgatgtgcgcattattgaaaatcatggtgtggaggatgaacttcccaactattgtttccctctggatgctgttggcagaacagatacttatcagggaattaaggctaatggaactgatcaaaccacatggaccaaagatgacagtgtcaatgatgctaatgagataggcaagggtaatccattcgccatggaaatcaacatccaagccaacctgtggaggaacttcctctacgccaacgtggccctgtacctgcccgactcttacaagtacacgccggccaatgttaccctgcccaccaacaccaacacctacgattacatgaacggccgggtggtggcgccctcgctggtggactcctacatcaacatcggggcgcgctggtcgctggatcccatggacaacgtgaaccccttcaaccaccaccgcaatgcggggctgcgctaccgctccatgctcctgggcaacgggcgctacgtgcccttccacatccaggtgccccagaaatttttcgccatcaagagcctcctgctcctgcccgggtcctacacctacgagtggaacttccgcaaggacgtcaacatgatcctgcagagctccctcggcaacgacctgcgcacggacggggcctccatctccttcaccagcatcaacctctacgccaccttcttccccatggcgcacaacacggcctccacgctcgaggccatgctgcgcaacgacaccaacgaccagtccttcaacgactacctctcggcggccaacatgctctaccccatcccggccaacgccaccaacgtgcccatctccatcccctcgcgcaactgggccgccttccgcggctggtccttcacgcgtctcaagaccaaggagacgccctcgctgggctccgggttcgacccctacttcgtctactcgggctccatcccctacctcgacggcaccttctacctcaaccacaccttcaagaaggtctccatcaccttcgactcctccgtcagctggcccggcaacgaccggctcctgacgcccaacgagttcgaaatcaagcgcaccgtcgacggcgagggctacaacgtggcccagtgcaacatgaccaaggactggttcctggtccagatgctggcccactacaacatcggctaccagggcttctacgtgcccgagggctacaaggaccgcatgtactccttcttccgcaacttccagcccatgagccgccaggtggtggacgaggtcaactacaaggactaccaggccgtcaccctggcctaccagcacaacaactcgggcttcgtcggctacctcgcgcccaccatgcgccagggccagccctaccccgccaactacccctacccgctcatcggcaagagcgccgtcaccagcgtcacccagaaaaagttcctctgcgacagggtcatgtggcgcatccccttctccagcaacttcatgtccatgggcgcgctcaccgacctcggccagaacatgctctatgccaactccgcccacgcgctagacatgaatttcgaagtcgaccccatggatgagtccacccttctctatgttgtcttcgaagtcttcgacgtcgtccgagtgcaccagccccaccgcggcgtcatcgaggccgtctacctgcgcacccccttctcggccggtaacgccaccacctaagctcttgcttcttgcaagccatggccgcgggctccggcgagcaggagctcagggccatcatccgcgacctgggctgcgggccctacttcctgggcaccttcgataagcgcttcccgggattcatggccccgcacaagctggcctgcgccatcgtcaacacggccggccgcgagaccgggggcgagcactggctggccttcgcctggaacccgcgctcgaacacctgctacctcttcgaccccttcgggttctcggacgagcgcctcaagcagatctaccagttcgagtacgagggcctgctgcgccgcagcgccctggccaccgaggaccgctgcgtcaccctggaaaagtccacccagaccgtgcagggtccgcgctcggccgcctgcgggctcttctgctgcatgttcctgcacgccttcgtgcactggcccgaccgccccatggacaagaaccccaccatgaacttgctgacgggggtgcccaacggcatgctccagtcgccccaggtggaacccaccctgcgccgcaaccaggaggcgctctaccgcttcctcaactcccactccgcctactttcgctcccaccgcgcgcgcatcgagaaggccaccgccttcgaccgcatgaatcaagacatgtaaaccgtgtgtgtatgttaaatgtctttaataaacagcactttcatgttacacatgcatctgagatgatttatttagaaatcgaaagggttctgccgggtctcggcatggcccgcgggcagggacacgttgcggaactggtacttggccagccacttgaactcggggatcagcagtttgggcagcggggtgtcggggaaggagtcggtccacagcttccgcgtcagttgcagggcgcccagcaggtcgggcgcggagatcttgaaatcgcagttgggacccgcgttctgcgcgcgggagttgcggtacacggggttgcagcactggaacaccatcagggccgggtgcttcacgctcgccagcaccgtcgcgtcggtgatgctctccacgtcgaggtcctcggcgttggccatcccgaagggggtcatcttgcaggtctgccttcccatggtgggcacgcacccgggcttgtggttgcaatcgcagtgcagggggatcagcatcatctgggcctggtcggcgttcatccccgggtacatggccttcatgaaagcctccaattgcctgaacgcctgctgggccttggctccctcggtgaagaagaccccgcaggacttgctagagaactggttggtggcgcacccggcgtcgtgcacgcagcagcgcgcgtcgttgttggccagctgcaccacgctgcgcccccagcggttctgggtgatcttggcccggtcggggttctccttcagcgcgcgctgcccgttctcgctcgccacatccatctcgatcatgtgctccttctggatcatggtggtcccgtgcaggcaccgcagcttgccctcggcctcggtgcacccgtgcagccacagcgcgcacccggtgcactcccagttcttgtgggcgatctgggaatgcgcgtgcacgaagccctgcaggaagcggcccatcatggtggtcagggtcttgttgctagtgaaggtcagcggaatgccgcggtgctcctcgttgatgtacaggtggcagatgcggcggtacacctcgccctgctcgggcatcagctggaagttggctttcaggtcggtctccacgcggtagcggtccatcagcatagtcatgatttccatacccttctcccaggccgagacgatgggcaggctcatagggttcttcaccatcatcttagcgctagcagccgcggccagggggtcgctctcgtccagggtctcaaagctccgcttgccgtccttctcggtgatccgcaccggggggtagctgaagcccacggccgccagctcctcctcggcctgtctttcgtcctcgctgtcctggctgacgtcctgcaggaccacatgcttggtcttgcggggtttcttcttgggcggcagcggcggcggagatgttggagatggcgagggggagcgcgagttctcgctcaccactactatctcttcctcttcttggtccgaggccacgcggcggtaggtatgtctcttcgggggcagaggcggaggcgacgggctctcgccgccgcgacttggcggatggctggcagagccccttccgcgttcgggggtgcgctcccggcggcgctctgactgacttcctccgcggccggccattgtgttctcctagggaggaacaacaagcatggagactcagccatcgccaacctcgccatctgcccccaccgccgacgagaagcagcagcagcagaatgaaagcttaaccgccccgccgcccagccccgccacctccgacgcggccgtcccagacatgcaagagatggaggaatccatcgagattgacctgggctatgtgacgcccgcggagcacgaggaggagctggcagtgcgcttttcacaagaagagatacaccaagaacagccagagcaggaagcagagaatgagcagagtcaggctgggctcgagcatgacggcgactacctccacctgagcgggggggaggacgcgctcatcaagcatctggcccggcaggccaccatcgtcaaggatgcgctgctcgaccgcaccgaggtgcccctcagcgtggaggagctcagccgcgcctacgagttgaacctcttctcgccgcgcgtgccccccaagcgccagcccaatggcacctgcgagcccaacccgcgcctcaacttctacccggtcttcgcggtgcccgaggccctggccacctaccacatctttttcaagaaccaaaagatccccgtctcctgccgcgccaaccgcacccgcgccgacgcccttttcaacctgggtcccggcgcccgcctacctgatatcgcctccttggaagaggttcccaagatcttcgagggtctgggcagcgacgagactcgggccgcgaacgctctgcaaggagaaggaggagagcatgagcaccacagcgccctggtcgagttggaaggcgacaacgcgcggctggcggtgctcaaacgcacggtcgagctgacccatttcgcctacccggctctgaacctgccccccaaagtcatgagcgcggtcatggaccaggtgctcatcaagcgcgcgtcgcccatctccgaggacgagggcatgcaagactccgaggagggcaagcccgtggtcagcgacgagcagctggcccggtggctgggtcctaatgctagtccccagagtttggaagagcggcgcaaactcatgatggccgtggtcctggtgaccgtggagctggagtgcctgcgccgcttcttcgccgacgcggagaccctgcgcaaggtcgaggagaacctgcactacctcttcaggcacgggttcgtgcgccaggcctgcaagatctccaacgtggagctgaccaacctggtctcctacatgggcatcttgcacgagaaccgcctggggcagaacgtgctgcacaccaccctgcgcggggaggcccggcgcgactacatccgcgactgcgtctacctctacctctgccacacctggcagacgggcatgggcgtgtggcagcagtgtctggaggagcagaacctgaaagagctctgcaagctcctgcagaagaacctcaagggtctgtggaccgggttcgacgagcgcaccaccgcctcggacctggccgacctcattttccccgagcgcctcaggctgacgctgcgcaacggcctgcccgactttatgagccaaagcatgttgcaaaactttcgctctttcatcctcgaacgctccggaatcctgcccgccacctgctccgcgctgccctcggacttcgtgccgctgaccttccgcgagtgccccccgccgctgtggagccactgctacctgctgcgcctggccaactacctggcctaccactcggacgtgatcgaggacgtcagcggcgagggcctgctcgagtgccactgccgctgcaacctctgcacgccgcaccgctccctggcctgcaacccccagctgctgagcgagacccagatcatcggcaccttcgagttgcaagggcccagcgaaggcgagggttcagccgccaaggggggtctgaaactcaccccggggctgtggacctcggcctacttgcgcaagttcgtgcccgaggactaccatcccttcgagatcaggttctacgaggaccaatcccatccgcccaaggccgagctgtcggcctgcgtcatcacccagggggcgatcctggcccaattgcaagccatccagaaatcccgccaagaattcttgctgaaaaagggccgcggggtctacctcgacccccagaccggtgaggagctcaaccccggcttcccccaggatgccccgaggaaacaagaagctgaaagtggagctgccgcccgtggaggatttggaggaagactgggagaacagcagtcaggcagaggaggaggagatggaggaagactgggacagcactcaggcagaggaggacagcctgcaagacagtctggaggaagacgaggaggaggcagaggaggaggtggaagaagcagccgccgccagaccgtcgtcctcggcgggggagaaagcaagcagcacggataccatctccgctccgggtcggggtcccgctcgaccacacagtagatgggacgagaccggacgattcccgaaccccaccacccagaccggtaagaaggagcggcagggatacaagtcctggcgggggcacaaaaacgccatcgtctcctgcttgcaggcctgcgggggcaacatctccttcacccggcgctacctgctcttccaccgcggggtgaactttccccgcaacatcttgcattactaccgtcacctccacagcccctactacttccaagaagaggcagcagcagcagaaaaagaccagcagaaaaccagcagctagaaaatccacagcggcggcagcaggtggactgaggatcgcggcgaacgagccggcgcaaacccgggagctgaggaaccggatctttcccaccctctatgccatcttccagcagagtcgggggcaggagcaggaactgaaagtcaagaaccgttctctgcgctcgctcacccgcagttgtctgtatcacaagagcgaagaccaacttcagcgcactctcgaggacgccgaggctctcttcaacaagtactgcgcgctcactcttaaagagtagcccgcgcccgcccagtcgcagaaaaaggcgggaattacgtcacctgtgcccttcgccctagccgcctccacccatcatcatgagcaaagagattcccacgccttacatgtggagctaccagccccagatgggcctggccgccggtgccgcccaggactactccacccgcatgaattggctcagcgccgggcccgcgatgatctcacgggtgaatgacatccgcgcccaccgaaaccagatactcctagaacagtcagcgctcaccgccacgccccgcaatcacctcaatccgcgtaattggcccgccgccctggtgtaccaggaaattccccagcccacgaccgtactacttccgcgagacgcccaggccgaagtccagctgactaactcaggtgtccagctggcgggcggcgccaccctgtgtcgtcaccgccccgctcagggtataaagcggctggtgatccggggcagaggcacacagctcaacgacgaggtggtgagctcttcgctgggtctgcgacctgacggagtcttccaactcgccggatcggggagatcttccttcacgcctcgtcaggccgtcctgactttggagagttcgtcctcgcagccccgctcgggtggcatcggcactctccagttcgtggaggagttcactccctcggtctacttcaaccccttctccggctcccccggccactacccggacgagttcatcccgaacttcgacgccatcagcgagtcggtggacggctacgattgaatgtcccatggtggcgcagctgacctagctcggcttcgacacctggaccactgccgccgcttccgctgcttcgctcgggatctcgccgagtttgcctactttgagctgcccgaggagcaccctcagggcccggcccacggagtgcggatcgtcgtcgaagggggcctcgactcccacctgcttcggatcttcagccagcgtccgatcctggtcgagcgcgagcaaggacagacccttctgactctgtactgcatctgcaaccaccccggcctgcatgaaagtctttgttgtctgctgtgtactgagtataataaaagctgagatcagcgactactccggacttccgtgtgttcctgaatccatcaaccagtctttgttcttcaccgggaacgagaccgagctccagctccagtgtaagccccacaagaagtacctcacctggctgttccagggctccccgatcgccgttgtcaaccactgcgacaacgacggagtcctgctgagcggccctgccaaccttactttttccacccgcagaagcaagctccagctcttccaacccttcctccccgggacctatcagtgcgtctcgggaccctgccatcacaccttccacctgatcccgaataccacagcgtcgctccccgctactaacaaccaaactaacctccaccaacgccaccgtcgcgacggccacaatacatgcccatattagactatgaggccgagccacagcgacccatgctccccgctattagttacttcaatctaaccggcggagatgactgacccactggccaacaacaacgtcaacgaccttctcctggacatggacggccgcgcctcggagcagcgactcgcccaacttcgcattcgccagcagcaggagagagccgtcaaggagctgcaggatgcggtggccatccaccagtgcaagagaggcatcttctgcctggtgaaacaggccaagatctcctacgaggtcactccaaacgaccatcgcctctcctacgagctcctgcagcagcgccagaagttcacctgcctggtcggagtcaaccccatcgtcatcacccagcagtctggcgataccaaggggtgcatccactgctcctgcgactcccccgactgcgtccacactctgatcaagaccctctgcggcctccgcgacctcctccccatgaactaatcacccccttatccagtgaaataaagatcatattgatgatgattttacagaaataaaaaataatcatttgatttgaaataaagatacaatcatattgatgatttgagtttaacaaaaaaataaagaatcacttacttgaaatctgataccaggtctctgtccatgttttctgccaacaccacttcactcccctcttcccagctctggtactgcaggccccggcgggctgcaaacttcctccacacgctgaaggggatgtcaaattcctcctgtccctcaatcttcattttatcttctatcagatgtccaaaaagcgcgtccgggtggatgatgacttcgaccccgtctacccctacgatgcagacaacgcaccgaccgtgcccttcatcaacccccccttcgtctcttcagatggattccaagagaagcccctgggggtgttgtccctgcgactggccgaccccgtcaccaccaagaacggggaaatcaccctcaagctgggagagggggtggacctcgattcctcgggaaaactcatctccaacacggccaccaaggccgccgcccctctcagtttttccaacaacaccatttcccttaacatggatcaccccttttacactaaagatggaaaattatccttacaagtttctccaccattaaatatactgagaacaagcattctaaacacactagctttaggttttggatcaggtttaggactccgtggctctgccttggcagtacagttagtctctccacttacatttgatactgatggaaacataaagcttaccttagacagaggtttgcatgttacaacaggagatgcaattgaaagcaacataagctgggctaaaggtttaaaatttgaagatggagccatagcaaccaacattggaaatgggttagagtttggaagcagtagtacagaaacaggtgttgatgatgcttacccaatccaagttaaacttggatctggccttagctttgacagtacaggagccataatggctggtaacaaagaagacgataaactcactttgtggacaacacctgatccatcaccaaactgtcaaatactcgcagaaaatgatgcaaaactaacactttgcttgactaaatgtggtagtcaaatactggccactgtgtcagtcttagttgtaggaagtggaaacctaaaccccattactggcaccgtaagcagtgctcaggtgtttctacgttttgatgcaaacggtgttcttttaacagaacattctacactaaaaaaatactgggggtataggcagggagatagcatagatggcactccatataccaatgctgtaggattcatgcccaatttaaaagcttatccaaagtcacaaagttctactactaaaaataatatagtagggcaagtatacatgaatggagatgtttcaaaacctatgcttctcactataaccctcaatggtactgatgacagcaacagtacatattcaatgtcattttcatacacctggactaatggaagctatgttggagcaacatttggggctaactcttataccttctcatacatcgcccaagaatgaacactgtatcccaccctgcatgccaacccttcccaccccactctgtggaacaaactctgaaacacaaaataaaataaagttcaagtgttttattgattcaacagttttacaggattcgagcagttatttttcctccaccctcccaggacatggaatacaccaccctctccccccgcacagccttgaacatctgaatgccattggtgatggacatgcttttggtctccacgttccacacagtttcagagcgagccagtctcgggtcggtcagggagatgaaaccctccgggcactcccgcatctgcacctcacagctcaacagctgaggattgtcctcggtggtcgggatcacggttatctggaagaagcagaagagcggcggtgggaatcatagtccgcgaacgggatcggccggtggtgtcgcatcaggccccgcagcagtcgctgccgccgccgctccgtcaagctgctgctcagggggtccgggtccagggactccctcagcatgatgcccacggccctcagcatcagtcgtctggtgcggcgggcgcagcagcgcatgcggatctcgctcaggtcgctgcagtacgtgcaacacagaaccaccaggttgttcaacagtccatagttcaacacgctccagccgaaactcatcgcgggaaggatgctacccacgtggccgtcgtaccagatcctcaggtaaatcaagtggtgccccctccagaacacgctgcccacgtacatgatctccttgggcatgtggcggttcaccacctcccggtaccacatcaccctctggttgaacatgcagccccggatgatcctgcggaaccacagggccagcaccgccccgcccgccatgcagcgaagagaccccgggtcccggcaatggcaatggaggacccaccgctcgtacccgtggatcatctgggagctgaacaagtctatgttggcacagcacaggcatatgctcatgcatctcttcagcactctcaactcctcgggggtcaaaaccatatcccagggcacggggaactcttgcaggacagcgaaccccgcagaacagggcaatcctcgcacagaacttacattgtgcatggacagggtatcgcaatcaggcagcaccgggtgatcctccaccagagaagcgcgggtctcggtctcctcacagcgtggtaagggggccggccgatacgggtgatggcgggacgcggctgatcgtgttcgcgaccgtgtcatgatgcagttgctttcggacattttcgtacttgctgtagcagaacctggtccgggcgctgcacaccgatcgccggcggcggtctcggcgcttggaacgctcggtgttgaaattgtaaaacagccactctctcagaccgtgcagcagatctagggcctcaggagtgatgaagatcccatcatgcctgatggctctgatcacatcgaccaccgtggaatgggccagacccagccagatgatgcaattttgttgggtttcggtgacggcgggggagggaagaacaggaagaaccatgattaacttttaatccaaacggtctcggagtacttcaaaatgaagatcgcggagatggcacctctcgcccccgctgtgttggtggaaaataacagccaggtcaaaggtgatacggttctcgagatgttccacggtggcttccagcaaagcctccacgcgcacatccagaaacaagacaatagcgaaagcgggagggttctctaattcctcaatcatcatgttacactcctgcaccatccccagataattttcatttttccagccttgaatgattcgaactagttcgtgaggtaaatccaagccagccatgataaagagctcgcgcagagcgccctccaccggcattcttaagcacaccctcataattccaagatattctgctcctggttcacctgcagcagattgacaagcggaatatcaaaatctctgccgcgatccctgagctcctccctcagcaataactgtaagtactctttcatatcctctccgaaatttttagccataggaccaccaggaataagattagggcaagccacagtacagataaaccgaagtcctccccagtgagcattgccaaatgcaagactgctataagcatgctggctagacccggtgatatcttccagataactggacagaaaatcgcccaggcaatttttaagaaaatcaacaaaagaaaaatcctccaggtggacgtttagagcctcgggaacaacgatgaagtaaatgcaagcggtgcgttccagcatggttagttagctgatctgtagaaaaaacaaaaatgaacattaaaccatgctagcctggcgaacaggtgggtaaatcgttctctccagcaccaggcaggccacggggtctccggcgcgaccctcgtaaaaattgtcgctatgattgaaaaccatcacagagagacgttcccggtggccggcgtgaatgattcgacaagatgaatacacccccggaacattggcgtccgcgagtgaaaaaaagcgcccgaggaagcaataaggcactacaatgctcagtctcaagtccagcaaagcgatgccatgcggatgaagcacaaaattctcaggtgcgtacaaaatgtaattactcccctcctgcacaggcagcaaagcccccgatccctccaggtacacatacaaagcctcagcgtccatagcttaccgagcagcagcacacaacaggcgcaagagtcagagaaaggctgagctctaacctgtccacccgctctctgctcaatatatagcccagatctacactgacgtaaaggccaaagtctaaaaatacccgccaaataatcacacacgcccagcacacgcccagaaaccggtgacacactcaaaaaaatacgcgcacttcctcaaacgcccaaaactgccgtcatttccgggttcccacgctacgtcatcaaaacacgactttcaaattccgtcgaccgttaaaaacgtcacccgccccgcccctaacggtcgcccgtctctcagccaatcagcgccccgcatccccaaattcaaacacctcatttgcatattaacgcgcacaaaaagtttgaggtatattattgatgatgg

SEQ ID NO: 12 - DNA, 32788 bp, synthetic construct
  source 1..32788: mol_type = other DNA
ccatcttcaataatatacctcaaactttttgtgcgcgttaatatgcaaatgaggcgtttgaatttggggaggaagggcggtgattggtcgagggatgagcgaccgttaggggcggggcgagtgacgttttgatgacgtggttgcgaggaggagccagtttgcaagttctcgtgggaaaagtgacgtcaaacgaggtgtggtttgaacacggaaatactcaattttcccgcgctctctgacaggaaatgaggtgtttctgggcggatgcaagtgaaaacgggccattttcgcgcgaaaactgaatgaggaagtgaaaatctgagtaatttcgcgtttatggcagggaggagtatttgccgagggccgagtagactttgaccgattacgtgggggtttcgattaccgtgtttttcacctaaatttccgcgtacggtgtcaaagtccggtgtttttacgtaggtgtcagctgatcgccagggtatttaaacctgcgctctccagtcaagaggccactcttgagtgccagcgagaagagttttctcctccgcgccgcgagtcagatctacactttgaaagtagggataacagggtaatgacattgattattgactagttgttaatagtaatcaattacggggtcattagttcatagcccatatatggagttccgcgttacataacttacggtaaatggcccgcctggctgaccgcccaacgacccccgcccattgacgtcaataatgacgtatgttcccatagtaacgccaatagggactttccattgacgtcaatgggtggagtatttacggtaaactgcccacttggcagtacatcaagtgtatcatatgccaagtccgccccctattgacgtcaatgacggtaaatggcccgcctggcattatgcccagtacatgaccttacgggactttcctacttggcagtacatctacgtattagtcatcgctattaccatggtgatgcggttttggcagtacaccaatgggcgtggatagcggtttgactcacggggatttccaagtctccaccccattgacgtcaatgggagtttgttttggcaccaaaatcaacgggactttccaaaatgtcgtaataaccccgccccgttgacgcaaatgggcggtaggcgtgtacggtgggaggtctatataagcagagctcgtttagtgaaccgtcagatcgcctggaacgccatccacgctgttttgacctccatagaagacagcgatcgcgccaccatggccgggatgttccaggcactgtccgaaggctgcacaccctatgatattaaccagatgctgaatgtcctgggagaccaccaggtctctggcctggagcagctggagagcatcatcaacttcgagaagctgaccgagtggacaagctccaatgtgatgcctatcctgtccccactgaccaagggcatcctgggcttcgtgtttaccctgacagtgccttctgagcggggcctgtcttgcatcagcgaggcagacgcaaccacaccagagtccgccaatctgggcgaggagatcctgtctcagctgtacctgtggccccgggtgacatatcactccccttcttacgcctatcaccagttcgagcggagagccaagtacaagagacacttcccaggctttggccagtctctgctgttcggctaccccgtgtacgtgttcggcgattgcgtgcagggcgactgggatgccatccggtttagatactgcgcaccacctggatatgcactgctgaggtgtaacgacaccaattattccgccctgctggcagtgggcgccctggagggccctcgcaatcaggattggctgggcgtgccaaggcagctggtgacacgcatgcaggccatccagaacgcaggcctgtgcaccctggtggcaatgctggaggagacaatcttctggctgcaggcctttctgatggccctgaccgacagcggccccaagacaaacatcatcgtggattcccagtacgtgatgggcatctccaagccttctttccaggagtttgtggactgggagaacgtgagcccagagctgaattccaccgatcagccattctggcaggcaggaatcctggcaaggaacctggtgcctatggtggccacagtgcagggccagaatctgaagtaccagggccagagcctggtcatcagcgcctccatcatcgtgtttaacctgctggagctggagggcgactatcgggacgatggcaacgtgtgggtgcacaccccactgagccccagaacactgaacgcctgggtgaaggccgtggaggagaagaagggcatcccagtgcacctggagctggcctccatgaccaatatggagctgatgtctagcatcgtgcaccagcaggtgaggacatacggacccgtgttcatgtgcctgggaggcctgctgaccatggtggcaggagccgtgtggctgacagtgcgggtgctggagctgttcagagccgcccagctggccaacgatgtggtgctgcagatcatggagctgtgcggagcagcctttcgccaggtgtgccacaccacagtgccatggcccaatgcctccctgacccccaagtggaacaatgagacaacacagcctcagatcgccaactgtagcgtgtacgacttcttcgtgtggctgcactactatagcgtgagggataccctgtggccccgcgtgacataccacatgaataagtacgcctatcacatgctggagaggcgcgccaagtataagagaggccctggcccaggcgcaaagtttgtggcagcatggaccctgaaggccgccgccggccccggccccggccagtatatcaaggctaacagtaagttcattggaatcacagagctgggacccggacctggataatgagtttaaactcccatttaaatgtgagggttaatgcttcgagcagacatgataagatacattgatgagtttggacaaaccacaactagaatgcagtgaaaaaaatgctttatttgtgaaatttgtgatgctattgctttatttgtaaccattataagctgcaataaacaagttaacaacaacaattgcattcattttatgtttcaggttcagggggagatgtgggaggttttttaaagcaagtaaaacctctacaaatgtggtaaaataactataacggtcctaaggtagcgagtgagtagtgttctggggcgggggaggacctgcatgagggccagaataactgaaatctgtgcttttctgtgtgttgcagcagcatgagcggaagcggctcctttgagggaggggtattcagcccttatctgacggggcgtctcccctcctgggcgggagtgcgtcagaatgtgatgggatccacggtggacggccggcccgtgcagcccgcgaactcttcaaccctgacctatgcaaccctgagctcttcgtcgttggacgcagctgccgccgcagctgctgcatctgccgccagcgccgtgcgcggaatggccatgggcgccggctactacggcactctggtggccaactcgagttccaccaataatcccgccagcctgaacgaggagaagctgttgctgctgatggcccagctcgaggccttgacccagcgcctgggcgagctgacccagcaggtggctcagctgcaggagcagacgcgggccgcggttgccacggtgaaatccaaataaaaaatgaatcaataaataaacggagacggttgttgattttaacacagagtctgaatctttatttgatttttcgcgcgcggtaggccctggaccaccggtctcgatcattgagcacccggtggatcttttccaggacccggtagaggtgggcttggatgttgaggtacatgggcatgagcccgtcccgggggtggaggtagctccattgcagggcctcgtgctcgggggtggtgttgtaaatcacccagtcatagcaggggcgcagggcatggtgttgcacaatatctttgaggaggagactgatggccacgggcagccctttggtgtaggtgtttacaaatctgttgagctgggagggatgcatgcggggggagatgaggtgcatcttggcctggatcttgagattggcgatgttaccgcccagatcccgcctggggttcatgttgtgcaggaccaccagcacggtgtatccggtgcacttggggaatttatcatgcaacttggaagggaaggcgtgaaagaatttggcgacgcctttgtgcccgcccaggttttccatgcactcatccatgatgatggcgatgggcccgtgggcggcggcctgggcaaagacgtttcgggggtcggacacatcatagttgtggtcctgggtgaggtcatcataggccattttaatgaatttggggcggagggtgccggactgggggacaaaggtaccctcgatcccgggggcgtagttcccctcacagatctgcatctcccaggctttgagctcggagggggggatcatgtccacctgcggggcgataaagaacacggtttccggggcgggggagatgagctgggccgaaagcaagttccggagcagctgggacttgccgcagccggtggggccgtagatgaccccgatgaccggctgcaggtggtagttgagggagagacagctgccgtcctcccggaggaggggggccacctcgttcatcatctcgcgcacgtgcatgttctcgcgcaccagttccgccaggaggcgctctccccccagggataggagctcctggagcgaggcgaagtttttcagcggcttgagtccgtcggccatgggcattttggagagggtttgttgcaagagttccaggcggtcccagagctcggtgatgtgctctacggcatctcgatccagcagacctcctcgtttcgcgggttgggacggctgcgggagtagggcaccagacgatgggcgtccagcgcagccagggtccggtccttccagggtcgcagcgtccgcgtcagggtggtctccgtcacggtgaaggggtgcgcgccgggctgggcgcttgcgagggtgcgcttcaggctcatccggctggtcgaaaaccgctcccgatcggcgccctgcgcgtcggccaggtagcaattgaccatgagttcgtagttgagcgcctcggccgcgtggcctttggcgcggagcttacctttggaagtctgcccgcaggcgggacagaggagggacttgagggcgtagagcttgggggcgaggaagacggactcgggggcgtaggcgtccgcgccgcagtgggcgcagacggtctcgcactccacgagccaggtgaggtcgggctggtcggggtcaaaaaccagtttcccgccgttctttttgatgcgtttcttacctttggtctccatgagctcgtgtccccgctgggtgacaaagaggctgtccgtgtccccgtagaccgactttatgggccggtcctcgagcggtgtgccgcggtcctcctcgtagaggaaccccgcccactccgagacgaaagcccgggtccaggccagcacgaaggaggccacgtgggacgggtagcggtcgttgtccaccagcgggtccaccttttccagggtatgcaaacacatgtccccctcgtccacatccaggaaggtgattggcttgtaagtgtaggccacgtgaccgggggtcccggccgggggggtataaaagggtgcgggtccctgctcgtcctcactgtcttccggatcgctgtccaggagcgccagctgttggggtaggtattccctctcgaaggcgggcatgacctcggcactcaggttgtcagtttctagaaacgaggaggatttgatattgacggtgccggcggagatgcctttcaagagcccctcgtccatctggtcagaaaagacgatctttttgttgtcgagcttggtggcgaaggagccgtagagggcgttggagaggagcttggcgatggagcgcatggtctggtttttttccttgtcggcgcgctccttggcggcgatgttgagctgcacgtactcgcgcgccacgcacttccattcggggaagacggtggtcagctcgtcgggcacgattctgacctgccagccccgattatgcagggtgatgaggtccacactggtggccacctcgccgcgcaggggctcattagtccagcagaggcgtccgcccttgcgcgagcagaaggggggcagggggtccagcatgacctcgtcgggggggtcggcatcgatggtgaagatgccgggcaggaggtcggggtcaaagtagctgatggaagtggccagatcgtccagggcagcttgccattcgcgcacggccagcgcgctctcgtagggactgaggggcgtgccccagggcatgggatgggtaagcgcggaggcgtacatgccgcagatgtcgtagacgtagaggggctcctcgaggatgccgatgtaggtggggtagcagcgccccccgcggatgctggcgcgcacgtagtcatacagctcgtgcgagggggcgaggagccccgggcccaggttggtgcgactgggcttttcggcgcggtagacgatctggcggaaaatggcatgcgagttggaggagatggtgggcctttggaagatgttgaagtgggcgtggggcagtccgaccgagtcgcggatgaagtgggcgtaggagtcttgcagcttggcgacgagctcggcggtgactaggacgtccagagcgcagtagtcgagggtctcctggatgatgtcatacttgagctgtcccttttgtttccacagctcgcggttgagaaggaactcttcgcggtccttccagtactcttcgagggggaacccgtcctgatctgcacggtaagagcctagcatgtagaactggttgacggccttgtaggcgcagcagcccttctccacggggagggcgtaggcctgggcggccttgcgcagggaggtgtgcgtgagggcgaaagtgtccctgaccatgaccttgaggaactggtgcttgaagtcgatatcgtcgcagcccccctgctcccagagctggaagtccgtgcgcttcttgtaggcggggttgggcaaagcgaaagtaacatcgttgaagaggatcttgcccgcgcggggcataaagttgcgagtgatgcggaaaggttggggcacctcggcccggttgttgatgacctgggcggcgagcacgatctcgtcgaagccgttgatgttgtggcccacgatgtagagttccacgaatcgcggacggcccttgacgtggggcagtttcttgagctcctcgtaggtgagctcgtcggggtcgctgagcccgtgctgctcgagcgcccagtcggcgagatgggggttggcgcggaggaaggaagtccagagatccacggccagggcggtttgcagacggtcccggtactgacggaactgctgcccgacggccattttttcgggggtgacgcagtagaaggtgcgggggtccccgtgccagcgatcccatttgagctggagggcgagatcgagggcgagctcgacgagccggtcgtccccggagagtttcatgaccagcatgaaggggacgagctgcttgccgaaggaccccatccaggtgtaggtttccacatcgtaggtgaggaagagcctttcggtgcgaggatgcgagccgatggggaagaactggatctcctgccaccaattggaggaatggctgttgatgtgatggaagtagaaatgccgacggcgcgccgaacactcgtgcttgtgtttatacaagcggccacagtgctcgcaacgctgcacgggatgcacgtgctgcacgagctgtacctgagttcctttgacgaggaatttcagtgggaagtggagtcgtggcgcctgcatctcgtgctgtactacgtcgtggtggtcggcctggccctcttctgcctcgatggtggtcatgctgacgagcccgcgcgggaggcaggtccagacctcggcgcgagcgggtcggagagcgaggacgagggcgcgcaggccggagctgtccagggtcctgagacgctgcggagtcaggtcagtgggcagcggcggcgcgcggttgacttgcaggagtttttccagggcgcgcgggaggtccagatggtacttgatctccaccgcgccattggtggcgacgtcgatggcttgcagggtcccgtgcccctggggtgtgaccaccgtcccccgtttcttcttgggcggctggggcgacgggggcggtgcctcttccatggttagaagcggcggcgaggacgcgcgccgggcggcaggggcggctcggggcccggaggcaggggcggcaggggcacgtcggcgccgcgcgcgggtaggttctggtactgcgcccggagaagactggcgtgagcgacgacgcgacggttgacgtcctggatctgacgcctctgggtgaaggccacgggacccgtgagtttgaacctgaaagagagttcgacagaatcaatctcggtatcgttgacggcggcctgccgcaggatctcttgcacgtcgcccgagttgtcctggtaggcgatctcggtcatgaactgctcgatctcctcctcttgaaggtctccgcggccggcgcgctccacggtggccgcgaggtcgttggagatgcggcccatgagctgcgagaaggcgttcatgcccgcctcgttccagacgcggctgtagaccacgacgccctcgggatcgcgggcgcgcatgaccacctgggcgaggttgagctccacgtggcgcgtgaagaccgcgtagttgcagaggcgctggtagaggtagttgagcgtggtggcgatgtgctcggtgacgaagaaatacatgatccagcggcggagcggcatctcgctgacgtcgcccagcgcctccaaacgttccatggcctcgtaaaagtccacggcgaagttgaaaaactgggagttgcgcgccgagacggtcaactcctcctccagaagacggatgagctcggcgatggtggcgcgcacctcgcgctcgaaggcccccgggagttcctccacttcctcttcttcctcctccactaacatctcttctacttcctcctcaggcggcagtggtggcgggggagggggcctgcgtcgccggcggcgcacgggcagacggtcgatgaagcgctcgatggtctcgccgcgccggcgtcgcatggtctcggtgacggcgcgcccgtcctcgcggggccgcagcgtgaagacgccgccgcgcatctccaggtggccgggggggtccccgttgggcagggagagggcgctgacgatgcatcttatcaattgccccgtagggactccgcgcaaggacctgagcgtctcgagatccacgggatctgaaaaccgctgaacgaaggcttcgagccagtcgcagtcgcaaggtaggctgagcacggtttcttctggcgggtcatgttggttgggagcggggcgggcgatgctgctggtgatgaagttgaaataggcggttctgagacggcggatggtggcgaggagcaccaggtctttgggcccggcttgctggatgcgcagacggtcggccatgccccaggcgtggtcctgacacctggccaggtccttgtagtagtcctgcatgagccgctccacgggcacctcctcctcgcccgcgcggccgtgcatgcgcgtgagcccgaagccgcgctggggctggacgagcgccaggtcggcgacgacgcgctcggcgaggatggcttgctggatctgggtgagggtggtctggaagtcatcaaagtcgacgaagcggtggtaggctccggtgttgatggtgtaggagcagttggccatgacggaccagttgacggtctggtggcccggacgcacgagctcgtggtacttgaggcgcgagtaggcgcgcgtgtcgaagatgtagtcgttgcaggtgcgcaccaggtactggtagccgatgaggaagtgcggcggcggctggcggtagagcggccatcgctcggtggcgggggcgccgggcgcgaggtcctcgagcatggtgcggtggtagccgtagatgtacctggacatccaggtgatgccggcggcggtggtggaggcgcgcgggaactcgcggacgcggttccagatgttgcgcagcggcaggaagtagttcatggtgggcacggtctggcccgtgaggcgcgcgcagtcgtggatgctctatacgggcaaaaacgaaagcggtcagcggctcgactccgtggcctggaggctaagcgaacgggttgggctgcgcgtgtaccccggttcgaatctcgaatcaggctggagccgcagctaacgtggtattggcactcccgtctcgacccaagcctgcaccaaccctccaggatacggaggcgggtcgttttgcaacttttttttggaggccggatgagactagtaagcgcggaaagcggccgaccgcgatggctcgctgccgtagtctggagaagaatcgccagggttgcgttgcggtgtgccccggttcgaggccggccggattccgcggctaacgagggcgtggctgccccgtcgtttccaagaccccatagccagccgacttctccagttacggagcgagcccctcttttgttttgtttgtttttgccagatgcatcccgtactgcggcagatgcgcccccaccaccctccaccgcaacaacagccccctccacagccggcgcttctgcccccgccccagcagcaacttccagccacgaccgccgcggccgccgtgagcggggctggacagagttatgatcaccagctggccttggaagagggcgaggggctggcgcgcctgggggcgtcgtcgccggagcggcacccgcgcgtgcagatgaaaagggacgctcgcgaggcctacgtgcccaagcagaacctgttcagagacaggagcggcgaggagcccgaggagatgcgcgcggcccggttccacgcggggcgggagctgcggcgcggcctggaccgaaagagggtgctgagggacgaggatttcgaggcggacgagctgacggggatcagccccgcgcgcgcgcacgtggccgcggccaacctggtcacggcgtacgagcagaccgtgaaggaggagagcaacttccaaaaatccttcaacaaccacgtgcgcaccctgatcgcgcgcgaggaggtgaccctgggcctgatgcacctgtgggacctgctggaggccatcgtgcagaaccccaccagcaagccgctgacggcgcagctgttcctggtggtgcagcatagtcgggacaacgaagcgttcagggaggcgctgctgaatatcaccgagcccgagggccgctggctcctggacctggtgaacattctgcagagcatcgtggtgcaggagcgcgggctgccgctgtccgagaagctggcggccatcaacttctcggtgctgagtttgggcaagtactacgctaggaagatctacaagaccccgtacgtgcccatagacaaggaggtgaagatcgacgggttttacatgcgcatgaccctgaaagtgctgaccctgagcgacgatctgggggtgtaccgcaacgacaggatgcaccgtgcggtgagcgccagcaggcggcgcgagctgagcgaccaggagctgatgcatagtctgcagcgggccctgaccggggccgggaccgagggggagagctactttgacatgggcgcggacctgcactggcagcccagccgccgggccttggaggcggcggcaggaccctacgtagaagaggtggacgatgaggtggacgaggagggcgagtacctggaagactgatggcgcgaccgtatttttgctagatgcaacaacaacagccacctcctgatcccgcgatgcgggcggcgctgcagagccagccgtccggcattaactcctcggacgattggacccaggccatgcaacgcatcatggcgctgacgacccgcaaccccgaagcctttagacagcagccccaggccaaccggctctcggccatcctggaggccgtggtgccctcgcgctccaaccccacgcacgagaaggtcctggccatcgtgaacgcgctggtggagaacaaggccatccgcggcgacgaggccggcctggtgtacaacgcgctgctggagcgcgtggcccgctacaacagcaccaacgtgcagaccaacctggaccgcatggtgaccgacgtgcgcgaggccgtggcccagcgcgagcggttccaccgcgagtccaacctgggatccatggtggcgctgaacgccttcctcagcacccagcccgccaacgtgccccggggccaggaggactacaccaacttcatcagcgccctgcgcctgatggtgaccgaggtgccccagagcgaggtgtaccagtccgggccggactacttcttccagaccagtcgccagggcttgcagaccgtgaacctgagccaggctttcaagaacttgcagggcctgtggggcgtgcaggccccggtcggggaccgcgcgacggtgtcgagcctgctgacgccgaactcgcgcctgctgctgctgctggtggcccccttcacggacagcggcagcatcaaccgcaactcgtacctgggctacctgattaacctgtaccgcgaggccatcggccaggcgcacgtggacgagcagacctaccaggagatcacccacgtgagccgcgccctgggccaggacgacccgggcaacctggaagccaccctgaactttttgctgaccaaccggtcgcagaagatcccgccccagtacgcgctcagcaccgaggaggagcgcatcctgcgttacgtgcagcagagcgtgggcctgttcctgatgcaggagggggccacccccagcgccgcgctcgacatgaccgcgcgcaacatggagcccagcatgtacgccagcaaccgcccgttcatcaataaactgatggactacttgcatcgggcggccgccatgaactctgactatttcaccaacgccatcctgaatccccactggctcccgccgccggggttctacacgggcgagtacgacatgcccgaccccaatgacgggttcctgtgggacgatgtggacagcagcgtgttctccccccgaccgggtgctaacgagcgccccttgtggaagaaggaaggcagcgaccgacgcccgtcctcggcgctgtccggccgcgagggtgctgccgcggcggtgcccgaggccgccagtcctttcccgagcttgcccttctcgctgaacagtatccgcagcagcgagctgggcaggatcacgcgcccgcgcttgctgggcgaagaggagtacttgaatgactcgctgttgagacccgagcgggagaagaacttccccaataacgggatagaaagcctggtggacaagatgagccgctggaagacgtatgcgcaggagcacagggacgatccccgggcgtcgcagggggccacgagccggggcagcgccgcccgtaaacgccggtggcacgacaggcagcggggacagatgtgggacgatgaggactccgccgacgacagcagcgtgttggacttgggtgggagtggtaacccgttcgctcacctgcgcccccgtatcgggcgcatgatgtaagagaaaccgaaaataaatgatactcaccaaggccatggcgaccagcgtgcgttcgtttcttctctgttgttgttgtatctagtatgatgaggcgtgcgtacccggagggtcctcctccctcgtacgagagcgtgatgcagcaggcgatggcggcggcggcgatgcagcccccgctggaggctccttacgtgcccccgcggtacctggcgcctacggaggggcggaacagcattcgttactcggagctggcacccttgtacgataccacccggttgtacctggtggacaacaagtcggcggacatcgcctcgctgaactaccagaacgaccacagcaacttcctgaccaccgtggtgcagaacaatgacttcacccccacggaggccagcacccagaccatcaactttgacgagcgctcgcggtggggcggccagctgaaaaccatcatgcacaccaacatgcccaacgtgaacgagttcatgtacagcaacaagttcaaggcgcgggtgatggtctcccgcaagacccccaatggggtgacagtgacagaggattatgatggtagtcaggatgagctgaagtatgaatgggtggaatttgagctgcccgaaggcaacttctcggtgaccatgaccatcgacctgatgaacaacgccatcatcgacaattacttggcggtggggcggcagaacggggtgctggagagcgacatcggcgtgaagttcgacactaggaacttcaggctgggctgggaccccgtgaccgagctggtcatgcccggggtgtacaccaacgaggctttccatcccgatattgtcttgctgcccggctgcggggtggacttcaccgagagccgcctcagcaacctgctgggcattcgcaagaggcagcccttccaggaaggcttccagatcatgtacgaggatctggaggggggcaacatccccgcgctcctggatgtcgacgcctatgagaaaagcaaggaggatgcagcagctgaagcaactgcagccgtagctaccgcctctaccgaggtcaggggcgataattttgcaagcgccgcagcagtggcagcggccgaggcggctgaaaccgaaagtaagatagtcattcagccggtggagaaggatagcaagaacaggagctacaacgtactaccggacaagataaacaccgcctaccgcagctggtacctagcctacaactatggcgaccccgagaagggcgtgcgctcctggacgctgctcaccacctcggacgtcacctgcggcgtggagcaagtctactggtcgctgcccgacatgatgcaagacccggtcaccttccgctccacgcgtcaagttagcaactacccggtggtgggcgccgagctcctgcccgtctactccaagagcttcttcaacgagcaggccgtctactcgcagcagctgcgcgccttcacctcgcttacgcacgtcttcaaccgcttccccgagaaccagatcctcgtccgcccgcccgcgcccaccattaccaccgtcagtgaaaacgttcctgctctcacagatcacgggaccctgccgctgcgcagcagtatccggggagtccagcgcgtgaccgttactgacgccagacgccgcacctgcccctacgtctacaaggccctgggcatagtcgcgccgcgcgtcctctcgagccgcaccttctaaatgtccattctcatctcgcccagtaataacaccggttggggcctgcgcgcgcccagcaagatgtacggaggcgctcgccaacgctccacgcaacaccccgtgcgcgtgcgcgggcacttccgcgctccctggggcgccctcaagggccgcgtgcggtcgcgcaccaccgtcgacgacgtgatcgaccaggtggtggccgacgcgcgcaactacacccccgccgccgcgcccgtctccaccgtggacgccgtcatcgacagcgtggtggccgacgcgcgccggtacgcccgcgccaagagccggcggcggcgcatcgcccggcggcaccggagcacccccgccatgcgcgcggcgcgagccttgctgcgcagggccaggcgcacgggacgcagggccatgctcagggcggccagacgcgcggcttcaggcgccagcgccggcaggacccggagacgcgcggccacggcggcggcagcggccatcgccagcatgtcccgcccgcggcgagggaacgtgtactgggtgcgcgacgccgccaccggtgtgcgcgtgcccgtgcgcacccgcccccctcgcacttgaagatgttcacttcgcgatgttgatgtgtcccagcggcgaggaggatgtccaagcgcaaattcaaggaagagatgctccaggtcatcgcgcctgagatctacggccctgcggtggtgaaggaggaaagaaagccccgcaaaatcaagcgggtcaaaaaggacaaaaaggaagaagaaagtgatgtggacggattggtggagtttgtgcgcgagttcgccccccggcggcgcgtgcagtggcgcgggcggaaggtgcaaccggtgctgagacccggcaccaccgtggtcttcacgcccggcgagcgctccggcaccgcttccaagcgctcctacgacgaggtgtacggggatgatgatattctggagcaggcggccgagcgcctgggcgagtttgcttacggcaagcgcagccgttccgcaccgaaggaagaggcggtgtccatcccgctggaccacggcaaccccacgccgagcctcaagcccgtgaccttgcagcaggtgctgccgaccgcggcgccgcgccgggggttcaagcgcgagggcgaggatctgtaccccaccatgcagctgatggtgcccaagcgccagaagctggaagacgtgctggagaccatgaaggtggacccggacgtgcagcccgaggtcaaggtgcggcccatcaagcaggtggccccgggcctgggcgtgcagaccgtggacatcaagattcccacggagcccatggaaacgcagaccgagcccatgatcaagcccagcaccagcaccatggaggtgcagacggatccctggatgccatcggctcctagtcgaagaccccggcgcaagtacggcgcggccagcctgctgatgcccaactacgcgctgcatccttccatcatccccacgccgggctaccgcggcacgcgcttctaccgcggtcataccagcagccgccgccgcaagaccaccactcgccgccgccgtcgccgcaccgccgctgcaaccacccctgccgccctggtgcggagagtgtaccgccgcggccgcgcacctctgaccctgccgcgcgcgcgctaccacccgagcatcgccatttaaactttcgcctgctttgcagatcaatggccctcacatgccgccttcgcgttcccattacgggctaccgaggaagaaaaccgcgccgtagaaggctggcggggaacgggatgcgtcgccaccaccaccggcggcggcgcgccatcagcaagcggttggggggaggcttcctgcccgcgctgatccccatcatcgccgcggcgatcggggcgatccccggcattgcttccgtggcggtgcaggcctctcagcgccactgagacacacttggaaacatcttgtaataaaccaatggactctgacgctcctggtcctgtgatgtgttttcgtagacagatggaagacatcaatttttcgtccctggctccgcgacacggcacgcggccgttcatgggcacctggagcgacatcggcaccagccaactgaacgggggcgccttcaattggagcagtctctggagcgggcttaagaatttcgggtccacgcttaaaacctatggcagcaaggcgtggaacagcaccacagggcaggcgctgagggataagctgaaagagcagaacttccagcagaaggtggtcgatgggctcgcctcgggcatcaacggggtggtggacctggccaaccaggccgtgcagcggcagatcaacagccgcctggacccggtgccgcccgccggctccgtggagatgccgcaggtggaggaggagctgcctcccctggacaagcggggcgagaagcgaccccgccccgatgcggaggagacgctgctgacgcacacggacgagccgcccccgtacgaggaggcggtgaaactgggtctgcccaccacgcggcccatcgcgcccctggccaccggggtgctgaaacccgaaaagcccgcgaccctggacttgcctcctccccagccttcccgcccctctacagtggctaagcccctgccgccggtggccgtggcccgcgcgcgacccgggggcaccgcccgccctcatgcgaactggcagagcactctgaacagcatcgtgggtctgggagtgcagagtgtgaagcgccgccgctgctattaaacctaccgtagcgcttaacttgcttgtctgtgtgtgtatgtattatgtcgccgccgccgctgtccaccagaaggaggagtgaagaggcgcgtcgccgagttgcaagatggccaccccatcgatgctgccccagtgggcgtacatgcacatcgccggacaggacgcttcggagtacctgagtccgggtctggtgcagtttgcccgcgccacagacacctacttcagtctggggaacaagtttaggaaccccacggtggcgcccacgcacgatgtgaccaccgaccgcagccagcggctgacgctgcgcttcgtgcccgtggaccgcgaggacaacacctactcgtacaaagtgcgctacacgctggccgtgggcgacaaccgcgtgctggacatggccagcacctactttgacatccgcggcgtgctggatcggggccctagcttcaaaccctactccggcaccgcctacaacagtctggcccccaagggagcacccaacacttgtcagtggacatataaagccgatggtgaaactgccacagaaaaaacctatacatatggaaatgcacccgtgcagggcattaacatcacaaaagatggtattcaacttggaactgacaccgatgatcagccaatctacgcagataaaacctatcagcctgaacctcaagtgggtgatgctgaatggcatgacatcactggtactgatgaaaagtatggaggcagagctcttaagcctgataccaaaatgaagccttgttatggttcttttgccaagcctactaataaagaaggaggtcaggcaaatgtgaaaacaggaacaggcactactaaagaatatgacatagacatggctttctttgacaacagaagtgcggctgctgctggcctagctccagaaattgttttgtatactgaaaatgtggatttggaaactccagatacccatattgtatacaaagcaggcacagatgacagcagctcttctattaatttgggtcagcaagccatgcccaacagacctaactacattggtttcagagacaactttatcgggctcatgtactacaacagcactggcaatatgggggtgctggccggtcaggcttctcagctgaatgctgtggttgacttgcaagacagaaacaccgagctgtcctaccagctcttgcttgactctctgggtgacagaacccggtatttcagtatgtggaatcaggcggtggacagctatgatcctgatgtgcgcattattgaaaatcatggtgtggaggatgaacttcccaactattgtttccctctggatgctgttggcagaacagatacttatcagggaattaaggctaatggaactgatcaaaccacatggaccaaagatgacagtgtcaatgatgctaatgagataggcaagggtaatccattcgccatggaaatcaacatccaagccaacctgtggaggaacttcctctacgccaacgtggccctgtacctgcccgactcttacaagtacacgccggccaatgttaccctgcccaccaacaccaacacctacgattacatgaacggccgggtggtggcgccctcgctggtggactcctacatcaacatcggggcgcgctggtcgctggatcccatggacaacgtgaaccccttcaaccaccaccgcaatgcggggctgcgctaccgctccatgctcctgggcaacgggcgctacgtgcccttccacatccaggtgccccagaaatttttcgccatcaagagcctcctgctcctgcccgggtcctacacctacgagtggaacttccgcaaggacgtcaacatgatcctgcagagctccctcggcaacgacctgcgcacggacggggcctccatctccttcaccagcatcaacctctacgccaccttcttccccatggcgcacaacacggcctccacgctcgaggccatgctgcgcaacgacaccaacgaccagtccttcaacgactacctctcggcggccaacatgctctaccccatcccggccaacgccaccaacgtgcccatctccatcccctcgcgcaactgggccgccttccgcggctggtccttcacgcgtctcaagaccaaggagacgccctcgctgggctccgggttcgacccctacttcgtctactcgggctccatcccctacctcgacggcaccttctacctcaaccacaccttcaagaaggtctccatcaccttcgactcctccgtcagctggcccggcaacgaccggctcctgacgcccaacgagttcgaaatcaagcgcaccgtcgacggcgagggctacaacgtggcccagtgcaacatgaccaaggactggttcctggtccagatgctggcccactacaacatcggctaccagggcttctacgtgcccgagggctacaaggaccgcatgtactccttcttccgcaacttccagcccatgagccgccaggtggtggacgaggtcaactacaaggactaccaggccgtcaccctggcctaccagcacaacaactcgggcttcgtcggctacctcgcgcccaccatgcgccagggccagccctaccccgccaactacccctacccgctcatcggcaagagcgccgtcaccagcgtcacccagaaaaagttcctctgcgacagggtcatgtggcgcatccccttctccagcaacttcatgtccatgggcgcgctcaccgacctcggccagaacatgctctatgccaactccgcccacgcgctagacatgaatttcgaagtcgaccccatggatgagtccacccttctctatgttgtcttcgaagtcttcgacgtcgtccgagtgcaccagccccaccgcggcgtcatcgaggccgtctacctgcgcacccccttctcggccggtaacgccaccacctaagctcttgcttcttgcaagccatggccgcgggctccggcgagcaggagctcagggccatcatccgcgacctgggctgcgggccctacttcctgggcaccttcgataagcgcttcccgggattcatggccccgcacaagctggcctgcgccatcgtcaacacggccggccgcgagaccgggggcgagcactggctggccttcgcctggaacccgcgctcgaacacctgctacctcttcgaccccttcgggttctcggacgagcgcctcaagcagatctaccagttcgagtacgagggcctgctgcgccgcagcgccctggccaccgaggaccgctgcgtcaccctggaaaagtccacccagaccgtgcagggtccgcgctcggccgcctgcgggctcttctgctgcatgttcctgcacgccttcgtgcactggcccgaccgccccatggacaagaaccccaccatgaacttgctgacgggggtgcccaacggcatgctccagtcgccccaggtggaacccaccctgcgccgcaaccaggaggcgctctaccgcttcctcaactcccactccgcctactttcgctcccaccgcgcgcgcatcgagaaggccaccgccttcgaccgcatgaatcaagacatgtaaaccgtgtgtgtatgttaaatgtctttaataaacagcactttcatgttacacatgcatctgagatgatttatttagaaatcgaaagggttctgccgggtctcggcatggcccgcgggcagggacacgttgcggaactggtacttggccagccacttgaactcggggatcagcagtttgggcagcggggtgtcggggaaggagtcggtccacagcttccgcgtcagttgcagggcgcccagcaggtcgggcgcggagatcttgaaatcgcagttgggacccgcgttctgcgcgcgggagttgcggtacacggggttgcagcactggaacaccatcagggccgggtgcttcacgctcgccagcaccgtcgcgtcggtgatgctctccacgtcgaggtcctcggcgttggccatcccgaagggggtcatcttgcaggtctgccttcccatggtgggcacgcacccgggcttgtggttgcaatcgcagtgcagggggatcagcatcatctgggcctggtcggcgttcatccccgggtacatggccttcatgaaagcctccaattgcctgaacgcctgctgggccttggctccctcggtgaagaagaccccgcaggacttgctagagaactggttggtggcgcacccggcgtcgtgcacgcagcagcgcgcgtcgttgttggccagctgcaccacgctgcgcccccagcggttctgggtgatcttggcccggtcggggttctccttcagcgcgcgctgcccgttctcgctcgccacatccatctcgatcatgtgctccttctggatcatggtggtcccgtgcaggcaccgcagcttgccctcggcctcggtgcacccgtgcagccacagcgcgcacccggtgcactcccagttcttgtgggcgatctgggaatgcgcgtgcacgaagccctgcaggaagcggcccatcatggtggtcagggtcttgttgctagtgaaggtcagcggaatgccgcggtgctcctcgttgatgtacaggtggcagatgcggcggtacacctcgccctgctcgggcatcagctggaagttggctttcaggtcggtctccacgcggtagcggtccatcagcatagtcatgatttccatacccttctcccaggccgagacgatgggcaggctcatagggttcttcaccatcatcttagcgctagcagccgcggccagggggtcgctctcgtccagggtctcaaagctccgcttgccgtccttctcggtgatccgcaccggggggtagctgaagcccacggccgccagctcctcctcggcctgtctttcgtcctcgctgtcctggctgacgtcctgcaggaccacatgcttggtcttgcggggtttcttcttgggcggcagcggcggcggagatgttggagatggcgagggggagcgcgagttctcgctcaccactactatctcttcctcttcttggtccgaggccacgcggcggtaggtatgtctcttcgggggcagaggcggaggcgacgggctctcgccgccgcgacttggcggatggctggcagagccccttccgcgttcgggggtgcgctcccggcggcgctctgactgacttcctccgcggccggccattgtgttctcctagggaggaacaacaagcatggagactcagccatcgccaacctcgccatctgcccccaccgccgacgagaagcagcagcagcagaatgaaagcttaaccgccccgccgcccagccccgccacctccgacgcggccgtcccagacatgcaagagatggaggaatccatcgagattgacctgggctatgtgacgcccgcggagcacgaggaggagctggcagtgcgcttttcacaagaagagatacaccaagaacagccagagcaggaagcagagaatgagcagagtcaggctgggctcgagcatgacggcgactacctccacctgagcgggggggaggacgcgctcatcaagcatctggcccggcaggccaccatcgtcaaggatgcgctgctcgaccgcaccgaggtgcccctcagcgtggaggagctcagccgcgcctacgagttgaacctcttctcgccgcgcgtgccccccaagcgccagcccaatggcacctgcgagcccaacccgcgcctcaacttctacccggtcttcgcggtgcccgaggccctggccacctaccacatctttttcaagaaccaaaagatccccgtctcctgccgcgccaaccgcacccgcgccgacgcccttttcaacctgggtcccggcgcccgcctacctgatatcgcctccttggaagaggttcccaagatcttcgagggtctgggcagcgacgagactcgggccgcgaacgctctgcaaggagaaggaggagagcatgagcaccacagcgccctggtcgagttggaaggcgacaacgcgcggctggcggtgctcaaacgcacggtcgagctgacccatttcgcctacccggctctgaacctgccccccaaagtcatgagcgcggtcatggaccaggtgctcatcaagcgcgcgtcgcccatctccgaggacgagggcatgcaagactccgaggagggcaagcccgtggtcagcgacgagcagctggcccggtggctgggtcctaatgctagtccccagagtttggaagagcggcgcaaactcatgatggccgtggtcctggtgaccgtggagctggagtgcctgcgccgcttcttcgccgacgcggagaccctgcgcaaggtcgaggagaacctgcactacctcttcaggcacgggttcgtgcgccaggcctgcaagatctccaacgtggagctgaccaacctggtctcctacatgggcatcttgcacgagaaccgcctggggcagaacgtgctgcacaccaccctgcgcggggaggcccggcgcgactacatccgcgactgcgtctacctctacctctgccacacctggcagacgggcatgggcgtgtggcagcagtgtctggaggagcagaacctgaaagagctctgcaagctcctgcagaagaacctcaagggtctgtggaccgggttcgacgagcgcaccaccgcctcggacctggccgacctcattttccccgagcgcctcaggctgacgctgcgcaacggcctgcccgactttatgagccaaagcatgttgcaaaactttcgctctttcatcctcgaacgctccggaatcctgcccgccacctgctccgcgctgccctcggacttcgtgccgctgaccttccgcgagtgccccccgccgctgtggagccactgctacctgctgcgcctggccaactacctggcctaccactcggacgtgatcgaggacgtcagcggcgagggcctgctcgagtgccactgccgctgcaacctctgcacgccgcaccgctccctggcctgcaacccccagctgctgagcgagacccagatcatcggcaccttcgagttgcaagggcccagcgaaggcgagggttcagccgccaaggggggtctgaaactcaccccggggctgtggacctcggcctacttgcgcaagttcgtgcccgaggactaccatcccttcgagatcaggttctacgaggaccaatcccatccgcccaaggccgagctgtcggcctgcgtcatcacccagggggcgatcctggcccaattgcaagccatccagaaatcccgccaagaattcttgctgaaaaagggccgcggggtctacctcgacccccagaccggtgaggagctcaaccccggcttcccccaggatgccccgaggaaacaagaagctgaaagtggagctgccgcccgtggaggatttggaggaagactgggagaacagcagtcaggcagaggaggaggagatggaggaagactgggacagcactcaggcagaggaggacagcctgcaagacagtctggaggaagacgaggaggaggcagaggaggaggtggaagaagcagccgccgccagaccgtcgtcctcggcgggggagaaagcaagcagcacggataccatctccgctccgggtcggggtcccgctcgaccacacagtagatgggacgagaccggacgattcccgaaccccaccacccagaccggtaagaaggagcggcagggatacaagtcctggcgggggcacaaaaacgccatcgtctcctgcttgcaggcctgcgggggcaacatctccttcacccggcgctacctgctcttccaccgcggggtgaactttccccgcaacatcttgcattactaccgtcacctccacagcccctactacttccaagaagaggcagcagcagcagaaaaagaccagcagaaaaccagcagctagaaaatccacagcggcggcagcaggtggactgaggatcgcggcgaacgagccggcgcaaacccgggagctgaggaaccggatctttcccaccctctatgccatcttccagcagagtcgggggcaggagcaggaactgaaagtcaagaaccgttctctgcgctcgctcacccgcagttgtctgtatcacaagagcgaagaccaacttcagcgcactctcgaggacgccgaggctctcttcaacaagtactgcgcgctcactcttaaagagtagcccgcgcccgcccagtcgcagaaaaaggcgggaattacgtcacctgtgcccttcgccctagccgcctccacccatcatcatgagcaaagagattcccacgccttacatgtggagctaccagccccagatgggcctggccgccggtgccgcccaggactactccacccgcatgaattggctcagcgccgggcccgcgatgatctcacgggtgaatgacatccgcgcccaccgaaaccagatactcctagaacagtcagcgctcaccgccacgccccgcaatcacctcaatccgcgtaattggcccgccgccctggtgtaccaggaaattccccagcccacgaccgtactacttccgcgagacgcccaggccgaagtccagctgactaactcaggtgtccagctggcgggcggcgccaccctgtgtcgtcaccgccccgctcagggtataaagcggctggtgatccggggcagaggcacacagctcaacgacgaggtggtgagctcttcgctgggtctgcgacctgacggagtcttccaactcgccggatcggggagatcttccttcacgcctcgtcaggccgtcctgactttggagagttcgtcctcgcagccccgctcgggtggcatcggcactctccagttcgtggaggagttcactccctcggtctacttcaaccccttctccggctcccccggccactacccggacgagttcatcccgaacttcgacgccatcagcgagtcggtggacggctacgattgaatgtcccatggtggcgcagctgacctagctcggcttcgacacctggaccactgccgccgcttccgctgcttcgctcgggatctcgccgagtttgcctactttgagctgcccgaggagcaccctcagggcccggcccacggagtgcggatcgtcgtcgaagggggcctcgactcccacctgcttcggatcttcagccagcgtccgatcctggtcgagcgcgagcaaggacagacccttctgactctgtactgcatctgcaaccaccccggcctgcatgaaagtctttgttgtctgctgtgtactgagtataataaaagctgagatcagcgactactccggacttccgtgtgttcctgaatccatcaaccagtctttgttcttcaccgggaacgagaccgagctccagctccagtgtaagccccacaagaagtacctcacctggctgttccagggctccccgatcgccgttgtcaaccactgcgacaacgacggagtcctgctgagcggccctgccaaccttactttttccacccgcagaagcaagctccagctcttccaacccttcctccccgggacctatcagtgcgtctcgggaccctgccatcacaccttccacctgatcccgaataccacagcgtcgctccccgctactaacaaccaaactaacctccaccaacgccaccgtcgcgacggccacaatacatgcccatattagactatgaggccgagccacagcgacccatgctccccgctattagttacttcaatctaaccggcggagatgactgacccactggccaacaacaacgtcaacgaccttctcctggacatggacggccgcgcctcggagcagcgactcgcccaacttcgcattcgccagcagcaggagagagccgtcaaggagctgcaggatgcggtggccatccaccagtgcaagagaggcatcttctgcctggtgaaacaggccaagatctcctacgaggtcactccaaacgaccatcgcctctcctacgagctcctgcagcagcgccagaagttcacctgcctggtcggagtcaaccccatcgtcatcacccagcagtctggcgataccaaggggtgcatccactgctcctgcgactcccccgactgcgtccacactctgatcaagaccctctgcggcctccgcgacctcctccccatgaactaatcacccccttatccagtgaaataaagatcatattgatgatgattttacagaaataaaaaataatcatttgatttgaaataaagatacaatcatattgatgatttgagtttaacaaaaaaataaagaatcacttacttgaaatctgataccaggtctctgtccatgttttctgccaacaccacttcactcccctcttcccagctctggtactgcaggccccggcgggctgcaaacttcctccacacgctgaaggggatgtcaaattcctcctgtccctcaatcttcattttatcttctatcagatgtccaaaaagcgcgtccgggtggatgatgacttcgaccccgtctacccctacgatgcagacaacgcaccgaccgtgcccttcatcaacccccccttcgtctcttcagatggattccaagagaagcccctgggggtgttgtccctgcgactggccgaccccgtcaccaccaagaacggggaaatcaccctcaagctgggagagggggtggacctcgattcctcgggaaaactcatctccaacacggccaccaaggccgccgcccctctcagtttttccaacaacaccatttcccttaacatggatcaccccttttacactaaagatggaaaattatccttacaagtttctccaccattaaatatactgagaacaagcattctaaacacactagctttaggttttggatcaggtttaggactccgtggctctgccttggcagtacagttagtctctccacttacatttgatactgatggaaacataaagcttaccttagacagaggtttgcatgttacaacaggagatgcaattgaaagcaacataagctgggctaaaggtttaaaatttgaagatggagccatagcaaccaacattggaaatgggttagagtttggaagcagtagtacagaaacaggtgttgatgatgcttacccaatccaagttaaacttggatctggccttagctttgacagtacaggagccataatggctggtaacaaagaagacgataaactcactttgtggacaacacctgatccatcaccaaactgtcaaatactcgcagaaaatgatgcaaaactaacactttgcttgactaaatgtggtagtcaaatactggccactgtgtcagtcttagttgtaggaagtggaaacctaaaccccattactggcaccgtaagcagtgctcaggtgtttctacgttttgatgcaaacggtgttcttttaacagaacattctacactaaaaaaatactgggggtataggcagggagatagcatagatggcactccatataccaatgctgtaggattcatgcccaatttaaaagcttatccaaagtcacaaagttctactactaaaaataatatagtagggcaagtatacatgaatggagatgtttcaaaacctatgcttctcactataaccctcaatggtactgatgacagcaacagtacatattcaatgtcattttcatacacctggactaatggaagctatgttggagcaacatttggggctaactcttataccttctcatacatcgcccaagaatgaacactgtatcccaccctgcatgccaacccttcccaccccactctgtggaacaaactctgaaacacaaaataaaataaagttcaagtgttttattgattcaacagttttacaggattcgagcagttatttttcctccaccctcccaggacatggaatacaccaccctctccccccgcacagccttgaacatctgaatgccattggtgatggacatgcttttggtctccacgttccacacagtttcagagcgagccagtctcgggtcggtcagggagatgaaaccctccgggcactcccgcatctgcacctcacagctcaacagctgaggattgtcctcggtggtcgggatcacggttatctggaagaagcagaagagcggcggtgggaatcatagtccgcgaacgggatcggccggtggtgtcgcatcaggccccgcagcagtcgctgccgccgccgctccgtcaagctgctgctcagggggtccgggtccagggactccctcagcatgatgcccacggccctcagcatcagtcgtctggtgcggcgggcgcagcagcgcatgcggatctcgctcaggtcgctgcagtacgtgcaacacagaaccaccaggttgttcaacagtccatagttcaacacgctccagccgaaactcatcgcgggaaggatgctacccacgtggccgtcgtaccagatcctcaggtaaatcaagtggtgccccctccagaacacgctgcccacgtacatgatctccttgggcatgtggcggttcaccacctcccggtaccacatcaccctctggttgaacatgcagccccggatgatcctgcggaaccacagggccagcaccgccccgcccgccatgcagcgaagagaccccgggtcccggcaatggcaatggaggacccaccgctcgtacccgtggatcatctgggagctgaacaagtctatgttggcacagcacaggcatatgctcatgcatctcttcagcactctcaactcctcgggggtcaaaaccatatcccagggcacggggaactcttgcaggacagcgaaccccgcagaacagggcaatcctcgcacagaacttacattgtgcatggacagggtatcgcaatcaggcagcaccgggtgatcctccaccagagaagcgcgggtctcggtctcctcacagcgtggtaagggggccggccgatacgggtgatggcgggacgcggctgatcgtgttcgcgaccgtgtcatgatgcagttgctttcggacattttcgtacttgctgtagcagaacctggtccgggcgctgcacaccgatcgccggcggcggtctcggcgcttggaacgctcggtgttgaaattgtaaaacagccactctctcagaccgtgcagcagatctagggcctcaggagtgatgaagatcccatcatgcctgatggctctgatcacatcgaccaccgtggaatgggccagacccagccagatgatgcaattttgttgggtttcggtgacggcgggggagggaagaacaggaagaaccatgattaacttttaatccaaacggtctcggagtacttcaaaatgaagatcgcggagatggcacctctcgcccccgctgtgttggtggaaaataacagccaggtcaaaggtgatacggttctcgagatgttccacggtggcttccagcaaagcctccacgcgcacatccagaaacaagacaatagcgaaagcgggagggttctctaattcctcaatcatcatgttacactcctgcaccatccccagataattttcatttttccagccttgaatgattcgaactagttcgtgaggtaaatccaagccagccatgataaagagctcgcgcagagcgccctccaccggcattcttaagcacaccctcataattccaagatattctgctcctggttcacctgcagcagattgacaagcggaatatcaaaatctctgccgcgatccctgagctcctccctcagcaataactgtaagtactctttcatatcctctccgaaatttttagccataggaccaccaggaataagattagggcaagccacagtacagataaaccgaagtcctccccagtgagcattgccaaatgcaagactgctataagcatgctggctagacccggtgatatcttccagataactggacagaaaatcgcccaggcaatttttaagaaaatcaacaaaagaaaaatcctccaggtggacgtttagagcctcgggaacaacgatgaagtaaatgcaagcggtgcgttccagcatggttagttagctgatctgtagaaaaaacaaaaatgaacattaaaccatgctagcctggcgaacaggtgggtaaatcgttctctccagcaccaggcaggccacggggtctccggcgcgaccctcgtaaaaattgtcgctatgattgaaaaccatcacagagagacgttcccggtggccggcgtgaatgattcgacaagatgaatacacccccggaacattggcgtccgcgagtgaaaaaaagcgcccgaggaagcaataaggcactacaatgctcagtctcaagtccagcaaagcgatgccatgcggatgaagcacaaaattctcaggtgcgtacaaaatgtaattactcccctcctgcacaggcagcaaagcccccgatccctccaggtacacatacaaagcctcagcgtccatagcttaccgagcagcagcacacaacaggcgcaagagtcagagaaaggctgagctctaacctgtccacccgctctctgctcaatatatagcccagatctacactgacgtaaaggccaaagtctaaaaatacccgccaaataatcacacacgcccagcacacgcccagaaaccggtgacacactcaaaaaaatacgcgcacttcctcaaacgcccaaaactgccgtcatttccgggttcccacgctacgtcatcaaaacacgactttcaaattccgtcgaccgttaaaaacgtcacccgccccgcccctaacggtcgcccgtctctcagccaatcagcgccccgcatccccaaattcaaacacctcatttgcatattaacgcgcacaaaaagtttgaggtatattattgatgatgg

SEQ ID NO: 13 - DNA, 30684 bp, synthetic construct
  source 1..30684: mol_type = other DNA
ccatcttcaataatatacctcaaactttttgtgcgcgttaatatgcaaatgaggcgtttgaatttggggaggaagggcggtgattggtcgagggatgagcgaccgttaggggcggggcgagtgacgttttgatgacgtggttgcgaggaggagccagtttgcaagttctcgtgggaaaagtgacgtcaaacgaggtgtggtttgaacacggaaatactcaattttcccgcgctctctgacaggaaatgaggtgtttctgggcggatgcaagtgaaaacgggccattttcgcgcgaaaactgaatgaggaagtgaaaatctgagtaatttcgcgtttatggcagggaggagtatttgccgagggccgagtagactttgaccgattacgtgggggtttcgattaccgtgtttttcacctaaatttccgcgtacggtgtcaaagtccggtgtttttacgtaggtgtcagctgatcgccagggtatttaaacctgcgctctccagtcaagaggccactcttgagtgccagcgagaagagttttctcctccgcgccgcgagtcagatctacactttgaaagtagggataacagggtaatgacattgattattgactagttgttaatagtaatcaattacggggtcattagttcatagcccatatatggagttccgcgttacataacttacggtaaatggcccgcctggctgaccgcccaacgacccccgcccattgacgtcaataatgacgtatgttcccatagtaacgccaatagggactttccattgacgtcaatgggtggagtatttacggtaaactgcccacttggcagtacatcaagtgtatcatatgccaagtccgccccctattgacgtcaatgacggtaaatggcccgcctggcattatgcccagtacatgaccttacgggactttcctacttggcagtacatctacgtattagtcatcgctattaccatggtgatgcggttttggcagtacaccaatgggcgtggatagcggtttgactcacggggatttccaagtctccaccccattgacgtcaatgggagtttgttttggcaccaaaatcaacgggactttccaaaatgtcgtaataaccccgccccgttgacgcaaatgggcggtaggcgtgtacggtgggaggtctatataagcagagctcgtttagtgaaccgtcagatcgcctggaacgccatccacgctgttttgacctccatagaagacagcgatcgcgccaccatggtgagcaagggcgaggagctgttcaccggggtggtgcccatcctggtcgagctggacggcgacgtaaacggccacaagttcagcgtgtccggcgagggcgagggcgatgccacctacggcaagctgaccctgaagttcatctgcaccaccggcaagctgcccgtgccctggcccaccctcgtgaccaccctgacctacggcgtgcagtgcttcagccgctaccccgaccacatgaagcagcacgacttcttcaagtccgccatgcccgaaggctacgtccaggagcgcaccatcttcttcaaggacgacggcaactacaagacccgcgccgaggtgaagttcgagggcgacaccctggtgaaccgcatcgagctgaagggcatcgacttcaaggaggacggcaacatcctggggcacaagctggagtacaactacaacagccacaacgtctatatcatggccgacaagcagaagaacggcatcaaggtgaacttcaagatccgccacaacatcgaggacggcagcgtgcagctcgccgaccactaccagcagaacacccccatcggcgacggccccgtgctgctgcccgacaaccactacctgagcacccagtccgccctgagcaaagaccccaacgagaagcgcgatcacatggtcctgctggagttcgtgaccgccgccgggatcactctcggcatggacgagctttacaagtagtgagtttaaactcccatttaaatgtgagggttaatgcttcgagcagacatgataagatacattgatgagtttggacaaaccacaactagaatgcagtgaaaaaaatgctttatttgtgaaatttgtgatgctattgctttatttgtaaccattataagctgcaataaacaagttaacaacaacaattgcattcattttatgtttcaggttcagggggagatgtgggaggttttttaaagcaagtaaaacctctacaaatgtggtaaaataactataacggtcctaaggtagcgagtgagtagtgttctggggcgggggaggacctgcatgagggccagaataactgaaatctgtgcttttctgtgtgttgcagcagcatgagcggaagcggctcctttgagggaggggtattcagcccttatctgacggggcgtctcccctcctgggcgggagtgcgtcagaatgtgatgggatccacggtggacggccggcccgtgcagcccgcgaactcttcaaccctgacctatgcaaccctgagctcttcgtcgttggacgcagctgccgccgcagctgctgcatctgccgccagcgccgtgcgcggaatggccatgggcgccggctactacggcactctggtggccaactcgagttccaccaataatcccgccagcctgaacgaggagaagctgttgctgctgatggcccagctcgaggccttgacccagcgcctgggcgagctgacccagcaggtggctcagctgcaggagcagacgcgggccgcggttgccacggtgaaatccaaataaaaaatgaatcaataaataaacggagacggttgttgattttaacacagagtctgaatctttatttgatttttcgcgcgcggtaggccctggaccaccggtctcgatcattgagcacccggtggatcttttccaggacccggtagaggtgggcttggatgttgaggtacatgggcatgagcccgtcccgggggtggaggtagctccattgcagggcctcgtgctcgggggtggtgttgtaaatcacccagtcatagcaggggcgcagggcatggtgttgcacaatatctttgaggaggagactgatggccacgggcagccctttggtgtaggtgtttacaaatctgttgagctgggagggatgcatgcggggggagatgaggtgcatcttggcctggatcttgagattggcgatgttaccgcccagatcccgcctggggttcatgttgtgcaggaccaccagcacggtgtatccggtgcacttggggaatttatcatgcaacttggaagggaaggcgtgaaagaatttggcgacgcctttgtgcccgcccaggttttccatgcactcatccatgatgatggcgatgggcccgtgggcggcggcctgggcaaagacgtttcgggggtcggacacatcatagttgtggtcctgggtgaggtcatcataggccattttaatgaatttggggcggagggtgccggactgggggacaaaggtaccctcgatcccgggggcgtagttcccctcacagatctgcatctcccaggctttgagctcggagggggggatcatgtccacctgcggggcgataaagaacacggtttccggggcgggggagatgagctgggccgaaagcaagttccggagcagctgggacttgccgcagccggtggggccgtagatgaccccgatgaccggctgcaggtggtagttgagggagagacagctgccgtcctcccggaggaggggggccacctcgttcatcatctcgcgcacgtgcatgttctcgcgcaccagttccgccaggaggcgctctccccccagggataggagctcctggagcgaggcgaagtttttcagcggcttgagtccgtcggccatgggcattttggagagggtttgttgcaagagttccaggcggtcccagagctcggtgatgtgctctacggcatctcgatccagcagacctcctcgtttcgcgggttgggacggctgcgggagtagggcaccagacgatgggcgtccagcgcagccagggtccggtccttccagggtcgcagcgtccgcgtcagggtggtctccgtcacggtgaaggggtgcgcgccgggctgggcgcttgcgagggtgcgcttcaggctcatccggctggtcgaaaaccgctcccgatcggcgccctgcgcgtcggccaggtagcaattgaccatgagttcgtagttgagcgcctcggccgcgtggcctttggcgcggagcttacctttggaagtctgcccgcaggcgggacagaggagggacttgagggcgtagagcttgggggcgaggaagacggactcgggggcgtaggcgtccgcgccgcagtgggcgcagacggtctcgcactccacgagccaggtgaggtcgggctggtcggggtcaaaaaccagtttcccgccgttctttttgatgcgtttcttacctttggtctccatgagctcgtgtccccgctgggtgacaaagaggctgtccgtgtccccgtagaccgactttatgggccggtcctcgagcggtgtgccgcggtcctcctcgtagaggaaccccgcccactccgagacgaaagcccgggtccaggccagcacgaaggaggccacgtgggacgggtagcggtcgttgtccaccagcgggtccaccttttccagggtatgcaaacacatgtccccctcgtccacatccaggaaggtgattggcttgtaagtgtaggccacgtgaccgggggtcccggccgggggggtataaaagggtgcgggtccctgctcgtcctcactgtcttccggatcgctgtccaggagcgccagctgttggggtaggtattccctctcgaaggcgggcatgacctcggcactcaggttgtcagtttctagaaacgaggaggatttgatattgacggtgccggcggagatgcctttcaagagcccctcgtccatctggtcagaaaagacgatctttttgttgtcgagcttggtggcgaaggagccgtagagggcgttggagaggagcttggcgatggagcgcatggtctggtttttttccttgtcggcgcgctccttggcggcgatgttgagctgcacgtactcgcgcgccacgcacttccattcggggaagacggtggtcagctcgtcgggcacgattctgacctgccagccccgattatgcagggtgatgaggtccacactggtggccacctcgccgcgcaggggctcattagtccagcagaggcgtccgcccttgcgcgagcagaaggggggcagggggtccagcatgacctcgtcgggggggtcggcatcgatggtgaagatgccgggcaggaggtcggggtcaaagtagctgatggaagtggccagatcgtccagggcagcttgccattcgcgcacggccagcgcgcgctcgtagggactgaggggcgtgccccagggcatgggatgggtaagcgcggaggcgtacatgccgcagatgtcgtagacgtagaggggctcctcgaggatgccgatgtaggtggggtagcagcgccccccgcggatgctggcgcgcacgtagtcatacagctcgtgcgagggggcgaggagccccgggcccaggttggtgcgactgggcttttcggcgcggtagacgatctggcggaaaatggcatgcgagttggaggagatggtgggcctttggaagatgttgaagtgggcgtggggcagtccgaccgagtcgcggatgaagtgggcgtaggagtcttgcagcttggcgacgagctcggcggtgactaggacgtccagagcgcagtagtcgagggtctcctggatgatgtcatacttgagctgtcccttttgtttccacagctcgcggttgagaaggaactcttcgcggtccttccagtactcttcgagggggaacccgtcctgatctgcacggtaagagcctagcatgtagaactggttgacggccttgtaggcgcagcagcccttctccacggggagggcgtaggcctgggcggccttgcgcagggaggtgtgcgtgagggcgaaagtgtccctgaccatgaccttgaggaactggtgcttgaagtcgatatcgtcgcagcccccctgctcccagagctggaagtccgtgcgcttcttgtaggcggggttgggcaaagcgaaagtaacatcgttgaagaggatcttgcccgcgcggggcataaagttgcgagtgatgcggaaaggttggggcacctcggcccggttgttgatgacctgggcggcgagcacgatctcgtcgaagccgttgatgttgtggcccacgatgtagagttccacgaatcgcggacggcccttgacgtggggcagtttcttgagctcctcgtaggtgagctcgtcggggtcgctgagcccgtgctgctcgagcgcccagtcggcgagatgggggttggcgcggaggaaggaagtccagagatccacggccagggcggtttgcagacggtcccggtactgacggaactgctgcccgacggccattttttcgggggtgacgcagtagaaggtgcgggggtccccgtgccagcgatcccatttgagctggagggcgagatcgagggcgagctcgacgagccggtcgtccccggagagtttcatgaccagcatgaaggggacgagctgcttgccgaaggaccccatccaggtgtaggtttccacatcgtaggtgaggaagagcctttcggtgcgaggatgcgagccgatggggaagaactggatctcctgccaccaattggaggaatggctgttgatgtgatggaagtagaaatgccgacggcgcgccgaacactcgtgcttgtgtttatacaagcggccacagtgctcgcaacgctgcacgggatgcacgtgctgcacgagctgtacctgagttcctttgacgaggaatttcagtgggaagtggagtcgtggcgcctgcatctcgtgctgtactacgtcgtggtggtcggcctggccctcttctgcctcgatggtggtcatgctgacgagcccgcgcgggaggcaggtccagacctcggcgcgagcgggtcggagagcgaggacgagggcgcgcaggccggagctgtccagggtcctgagacgctgcggagtcaggtcagtgggcagcggcggcgcgcggttgacttgcaggagtttttccagggcgcgcgggaggtccagatggtacttgatctccaccgcgccattggtggcgacgtcgatggcttgcagggtcccgtgcccctggggtgtgaccaccgtcccccgtttcttcttgggcggctggggcgacgggggcggtgcctcttccatggttagaagcggcggcgaggacgcgcgccgggcggcaggggcggctcggggcccggaggcaggggcggcaggggcacgtcggcgccgcgcgcgggtaggttctggtactgcgcccggagaagactggcgtgagcgacgacgcgacggttgacgtcctggatctgacgcctctgggtgaaggccacgggacccgtgagtttgaacctgaaagagagttcgacagaatcaatctcggtatcgttgacggcggcctgccgcaggatctcttgcacgtcgcccgagttgtcctggtaggcgatctcggtcatgaactgctcgatctcctcctcttgaaggtctccgcggccggcgcgctccacggtggccgcgaggtcgttggagatgcggcccatgagctgcgagaaggcgttcatgcccgcctcgttccagacgcggctgtagaccacgacgccctcgggatcgcgggcgcgcatgaccacctgggcgaggttgagctccacgtggcgcgtgaagaccgcgtagttgcagaggcgctggtagaggtagttgagcgtggtggcgatgtgctcggtgacgaagaaatacatgatccagcggcggagcggcatctcgctgacgtcgcccagcgcctccaaacgttccatggcctcgtaaaagtccacggcgaagttgaaaaactgggagttgcgcgccgagacggtcaactcctcctccagaagacggatgagctcggcgatggtggcgcgcacctcgcgctcgaaggcccccgggagttcctccacttcctcttcttcctcctccactaacatctcttctacttcctcctcaggcggcagtggtggcgggggagggggcctgcgtcgccggcggcgcacgggcagacggtcgatgaagcgctcgatggtctcgccgcgccggcgtcgcatggtctcggtgacggcgcgcccgtcctcgcggggccgcagcgtgaagacgccgccgcgcatctccaggtggccgggggggtccccgttgggcagggagagggcgctgacgatgcatcttatcaattgccccgtagggactccgcgcaaggacctgagcgtctcgagatccacgggatctgaaaaccgctgaacgaaggcttcgagccagtcgcagtcgcaaggtaggctgagcacggtttcttctggcgggtcatgttggttgggagcggggcgggcgatgctgctggtgatgaagttgaaataggcggttctgagacggcggatggtggcgaggagcaccaggtctttgggcccggcttgctggatgcgcagacggtcggccatgccccaggcgtggtcctgacacctggccaggtccttgtagtagtcctgcatgagccgctccacgggcacctcctcctcgcccgcgcggccgtgcatgcgcgtgagcccgaagccgcgctggggctggacgagcgccaggtcggcgacgacgcgctcggcgaggatggcttgctggatctgggtgagggtggtctggaagtcatcaaagtcgacgaagcggtggtaggctccggtgttgatggtgtaggagcagttggccatgacggaccagttgacggtctggtggcccggacgcacgagctcgtggtacttgaggcgcgagtaggcgcgcgtgtcgaagatgtagtcgttgcaggtgcgcaccaggtactggtagccgatgaggaagtgcggcggcggctggcggtagagcggccatcgctcggtggcgggggcgccgggcgcgaggtcctcgagcatggtgcggtggtagccgtagatgtacctggacatccaggtgatgccggcggcggtggtggaggcgcgcgggaactcgcggacgcggttccagatgttgcgcagcggcaggaagtagttcatggtgggcacggtctggcccgtgaggcgcgcgcagtcgtggatgctctatacgggcaaaaacgaaagcggtcagcggctcgactccgtggcctggaggctaagcgaacgggttgggctgcgcgtgtaccccggttcgaatctcgaatcaggctggagccgcagctaacgtggtattggcactcccgtctcgacccaagcctgcaccaaccctccaggatacggaggcgggtcgttttgcaacttttttttggaggccggatgagactagtaagcgcggaaagcggccgaccgcgatggctcgctgccgtagtctggagaagaatcgccagggttgcgttgcggtgtgccccggttcgaggccggccggattccgcggctaacgagggcgtggctgccccgtcgtttccaagaccccatagccagccgacttctccagttacggagcgagcccctcttttgttttgtttgtttttgccagatgcatcccgtactgcggcagatgcgcccccaccaccctccaccgcaacaacagccccctccacagccggcgcttctgcccccgccccagcagcaacttccagccacgaccgccgcggccgccgtgagcggggctggacagagttatgatcaccagctggccttggaagagggcgaggggctggcgcgcctgggggcgtcgtcgccggagcggcacccgcgcgtgcagatgaaaagggacgctcgcgaggcctacgtgcccaagcagaacctgttcagagacaggagcggcgaggagcccgaggagatgcgcgcggcccggttccacgcggggcgggagctgcggcgcggcctggaccgaaagagggtgctgagggacgaggatttcgaggcggacgagctgacggggatcagccccgcgcgcgcgcacgtggccgcggccaacctggtcacggcgtacgagcagaccgtgaaggaggagagcaacttccaaaaatccttcaacaaccacgtgcgcaccctgatcgcgcgcgaggaggtgaccctgggcctgatgcacctgtgggacctgctggaggccatcgtgcagaaccccaccagcaagccgctgacggcgcagctgttcctggtggtgcagcatagtcgggacaacgaagcgttcagggaggcgctgctgaatatcaccgagcccgagggccgctggctcctggacctggtgaacattctgcagagcatcgtggtgcaggagcgcgggctgccgctgtccgagaagctggcggccatcaacttctcggtgctgagtttgggcaagtactacgctaggaagatctacaagaccccgtacgtgcccatagacaaggaggtgaagatcgacgggttttacatgcgcatgaccctgaaagtgctgaccctgagcgacgatctgggggtgtaccgcaacgacaggatgcaccgtgcggtgagcgccagcaggcggcgcgagctgagcgaccaggagctgatgcatagtctgcagcgggccctgaccggggccgggaccgagggggagagctactttgacatgggcgcggacctgcactggcagcccagccgccgggccttggaggcggcggcaggaccctacgtagaagaggtggacgatgaggtggacgaggagggcgagtacctggaagactgatggcgcgaccgtatttttgctagatgcaacaacaacagccacctcctgatcccgcgatgcgggcggcgctgcagagccagccgtccggcattaactcctcggacgattggacccaggccatgcaacgcatcatggcgctgacgacccgcaaccccgaagcctttagacagcagccccaggccaaccggctctcggccatcctggaggccgtggtgccctcgcgctccaaccccacgcacgagaaggtcctggccatcgtgaacgcgctggtggagaacaaggccatccgcggcgacgaggccggcctggtgtacaacgcgctgctggagcgcgtggcccgctacaacagcaccaacgtgcagaccaacctggaccgcatggtgaccgacgtgcgcgaggccgtggcccagcgcgagcggttccaccgcgagtccaacctgggatccatggtggcgctgaacgccttcctcagcacccagcccgccaacgtgccccggggccaggaggactacaccaacttcatcagcgccctgcgcctgatggtgaccgaggtgccccagagcgaggtgtaccagtccgggccggactacttcttccagaccagtcgccagggcttgcagaccgtgaacctgagccaggctttcaagaacttgcagggcctgtggggcgtgcaggccccggtcggggaccgcgcgacggtgtcgagcctgctgacgccgaactcgcgcctgctgctgctgctggtggcccccttcacggacagcggcagcatcaaccgcaactcgtacctgggctacctgattaacctgtaccgcgaggccatcggccaggcgcacgtggacgagcagacctaccaggagatcacccacgtgagccgcgccctgggccaggacgacccgggcaacctggaagccaccctgaactttttgctgaccaaccggtcgcagaagatcccgccccagtacgcgctcagcaccgaggaggagcgcatcctgcgttacgtgcagcagagcgtgggcctgttcctgatgcaggagggggccacccccagcgccgcgctcgacatgaccgcgcgcaacatggagcccagcatgtacgccagcaaccgcccgttcatcaataaactgatggactacttgcatcgggcggccgccatgaactctgactatttcaccaacgccatcctgaatccccactggctcccgccgccggggttctacacgggcgagtacgacatgcccgaccccaatgacgggttcctgtgggacgatgtggacagcagcgtgttctccccccgaccgggtgctaacgagcgccccttgtggaagaaggaaggcagcgaccgacgcccgtcctcggcgctgtccggccgcgagggtgctgccgcggcggtgcccgaggccgccagtcctttcccgagcttgcccttctcgctgaacagtatccgcagcagcgagctgggcaggatcacgcgcccgcgcttgctgggcgaagaggagtacttgaatgactcgctgttgagacccgagcgggagaagaacttccccaataacgggatagaaagcctggtggacaagatgagccgctggaagacgtatgcgcaggagcacagggacgatccccgggcgtcgcagggggccacgagccggggcagcgccgcccgtaaacgccggtggcacgacaggcagcggggacagatgtgggacgatgaggactccgccgacgacagcagcgtgttggacttgggtgggagtggtaacccgttcgctcacctgcgcccccgtatcgggcgcatgatgtaagagaaaccgaaaataaatgatactcaccaaggccatggcgaccagcgtgcgttcgtttcttctctgttgttgttgtatctagtatgatgaggcgtgcgtacccggagggtcctcctccctcgtacgagagcgtgatgcagcaggcgatggcggcggcggcgatgcagcccccgctggaggctccttacgtgcccccgcggtacctggcgcctacggaggggcggaacagcattcgttactcggagctggcacccttgtacgataccacccggttgtacctggtggacaacaagtcggcggacatcgcctcgctgaactaccagaacgaccacagcaacttcctgaccaccgtggtgcagaacaatgacttcacccccacggaggccagcacccagaccatcaactttgacgagcgctcgcggtggggcggccagctgaaaaccatcatgcacaccaacatgcccaacgtgaacgagttcatgtacagcaacaagttcaaggcgcgggtgatggtctcccgcaagacccccaatggggtgacagtgacagaggattatgatggtagtcaggatgagctgaagtatgaatgggtggaatttgagctgcccgaaggcaacttctcggtgaccatgaccatcgacctgatgaacaacgccatcatcgacaattacttggcggtggggcggcagaacggggtgctggagagcgacatcggcgtgaagttcgacactaggaacttcaggctgggctgggaccccgtgaccgagctggtcatgcccggggtgtacaccaacgaggctttccatcccgatattgtcttgctgcccggctgcggggtggacttcaccgagagccgcctcagcaacctgctgggcattcgcaagaggcagcccttccaggaaggcttccagatcatgtacgaggatctggaggggggcaacatccccgcgctcctggatgtcgacgcctatgagaaaagcaaggaggatgcagcagctgaagcaactgcagccgtagctaccgcctctaccgaggtcaggggcgataattttgcaagcgccgcagcagtggcagcggccgaggcggctgaaaccgaaagtaagatagtcattcagccggtggagaaggatagcaagaacaggagctacaacgtactaccggacaagataaacaccgcctaccgcagctggtacctagcctacaactatggcgaccccgagaagggcgtgcgctcctggacgctgctcaccacctcggacgtcacctgcggcgtggagcaagtctactggtcgctgcccgacatgatgcaagacccggtcaccttccgctccacgcgtcaagttagcaactacccggtggtgggcgccgagctcctgcccgtctactccaagagcttcttcaacgagcaggccgtctactcgcagcagctgcgcgccttcacctcgcttacgcacgtcttcaaccgcttccccgagaaccagatcctcgtccgcccgcccgcgcccaccattaccaccgtcagtgaaaacgttcctgctctcacagatcacgggaccctgccgctgcgcagcagtatccggggagtccagcgcgtgaccgttactgacgccagacgccgcacctgcccctacgtctacaaggccctgggcatagtcgcgccgcgcgtcctctcgagccgcaccttctaaatgtccattctcatctcgcccagtaataacaccggttggggcctgcgcgcgcccagcaagatgtacggaggcgctcgccaacgctccacgcaacaccccgtgcgcgtgcgcgggcacttccgcgctccctggggcgccctcaagggccgcgtgcggtcgcgcaccaccgtcgacgacgtgatcgaccaggtggtggccgacgcgcgcaactacacccccgccgccgcgcccgtctccaccgtggacgccgtcatcgacagcgtggtggccgacgcgcgccggtacgcccgcgccaagagccggcggcggcgcatcgcccggcggcaccggagcacccccgccatgcgcgcggcgcgagccttgctgcgcagggccaggcgcacgggacgcagggccatgctcagggcggccagacgcgcggcttcaggcgccagcgccggcaggacccggagacgcgcggccacggcggcggcagcggccatcgccagcatgtcccgcccgcggcgagggaacgtgtactgggtgcgcgacgccgccaccggtgtgcgcgtgcccgtgcgcacccgcccccctcgcacttgaagatgttcacttcgcgatgttgatgtgtcccagcggcgaggaggatgtccaagcgcaaattcaaggaagagatgctccaggtcatcgcgcctgagatctacggccctgcggtggtgaaggaggaaagaaagccccgcaaaatcaagcgggtcaaaaaggacaaaaaggaagaagaaagtgatgtggacggattggtggagtttgtgcgcgagttcgccccccggcggcgcgtgcagtggcgcgggcggaaggtgcaaccggtgctgagacccggcaccaccgtggtcttcacgcccggcgagcgctccggcaccgcttccaagcgctcctacgacgaggtgtacggggatgatgatattctggagcaggcggccgagcgcctgggcgagtttgcttacggcaagcgcagccgttccgcaccgaaggaagaggcggtgtccatcccgctggaccacggcaaccccacgccgagcctcaagcccgtgaccttgcagcaggtgctgccgaccgcggcgccgcgccgggggttcaagcgcgagggcgaggatctgtaccccaccatgcagctgatggtgcccaagcgccagaagctggaagacgtgctggagaccatgaaggtggacccggacgtgcagcccgaggtcaaggtgcggcccatcaagcaggtggccccgggcctgggcgtgcagaccgtggacatcaagattcccacggagcccatggaaacgcagaccgagcccatgatcaagcccagcaccagcaccatggaggtgcagacggatccctggatgccatcggctcctagtcgaagaccccggcgcaagtacggcgcggccagcctgctgatgcccaactacgcgctgcatccttccatcatccccacgccgggctaccgcggcacgcgcttctaccgcggtcataccagcagccgccgccgcaagaccaccactcgccgccgccgtcgccgcaccgccgctgcaaccacccctgccgccctggtgcggagagtgtaccgccgcggccgcgcacctctgaccctgccgcgcgcgcgctaccacccgagcatcgccatttaaactttcgcctgctttgcagatcaatggccctcacatgccgccttcgcgttcccattacgggctaccgaggaagaaaaccgcgccgtagaaggctggcggggaacgggatgcgtcgccaccaccaccggcggcggcgcgccatcagcaagcggttggggggaggcttcctgcccgcgctgatccccatcatcgccgcggcgatcggggcgatccccggcattgcttccgtggcggtgcaggcctctcagcgccactgagacacacttggaaacatcttgtaataaaccaatggactctgacgctcctggtcctgtgatgtgttttcgtagacagatggaagacatcaatttttcgtccctggctccgcgacacggcacgcggccgttcatgggcacctggagcgacatcggcaccagccaactgaacgggggcgccttcaattggagcagtctctggagcgggcttaagaatttcgggtccacgcttaaaacctatggcagcaaggcgtggaacagcaccacagggcaggcgctgagggataagctgaaagagcagaacttccagcagaaggtggtcgatgggctcgcctcgggcatcaacggggtggtggacctggccaaccaggccgtgcagcggcagatcaacagccgcctggacccggtgccgcccgccggctccgtggagatgccgcaggtggaggaggagctgcctcccctggacaagcggggcgagaagcgaccccgccccgatgcggaggagacgctgctgacgcacacggacgagccgcccccgtacgaggaggcggtgaaactgggtctgcccaccacgcggcccatcgcgcccctggccaccggggtgctgaaacccgaaaagcccgcgaccctggacttgcctcctccccagccttcccgcccctctacagtggctaagcccctgccgccggtggccgtggcccgcgcgcgacccgggggcaccgcccgccctcatgcgaactggcagagcactctgaacagcatcgtgggtctgggagtgcagagtgtgaagcgccgccgctgctattaaacctaccgtagcgcttaacttgcttgtctgtgtgtgtatgtattatgtcgccgccgccgctgtccaccagaaggaggagtgaagaggcgcgtcgccgagttgcaagatggccaccccatcgatgctgccccagtgggcgtacatgcacatcgccggacaggacgcttcggagtacctgagtccgggtctggtgcagtttgcccgcgccacagacacctacttcagtctggggaacaagtttaggaaccccacggtggcgcccacgcacgatgtgaccaccgaccgcagccagcggctgacgctgcgcttcgtgcccgtggaccgcgaggacaacacctactcgtacaaagtgcgctacacgctggccgtgggcgacaaccgcgtgctggacatggccagcacctactttgacatccgcggcgtgctggatcggggccctagcttcaaaccctactccggcaccgcctacaacagtctggcccccaagggagcacccaacacttgtcagtggacatataaagccgatggtgaaactgccacagaaaaaacctatacatatggaaatgcacccgtgcagggcattaacatcacaaaagatggtattcaacttggaactgacaccgatgatcagccaatctacgcagataaaacctatcagcctgaacctcaagtgggtgatgctgaatggcatgacatcactggtactgatgaaaagtatggaggcagagctcttaagcctgataccaaaatgaagccttgttatggttcttttgccaagcctactaataaagaaggaggtcaggcaaatgtgaaaacaggaacaggcactactaaagaatatgacatagacatggctttctttgacaacagaagtgcggctgctgctggcctagctccagaaattgttttgtatactgaaaatgtggatttggaaactccagatacccatattgtatacaaagcaggcacagatgacagcagctcttctattaatttgggtcagcaagccatgcccaacagacctaactacattggtttcagagacaactttatcgggctcatgtactacaacagcactggcaatatgggggtgctggccggtcaggcttctcagctgaatgctgtggttgacttgcaagacagaaacaccgagctgtcctaccagctcttgcttgactctctgggtgacagaacccggtatttcagtatgtggaatcaggcggtggacagctatgatcctgatgtgcgcattattgaaaatcatggtgtggaggatgaacttcccaactattgtttccctctggatgctgttggcagaacagatacttatcagggaattaaggctaatggaactgatcaaaccacatggaccaaagatgacagtgtcaatgatgctaatgagataggcaagggtaatccattcgccatggaaatcaacatccaagccaacctgtggaggaacttcctctacgccaacgtggccctgtacctgcccgactcttacaagtacacgccggccaatgttaccctgcccaccaacaccaacacctacgattacatgaacggccgggtggtggcgccctcgctggtggactcctacatcaacatcggggcgcgctggtcgctggatcccatggacaacgtgaaccccttcaaccaccaccgcaatgcggggctgcgctaccgctccatgctcctgggcaacgggcgctacgtgcccttccacatccaggtgccccagaaatttttcgccatcaagagcctcctgctcctgcccgggtcctacacctacgagtggaacttccgcaaggacgtcaacatgatcctgcagagctccctcggcaacgacctgcgcacggacggggcctccatctccttcaccagcatcaacctctacgccaccttcttccccatggcgcacaacacggcctccacgctcgaggccatgctgcgcaacgacaccaacgaccagtccttcaacgactacctctcggcggccaacatgctctaccccatcccggccaacgccaccaacgtgcccatctccatcccctcgcgcaactgggccgccttccgcggctggtccttcacgcgtctcaagaccaaggagacgccctcgctgggctccgggttcgacccctacttcgtctactcgggctccatcccctacctcgacggcaccttctacctcaaccacaccttcaagaaggtctccatcaccttcgactcctccgtcagctggcccggcaacgaccggctcctgacgcccaacgagttcgaaatcaagcgcaccgtcgacggcgagggctacaacgtggcccagtgcaacatgaccaaggactggttcctggtccagatgctggcccactacaacatcggctaccagggcttctacgtgcccgagggctacaaggaccgcatgtactccttcttccgcaacttccagcccatgagccgccaggtggtggacgaggtcaactacaaggactaccaggccgtcaccctggcctaccagcacaacaactcgggcttcgtcggctacctcgcgcccaccatgcgccagggccagccctaccccgccaactacccctacccgctcatcggcaagagcgccgtcaccagcgtcacccagaaaaagttcctctgcgacagggtcatgtggcgcatccccttctccagcaacttcatgtccatgggcgcgctcaccgacctcggccagaacatgctctatgccaactccgcccacgcgctagacatgaatttcgaagtcgaccccatggatgagtccacccttctctatgttgtcttcgaagtcttcgacgtcgtccgagtgcaccagccccaccgcggcgtcatcgaggccgtctacctgcgcacccccttctcggccggtaacgccaccacctaagctcttgcttcttgcaagccatggccgcgggctccggcgagcaggagctcagggccatcatccgcgacctgggctgcgggccctacttcctgggcaccttcgataagcgcttcccgggattcatggccccgcacaagctggcctgcgccatcgtcaacacggccggccgcgagaccgggggcgagcactggctggccttcgcctggaacccgcgctcgaacacctgctacctcttcgaccccttcgggttctcggacgagcgcctcaagcagatctaccagttcgagtacgagggcctgctgcgccgcagcgccctggccaccgaggaccgctgcgtcaccctggaaaagtccacccagaccgtgcagggtccgcgctcggccgcctgcgggctcttctgctgcatgttcctgcacgccttcgtgcactggcccgaccgccccatggacaagaaccccaccatgaacttgctgacgggggtgcccaacggcatgctccagtcgccccaggtggaacccaccctgcgccgcaaccaggaggcgctctaccgcttcctcaactcccactccgcctactttcgctcccaccgcgcgcgcatcgagaaggccaccgccttcgaccgcatgaatcaagacatgtaaaccgtgtgtgtatgttaaatgtctttaataaacagcactttcatgttacacatgcatctgagatgatttatttagaaatcgaaagggttctgccgggtctcggcatggcccgcgggcagggacacgttgcggaactggtacttggccagccacttgaactcggggatcagcagtttgggcagcggggtgtcggggaaggagtcggtccacagcttccgcgtcagttgcagggcgcccagcaggtcgggcgcggagatcttgaaatcgcagttgggacccgcgttctgcgcgcgggagttgcggtacacggggttgcagcactggaacaccatcagggccgggtgcttcacgctcgccagcaccgtcgcgtcggtgatgctctccacgtcgaggtcctcggcgttggccatcccgaagggggtcatcttgcaggtctgccttcccatggtgggcacgcacccgggcttgtggttgcaatcgcagtgcagggggatcagcatcatctgggcctggtcggcgttcatccccgggtacatggccttcatgaaagcctccaattgcctgaacgcctgctgggccttggctccctcggtgaagaagaccccgcaggacttgctagagaactggttggtggcgcacccggcgtcgtgcacgcagcagcgcgcgtcgttgttggccagctgcaccacgctgcgcccccagcggttctgggtgatcttggcccggtcggggttctccttcagcgcgcgctgcccgttctcgctcgccacatccatctcgatcatgtgctccttctggatcatggtggtcccgtgcaggcaccgcagcttgccctcggcctcggtgcacccgtgcagccacagcgcgcacccggtgcactcccagttcttgtgggcgatctgggaatgcgcgtgcacgaagccctgcaggaagcggcccatcatggtggtcagggtcttgttgctagtgaaggtcagcggaatgccgcggtgctcctcgttgatgtacaggtggcagatgcggcggtacacctcgccctgctcgggcatcagctggaagttggctttcaggtcggtctccacgcggtagcggtccatcagcatagtcatgatttccatacccttctcccaggccgagacgatgggcaggctcatagggttcttcaccatcatcttagcgctagcagccgcggccagggggtcgctctcgtccagggtctcaaagctccgcttgccgtccttctcggtgatccgcaccggggggtagctgaagcccacggccgccagctcctcctcggcctgtctttcgtcctcgctgtcctggctgacgtcctgcaggaccacatgcttggtcttgcggggtttcttcttgggcggcagcggcggcggagatgttggagatggcgagggggagcgcgagttctcgctcaccactactatctcttcctcttcttggtccgaggccacgcggcggtaggtatgtctcttcgggggcagaggcggaggcgacgggctctcgccgccgcgacttggcggatggctggcagagccccttccgcgttcgggggtgcgctcccggcggcgctctgactgacttcctccgcggccggccattgtgttctcctagggaggaacaacaagcatggagactcagccatcgccaacctcgccatctgcccccaccgccgacgagaagcagcagcagcagaatgaaagcttaaccgccccgccgcccagccccgccacctccgacgcggccgtcccagacatgcaagagatggaggaatccatcgagattgacctgggctatgtgacgcccgcggagcacgaggaggagctggcagtgcgcttttcacaagaagagatacaccaagaacagccagagcaggaagcagagaatgagcagagtcaggctgggctcgagcatgacggcgactacctccacctgagcgggggggaggacgcgctcatcaagcatctggcccggcaggccaccatcgtcaaggatgcgctgctcgaccgcaccgaggtgcccctcagcgtggaggagctcagccgcgcctacgagttgaacctcttctcgccgcgcgtgccccccaagcgccagcccaatggcacctgcgagcccaacccgcgcctcaacttctacccggtcttcgcggtgcccgaggccctggccacctaccacatctttttcaagaaccaaaagatccccgtctcctgccgcgccaaccgcacccgcgccgacgcccttttcaacctgggtcccggcgcccgcctacctgatatcgcctccttggaagaggttcccaagatcttcgagggtctgggcagcgacgagactcgggccgcgaacgctctgcaaggagaaggaggagagcatgagcaccacagcgccctggtcgagttggaaggcgacaacgcgcggctggcggtgctcaaacgcacggtcgagctgacccatttcgcctacccggctctgaacctgccccccaaagtcatgagcgcggtcatggaccaggtgctcatcaagcgcgcgtcgcccatctccgaggacgagggcatgcaagactccgaggagggcaagcccgtggtcagcgacgagcagctggcccggtggctgggtcctaatgctagtccccagagtttggaagagcggcgcaaactcatgatggccgtggtcctggtgaccgtggagctggagtgcctgcgccgcttcttcgccgacgcggagaccctgcgcaaggtcgaggagaacctgcactacctcttcaggcacgggttcgtgcgccaggcctgcaagatctccaacgtggagctgaccaacctggtctcctacatgggcatcttgcacgagaaccgcctggggcagaacgtgctgcacaccaccctgcgcggggaggcccggcgcgactacatccgcgactgcgtctacctctacctctgccacacctggcagacgggcatgggcgtgtggcagcagtgtctggaggagcagaacctgaaagagctctgcaagctcctgcagaagaacctcaagggtctgtggaccgggttcgacgagcgcaccaccgcctcggacctggccgacctcattttccccgagcgcctcaggctgacgctgcgcaacggcctgcccgactttatgagccaaagcatgttgcaaaactttcgctctttcatcctcgaacgctccggaatcctgcccgccacctgctccgcgctgccctcggacttcgtgccgctgaccttccgcgagtgccccccgccgctgtggagccactgctacctgctgcgcctggccaactacctggcctaccactcggacgtgatcgaggacgtcagcggcgagggcctgctcgagtgccactgccgctgcaacctctgcacgccgcaccgctccctggcctgcaacccccagctgctgagcgagacccagatcatcggcaccttcgagttgcaagggcccagcgaaggcgagggttcagccgccaaggggggtctgaaactcaccccggggctgtggacctcggcctacttgcgcaagttcgtgcccgaggactaccatcccttcgagatcaggttctacgaggaccaatcccatccgcccaaggccgagctgtcggcctgcgtcatcacccagggggcgatcctggcccaattgcaagccatccagaaatcccgccaagaattcttgctgaaaaagggccgcggggtctacctcgacccccagaccggtgaggagctcaaccccggcttcccccaggatgccccgaggaaacaagaagctgaaagtggagctgccgcccgtggaggatttggaggaagactgggagaacagcagtcaggcagaggaggaggagatggaggaagactgggacagcactcaggcagaggaggacagcctgcaagacagtctggaggaagacgaggaggaggcagaggaggaggtggaagaagcagccgccgccagaccgtcgtcctcggcgggggagaaagcaagcagcacggataccatctccgctccgggtcggggtcccgctcgaccacacagtagatgggacgagaccggacgattcccgaaccccaccacccagaccggtaagaaggagcggcagggatacaagtcctggcgggggcacaaaaacgccatcgtctcctgcttgcaggcctgcgggggcaacatctccttcacccggcgctacctgctcttccaccgcggggtgaactttccccgcaacatcttgcattactaccgtcacctccacagcccctactacttccaagaagaggcagcagcagcagaaaaagaccagcagaaaaccagcagctagaaaatccacagcggcggcagcaggtggactgaggatcgcggcgaacgagccggcgcaaacccgggagctgaggaaccggatctttcccaccctctatgccatcttccagcagagtcgggggcaggagcaggaactgaaagtcaagaaccgttctctgcgctcgctcacccgcagttgtctgtatcacaagagcgaagaccaacttcagcgcactctcgaggacgccgaggctctcttcaacaagtactgcgcgctcactcttaaagagtagcccgcgcccgcccagtcgcagaaaaaggcgggaattacgtcacctgtgcccttcgccctagccgcctccacccatcatcatgagcaaagagattcccacgccttacatgtggagctaccagccccagatgggcctggccgccggtgccgcccaggactactccacccgcatgaattggctcagcgccgggcccgcgatgatctcacgggtgaatgacatccgcgcccaccgaaaccagatactcctagaacagtcagcgctcaccgccacgccccgcaatcacctcaatccgcgtaattggcccgccgccctggtgtaccaggaaattccccagcccacgaccgtactacttccgcgagacgcccaggccgaagtccagctgactaactcaggtgtccagctggcgggcggcgccaccctgtgtcgtcaccgccccgctcagggtataaagcggctggtgatccggggcagaggcacacagctcaacgacgaggtggtgagctcttcgctgggtctgcgacctgacggagtcttccaactcgccggatcggggagatcttccttcacgcctcgtcaggccgtcctgactttggagagttcgtcctcgcagccccgctcgggtggcatcggcactctccagttcgtggaggagttcactccctcggtctacttcaaccccttctccggctcccccggccactacccggacgagttcatcccgaacttcgacgccatcagcgagtcggtggacggctacgattgaaactaatcacccccttatccagtgaaataaagatcatattgatgatgattttacagaaataaaaaataatcatttgatttgaaataaagatacaatcatattgatgatttgagtttaacaaaaaaataaagaatcacttacttgaaatctgataccaggtctctgtccatgttttctgccaacaccacttcactcccctcttcccagctctggtactgcaggccccggcgggctgcaaacttcctccacacgctgaaggggatgtcaaattcctcctgtccctcaatcttcattttatcttctatcagatgtccaaaaagcgcgtccgggtggatgatgacttcgaccccgtctacccctacgatgcagacaacgcaccgaccgtgcccttcatcaacccccccttcgtctcttcagatggattccaagagaagcccctgggggtgttgtccctgcgactggccgaccccgtcaccaccaagaacggggaaatcaccctcaagctgggagagggggtggacctcgattcctcgggaaaactcatctccaacacggccaccaaggccgccgcccctctcagtttttccaacaacaccatttcccttaacatggatcaccccttttacactaaagatggaaaattatccttacaagtttctccaccattaaatatactgagaacaagcattctaaacacactagctttaggttttggatcaggtttaggactccgtggctctgccttggcagtacagttagtctctccacttacatttgatactgatggaaacataaagcttaccttagacagaggtttgcatgttacaacaggagatgcaattgaaagcaacataagctgggctaaaggtttaaaatttgaagatggagccatagcaaccaacattggaaatgggttagagtttggaagcagtagtacagaaacaggtgttgatgatgcttacccaatccaagttaaacttggatctggccttagctttgacagtacaggagccataatggctggtaacaaagaagacgataaactcactttgtggacaacacctgatccatcaccaaactgtcaaatactcgcagaaaatgatgcaaaactaacactttgcttgactaaatgtggtagtcaaatactggccactgtgtcagtcttagttgtaggaagtggaaacctaaaccccattactggcaccgtaagcagtgctcaggtgtttctacgttttgatgcaaacggtgttcttttaacagaacattctacactaaaaaaatactgggggtataggcagggagatagcatagatggcactccatataccaatgctgtaggattcatgcccaatttaaaagcttatccaaagtcacaaagttctactactaaaaataatatagtagggcaagtatacatgaatggagatgtttcaaaacctatgcttctcactataaccctcaatggtactgatgacagcaacagtacatattcaatgtcattttcatacacctggactaatggaagctatgttggagcaacatttggggctaactcttataccttctcatacatcgcccaagaatgaacactgtatcccaccctgcatgccaacccttcccaccccactctgtggaacaaactctgaaacacaaaataaaataaagttcaagtgttttattgattcaacagttttacaggattcgagcagttatttttcctccaccctcccaggacatggaatacaccaccctctccccccgcacagccttgaacatctgaatgccattggtgatggacatgcttttggtctccacgttccacacagtttcagagcgagccagtctcgggtcggtcagggagatgaaaccctccgggcactcccgcatctgcacctcacagctcaacagctgaggattgtcctcggtggtcgggatcacggttatctggaagaagcagaagagcggcggtgggaatcatagtccgcgaacgggatcggccggtggtgtcgcatcaggccccgcagcagtcgctgccgccgccgctccgtcaagctgctgctcagggggtccgggtccagggactccctcagcatgatgcccacggccctcagcatcagtcgtctggtgcggcgggcgcagcagcgcatgcggatctcgctcaggtcgctgcagtacgtgcaacacagaaccaccaggttgttcaacagtccatagttcaacacgctccagccgaaactcatcgcgggaaggatgctacccacgtggccgtcgtaccagatcctcaggtaaatcaagtggtgccccctccagaacacgctgcccacgtacatgatctccttgggcatgtggcggttcaccacctcccggtaccacatcaccctctggttgaacatgcagccccggatgatcctgcggaaccacagggccagcaccgccccgcccgccatgcagcgaagagaccccgggtcccggcaatggcaatggaggacccaccgctcgtacccgtggatcatctgggagctgaacaagtctatgttggcacagcacaggcatatgctcatgcatctcttcagcactctcaactcctcgggggtcaaaaccatatcccagggcacggggaactcttgcaggacagcgaaccccgcagaacagggcaatcctcgcacagaacttacattgtgcatggacagggtatcgcaatcaggcagcaccgggtgatcctccaccagagaagcgcgggtctcggtctcctcacagcgtggtaagggggccggccgatacgggtgatggcgggacgcggctgatcgtgttcgcgaccgtgtcatgatgcagttgctttcggacattttcgtacttgctgtagcagaacctggtccgggcgctgcacaccgatcgccggcggcggtctcggcgcttggaacgctcggtgttgaaattgtaaaacagccactctctcagaccgtgcagcagatctagggcctcaggagtgatgaagatcccatcatgcctgatggctctgatcacatcgaccaccgtggaatgggccagacccagccagatgatgcaattttgttgggtttcggtgacggcgggggagggaagaacaggaagaaccatgattaacttttaatccaaacggtctcggagtacttcaaaatgaagatcgcggagatggcacctctcgcccccgctgtgttggtggaaaataacagccaggtcaaaggtgatacggttctcgagatgttccacggtggcttccagcaaagcctccacgcgcacatccagaaacaagacaatagcgaaagcgggagggttctctaattcctcaatcatcatgttacactcctgcaccatccccagataattttcatttttccagccttgaatgattcgaactagttcctgaggtaaatccaagccagccatgataaagagctcgcgcagagcgccctccaccggcattcttaagcacaccctcataattccaagatattctgctcctggttcacctgcagcagattgacaagcggaatatcaaaatctctgccgcgatccctgagctcctccctcagcaataactgtaagtactctttcatatcctctccgaaatttttagccataggaccaccaggaataagattagggcaagccacagtacagataaaccgaagtcctccccagtgagcattgccaaatgcaagactgctataagcatgctggctagacccggtgatatcttccagataactggacagaaaatcgcccaggcaatttttaagaaaatcaacaaaagaaaaatcctccaggtggacgtttagagcctcgggaacaacgatgaagtaaatgcaagcggtgcgttccagcatggttagttagctgatctgtagaaaaaacaaaaatgaacattaaaccatgctagcctggcgaacaggtgggtaaatcgttctctccagcaccaggcaggccacggggtctccggcgcgaccctcgtaaaaattgtcgctatgattgaaaaccatcacagagagacgttcccggtggccggcgtgaatgattcgacaagatgaatacacccccggaacattggcgtccgcgagtgaaaaaaagcgcccgaggaagcaataaggcactacaatgctcagtctcaagtccagcaaagcgatgccatgcggatgaagcacaaaattctcaggtgcgtacaaaatgtaattactcccctcctgcacaggcagcaaagcccccgatccctccaggtacacatacaaagcctcagcgtccatagcttaccgagcagcagcacacaacaggcgcaagagtcagagaaaggctgagctctaacctgtccacccgctctctgctcaatatatagcccagatctacactgacgtaaaggccaaagtctaaaaatacccgccaaataatcacacacgcccagcacacgcccagaaaccggtgacacactcaaaaaaatacgcgcacttcctcaaacgcccaaaactgccgtcatttccgggttcccacgctacgtcatcaaaacacgactttcaaattccgtcgaccgttaaaaacgtcacccgccccgcccctaacggtcgcccgtctctcagccaatcagcgccccgcatccccaaattcaaacacctcatttgcatattaacgcgcacaaaaagtttgaggtatattattgatgatgg

SEQ ID NO: 14 - DNA, 8602 bp, synthetic construct
  source 1..8602: mol_type = other DNA
atgggcggcgcatgagagaagcccagaccaattacctacccaaaatggagaaagttcacgttgacatcgaggaagacagcccattcctcagagctttgcagcggagcttcccgcagtttgaggtagaagccaagcaggtcactgataatgaccatgctaatgccagagcgttttcgcatctggcttcaaaactgatcgaaacggaggtggacccatccgacacgatccttgacattggaagtgcgcccgcccgcagaatgtattctaagcacaagtatcattgtatctgtccgatgagatgtgcggaagatccggacagattgtataagtatgcaactaagctgaagaaaaactgtaaggaaataactgataaggaattggacaagaaaatgaaggagctcgccgccgtcatgagcgaccctgacctggaaactgagactatgtgcctccacgacgacgagtcgtgtcgctacgaagggcaagtcgctgtttaccaggatgtatacgcggttgacggaccgacaagtctctatcaccaagccaataagggagttagagtcgcctactggataggctttgacaccaccccttttatgtttaagaacttggctggagcatatccatcatactctaccaactgggccgacgaaaccgtgttaacggctcgtaacataggcctatgcagctctgacgttatggagcggtcacgtagagggatgtccattcttagaaagaagtatttgaaaccatccaacaatgttctattctctgttggctcgaccatctaccacgagaagagggacttactgaggagctggcacctgccgtctgtatttcacttacgtggcaagcaaaattacacatgtcggtgtgagactatagttagttgcgacgggtacgtcgttaaaagaatagctatcagtccaggcctgtatgggaagccttcaggctatgctgctacgatgcaccgcgagggattcttgtgctgcaaagtgacagacacattgaacggggagagggtctcttttcccgtgtgcacgtatgtgccagctacattgtgtgaccaaatgactggcatactggcaacagatgtcagtgcggacgacgcgcaaaaactgctggttgggctcaaccagcgtatagtcgtcaacggtcgcacccagagaaacaccaataccatgaaaaattaccttttgcccgtagtggcccaggcatttgctaggtgggcaaaggaatataaggaagatcaagaagatgaaaggccactaggactacgagatagacagttagtcatggggtgttgttgggcttttagaaggcacaagataacatctatttataagcgcccggatacccaaaccatcatcaaagtgaacagcgatttccactcattcgtgctgcccaggataggcagtaacacattggagatcgggctgagaacaagaatcaggaaaatgttagaggagcacaaggagccgtcacctctcattaccgccgaggacgtacaagaagctaagtgcgcagccgatgaggctaaggaggtgcgtgaagccgaggagttgcgcgcagctctaccacctttggcagctgatgttgaggagcccactctggaagccgatgtcgacttgatgttacaagaggctggggccggctcagtggagacacctcgtggcttgataaaggttaccagctacgctggcgaggacaagatcggctcttacgctgtgctttctccgcaggctgtactcaagagtgaaaaattatcttgcatccaccctctcgctgaacaagtcatagtgataacacactctggccgaaaagggcgttatgccgtggaaccataccatggtaaagtagtggtgccagagggacatgcaatacccgtccaggactttcaagctctgagtgaaagtgccaccattgtgtacaacgaacgtgagttcgtaaacaggtacctgcaccatattgccacacatggaggagcgctgaacactgatgaagaatattacaaaactgtcaagcccagcgagcacgacggcgaatacctgtacgacatcgacaggaaacagtgcgtcaagaaagaactagtcactgggctagggctcacaggcgagctggtggatcctcccttccatgaattcgcctacgagagtctgagaacacgaccagccgctccttaccaagtaccaaccataggggtgtatggcgtgccaggatcaggcaagtctggcatcattaaaagcgcagtcaccaaaaaagatctagtggtgagcgccaagaaagaaaactgtgcagaaattataagggacgtcaagaaaatgaaagggctggacgtcaatgccagaactgtggactcagtgctcttgaatggatgcaaacaccccgtagagaccctgtatattgacgaagcttttgcttgtcatgcaggtactctcagagcgctcatagccattataagacctaaaaaggcagtgctctgcggggatcccaaacagtgcggtttttttaacatgatgtgcctgaaagtgcattttaaccacgagatttgcacacaagtcttccacaaaagcatctctcgccgttgcactaaatctgtgacttcggtcgtctcaaccttgttttacgacaaaaaaatgagaacgacgaatccgaaagagactaagattgtgattgacactaccggcagtaccaaacctaagcaggacgatctcattctcacttgtttcagagggtgggtgaagcagttgcaaatagattacaaaggcaacgaaataatgacggcagctgcctctcaagggctgacccgtaaaggtgtgtatgccgttcggtacaaggtgaatgaaaatcctctgtacgcacccacctcagaacatgtgaacgtcctactgacccgcacggaggaccgcatcgtgtggaaaacactagccggcgacccatggataaaaacactgactgccaagtaccctgggaatttcactgccacgatagaggagtggcaagcagagcatgatgccatcatgaggcacatcttggagagaccggaccctaccgacgtcttccagaataaggcaaacgtgtgttgggccaaggctttagtgccggtgctgaagaccgctggcatagacatgaccactgaacaatggaacactgtggattattttgaaacggacaaagctcactcagcagagatagtattgaaccaactatgcgtgaggttctttggactcgatctggactccggtctattttctgcacccactgttccgttatccattaggaataatcactgggataactccccgtcgcctaacatgtacgggctgaataaagaagtggtccgtcagctctctcgcaggtacccacaactgcctcgggcagttgccactggaagagtctatgacatgaacactggtacactgcgcaattatgatccgcgcataaacctagtacctgtaaacagaagactgcctcatgctttagtcctccaccataatgaacacccacagagtgacttttcttcattcgtcagcaaattgaagggcagaactgtcctggtggtcggggaaaagttgtccgtcccaggcaaaatggttgactggttgtcagaccggcctgaggctaccttcagagctcggctggatttaggcatcccaggtgatgtgcccaaatatgacataatatttgttaatgtgaggaccccatataaataccatcactatcagcagtgtgaagaccatgccattaagcttagcatgttgaccaagaaagcttgtctgcatctgaatcccggcggaacctgtgtcagcataggttatggttacgctgacagggccagcgaaagcatcattggtgctatagcgcggcagttcaagttttcccgggtatgcaaaccgaaatcctcacttgaagagacggaagttctgtttgtattcattgggtacgatcgcaaggcccgtacgcacaatccttacaagctttcatcaaccttgaccaacatttatacaggttccagactccacgaagccggatgtgcaccctcatatcatgtggtgcgaggggatattgccacggccaccgaaggagtgattataaatgctgctaacagcaaaggacaacctggcggaggggtgtgcggagcgctgtataagaaattcccggaaagcttcgatttacagccgatcgaagtaggaaaagcgcgactggtcaaaggtgcagctaaacatatcattcatgccgtaggaccaaacttcaacaaagtttcggaggttgaaggtgacaaacagttggcagaggcttatgagtccatcgctaagattgtcaacgataacaattacaagtcagtagcgattccactgttgtccaccggcatcttttccgggaacaaagatcgactaacccaatcattgaaccatttgctgacagctttagacaccactgatgcagatgtagccatatactgcagggacaagaaatgggaaatgactctcaaggaagcagtggctaggagagaagcagtggaggagatatgcatatccgacgactcttcagtgacagaacctgatgcagagctggtgagggtgcatccgaagagttctttggctggaaggaagggctacagcacaagcgatggcaaaactttctcatatttggaagggaccaagtttcaccaggcggccaaggatatagcagaaattaatgccatgtggcccgttgcaacggaggccaatgagcaggtatgcatgtatatcctcggagaaagcatgagcagtattaggtcgaaatgccccgtcgaagagtcggaagcctccacaccacctagcacgctgccttgcttgtgcatccatgccatgactccagaaagagtacagcgcctaaaagcctcacgtccagaacaaattactgtgtgctcatcctttccattgccgaagtatagaatcactggtgtgcagaagatccaatgctcccagcctatattgttctcaccgaaagtgcctgcgtatattcatccaaggaagtatctcgtggaaacaccaccggtagacgagactccggagccatcggcagagaaccaatccacagaggggacacctgaacaaccaccacttataaccgaggatgagaccaggactagaacgcctgagccgatcatcatcgaagaggaagaagaggatagcataagtttgctgtcagatggcccgacccaccaggtgctgcaagtcgaggcagacattcacgggccgccctctgtatctagctcatcctggtccattcctcatgcatccgactttgatgtggacagtttatccatacttgacaccctggagggagctagcgtgaccagcggggcaacgtcagccgagactaactcttacttcgcaaagagtatggagtttctggcgcgaccggtgcctgcgcctcgaacagtattcaggaaccctccacatcccgctccgcgcacaagaacaccgtcacttgcacccagcagggcctgctcgagaaccagcctagtttccaccccgccaggcgtgaatagggtgatcactagagaggagctcgaggcgcttaccccgtcacgcactcctagcaggtcggtctcgagaaccagcctggtctccaacccgccaggcgtaaatagggtgattacaagagaggagtttgaggcgttcgtagcacaacaacaatgacggtttgatgcgggtgcatacatcttttcctccgacaccggtcaagggcatttacaacaaaaatcagtaaggcaaacggtgctatccgaagtggtgttggagaggaccgaattggagatttcgtatgccccgcgcctcgaccaagaaaaagaagaattactacgcaagaaattacagttaaatcccacacctgctaacagaagcagataccagtccaggaaggtggagaacatgaaagccataacagctagacgtattctgcaaggcctagggcattatttgaaggcagaaggaaaagtggagtgctaccgaaccctgcatcctgttcctttgtattcatctagtgtgaaccgtgccttttcaagccccaaggtcgcagtggaagcctgtaacgccatgttgaaagagaactttccgactgtggcttcttactgtattattccagagtacgatgcctatttggacatggttgacggagcttcatgctgcttagacactgccagtttttgccctgcaaagctgcgcagctttccaaagaaacactcctatttggaacccacaatacgatcggcagtgccttcagcgatccagaacacgctccagaacgtcctggcagctgccacaaaaagaaattgcaatgtcacgcaaatgagagaattgcccgtattggattcggcggcctttaatgtggaatgcttcaagaaatatgcgtgtaataatgaatattgggaaacgtttaaagaaaaccccatcaggcttactgaagaaaacgtggtaaattacattaccaaattaaaaggaccaaaagctgctgctctttttgcgaagacacataatttgaatatgttgcaggacataccaatggacaggtttgtaatggacttaaagagagacgtgaaagtgactccaggaacaaaacatactgaagaacggcccaaggtacaggtgatccaggctgccgatccgctagcaacagcgtatctgtgcggaatccaccgagagctggttaggagattaaatgcggtcctgcttccgaacattcatacactgtttgatatgtcggctgaagactttgacgctattatagccgagcacttccagcctggggattgtgttctggaaactgacatcgcgtcgtttgataaaagtgaggacgacgccatggctctgaccgcgttaatgattctggaagacttaggtgtggacgcagagctgttgacgctgattgaggcggctttcggcgaaatttcatcaatacatttgcccactaaaactaaatttaaattcggagccatgatgaaatctggaatgttcctcacactgtttgtgaacacagtcattaacattgtaatcgcaagcagagtgttgagagaacggctaaccggatcaccatgtgcagcattcattggagatgacaatatcgtgaaaggagtcaaatcggacaaattaatggcagacaggtgcgccacctggttgaatatggaagtcaagattatagatgctgtggtgggcgagaaagcgccttatttctgtggagggtttattttgtgtgactccgtgaccggcacagcgtgccgtgtggcagaccccctaaaaaggctgtttaagcttggcaaacctctggcagcagacgatgaacatgatgatgacaggagaagggcattgcatgaagagtcaacacgctggaaccgagtgggtattctttcagagctgtgcaaggcagtagaatcaaggtatgaaaccgtaggaacttccatcatagttatggccatgactactctagctagcagtgttaaatcattcagctacctgagaggggcccctataactctctacggctaacctgaatggactacgactctagaatagtctttaattaaagtccgccatatgaggccaccatgcagatcttcgtgaagaccctgaccggcaagaccatcaccctagaggtggagcccagtgacaccatcgagaacgtgaaggccaagatccaggataaagagggcatcccccctgaccagcagaggctgatctttgccggcaagcagctggaagatggccgcaccctctctgattacaacatccagaaggagtcaaccctgcacctggtccttcgcctgagaggtggcgctgcttacagtataatcaactttgaaaaactggctgcttacggcatcctgggctttgtgtttacactggctgcctacctgctgtttggctatcctgtgtacgtggccgcttatggactgtgtaccctggtggccatgctggctgcttacaatctggtgcctatggtggccacagtggccgcctattgtcttggcggactgctgacaatggtggcagcctacagcccgagctatgcgtatcatcagtttgcagcctacggcccaggaccaggcgctaaatttgtggctgcctggacactgaaagccgccgctggaccaggtcctggacagtacatcaaggccaacagcaagttcatcggcatcaccgaactcggcccaggaccaggctatccctacgatgtgcctgattacgcctgatagtgatgattcgaacggccgtatcacgcccaaacatttacagccgcggtgtcaaaaaccgcgtggacgtggttaacatccctgctgggaggatcagccgtaattattataattggcttggtgctggctactattgtggccatgtacgtgctgaccaaccagaaacataattgaatacagcagcaattggcaagctgcttacatagaactcgcggcgattggcatgccgccttaaaatttttattttattttttcttttcttttccgaatcggattttgtttttaatatttcaaaaaaaaaaaaaaaaaaaaaaaaaaaaaaaaaaaaaaaaaaaaaaaaaaaaaaaaaaaaaaaaaaaaaaaaaaaaaaaa

SEQ ID NO: 15 - DNA, 9595 bp, synthetic construct
  source 1..9595: mol_type = other DNA
atgggcggcgcatgagagaagcccagaccaattacctacccaaaatggagaaagttcacgttgacatcgaggaagacagcccattcctcagagctttgcagcggagcttcccgcagtttgaggtagaagccaagcaggtcactgataatgaccatgctaatgccagagcgttttcgcatctggcttcaaaactgatcgaaacggaggtggacccatccgacacgatccttgacattggaagtgcgcccgcccgcagaatgtattctaagcacaagtatcattgtatctgtccgatgagatgtgcggaagatccggacagattgtataagtatgcaactaagctgaagaaaaactgtaaggaaataactgataaggaattggacaagaaaatgaaggagctcgccgccgtcatgagcgaccctgacctggaaactgagactatgtgcctccacgacgacgagtcgtgtcgctacgaagggcaagtcgctgtttaccaggatgtatacgcggttgacggaccgacaagtctctatcaccaagccaataagggagttagagtcgcctactggataggctttgacaccaccccttttatgtttaagaacttggctggagcatatccatcatactctaccaactgggccgacgaaaccgtgttaacggctcgtaacataggcctatgcagctctgacgttatggagcggtcacgtagagggatgtccattcttagaaagaagtatttgaaaccatccaacaatgttctattctctgttggctcgaccatctaccacgagaagagggacttactgaggagctggcacctgccgtctgtatttcacttacgtggcaagcaaaattacacatgtcggtgtgagactatagttagttgcgacgggtacgtcgttaaaagaatagctatcagtccaggcctgtatgggaagccttcaggctatgctgctacgatgcaccgcgagggattcttgtgctgcaaagtgacagacacattgaacggggagagggtctcttttcccgtgtgcacgtatgtgccagctacattgtgtgaccaaatgactggcatactggcaacagatgtcagtgcggacgacgcgcaaaaactgctggttgggctcaaccagcgtatagtcgtcaacggtcgcacccagagaaacaccaataccatgaaaaattaccttttgcccgtagtggcccaggcatttgctaggtgggcaaaggaatataaggaagatcaagaagatgaaaggccactaggactacgagatagacagttagtcatggggtgttgttgggcttttagaaggcacaagataacatctatttataagcgcccggatacccaaaccatcatcaaagtgaacagcgatttccactcattcgtgctgcccaggataggcagtaacacattggagatcgggctgagaacaagaatcaggaaaatgttagaggagcacaaggagccgtcacctctcattaccgccgaggacgtacaagaagctaagtgcgcagccgatgaggctaaggaggtgcgtgaagccgaggagttgcgcgcagctctaccacctttggcagctgatgttgaggagcccactctggaagccgatgtcgacttgatgttacaagaggctggggccggctcagtggagacacctcgtggcttgataaaggttaccagctacgctggcgaggacaagatcggctcttacgctgtgctttctccgcaggctgtactcaagagtgaaaaattatcttgcatccaccctctcgctgaacaagtcatagtgataacacactctggccgaaaagggcgttatgccgtggaaccataccatggtaaagtagtggtgccagagggacatgcaatacccgtccaggactttcaagctctgagtgaaagtgccaccattgtgtacaacgaacgtgagttcgtaaacaggtacctgcaccatattgccacacatggaggagcgctgaacactgatgaagaatattacaaaactgtcaagcccagcgagcacgacggcgaatacctgtacgacatcgacaggaaacagtgcgtcaagaaagaactagtcactgggctagggctcacaggcgagctggtggatcctcccttccatgaattcgcctacgagagtctgagaacacgaccagccgctccttaccaagtaccaaccataggggtgtatggcgtgccaggatcaggcaagtctggcatcattaaaagcgcagtcaccaaaaaagatctagtggtgagcgccaagaaagaaaactgtgcagaaattataagggacgtcaagaaaatgaaagggctggacgtcaatgccagaactgtggactcagtgctcttgaatggatgcaaacaccccgtagagaccctgtatattgacgaagcttttgcttgtcatgcaggtactctcagagcgctcatagccattataagacctaaaaaggcagtgctctgcggggatcccaaacagtgcggtttttttaacatgatgtgcctgaaagtgcattttaaccacgagatttgcacacaagtcttccacaaaagcatctctcgccgttgcactaaatctgtgacttcggtcgtctcaaccttgttttacgacaaaaaaatgagaacgacgaatccgaaagagactaagattgtgattgacactaccggcagtaccaaacctaagcaggacgatctcattctcacttgtttcagagggtgggtgaagcagttgcaaatagattacaaaggcaacgaaataatgacggcagctgcctctcaagggctgacccgtaaaggtgtgtatgccgttcggtacaaggtgaatgaaaatcctctgtacgcacccacctcagaacatgtgaacgtcctactgacccgcacggaggaccgcatcgtgtggaaaacactagccggcgacccatggataaaaacactgactgccaagtaccctgggaatttcactgccacgatagaggagtggcaagcagagcatgatgccatcatgaggcacatcttggagagaccggaccctaccgacgtcttccagaataaggcaaacgtgtgttgggccaaggctttagtgccggtgctgaagaccgctggcatagacatgaccactgaacaatggaacactgtggattattttgaaacggacaaagctcactcagcagagatagtattgaaccaactatgcgtgaggttctttggactcgatctggactccggtctattttctgcacccactgttccgttatccattaggaataatcactgggataactccccgtcgcctaacatgtacgggctgaataaagaagtggtccgtcagctctctcgcaggtacccacaactgcctcgggcagttgccactggaagagtctatgacatgaacactggtacactgcgcaattatgatccgcgcataaacctagtacctgtaaacagaagactgcctcatgctttagtcctccaccataatgaacacccacagagtgacttttcttcattcgtcagcaaattgaagggcagaactgtcctggtggtcggggaaaagttgtccgtcccaggcaaaatggttgactggttgtcagaccggcctgaggctaccttcagagctcggctggatttaggcatcccaggtgatgtgcccaaatatgacataatatttgttaatgtgaggaccccatataaataccatcactatcagcagtgtgaagaccatgccattaagcttagcatgttgaccaagaaagcttgtctgcatctgaatcccggcggaacctgtgtcagcataggttatggttacgctgacagggccagcgaaagcatcattggtgctatagcgcggcagttcaagttttcccgggtatgcaaaccgaaatcctcacttgaagagacggaagttctgtttgtattcattgggtacgatcgcaaggcccgtacgcacaatccttacaagctttcatcaaccttgaccaacatttatacaggttccagactccacgaagccggatgtgcaccctcatatcatgtggtgcgaggggatattgccacggccaccgaaggagtgattataaatgctgctaacagcaaaggacaacctggcggaggggtgtgcggagcgctgtataagaaattcccggaaagcttcgatttacagccgatcgaagtaggaaaagcgcgactggtcaaaggtgcagctaaacatatcattcatgccgtaggaccaaacttcaacaaagtttcggaggttgaaggtgacaaacagttggcagaggcttatgagtccatcgctaagattgtcaacgataacaattacaagtcagtagcgattccactgttgtccaccggcatcttttccgggaacaaagatcgactaacccaatcattgaaccatttgctgacagctttagacaccactgatgcagatgtagccatatactgcagggacaagaaatgggaaatgactctcaaggaagcagtggctaggagagaagcagtggaggagatatgcatatccgacgactcttcagtgacagaacctgatgcagagctggtgagggtgcatccgaagagttctttggctggaaggaagggctacagcacaagcgatggcaaaactttctcatatttggaagggaccaagtttcaccaggcggccaaggatatagcagaaattaatgccatgtggcccgttgcaacggaggccaatgagcaggtatgcatgtatatcctcggagaaagcatgagcagtattaggtcgaaatgccccgtcgaagagtcggaagcctccacaccacctagcacgctgccttgcttgtgcatccatgccatgactccagaaagagtacagcgcctaaaagcctcacgtccagaacaaattactgtgtgctcatcctttccattgccgaagtatagaatcactggtgtgcagaagatccaatgctcccagcctatattgttctcaccgaaagtgcctgcgtatattcatccaaggaagtatctcgtggaaacaccaccggtagacgagactccggagccatcggcagagaaccaatccacagaggggacacctgaacaaccaccacttataaccgaggatgagaccaggactagaacgcctgagccgatcatcatcgaagaggaagaagaggatagcataagtttgctgtcagatggcccgacccaccaggtgctgcaagtcgaggcagacattcacgggccgccctctgtatctagctcatcctggtccattcctcatgcatccgactttgatgtggacagtttatccatacttgacaccctggagggagctagcgtgaccagcggggcaacgtcagccgagactaactcttacttcgcaaagagtatggagtttctggcgcgaccggtgcctgcgcctcgaacagtattcaggaaccctccacatcccgctccgcgcacaagaacaccgtcacttgcacccagcagggcctgctcgagaaccagcctagtttccaccccgccaggcgtgaatagggtgatcactagagaggagctcgaggcgcttaccccgtcacgcactcctagcaggtcggtctcgagaaccagcctggtctccaacccgccaggcgtaaatagggtgattacaagagaggagtttgaggcgttcgtagcacaacaacaatgacggtttgatgcgggtgcatacatcttttcctccgacaccggtcaagggcatttacaacaaaaatcagtaaggcaaacggtgctatccgaagtggtgttggagaggaccgaattggagatttcgtatgccccgcgcctcgaccaagaaaaagaagaattactacgcaagaaattacagttaaatcccacacctgctaacagaagcagataccagtccaggaaggtggagaacatgaaagccataacagctagacgtattctgcaaggcctagggcattatttgaaggcagaaggaaaagtggagtgctaccgaaccctgcatcctgttcctttgtattcatctagtgtgaaccgtgccttttcaagccccaaggtcgcagtggaagcctgtaacgccatgttgaaagagaactttccgactgtggcttcttactgtattattccagagtacgatgcctatttggacatggttgacggagcttcatgctgcttagacactgccagtttttgccctgcaaagctgcgcagctttccaaagaaacactcctatttggaacccacaatacgatcggcagtgccttcagcgatccagaacacgctccagaacgtcctggcagctgccacaaaaagaaattgcaatgtcacgcaaatgagagaattgcccgtattggattcggcggcctttaatgtggaatgcttcaagaaatatgcgtgtaataatgaatattgggaaacgtttaaagaaaaccccatcaggcttactgaagaaaacgtggtaaattacattaccaaattaaaaggaccaaaagctgctgctctttttgcgaagacacataatttgaatatgttgcaggacataccaatggacaggtttgtaatggacttaaagagagacgtgaaagtgactccaggaacaaaacatactgaagaacggcccaaggtacaggtgatccaggctgccgatccgctagcaacagcgtatctgtgcggaatccaccgagagctggttaggagattaaatgcggtcctgcttccgaacattcatacactgtttgatatgtcggctgaagactttgacgctattatagccgagcacttccagcctggggattgtgttctggaaactgacatcgcgtcgtttgataaaagtgaggacgacgccatggctctgaccgcgttaatgattctggaagacttaggtgtggacgcagagctgttgacgctgattgaggcggctttcggcgaaatttcatcaatacatttgcccactaaaactaaatttaaattcggagccatgatgaaatctggaatgttcctcacactgtttgtgaacacagtcattaacattgtaatcgcaagcagagtgttgagagaacggctaaccggatcaccatgtgcagcattcattggagatgacaatatcgtgaaaggagtcaaatcggacaaattaatggcagacaggtgcgccacctggttgaatatggaagtcaagattatagatgctgtggtgggcgagaaagcgccttatttctgtggagggtttattttgtgtgactccgtgaccggcacagcgtgccgtgtggcagaccccctaaaaaggctgtttaagcttggcaaacctctggcagcagacgatgaacatgatgatgacaggagaagggcattgcatgaagagtcaacacgctggaaccgagtgggtattctttcagagctgtgcaaggcagtagaatcaaggtatgaaaccgtaggaacttccatcatagttatggccatgactactctagctagcagtgttaaatcattcagctacctgagaggggcccctataactctctacggctaacctgaatggactacgactctagaatagtctttaattaaagtccgccatatgagatggaagatgccaaaaacattaagaagggcccagcgccattctacccactcgaagacgggaccgccggcgagcagctgcacaaagccatgaagcgctacgccctggtgcccggcaccatcgcctttaccgacgcacatatcgaggtggacattacctacgccgagtacttcgagatgagcgttcggctggcagaagctatgaagcgctatgggctgaatacaaaccatcggatcgtggtgtgcagcgagaatagcttgcagttcttcatgcccgtgttgggtgccctgttcatcggtgtggctgtggccccagctaacgacatctacaacgagcgcgagctgctgaacagcatgggcatcagccagcccaccgtcgtattcgtgagcaagaaagggctgcaaaagatcctcaacgtgcaaaagaagctaccgatcatacaaaagatcatcatcatggatagcaagaccgactaccagggcttccaaagcatgtacaccttcgtgacttcccatttgccacccggcttcaacgagtacgacttcgtgcccgagagcttcgaccgggacaaaaccatcgccctgatcatgaacagtagtggcagtaccggattgcccaagggcgtagccctaccgcaccgcaccgcttgtgtccgattcagtcatgcccgcgaccccatcttcggcaaccagatcatccccgacaccgctatcctcagcgtggtgccatttcaccacggcttcggcatgttcaccacgctgggctacttgatctgcggctttcgggtcgtgctcatgtaccgcttcgaggaggagctattcttgcgcagcttgcaagactataagattcaatctgccctgctggtgcccacactatttagcttcttcgctaagagcactctcatcgacaagtacgacctaagcaacttgcacgagatcgccagcggcggggcgccgctcagcaaggaggtaggtgaggccgtggccaaacgcttccacctaccaggcatccgccagggctacggcctgacagaaacaaccagcgccattctgatcacccccgaaggggacgacaagcctggcgcagtaggcaaggtggtgcccttcttcgaggctaaggtggtggacttggacaccggtaagacactgggtgtgaaccagcgcggcgagctgtgcgtccgtggccccatgatcatgagcggctacgttaacaaccccgaggctacaaacgctctcatcgacaaggacggctggctgcacagcggcgacatcgcctactgggacgaggacgagcacttcttcatcgtggaccggctgaagagcctgatcaaatacaagggctaccaggtagccccagccgaactggagagcatcctgctgcaacaccccaacatcttcgacgccggggtcgccggcctgcccgacgacgatgccggcgagctgcccgccgcagtcgtcgtgctggaacacggtaaaaccatgaccgagaaggagatcgtggactatgtggccagccaggttacaaccgccaagaagctgcgcggtggtgttgtgttcgtggacgaggtgcctaaaggactgaccggcaagttggacgcccgcaagatccgcgagattctcattaaggccaagaagggcggcaagatcgccgtgtaattcgaacggccgtatcacgcccaaacatttacagccgcggtgtcaaaaaccgcgtggacgtggttaacatccctgctgggaggatcagccgtaattattataattggcttggtgctggctactattgtggccatgtacgtgctgaccaaccagaaacataattgaatacagcagcaattggcaagctgcttacatagaactcgcggcgattggcatgccgccttaaaatttttattttattttttcttttcttttccgaatcggattttgtttttaatatttcaaaaaaaaaaaaaaaaaaaaaaaaaaaaaaaaaaaaaaaaaaaaaaaaaaaaaaaaaaaaaaaaaaaaaaaaaaaaaaaa

SEQ ID NO: 16 - protein, 139 aa, synthetic construct
PSSLSASVGDRVTITCRASQSINSYLDWYQQKPGKAPKLLIYAASSLQSGVPSRFSGSGSGTDFTLTISSLQPEDFATYYCQQYYSTPFTFGPGTKVEIKRTVAAPSVFIFPPSDEQLKSGTASVVCLLNNFYPREAKV

SEQ ID NO: 17 - protein, 167 aa, synthetic construct
GVVQPGRSLRLSCAASGFTFSSYGMHWVRQAPGKGLEWVAVIWYDGSNKYYADSVKGRFTISRDNSKNTLYLQMNSLRAEDTAVYYCARDPRGATLYYYYYGMDVWGQGTTVTVSSASTKGPSVFPLAPCSRSTSESTAALGCLVKDYFPEPVTVSWNSGALTSGVH

SEQ ID NO: 18 - protein, 10 aa, synthetic construct
GFTFSSYGMH

SEQ ID NO: 19 - protein, 15 aa, synthetic construct
VIWYDGSNKYYADSV

SEQ ID NO: 20 - protein, 16 aa, synthetic construct
DPRGATLYYYYYGMDV

SEQ ID NO: 21 - protein, 11 aa, synthetic construct
RASQSINSYLD

SEQ ID NO: 22 - protein, 7 aa, synthetic construct
AASSLQS

SEQ ID NO: 23 - protein, 9 aa, synthetic construct
QQYYSTPFT

SEQ ID NO: 24 - protein, 108 aa, synthetic construct
EIVLTQSPGTLSLSPGERATLSCRASQRVSSSYLAWYQQKPGQAPRLLIYDASSRATGIPDRFSGSGSGTDFTLTISRLEPEDFAVYYCQQYGSLPWTFGQGTKVEIK

SEQ ID NO: 25 - protein, 121 aa, synthetic construct
EVQLVESGGGLVQPGGSLRLSCAASGFTFSRYWMSWVRQAPGKGLEWVANIKQDGSEKYYVDSVKGRFTISRDNAKNSLYLQMNSLRAEDTAVYYCAREGGWFGELAFDYWGQGTLVTVSS

SEQ ID NO: 26 - protein, 5 aa, synthetic construct
RYWMS

SEQ ID NO: 27 - protein, 17 aa, synthetic construct
NIKQDGSEKYYVDSVKG

SEQ ID NO: 28 - protein, 12 aa, synthetic construct
EGGWFGELAFDY

SEQ ID NO: 29 - protein, 12 aa, synthetic construct
RASQRVSSSYLA

SEQ ID NO: 30 - protein, 7 aa, synthetic construct
DASSRAT

SEQ ID NO: 31 - protein, 9 aa, synthetic construct
QQYGSLPWT

SEQ ID NO: 32 - DNA, 2019 bp, synthetic construct
  source 1..2019: mol_type = other DNA
gcccgggcatttaaatgcgatcgcatcgattacgactctagaatagtctagtccgcaggccaccatgcagatcttcgtgaagaccctgaccggcaagaccatcaccctagaggtggagcccagtgacaccatcgagaacgtgaaggccaagatccaggataaagagggcatcccccctgaccagcagaggctgatctttgccggcaagcagctggaagatggccgcaccctctctgattacaacatccagaaggagtcaaccctgcacctggtccttcgcctgagaggtgccatgtttcaggcgctgagcgaaggctgcaccccgtatgatattaaccagatgctgaacgtgctgggcgatcatcaggtctcaggccttgagcagcttgagagtataatcaactttgaaaaactgactgaatggaccagttctaatgttatgcctatcctgtctcctctgacaaagggcatcctgggcttcgtgtttaccctgaccgtgccttctgagagaggacttagctgcattagcgaagcggatgcgaccaccccggaaagcgcgaacctgggcgaagaaattctgagccagctgtatctttggccaagggtgacctaccattcccctagttatgcttaccaccaatttgaaagacgagccaaatataaaagacacttccccggctttggccagagcctgctgtttggctaccctgtgtacgtgttcggcgattgcgtgcagggcgattgggatgcgattcgctttcgctattgcgcgccgccgggctatgcgctgctgcgctgcaacgataccaactatagcgctctgctggctgtgggggccctagaaggacccaggaatcaggactggcttggtgtcccaagacaacttgtaactcggatgcaggctattcagaatgccggcctgtgtaccctggtggccatgctggaagagacaatcttctggctgcaagcgtttctgatggcgctgaccgatagcggcccgaaaaccaacattattgtggatagccagtatgtgatgggcattagcaaaccgagctttcaggaatttgtggattgggaaaacgtgagcccggaactgaacagcaccgatcagccgttttggcaagccggaatcctggccagaaatctggtgcctatggtggccacagtgcagggccagaacctgaagtaccagggtcagtcactagtcatctctgcttctatcattgtcttcaacctgctggaactggaaggtgattatcgagatgatggcaacgtgtgggtgcataccccgctgagcccgcgcaccctgaacgcgtgggtgaaagcggtggaagaaaaaaaaggtattccagttcacctagagctggccagtatgaccaacatggagctcatgagcagtattgtgcatcagcaggtcagaacatacggccccgtgttcatgtgtctcggcggactgcttacaatggtggctggtgctgtgtggctgacagtgcgagtgctcgagctgttccgggccgcgcagctggccaacgacgtggtcctccagatcatggagctttgtggtgcagcgtttcgccaggtgtgccataccaccgtgccgtggccgaacgcgagcctgaccccgaaatggaacaacgaaaccacccagccccagatcgccaactgcagcgtgtatgacttttttgtgtggctccattattattctgttcgagacacactttggccaagggtgacctaccatatgaacaaatatgcgtatcatatgctggaaagacgagccaaatataaaagaggaccaggacctggcgctaaatttgtggccgcctggacactgaaagccgctgctggtcctggacctggccagtacatcaaggccaacagcaagttcatcggcatcaccgaactcggacccggaccaggctgatgatttcgaaatttaaataagcttgcggccgctagggataacagggtaattatcacgcccaaacatttacagccgcggtgtcaaaaaccgcgtgg

SEQ ID NO: 33 - protein, 619 aa, synthetic construct
MQIFVKTLTGKTITLEVEPSDTIENVKAKIQDKEGIPPDQQRLIFAGKQLEDGRTLSDYNIQKESTLHLVLRLRGAMFQALSEGCTPYDINQMLNVLGDHQVSGLEQLESIINFEKLTEWTSSNVMPILSPLTKGILGFVFTLTVPSERGLSCISEADATTPESANLGEEILSQLYLWPRVTYHSPSYAYHQFERRAKYKRHFPGFGQSLLFGYPVYVFGDCVQGDWDAIRFRYCAPPGYALLRCNDTNYSALLAVGALEGPRNQDWLGVPRQLVTRMQAIQNAGLCTLVAMLEETIFWLQAFLMALTDSGPKTNIIVDSQYVMGISKPSFQEFVDWENVSPELNSTDQPFWQAGILARNLVPMVATVQGQNLKYQGQSLVISASIIVFNLLELEGDYRDDGNVWVHTPLSPRTLNAWVKAVEEKKGIPVHLELASMTNMELMSSIVHQQVRTYGPVFMCLGGLLTMVAGAVWLTVRVLELFRAAQLANDVVLQIMELCGAAFRQVCHTTVPWPNASLTPKWNNETTQPQIANCSVYDFFVWLHYYSVRDTLWPRVTYHMNKYAYHMLERRAKYKRGPGPGAKFVAAWTLKAAAGPGPGQYIKANSKFIGITELGPGPG

SEQ ID NO: 34 - DNA, 1638 bp, synthetic construct
  source 1..1638: mol_type = other DNA
atggccgggatgttccaggcactgtccgaaggctgcacaccctatgatattaaccagatgctgaatgtcctgggagaccaccaggtctctggcctggagcagctggagagcatcatcaacttcgagaagctgaccgagtggacaagctccaatgtgatgcctatcctgtccccactgaccaagggcatcctgggcttcgtgtttaccctgacagtgccttctgagcggggcctgtcttgcatcagcgaggcagacgcaaccacaccagagtccgccaatctgggcgaggagatcctgtctcagctgtacctgtggccccgggtgacatatcactccccttcttacgcctatcaccagttcgagcggagagccaagtacaagagacacttcccaggctttggccagtctctgctgttcggctaccccgtgtacgtgttcggcgattgcgtgcagggcgactgggatgccatccggtttagatactgcgcaccacctggatatgcactgctgaggtgtaacgacaccaattattccgccctgctggcagtgggcgccctggagggccctcgcaatcaggattggctgggcgtgccaaggcagctggtgacacgcatgcaggccatccagaacgcaggcctgtgcaccctggtggcaatgctggaggagacaatcttctggctgcaggcctttctgatggccctgaccgacagcggccccaagacaaacatcatcgtggattcccagtacgtgatgggcatctccaagccttctttccaggagtttgtggactgggagaacgtgagcccagagctgaattccaccgatcagccattctggcaggcaggaatcctggcaaggaacctggtgcctatggtggccacagtgcagggccagaatctgaagtaccagggccagagcctggtcatcagcgcctccatcatcgtgtttaacctgctggagctggagggcgactatcgggacgatggcaacgtgtgggtgcacaccccactgagccccagaacactgaacgcctgggtgaaggccgtggaggagaagaagggcatcccagtgcacctggagctggcctccatgaccaatatggagctgatgtctagcatcgtgcaccagcaggtgaggacatacggacccgtgttcatgtgcctgggaggcctgctgaccatggtggcaggagccgtgtggctgacagtgcgggtgctggagctgttcagagccgcccagctggccaacgatgtggtgctgcagatcatggagctgtgcggagcagcctttcgccaggtgtgccacaccacagtgccatggcccaatgcctccctgacccccaagtggaacaatgagacaacacagcctcagatcgccaactgtagcgtgtacgacttcttcgtgtggctgcactactatagcgtgagggataccctgtggccccgcgtgacataccacatgaataagtacgcctatcacatgctggagaggcgcgccaagtataagagaggccctggcccaggcgcaaagtttgtggcagcatggaccctgaaggccgccgccggccccggccccggccagtatatcaaggctaacagtaagttcattggaatcacagagctgggacccggacctgga

SEQ ID NO: 35 - protein, 546 aa, synthetic construct
MAGMFQALSEGCTPYDINQMLNVLGDHQVSGLEQLESIINFEKLTEWTSSNVMPILSPLTKGILGFVFTLTVPSERGLSCISEADATTPESANLGEEILSQLYLWPRVTYHSPSYAYHQFERRAKYKRHFPGFGQSLLFGYPVYVFGDCVQGDWDAIRFRYCAPPGYALLRCNDTNYSALLAVGALEGPRNQDWLGVPRQLVTRMQAIQNAGLCTLVAMLEETIFWLQAFLMALTDSGPKTNIIVDSQYVMGISKPSFQEFVDWENVSPELNSTDQPFWQAGILARNLVPMVATVQGQNLKYQGQSLVISASIIVFNLLELEGDYRDDGNVWVHTPLSPRTLNAWVKAVEEKKGIPVHLELASMTNMELMSSIVHQQVRTYGPVFMCLGGLLTMVAGAVWLTVRVLELFRAAQLANDVVLQIMELCGAAFRQVCHTTVPWPNASLTPKWNNETTQPQIANCSVYDFFVWLHYYSVRDTLWPRVTYHMNKYAYHMLERRAKYKRGPGPGAKFVAAWTLKAAAGPGPGQYIKANSKFIGITELGPGPG

SEQ ID NO: 36 - DNA, 2019 bp, synthetic construct
  source 1..2019: mol_type = other DNA
gcccgggcatttaaatgcgatcgcatcgattacgactctagaatagtctagtccgcaggccaccatgcagatcttcgtgaagaccctgaccggcaagaccatcaccctagaggtggagcccagtgacaccatcgagaacgtgaaggccaagatccaggataaagagggcatcccccctgaccagcagaggctgatctttgccggcaagcagctggaagatggccgcaccctctctgattacaacatccagaaggagtcaaccctgcacctggtccttcgcctgagaggtgccatgtttcaggcgctgagcgaaggctgcaccccgtatgatattaaccagatgctgaacgtgctgggcgatcatcagtttaagcacatcaaagcctttgaccggacatttgctaacaacccaggtcccatggttgtgtttgccacacctgggcctatcctgtctcctctgacaaagggcatcctgggcttcgtgtttaccctgaccgtgccttctgagagaggacttagctgcattagcgaagcggatgcgaccaccccggaaagcgcgaacctgggcgaagaaattctgagccagctgtatctttggccaagggtgacctaccattcccctagttatgcttaccaccaatttgaaagacgagccaaatataaaagacacttccccggctttggccagagcctgctgtttggctaccctgtgtacgtgttcggcgattgcgtgcagggcgattgggatgcgattcgctttcgctattgcgcgccgccgggctatgcgctgctgcgctgcaacgataccaactatagcgctctgctggctgtgggggccctagaaggacccaggaatcaggactggcttggtgtcccaagacaacttgtaactcggatgcaggctattcagaatgccggcctgtgtaccctggtggccatgctggaagagacaatcttctggctgcaagcgtttctgatggcgctgaccgatagcggcccgaaaaccaacattattgtggatagccagtatgtgatgggcattagcaaaccgagctttcaggaatttgtggattgggaaaacgtgagcccggaactgaacagcaccgatcagccgttttggcaagccggaatcctggccagaaatctggtgcctatggtggccacagtgcagggccagaacctgaagtaccagggtcagtcactagtcatctctgcttctatcattgtcttcaacctgctggaactggaaggtgattatcgagatgatggcaacgtgtgggtgcataccccgctgagcccgcgcaccctgaacgcgtgggtgaaagcggtggaagaaaaaaaaggtattccagttcacctagagctggccagtatgaccaacatggagctcatgagcagtattgtgcatcagcaggtcagaacatacggccccgtgttcatgtgtctcggcggactgcttacaatggtggctggtgctgtgtggctgacagtgcgagtgctcgagctgttccgggccgcgcagctggccaacgacgtggtcctccagatcatggagctttgtggtgcagcgtttcgccaggtgtgccataccaccgtgccgtggccgaacgcgagcctgaccccgaaatggaacaacgaaaccacccagccccagatcgccaactgcagcgtgtatgacttttttgtgtggctccattattattctgttcgagacacactttggccaagggtgacctaccatatgaacaaatatgcgtatcatatgctggaaagacgagccaaatataaaagaggaccaggacctggcgctaaatttgtggccgcctggacactgaaagccgctgctggtcctggacctggccagtacatcaaggccaacagcaagttcatcggcatcaccgaactcggacccggaccaggctgatgatttcgaaatttaaataagcttgcggccgctagggataacagggtaattatcacgcccaaacatttacagccgcggtgtcaaaaaccgcgtgg

SEQ ID NO: 37 - protein, 619 aa, synthetic construct
MQIFVKTLTGKTITLEVEPSDTIENVKAKIQDKEGIPPDQQRLIFAGKQLEDGRTLSDYNIQKESTLHLVLRLRGAMFQALSEGCTPYDINQMLNVLGDHQFKHIKAFDRTFANNPGPMVVFATPGPILSPLTKGILGFVFTLTVPSERGLSCISEADATTPESANLGEEILSQLYLWPRVTYHSPSYAYHQFERRAKYKRHFPGFGQSLLFGYPVYVFGDCVQGDWDAIRFRYCAPPGYALLRCNDTNYSALLAVGALEGPRNQDWLGVPRQLVTRMQAIQNAGLCTLVAMLEETIFWLQAFLMALTDSGPKTNIIVDSQYVMGISKPSFQEFVDWENVSPELNSTDQPFWQAGILARNLVPMVATVQGQNLKYQGQSLVISASIIVFNLLELEGDYRDDGNVWVHTPLSPRTLNAWVKAVEEKKGIPVHLELASMTNMELMSSIVHQQVRTYGPVFMCLGGLLTMVAGAVWLTVRVLELFRAAQLANDVVLQIMELCGAAFRQVCHTTVPWPNASLTPKWNNETTQPQIANCSVYDFFVWLHYYSVRDTLWPRVTYHMNKYAYHMLERRAKYKRGPGPGAKFVAAWTLKAAAGPGPGQYIKANSKFIGITELGPGPG

SEQ ID NO: 38 - DNA, 228 bp, synthetic construct
  source 1..228: mol_type = other DNA
atgcagatcttcgtgaagaccctgaccggcaagaccatcaccctagaggtggagcccagtgacaccatcgagaacgtgaaggccaagatccaggataaagagggcatcccccctgaccagcagaggctgatctttgccggcaagcagctggaagatggccgcaccctctctgattacaacatccagaaggagtcaaccctgcacctggtccttcgcctgagaggtggc

SEQ ID NO: 39 - DNA, 228 bp, synthetic construct
  source 1..228: mol_type = other DNA
atgcagatcttcgtgaagaccctgaccggcaagaccatcaccctagaggtggagcccagtgacaccatcgagaacgtgaaggccaagatccaggataaagagggcatcccccctgaccagcagaggctgatctttgccggcaagcagctggaagatggccgcaccctctctgattacaacatccagaaggagtcaaccctgcacctggtccttcgcctgagaggtgcc

SEQ ID NO: 40 - DNA, 78 bp, Homo sapiens
  source 1..78: mol_type = genomic DNA
atggccgtcatggcgccccgaaccctcgtcctgctactctcgggggctctggccctgacccagacctgggcgggctct

SEQ ID NO: 41 - DNA, 201 bp, Homo sapiens
  source 1..201: mol_type = genomic DNA
ccgtcttcccagcccaccatccccatcgtgggcatcattgctggcctggttctctttggagctgtgatcactggagctgtggtcgctgctgtgatgtggaggaggaagagctcagatagaaaaggagggagctactctcaggctgcaagcagtgacagtgcccagggctctgatgtgtctctcacagcttgtaaagtgtga

SEQ ID NO: 42 - DNA, 60 bp, synthetic construct
  source 1..60: mol_type = other DNA
atggagaccgatacactgctgctgtgggtgctgctcctgtgggtgccaggaagcacaggc

SEQ ID NO: 43 - DNA, 3178 bp, Homo sapiens
  source 1..3178: mol_type = genomic DNA
ggcaccgattcggggcctgcccggacttcgccgcacgctgcagaacctcgcccagcgcccaccatgccccggcagctcagcgcggcggccgcgctcttcgcgtccctggccgtaattttgcacgatggcagtcaaatgagagcaaaagcatttccagaaaccagagattattctcaacctactgcagcagcaacagtacaggacataaaaaaacctgtccagcaaccagctaagcaagcacctcaccaaactttagcagcaagattcatggatggtcatatcacctttcaaacagcggccacagtaaaaattccaacaactaccccagcaactacaaaaaacactgcaaccaccagcccaattacctacaccctggtcacaacccaggccacacccaacaactcacacacagctcctccagttactgaagttacagtcggccctagcttagccccttattcactgccacccaccatcaccccaccagctcatacagctggaaccagttcatcaaccgtcagccacacaactgggaacaccactcaacccagtaaccagaccacccttccagcaactttatcgatagcactgcacaaaagcacaaccggtcagaagcctgatcaacccacccatgccccaggaacaacggcagctgcccacaataccacccgcacagctgcacctgcctccacggttcctgggcccacccttgcacctcagccatcgtcagtcaagactggaatttatcaggttctaaacggaagcagactctgtataaaagcagagatggggatacagctgattgttcaagacaaggagtcggttttttcacctcggagatacttcaacatcgaccccaacgcaacgcaagcctctgggaactgtggcacccgaaaatccaaccttctgttgaattttcagggcggatttgtgaatctcacatttaccaaggatgaagaatcatattatatcagtgaagtgggagcctatttgaccgtctcagatccagagacagtttaccaaggaatcaaacatgcggtggtgatgttccagacagcagtcgggcattccttcaagtgcgtgagtgaacagagcctccagttgtcagcccacctgcaggtgaaaacaaccgatgtccaacttcaagcctttgattttgaagatgaccactttggaaatgtggatgagtgctcgtctgactacacaattgtgcttcctgtgattggggccatcgtggttggtctctgccttatgggtatgggtgtctataaaatccgcctaaggtgtcaatcatctggataccagagaatctaattgttgcccggggggaatgaaaataatggaatttagagaactctttcatcccttccaggatggatgttgggaaattccctcagagtgtgggtccttcaaacaatgtaaaccaccatcttctattcaaatgaagtgagtcatgtgtgatttaagttcaggcagcacatcaatttctaaatactttttgtttattttatgaaagatatagtgagctgtttattttctagtttcctttagaatattttagccactcaaagtcaacatttgagatatgttgaattaacataatatatgtaaagtagaataagccttcaaattataaaccaagggtcaattgtaactaatactactgtgtgtgcattgaagattttattttacccttgatcttaacaaagcctttgctttgttatcaaatggactttcagtgcttttactatctgtgttttatggtttcatgtaacatacatattcctggtgtagcacttaactccttttccactttaaatttgtttttgttttttgagacggagtttcactcttgtcacccaggctggagtacagtggcacgatctcggcttatggcaacctccgcctcccgggttcaagtgattctcctgcttcagcttcccgagtagctgggattacaggcacacactaccacgcctggctaatttttgtatttttattatagacgggtttcaccatgttggccagactggtcttgaactcttgacctcaggtgatccacccacctcagcctcccaaagtgctgggattacaggcatgagccattgcgcccggccttaaatgttttttttaatcatcaaaaagaacaacatatctcaggttgtctaagtgtttttatgtaaaaccaacaaaaagaacaaatcagcttatattttttatcttgatgactcctgctccagaattgctagactaagaattaggtggctacagatggtagaactaaacaataagcaagagacaataataatggcccttaattattaacaaagtgccagagtctaggctaagcactttatctatatctcatttcattctcacaacttataagtgaatgagtaaactgagacttaagggaactgaatcacttaaatgtcacctggctaactgatggcagagccagagcttgaattcatgttggtctgacatcaaggtctttggtcttctccctacaccaagttacctacaagaacaatgacaccacactctgcctgaaggctcacacctcataccagcatacgctcaccttacagggaaatgggtttatccaggatcatgagacattagggtagatgaaaggagagctttgcagataacaaaatagcctatccttaataaatcctccactctctggaaggagactgaggggctttgtaaaacattagtcagttgctcatttttatgggattgcttagctgggctgtaaagatgaaggcatcaaataaactcaaagtatttttaaatttttttgataatagagaaacttcgctaaccaactgttctttcttgagtgtatagccccatcttgtggtaacttgctgcttctgcacttcatatccatatttcctattgttcactttattctgtagagcagcctgccaagaattttatttctgctgttttttttgctgctaaagaaaggaactaagtcaggatgttaacagaaaagtccacataaccctagaattcttagtcaaggaataattcaagtcagcctagagaccatgttgactttcctcatgtgtttccttatgactcagtaagttggcaaggtcctgactttagtcttaataaaacattgaattgtagtaaaggtttttgcaataaaaacttactttgg

SEQ ID NO: 44 - DNA, 1858 bp, Mus sp.
  source 1..1858: mol_type = genomic DNA
attccggaggtgaaaaacaatggcacaacgtgtataatggccagcttctctgcctcctttctgaccacctacgagactgcgaatggttctcagatcgtgaacatttccctgccagcctctgcagaagtactgaaaaatggcagttcttgtggtaaagaaaatgtttctgaccccagcctcacaattacttttggaagaggatatttactgacactcaacttcacaaaaaatacaacacgttacagtgtccagcatatgtattttacatataacttgtcagatacagaacattttcccaatgccatcagcaaagagatctacaccatggattccacaactgacatcaaggcagacatcaacaaagcataccggtgtgtcagtgatatccgggtctacatgaagaatgtgaccgttgtgctccgggatgccactatccaggcctacctgtcgagtggcaacttcagcaaggaagagacacactgcacacaggatggaccttccccaaccactgggccacccagcccctcaccaccacttgtgcccacaaaccccactgtatccaagtacaatgttactggtaacaacggaacctgcctgctggcctctatggcactgcaactgaatatcacctacctgaaaaaggacaacaagacggtgaccagagcgttcaacatcagcccaaatgacacatctagtgggagttgcggtatcaacttggtgaccctgaaagtggagaacaagaacagagccctggaattgcagtttgggatgaatgccagctctagcctgtttttcttgcaaggagtgcgcttgaatatgactcttcctgatgccctagtgcccacattcagcatctccaaccattcactgaaagctcttcaggccactgtgggaaactcatacaagtgcaacactgaggaacacatctttgtcagcaagatgctctccctcaatgtcttcagtgtgcaggtccaggctttcaaggtggacagtgacaggtttgggtctgtggaagagtgtgttcaggatggtaacaacatgttgatccccattgctgtgggcggtgccctggcagggctgatcctcatcgtcctcattgcctacctcattggcaggaagaggagtcacgccggctatcagaccatctagcctggtgggcaggtgcaccagagatgcacaggggcctgttctcacatccccaagcttagataggtgtggaagggaggcacactttctggcaaactgttttaaaatctgctttatcaaatgtgaagttcatcttgcaacatttactatgcacaaaggaataactattgaaatgacggtgttaattttgctaactgggttaaatattgatgagaaggctccactgatttgacttttaagacttggtgtttggttcttcattcttttactcagatttaagcctatcaaagggatactctggtccagaccttggcctggcaagggtggctgatggttaggctgcacacacttaagaagcaacgggagcagggaaggcttgcacacaggcacgcacagggtcaacctctggacacttggcttgggctacctggccttgggggggctgaactctggcatctggctgggtacacacccccccaatttctgtgctctgccacccgtgagctgccactttcctaaatagaaaatggcattatttttatttacttttttgtaaagtgatttccagtcttgtgttggcgttcagggtggccctgtctctgcactgtgtacaataatagattcacactgctgacgtgtcttgcagcgtaggtgggttgtacactgggcatcagctcacgtaatgcattgcctgtaacgatgctaataaaaa

SEQ ID NO: 45 - DNA, 2339 bp, Homo sapiens
  source 1..2339: mol_type = genomic DNA
ggcccaaccgccgcccgcgcccccgctctccgcaccgtacccggccgcctcgcgccatggcggcccccggcagcgcccggcgacccctgctgctgctactgctgttgctgctgctcggcctcatgcattgtgcgtcagcagcaatgtttatggtgaaaaatggcaacgggaccgcgtgcataatggccaacttctctgctgccttctcagtgaactacgacaccaagagtggccctaagaacatgacctttgacctgccatcagatgccacagtggtgctcaaccgcagctcctgtggaaaagagaacacttctgaccccagtctcgtgattgcttttggaagaggacatacactcactctcaatttcacgagaaatgcaacacgttacagcgtccagctcatgagttttgtttataacttgtcagacacacaccttttccccaatgcgagctccaaagaaatcaagactgtggaatctataactgacatcagggcagatatagataaaaaatacagatgtgttagtggcacccaggtccacatgaacaacgtgaccgtaacgctccatgatgccaccatccaggcgtacctttccaacagcagcttcagcaggggagagacacgctgtgaacaagacaggccttccccaaccacagcgccccctgcgccacccagcccctcgccctcacccgtgcccaagagcccctctgtggacaagtacaacgtgagcggcaccaacgggacctgcctgctggccagcatggggctgcagctgaacctcacctatgagaggaaggacaacacgacggtgacaaggcttctcaacatcaaccccaacaagacctcggccagcgggagctgcggcgcccacctggtgactctggagctgcacagcgagggcaccaccgtcctgctcttccagttcgggatgaatgcaagttctagccggtttttcctacaaggaatccagttgaatacaattcttcctgacgccagagaccctgcctttaaagctgccaacggctccctgcgagcgctgcaggccacagtcggcaattcctacaagtgcaacgcggaggagcacgtccgtgtcacgaaggcgttttcagtcaatatattcaaagtgtgggtccaggctttcaaggtggaaggtggccagtttggctctgtggaggagtgtctgctggacgagaacagcatgctgatccccatcgctgtgggtggtgccctggcggggctggtcctcatcgtcctcatcgcctacctcgtcggcaggaagaggagtcacgcaggctaccagactatctagcctggtgcacgcaggcacagcagctgcaggggcctctgttcctttctctgggcttagggtcctgtcgaaggggaggcacactttctggcaaacgtttctcaaatctgcttcatccaatgtgaagttcatcttgcagcatttactatgcacaacagagtaactatcgaaatgacggtgttaattttgctaactgggttaaatattttgctaactggttaaacattaatatttaccaaagtaggattttgagggtgggggtgctctctctgagggggtgggggtgccgctgtctctgaggggtgggggtgccgctgtctctgaggggtgggggtgccgctctctctgagggggtgggggtgccgctttctctgagggggtgggggtgccgctctctctgagggggtgggggtgctgctctctccgaggggtggaatgccgctgtctctgaggggtgggggtgccgctctaaattggctccatatcatttgagtttagggttctggtgtttggtttcttcattctttactgcactcagatttaagccttacaaagggaaagcctctggccgtcacacgtaggacgcatgaaggtcactcgtggtgaggctgacatgctcacacattacaacagtagagagggaaaatcctaagacagaggaactccagagatgagtgtctggagcgcttcagttcagctttaaaggccaggacgggccacacgtggctggcggcctcgttccagtggcggcacgtccttgggcgtctctaatgtctgcagctcaagggctggcacttttttaaatataaaaatgggtgttatttttatttttttttgtaaagtgatttttggtcttctgttgacattcggggtgatcctgttctgcgctgtgtacaatgtgagatcggtgcgttctcctgatgttttgccgtggcttggggattgtacacgggaccagctcacgtaatgcattgcctgtaacaatgtaataaaaagcctctttcttttaaaaaaaaaaaaaaaaaaaaaaaa

SEQ ID NO: 46 - DNA, 45 bp, synthetic construct
  source 1..45: mol_type = other DNA
cagtacatcaaggccaacagcaagttcatcggcatcaccgaactc

SEQ ID NO: 47 - protein, 15 aa, synthetic construct
QYIKANSKFIGITEL

SEQ ID NO: 48 - DNA, 39 bp, synthetic construct
  source 1..39: mol_type = other DNA
gctaaatttgtggctgcctggacactgaaagccgccgct

SEQ ID NO: 49 - protein, 13 aa, synthetic construct
AKFVAAWTLKAAA

SEQ ID NO: 50 - DNA, 593 bp, Woodchuck hepatitis virus
  source 1..593: mol_type = genomic DNA
aatcaacctctggattacaaaatttgtgaaagattgactggtattcttaactatgttgctccttttacgctatgtggatacgctgctttaatgcctttgtatcatgctattgcttcccgtatggctttcattttctcctccttgtataaatcctggttgctgtctctttatgaggagttgtggcccgttgtcaggcaacgtggcgtggtgtgcactgtgtttgctgacgcaacccccactggttggggcattgccaccacctgtcagctcctttccgggactttcgctttccccctccctattgccacggcggaactcatcgccgcctgccttgcccgctgctggacaggggctcggctgttgggcactgacaattccgtggtgttgtcggggaagctgacgtcctttccatggctgctcgcctgtgttgccacctggattctgcgcgggacgtccttctgctacgtcccttcggccctcaatccagcggaccttccttcccgcggcctgctgccggctctgcggcctcttccgcgtcttcgccttcgccctcagacgagtcggatctccctttgggccgcctccccgcctgt

SEQ ID NO: 51 - DNA, 589 bp, synthetic construct
  source 1..589: mol_type = other DNA
tctcccccccccccctctccctcccccccccctaacgttactggccgaagccgcttggaataaggccggtgtgcgtttgtctatatgttattttccaccatattgccgtcttttggcaatgtgagggcccggaaacctggccctgtcttcttgacgagcattcctaggggtctttcccctctcgccaaaggaatgcaaggtctgttgaatgtcgtgaaggaagcagttcctctggaagcttcttgaagacaaacaacgtctgtagcgaccctttgcaggcagcggaaccccccacctggcgacaggtgcctctgcggccaaaagccacgtgtataagatacacctgcaaaggcggcacaaccccagtgccacgttgtgagttggatagttgtggaaagagtcaaatggctctcctcaagcgtattcaacaaggggctgaaggatgcccagaaggtaccccattgtatgggatctgatctggggcctcggtgcacatgctttacatgtgtttagtcgaggttaaaaaaacgtctaggccccccgaaccacggggacgtggttttcctttgaaaaacacgatgataatatg

SEQ ID NO: 52 - DNA, 720 bp, synthetic construct
  source 1..720: mol_type = other DNA
atggtgagcaagggcgaggagctgttcaccggggtggtgcccatcctggtcgagctggacggcgacgtaaacggccacaagttcagcgtgtccggcgagggcgagggcgatgccacctacggcaagctgaccctgaagttcatctgcaccaccggcaagctgcccgtgccctggcccaccctcgtgaccaccctgacctacggcgtgcagtgcttcagccgctaccccgaccacatgaagcagcacgacttcttcaagtccgccatgcccgaaggctacgtccaggagcgcaccatcttcttcaaggacgacggcaactacaagacccgcgccgaggtgaagttcgagggcgacaccctggtgaaccgcatcgagctgaagggcatcgacttcaaggaggacggcaacatcctggggcacaagctggagtacaactacaacagccacaacgtctatatcatggccgacaagcagaagaacggcatcaaggtgaacttcaagatccgccacaacatcgaggacggcagcgtgcagctcgccgaccactaccagcagaacacccccatcggcgacggccccgtgctgctgcccgacaaccactacctgagcacccagtccgccctgagcaaagaccccaacgagaagcgcgatcacatggtcctgctggagttcgtgaccgccgccgggatcactctcggcatggacgagctgtacaagtag

SEQ ID NO: 53 - DNA, 1563 bp, synthetic construct
  source 1..1563: mol_type = other DNA
atgctgctgctgctgctgctgctgggcctgaggctacagctctccctgggcatcatcccagttgaggaggagaacccggacttctggaaccgcgaggcagccgaggccctgggtgccgccaagaagctgcagcctgcacagacagccgccaagaacctcatcatcttcctgggcgatgggatgggggtgtctacggtgacagctgccaggatcctaaaagggcagaagaaggacaaactggggcctgagatacccctggccatggaccgcttcccatatgtggctctgtccaagacatacaatgtagacaaacatgtgccagacagtggagccacagccacggcctacctgtgcggggtcaagggcaacttccagaccattggcttgagtgcagccgcccgctttaaccagtgcaacacgacacgcggcaacgaggtcatctccgtgatgaatcgggccaagaaagcagggaagtcagtgggagtggtaaccaccacacgagtgcagcacgcctcgccagccggcacctacgcccacacggtgaaccgcaactggtactcggacgccgacgtgcctgcctcggcccgccaggaggggtgccaggacatcgctacgcagctcatctccaacatggacattgacgtgatcctaggtggaggccgaaagtacatgtttcgcatgggaaccccagaccctgagtacccagatgactacagccaaggtgggaccaggctggacgggaagaatctggtgcaggaatggctggcgaagcgccagggtgcccggtatgtgtggaaccgcactgagctcatgcaggcttccctggacccgtctgtgacccatctcatgggtctctttgagcctggagacatgaaatacgagatccaccgagactccacactggacccctccctgatggagatgacagaggctgccctgcgcctgctgagcaggaacccccgcggcttcttcctcttcgtggagggtggtcgcatcgaccatggtcatcatgaaagcagggcttaccgggcactgactgagacgatcatgttcgacgacgccattgagagggcgggccagctcaccagcgaggaggacacgctgagcctcgtcactgccgaccactcccacgtcttctccttcggaggctaccccctgcgagggagctccatcttcgggctggcccctggcaaggcccgggacaggaaggcctacacggtcctcctatacggaaacggtccaggctatgtgctcaaggacggcgcccggccggatgttaccgagagcgagagcgggagccccgagtatcggcagcagtcagcagtgcccctggacgaagagacccacgcaggcgaggacgtggcggtgttcgcgcgcggcccgcaggcgcacctggttcacggcgtgcaggagcagaccttcatagcgcacgtcatggccttcgccgcctgcctggagccctacaccgcctgcgacctggcgccccccgccggcaccaccgacgccgcgcacccgggttactctagagtcggggcggccggccgcttcgagcagacatgataa

SEQ ID NO: 54 - DNA, 1653 bp, synthetic construct
  source 1..1653: mol_type = other DNA
atggaagatgccaaaaacattaagaagggcccagcgccattctacccactcgaagacgggaccgccggcgagcagctgcacaaagccatgaagcgctacgccctggtgcccggcaccatcgcctttaccgacgcacatatcgaggtggacattacctacgccgagtacttcgagatgagcgttcggctggcagaagctatgaagcgctatgggctgaatacaaaccatcggatcgtggtgtgcagcgagaatagcttgcagttcttcatgcccgtgttgggtgccctgttcatcggtgtggctgtggccccagctaacgacatctacaacgagcgcgagctgctgaacagcatgggcatcagccagcccaccgtcgtattcgtgagcaagaaagggctgcaaaagatcctcaacgtgcaaaagaagctaccgatcatacaaaagatcatcatcatggatagcaagaccgactaccagggcttccaaagcatgtacaccttcgtgacttcccatttgccacccggcttcaacgagtacgacttcgtgcccgagagcttcgaccgggacaaaaccatcgccctgatcatgaacagtagtggcagtaccggattgcccaagggcgtagccctaccgcaccgcaccgcttgtgtccgattcagtcatgcccgcgaccccatcttcggcaaccagatcatccccgacaccgctatcctcagcgtggtgccatttcaccacggcttcggcatgttcaccacgctgggctacttgatctgcggctttcgggtcgtgctcatgtaccgcttcgaggaggagctattcttgcgcagcttgcaagactataagattcaatctgccctgctggtgcccacactatttagcttcttcgctaagagcactctcatcgacaagtacgacctaagcaacttgcacgagatcgccagcggcggggcgccgctcagcaaggaggtaggtgaggccgtggccaaacgcttccacctaccaggcatccgccagggctacggcctgacagaaacaaccagcgccattctgatcacccccgaaggggacgacaagcctggcgcagtaggcaaggtggtgcccttcttcgaggctaaggtggtggacttggacaccggtaagacactgggtgtgaaccagcgcggcgagctgtgcgtccgtggccccatgatcatgagcggctacgttaacaaccccgaggctacaaacgctctcatcgacaaggacggctggctgcacagcggcgacatcgcctactgggacgaggacgagcacttcttcatcgtggaccggctgaagagcctgatcaaatacaagggctaccaggtagccccagccgaactggagagcatcctgctgcaacaccccaacatcttcgacgccggggtcgccggcctgcccgacgacgatgccggcgagctgcccgccgcagtcgtcgtgctggaacacggtaaaaccatgaccgagaaggagatcgtggactatgtggccagccaggttacaaccgccaagaagctgcgcggtggtgttgtgttcgtggacgaggtgcctaaaggactgaccggcaagttggacgcccgcaagatccgcgagattctcattaaggccaagaagggcggcaagatcgccgtgtaa

SEQ ID NO: 55 - DNA, 66 bp, Foot-and-mouth disease virus
  source 1..66: mol_type = genomic DNA
gtaaagcaaacactgaactttgaccttctcaagttggctggagacgttgagtccaatcctgggccc

SEQ ID NO: 56 - protein, 5 aa, synthetic construct
GPGPG

SEQ ID NO: 57 - protein, 594 aa, synthetic construct
TSRTLSYYKLGASQRVAGDSGFAAYSRYRIGNYCAAGTTQTACTDDNALAYYNTTKGGWPQIAQFAPSASAFFGMSRIGMEVTPSGTWLTYTGAIKLDDKDPNPANNAAIVLQLPQGTTLPKGFYAEGGVPINTNSSPDDQIGYYRRATRRIRLYLYALVYFLQSINFVRIIMRLWLCSTDVVYRAFDIYNDKVAGFAKFLKTRQKRTATKAYNVTQAFGRRGPEQTQPYVCNAPGCDVTDVTQLYLGGMSYYACLVGLMWLSYFIASFRLFARTRSMWSFNPETNILLNVPLHGTILTRPLLESELVILLNKHIDAYKTFPPTEPKKDKKKKADETQALPQRQKKQQTVTVGDSAEVAVKMFDAYVNTFSSTFNVMDLFMRIFTIGTVTLKQGEIKDATPSDFVRATATIPIQASLPFGWLILLQFAYANRNRFLYIIKLIFLWLLWPVLAVFQSASKIITLKKRWQLALSKGVHFVCNLLLLHVMSKHTDFSSEIIGYKAIDGGVTRDCVVLHSYFTSDYYQLYSTQLSTDTGVEHVTFFIYNKIVDEPEEHVQIHTIDGSSGVCNIVNVSLVKPSFYVYSRVKNLNSSRVP

SEQ ID NO: 58 - protein, 640 aa, synthetic construct
MAGTSRTLSYYKLGASQRVAGDSGFAAYSRYRIGNYCAAGTTQTACTDDNALAYYNTTKGGWPQIAQFAPSASAFFGMSRIGMEVTPSGTWLTYTGAIKLDDKDPNPANNAAIVLQLPQGTTLPKGFYAEGGVPINTNSSPDDQIGYYRRATRRIRLYLYALVYFLQSINFVRIIMRLWLCSTDVVYRAFDIYNDKVAGFAKFLKTRQKRTATKAYNVTQAFGRRGPEQTQPYVCNAPGCDVTDVTQLYLGGMSYYACLVGLMWLSYFIASFRLFARTRSMWSFNPETNILLNVPLHGTILTRPLLESELVILLNKHIDAYKTFPPTEPKKDKKKKADETQALPQRQKKQQTVTVGDSAEVAVKMFDAYVNTFSSTFNVMDLFMRIFTIGTVTLKQGEIKDATPSDFVRATATIPIQASLPFGWLILLQFAYANRNRFLYIIKLIFLWLLWPVLAVFQSASKIITLKKRWQLALSKGVHFVCNLLLLHVMSKHTDFSSEIIGYKAIDGGVTRDCVVLHSYFTSDYYQLYSTQLSTDTGVEHVTFFIYNKIVDEPEEHVQIHTIDGSSGVCNIVNVSLVKPSFYVYSRVKNLNSSRVPGPGPGAKFVAAWTLKAAAGPGPGQYIKANSKFIGITELGPGPG

SEQ ID NO: 59 - protein, 1273 aa, Severe acute respiratory syndrome coronavirus 2
MFVFLVLLPLVSSQCVNLTTRTQLPPAYTNSFTRGVYYPDKVFRSSVLHSTQDLFLPFFSNVTWFHAIHVSGTNGTKRFDNPVLPFNDGVYFASTEKSNIIRGWIFGTTLDSKTQSLLIVNNATNVVIKVCEFQFCNDPFLGVYYHKNNKSWMESEFRVYSSANNCTFEYVSQPFLMDLEGKQGNFKNLREFVFKNIDGYFKIYSKHTPINLVRDLPQGFSALEPLVDLPIGINITRFQTLLALHRSYLTPGDSSSGWTAGAAAYYVGYLQPRTFLLKYNENGTITDAVDCALDPLSETKCTLKSFTVEKGIYQTSNFRVQPTESIVRFPNITNLCPFGEVFNATRFASVYAWNRKRISNCVADYSVLYNSASFSTFKCYGVSPTKLNDLCFTNVYADSFVIRGDEVRQIAPGQTGKIADYNYKLPDDFTGCVIAWNSNNLDSKVGGNYNYLYRLFRKSNLKPFERDISTEIYQAGSTPCNGVEGFNCYFPLQSYGFQPTNGVGYQPYRVVVLSFELLHAPATVCGPKKSTNLVKNKCVNFNFNGLTGTGVLTESNKKFLPFQQFGRDIADTTDAVRDPQTLEILDITPCSFGGVSVITPGTNTSNQVAVLYQDVNCTEVPVAIHADQLTPTWRVYSTGSNVFQTRAGCLIGAEHVNNSYECDIPIGAGICASYQTQTNSPRRARSVASQSIIAYTMSLGAENSVAYSNNSIAIPTNFTISVTTEILPVSMTKTSVDCTMYICGDSTECSNLLLQYGSFCTQLNRALTGIAVEQDKNTQEVFAQVKQIYKTPPIKDFGGFNFSQILPDPSKPSKRSFIEDLLFNKVTLADAGFIKQYGDCLGDIAARDLICAQKFNGLTVLPPLLTDEMIAQYTSALLAGTITSGWTFGAGAALQIPFAMQMAYRFNGIGVTQNVLYENQKLIANQFNSAIGKIQDSLSSTASALGKLQDVVNQNAQALNTLVKQLSSNFGAISSVLNDILSRLDKVEAEVQIDRLITGRLQSLQTYVTQQLIRAAEIRASANLAATKMSECVLGQSKRVDFCGKGYHLMSFPQSAPHGVVFLHVTYVPAQEKNFTTAPAICHDGKAHFPREGVFVSNGTHWFVTQRNFYEPQIITTDNTFVSGNCDVVIGIVNNTVYDPLQPELDSFKEELDKYFKNHTSPDVDLGDISGINASVVNIQKEIDRLNEVAKNLNESLIDLQELGKYEQYIKWPWYIWLGFIAGLIAIVMVTIMLCCMTSCCSCLKGCCSCGSCCKFDEDDSEPVLKGVKLHYT

SEQ ID NO: 60 - protein, 1273 aa, synthetic construct
MFVFLVLLPLVSSQCVNLTTRTQLPPAYTNSFTRGVYYPDKVFRSSVLHSTQDLFLPFFSNVTWFHAIHVSGTNGTKRFDNPVLPFNDGVYFASTEKSNIIRGWIFGTTLDSKTQSLLIVNNATNVVIKVCEFQFCNDPFLGVYYHKNNKSWMESEFRVYSSANNCTFEYVSQPFLMDLEGKQGNFKNLREFVFKNIDGYFKIYSKHTPINLVRDLPQGFSALEPLVDLPIGINITRFQTLLALHRSYLTPGDSSSGWTAGAAAYYVGYLQPRTFLLKYNENGTITDAVDCALDPLSETKCTLKSFTVEKGIYQTSNFRVQPTESIVRFPNITNLCPFGEVFNATRFASVYAWNRKRISNCVADYSVLYNSASFSTFKCYGVSPTKLNDLCFTNVYADSFVIRGDEVRQIAPGQTGKIADYNYKLPDDFTGCVIAWNSNNLDSKVGGNYNYLYRLFRKSNLKPFERDISTEIYQAGSTPCNGVEGFNCYFPLQSYGFQPTNGVGYQPYRVVVLSFELLHAPATVCGPKKSTNLVKNKCVNFNFNGLTGTGVLTESNKKFLPFQQFGRDIADTTDAVRDPQTLEILDITPCSFGGVSVITPGTNTSNQVAVLYQGVNCTEVPVAIHADQLTPTWRVYSTGSNVFQTRAGCLIGAEHVNNSYECDIPIGAGICASYQTQTNSPVRARSVASQSIIAYTMSLGAENSVAYSNNSIAIPTNFTISVTTEILPVSMTKTSVDCTMYICGDSTECSNLLLQYGSFCTQLNRALTGIAVEQDKNTQEVFAQVKQIYKTPPIKDFGGFNFSQILPDPSKPSKNSFIEDLLFNKVTLADAGFIKQYGDCLGDIAARDLICAQKFNGLTVLPPLLTDEMIAQYTSALLAGTITSGWTFGAGAALQIPFAMQMAYRFNGIGVTQNVLYENQKLIANQFNSAIGKIQDSLSSTASALGKLQDVVNQNAQALNTLVKQLSSNFGAISSVLNDILSRLDPPEAEVQIDRLITGRLQSLQTYVTQQLIRAAEIRASANLAATKMSECVLGQSKRVDFCGKGYHLMSFPQSAPHGVVFLHVTYVPAQEKNFTTAPAICHDGKAHFPREGVFVSNGTHWFVTQRNFYEPQIITTDNTFVSGNCDVVIGIVNNTVYDPLQPELDSFKEELDKYFKNHTSPDVDLGDISGINASVVNIQKEIDRLNEVAKNLNESLIDLQELGKYEQYIKWPWYIWLGFIAGLIAIVMVTIMLCCMTSCCSCLKGCCSCGSCCKFDEDDSEPVLKGVKLHYT

SEQ ID NO: 61 - protein, 222 aa, Severe acute respiratory syndrome coronavirus 2
MADSNGTITVEELKKLLEQWNLVIGFLFLTWICLLQFAYANRNRFLYIIKLIFLWLLWPVTLACFVLAAVYRINWITGGIAIAMACLVGLMWLSYFIASFRLFARTRSMWSFNPETNILLNVPLHGTILTRPLLESELVIGAVILRGHLRIAGHHLGRCDIKDLPKEITVATSRTLSYYKLGASQRVAGDSGFAAYSRYRIGNYKLNTDHSSSSDNIALLVQ

SEQ ID NO: 62 - protein, 419 aa, Severe acute respiratory syndrome coronavirus 2
MSDNGPQNQRNAPRITFGGPSDSTGSNQNGERSGARSKQRRPQGLPNNTASWFTALTQHGKEDLKFPRGQGVPINTNSSPDDQIGYYRRATRRIRGGDGKMKDLSPRWYFYYLGTGPEAGLPYGANKDGIIWVATEGALNTPKDHIGTRNPANNAAIVLQLPQGTTLPKGFYAEGSRGGSQASSRSSSRSRNSSRNSTPGSSRGTSPARMAGNGGDAALALLLLDRLNQLESKMSGKGQQQQGQTVTKKSAAEASKKPRQKRTATKAYNVTQAFGRRGPEQTQGNFGDQELIRQGTDYKHWPQIAQFAPSASAFFGMSRIGMEVTPSGTWLTYTGAIKLDDKDPNFKDQVILLNKHIDAYKTFPPTEPKKDKKKKADETQALPQRQKKQQTVTLLPAADLDDFSKQLQQSMSSADSTQA

SEQ ID NO: 63 - protein, 75 aa, Severe acute respiratory syndrome coronavirus 2
MYSFVSEETGTLIVNSVLLFLAFVVFLLVTLAILTALRLCAYCCNIVNVSLVKPSFYVYSRVKNLNSSRVPDLLV

SEQ ID NO: 64 - DNA, 1920 bp, synthetic construct
  source 1..1920: mol_type = other DNA
atggctggcacttcccgcaccttgtcctattacaaacttggcgcgagtcaacgggtggcgggtgactccggatttgcggcatattcacgatataggatcgggaattactgcgcagcaggtactacgcagactgcttgcacggatgataacgcgctggcctattacaatacaacaaaaggaggctggccccagatcgcccaattcgccccatcagccagtgctttcttcggcatgagtcgaatcggtatggaagtaacaccctccggcacatggcttacctacactggcgcgataaagctcgatgacaaagaccctaatcctgcgaataacgctgcaattgttctccagcttcctcagggtacgaccctgccaaaaggtttttacgcagagggcggcgtcccaatcaatacgaatagcagcccggacgatcaaataggatactacagaagggccacacggcggatcaggctgtacctctatgcgcttgtctatttcctccagagtattaatttcgtgaggatcatcatgcggttgtggctctgctctacagacgtagtatatcgagcttttgacatttacaatgacaaagtagccgggtttgccaaatttctcaaaaccagacagaagcggacggcaactaaggcttacaatgtgactcaggcgttcgggcggagaggtccggaacagacccaaccttatgtgtgcaatgcaccgggatgtgatgtcacagatgtgactcagctctaccttggagggatgtcctattatgcgtgtctcgtgggcctcatgtggttgtcctatttcatagcatcatttcgattgtttgctcgaacgaggtctatgtggtccttcaatcctgagacgaacatacttctgaatgtcccactccacggcaccatactgactcggccgctccttgaaagtgaactcgtaatcctccttaacaaacacatcgatgcctacaaaacgtttccaccaacggaaccgaagaaggataaaaagaagaaggccgatgaaacgcaggccctgccccaacgccaaaaaaagcagcagacggtcacggttggcgattctgccgaagtagctgtaaagatgtttgacgcctacgtcaatacattctcatcaacctttaatgtgatggatctgtttatgagaattttcactattggaaccgtcactcttaagcagggagaaatcaaagacgcgacaccatctgattttgttagggcaacagccactatccccatacaagccagcttgccatttggatggctgatccttctccaattcgcgtatgctaaccggaatcgctttctctacataataaagctgatcttcctttggcttctctggcccgttttggctgtattccagtcagccagtaagataataactctcaaaaagcggtggcagcttgcacttagtaaaggcgtccatttcgtctgcaatctccttttgctgcatgttatgtctaagcacacagactttagttcagagattattggatacaaagctattgatggtggtgttactagagattgtgtagttctccattcatacttcacgtcagattattatcaactctacagcacgcagctttccacggatacaggcgtagagcatgtgaccttcttcatctataataagatagtcgacgaacctgaggaacatgtccaaattcatacaattgatgggtcctccggcgtatgcaacatcgttaacgtgagccttgtcaaacctagcttctatgtctattctagggttaagaacctgaattcctccagggtccctggacccggaccaggcgccaaatttgttgctgcttggacactgaaagctgctgctgggcccggaccaggccagtacatcaaggccaactctaagtttatcggcatcaccgaattgggacctggacccggc

SEQ ID NO: 65 - DNA, 2305 bp, synthetic construct
  source 1..2305: mol_type = other DNA
gacattgattattgactagttgttaatagtaatcaattacggggtcattagttcatagcccatatatggagttccgcgttacataacttacggtaaatggcccgcctggctgaccgcccaacgacccccgcccattgacgtcaataatgacgtatgttcccatagtaacgccaatagggactttccattgacgtcaatgggtggagtatttacggtaaactgcccacttggcagtacatcaagtgtatcatatgccaagtccgccccctattgacgtcaatgacggtaaatggcccgcctggcattatgcccagtacatgaccttacgggactttcctacttggcagtacatctacgtattagtcatcgctattaccatggtgatgcggttttggcagtacaccaatgggcgtggatagcggtttgactcacggggatttccaagtctccaccccattgacgtcaatgggagtttgttttggcaccaaaatcaacgggactttccaaaatgtcgtaataaccccgccccgttgacgcaaatgggcggtaggcgtgtacggtgggaggtctatataagcagagctcgtttagtgaaccgtcagatcgcctggaacgccatccacgctgttttgacctccatagaagacagcgatcgcgccaccgccgggtttgccaaatttctcaaaaccagacagaagcggacggcaactaaggcttacaatgtgactcaggcgttcgggcggagaggtccggaacagacccaaccttatgtgtgcaatgcaccgggatgtgatgtcacagatgtgactcagctctaccttggagggatgtcctattatgcgtgtctcgtgggcctcatgtggttgtcctatttcatagcatcatttcgattgtttgctcgaacgaggtctatgtggtccttcaatcctgagacgaacatacttctgaatgtcccactccacggcaccatactgactcggccgctccttgaaagtgaactcgtaatcctccttaacaaacacatcgatgcctacaaaacgtttccaccaacggaaccgaagaaggataaaaagaagaaggccgatgaaacgcaggccctgccccaacgccaaaaaaagcagcagacggtcacggttggcgattctgccgaagtagctgtaaagatgtttgacgcctacgtcaatacattctcatcaacctttaatgtgatggatctgtttatgagaattttcactattggaaccgtcactcttaagcagggagaaatcaaagacgcgacaccatctgattttgttagggcaacagccactatccccatacaagccagcttgccatttggatggctgatccttctccaattcgcgtatgctaaccggaatcgctttctctacataataaagctgatcttcctttggcttctctggcccgttttggctgtattccagtcagccagtaagataataactctcaaaaagcggtggcagcttgcacttagtaaaggcgtccatttcgtctgcaatctccttttgctgcatgttatgtctaagcacacagactttagttcagagattattggatacaaagctattgatggtggtgttactagagattgtgtagttctccattcatacttcacgtcagattattatcaactctacagcacgcagctttccacggatacaggcgtagagcatgtgaccttcttcatctataataagatagtcgacgaacctgaggaacatgtccaaattcatacaattgatgggtcctccggcgtatgcaacatcgttaacgtgagccttgtcaaacctagcttctatgtctattctagggttaagaacctgaattcctccagggtccctggacccggaccaggcgccaaatttgttgctgcttggacactgaaagctgctgctgggcccggaccaggccagtacatcaaggccaactctaagtttatcggcatcaccgaattgggacctggacccggctagtgagtttaaactcccatttaaatgtgagggttaatgcttcgagcagagctcgctgatcagcctcgactgtgccttctagttgccagccatctgttgtttgcccctcccccgtgccttccttgaccctggaaggtgccactcccactgtcctttcctaataaaatgaggaaattgcatcgcattgtctgagtaggtgtcattctattctggggggtggggtggggcaggacagcaagggggaggattgggaagacaatagcaggcatgctggggatgcggtgggctctatggcttctgaggcggaaagaacc

SEQ ID NO: 66 - DNA, 5496 bp, synthetic construct
  source 1..5496: mol_type = other DNA
gacattgattattgactagttgttaatagtaatcaattacggggtcattagttcatagcccatatatggagttccgcgttacataacttacggtaaatggcccgcctggctgaccgcccaacgacccccgcccattgacgtcaataatgacgtatgttcccatagtaacgccaatagggactttccattgacgtcaatgggtggagtatttacggtaaactgcccacttggcagtacatcaagtgtatcatatgccaagtccgccccctattgacgtcaatgacggtaaatggcccgcctggcattatgcccagtacatgaccttacgggactttcctacttggcagtacatctacgtattagtcatcgctattaccatggtgatgcggttttggcagtacaccaatgggcgtggatagcggtttgactcacggggatttccaagtctccaccccattgacgtcaatgggagtttgttttggcaccaaaatcaacgggactttccaaaatgtcgtaataaccccgccccgttgacgcaaatgggcggtaggcgtgtacggtgggaggtctatataagcagagctcgtttagtgaaccgtcagatcgcctggaacgccatccacgctgttttgacctccatagaagacagcgatcgcgccaccatgtttgtctttctggtcctgcttcccctcgttagttctcagtgtgtgaacctcaccacacggacgcaactccctccagcttacacaaattcttttacgcgaggcgtgtattatccggataaagttttcaggtcctccgtcctgcactccacgcaggacctttttttgccgttcttttctaacgtaacatggtttcatgccattcatgtttccgggacaaacggtacgaaacgctttgataaccctgtgctgccgttcaatgatggcgtttactttgcctctacggaaaagagtaacataatccgaggctggatcttcgggaccaccctggatagcaagactcagagtcttctcatcgttaataacgctacaaacgttgttatcaaggtgtgtgaattccagttttgcaacgatccctttttgggggtatactatcacaaaaacaataaaagttggatggaatcagagtttcgcgtgtattcttctgcgaacaactgcacgtttgaatacgttagtcagccttttctcatggacttggaaggtaagcaggggaactttaaaaacttgcgggagttcgtttttaagaacatagatggttacttcaaaatttatagcaaacatacaccgatcaacctcgtgagagatctcccacagggtttttccgcactcgaaccgctcgtggatctgccgattggaattaacattacccgcttccagaccctgttggctctgcacagaagctatctgacgccaggggattccagcagtggatggacggcgggtgcggccgcgtattatgtaggctatctccaaccccgaacgttcttgctgaagtacaatgagaatgggaccattacggatgctgtggattgtgcattggatcctctctctgagacaaaatgcacccttaaaagcttcactgtagaaaagggtatttatcagactagcaacttccgcgtacaaccaacggagtctatcgttaggttccccaacattactaacttgtgcccatttggcgaagtgtttaacgcaactaggtttgctagtgtctatgcttggaatcgaaagagaataagcaattgtgtcgcagattactccgtattgtataattctgcaagcttttcaacattcaagtgctacggagtgtctcccaccaaattgaacgacctgtgttttactaacgtgtatgccgactctttcgttatccgaggcgatgaggtcaggcaaattgcccccggacaaactgggaaaattgcggattataattacaagcttccagacgactttacgggctgtgttatcgcatggaactccaacaatctcgacagcaaagtgggtggaaattataattatttgtatagattgtttcgcaagtccaacctgaagccattcgagagagacatctccaccgagatttatcaagccggctcaactccttgcaacggagtcgaaggcttcaactgttattttccgcttcagtcctatggttttcaacctacgaacggcgtgggataccagccgtatcgagtcgtggtactgtcctttgaacttttgcacgccccagcaactgtttgcggaccaaaaaagtccacaaatctcgtcaaaaacaagtgcgttaattttaattttaacgggcttacgggtactggtgtactgacggagtccaataagaaattcctgccattccaacagtttggacgggatattgctgatacgaccgacgctgtgcgagatccccagacacttgagatcctcgacataaccccctgtagttttggtggagtgtctgtaattacccccggaacgaacaccagcaaccaagttgcggtgctttatcaggatgttaattgcactgaggttcctgtcgcgatacatgccgaccaactgacgcctacatggcgagtatattcaacgggctccaacgtcttccagacgcgagccggttgtctcattggagctgaacatgtgaacaactcttatgaatgcgatataccaattggggcaggtatctgcgcctcttatcagacgcagactaactcacccagacgagcacggagcgtggcaagccaatccattattgcctacaccatgtccttgggagctgagaattcagtcgcctattctaataatagcattgctataccgacgaactttacaatttccgtaactaccgaaatattgcccgtcagtatgactaagactagcgttgactgcacaatgtacatttgcggcgatagtaccgaatgctctaatcttcttctgcagtatggtagtttttgtacacaactgaatcgagctctgactgggatcgcagtcgaacaggacaaaaatacacaggaagttttcgcgcaagtgaagcaaatctacaaaacgcctcccataaaagatttcggaggattcaatttcagtcagatactccctgatccctctaaaccatctaaacgatcctttatcgaagatttgctgttcaacaaggtgacccttgctgacgctggattcataaagcagtacggggattgtcttggcgatatcgcagcccgagaccttatttgtgcccaaaaatttaacggacttacggtactccctccccttctgactgacgaaatgatagcccagtacaccagtgctctgctggctggcaccataacgagcggatggacttttggtgcgggtgcagcactgcagatccccttcgcgatgcaaatggcatacaggtttaatgggattggggtcacccagaatgtattgtacgagaaccagaagcttatagcgaatcaatttaacagtgcaattggtaagattcaggacagcctttcaagtaccgcgagtgctctcgggaagttgcaggatgtagtaaatcaaaatgcgcaggcgctgaatacgttggttaaacagctcagcagtaattttggagcaatttctagcgtgctgaatgacatcctcagcagactcgataaggtggaggctgaggtacagatagatagactcatcacgggcagattgcagagtttgcagacatacgtcacgcaacaactcattcgagcagcagaaattagagcatccgcaaatctggcggccacgaaaatgtctgagtgcgttctggggcagtccaagagagttgacttttgtgggaaaggatatcatctgatgagttttccgcagtcagcgccacatggtgtggtctttctgcacgttacttatgtccccgcacaggagaagaattttacgaccgcgccagctatttgccatgacggtaaggctcacttcccgagggaaggggtattcgtttctaacggtacgcattggtttgttacgcaacggaacttttatgaaccacagattattaccaccgacaacacattcgtaagtggaaactgtgatgtcgttatcggaatagtaaataataccgtttatgacccccttcagcctgaacttgattccttcaaggaagagctcgataaatactttaagaaccacaccagccccgatgttgacctgggtgatatatctgggatcaacgcttctgtcgtcaacattcaaaaagagatcgatcgcctgaatgaggtggccaaaaacctcaatgaaagtctcattgaccttcaagaactcggtaagtacgagcaatacatcaagtggccatggtacatatggctgggcttcattgctgggttgatagctatagtgatggttacgataatgttgtgttgtatgacatcctgctgtagctgccttaaaggttgttgttcttgcggttcttgttgtaagtttgacgaagatgattcagagcctgttctgaaaggggtgaagctccattatactggcggttctggaggtgtccgtgctgaaggacgcgggtcccttctcacctgcggcgacgttgaggaaaaccctggccctatggctgacagcaatggtactattacggtggaagaactgaaaaagctcttggaacagtggaaccttgtgatcggttttctgtttttgacctggatttgcttgctccagttcgcctatgctaatagaaacaggtttctctatataatcaagttgatttttctgtggctgctctggcccgttacgcttgcgtgttttgtcctggctgctgtgtaccggatcaattggatcactggtggcattgctatcgccatggcttgtcttgtcgggctgatgtggctttcctattttatcgcttcatttaggctgtttgctcgaaccagatcaatgtggtcatttaatccagagactaatattctcttgaatgttccgctgcacggaactatcctcacacgacccctgttggagtccgaattggttatcggtgccgtaattctcaggggccaccttagaatcgcgggccaccatttgggacggtgcgatattaaagacctgcccaaagagatcacagtggccacaagtagaacgctctcatactataaactgggagcttcccagagagtggccggggatagtggcttcgcggcatatagtcgctaccgcatcggtaactataaacttaatacggaccatagtagctctagcgataacattgccttgctggttcagtgataagtttaaactcccatttaaatgtgagggttaatgcttcgagcagacatgataagatacattgatgagtttggacaaaccacaactagaatgcagtgaaaaaaatgctttatttgtgaaatttgtgatgctattgctttatttgtaaccattataagctgcaataaacaagttaacaacaacaattgcattcattttatgtttcaggttcagggggagatgtgggaggttttttaaagcaagtaaaacctctacaaatgtggtaaaa

SEQ ID NO: 67 - DNA, 5536 bp, synthetic construct
  source 1..5536: mol_type = other DNA
gacattgattattgactagttgttaatagtaatcaattacggggtcattagttcatagcccatatatggagttccgcgttacataacttacggtaaatggcccgcctggctgaccgcccaacgacccccgcccattgacgtcaataatgacgtatgttcccatagtaacgccaatagggactttccattgacgtcaatgggtggagtatttacggtaaactgcccacttggcagtacatcaagtgtatcatatgccaagtccgccccctattgacgtcaatgacggtaaatggcccgcctggcattatgcccagtacatgaccttacgggactttcctacttggcagtacatctacgtattagtcatcgctattaccatggtgatgcggttttggcagtacaccaatgggcgtggatagcggtttgactcacggggatttccaagtctccaccccattgacgtcaatgggagtttgttttggcaccaaaatcaacgggactttccaaaatgtcgtaataaccccgccccgttgacgcaaatgggcggtaggcgtgtacggtgggaggtctatataagcagagctcgtttagtgaaccgtcagatcgcctggaacgccatccacgctgttttgacctccatagaagacagcgatcgcgccaccatgtttgtctttctggtcctgcttcccctcgttagttctcagtgtgtgaacctcaccacacggacgcaactccctccagcttacacaaattcttttacgcgaggcgtgtattatccggataaagttttcaggtcctccgtcctgcactccacgcaggacctttttttgccgttcttttctaacgtaacatggtttcatgccattcatgtttccgggacaaacggtacgaaacgctttgataaccctgtgctgccgttcaatgatggcgtttactttgcctctacggaaaagagtaacataatccgaggctggatcttcgggaccaccctggatagcaagactcagagtcttctcatcgttaataacgctacaaacgttgttatcaaggtgtgtgaattccagttttgcaacgatccctttttgggggtatactatcacaaaaacaataaaagttggatggaatcagagtttcgcgtgtattcttctgcgaacaactgcacgtttgaatacgttagtcagccttttctcatggacttggaaggtaagcaggggaactttaaaaacttgcgggagttcgtttttaagaacatagatggttacttcaaaatttatagcaaacatacaccgatcaacctcgtgagagatctcccacagggtttttccgcactcgaaccgctcgtggatctgccgattggaattaacattacccgcttccagaccctgttggctctgcacagaagctatctgacgccaggggattccagcagtggatggacggcgggtgcggccgcgtattatgtaggctatctccaaccccgaacgttcttgctgaagtacaatgagaatgggaccattacggatgctgtggattgtgcattggatcctctctctgagacaaaatgcacccttaaaagcttcactgtagaaaagggtatttatcagactagcaacttccgcgtacaaccaacggagtctatcgttaggttccccaacattactaacttgtgcccatttggcgaagtgtttaacgcaactaggtttgctagtgtctatgcttggaatcgaaagagaataagcaattgtgtcgcagattactccgtattgtataattctgcaagcttttcaacattcaagtgctacggagtgtctcccaccaaattgaacgacctgtgttttactaacgtgtatgccgactctttcgttatccgaggcgatgaggtcaggcaaattgcccccggacaaactgggaaaattgcggattataattacaagcttccagacgactttacgggctgtgttatcgcatggaactccaacaatctcgacagcaaagtgggtggaaattataattatttgtatagattgtttcgcaagtccaacctgaagccattcgagagagacatctccaccgagatttatcaagccggctcaactccttgcaacggagtcgaaggcttcaactgttattttccgcttcagtcctatggttttcaacctacgaacggcgtgggataccagccgtatcgagtcgtggtactgtcctttgaacttttgcacgccccagcaactgtttgcggaccaaaaaagtccacaaatctcgtcaaaaacaagtgcgttaattttaattttaacgggcttacgggtactggtgtactgacggagtccaataagaaattcctgccattccaacagtttggacgggatattgctgatacgaccgacgctgtgcgagatccccagacacttgagatcctcgacataaccccctgtagttttggtggagtgtctgtaattacccccggaacgaacaccagcaaccaagttgcggtgctttatcaggatgttaattgcactgaggttcctgtcgcgatacatgccgaccaactgacgcctacatggcgagtatattcaacgggctccaacgtcttccagacgcgagccggttgtctcattggagctgaacatgtgaacaactcttatgaatgcgatataccaattggggcaggtatctgcgcctcttatcagacgcagactaactcacccagacgagcacggagcgtggcaagccaatccattattgcctacaccatgtccttgggagctgagaattcagtcgcctattctaataatagcattgctataccgacgaactttacaatttccgtaactaccgaaatattgcccgtcagtatgactaagactagcgttgactgcacaatgtacatttgcggcgatagtaccgaatgctctaatcttcttctgcagtatggtagtttttgtacacaactgaatcgagctctgactgggatcgcagtcgaacaggacaaaaatacacaggaagttttcgcgcaagtgaagcaaatctacaaaacgcctcccataaaagatttcggaggattcaatttcagtcagatactccctgatccctctaaaccatctaaacgatcctttatcgaagatttgctgttcaacaaggtgacccttgctgacgctggattcataaagcagtacggggattgtcttggcgatatcgcagcccgagaccttatttgtgcccaaaaatttaacggacttacggtactccctccccttctgactgacgaaatgatagcccagtacaccagtgctctgctggctggcaccataacgagcggatggacttttggtgcgggtgcagcactgcagatccccttcgcgatgcaaatggcatacaggtttaatgggattggggtcacccagaatgtattgtacgagaaccagaagcttatagcgaatcaatttaacagtgcaattggtaagattcaggacagcctttcaagtaccgcgagtgctctcgggaagttgcaggatgtagtaaatcaaaatgcgcaggcgctgaatacgttggttaaacagctcagcagtaattttggagcaatttctagcgtgctgaatgacatcctcagcagactcgataaggtggaggctgaggtacagatagatagactcatcacgggcagattgcagagtttgcagacatacgtcacgcaacaactcattcgagcagcagaaattagagcatccgcaaatctggcggccacgaaaatgtctgagtgcgttctggggcagtccaagagagttgacttttgtgggaaaggatatcatctgatgagttttccgcagtcagcgccacatggtgtggtctttctgcacgttacttatgtccccgcacaggagaagaattttacgaccgcgccagctatttgccatgacggtaaggctcacttcccgagggaaggggtattcgtttctaacggtacgcattggtttgttacgcaacggaacttttatgaaccacagattattaccaccgacaacacattcgtaagtggaaactgtgatgtcgttatcggaatagtaaataataccgtttatgacccccttcagcctgaacttgattccttcaaggaagagctcgataaatactttaagaaccacaccagccccgatgttgacctgggtgatatatctgggatcaacgcttctgtcgtcaacattcaaaaagagatcgatcgcctgaatgaggtggccaaaaacctcaatgaaagtctcattgaccttcaagaactcggtaagtacgagcaatacatcaagtggccatggtacatatggctgggcttcattgctgggttgatagctatagtgatggttacgataatgttgtgttgtatgacatcctgctgtagctgccttaaaggttgttgttcttgcggttcttgttgtaagtttgacgaagatgattcagagcctgttctgaaaggggtgaagctccattatactggcggttctggaggtgtccgtgctgaaggacgcgggtcccttctcacctgcggcgacgttgaggaaaaccctggccctatggctgacagcaatggtactattacggtggaagaactgaaaaagctcttggaacagtggaaccttgtgatcggttttctgtttttgacctggatttgcttgctccagttcgcctatgctaatagaaacaggtttctctatataatcaagttgatttttctgtggctgctctggcccgttacgcttgcgtgttttgtcctggctgctgtgtaccggatcaattggatcactggtggcattgctatcgccatggcttgtcttgtcgggctgatgtggctttcctattttatcgcttcatttaggctgtttgctcgaaccagatcaatgtggtcatttaatccagagactaatattctcttgaatgttccgctgcacggaactatcctcacacgacccctgttggagtccgaattggttatcggtgccgtaattctcaggggccaccttagaatcgcgggccaccatttgggacggtgcgatattaaagacctgcccaaagagatcacagtggccacaagtagaacgctctcatactataaactgggagcttcccagagagtggccggggatagtggcttcgcggcatatagtcgctaccgcatcggtaactataaacttaatacggaccatagtagctctagcgataacattgccttgctggttcagtgagtttaaactcccatttaaatgtgagggttaatgcttcgagcagagctcgctgatcagcctcgactgtgccttctagttgccagccatctgttgtttgcccctcccccgtgccttccttgaccctggaaggtgccactcccactgtcctttcctaataaaatgaggaaattgcatcgcattgtctgagtaggtgtcattctattctggggggtggggtggggcaggacagcaagggggaggattgggaagacaatagcaggcatgctggggatgcggtgggctctatggcttctgaggcggaaagaacc

SEQ ID NO: 68 - DNA, 7631 bp, synthetic construct
  source 1..7631: mol_type = other DNA
gacattgattattgactagttgttaatagtaatcaattacggggtcattagttcatagcccatatatggagttccgcgttacataacttacggtaaatggcccgcctggctgaccgcccaacgacccccgcccattgacgtcaataatgacgtatgttcccatagtaacgccaatagggactttccattgacgtcaatgggtggagtatttacggtaaactgcccacttggcagtacatcaagtgtatcatatgccaagtccgccccctattgacgtcaatgacggtaaatggcccgcctggcattatgcccagtacatgaccttacgggactttcctacttggcagtacatctacgtattagtcatcgctattaccatggtgatgcggttttggcagtacaccaatgggcgtggatagcggtttgactcacggggatttccaagtctccaccccattgacgtcaatgggagtttgttttggcaccaaaatcaacgggactttccaaaatgtcgtaataaccccgccccgttgacgcaaatgggcggtaggcgtgtacggtgggaggtctatataagcagagctcgtttagtgaaccgtcagatcgcctggaacgccatccacgctgttttgacctccatagaagacagcgatcgcgccaccatgtttgtctttctggtcctgcttcccctcgttagttctcagtgtgtgaacctcaccacacggacgcaactccctccagcttacacaaattcttttacgcgaggcgtgtattatccggataaagttttcaggtcctccgtcctgcactccacgcaggacctttttttgccgttcttttctaacgtaacatggtttcatgccattcatgtttccgggacaaacggtacgaaacgctttgataaccctgtgctgccgttcaatgatggcgtttactttgcctctacggaaaagagtaacataatccgaggctggatcttcgggaccaccctggatagcaagactcagagtcttctcatcgttaataacgctacaaacgttgttatcaaggtgtgtgaattccagttttgcaacgatccctttttgggggtatactatcacaaaaacaataaaagttggatggaatcagagtttcgcgtgtattcttctgcgaacaactgcacgtttgaatacgttagtcagccttttctcatggacttggaaggtaagcaggggaactttaaaaacttgcgggagttcgtttttaagaacatagatggttacttcaaaatttatagcaaacatacaccgatcaacctcgtgagagatctcccacagggtttttccgcactcgaaccgctcgtggatctgccgattggaattaacattacccgcttccagaccctgttggctctgcacagaagctatctgacgccaggggattccagcagtggatggacggcgggtgcggccgcgtattatgtaggctatctccaaccccgaacgttcttgctgaagtacaatgagaatgggaccattacggatgctgtggattgtgcattggatcctctctctgagacaaaatgcacccttaaaagcttcactgtagaaaagggtatttatcagactagcaacttccgcgtacaaccaacggagtctatcgttaggttccccaacattactaacttgtgcccatttggcgaagtgtttaacgcaactaggtttgctagtgtctatgcttggaatcgaaagagaataagcaattgtgtcgcagattactccgtattgtataattctgcaagcttttcaacattcaagtgctacggagtgtctcccaccaaattgaacgacctgtgttttactaacgtgtatgccgactctttcgttatccgaggcgatgaggtcaggcaaattgcccccggacaaactgggaaaattgcggattataattacaagcttccagacgactttacgggctgtgttatcgcatggaactccaacaatctcgacagcaaagtgggtggaaattataattatttgtatagattgtttcgcaagtccaacctgaagccattcgagagagacatctccaccgagatttatcaagccggctcaactccttgcaacggagtcgaaggcttcaactgttattttccgcttcagtcctatggttttcaacctacgaacggcgtgggataccagccgtatcgagtcgtggtactgtcctttgaacttttgcacgccccagcaactgtttgcggaccaaaaaagtccacaaatctcgtcaaaaacaagtgcgttaattttaattttaacgggcttacgggtactggtgtactgacggagtccaataagaaattcctgccattccaacagtttggacgggatattgctgatacgaccgacgctgtgcgagatccccagacacttgagatcctcgacataaccccctgtagttttggtggagtgtctgtaattacccccggaacgaacaccagcaaccaagttgcggtgctttatcaggatgttaattgcactgaggttcctgtcgcgatacatgccgaccaactgacgcctacatggcgagtatattcaacgggctccaacgtcttccagacgcgagccggttgtctcattggagctgaacatgtgaacaactcttatgaatgcgatataccaattggggcaggtatctgcgcctcttatcagacgcagactaactcacccagacgagcacggagcgtggcaagccaatccattattgcctacaccatgtccttgggagctgagaattcagtcgcctattctaataatagcattgctataccgacgaactttacaatttccgtaactaccgaaatattgcccgtcagtatgactaagactagcgttgactgcacaatgtacatttgcggcgatagtaccgaatgctctaatcttcttctgcagtatggtagtttttgtacacaactgaatcgagctctgactgggatcgcagtcgaacaggacaaaaatacacaggaagttttcgcgcaagtgaagcaaatctacaaaacgcctcccataaaagatttcggaggattcaatttcagtcagatactccctgatccctctaaaccatctaaacgatcctttatcgaagatttgctgttcaacaaggtgacccttgctgacgctggattcataaagcagtacggggattgtcttggcgatatcgcagcccgagaccttatttgtgcccaaaaatttaacggacttacggtactccctccccttctgactgacgaaatgatagcccagtacaccagtgctctgctggctggcaccataacgagcggatggacttttggtgcgggtgcagcactgcagatccccttcgcgatgcaaatggcatacaggtttaatgggattggggtcacccagaatgtattgtacgagaaccagaagcttatagcgaatcaatttaacagtgcaattggtaagattcaggacagcctttcaagtaccgcgagtgctctcgggaagttgcaggatgtagtaaatcaaaatgcgcaggcgctgaatacgttggttaaacagctcagcagtaattttggagcaatttctagcgtgctgaatgacatcctcagcagactcgataaggtggaggctgaggtacagatagatagactcatcacgggcagattgcagagtttgcagacatacgtcacgcaacaactcattcgagcagcagaaattagagcatccgcaaatctggcggccacgaaaatgtctgagtgcgttctggggcagtccaagagagttgacttttgtgggaaaggatatcatctgatgagttttccgcagtcagcgccacatggtgtggtctttctgcacgttacttatgtccccgcacaggagaagaattttacgaccgcgccagctatttgccatgacggtaaggctcacttcccgagggaaggggtattcgtttctaacggtacgcattggtttgttacgcaacggaacttttatgaaccacagattattaccaccgacaacacattcgtaagtggaaactgtgatgtcgttatcggaatagtaaataataccgtttatgacccccttcagcctgaacttgattccttcaaggaagagctcgataaatactttaagaaccacaccagccccgatgttgacctgggtgatatatctgggatcaacgcttctgtcgtcaacattcaaaaagagatcgatcgcctgaatgaggtggccaaaaacctcaatgaaagtctcattgaccttcaagaactcggtaagtacgagcaatacatcaagtggccatggtacatatggctgggcttcattgctgggttgatagctatagtgatggttacgataatgttgtgttgtatgacatcctgctgtagctgccttaaaggttgttgttcttgcggttcttgttgtaagtttgacgaagatgattcagagcctgttctgaaaggggtgaagctccattatacttgatgggtttaaactcccatttaaatgtgagggttaatgcttcgagcagacatgataagatacattgatgagtttggacaaaccacaactagaatgcagtgaaaaaaatgctttatttgtgaaatttgtgatgctattgctttatttgtaaccattataagctgcaataaacaagttaacaacaacaattgcattcattttatgtttcaggttcagggggagatgtgggaggttttttaaagcaagtaaaacctctacaaatgtggtaaaataactataacggtcctaaggtagcgagacattgattattgactagttgttaatagtaatcaattacggggtcattagttcatagcccatatatggagttccgcgttacataacttacggtaaatggcccgcctggctgaccgcccaacgacccccgcccattgacgtcaataatgacgtatgttcccatagtaacgccaatagggactttccattgacgtcaatgggtggagtatttacggtaaactgcccacttggcagtacatcaagtgtatcatatgccaagtccgccccctattgacgtcaatgacggtaaatggcccgcctggcattatgcccagtacatgaccttacgggactttcctacttggcagtacatctacgtattagtcatcgctattaccatggtgatgcggttttggcagtacaccaatgggcgtggatagcggtttgactcacggggatttccaagtctccaccccattgacgtcaatgggagtttgttttggcaccaaaatcaacgggactttccaaaatgtcgtaataaccccgccccgttgacgcaaatgggcggtaggcgtgtacggtgggaggtctatataagcagagctcgtttagtgaaccgtcagatcgcctggaacgccatccacgctgttttgacctccatagaagacagcgatcgcgccaccatggctggcacttcccgcaccttgtcctattacaaacttggcgcgagtcaacgggtggcgggtgactccggatttgcggcatattcacgatataggatcgggaattactgcgcagcaggtactacgcagactgcttgcacggatgataacgcgctggcctattacaatacaacaaaaggaggctggccccagatcgcccaattcgccccatcagccagtgctttcttcggcatgagtcgaatcggtatggaagtaacaccctccggcacatggcttacctacactggcgcgataaagctcgatgacaaagaccctaatcctgcgaataacgctgcaattgttctccagcttcctcagggtacgaccctgccaaaaggtttttacgcagagggcggcgtcccaatcaatacgaatagcagcccggacgatcaaataggatactacagaagggccacacggcggatcaggctgtacctctatgcgcttgtctatttcctccagagtattaatttcgtgaggatcatcatgcggttgtggctctgctctacagacgtagtatatcgagcttttgacatttacaatgacaaagtagccgggtttgccaaatttctcaaaaccagacagaagcggacggcaactaaggcttacaatgtgactcaggcgttcgggcggagaggtccggaacagacccaaccttatgtgtgcaatgcaccgggatgtgatgtcacagatgtgactcagctctaccttggagggatgtcctattatgcgtgtctcgtgggcctcatgtggttgtcctatttcatagcatcatttcgattgtttgctcgaacgaggtctatgtggtccttcaatcctgagacgaacatacttctgaatgtcccactccacggcaccatactgactcggccgctccttgaaagtgaactcgtaatcctccttaacaaacacatcgatgcctacaaaacgtttccaccaacggaaccgaagaaggataaaaagaagaaggccgatgaaacgcaggccctgccccaacgccaaaaaaagcagcagacggtcacggttggcgattctgccgaagtagctgtaaagatgtttgacgcctacgtcaatacattctcatcaacctttaatgtgatggatctgtttatgagaattttcactattggaaccgtcactcttaagcagggagaaatcaaagacgcgacaccatctgattttgttagggcaacagccactatccccatacaagccagcttgccatttggatggctgatccttctccaattcgcgtatgctaaccggaatcgctttctctacataataaagctgatcttcctttggcttctctggcccgttttggctgtattccagtcagccagtaagataataactctcaaaaagcggtggcagcttgcacttagtaaaggcgtccatttcgtctgcaatctccttttgctgcatgttatgtctaagcacacagactttagttcagagattattggatacaaagctattgatggtggtgttactagagattgtgtagttctccattcatacttcacgtcagattattatcaactctacagcacgcagctttccacggatacaggcgtagagcatgtgaccttcttcatctataataagatagtcgacgaacctgaggaacatgtccaaattcatacaattgatgggtcctccggcgtatgcaacatcgttaacgtgagccttgtcaaacctagcttctatgtctattctagggttaagaacctgaattcctccagggtccctggacccggaccaggcgccaaatttgttgctgcttggacactgaaagctgctgctgggcccggaccaggccagtacatcaaggccaactctaagtttatcggcatcaccgaattgggacctggacccggctagtgagtttaaactcccatttaaatgtgagggttaatgcttcgagcagacatgataagatacattgatgagtttggacaaaccacaactagaatgcagtgaaaaaaatgctttatttgtgaaatttgtgatgctattgctttatttgtaaccattataagctgcaataaacaagttaacaacaacaattgcattcattttatgtttcaggttcagggggagatgtgggaggttttttaaagcaagtaaaacctctacaaatgtggtaaaa

SEQ ID NO: 69 - DNA, 4752 bp, synthetic construct
  source 1..4752: mol_type = other DNA
gacattgattattgactagttgttaatagtaatcaattacggggtcattagttcatagcccatatatggagttccgcgttacataacttacggtaaatggcccgcctggctgaccgcccaacgacccccgcccattgacgtcaataatgacgtatgttcccatagtaacgccaatagggactttccattgacgtcaatgggtggagtatttacggtaaactgcccacttggcagtacatcaagtgtatcatatgccaagtccgccccctattgacgtcaatgacggtaaatggcccgcctggcattatgcccagtacatgaccttacgggactttcctacttggcagtacatctacgtattagtcatcgctattaccatggtgatgcggttttggcagtacaccaatgggcgtggatagcggtttgactcacggggatttccaagtctccaccccattgacgtcaatgggagtttgttttggcaccaaaatcaacgggactttccaaaatgtcgtaataaccccgccccgttgacgcaaatgggcggtaggcgtgtacggtgggaggtctatataagcagagctcgtttagtgaaccgtcagatcgcctggaacgccatccacgctgttttgacctccatagaagacagcgatcgcgccaccatgtttgtctttctggtcctgcttcccctcgttagttctcagtgtgtgaacctcaccacacggacgcaactccctccagcttacacaaattcttttacgcgaggcgtgtattatccggataaagttttcaggtcctccgtcctgcactccacgcaggacctttttttgccgttcttttctaacgtaacatggtttcatgccattcatgtttccgggacaaacggtacgaaacgctttgataaccctgtgctgccgttcaatgatggcgtttactttgcctctacggaaaagagtaacataatccgaggctggatcttcgggaccaccctggatagcaagactcagagtcttctcatcgttaataacgctacaaacgttgttatcaaggtgtgtgaattccagttttgcaacgatccctttttgggggtatactatcacaaaaacaataaaagttggatggaatcagagtttcgcgtgtattcttctgcgaacaactgcacgtttgaatacgttagtcagccttttctcatggacttggaaggtaagcaggggaactttaaaaacttgcgggagttcgtttttaagaacatagatggttacttcaaaatttatagcaaacatacaccgatcaacctcgtgagagatctcccacagggtttttccgcactcgaaccgctcgtggatctgccgattggaattaacattacccgcttccagaccctgttggctctgcacagaagctatctgacgccaggggattccagcagtggatggacggcgggtgcggccgcgtattatgtaggctatctccaaccccgaacgttcttgctgaagtacaatgagaatgggaccattacggatgctgtggattgtgcattggatcctctctctgagacaaaatgcacccttaaaagcttcactgtagaaaagggtatttatcagactagcaacttccgcgtacaaccaacggagtctatcgttaggttccccaacattactaacttgtgcccatttggcgaagtgtttaacgcaactaggtttgctagtgtctatgcttggaatcgaaagagaataagcaattgtgtcgcagattactccgtattgtataattctgcaagcttttcaacattcaagtgctacggagtgtctcccaccaaattgaacgacctgtgttttactaacgtgtatgccgactctttcgttatccgaggcgatgaggtcaggcaaattgcccccggacaaactgggaaaattgcggattataattacaagcttccagacgactttacgggctgtgttatcgcatggaactccaacaatctcgacagcaaagtgggtggaaattataattatttgtatagattgtttcgcaagtccaacctgaagccattcgagagagacatctccaccgagatttatcaagccggctcaactccttgcaacggagtcgaaggcttcaactgttattttccgcttcagtcctatggttttcaacctacgaacggcgtgggataccagccgtatcgagtcgtggtactgtcctttgaacttttgcacgccccagcaactgtttgcggaccaaaaaagtccacaaatctcgtcaaaaacaagtgcgttaattttaattttaacgggcttacgggtactggtgtactgacggagtccaataagaaattcctgccattccaacagtttggacgggatattgctgatacgaccgacgctgtgcgagatccccagacacttgagatcctcgacataaccccctgtagttttggtggagtgtctgtaattacccccggaacgaacaccagcaaccaagttgcggtgctttatcaggatgttaattgcactgaggttcctgtcgcgatacatgccgaccaactgacgcctacatggcgagtatattcaacgggctccaacgtcttccagacgcgagccggttgtctcattggagctgaacatgtgaacaactcttatgaatgcgatataccaattggggcaggtatctgcgcctcttatcagacgcagactaactcacccagacgagcacggagcgtggcaagccaatccattattgcctacaccatgtccttgggagctgagaattcagtcgcctattctaataatagcattgctataccgacgaactttacaatttccgtaactaccgaaatattgcccgtcagtatgactaagactagcgttgactgcacaatgtacatttgcggcgatagtaccgaatgctctaatcttcttctgcagtatggtagtttttgtacacaactgaatcgagctctgactgggatcgcagtcgaacaggacaaaaatacacaggaagttttcgcgcaagtgaagcaaatctacaaaacgcctcccataaaagatttcggaggattcaatttcagtcagatactccctgatccctctaaaccatctaaacgatcctttatcgaagatttgctgttcaacaaggtgacccttgctgacgctggattcataaagcagtacggggattgtcttggcgatatcgcagcccgagaccttatttgtgcccaaaaatttaacggacttacggtactccctccccttctgactgacgaaatgatagcccagtacaccagtgctctgctggctggcaccataacgagcggatggacttttggtgcgggtgcagcactgcagatccccttcgcgatgcaaatggcatacaggtttaatgggattggggtcacccagaatgtattgtacgagaaccagaagcttatagcgaatcaatttaacagtgcaattggtaagattcaggacagcctttcaagtaccgcgagtgctctcgggaagttgcaggatgtagtaaatcaaaatgcgcaggcgctgaatacgttggttaaacagctcagcagtaattttggagcaatttctagcgtgctgaatgacatcctcagcagactcgataaggtggaggctgaggtacagatagatagactcatcacgggcagattgcagagtttgcagacatacgtcacgcaacaactcattcgagcagcagaaattagagcatccgcaaatctggcggccacgaaaatgtctgagtgcgttctggggcagtccaagagagttgacttttgtgggaaaggatatcatctgatgagttttccgcagtcagcgccacatggtgtggtctttctgcacgttacttatgtccccgcacaggagaagaattttacgaccgcgccagctatttgccatgacggtaaggctcacttcccgagggaaggggtattcgtttctaacggtacgcattggtttgttacgcaacggaacttttatgaaccacagattattaccaccgacaacacattcgtaagtggaaactgtgatgtcgttatcggaatagtaaataataccgtttatgacccccttcagcctgaacttgattccttcaaggaagagctcgataaatactttaagaaccacaccagccccgatgttgacctgggtgatatatctgggatcaacgcttctgtcgtcaacattcaaaaagagatcgatcgcctgaatgaggtggccaaaaacctcaatgaaagtctcattgaccttcaagaactcggtaagtacgagcaatacatcaagtggccatggtacatatggctgggcttcattgctgggttgatagctatagtgatggttacgataatgttgtgttgtatgacatcctgctgtagctgccttaaaggttgttgttcttgcggttcttgttgtaagtttgacgaagatgattcagagcctgttctgaaaggggtgaagctccattatacttgatgggtttaaactcccatttaaatgtgagggttaatgcttcgagcagacatgataagatacattgatgagtttggacaaaccacaactagaatgcagtgaaaaaaatgctttatttgtgaaatttgtgatgctattgctttatttgtaaccattataagctgcaataaacaagttaacaacaacaattgcattcattttatgtttcaggttcagggggagatgtgggaggttttttaaagcaagtaaaacctctacaaatgtggtaaaa

SEQ ID NO: 70 - DNA, 4752 bp, synthetic construct
  source 1..4752: mol_type = other DNA
gacattgattattgactagttgttaatagtaatcaattacggggtcattagttcatagcccatatatggagttccgcgttacataacttacggtaaatggcccgcctggctgaccgcccaacgacccccgcccattgacgtcaataatgacgtatgttcccatagtaacgccaatagggactttccattgacgtcaatgggtggagtatttacggtaaactgcccacttggcagtacatcaagtgtatcatatgccaagtccgccccctattgacgtcaatgacggtaaatggcccgcctggcattatgcccagtacatgaccttacgggactttcctacttggcagtacatctacgtattagtcatcgctattaccatggtgatgcggttttggcagtacaccaatgggcgtggatagcggtttgactcacggggatttccaagtctccaccccattgacgtcaatgggagtttgttttggcaccaaaatcaacgggactttccaaaatgtcgtaataaccccgccccgttgacgcaaatgggcggtaggcgtgtacggtgggaggtctatataagcagagctcgtttagtgaaccgtcagatcgcctggaacgccatccacgctgttttgacctccatagaagacagcgatcgcgccaccatgtttgtctttctggtcctgcttcccctcgttagttctcagtgtgtgaacctcaccacacggacgcaactccctccagcttacacaaattcttttacgcgaggcgtgtattatccggataaagttttcaggtcctccgtcctgcactccacgcaggacctttttttgccgttcttttctaacgtaacatggtttcatgccattcatgtttccgggacaaacggtacgaaacgctttgataaccctgtgctgccgttcaatgatggcgtttactttgcctctacggaaaagagtaacataatccgaggctggatcttcgggaccaccctggatagcaagactcagagtcttctcatcgttaataacgctacaaacgttgttatcaaggtgtgtgaattccagttttgcaacgatccctttttgggggtatactatcacaaaaacaataaaagttggatggaatcagagtttcgcgtgtattcttctgcgaacaactgcacgtttgaatacgttagtcagccttttctcatggacttggaaggtaagcaggggaactttaaaaacttgcgggagttcgtttttaagaacatagatggttacttcaaaatttatagcaaacatacaccgatcaacctcgtgagagatctcccacagggtttttccgcactcgaaccgctcgtggatctgccgattggaattaacattacccgcttccagaccctgttggctctgcacagaagctatctgacgccaggggattccagcagtggatggacggcgggtgcggccgcgtattatgtaggctatctccaaccccgaacgttcttgctgaagtacaatgagaatgggaccattacggatgctgtggattgtgcattggatcctctctctgagacaaaatgcacccttaaaagcttcactgtagaaaagggtatttatcagactagcaacttccgcgtacaaccaacggagtctatcgttaggttccccaacattactaacttgtgcccatttggcgaagtgtttaacgcaactaggtttgctagtgtctatgcttggaatcgaaagagaataagcaattgtgtcgcagattactccgtattgtataattctgcaagcttttcaacattcaagtgctacggagtgtctcccaccaaattgaacgacctgtgttttactaacgtgtatgccgactctttcgttatccgaggcgatgaggtcaggcaaattgcccccggacaaactgggaaaattgcggattataattacaagcttccagacgactttacgggctgtgttatcgcatggaactccaacaatctcgacagcaaagtgggtggaaattataattatttgtatagattgtttcgcaagtccaacctgaagccattcgagagagacatctccaccgagatttatcaagccggctcaactccttgcaacggagtcgaaggcttcaactgttattttccgcttcagtcctatggttttcaacctacgaacggcgtgggataccagccgtatcgagtcgtggtactgtcctttgaacttttgcacgccccagcaactgtttgcggaccaaaaaagtccacaaatctcgtcaaaaacaagtgcgttaattttaattttaacgggcttacgggtactggtgtactgacggagtccaataagaaattcctgccattccaacagtttggacgggatattgctgatacgaccgacgctgtgcgagatccccagacacttgagatcctcgacataaccccctgtagttttggtggagtgtctgtaattacccccggaacgaacaccagcaaccaagttgcggtgctttatcagggtgttaattgcactgaggttcctgtcgcgatacatgccgaccaactgacgcctacatggcgagtatattcaacgggctccaacgtcttccagacgcgagccggttgtctcattggagctgaacatgtgaacaactcttatgaatgcgatataccaattggggcaggtatctgcgcctcttatcagacgcagactaactcacccgtacgagcacggagcgtggcaagccaatccattattgcctacaccatgtccttgggagctgagaattcagtcgcctattctaataatagcattgctataccgacgaactttacaatttccgtaactaccgaaatattgcccgtcagtatgactaagactagcgttgactgcacaatgtacatttgcggcgatagtaccgaatgctctaatcttcttctgcagtatggtagtttttgtacacaactgaatcgagctctgactgggatcgcagtcgaacaggacaaaaatacacaggaagttttcgcgcaagtgaagcaaatctacaaaacgcctcccataaaagatttcggaggattcaatttcagtcagatactccctgatccctctaaaccatctaaaaactcctttatcgaagatttgctgttcaacaaggtgacccttgctgacgctggattcataaagcagtacggggattgtcttggcgatatcgcagcccgagaccttatttgtgcccaaaaatttaacggacttacggtactccctccccttctgactgacgaaatgatagcccagtacaccagtgctctgctggctggcaccataacgagcggatggacttttggtgcgggtgcagcactgcagatccccttcgcgatgcaaatggcatacaggtttaatgggattggggtcacccagaatgtattgtacgagaaccagaagcttatagcgaatcaatttaacagtgcaattggtaagattcaggacagcctttcaagtaccgcgagtgctctcgggaagttgcaggatgtagtaaatcaaaatgcgcaggcgctgaatacgttggttaaacagctcagcagtaattttggagcaatttctagcgtgctgaatgacatcctcagcagactcgatcccccagaggctgaggtacagatagatagactcatcacgggcagattgcagagtttgcagacatacgtcacgcaacaactcattcgagcagcagaaattagagcatccgcaaatctggcggccacgaaaatgtctgagtgcgttctggggcagtccaagagagttgacttttgtgggaaaggatatcatctgatgagttttccgcagtcagcgccacatggtgtggtctttctgcacgttacttatgtccccgcacaggagaagaattttacgaccgcgccagctatttgccatgacggtaaggctcacttcccgagggaaggggtattcgtttctaacggtacgcattggtttgttacgcaacggaacttttatgaaccacagattattaccaccgacaacacattcgtaagtggaaactgtgatgtcgttatcggaatagtaaataataccgtttatgacccccttcagcctgaacttgattccttcaaggaagagctcgataaatactttaagaaccacaccagccccgatgttgacctgggtgatatatctgggatcaacgcttctgtcgtcaacattcaaaaagagatcgatcgcctgaatgaggtggccaaaaacctcaatgaaagtctcattgaccttcaagaactcggtaagtacgagcaatacatcaagtggccatggtacatatggctgggcttcattgctgggttgatagctatagtgatggttacgataatgttgtgttgtatgacatcctgctgtagctgccttaaaggttgttgttcttgcggttcttgttgtaagtttgacgaagatgattcagagcctgttctgaaaggggtgaagctccattatacttgataagtttaaactcccatttaaatgtgagggttaatgcttcgagcagacatgataagatacattgatgagtttggacaaaccacaactagaatgcagtgaaaaaaatgctttatttgtgaaatttgtgatgctattgctttatttgtaaccattataagctgcaataaacaagttaacaacaacaattgcattcattttatgtttcaggttcagggggagatgtgggaggttttttaaagcaagtaaaacctctacaaatgtggtaaaa

SEQ ID NO: 71 - DNA, 7922 bp, synthetic construct
  source 1..7922: mol_type = other DNA
gacattgattattgactagttgttaatagtaatcaattacggggtcattagttcatagcccatatatggagttccgcgttacataacttacggtaaatggcccgcctggctgaccgcccaacgacccccgcccattgacgtcaataatgacgtatgttcccatagtaacgccaatagggactttccattgacgtcaatgggtggagtatttacggtaaactgcccacttggcagtacatcaagtgtatcatatgccaagtccgccccctattgacgtcaatgacggtaaatggcccgcctggcattatgcccagtacatgaccttacgggactttcctacttggcagtacatctacgtattagtcatcgctattaccatggtgatgcggttttggcagtacaccaatgggcgtggatagcggtttgactcacggggatttccaagtctccaccccattgacgtcaatgggagtttgttttggcaccaaaatcaacgggactttccaaaatgtcgtaataaccccgccccgttgacgcaaatgggcggtaggcgtgtacggtgggaggtctatataagcagagctcgtttagtgaaccgtcagatcgcctggaacgccatccacgctgttttgacctccatagaagacagcgatcgcgccaccatgtttgtctttctggtcctgcttcccctcgttagttctcagtgtgtgaacctcaccacacggacgcaactccctccagcttacacaaattcttttacgcgaggcgtgtattatccggataaagttttcaggtcctccgtcctgcactccacgcaggacctttttttgccgttcttttctaacgtaacatggtttcatgccattcatgtttccgggacaaacggtacgaaacgctttgataaccctgtgctgccgttcaatgatggcgtttactttgcctctacggaaaagagtaacataatccgaggctggatcttcgggaccaccctggatagcaagactcagagtcttctcatcgttaataacgctacaaacgttgttatcaaggtgtgtgaattccagttttgcaacgatccctttttgggggtatactatcacaaaaacaataaaagttggatggaatcagagtttcgcgtgtattcttctgcgaacaactgcacgtttgaatacgttagtcagccttttctcatggacttggaaggtaagcaggggaactttaaaaacttgcgggagttcgtttttaagaacatagatggttacttcaaaatttatagcaaacatacaccgatcaacctcgtgagagatctcccacagggtttttccgcactcgaaccgctcgtggatctgccgattggaattaacattacccgcttccagaccctgttggctctgcacagaagctatctgacgccaggggattccagcagtggatggacggcgggtgcggccgcgtattatgtaggctatctccaaccccgaacgttcttgctgaagtacaatgagaatgggaccattacggatgctgtggattgtgcattggatcctctctctgagacaaaatgcacccttaaaagcttcactgtagaaaagggtatttatcagactagcaacttccgcgtacaaccaacggagtctatcgttaggttccccaacattactaacttgtgcccatttggcgaagtgtttaacgcaactaggtttgctagtgtctatgcttggaatcgaaagagaataagcaattgtgtcgcagattactccgtattgtataattctgcaagcttttcaacattcaagtgctacggagtgtctcccaccaaattgaacgacctgtgttttactaacgtgtatgccgactctttcgttatccgaggcgatgaggtcaggcaaattgcccccggacaaactgggaaaattgcggattataattacaagcttccagacgactttacgggctgtgttatcgcatggaactccaacaatctcgacagcaaagtgggtggaaattataattatttgtatagattgtttcgcaagtccaacctgaagccattcgagagagacatctccaccgagatttatcaagccggctcaactccttgcaacggagtcgaaggcttcaactgttattttccgcttcagtcctatggttttcaacctacgaacggcgtgggataccagccgtatcgagtcgtggtactgtcctttgaacttttgcacgccccagcaactgtttgcggaccaaaaaagtccacaaatctcgtcaaaaacaagtgcgttaattttaattttaacgggcttacgggtactggtgtactgacggagtccaataagaaattcctgccattccaacagtttggacgggatattgctgatacgaccgacgctgtgcgagatccccagacacttgagatcctcgacataaccccctgtagttttggtggagtgtctgtaattacccccggaacgaacaccagcaaccaagttgcggtgctttatcaggatgttaattgcactgaggttcctgtcgcgatacatgccgaccaactgacgcctacatggcgagtatattcaacgggctccaacgtcttccagacgcgagccggttgtctcattggagctgaacatgtgaacaactcttatgaatgcgatataccaattggggcaggtatctgcgcctcttatcagacgcagactaactcacccagacgagcacggagcgtggcaagccaatccattattgcctacaccatgtccttgggagctgagaattcagtcgcctattctaataatagcattgctataccgacgaactttacaatttccgtaactaccgaaatattgcccgtcagtatgactaagactagcgttgactgcacaatgtacatttgcggcgatagtaccgaatgctctaatcttcttctgcagtatggtagtttttgtacacaactgaatcgagctctgactgggatcgcagtcgaacaggacaaaaatacacaggaagttttcgcgcaagtgaagcaaatctacaaaacgcctcccataaaagatttcggaggattcaatttcagtcagatactccctgatccctctaaaccatctaaacgatcctttatcgaagatttgctgttcaacaaggtgacccttgctgacgctggattcataaagcagtacggggattgtcttggcgatatcgcagcccgagaccttatttgtgcccaaaaatttaacggacttacggtactccctccccttctgactgacgaaatgatagcccagtacaccagtgctctgctggctggcaccataacgagcggatggacttttggtgcgggtgcagcactgcagatccccttcgcgatgcaaatggcatacaggtttaatgggattggggtcacccagaatgtattgtacgagaaccagaagcttatagcgaatcaatttaacagtgcaattggtaagattcaggacagcctttcaagtaccgcgagtgctctcgggaagttgcaggatgtagtaaatcaaaatgcgcaggcgctgaatacgttggttaaacagctcagcagtaattttggagcaatttctagcgtgctgaatgacatcctcagcagactcgataaggtggaggctgaggtacagatagatagactcatcacgggcagattgcagagtttgcagacatacgtcacgcaacaactcattcgagcagcagaaattagagcatccgcaaatctggcggccacgaaaatgtctgagtgcgttctggggcagtccaagagagttgacttttgtgggaaaggatatcatctgatgagttttccgcagtcagcgccacatggtgtggtctttctgcacgttacttatgtccccgcacaggagaagaattttacgaccgcgccagctatttgccatgacggtaaggctcacttcccgagggaaggggtattcgtttctaacggtacgcattggtttgttacgcaacggaacttttatgaaccacagattattaccaccgacaacacattcgtaagtggaaactgtgatgtcgttatcggaatagtaaataataccgtttatgacccccttcagcctgaacttgattccttcaaggaagagctcgataaatactttaagaaccacaccagccccgatgttgacctgggtgatatatctgggatcaacgcttctgtcgtcaacattcaaaaagagatcgatcgcctgaatgaggtggccaaaaacctcaatgaaagtctcattgaccttcaagaactcggtaagtacgagcaatacatcaagtggccatggtacatatggctgggcttcattgctgggttgatagctatagtgatggttacgataatgttgtgttgtatgacatcctgctgtagctgccttaaaggttgttgttcttgcggttcttgttgtaagtttgacgaagatgattcagagcctgttctgaaaggggtgaagctccattatactggtggaagcggtgggttcgggcagagggcagaggctcactgctcacgtgtggtgatgtagaagagaatccaggtcctatgtactcattcgtatccgaggagaccggcacgttgatcgttaattctgtattgttgtttctcgcttttgtggtatttctccttgttacgcttgcgattcttaccgcccttcgcctctgtgcttactgctgcaacattgtgaatgtctccctcgtgaagccctccttttatgtttactccagagtgaaaaacctcaatagctccagggttccagacctgctggtgtgataaagacatgataagatacattgatgagtttggacaaaccacaactagaatgcagtgaaaaaaatgctttatttgtgaaatttgtgatgctattgctttatttgtaaccattataagctgcaataaacaagttaacaacaacaattgcattcattttatgtttcaggttcagggggagatgtgggaggttttttaaagcaagtaaaacctctacaaatgtggtaaaaggcacgtcgacgttagacattgattattgactagttgttaatagtaatcaattacggggtcattagttcatagcccatatatggagttccgcgttacataacttacggtaaatggcccgcctggctgaccgcccaacgacccccgcccattgacgtcaataatgacgtatgttcccatagtaacgccaatagggactttccattgacgtcaatgggtggagtatttacggtaaactgcccacttggcagtacatcaagtgtatcatatgccaagtccgccccctattgacgtcaatgacggtaaatggcccgcctggcattatgcccagtacatgaccttacgggactttcctacttggcagtacatctacgtattagtcatcgctattaccatggtgatgcggttttggcagtacaccaatgggcgtggatagcggtttgactcacggggatttccaagtctccaccccattgacgtcaatgggagtttgttttggcaccaaaatcaacgggactttccaaaatgtcgtaataaccccgccccgttgacgcaaatgggcggtaggcgtgtacggtgggaggtctatataagcagagctcgtttagtgaaccgtcagatcactcttctggtccccacagactcagagagaacccagtttaaacgccaccatgtcagataatgggcctcagaaccagcggaatgcccccaggatcacgttcggtgggccttcagattcaactggaagcaatcagaacggggaaagatccggtgcaaggtccaagcaacgccgaccccagggattgcctaataatacagcaagttggtttactgcactgacccaacacgggaaagaggaccttaaatttccgcgggggcaaggagtacctataaacactaatagcagccccgatgaccaaattgggtactaccgcagagcaacccggcgaatcagagggggtgacggtaagatgaaggacctctcccccaggtggtacttctactatttgggaacggggccagaagccggactgccctacggcgcaaacaaagacggtataatatgggtcgccactgagggcgctctgaatacgccaaaagatcacattggtactagaaacccggcgaacaatgcggcaattgtgcttcagctccctcaaggaacaacgttgccaaaaggattttacgcagagggatcacgggggggttcccaggctagttctcgcagttcctcaaggagtcgaaattccagtaggaactcaaccccaggctcaagccgcgggacttcacctgcaagaatggccggtaacgggggagacgctgctttggctcttcttctccttgatcgccttaatcagcttgagtctaagatgtctggtaaaggccaacagcaacaaggacagacggtaacgaaaaaatccgccgccgaggcctctaaaaaaccgagacaaaaacggactgctacgaaagcgtataacgtcactcaggcttttggtaggcggggcccggaacaaacccagggtaattttggcgatcaggaactgattagacaaggcaccgactacaagcactggcctcagatcgcgcagtttgcaccctccgcttcagcgttcttcgggatgtcacgcatcgggatggaggttacaccgagtggaacatggctgacatatactggtgcaatcaagctggacgacaaggatcccaacttcaaagatcaagttatactcctcaacaaacatatcgatgcgtataagacattccccccgacggaacccaaaaaagataaaaaaaagaaggccgacgagacccaagccctcccacaacgacaaaagaaacaacaaacagtaacactgctcccagccgcagacttggatgatttctccaaacagttgcagcaatctatgagttcagccgatagtactcaggccggcggttctggaggtgtccgtgctgaaggacgcgggtcccttctcacctgcggcgacgttgaggaaaaccctggccctatggctgacagcaatggtactattacggtggaagaactgaaaaagctcttggaacagtggaaccttgtgatcggttttctgtttttgacctggatttgcttgctccagttcgcctatgctaatagaaacaggtttctctatataatcaagttgatttttctgtggctgctctggcccgttacgcttgcgtgttttgtcctggctgctgtgtaccggatcaattggatcactggtggcattgctatcgccatggcttgtcttgtcgggctgatgtggctttcctattttatcgcttcatttaggctgtttgctcgaaccagatcaatgtggtcatttaatccagagactaatattctcttgaatgttccgctgcacggaactatcctcacacgacccctgttggagtccgaattggttatcggtgccgtaattctcaggggccaccttagaatcgcgggccaccatttgggacggtgcgatattaaagacctgcccaaagagatcacagtggccacaagtagaacgctctcatactataaactgggagcttcccagagagtggccggggatagtggcttcgcggcatatagtcgctaccgcatcggtaactataaacttaatacggaccatagtagctctagcgataacattgccttgctggttcagtgatagatttaaatctgtgccttctagttgccagccatctgttgtttgcccctcccccgtgccttccttgaccctggaaggtgccactcccactgtcctttcctaataaaatgaggaaattgcatcgcattgtctgagtaggtgtcattctattctggggggtggggtggggcaggacagcaagggggaggattgggaagacaatagcaggcatgctggggatgcggtgggctctatgg

SEQ ID NO: 72 - DNA, 7619 bp, synthetic construct
  source 1..7619: mol_type = other DNA
gacattgattattgactagttgttaatagtaatcaattacggggtcattagttcatagcccatatatggagttccgcgttacataacttacggtaaatggcccgcctggctgaccgcccaacgacccccgcccattgacgtcaataatgacgtatgttcccatagtaacgccaatagggactttccattgacgtcaatgggtggagtatttacggtaaactgcccacttggcagtacatcaagtgtatcatatgccaagtccgccccctattgacgtcaatgacggtaaatggcccgcctggcattatgcccagtacatgaccttacgggactttcctacttggcagtacatctacgtattagtcatcgctattaccatggtgatgcggttttggcagtacaccaatgggcgtggatagcggtttgactcacggggatttccaagtctccaccccattgacgtcaatgggagtttgttttggcaccaaaatcaacgggactttccaaaatgtcgtaataaccccgccccgttgacgcaaatgggcggtaggcgtgtacggtgggaggtctatataagcagagctcgtttagtgaaccgtcagatcgcctggaacgccatccacgctgttttgacctccatagaagacagcgatcgcgccaccatgtttgtctttctggtcctgcttcccctcgttagttctcagtgtgtgaacctcaccacacggacgcaactccctccagcttacacaaattcttttacgcgaggcgtgtattatccggataaagttttcaggtcctccgtcctgcactccacgcaggacctttttttgccgttcttttctaacgtaacatggtttcatgccattcatgtttccgggacaaacggtacgaaacgctttgataaccctgtgctgccgttcaatgatggcgtttactttgcctctacggaaaagagtaacataatccgaggctggatcttcgggaccaccctggatagcaagactcagagtcttctcatcgttaataacgctacaaacgttgttatcaaggtgtgtgaattccagttttgcaacgatccctttttgggggtatactatcacaaaaacaataaaagttggatggaatcagagtttcgcgtgtattcttctgcgaacaactgcacgtttgaatacgttagtcagccttttctcatggacttggaaggtaagcaggggaactttaaaaacttgcgggagttcgtttttaagaacatagatggttacttcaaaatttatagcaaacatacaccgatcaacctcgtgagagatctcccacagggtttttccgcactcgaaccgctcgtggatctgccgattggaattaacattacccgcttccagaccctgttggctctgcacagaagctatctgacgccaggggattccagcagtggatggacggcgggtgcggccgcgtattatgtaggctatctccaaccccgaacgttcttgctgaagtacaatgagaatgggaccattacggatgctgtggattgtgcattggatcctctctctgagacaaaatgcacccttaaaagcttcactgtagaaaagggtatttatcagactagcaacttccgcgtacaaccaacggagtctatcgttaggttccccaacattactaacttgtgcccatttggcgaagtgtttaacgcaactaggtttgctagtgtctatgcttggaatcgaaagagaataagcaattgtgtcgcagattactccgtattgtataattctgcaagcttttcaacattcaagtgctacggagtgtctcccaccaaattgaacgacctgtgttttactaacgtgtatgccgactctttcgttatccgaggcgatgaggtcaggcaaattgcccccggacaaactgggaaaattgcggattataattacaagcttccagacgactttacgggctgtgttatcgcatggaactccaacaatctcgacagcaaagtgggtggaaattataattatttgtatagattgtttcgcaagtccaacctgaagccattcgagagagacatctccaccgagatttatcaagccggctcaactccttgcaacggagtcgaaggcttcaactgttattttccgcttcagtcctatggttttcaacctacgaacggcgtgggataccagccgtatcgagtcgtggtactgtcctttgaacttttgcacgccccagcaactgtttgcggaccaaaaaagtccacaaatctcgtcaaaaacaagtgcgttaattttaattttaacgggcttacgggtactggtgtactgacggagtccaataagaaattcctgccattccaacagtttggacgggatattgctgatacgaccgacgctgtgcgagatccccagacacttgagatcctcgacataaccccctgtagttttggtggagtgtctgtaattacccccggaacgaacaccagcaaccaagttgcggtgctttatcaggatgttaattgcactgaggttcctgtcgcgatacatgccgaccaactgacgcctacatggcgagtatattcaacgggctccaacgtcttccagacgcgagccggttgtctcattggagctgaacatgtgaacaactcttatgaatgcgatataccaattggggcaggtatctgcgcctcttatcagacgcagactaactcacccagacgagcacggagcgtggcaagccaatccattattgcctacaccatgtccttgggagctgagaattcagtcgcctattctaataatagcattgctataccgacgaactttacaatttccgtaactaccgaaatattgcccgtcagtatgactaagactagcgttgactgcacaatgtacatttgcggcgatagtaccgaatgctctaatcttcttctgcagtatggtagtttttgtacacaactgaatcgagctctgactgggatcgcagtcgaacaggacaaaaatacacaggaagttttcgcgcaagtgaagcaaatctacaaaacgcctcccataaaagatttcggaggattcaatttcagtcagatactccctgatccctctaaaccatctaaacgatcctttatcgaagatttgctgttcaacaaggtgacccttgctgacgctggattcataaagcagtacggggattgtcttggcgatatcgcagcccgagaccttatttgtgcccaaaaatttaacggacttacggtactccctccccttctgactgacgaaatgatagcccagtacaccagtgctctgctggctggcaccataacgagcggatggacttttggtgcgggtgcagcactgcagatccccttcgcgatgcaaatggcatacaggtttaatgggattggggtcacccagaatgtattgtacgagaaccagaagcttatagcgaatcaatttaacagtgcaattggtaagattcaggacagcctttcaagtaccgcgagtgctctcgggaagttgcaggatgtagtaaatcaaaatgcgcaggcgctgaatacgttggttaaacagctcagcagtaattttggagcaatttctagcgtgctgaatgacatcctcagcagactcgataaggtggaggctgaggtacagatagatagactcatcacgggcagattgcagagtttgcagacatacgtcacgcaacaactcattcgagcagcagaaattagagcatccgcaaatctggcggccacgaaaatgtctgagtgcgttctggggcagtccaagagagttgacttttgtgggaaaggatatcatctgatgagttttccgcagtcagcgccacatggtgtggtctttctgcacgttacttatgtccccgcacaggagaagaattttacgaccgcgccagctatttgccatgacggtaaggctcacttcccgagggaaggggtattcgtttctaacggtacgcattggtttgttacgcaacggaacttttatgaaccacagattattaccaccgacaacacattcgtaagtggaaactgtgatgtcgttatcggaatagtaaataataccgtttatgacccccttcagcctgaacttgattccttcaaggaagagctcgataaatactttaagaaccacaccagccccgatgttgacctgggtgatatatctgggatcaacgcttctgtcgtcaacattcaaaaagagatcgatcgcctgaatgaggtggccaaaaacctcaatgaaagtctcattgaccttcaagaactcggtaagtacgagcaatacatcaagtggccatggtacatatggctgggcttcattgctgggttgatagctatagtgatggttacgataatgttgtgttgtatgacatcctgctgtagctgccttaaaggttgttgttcttgcggttcttgttgtaagtttgacgaagatgattcagagcctgttctgaaaggggtgaagctccattatacttgaggagacatgataagatacattgatgagtttggacaaaccacaactagaatgcagtgaaaaaaatgctttatttgtgaaatttgtgatgctattgctttatttgtaaccattataagctgcaataaacaagttaacaacaacaattgcattcattttatgtttcaggttcagggggagatgtgggaggttttttaaagcaagtaaaacctctacaaatgtggtaaaaggcacgtcgacgttagacattgattattgactagttgttaatagtaatcaattacggggtcattagttcatagcccatatatggagttccgcgttacataacttacggtaaatggcccgcctggctgaccgcccaacgacccccgcccattgacgtcaataatgacgtatgttcccatagtaacgccaatagggactttccattgacgtcaatgggtggagtatttacggtaaactgcccacttggcagtacatcaagtgtatcatatgccaagtccgccccctattgacgtcaatgacggtaaatggcccgcctggcattatgcccagtacatgaccttacgggactttcctacttggcagtacatctacgtattagtcatcgctattaccatggtgatgcggttttggcagtacaccaatgggcgtggatagcggtttgactcacggggatttccaagtctccaccccattgacgtcaatgggagtttgttttggcaccaaaatcaacgggactttccaaaatgtcgtaataaccccgccccgttgacgcaaatgggcggtaggcgtgtacggtgggaggtctatataagcagagctcgtttagtgaaccgtcagatcactcttctggtccccacagactcagagagaacccagtttaaacgccaccatgtcagataatgggcctcagaaccagcggaatgcccccaggatcacgttcggtgggccttcagattcaactggaagcaatcagaacggggaaagatccggtgcaaggtccaagcaacgccgaccccagggattgcctaataatacagcaagttggtttactgcactgacccaacacgggaaagaggaccttaaatttccgcgggggcaaggagtacctataaacactaatagcagccccgatgaccaaattgggtactaccgcagagcaacccggcgaatcagagggggtgacggtaagatgaaggacctctcccccaggtggtacttctactatttgggaacggggccagaagccggactgccctacggcgcaaacaaagacggtataatatgggtcgccactgagggcgctctgaatacgccaaaagatcacattggtactagaaacccggcgaacaatgcggcaattgtgcttcagctccctcaaggaacaacgttgccaaaaggattttacgcagagggatcacgggggggttcccaggctagttctcgcagttcctcaaggagtcgaaattccagtaggaactcaaccccaggctcaagccgcgggacttcacctgcaagaatggccggtaacgggggagacgctgctttggctcttcttctccttgatcgccttaatcagcttgagtctaagatgtctggtaaaggccaacagcaacaaggacagacggtaacgaaaaaatccgccgccgaggcctctaaaaaaccgagacaaaaacggactgctacgaaagcgtataacgtcactcaggcttttggtaggcggggcccggaacaaacccagggtaattttggcgatcaggaactgattagacaaggcaccgactacaagcactggcctcagatcgcgcagtttgcaccctccgcttcagcgttcttcgggatgtcacgcatcgggatggaggttacaccgagtggaacatggctgacatatactggtgcaatcaagctggacgacaaggatcccaacttcaaagatcaagttatactcctcaacaaacatatcgatgcgtataagacattccccccgacggaacccaaaaaagataaaaaaaagaaggccgacgagacccaagccctcccacaacgacaaaagaaacaacaaacagtaacactgctcccagccgcagacttggatgatttctccaaacagttgcagcaatctatgagttcagccgatagtactcaggccggcggttctggaggtgtccgtgctgaaggacgcgggtcccttctcacctgcggcgacgttgaggaaaaccctggccctatggctgacagcaatggtactattacggtggaagaactgaaaaagctcttggaacagtggaaccttgtgatcggttttctgtttttgacctggatttgcttgctccagttcgcctatgctaatagaaacaggtttctctatataatcaagttgatttttctgtggctgctctggcccgttacgcttgcgtgttttgtcctggctgctgtgtaccggatcaattggatcactggtggcattgctatcgccatggcttgtcttgtcgggctgatgtggctttcctattttatcgcttcatttaggctgtttgctcgaaccagatcaatgtggtcatttaatccagagactaatattctcttgaatgttccgctgcacggaactatcctcacacgacccctgttggagtccgaattggttatcggtgccgtaattctcaggggccaccttagaatcgcgggccaccatttgggacggtgcgatattaaagacctgcccaaagagatcacagtggccacaagtagaacgctctcatactataaactgggagcttcccagagagtggccggggatagtggcttcgcggcatatagtcgctaccgcatcggtaactataaacttaatacggaccatagtagctctagcgataacattgccttgctggttcagtgatagatttaaatctgtgccttctagttgccagccatctgttgtttgcccctcccccgtgccttccttgaccctggaaggtgccactcccactgtcctttcctaataaaatgaggaaattgcatcgcattgtctgagtaggtgtcattctattctggggggtggggtggggcaggacagcaagggggaggattgggaagacaatagcaggcatgctggggatgcggtgggctctatgg

SEQ ID NO: 73 - DNA, 4484 bp, synthetic construct
  source 1..4484: mol_type = other DNA
gacattgattattgactagttgttaatagtaatcaattacggggtcattagttcatagcccatatatggagttccgcgttacataacttacggtaaatggcccgcctggctgaccgcccaacgacccccgcccattgacgtcaataatgacgtatgttcccatagtaacgccaatagggactttccattgacgtcaatgggtggagtatttacggtaaactgcccacttggcagtacatcaagtgtatcatatgccaagtccgccccctattgacgtcaatgacggtaaatggcccgcctggcattatgcccagtacatgaccttacgggactttcctacttggcagtacatctacgtattagtcatcgctattaccatggtgatgcggttttggcagtacaccaatgggcgtggatagcggtttgactcacggggatttccaagtctccaccccattgacgtcaatgggagtttgttttggcaccaaaatcaacgggactttccaaaatgtcgtaataaccccgccccgttgacgcaaatgggcggtaggcgtgtacggtgggaggtctatataagcagagctcgtttagtgaaccgtcagatcgcctggaacgccatccacgctgttttgacctccatagaagacagcgatcgcgccaccatgtttgtctttctggtcctgcttcccctcgttagttctcagtgtgtgaacctcaccacacggacgcaactccctccagcttacacaaattcttttacgcgaggcgtgtattatccggataaagttttcaggtcctccgtcctgcactccacgcaggacctttttttgccgttcttttctaacgtaacatggtttcatgccattcatgtttccgggacaaacggtacgaaacgctttgataaccctgtgctgccgttcaatgatggcgtttactttgcctctacggaaaagagtaacataatccgaggctggatcttcgggaccaccctggatagcaagactcagagtcttctcatcgttaataacgctacaaacgttgttatcaaggtgtgtgaattccagttttgcaacgatccctttttgggggtatactatcacaaaaacaataaaagttggatggaatcagagtttcgcgtgtattcttctgcgaacaactgcacgtttgaatacgttagtcagccttttctcatggacttggaaggtaagcaggggaactttaaaaacttgcgggagttcgtttttaagaacatagatggttacttcaaaatttatagcaaacatacaccgatcaacctcgtgagagatctcccacagggtttttccgcactcgaaccgctcgtggatctgccgattggaattaacattacccgcttccagaccctgttggctctgcacagaagctatctgacgccaggggattccagcagtggatggacggcgggtgcggccgcgtattatgtaggctatctccaaccccgaacgttcttgctgaagtacaatgagaatgggaccattacggatgctgtggattgtgcattggatcctctctctgagacaaaatgcacccttaaaagcttcactgtagaaaagggtatttatcagactagcaacttccgcgtacaaccaacggagtctatcgttaggttccccaacattactaacttgtgcccatttggcgaagtgtttaacgcaactaggtttgctagtgtctatgcttggaatcgaaagagaataagcaattgtgtcgcagattactccgtattgtataattctgcaagcttttcaacattcaagtgctacggagtgtctcccaccaaattgaacgacctgtgttttactaacgtgtatgccgactctttcgttatccgaggcgatgaggtcaggcaaattgcccccggacaaactgggaaaattgcggattataattacaagcttccagacgactttacgggctgtgttatcgcatggaactccaacaatctcgacagcaaagtgggtggaaattataattatttgtatagattgtttcgcaagtccaacctgaagccattcgagagagacatctccaccgagatttatcaagccggctcaactccttgcaacggagtcgaaggcttcaactgttattttccgcttcagtcctatggttttcaacctacgaacggcgtgggataccagccgtatcgagtcgtggtactgtcctttgaacttttgcacgccccagcaactgtttgcggaccaaaaaagtccacaaatctcgtcaaaaacaagtgcgttaattttaattttaacgggcttacgggtactggtgtactgacggagtccaataagaaattcctgccattccaacagtttggacgggatattgctgatacgaccgacgctgtgcgagatccccagacacttgagatcctcgacataaccccctgtagttttggtggagtgtctgtaattacccccggaacgaacaccagcaaccaagttgcggtgctttatcaggatgttaattgcactgaggttcctgtcgcgatacatgccgaccaactgacgcctacatggcgagtatattcaacgggctccaacgtcttccagacgcgagccggttgtctcattggagctgaacatgtgaacaactcttatgaatgcgatataccaattggggcaggtatctgcgcctcttatcagacgcagactaactcacccagacgagcacggagcgtggcaagccaatccattattgcctacaccatgtccttgggagctgagaattcagtcgcctattctaataatagcattgctataccgacgaactttacaatttccgtaactaccgaaatattgcccgtcagtatgactaagactagcgttgactgcacaatgtacatttgcggcgatagtaccgaatgctctaatcttcttctgcagtatggtagtttttgtacacaactgaatcgagctctgactgggatcgcagtcgaacaggacaaaaatacacaggaagttttcgcgcaagtgaagcaaatctacaaaacgcctcccataaaagatttcggaggattcaatttcagtcagatactccctgatccctctaaaccatctaaacgatcctttatcgaagatttgctgttcaacaaggtgacccttgctgacgctggattcataaagcagtacggggattgtcttggcgatatcgcagcccgagaccttatttgtgcccaaaaatttaacggacttacggtactccctccccttctgactgacgaaatgatagcccagtacaccagtgctctgctggctggcaccataacgagcggatggacttttggtgcgggtgcagcactgcagatccccttcgcgatgcaaatggcatacaggtttaatgggattggggtcacccagaatgtattgtacgagaaccagaagcttatagcgaatcaatttaacagtgcaattggtaagattcaggacagcctttcaagtaccgcgagtgctctcgggaagttgcaggatgtagtaaatcaaaatgcgcaggcgctgaatacgttggttaaacagctcagcagtaattttggagcaatttctagcgtgctgaatgacatcctcagcagactcgataaggtggaggctgaggtacagatagatagactcatcacgggcagattgcagagtttgcagacatacgtcacgcaacaactcattcgagcagcagaaattagagcatccgcaaatctggcggccacgaaaatgtctgagtgcgttctggggcagtccaagagagttgacttttgtgggaaaggatatcatctgatgagttttccgcagtcagcgccacatggtgtggtctttctgcacgttacttatgtccccgcacaggagaagaattttacgaccgcgccagctatttgccatgacggtaaggctcacttcccgagggaaggggtattcgtttctaacggtacgcattggtttgttacgcaacggaacttttatgaaccacagattattaccaccgacaacacattcgtaagtggaaactgtgatgtcgttatcggaatagtaaataataccgtttatgacccccttcagcctgaacttgattccttcaaggaagagctcgataaatactttaagaaccacaccagccccgatgttgacctgggtgatatatctgggatcaacgcttctgtcgtcaacattcaaaaagagatcgatcgcctgaatgaggtggccaaaaacctcaatgaaagtctcattgaccttcaagaactcggtaagtacgagcaatacatcaagtggccatggtacatatggctgggcttcattgctgggttgatagctatagtgatggttacgataatgttgtgttgtatgacatcctgctgtagctgccttaaaggttgttgttcttgcggttcttgttgtaagtttgacgaagatgattcagagcctgttctgaaaggggtgaagctccattatacttga

SEQ ID NO: 74 - DNA, 8641 bp, synthetic construct
  source 1..8641: mol_type = other DNA
gacattgattattgactagttgttaatagtaatcaattacggggtcattagttcatagcccatatatggagttccgcgttacataacttacggtaaatggcccgcctggctgaccgcccaacgacccccgcccattgacgtcaataatgacgtatgttcccatagtaacgccaatagggactttccattgacgtcaatgggtggagtatttacggtaaactgcccacttggcagtacatcaagtgtatcatatgccaagtccgccccctattgacgtcaatgacggtaaatggcccgcctggcattatgcccagtacatgaccttacgggactttcctacttggcagtacatctacgtattagtcatcgctattaccatggtgatgcggttttggcagtacaccaatgggcgtggatagcggtttgactcacggggatttccaagtctccaccccattgacgtcaatgggagtttgttttggcaccaaaatcaacgggactttccaaaatgtcgtaataaccccgccccgttgacgcaaatgggcggtaggcgtgtacggtgggaggtctatataagcagagctcgtttagtgaaccgtcagatcgcctggaacgccatccacgctgttttgacctccatagaagacagcgatcgcgccaccatgtttgtctttctggtcctgcttcccctcgttagttctcagtgtgtgaacctcaccacacggacgcaactccctccagcttacacaaattcttttacgcgaggcgtgtattatccggataaagttttcaggtcctccgtcctgcactccacgcaggacctttttttgccgttcttttctaacgtaacatggtttcatgccattcatgtttccgggacaaacggtacgaaacgctttgataaccctgtgctgccgttcaatgatggcgtttactttgcctctacggaaaagagtaacataatccgaggctggatcttcgggaccaccctggatagcaagactcagagtcttctcatcgttaataacgctacaaacgttgttatcaaggtgtgtgaattccagttttgcaacgatccctttttgggggtatactatcacaaaaacaataaaagttggatggaatcagagtttcgcgtgtattcttctgcgaacaactgcacgtttgaatacgttagtcagccttttctcatggacttggaaggtaagcaggggaactttaaaaacttgcgggagttcgtttttaagaacatagatggttacttcaaaatttatagcaaacatacaccgatcaacctcgtgagagatctcccacagggtttttccgcactcgaaccgctcgtggatctgccgattggaattaacattacccgcttccagaccctgttggctctgcacagaagctatctgacgccaggggattccagcagtggatggacggcgggtgcggccgcgtattatgtaggctatctccaaccccgaacgttcttgctgaagtacaatgagaatgggaccattacggatgctgtggattgtgcattggatcctctctctgagacaaaatgcacccttaaaagcttcactgtagaaaagggtatttatcagactagcaacttccgcgtacaaccaacggagtctatcgttaggttccccaacattactaacttgtgcccatttggcgaagtgtttaacgcaactaggtttgctagtgtctatgcttggaatcgaaagagaataagcaattgtgtcgcagattactccgtattgtataattctgcaagcttttcaacattcaagtgctacggagtgtctcccaccaaattgaacgacctgtgttttactaacgtgtatgccgactctttcgttatccgaggcgatgaggtcaggcaaattgcccccggacaaactgggaaaattgcggattataattacaagcttccagacgactttacgggctgtgttatcgcatggaactccaacaatctcgacagcaaagtgggtggaaattataattatttgtatagattgtttcgcaagtccaacctgaagccattcgagagagacatctccaccgagatttatcaagccggctcaactccttgcaacggagtcgaaggcttcaactgttattttccgcttcagtcctatggttttcaacctacgaacggcgtgggataccagccgtatcgagtcgtggtactgtcctttgaacttttgcacgccccagcaactgtttgcggaccaaaaaagtccacaaatctcgtcaaaaacaagtgcgttaattttaattttaacgggcttacgggtactggtgtactgacggagtccaataagaaattcctgccattccaacagtttggacgggatattgctgatacgaccgacgctgtgcgagatccccagacacttgagatcctcgacataaccccctgtagttttggtggagtgtctgtaattacccccggaacgaacaccagcaaccaagttgcggtgctttatcaggatgttaattgcactgaggttcctgtcgcgatacatgccgaccaactgacgcctacatggcgagtatattcaacgggctccaacgtcttccagacgcgagccggttgtctcattggagctgaacatgtgaacaactcttatgaatgcgatataccaattggggcaggtatctgcgcctcttatcagacgcagactaactcacccagacgagcacggagcgtggcaagccaatccattattgcctacaccatgtccttgggagctgagaattcagtcgcctattctaataatagcattgctataccgacgaactttacaatttccgtaactaccgaaatattgcccgtcagtatgactaagactagcgttgactgcacaatgtacatttgcggcgatagtaccgaatgctctaatcttcttctgcagtatggtagtttttgtacacaactgaatcgagctctgactgggatcgcagtcgaacaggacaaaaatacacaggaagttttcgcgcaagtgaagcaaatctacaaaacgcctcccataaaagatttcggaggattcaatttcagtcagatactccctgatccctctaaaccatctaaacgatcctttatcgaagatttgctgttcaacaaggtgacccttgctgacgctggattcataaagcagtacggggattgtcttggcgatatcgcagcccgagaccttatttgtgcccaaaaatttaacggacttacggtactccctccccttctgactgacgaaatgatagcccagtacaccagtgctctgctggctggcaccataacgagcggatggacttttggtgcgggtgcagcactgcagatccccttcgcgatgcaaatggcatacaggtttaatgggattggggtcacccagaatgtattgtacgagaaccagaagcttatagcgaatcaatttaacagtgcaattggtaagattcaggacagcctttcaagtaccgcgagtgctctcgggaagttgcaggatgtagtaaatcaaaatgcgcaggcgctgaatacgttggttaaacagctcagcagtaattttggagcaatttctagcgtgctgaatgacatcctcagcagactcgataaggtggaggctgaggtacagatagatagactcatcacgggcagattgcagagtttgcagacatacgtcacgcaacaactcattcgagcagcagaaattagagcatccgcaaatctggcggccacgaaaatgtctgagtgcgttctggggcagtccaagagagttgacttttgtgggaaaggatatcatctgatgagttttccgcagtcagcgccacatggtgtggtctttctgcacgttacttatgtccccgcacaggagaagaattttacgaccgcgccagctatttgccatgacggtaaggctcacttcccgagggaaggggtattcgtttctaacggtacgcattggtttgttacgcaacggaacttttatgaaccacagattattaccaccgacaacacattcgtaagtggaaactgtgatgtcgttatcggaatagtaaataataccgtttatgacccccttcagcctgaacttgattccttcaaggaagagctcgataaatactttaagaaccacaccagccccgatgttgacctgggtgatatatctgggatcaacgcttctgtcgtcaacattcaaaaagagatcgatcgcctgaatgaggtggccaaaaacctcaatgaaagtctcattgaccttcaagaactcggtaagtacgagcaatacatcaagtggccatggtacatatggctgggcttcattgctgggttgatagctatagtgatggttacgataatgttgtgttgtatgacatcctgctgtagctgccttaaaggttgttgttcttgcggttcttgttgtaagtttgacgaagatgattcagagcctgttctgaaaggggtgaagctccattatactggtggaagcggtggggttcgggcagagggcagaggctcactgctcacgtgtggtgatgtagaagagaatccaggtcctatgtactcattcgtatccgaggagaccggcacgttgatcgttaattctgtattgttgtttctcgcttttgtggtatttctccttgttacgcttgcgattcttaccgcccttcgcctctgtgcttactgctgcaacattgtgaatgtctccctcgtgaagccctccttttatgtttactccagagtgaaaaacctcaatagctccagggttccagacctgctggtgggcggttctggaggtgtccgtgctgaaggacgcgggtcccttctcacctgcggcgacgttgaggaaaaccctggccctatggctgacagcaatggtactattacggtggaagaactgaaaaagctcttggaacagtggaaccttgtgatcggttttctgtttttgacctggatttgcttgctccagttcgcctatgctaatagaaacaggtttctctatataatcaagttgatttttctgtggctgctctggcccgttacgcttgcgtgttttgtcctggctgctgtgtaccggatcaattggatcactggtggcattgctatcgccatggcttgtcttgtcgggctgatgtggctttcctattttatcgcttcatttaggctgtttgctcgaaccagatcaatgtggtcatttaatccagagactaatattctcttgaatgttccgctgcacggaactatcctcacacgacccctgttggagtccgaattggttatcggtgccgtaattctcaggggccaccttagaatcgcgggccaccatttgggacggtgcgatattaaagacctgcccaaagagatcacagtggccacaagtagaacgctctcatactataaactgggagcttcccagagagtggccggggatagtggcttcgcggcatatagtcgctaccgcatcggtaactataaacttaatacggaccatagtagctctagcgataacattgccttgctggttcagtgataaagacatgataagatacattgatgagtttggacaaaccacaactagaatgcagtgaaaaaaatgctttatttgtgaaatttgtgatgctattgctttatttgtaaccattataagctgcaataaacaagttaacaacaacaattgcattcattttatgtttcaggttcagggggagatgtgggaggttttttaaagcaagtaaaacctctacaaatgtggtaaaaggcacgtcgacgttagacattgattattgactagttgttaatagtaatcaattacggggtcattagttcatagcccatatatggagttccgcgttacataacttacggtaaatggcccgcctggctgaccgcccaacgacccccgcccattgacgtcaataatgacgtatgttcccatagtaacgccaatagggactttccattgacgtcaatgggtggagtatttacggtaaactgcccacttggcagtacatcaagtgtatcatatgccaagtccgccccctattgacgtcaatgacggtaaatggcccgcctggcattatgcccagtacatgaccttacgggactttcctacttggcagtacatctacgtattagtcatcgctattaccatggtgatgcggttttggcagtacaccaatgggcgtggatagcggtttgactcacggggatttccaagtctccaccccattgacgtcaatgggagtttgttttggcaccaaaatcaacgggactttccaaaatgtcgtaataaccccgccccgttgacgcaaatgggcggtaggcgtgtacggtgggaggtctatataagcagagctcgtttagtgaaccgtcagatcactcttctggtccccacagactcagagagaacccagtttaaacgccaccatggctggcacttcccgcaccttgtcctattacaaacttggcgcgagtcaacgggtggcgggtgactccggatttgcggcatattcacgatataggatcgggaattactgcgcagcaggtactacgcagactgcttgcacggatgataacgcgctggcctattacaatacaacaaaaggaggctggccccagatcgcccaattcgccccatcagccagtgctttcttcggcatgagtcgaatcggtatggaagtaacaccctccggcacatggcttacctacactggcgcgataaagctcgatgacaaagaccctaatcctgcgaataacgctgcaattgttctccagcttcctcagggtacgaccctgccaaaaggtttttacgcagagggcggcgtcccaatcaatacgaatagcagcccggacgatcaaataggatactacagaagggccacacggcggatcaggctgtacctctatgcgcttgtctatttcctccagagtattaatttcgtgaggatcatcatgcggttgtggctctgctctacagacgtagtatatcgagcttttgacatttacaatgacaaagtagccgggtttgccaaatttctcaaaaccagacagaagcggacggcaactaaggcttacaatgtgactcaggcgttcgggcggagaggtccggaacagacccaaccttatgtgtgcaatgcaccgggatgtgatgtcacagatgtgactcagctctaccttggagggatgtcctattatgcgtgtctcgtgggcctcatgtggttgtcctatttcatagcatcatttcgattgtttgctcgaacgaggtctatgtggtccttcaatcctgagacgaacatacttctgaatgtcccactccacggcaccatactgactcggccgctccttgaaagtgaactcgtaatcctccttaacaaacacatcgatgcctacaaaacgtttccaccaacggaaccgaagaaggataaaaagaagaaggccgatgaaacgcaggccctgccccaacgccaaaaaaagcagcagacggtcacggttggcgattctgccgaagtagctgtaaagatgtttgacgcctacgtcaatacattctcatcaacctttaatgtgatggatctgtttatgagaattttcactattggaaccgtcactcttaagcagggagaaatcaaagacgcgacaccatctgattttgttagggcaacagccactatccccatacaagccagcttgccatttggatggctgatccttctccaattcgcgtatgctaaccggaatcgctttctctacataataaagctgatcttcctttggcttctctggcccgttttggctgtattccagtcagccagtaagataataactctcaaaaagcggtggcagcttgcacttagtaaaggcgtccatttcgtctgcaatctccttttgctgcatgttatgtctaagcacacagactttagttcagagattattggatacaaagctattgatggtggtgttactagagattgtgtagttctccattcatacttcacgtcagattattatcaactctacagcacgcagctttccacggatacaggcgtagagcatgtgaccttcttcatctataataagatagtcgacgaacctgaggaacatgtccaaattcatacaattgatgggtcctccggcgtatgcaacatcgttaacgtgagccttgtcaaacctagcttctatgtctattctagggttaagaacctgaattcctccagggtccctggacccggaccaggcgccaaatttgttgctgcttggacactgaaagctgctgctgggcccggaccaggccagtacatcaaggccaactctaagtttatcggcatcaccgaattgggacctggacccggctagtgagtttaaactcccatttaaatgtgagggttaatgcttcgagcagagctcgctgatcagcctcgactgtgccttctagttgccagccatctgttgtttgcccctcccccgtgccttccttgaccctggaaggtgccactcccactgtcctttcctaataaaatgaggaaattgcatcgcattgtctgagtaggtgtcattctattctggggggtggggtggggcaggacagcaagggggaggattgggaagacaatagcaggcatgctggggatgcggtgggctctatgg

SEQ ID NO: 75 - DNA, 28278 bp, synthetic construct
  source 1..28278: mol_type = other DNA
catcttcaataatatacctcaaactttttgtgcgcgttaatatgcaaatgaggcgtttgaatttggggaggaagggcggtgattggtcgagggatgagcgaccgttaggggcggggcgagtgacgttttgatgacgtggttgcgaggaggagccagtttgcaagttctcgtgggaaaagtgacgtcaaacgaggtgtggtttgaacacggaaatactcaattttcccgcgctctctgacaggaaatgaggtgtttctgggcggatgcaagtgaaaacgggccattttcgcgcgaaaactgaatgaggaagtgaaaatctgagtaatttcgcgtttatggcagggaggagtatttgccgagggccgagtagactttgaccgattacgtgggggtttcgattaccgtgtttttcacctaaatttccgcgtacggtgtcaaagtccggtgtttttacgtaggtgtcagctgatcgccagggtatttaaacctgcgctctccagtcaagaggccactcttgagtgccagcgagaagagttttctcctccgcgccgcgagtcagatctacactttgaaagtagggataaggtagcgagtgagtagtgttctggggcgggggaggacctgcatgagggccagaataactgaaatctgtgcttttctgtgtgttgcagcagcatgagcggaagcggctcctttgagggaggggtattcagcccttatctgacggggcgtctcccctcctgggcgggagtgcgtcagaatgtgatgggatccacggtggacggccggcccgtgcagcccgcgaactcttcaaccctgacctatgcaaccctgagctcttcgtcgttggacgcagctgccgccgcagctgctgcatctgccgccagcgccgtgcgcggaatggccatgggcgccggctactacggcactctggtggccaactcgagttccaccaataatcccgccagcctgaacgaggagaagctgttgctgctgatggcccagctcgaggccttgacccagcgcctgggcgagctgacccagcaggtggctcagctgcaggagcagacgcgggccgcggttgccacggtgaaatccaaataaaaaatgaatcaataaataaacggagacggttgttgattttaacacagagtctgaatctttatttgatttttcgcgcgcggtaggccctggaccaccggtctcgatcattgagcacccggtggatcttttccaggacccggtagaggtgggcttggatgttgaggtacatgggcatgagcccgtcccgggggtggaggtagctccattgcagggcctcgtgctcgggggtggtgttgtaaatcacccagtcatagcaggggcgcagggcatggtgttgcacaatatctttgaggaggagactgatggccacgggcagccctttggtgtaggtgtttacaaatctgttgagctgggagggatgcatgcggggggagatgaggtgcatcttggcctggatcttgagattggcgatgttaccgcccagatcccgcctggggttcatgttgtgcaggaccaccagcacggtgtatccggtgcacttggggaatttatcatgcaacttggaagggaaggcgtgaaagaatttggcgacgcctttgtgcccgcccaggttttccatgcactcatccatgatgatggcgatgggcccgtgggcggcggcctgggcaaagacgtttcgggggtcggacacatcatagttgtggtcctgggtgaggtcatcataggccattttaatgaatttggggcggagggtgccggactgggggacaaaggtaccctcgatcccgggggcgtagttcccctcacagatctgcatctcccaggctttgagctcggagggggggatcatgtccacctgcggggcgataaagaacacggtttccggggcgggggagatgagctgggccgaaagcaagttccggagcagctgggacttgccgcagccggtggggccgtagatgaccccgatgaccggctgcaggtggtagttgagggagagacagctgccgtcctcccggaggaggggggccacctcgttcatcatctcgcgcacgtgcatgttctcgcgcaccagttccgccaggaggcgctctccccccagggataggagctcctggagcgaggcgaagtttttcagcggcttgagtccgtcggccatgggcattttggagagggtttgttgcaagagttccaggcggtcccagagctcggtgatgtgctctacggcatctcgatccagcagacctcctcgtttcgcgggttgggacggctgcgggagtagggcaccagacgatgggcgtccagcgcagccagggtccggtccttccagggtcgcagcgtccgcgtcagggtggtctccgtcacggtgaaggggtgcgcgccgggctgggcgcttgcgagggtgcgcttcaggctcatccggctggtcgaaaaccgctcccgatcggcgccctgcgcgtcggccaggtagcaattgaccatgagttcgtagttgagcgcctcggccgcgtggcctttggcgcggagcttacctttggaagtctgcccgcaggcgggacagaggagggacttgagggcgtagagcttgggggcgaggaagacggactcgggggcgtaggcgtccgcgccgcagtgggcgcagacggtctcgcactccacgagccaggtgaggtcgggctggtcggggtcaaaaaccagtttcccgccgttctttttgatgcgtttcttacctttggtctccatgagctcgtgtccccgctgggtgacaaagaggctgtccgtgtccccgtagaccgactttatgggccggtcctcgagcggtgtgccgcggtcctcctcgtagaggaaccccgcccactccgagacgaaagcccgggtccaggccagcacgaaggaggccacgtgggacgggtagcggtcgttgtccaccagcgggtccaccttttccagggtatgcaaacacatgtccccctcgtccacatccaggaaggtgattggcttgtaagtgtaggccacgtgaccgggggtcccggccgggggggtataaaagggtgcgggtccctgctcgtcctcactgtcttccggatcgctgtccaggagcgccagctgttggggtaggtattccctctcgaaggcgggcatgacctcggcactcaggttgtcagtttctagaaacgaggaggatttgatattgacggtgccggcggagatgcctttcaagagcccctcgtccatctggtcagaaaagacgatctttttgttgtcgagcttggtggcgaaggagccgtagagggcgttggagaggagcttggcgatggagcgcatggtctggtttttttccttgtcggcgcgctccttggcggcgatgttgagctgcacgtactcgcgcgccacgcacttccattcggggaagacggtggtcagctcgtcgggcacgattctgacctgccagccccgattatgcagggtgatgaggtccacactggtggccacctcgccgcgcaggggctcattagtccagcagaggcgtccgcccttgcgcgagcagaaggggggcagggggtccagcatgacctcgtcgggggggtcggcatcgatggtgaagatgccgggcaggaggtcggggtcaaagtagctgatggaagtggccagatcgtccagggcagcttgccattcgcgcacggccagcgcgcgctcgtagggactgaggggcgtgccccagggcatgggatgggtaagcgcggaggcgtacatgccgcagatgtcgtagacgtagaggggctcctcgaggatgccgatgtaggtggggtagcagcgccccccgcggatgctggcgcgcacgtagtcatacagctcgtgcgagggggcgaggagccccgggcccaggttggtgcgactgggcttttcggcgcggtagacgatctggcggaaaatggcatgcgagttggaggagatggtgggcctttggaagatgttgaagtgggcgtggggcagtccgaccgagtcgcggatgaagtgggcgtaggagtcttgcagcttggcgacgagctcggcggtgactaggacgtccagagcgcagtagtcgagggtctcctggatgatgtcatacttgagctgtcccttttgtttccacagctcgcggttgagaaggaactcttcgcggtccttccagtactcttcgagggggaacccgtcctgatctgcacggtaagagcctagcatgtagaactggttgacggccttgtaggcgcagcagcccttctccacggggagggcgtaggcctgggcggccttgcgcagggaggtgtgcgtgagggcgaaagtgtccctgaccatgaccttgaggaactggtgcttgaagtcgatatcgtcgcagcccccctgctcccagagctggaagtccgtgcgcttcttgtaggcggggttgggcaaagcgaaagtaacatcgttgaagaggatcttgcccgcgcggggcataaagttgcgagtgatgcggaaaggttggggcacctcggcccggttgttgatgacctgggcggcgagcacgatctcgtcgaagccgttgatgttgtggcccacgatgtagagttccacgaatcgcggacggcccttgacgtggggcagtttcttgagctcctcgtaggtgagctcgtcggggtcgctgagcccgtgctgctcgagcgcccagtcggcgagatgggggttggcgcggaggaaggaagtccagagatccacggccagggcggtttgcagacggtcccggtactgacggaactgctgcccgacggccattttttcgggggtgacgcagtagaaggtgcgggggtccccgtgccagcgatcccatttgagctggagggcgagatcgagggcgagctcgacgagccggtcgtccccggagagtttcatgaccagcatgaaggggacgagctgcttgccgaaggaccccatccaggtgtaggtttccacatcgtaggtgaggaagagcctttcggtgcgaggatgcgagccgatggggaagaactggatctcctgccaccaattggaggaatggctgttgatgtgatggaagtagaaatgccgacggcgcgccgaacactcgtgcttgtgtttatacaagcggccacagtgctcgcaacgctgcacgggatgcacgtgctgcacgagctgtacctgagttcctttgacgaggaatttcagtgggaagtggagtcgtggcgcctgcatctcgtgctgtactacgtcgtggtggtcggcctggccctcttctgcctcgatggtggtcatgctgacgagcccgcgcgggaggcaggtccagacctcggcgcgagcgggtcggagagcgaggacgagggcgcgcaggccggagctgtccagggtcctgagacgctgcggagtcaggtcagtgggcagcggcggcgcgcggttgacttgcaggagtttttccagggcgcgcgggaggtccagatggtacttgatctccaccgcgccattggtggcgacgtcgatggcttgcagggtcccgtgcccctggggtgtgaccaccgtcccccgtttcttcttgggcggctggggcgacgggggcggtgcctcttccatggttagaagcggcggcgaggacgcgcgccgggcggcaggggcggctcggggcccggaggcaggggcggcaggggcacgtcggcgccgcgcgcgggtaggttctggtactgcgcccggagaagactggcgtgagcgacgacgcgacggttgacgtcctggatctgacgcctctgggtgaaggccacgggacccgtgagtttgaacctgaaagagagttcgacagaatcaatctcggtatcgttgacggcggcctgccgcaggatctcttgcacgtcgcccgagttgtcctggtaggcgatctcggtcatgaactgctcgatctcctcctcttgaaggtctccgcggccggcgcgctccacggtggccgcgaggtcgttggagatgcggcccatgagctgcgagaaggcgttcatgcccgcctcgttccagacgcggctgtagaccacgacgccctcgggatcgcgggcgcgcatgaccacctgggcgaggttgagctccacgtggcgcgtgaagaccgcgtagttgcagaggcgctggtagaggtagttgagcgtggtggcgatgtgctcggtgacgaagaaatacatgatccagcggcggagcggcatctcgctgacgtcgcccagcgcctccaaacgttccatggcctcgtaaaagtccacggcgaagttgaaaaactgggagttgcgcgccgagacggtcaactcctcctccagaagacggatgagctcggcgatggtggcgcgcacctcgcgctcgaaggcccccgggagttcctccacttcctcttcttcctcctccactaacatctcttctacttcctcctcaggcggcagtggtggcgggggagggggcctgcgtcgccggcggcgcacgggcagacggtcgatgaagcgctcgatggtctcgccgcgccggcgtcgcatggtctcggtgacggcgcgcccgtcctcgcggggccgcagcgtgaagacgccgccgcgcatctccaggtggccgggggggtccccgttgggcagggagagggcgctgacgatgcatcttatcaattgccccgtagggactccgcgcaaggacctgagcgtctcgagatccacgggatctgaaaaccgctgaacgaaggcttcgagccagtcgcagtcgcaaggtaggctgagcacggtttcttctggcgggtcatgttggttgggagcggggcgggcgatgctgctggtgatgaagttgaaataggcggttctgagacggcggatggtggcgaggagcaccaggtctttgggcccggcttgctggatgcgcagacggtcggccatgccccaggcgtggtcctgacacctggccaggtccttgtagtagtcctgcatgagccgctccacgggcacctcctcctcgcccgcgcggccgtgcatgcgcgtgagcccgaagccgcgctggggctggacgagcgccaggtcggcgacgacgcgctcggcgaggatggcttgctggatctgggtgagggtggtctggaagtcatcaaagtcgacgaagcggtggtaggctccggtgttgatggtgtaggagcagttggccatgacggaccagttgacggtctggtggcccggacgcacgagctcgtggtacttgaggcgcgagtaggcgcgcgtgtcgaagatgtagtcgttgcaggtgcgcaccaggtactggtagccgatgaggaagtgcggcggcggctggcggtagagcggccatcgctcggtggcgggggcgccgggcgcgaggtcctcgagcatggtgcggtggtagccgtagatgtacctggacatccaggtgatgccggcggcggtggtggaggcgcgcgggaactcgcggacgcggttccagatgttgcgcagcggcaggaagtagttcatggtgggcacggtctggcccgtgaggcgcgcgcagtcgtggatgctctatacgggcaaaaacgaaagcggtcagcggctcgactccgtggcctggaggctaagcgaacgggttgggctgcgcgtgtaccccggttcgaatctcgaatcaggctggagccgcagctaacgtggtattggcactcccgtctcgacccaagcctgcaccaaccctccaggatacggaggcgggtcgttttgcaacttttttttggaggccggatgagactagtaagcgcggaaagcggccgaccgcgatggctcgctgccgtagtctggagaagaatcgccagggttgcgttgcggtgtgccccggttcgaggccggccggattccgcggctaacgagggcgtggctgccccgtcgtttccaagaccccatagccagccgacttctccagttacggagcgagcccctcttttgttttgtttgtttttgccagatgcatcccgtactgcggcagatgcgcccccaccaccctccaccgcaacaacagccccctccacagccggcgcttctgcccccgccccagcagcaacttccagccacgaccgccgcggccgccgtgagcggggctggacagagttatgatcaccagctggccttggaagagggcgaggggctggcgcgcctgggggcgtcgtcgccggagcggcacccgcgcgtgcagatgaaaagggacgctcgcgaggcctacgtgcccaagcagaacctgttcagagacaggagcggcgaggagcccgaggagatgcgcgcggcccggttccacgcggggcgggagctgcggcgcggcctggaccgaaagagggtgctgagggacgaggatttcgaggcggacgagctgacggggatcagccccgcgcgcgcgcacgtggccgcggccaacctggtcacggcgtacgagcagaccgtgaaggaggagagcaacttccaaaaatccttcaacaaccacgtgcgcaccctgatcgcgcgcgaggaggtgaccctgggcctgatgcacctgtgggacctgctggaggccatcgtgcagaaccccaccagcaagccgctgacggcgcagctgttcctggtggtgcagcatagtcgggacaacgaagcgttcagggaggcgctgctgaatatcaccgagcccgagggccgctggctcctggacctggtgaacattctgcagagcatcgtggtgcaggagcgcgggctgccgctgtccgagaagctggcggccatcaacttctcggtgctgagtttgggcaagtactacgctaggaagatctacaagaccccgtacgtgcccatagacaaggaggtgaagatcgacgggttttacatgcgcatgaccctgaaagtgctgaccctgagcgacgatctgggggtgtaccgcaacgacaggatgcaccgtgcggtgagcgccagcaggcggcgcgagctgagcgaccaggagctgatgcatagtctgcagcgggccctgaccggggccgggaccgagggggagagctactttgacatgggcgcggacctgcactggcagcccagccgccgggccttggaggcggcggcaggaccctacgtagaagaggtggacgatgaggtggacgaggagggcgagtacctggaagactgatggcgcgaccgtatttttgctagatgcaacaacaacagccacctcctgatcccgcgatgcgggcggcgctgcagagccagccgtccggcattaactcctcggacgattggacccaggccatgcaacgcatcatggcgctgacgacccgcaaccccgaagcctttagacagcagccccaggccaaccggctctcggccatcctggaggccgtggtgccctcgcgctccaaccccacgcacgagaaggtcctggccatcgtgaacgcgctggtggagaacaaggccatccgcggcgacgaggccggcctggtgtacaacgcgctgctggagcgcgtggcccgctacaacagcaccaacgtgcagaccaacctggaccgcatggtgaccgacgtgcgcgaggccgtggcccagcgcgagcggttccaccgcgagtccaacctgggatccatggtggcgctgaacgccttcctcagcacccagcccgccaacgtgccccggggccaggaggactacaccaacttcatcagcgccctgcgcctgatggtgaccgaggtgccccagagcgaggtgtaccagtccgggccggactacttcttccagaccagtcgccagggcttgcagaccgtgaacctgagccaggctttcaagaacttgcagggcctgtggggcgtgcaggccccggtcggggaccgcgcgacggtgtcgagcctgctgacgccgaactcgcgcctgctgctgctgctggtggcccccttcacggacagcggcagcatcaaccgcaactcgtacctgggctacctgattaacctgtaccgcgaggccatcggccaggcgcacgtggacgagcagacctaccaggagatcacccacgtgagccgcgccctgggccaggacgacccgggcaacctggaagccaccctgaactttttgctgaccaaccggtcgcagaagatcccgccccagtacgcgctcagcaccgaggaggagcgcatcctgcgttacgtgcagcagagcgtgggcctgttcctgatgcaggagggggccacccccagcgccgcgctcgacatgaccgcgcgcaacatggagcccagcatgtacgccagcaaccgcccgttcatcaataaactgatggactacttgcatcgggcggccgccatgaactctgactatttcaccaacgccatcctgaatccccactggctcccgccgccggggttctacacgggcgagtacgacatgcccgaccccaatgacgggttcctgtgggacgatgtggacagcagcgtgttctccccccgaccgggtgctaacgagcgccccttgtggaagaaggaaggcagcgaccgacgcccgtcctcggcgctgtccggccgcgagggtgctgccgcggcggtgcccgaggccgccagtcctttcccgagcttgcccttctcgctgaacagtatccgcagcagcgagctgggcaggatcacgcgcccgcgcttgctgggcgaagaggagtacttgaatgactcgctgttgagacccgagcgggagaagaacttccccaataacgggatagaaagcctggtggacaagatgagccgctggaagacgtatgcgcaggagcacagggacgatccccgggcgtcgcagggggccacgagccggggcagcgccgcccgtaaacgccggtggcacgacaggcagcggggacagatgtgggacgatgaggactccgccgacgacagcagcgtgttggacttgggtgggagtggtaacccgttcgctcacctgcgcccccgtatcgggcgcatgatgtaagagaaaccgaaaataaatgatactcaccaaggccatggcgaccagcgtgcgttcgtttcttctctgttgttgttgtatctagtatgatgaggcgtgcgtacccggagggtcctcctccctcgtacgagagcgtgatgcagcaggcgatggcggcggcggcgatgcagcccccgctggaggctccttacgtgcccccgcggtacctggcgcctacggaggggcggaacagcattcgttactcggagctggcacccttgtacgataccacccggttgtacctggtggacaacaagtcggcggacatcgcctcgctgaactaccagaacgaccacagcaacttcctgaccaccgtggtgcagaacaatgacttcacccccacggaggccagcacccagaccatcaactttgacgagcgctcgcggtggggcggccagctgaaaaccatcatgcacaccaacatgcccaacgtgaacgagttcatgtacagcaacaagttcaaggcgcgggtgatggtctcccgcaagacccccaatggggtgacagtgacagaggattatgatggtagtcaggatgagctgaagtatgaatgggtggaatttgagctgcccgaaggcaacttctcggtgaccatgaccatcgacctgatgaacaacgccatcatcgacaattacttggcggtggggcggcagaacggggtgctggagagcgacatcggcgtgaagttcgacactaggaacttcaggctgggctgggaccccgtgaccgagctggtcatgcccggggtgtacaccaacgaggctttccatcccgatattgtcttgctgcccggctgcggggtggacttcaccgagagccgcctcagcaacctgctgggcattcgcaagaggcagcccttccaggaaggcttccagatcatgtacgaggatctggaggggggcaacatccccgcgctcctggatgtcgacgcctatgagaaaagcaaggaggatgcagcagctgaagcaactgcagccgtagctaccgcctctaccgaggtcaggggcgataattttgcaagcgccgcagcagtggcagcggccgaggcggctgaaaccgaaagtaagatagtcattcagccggtggagaaggatagcaagaacaggagctacaacgtactaccggacaagataaacaccgcctaccgcagctggtacctagcctacaactatggcgaccccgagaagggcgtgcgctcctggacgctgctcaccacctcggacgtcacctgcggcgtggagcaagtctactggtcgctgcccgacatgatgcaagacccggtcaccttccgctccacgcgtcaagttagcaactacccggtggtgggcgccgagctcctgcccgtctactccaagagcttcttcaacgagcaggccgtctactcgcagcagctgcgcgccttcacctcgcttacgcacgtcttcaaccgcttccccgagaaccagatcctcgtccgcccgcccgcgcccaccattaccaccgtcagtgaaaacgttcctgctctcacagatcacgggaccctgccgctgcgcagcagtatccggggagtccagcgcgtgaccgttactgacgccagacgccgcacctgcccctacgtctacaaggccctgggcatagtcgcgccgcgcgtcctctcgagccgcaccttctaaatgtccattctcatctcgcccagtaataacaccggttggggcctgcgcgcgcccagcaagatgtacggaggcgctcgccaacgctccacgcaacaccccgtgcgcgtgcgcgggcacttccgcgctccctggggcgccctcaagggccgcgtgcggtcgcgcaccaccgtcgacgacgtgatcgaccaggtggtggccgacgcgcgcaactacacccccgccgccgcgcccgtctccaccgtggacgccgtcatcgacagcgtggtggccgacgcgcgccggtacgcccgcgccaagagccggcggcggcgcatcgcccggcggcaccggagcacccccgccatgcgcgcggcgcgagccttgctgcgcagggccaggcgcacgggacgcagggccatgctcagggcggccagacgcgcggcttcaggcgccagcgccggcaggacccggagacgcgcggccacggcggcggcagcggccatcgccagcatgtcccgcccgcggcgagggaacgtgtactgggtgcgcgacgccgccaccggtgtgcgcgtgcccgtgcgcacccgcccccctcgcacttgaagatgttcacttcgcgatgttgatgtgtcccagcggcgaggaggatgtccaagcgcaaattcaaggaagagatgctccaggtcatcgcgcctgagatctacggccctgcggtggtgaaggaggaaagaaagccccgcaaaatcaagcgggtcaaaaaggacaaaaaggaagaagaaagtgatgtggacggattggtggagtttgtgcgcgagttcgccccccggcggcgcgtgcagtggcgcgggcggaaggtgcaaccggtgctgagacccggcaccaccgtggtcttcacgcccggcgagcgctccggcaccgcttccaagcgctcctacgacgaggtgtacggggatgatgatattctggagcaggcggccgagcgcctgggcgagtttgcttacggcaagcgcagccgttccgcaccgaaggaagaggcggtgtccatcccgctggaccacggcaaccccacgccgagcctcaagcccgtgaccttgcagcaggtgctgccgaccgcggcgccgcgccgggggttcaagcgcgagggcgaggatctgtaccccaccatgcagctgatggtgcccaagcgccagaagctggaagacgtgctggagaccatgaaggtggacccggacgtgcagcccgaggtcaaggtgcggcccatcaagcaggtggccccgggcctgggcgtgcagaccgtggacatcaagattcccacggagcccatggaaacgcagaccgagcccatgatcaagcccagcaccagcaccatggaggtgcagacggatccctggatgccatcggctcctagtcgaagaccccggcgcaagtacggcgcggccagcctgctgatgcccaactacgcgctgcatccttccatcatccccacgccgggctaccgcggcacgcgcttctaccgcggtcataccagcagccgccgccgcaagaccaccactcgccgccgccgtcgccgcaccgccgctgcaaccacccctgccgccctggtgcggagagtgtaccgccgcggccgcgcacctctgaccctgccgcgcgcgcgctaccacccgagcatcgccatttaaactttcgcctgctttgcagatcaatggccctcacatgccgccttcgcgttcccattacgggctaccgaggaagaaaaccgcgccgtagaaggctggcggggaacgggatgcgtcgccaccaccaccggcggcggcgcgccatcagcaagcggttggggggaggcttcctgcccgcgctgatccccatcatcgccgcggcgatcggggcgatccccggcattgcttccgtggcggtgcaggcctctcagcgccactgagacacacttggaaacatcttgtaataaaccaatggactctgacgctcctggtcctgtgatgtgttttcgtagacagatggaagacatcaatttttcgtccctggctccgcgacacggcacgcggccgttcatgggcacctggagcgacatcggcaccagccaactgaacgggggcgccttcaattggagcagtctctggagcgggcttaagaatttcgggtccacgcttaaaacctatggcagcaaggcgtggaacagcaccacagggcaggcgctgagggataagctgaaagagcagaacttccagcagaaggtggtcgatgggctcgcctcgggcatcaacggggtggtggacctggccaaccaggccgtgcagcggcagatcaacagccgcctggacccggtgccgcccgccggctccgtggagatgccgcaggtggaggaggagctgcctcccctggacaagcggggcgagaagcgaccccgccccgatgcggaggagacgctgctgacgcacacggacgagccgcccccgtacgaggaggcggtgaaactgggtctgcccaccacgcggcccatcgcgcccctggccaccggggtgctgaaacccgaaaagcccgcgaccctggacttgcctcctccccagccttcccgcccctctacagtggctaagcccctgccgccggtggccgtggcccgcgcgcgacccgggggcaccgcccgccctcatgcgaactggcagagcactctgaacagcatcgtgggtctgggagtgcagagtgtgaagcgccgccgctgctattaaacctaccgtagcgcttaacttgcttgtctgtgtgtgtatgtattatgtcgccgccgccgctgtccaccagaaggaggagtgaagaggcgcgtcgccgagttgcaagatggccaccccatcgatgctgccccagtgggcgtacatgcacatcgccggacaggacgcttcggagtacctgagtccgggtctggtgcagtttgcccgcgccacagacacctacttcagtctggggaacaagtttaggaaccccacggtggcgcccacgcacgatgtgaccaccgaccgcagccagcggctgacgctgcgcttcgtgcccgtggaccgcgaggacaacacctactcgtacaaagtgcgctacacgctggccgtgggcgacaaccgcgtgctggacatggccagcacctactttgacatccgcggcgtgctggatcggggccctagcttcaaaccctactccggcaccgcctacaacagtctggcccccaagggagcacccaacacttgtcagtggacatataaagccgatggtgaaactgccacagaaaaaacctatacatatggaaatgcacccgtgcagggcattaacatcacaaaagatggtattcaacttggaactgacaccgatgatcagccaatctacgcagataaaacctatcagcctgaacctcaagtgggtgatgctgaatggcatgacatcactggtactgatgaaaagtatggaggcagagctcttaagcctgataccaaaatgaagccttgttatggttcttttgccaagcctactaataaagaaggaggtcaggcaaatgtgaaaacaggaacaggcactactaaagaatatgacatagacatggctttctttgacaacagaagtgcggctgctgctggcctagctccagaaattgttttgtatactgaaaatgtggatttggaaactccagatacccatattgtatacaaagcaggcacagatgacagcagctcttctattaatttgggtcagcaagccatgcccaacagacctaactacattggtttcagagacaactttatcgggctcatgtactacaacagcactggcaatatgggggtgctggccggtcaggcttctcagctgaatgctgtggttgacttgcaagacagaaacaccgagctgtcctaccagctcttgcttgactctctgggtgacagaacccggtatttcagtatgtggaatcaggcggtggacagctatgatcctgatgtgcgcattattgaaaatcatggtgtggaggatgaacttcccaactattgtttccctctggatgctgttggcagaacagatacttatcagggaattaaggctaatggaactgatcaaaccacatggaccaaagatgacagtgtcaatgatgctaatgagataggcaagggtaatccattcgccatggaaatcaacatccaagccaacctgtggaggaacttcctctacgccaacgtggccctgtacctgcccgactcttacaagtacacgccggccaatgttaccctgcccaccaacaccaacacctacgattacatgaacggccgggtggtggcgccctcgctggtggactcctacatcaacatcggggcgcgctggtcgctggatcccatggacaacgtgaaccccttcaaccaccaccgcaatgcggggctgcgctaccgctccatgctcctgggcaacgggcgctacgtgcccttccacatccaggtgccccagaaatttttcgccatcaagagcctcctgctcctgcccgggtcctacacctacgagtggaacttccgcaaggacgtcaacatgatcctgcagagctccctcggcaacgacctgcgcacggacggggcctccatctccttcaccagcatcaacctctacgccaccttcttccccatggcgcacaacacggcctccacgctcgaggccatgctgcgcaacgacaccaacgaccagtccttcaacgactacctctcggcggccaacatgctctaccccatcccggccaacgccaccaacgtgcccatctccatcccctcgcgcaactgggccgccttccgcggctggtccttcacgcgtctcaagaccaaggagacgccctcgctgggctccgggttcgacccctacttcgtctactcgggctccatcccctacctcgacggcaccttctacctcaaccacaccttcaagaaggtctccatcaccttcgactcctccgtcagctggcccggcaacgaccggctcctgacgcccaacgagttcgaaatcaagcgcaccgtcgacggcgagggctacaacgtggcccagtgcaacatgaccaaggactggttcctggtccagatgctggcccactacaacatcggctaccagggcttctacgtgcccgagggctacaaggaccgcatgtactccttcttccgcaacttccagcccatgagccgccaggtggtggacgaggtcaactacaaggactaccaggccgtcaccctggcctaccagcacaacaactcgggcttcgtcggctacctcgcgcccaccatgcgccagggccagccctaccccgccaactacccctacccgctcatcggcaagagcgccgtcaccagcgtcacccagaaaaagttcctctgcgacagggtcatgtggcgcatccccttctccagcaacttcatgtccatgggcgcgctcaccgacctcggccagaacatgctctatgccaactccgcccacgcgctagacatgaatttcgaagtcgaccccatggatgagtccacccttctctatgttgtcttcgaagtcttcgacgtcgtccgagtgcaccagccccaccgcggcgtcatcgaggccgtctacctgcgcacccccttctcggccggtaacgccaccacctaagctcttgcttcttgcaagccatggccgcgggctccggcgagcaggagctcagggccatcatccgcgacctgggctgcgggccctacttcctgggcaccttcgataagcgcttcccgggattcatggccccgcacaagctggcctgcgccatcgtcaacacggccggccgcgagaccgggggcgagcactggctggccttcgcctggaacccgcgctcgaacacctgctacctcttcgaccccttcgggttctcggacgagcgcctcaagcagatctaccagttcgagtacgagggcctgctgcgccgcagcgccctggccaccgaggaccgctgcgtcaccctggaaaagtccacccagaccgtgcagggtccgcgctcggccgcctgcgggctcttctgctgcatgttcctgcacgccttcgtgcactggcccgaccgccccatggacaagaaccccaccatgaacttgctgacgggggtgcccaacggcatgctccagtcgccccaggtggaacccaccctgcgccgcaaccaggaggcgctctaccgcttcctcaactcccactccgcctactttcgctcccaccgcgcgcgcatcgagaaggccaccgccttcgaccgcatgaatcaagacatgtaaaccgtgtgtgtatgttaaatgtctttaataaacagcactttcatgttacacatgcatctgagatgatttatttagaaatcgaaagggttctgccgggtctcggcatggcccgcgggcagggacacgttgcggaactggtacttggccagccacttgaactcggggatcagcagtttgggcagcggggtgtcggggaaggagtcggtccacagcttccgcgtcagttgcagggcgcccagcaggtcgggcgcggagatcttgaaatcgcagttgggacccgcgttctgcgcgcgggagttgcggtacacggggttgcagcactggaacaccatcagggccgggtgcttcacgctcgccagcaccgtcgcgtcggtgatgctctccacgtcgaggtcctcggcgttggccatcccgaagggggtcatcttgcaggtctgccttcccatggtgggcacgcacccgggcttgtggttgcaatcgcagtgcagggggatcagcatcatctgggcctggtcggcgttcatccccgggtacatggccttcatgaaagcctccaattgcctgaacgcctgctgggccttggctccctcggtgaagaagaccccgcaggacttgctagagaactggttggtggcgcacccggcgtcgtgcacgcagcagcgcgcgtcgttgttggccagctgcaccacgctgcgcccccagcggttctgggtgatcttggcccggtcggggttctccttcagcgcgcgctgcccgttctcgctcgccacatccatctcgatcatgtgctccttctggatcatggtggtcccgtgcaggcaccgcagcttgccctcggcctcggtgcacccgtgcagccacagcgcgcacccggtgcactcccagttcttgtgggcgatctgggaatgcgcgtgcacgaagccctgcaggaagcggcccatcatggtggtcagggtcttgttgctagtgaaggtcagcggaatgccgcggtgctcctcgttgatgtacaggtggcagatgcggcggtacacctcgccctgctcgggcatcagctggaagttggctttcaggtcggtctccacgcggtagcggtccatcagcatagtcatgatttccatacccttctcccaggccgagacgatgggcaggctcatagggttcttcaccatcatcttagcgctagcagccgcggccagggggtcgctctcgtccagggtctcaaagctccgcttgccgtccttctcggtgatccgcaccggggggtagctgaagcccacggccgccagctcctcctcggcctgtctttcgtcctcgctgtcctggctgacgtcctgcaggaccacatgcttggtcttgcggggtttcttcttgggcggcagcggcggcggagatgttggagatggcgagggggagcgcgagttctcgctcaccactactatctcttcctcttcttggtccgaggccacgcggcggtaggtatgtctcttcgggggcagaggcggaggcgacgggctctcgccgccgcgacttggcggatggctggcagagccccttccgcgttcgggggtgcgctcccggcggcgctctgactgacttcctccgcggccggccattgtgttctcctagggaggaacaacaagcatggagactcagccatcgccaacctcgccatctgcccccaccgccgacgagaagcagcagcagcagaatgaaagcttaaccgccccgccgcccagccccgccacctccgacgcggccgtcccagacatgcaagagatggaggaatccatcgagattgacctgggctatgtgacgcccgcggagcacgaggaggagctggcagtgcgcttttcacaagaagagatacaccaagaacagccagagcaggaagcagagaatgagcagagtcaggctgggctcgagcatgacggcgactacctccacctgagcgggggggaggacgcgctcatcaagcatctggcccggcaggccaccatcgtcaaggatgcgctgctcgaccgcaccgaggtgcccctcagcgtggaggagctcagccgcgcctacgagttgaacctcttctcgccgcgcgtgccccccaagcgccagcccaatggcacctgcgagcccaacccgcgcctcaacttctacccggtcttcgcggtgcccgaggccctggccacctaccacatctttttcaagaaccaaaagatccccgtctcctgccgcgccaaccgcacccgcgccgacgcccttttcaacctgggtcccggcgcccgcctacctgatatcgcctccttggaagaggttcccaagatcttcgagggtctgggcagcgacgagactcgggccgcgaacgctctgcaaggagaaggaggagagcatgagcaccacagcgccctggtcgagttggaaggcgacaacgcgcggctggcggtgctcaaacgcacggtcgagctgacccatttcgcctacccggctctgaacctgccccccaaagtcatgagcgcggtcatggaccaggtgctcatcaagcgcgcgtcgcccatctccgaggacgagggcatgcaagactccgaggagggcaagcccgtggtcagcgacgagcagctggcccggtggctgggtcctaatgctagtccccagagtttggaagagcggcgcaaactcatgatggccgtggtcctggtgaccgtggagctggagtgcctgcgccgcttcttcgccgacgcggagaccctgcgcaaggtcgaggagaacctgcactacctcttcaggcacgggttcgtgcgccaggcctgcaagatctccaacgtggagctgaccaacctggtctcctacatgggcatcttgcacgagaaccgcctggggcagaacgtgctgcacaccaccctgcgcggggaggcccggcgcgactacatccgcgactgcgtctacctctacctctgccacacctggcagacgggcatgggcgtgtggcagcagtgtctggaggagcagaacctgaaagagctctgcaagctcctgcagaagaacctcaagggtctgtggaccgggttcgacgagcgcaccaccgcctcggacctggccgacctcattttccccgagcgcctcaggctgacgctgcgcaacggcctgcccgactttatgagccaaagcatgttgcaaaactttcgctctttcatcctcgaacgctccggaatcctgcccgccacctgctccgcgctgccctcggacttcgtgccgctgaccttccgcgagtgccccccgccgctgtggagccactgctacctgctgcgcctggccaactacctggcctaccactcggacgtgatcgaggacgtcagcggcgagggcctgctcgagtgccactgccgctgcaacctctgcacgccgcaccgctccctggcctgcaacccccagctgctgagcgagacccagatcatcggcaccttcgagttgcaagggcccagcgaaggcgagggttcagccgccaaggggggtctgaaactcaccccggggctgtggacctcggcctacttgcgcaagttcgtgcccgaggactaccatcccttcgagatcaggttctacgaggaccaatcccatccgcccaaggccgagctgtcggcctgcgtcatcacccagggggcgatcctggcccaattgcaagccatccagaaatcccgccaagaattcttgctgaaaaagggccgcggggtctacctcgacccccagaccggtgaggagctcaaccccggcttcccccaggatgccccgaggaaacaagaagctgaaagtggagctgccgcccgtggaggatttggaggaagactgggagaacagcagtcaggcagaggaggaggagatggaggaagactgggacagcactcaggcagaggaggacagcctgcaagacagtctggaggaagacgaggaggaggcagaggaggaggtggaagaagcagccgccgccagaccgtcgtcctcggcgggggagaaagcaagcagcacggataccatctccgctccgggtcggggtcccgctcgaccacacagtagatgggacgagaccggacgattcccgaaccccaccacccagaccggtaagaaggagcggcagggatacaagtcctggcgggggcacaaaaacgccatcgtctcctgcttgcaggcctgcgggggcaacatctccttcacccggcgctacctgctcttccaccgcggggtgaactttccccgcaacatcttgcattactaccgtcacctccacagcccctactacttccaagaagaggcagcagcagcagaaaaagaccagcagaaaaccagcagctagaaaatccacagcggcggcagcaggtggactgaggatcgcggcgaacgagccggcgcaaacccgggagctgaggaaccggatctttcccaccctctatgccatcttccagcagagtcgggggcaggagcaggaactgaaagtcaagaaccgttctctgcgctcgctcacccgcagttgtctgtatcacaagagcgaagaccaacttcagcgcactctcgaggacgccgaggctctcttcaacaagtactgcgcgctcactcttaaagagtagcccgcgcccgcccagtcgcagaaaaaggcgggaattacgtcacctgtgcccttcgccctagccgcctccacccatcatcatgagcaaagagattcccacgccttacatgtggagctaccagccccagatgggcctggccgccggtgccgcccaggactactccacccgcatgaattggctcagcgccgggcccgcgatgatctcacgggtgaatgacatccgcgcccaccgaaaccagatactcctagaacagtcagcgctcaccgccacgccccgcaatcacctcaatccgcgtaattggcccgccgccctggtgtaccaggaaattccccagcccacgaccgtactacttccgcgagacgcccaggccgaagtccagctgactaactcaggtgtccagctggcgggcggcgccaccctgtgtcgtcaccgccccgctcagggtataaagcggctggtgatccggggcagaggcacacagctcaacgacgaggtggtgagctcttcgctgggtctgcgacctgacggagtcttccaactcgccggatcggggagatcttccttcacgcctcgtcaggccgtcctgactttggagagttcgtcctcgcagccccgctcgggtggcatcggcactctccagttcgtggaggagttcactccctcggtctacttcaaccccttctccggctcccccggccactacccggacgagttcatcccgaacttcgacgccatcagcgagtcggtggacggctacgattgaaactaatcacccccttatccagtgaaataaagatcatattgatgatgattttacagaaataaaaaataatcatttgatttgaaataaagatacaatcatattgatgatttgagtttaacaaaaaaataaagaatcacttacttgaaatctgataccaggtctctgtccatgttttctgccaacaccacttcactcccctcttcccagctctggtactgcaggccccggcgggctgcaaacttcctccacacgctgaaggggatgtcaaattcctcctgtccctcaatcttcattttatcttctatcagatgtccaaaaagcgcgtccgggtggatgatgacttcgaccccgtctacccctacgatgcagacaacgcaccgaccgtgcccttcatcaacccccccttcgtctcttcagatggattccaagagaagcccctgggggtgttgtccctgcgactggccgaccccgtcaccaccaagaacggggaaatcaccctcaagctgggagagggggtggacctcgattcctcgggaaaactcatctccaacacggccaccaaggccgccgcccctctcagtttttccaacaacaccatttcccttaacatggatcaccccttttacactaaagatggaaaattatccttacaagtttctccaccattaaatatactgagaacaagcattctaaacacactagctttaggttttggatcaggtttaggactccgtggctctgccttggcagtacagttagtctctccacttacatttgatactgatggaaacataaagcttaccttagacagaggtttgcatgttacaacaggagatgcaattgaaagcaacataagctgggctaaaggtttaaaatttgaagatggagccatagcaaccaacattggaaatgggttagagtttggaagcagtagtacagaaacaggtgttgatgatgcttacccaatccaagttaaacttggatctggccttagctttgacagtacaggagccataatggctggtaacaaagaagacgataaactcactttgtggacaacacctgatccatcaccaaactgtcaaatactcgcagaaaatgatgcaaaactaacactttgcttgactaaatgtggtagtcaaatactggccactgtgtcagtcttagttgtaggaagtggaaacctaaaccccattactggcaccgtaagcagtgctcaggtgtttctacgttttgatgcaaacggtgttcttttaacagaacattctacactaaaaaaatactgggggtataggcagggagatagcatagatggcactccatataccaatgctgtaggattcatgcccaatttaaaagcttatccaaagtcacaaagttctactactaaaaataatatagtagggcaagtatacatgaatggagatgtttcaaaacctatgcttctcactataaccctcaatggtactgatgacagcaacagtacatattcaatgtcattttcatacacctggactaatggaagctatgttggagcaacatttggggctaactcttataccttctcatacatcgcccaagaatgaacactgtatcccaccctgcatgccaacccttcccaccccactctgtggaacaaactctgaaacacaaaataaaataaagttcaagtgttttattgattcaacagttttacaggattcgagcagttatttttcctccaccctcccaggacatggaatacaccaccctctccccccgcacagccttgaacatctgaatgccattggtgatggacatgcttttggtctccacgttccacacagtttcagagcgagccagtctcgggtcggtcagggagatgaaaccctccgggcactcccgcatctgcacctcacagctcaacagctgaggattgtcctcggtggtcgggatcacggttatctggaagaagcagaagagcggcggtgggaatcatagtccgcgaacgggatcggccggtggtgtcgcatcaggccccgcagcagtcgctgccgccgccgctccgtcaagctgctgctcagggggtccgggtccagggactccctcagcatgatgcccacggccctcagcatcagtcgtctggtgcggcgggcgcagcagcgcatgcggatctcgctcaggtcgctgcagtacgtgcaacacagaaccaccaggttgttcaacagtccatagttcaacacgctccagccgaaactcatcgcgggaaggatgctacccacgtggccgtcgtaccagatcctcaggtaaatcaagtggtgccccctccagaacacgctgcccacgtacatgatctccttgggcatgtggcggttcaccacctcccggtaccacatcaccctctggttgaacatgcagccccggatgatcctgcggaaccacagggccagcaccgccccgcccgccatgcagcgaagagaccccgggtcccggcaatggcaatggaggacccaccgctcgtacccgtggatcatctgggagctgaacaagtctatgttggcacagcacaggcatatgctcatgcatctcttcagcactctcaactcctcgggggtcaaaaccatatcccagggcacggggaactcttgcaggacagcgaaccccgcagaacagggcaatcctcgcacagaacttacattgtgcatggacagggtatcgcaatcaggcagcaccgggtgatcctccaccagagaagcgcgggtctcggtctcctcacagcgtggtaagggggccggccgatacgggtgatggcgggacgcggctgatcgtgttcgcgaccgtgtcatgatgcagttgctttcggacattttcgtacttgctgtagcagaacctggtccgggcgctgcacaccgatcgccggcggcggtctcggcgcttggaacgctcggtgttgaaattgtaaaacagccactctctcagaccgtgcagcagatctagggcctcaggagtgatgaagatcccatcatgcctgatggctctgatcacatcgaccaccgtggaatgggccagacccagccagatgatgcaattttgttgggtttcggtgacggcgagcctcgggaacaacgatgaagtaaatgcaagcggtgcgttccagcatggttagttagctgatctgtagaaaaaacaaaaatgaacattaaaccatgctagcctggcgaacaggtgggtaaatcgttctctccagcaccaggcaggccacggggtctccggcgcgaccctcgtaaaaattgtcgctatgattgaaaaccatcacagagagacgttcccggtggccggcgtgaatgattcgacaagatgaatacacccccggaacattggcgtccgcgagtgaaaaaaagcgcccgaggaagcaataaggcactacaatgctcagtctcaagtccagcaaagcgatgccatgcggatgaagcacaaaattctcaggtgcgtacaaaatgtaattactcccctcctgcacaggcagcaaagcccccgatccctccaggtacacatacaaagcctcagcgtccatagcttaccgagcagcagcacacaacaggcgcaagagtcagagaaaggctgagctctaacctgtccacccgctctctgctcaatatatagcccagatctacactgacgtaaaggccaaagtctaaaaatacccgccaaataatcacacacgcccagcacacgcccagaaaccggtgacacactcaaaaaaatacgcgcacttcctcaaacgcccaaaactgccgtcatttccgggttcccacgctacgtcatcaaaacacgactttcaaattccgtcgaccgttaaaaacgtcacccgccccgcccctaacggtcgcccgtctctcagccaatcagcgccccgcatccccaaattcaaacacctcatttgcatattaacgcgcacaaaaagtttgaggtatattattgatgatg

SEQ ID NO: 76 - DNA, 29903 bp, Severe acute respiratory syndrome coronavirus 2
  source 1..29903: mol_type = genomic DNA
attaaaggtttataccttcccaggtaacaaaccaaccaactttcgatctcttgtagatctgttctctaaacgaactttaaaatctgtgtggctgtcactcggctgcatgcttagtgcactcacgcagtataattaataactaattactgtcgttgacaggacacgagtaactcgtctatcttctgcaggctgcttacggtttcgtccgtgttgcagccgatcatcagcacatctaggtttcgtccgggtgtgaccgaaaggtaagatggagagccttgtccctggtttcaacgagaaaacacacgtccaactcagtttgcctgttttacaggttcgcgacgtgctcgtacgtggctttggagactccgtggaggaggtcttatcagaggcacgtcaacatcttaaagatggcacttgtggcttagtagaagttgaaaaaggcgttttgcctcaacttgaacagccctatgtgttcatcaaacgttcggatgctcgaactgcacctcatggtcatgttatggttgagctggtagcagaactcgaaggcattcagtacggtcgtagtggtgagacacttggtgtccttgtccctcatgtgggcgaaataccagtggcttaccgcaaggttcttcttcgtaagaacggtaataaaggagctggtggccatagttacggcgccgatctaaagtcatttgacttaggcgacgagcttggcactgatccttatgaagattttcaagaaaactggaacactaaacatagcagtggtgttacccgtgaactcatgcgtgagcttaacggaggggcatacactcgctatgtcgataacaacttctgtggccctgatggctaccctcttgagtgcattaaagaccttctagcacgtgctggtaaagcttcatgcactttgtccgaacaactggactttattgacactaagaggggtgtatactgctgccgtgaacatgagcatgaaattgcttggtacacggaacgttctgaaaagagctatgaattgcagacaccttttgaaattaaattggcaaagaaatttgacaccttcaatggggaatgtccaaattttgtatttcccttaaattccataatcaagactattcaaccaagggttgaaaagaaaaagcttgatggctttatgggtagaattcgatctgtctatccagttgcgtcaccaaatgaatgcaaccaaatgtgcctttcaactctcatgaagtgtgatcattgtggtgaaacttcatggcagacgggcgattttgttaaagccacttgcgaattttgtggcactgagaatttgactaaagaaggtgccactacttgtggttacttaccccaaaatgctgttgttaaaatttattgtccagcatgtcacaattcagaagtaggacctgagcatagtcttgccgaataccataatgaatctggcttgaaaaccattcttcgtaagggtggtcgcactattgcctttggaggctgtgtgttctcttatgttggttgccataacaagtgtgcctattgggttccacgtgctagcgctaacataggttgtaaccatacaggtgttgttggagaaggttccgaaggtcttaatgacaaccttcttgaaatactccaaaaagagaaagtcaacatcaatattgttggtgactttaaacttaatgaagagatcgccattattttggcatctttttctgcttccacaagtgcttttgtggaaactgtgaaaggtttggattataaagcattcaaacaaattgttgaatcctgtggtaattttaaagttacaaaaggaaaagctaaaaaaggtgcctggaatattggtgaacagaaatcaatactgagtcctctttatgcatttgcatcagaggctgctcgtgttgtacgatcaattttctcccgcactcttgaaactgctcaaaattctgtgcgtgttttacagaaggccgctataacaatactagatggaatttcacagtattcactgagactcattgatgctatgatgttcacatctgatttggctactaacaatctagttgtaatggcctacattacaggtggtgttgttcagttgacttcgcagtggctaactaacatctttggcactgtttatgaaaaactcaaacccgtccttgattggcttgaagagaagtttaaggaaggtgtagagtttcttagagacggttgggaaattgttaaatttatctcaacctgtgcttgtgaaattgtcggtggacaaattgtcacctgtgcaaaggaaattaaggagagtgttcagacattctttaagcttgtaaataaatttttggctttgtgtgctgactctatcattattggtggagctaaacttaaagccttgaatttaggtgaaacatttgtcacgcactcaaagggattgtacagaaagtgtgttaaatccagagaagaaactggcctactcatgcctctaaaagccccaaaagaaattatcttcttagagggagaaacacttcccacagaagtgttaacagaggaagttgtcttgaaaactggtgatttacaaccattagaacaacctactagtgaagctgttgaagctccattggttggtacaccagtttgtattaacgggcttatgttgctcgaaatcaaagacacagaaaagtactgtgcccttgcacctaatatgatggtaacaaacaataccttcacactcaaaggcggtgcaccaacaaaggttacttttggtgatgacactgtgatagaagtgcaaggttacaagagtgtgaatatcacttttgaacttgatgaaaggattgataaagtacttaatgagaagtgctctgcctatacagttgaactcggtacagaagtaaatgagttcgcctgtgttgtggcagatgctgtcataaaaactttgcaaccagtatctgaattacttacaccactgggcattgatttagatgagtggagtatggctacatactacttatttgatgagtctggtgagtttaaattggcttcacatatgtattgttctttctaccctccagatgaggatgaagaagaaggtgattgtgaagaagaagagtttgagccatcaactcaatatgagtatggtactgaagatgattaccaaggtaaacctttggaatttggtgccacttctgctgctcttcaacctgaagaagagcaagaagaagattggttagatgatgatagtcaacaaactgttggtcaacaagacggcagtgaggacaatcagacaactactattcaaacaattgttgaggttcaacctcaattagagatggaacttacaccagttgttcagactattgaagtgaatagttttagtggttatttaaaacttactgacaatgtatacattaaaaatgcagacattgtggaagaagctaaaaaggtaaaaccaacagtggttgttaatgcagccaatgtttaccttaaacatggaggaggtgttgcaggagccttaaataaggctactaacaatgccatgcaagttgaatctgatgattacatagctactaatggaccacttaaagtgggtggtagttgtgttttaagcggacacaatcttgctaaacactgtcttcatgttgtcggcccaaatgttaacaaaggtgaagacattcaacttcttaagagtgcttatgaaaattttaatcagcacgaagttctacttgcaccattattatcagctggtatttttggtgctgaccctatacattctttaagagtttgtgtagatactgttcgcacaaatgtctacttagctgtctttgataaaaatctctatgacaaacttgtttcaagctttttggaaatgaagagtgaaaagcaagttgaacaaaagatcgctgagattcctaaagaggaagttaagccatttataactgaaagtaaaccttcagttgaacagagaaaacaagatgataagaaaatcaaagcttgtgttgaagaagttacaacaactctggaagaaactaagttcctcacagaaaacttgttactttatattgacattaatggcaatcttcatccagattctgccactcttgttagtgacattgacatcactttcttaaagaaagatgctccatatatagtgggtgatgttgttcaagagggtgttttaactgctgtggttatacctactaaaaaggctggtggcactactgaaatgctagcgaaagctttgagaaaagtgccaacagacaattatataaccacttacccgggtcagggtttaaatggttacactgtagaggaggcaaagacagtgcttaaaaagtgtaaaagtgccttttacattctaccatctattatctctaatgagaagcaagaaattcttggaactgtttcttggaatttgcgagaaatgcttgcacatgcagaagaaacacgcaaattaatgcctgtctgtgtggaaactaaagccatagtttcaactatacagcgtaaatataagggtattaaaatacaagagggtgtggttgattatggtgctagattttacttttacaccagtaaaacaactgtagcgtcacttatcaacacacttaacgatctaaatgaaactcttgttacaatgccacttggctatgtaacacatggcttaaatttggaagaagctgctcggtatatgagatctctcaaagtgccagctacagtttctgtttcttcacctgatgctgttacagcgtataatggttatcttacttcttcttctaaaacacctgaagaacattttattgaaaccatctcacttgctggttcctataaagattggtcctattctggacaatctacacaactaggtatagaatttcttaagagaggtgataaaagtgtatattacactagtaatcctaccacattccacctagatggtgaagttatcacctttgacaatcttaagacacttctttctttgagagaagtgaggactattaaggtgtttacaacagtagacaacattaacctccacacgcaagttgtggacatgtcaatgacatatggacaacagtttggtccaacttatttggatggagctgatgttactaaaataaaacctcataattcacatgaaggtaaaacattttatgttttacctaatgatgacactctacgtgttgaggcttttgagtactaccacacaactgatcctagttttctgggtaggtacatgtcagcattaaatcacactaaaaagtggaaatacccacaagttaatggtttaacttctattaaatgggcagataacaactgttatcttgccactgcattgttaacactccaacaaatagagttgaagtttaatccacctgctctacaagatgcttattacagagcaagggctggtgaagctgctaacttttgtgcacttatcttagcctactgtaataagacagtaggtgagttaggtgatgttagagaaacaatgagttacttgtttcaacatgccaatttagattcttgcaaaagagtcttgaacgtggtgtgtaaaacttgtggacaacagcagacaacccttaagggtgtagaagctgttatgtacatgggcacactttcttatgaacaatttaagaaaggtgttcagataccttgtacgtgtggtaaacaagctacaaaatatctagtacaacaggagtcaccttttgttatgatgtcagcaccacctgctcagtatgaacttaagcatggtacatttacttgtgctagtgagtacactggtaattaccagtgtggtcactataaacatataacttctaaagaaactttgtattgcatagacggtgctttacttacaaagtcctcagaatacaaaggtcctattacggatgttttctacaaagaaaacagttacacaacaaccataaaaccagttacttataaattggatggtgttgtttgtacagaaattgaccctaagttggacaattattataagaaagacaattcttatttcacagagcaaccaattgatcttgtaccaaaccaaccatatccaaacgcaagcttcgataattttaagtttgtatgtgataatatcaaatttgctgatgatttaaaccagttaactggttataagaaacctgcttcaagagagcttaaagttacatttttccctgacttaaatggtgatgtggtggctattgattataaacactacacaccctcttttaagaaaggagctaaattgttacataaacctattgtttggcatgttaacaatgcaactaataaagccacgtataaaccaaatacctggtgtatacgttgtctttggagcacaaaaccagttgaaacatcaaattcgtttgatgtactgaagtcagaggacgcgcagggaatggataatcttgcctgcgaagatctaaaaccagtctctgaagaagtagtggaaaatcctaccatacagaaagacgttcttgagtgtaatgtgaaaactaccgaagttgtaggagacattatacttaaaccagcaaataatagtttaaaaattacagaagaggttggccacacagatctaatggctgcttatgtagacaattctagtcttactattaagaaacctaatgaattatctagagtattaggtttgaaaacccttgctactcatggtttagctgctgttaatagtgtcccttgggatactatagctaattatgctaagccttttcttaacaaagttgttagtacaactactaacatagttacacggtgtttaaaccgtgtttgtactaattatatgccttatttctttactttattgctacaattgtgtacttttactagaagtacaaattctagaattaaagcatctatgccgactactatagcaaagaatactgttaagagtgtcggtaaattttgtctagaggcttcatttaattatttgaagtcacctaatttttctaaactgataaatattataatttggtttttactattaagtgtttgcctaggttctttaatctactcaaccgctgctttaggtgttttaatgtctaatttaggcatgccttcttactgtactggttacagagaaggctatttgaactctactaatgtcactattgcaacctactgtactggttctataccttgtagtgtttgtcttagtggtttagattctttagacacctatccttctttagaaactatacaaattaccatttcatcttttaaatgggatttaactgcttttggcttagttgcagagtggtttttggcatatattcttttcactaggtttttctatgtacttggattggctgcaatcatgcaattgtttttcagctattttgcagtacattttattagtaattcttggcttatgtggttaataattaatcttgtacaaatggccccgatttcagctatggttagaatgtacatcttctttgcatcattttattatgtatggaaaagttatgtgcatgttgtagacggttgtaattcatcaacttgtatgatgtgttacaaacgtaatagagcaacaagagtcgaatgtacaactattgttaatggtgttagaaggtccttttatgtctatgctaatggaggtaaaggcttttgcaaactacacaattggaattgtgttaattgtgatacattctgtgctggtagtacatttattagtgatgaagttgcgagagacttgtcactacagtttaaaagaccaataaatcctactgaccagtcttcttacatcgttgatagtgttacagtgaagaatggttccatccatctttactttgataaagctggtcaaaagacttatgaaagacattctctctctcattttgttaacttagacaacctgagagctaataacactaaaggttcattgcctattaatgttatagtttttgatggtaaatcaaaatgtgaagaatcatctgcaaaatcagcgtctgtttactacagtcagcttatgtgtcaacctatactgttactagatcaggcattagtgtctgatgttggtgatagtgcggaagttgcagttaaaatgtttgatgcttacgttaatacgttttcatcaacttttaacgtaccaatggaaaaactcaaaacactagttgcaactgcagaagctgaacttgcaaagaatgtgtccttagacaatgtcttatctacttttatttcagcagctcggcaagggtttgttgattcagatgtagaaactaaagatgttgttgaatgtcttaaattgtcacatcaatctgacatagaagttactggcgatagttgtaataactatatgctcacctataacaaagttgaaaacatgacaccccgtgaccttggtgcttgtattgactgtagtgcgcgtcatattaatgcgcaggtagcaaaaagtcacaacattgctttgatatggaacgttaaagatttcatgtcattgtctgaacaactacgaaaacaaatacgtagtgctgctaaaaagaataacttaccttttaagttgacatgtgcaactactagacaagttgttaatgttgtaacaacaaagatagcacttaagggtggtaaaattgttaataattggttgaagcagttaattaaagttacacttgtgttcctttttgttgctgctattttctatttaataacacctgttcatgtcatgtctaaacatactgacttttcaagtgaaatcataggatacaaggctattgatggtggtgtcactcgtgacatagcatctacagatacttgttttgctaacaaacatgctgattttgacacatggtttagccagcgtggtggtagttatactaatgacaaagcttgcccattgattgctgcagtcataacaagagaagtgggttttgtcgtgcctggtttgcctggcacgatattacgcacaactaatggtgactttttgcatttcttacctagagtttttagtgcagttggtaacatctgttacacaccatcaaaacttatagagtacactgactttgcaacatcagcttgtgttttggctgctgaatgtacaatttttaaagatgcttctggtaagccagtaccatattgttatgataccaatgtactagaaggttctgttgcttatgaaagtttacgccctgacacacgttatgtgctcatggatggctctattattcaatttcctaacacctaccttgaaggttctgttagagtggtaacaacttttgattctgagtactgtaggcacggcacttgtgaaagatcagaagctggtgtttgtgtatctactagtggtagatgggtacttaacaatgattattacagatctttaccaggagttttctgtggtgtagatgctgtaaatttacttactaatatgtttacaccactaattcaacctattggtgctttggacatatcagcatctatagtagctggtggtattgtagctatcgtagtaacatgccttgcctactattttatgaggtttagaagagcttttggtgaatacagtcatgtagttgcctttaatactttactattccttatgtcattcactgtactctgtttaacaccagtttactcattcttacctggtgtttattctgttatttacttgtacttgacattttatcttactaatgatgtttcttttttagcacatattcagtggatggttatgttcacacctttagtacctttctggataacaattgcttatatcatttgtatttccacaaagcatttctattggttctttagtaattacctaaagagacgtgtagtctttaatggtgtttcctttagtacttttgaagaagctgcgctgtgcacctttttgttaaataaagaaatgtatctaaagttgcgtagtgatgtgctattacctcttacgcaatataatagatacttagctctttataataagtacaagtattttagtggagcaatggatacaactagctacagagaagctgcttgttgtcatctcgcaaaggctctcaatgacttcagtaactcaggttctgatgttctttaccaaccaccacaaacctctatcacctcagctgttttgcagagtggttttagaaaaatggcattcccatctggtaaagttgagggttgtatggtacaagtaacttgtggtacaactacacttaacggtctttggcttgatgacgtagtttactgtccaagacatgtgatctgcacctctgaagacatgcttaaccctaattatgaagatttactcattcgtaagtctaatcataatttcttggtacaggctggtaatgttcaactcagggttattggacattctatgcaaaattgtgtacttaagcttaaggttgatacagccaatcctaagacacctaagtataagtttgttcgcattcaaccaggacagactttttcagtgttagcttgttacaatggttcaccatctggtgtttaccaatgtgctatgaggcccaatttcactattaagggttcattccttaatggttcatgtggtagtgttggttttaacatagattatgactgtgtctctttttgttacatgcaccatatggaattaccaactggagttcatgctggcacagacttagaaggtaacttttatggaccttttgttgacaggcaaacagcacaagcagctggtacggacacaactattacagttaatgttttagcttggttgtacgctgctgttataaatggagacaggtggtttctcaatcgatttaccacaactcttaatgactttaaccttgtggctatgaagtacaattatgaacctctaacacaagaccatgttgacatactaggacctctttctgctcaaactggaattgccgttttagatatgtgtgcttcattaaaagaattactgcaaaatggtatgaatggacgtaccatattgggtagtgctttattagaagatgaatttacaccttttgatgttgttagacaatgctcaggtgttactttccaaagtgcagtgaaaagaacaatcaagggtacacaccactggttgttactcacaattttgacttcacttttagttttagtccagagtactcaatggtctttgttcttttttttgtatgaaaatgcctttttaccttttgctatgggtattattgctatgtctgcttttgcaatgatgtttgtcaaacataagcatgcatttctctgtttgtttttgttaccttctcttgccactgtagcttattttaatatggtctatatgcctgctagttgggtgatgcgtattatgacatggttggatatggttgatactagtttgtctggttttaagctaaaagactgtgttatgtatgcatcagctgtagtgttactaatccttatgacagcaagaactgtgtatgatgatggtgctaggagagtgtggacacttatgaatgtcttgacactcgtttataaagtttattatggtaatgctttagatcaagccatttccatgtgggctcttataatctctgttacttctaactactcaggtgtagttacaactgtcatgtttttggccagaggtattgtttttatgtgtgttgagtattgccctattttcttcataactggtaatacacttcagtgtataatgctagtttattgtttcttaggctatttttgtacttgttactttggcctcttttgtttactcaaccgctactttagactgactcttggtgtttatgattacttagtttctacacaggagtttagatatatgaattcacagggactactcccacccaagaatagcatagatgccttcaaactcaacattaaattgttgggtgttggtggcaaaccttgtatcaaagtagccactgtacagtctaaaatgtcagatgtaaagtgcacatcagtagtcttactctcagttttgcaacaactcagagtagaatcatcatctaaattgtgggctcaatgtgtccagttacacaatgacattctcttagctaaagatactactgaagcctttgaaaaaatggtttcactactttctgttttgctttccatgcagggtgctgtagacataaacaagctttgtgaagaaatgctggacaacagggcaaccttacaagctatagcctcagagtttagttcccttccatcatatgcagcttttgctactgctcaagaagcttatgagcaggctgttgctaatggtgattctgaagttgttcttaaaaagttgaagaagtctttgaatgtggctaaatctgaatttgaccgtgatgcagccatgcaacgtaagttggaaaagatggctgatcaagctatgacccaaatgtataaacaggctagatctgaggacaagagggcaaaagttactagtgctatgcagacaatgcttttcactatgcttagaaagttggataatgatgcactcaacaacattatcaacaatgcaagagatggttgtgttcccttgaacataatacctcttacaacagcagccaaactaatggttgtcataccagactataacacatataaaaatacgtgtgatggtacaacatttacttatgcatcagcattgtgggaaatccaacaggttgtagatgcagatagtaaaattgttcaacttagtgaaattagtatggacaattcacctaatttagcatggcctcttattgtaacagctttaagggccaattctgctgtcaaattacagaataatgagcttagtcctgttgcactacgacagatgtcttgtgctgccggtactacacaaactgcttgcactgatgacaatgcgttagcttactacaacacaacaaagggaggtaggtttgtacttgcactgttatccgatttacaggatttgaaatgggctagattccctaagagtgatggaactggtactatctatacagaactggaaccaccttgtaggtttgttacagacacacctaaaggtcctaaagtgaagtatttatactttattaaaggattaaacaacctaaatagaggtatggtacttggtagtttagctgccacagtacgtctacaagctggtaatgcaacagaagtgcctgccaattcaactgtattatctttctgtgcttttgctgtagatgctgctaaagcttacaaagattatctagctagtgggggacaaccaatcactaattgtgttaagatgttgtgtacacacactggtactggtcaggcaataacagttacaccggaagccaatatggatcaagaatcctttggtggtgcatcgtgttgtctgtactgccgttgccacatagatcatccaaatcctaaaggattttgtgacttaaaaggtaagtatgtacaaatacctacaacttgtgctaatgaccctgtgggttttacacttaaaaacacagtctgtaccgtctgcggtatgtggaaaggttatggctgtagttgtgatcaactccgcgaacccatgcttcagtcagctgatgcacaatcgtttttaaacgggtttgcggtgtaagtgcagcccgtcttacaccgtgcggcacaggcactagtactgatgtcgtatacagggcttttgacatctacaatgataaagtagctggttttgctaaattcctaaaaactaattgttgtcgcttccaagaaaaggacgaagatgacaatttaattgattcttactttgtagttaagagacacactttctctaactaccaacatgaagaaacaatttataatttacttaaggattgtccagctgttgctaaacatgacttctttaagtttagaatagacggtgacatggtaccacatatatcacgtcaacgtcttactaaatacacaatggcagacctcgtctatgctttaaggcattttgatgaaggtaattgtgacacattaaaagaaatacttgtcacatacaattgttgtgatgatgattatttcaataaaaaggactggtatgattttgtagaaaacccagatatattacgcgtatacgccaacttaggtgaacgtgtacgccaagctttgttaaaaacagtacaattctgtgatgccatgcgaaatgctggtattgttggtgtactgacattagataatcaagatctcaatggtaactggtatgatttcggtgatttcatacaaaccacgccaggtagtggagttcctgttgtagattcttattattcattgttaatgcctatattaaccttgaccagggctttaactgcagagtcacatgttgacactgacttaacaaagccttacattaagtgggatttgttaaaatatgacttcacggaagagaggttaaaactctttgaccgttattttaaatattgggatcagacataccacccaaattgtgttaactgtttggatgacagatgcattctgcattgtgcaaactttaatgttttattctctacagtgttcccacctacaagttttggaccactagtgagaaaaatatttgttgatggtgttccatttgtagtttcaactggataccacttcagagagctaggtgttgtacataatcaggatgtaaacttacatagctctagacttagttttaaggaattacttgtgtatgctgctgaccctgctatgcacgctgcttctggtaatctattactagataaacgcactacgtgcttttcagtagctgcacttactaacaatgttgcttttcaaactgtcaaacccggtaattttaacaaagacttctatgactttgctgtgtctaagggtttctttaaggaaggaagttctgttgaattaaaacacttcttctttgctcaggatggtaatgctgctatcagcgattatgactactatcgttataatctaccaacaatgtgtgatatcagacaactactatttgtagttgaagttgttgataagtactttgattgttacgatggtggctgtattaatgctaaccaagtcatcgtcaacaacctagacaaatcagctggttttccatttaataaatggggtaaggctagactttattatgattcaatgagttatgaggatcaagatgcacttttcgcatatacaaaacgtaatgtcatccctactataactcaaatgaatcttaagtatgccattagtgcaaagaatagagctcgcaccgtagctggtgtctctatctgtagtactatgaccaatagacagtttcatcaaaaattattgaaatcaatagccgccactagaggagctactgtagtaattggaacaagcaaattctatggtggttggcacaacatgttaaaaactgtttatagtgatgtagaaaaccctcaccttatgggttgggattatcctaaatgtgatagagccatgcctaacatgcttagaattatggcctcacttgttcttgctcgcaaacatacaacgtgttgtagcttgtcacaccgtttctatagattagctaatgagtgtgctcaagtattgagtgaaatggtcatgtgtggcggttcactatatgttaaaccaggtggaacctcatcaggagatgccacaactgcttatgctaatagtgtttttaacatttgtcaagctgtcacggccaatgttaatgcacttttatctactgatggtaacaaaattgccgataagtatgtccgcaatttacaacacagactttatgagtgtctctatagaaatagagatgttgacacagactttgtgaatgagttttacgcatatttgcgtaaacatttctcaatgatgatactctctgacgatgctgttgtgtgtttcaatagcacttatgcatctcaaggtctagtggctagcataaagaactttaagtcagttctttattatcaaaacaatgtttttatgtctgaagcaaaatgttggactgagactgaccttactaaaggacctcatgaattttgctctcaacatacaatgctagttaaacagggtgatgattatgtgtaccttccttacccagatccatcaagaatcctaggggccggctgttttgtagatgatatcgtaaaaacagatggtacacttatgattgaacggttcgtgtctttagctatagatgcttacccacttactaaacatcctaatcaggagtatgctgatgtctttcatttgtacttacaatacataagaaagctacatgatgagttaacaggacacatgttagacatgtattctgttatgcttactaatgataacacttcaaggtattgggaacctgagttttatgaggctatgtacacaccgcatacagtcttacaggctgttggggcttgtgttctttgcaattcacagacttcattaagatgtggtgcttgcatacgtagaccattcttatgttgtaaatgctgttacgaccatgtcatatcaacatcacataaattagtcttgtctgttaatccgtatgtttgcaatgctccaggttgtgatgtcacagatgtgactcaactttacttaggaggtatgagctattattgtaaatcacataaaccacccattagttttccattgtgtgctaatggacaagtttttggtttatataaaaatacatgtgttggtagcgataatgttactgactttaatgcaattgcaacatgtgactggacaaatgctggtgattacattttagctaacacctgtactgaaagactcaagctttttgcagcagaaacgctcaaagctactgaggagacatttaaactgtcttatggtattgctactgtacgtgaagtgctgtctgacagagaattacatctttcatgggaagttggtaaacctagaccaccacttaaccgaaattatgtctttactggttatcgtgtaactaaaaacagtaaagtacaaataggagagtacacctttgaaaaaggtgactatggtgatgctgttgtttaccgaggtacaacaacttacaaattaaatgttggtgattattttgtgctgacatcacatacagtaatgccattaagtgcacctacactagtgccacaagagcactatgttagaattactggcttatacccaacactcaatatctcagatgagttttctagcaatgttgcaaattatcaaaaggttggtatgcaaaagtattctacactccagggaccacctggtactggtaagagtcattttgctattggcctagctctctactacccttctgctcgcatagtgtatacagcttgctctcatgccgctgttgatgcactatgtgagaaggcattaaaatatttgcctatagataaatgtagtagaattatacctgcacgtgctcgtgtagagtgttttgataaattcaaagtgaattcaacattagaacagtatgtcttttgtactgtaaatgcattgcctgagacgacagcagatatagttgtctttgatgaaatttcaatggccacaaattatgatttgagtgttgtcaatgccagattacgtgctaagcactatgtgtacattggcgaccctgctcaattacctgcaccacgcacattgctaactaagggcacactagaaccagaatatttcaattcagtgtgtagacttatgaaaactataggtccagacatgttcctcggaacttgtcggcgttgtcctgctgaaattgttgacactgtgagtgctttggtttatgataataagcttaaagcacataaagacaaatcagctcaatgctttaaaatgttttataagggtgttatcacgcatgatgtttcatctgcaattaacaggccacaaataggcgtggtaagagaattccttacacgtaaccctgcttggagaaaagctgtctttatttcaccttataattcacagaatgctgtagcctcaaagattttgggactaccaactcaaactgttgattcatcacagggctcagaatatgactatgtcatattcactcaaaccactgaaacagctcactcttgtaatgtaaacagatttaatgttgctattaccagagcaaaagtaggcatactttgcataatgtctgatagagacctttatgacaagttgcaatttacaagtcttgaaattccacgtaggaatgtggcaactttacaagctgaaaatgtaacaggactctttaaagattgtagtaaggtaatcactgggttacatcctacacaggcacctacacacctcagtgttgacactaaattcaaaactgaaggtttatgtgttgacatacctggcatacctaaggacatgacctatagaagactcatctctatgatgggttttaaaatgaattatcaagttaatggttaccctaacatgtttatcacccgcgaagaagctataagacatgtacgtgcatggattggcttcgatgtcgaggggtgtcatgctactagagaagctgttggtaccaatttacctttacagctaggtttttctacaggtgttaacctagttgctgtacctacaggttatgttgatacacctaataatacagatttttccagagttagtgctaaaccaccgcctggagatcaatttaaacacctcataccacttatgtacaaaggacttccttggaatgtagtgcgtataaagattgtacaaatgttaagtgacacacttaaaaatctctctgacagagtcgtatttgtcttatgggcacatggctttgagttgacatctatgaagtattttgtgaaaataggacctgagcgcacctgttgtctatgtgatagacgtgccacatgcttttccactgcttcagacacttatgcctgttggcatcattctattggatttgattacgtctataatccgtttatgattgatgttcaacaatggggttttacaggtaacctacaaagcaaccatgatctgtattgtcaagtccatggtaatgcacatgtagctagttgtgatgcaatcatgactaggtgtctagctgtccacgagtgctttgttaagcgtgttgactggactattgaatatcctataattggtgatgaactgaagattaatgcggcttgtagaaaggttcaacacatggttgttaaagctgcattattagcagacaaattcccagttcttcacgacattggtaaccctaaagctattaagtgtgtacctcaagctgatgtagaatggaagttctatgatgcacagccttgtagtgacaaagcttataaaatagaagaattattctattcttatgccacacattctgacaaattcacagatggtgtatgcctattttggaattgcaatgtcgatagatatcctgctaattccattgtttgtagatttgacactagagtgctatctaaccttaacttgcctggttgtgatggtggcagtttgtatgtaaataaacatgcattccacacaccagcttttgataaaagtgcttttgttaatttaaaacaattaccatttttctattactctgacagtccatgtgagtctcatggaaaacaagtagtgtcagatatagattatgtaccactaaagtctgctacgtgtataacacgttgcaatttaggtggtgctgtctgtagacatcatgctaatgagtacagattgtatctcgatgcttataacatgatgatctcagctggctttagcttgtgggtttacaaacaatttgatacttataacctctggaacacttttacaagacttcagagtttagaaaatgtggcttttaatgttgtaaataagggacactttgatggacaacagggtgaagtaccagtttctatcattaataacactgtttacacaaaagttgatggtgttgatgtagaattgtttgaaaataaaacaacattacctgttaatgtagcatttgagctttgggctaagcgcaacattaaaccagtaccagaggtgaaaatactcaataatttgggtgtggacattgctgctaatactgtgatctgggactacaaaagagatgctccagcacatatatctactattggtgtttgttctatgactgacatagccaagaaaccaactgaaacgatttgtgcaccactcactgtcttttttgatggtagagttgatggtcaagtagacttatttagaaatgcccgtaatggtgttcttattacagaaggtagtgttaaaggtttacaaccatctgtaggtcccaaacaagctagtcttaatggagtcacattaattggagaagccgtaaaaacacagttcaattattataagaaagttgatggtgttgtccaacaattacctgaaacttactttactcagagtagaaatttacaagaatttaaacccaggagtcaaatggaaattgatttcttagaattagctatggatgaattcattgaacggtataaattagaaggctatgccttcgaacatatcgtttatggagattttagtcatagtcagttaggtggtttacatctactgattggactagctaaacgttttaaggaatcaccttttgaattagaagattttattcctatggacagtacagttaaaaactatttcataacagatgcgcaaacaggttcatctaagtgtgtgtgttctgttattgatttattacttgatgattttgttgaaataataaaatcccaagatttatctgtagtttctaaggttgtcaaagtgactattgactatacagaaatttcatttatgctttggtgtaaagatggccatgtagaaacattttacccaaaattacaatctagtcaagcgtggcaaccgggtgttgctatgcctaatctttacaaaatgcaaagaatgctattagaaaagtgtgaccttcaaaattatggtgatagtgcaacattacctaaaggcataatgatgaatgtcgcaaaatatactcaactgtgtcaatatttaaacacattaacattagctgtaccctataatatgagagttatacattttggtgctggttctgataaaggagttgcaccaggtacagctgttttaagacagtggttgcctacgggtacgctgcttgtcgattcagatcttaatgactttgtctctgatgcagattcaactttgattggtgattgtgcaactgtacatacagctaataaatgggatctcattattagtgatatgtacgaccctaagactaaaaatgttacaaaagaaaatgactctaaagagggttttttcacttacatttgtgggtttatacaacaaaagctagctcttggaggttccgtggctataaagataacagaacattcttggaatgctgatctttataagctcatgggacacttcgcatggtggacagcctttgttactaatgtgaatgcgtcatcatctgaagcatttttaattggatgtaattatcttggcaaaccacgcgaacaaatagatggttatgtcatgcatgcaaattacatattttggaggaatacaaatccaattcagttgtcttcctattctttatttgacatgagtaaatttccccttaaattaaggggtactgctgttatgtctttaaaagaaggtcaaatcaatgatatgattttatctcttcttagtaaaggtagacttataattagagaaaacaacagagttgttatttctagtgatgttcttgttaacaactaaacgaacaatgtttgtttttcttgttttattgccactagtctctagtcagtgtgttaatcttacaaccagaactcaattaccccctgcatacactaattctttcacacgtggtgtttattaccctgacaaagttttcagatcctcagttttacattcaactcaggacttgttcttacctttcttttccaatgttacttggttccatgctatacatgtctctgggaccaatggtactaagaggtttgataaccctgtcctaccatttaatgatggtgtttattttgcttccactgagaagtctaacataataagaggctggatttttggtactactttagattcgaagacccagtccctacttattgttaataacgctactaatgttgttattaaagtctgtgaatttcaattttgtaatgatccatttttgggtgtttattaccacaaaaacaacaaaagttggatggaaagtgagttcagagtttattctagtgcgaataattgcacttttgaatatgtctctcagccttttcttatggaccttgaaggaaaacagggtaatttcaaaaatcttagggaatttgtgtttaagaatattgatggttattttaaaatatattctaagcacacgcctattaatttagtgcgtgatctccctcagggtttttcggctttagaaccattggtagatttgccaataggtattaacatcactaggtttcaaactttacttgctttacatagaagttatttgactcctggtgattcttcttcaggttggacagctggtgctgcagcttattatgtgggttatcttcaacctaggacttttctattaaaatataatgaaaatggaaccattacagatgctgtagactgtgcacttgaccctctctcagaaacaaagtgtacgttgaaatccttcactgtagaaaaaggaatctatcaaacttctaactttagagtccaaccaacagaatctattgttagatttcctaatattacaaacttgtgcccttttggtgaagtttttaacgccaccagatttgcatctgtttatgcttggaacaggaagagaatcagcaactgtgttgctgattattctgtcctatataattccgcatcattttccacttttaagtgttatggagtgtctcctactaaattaaatgatctctgctttactaatgtctatgcagattcatttgtaattagaggtgatgaagtcagacaaatcgctccagggcaaactggaaagattgctgattataattataaattaccagatgattttacaggctgcgttatagcttggaattctaacaatcttgattctaaggttggtggtaattataattacctgtatagattgtttaggaagtctaatctcaaaccttttgagagagatatttcaactgaaatctatcaggccggtagcacaccttgtaatggtgttgaaggttttaattgttactttcctttacaatcatatggtttccaacccactaatggtgttggttaccaaccatacagagtagtagtactttcttttgaacttctacatgcaccagcaactgtttgtggacctaaaaagtctactaatttggttaaaaacaaatgtgtcaatttcaacttcaatggtttaacaggcacaggtgttcttactgagtctaacaaaaagtttctgcctttccaacaatttggcagagacattgctgacactactgatgctgtccgtgatccacagacacttgagattcttgacattacaccatgttcttttggtggtgtcagtgttataacaccaggaacaaatacttctaaccaggttgctgttctttatcaggatgttaactgcacagaagtccctgttgctattcatgcagatcaacttactcctacttggcgtgtttattctacaggttctaatgtttttcaaacacgtgcaggctgtttaataggggctgaacatgtcaacaactcatatgagtgtgacatacccattggtgcaggtatatgcgctagttatcagactcagactaattctcctcggcgggcacgtagtgtagctagtcaatccatcattgcctacactatgtcacttggtgcagaaaattcagttgcttactctaataactctattgccatacccacaaattttactattagtgttaccacagaaattctaccagtgtctatgaccaagacatcagtagattgtacaatgtacatttgtggtgattcaactgaatgcagcaatcttttgttgcaatatggcagtttttgtacacaattaaaccgtgctttaactggaatagctgttgaacaagacaaaaacacccaagaagtttttgcacaagtcaaacaaatttacaaaacaccaccaattaaagattttggtggttttaatttttcacaaatattaccagatccatcaaaaccaagcaagaggtcatttattgaagatctacttttcaacaaagtgacacttgcagatgctggcttcatcaaacaatatggtgattgccttggtgatattgctgctagagacctcatttgtgcacaaaagtttaacggccttactgttttgccacctttgctcacagatgaaatgattgctcaatacacttctgcactgttagcgggtacaatcacttctggttggacctttggtgcaggtgctgcattacaaataccatttgctatgcaaatggcttataggtttaatggtattggagttacacagaatgttctctatgagaaccaaaaattgattgccaaccaatttaatagtgctattggcaaaattcaagactcactttcttccacagcaagtgcacttggaaaacttcaagatgtggtcaaccaaaatgcacaagctttaaacacgcttgttaaacaacttagctccaattttggtgcaatttcaagtgttttaaatgatatcctttcacgtcttgacaaagttgaggctgaagtgcaaattgataggttgatcacaggcagacttcaaagtttgcagacatatgtgactcaacaattaattagagctgcagaaatcagagcttctgctaatcttgctgctactaaaatgtcagagtgtgtacttggacaatcaaaaagagttgatttttgtggaaagggctatcatcttatgtccttccctcagtcagcacctcatggtgtagtcttcttgcatgtgacttatgtccctgcacaagaaaagaacttcacaactgctcctgccatttgtcatgatggaaaagcacactttcctcgtgaaggtgtctttgtttcaaatggcacacactggtttgtaacacaaaggaatttttatgaaccacaaatcattactacagacaacacatttgtgtctggtaactgtgatgttgtaataggaattgtcaacaacacagtttatgatcctttgcaacctgaattagactcattcaaggaggagttagataaatattttaagaatcatacatcaccagatgttgatttaggtgacatctctggcattaatgcttcagttgtaaacattcaaaaagaaattgaccgcctcaatgaggttgccaagaatttaaatgaatctctcatcgatctccaagaacttggaaagtatgagcagtatataaaatggccatggtacatttggctaggttttatagctggcttgattgccatagtaatggtgacaattatgctttgctgtatgaccagttgctgtagttgtctcaagggctgttgttcttgtggatcctgctgcaaatttgatgaagacgactctgagccagtgctcaaaggagtcaaattacattacacataaacgaacttatggatttgtttatgagaatcttcacaattggaactgtaactttgaagcaaggtgaaatcaaggatgctactccttcagattttgttcgcgctactgcaacgataccgatacaagcctcactccctttcggatggcttattgttggcgttgcacttcttgctgtttttcagagcgcttccaaaatcataaccctcaaaaagagatggcaactagcactctccaagggtgttcactttgtttgcaacttgctgttgttgtttgtaacagtttactcacaccttttgctcgttgctgctggccttgaagccccttttctctatctttatgctttagtctacttcttgcagagtataaactttgtaagaataataatgaggctttggctttgctggaaatgccgttccaaaaacccattactttatgatgccaactattttctttgctggcatactaattgttacgactattgtataccttacaatagtgtaacttcttcaattgtcattacttcaggtgatggcacaacaagtcctatttctgaacatgactaccagattggtggttatactgaaaaatgggaatctggagtaaaagactgtgttgtattacacagttacttcacttcagactattaccagctgtactcaactcaattgagtacagacactggtgttgaacatgttaccttcttcatctacaataaaattgttgatgagcctgaagaacatgtccaaattcacacaatcgacggttcatccggagttgttaatccagtaatggaaccaatttatgatgaaccgacgacgactactagcgtgcctttgtaagcacaagctgatgagtacgaacttatgtactcattcgtttcggaagagacaggtacgttaatagttaatagcgtacttctttttcttgctttcgtggtattcttgctagttacactagccatccttactgcgcttcgattgtgtgcgtactgctgcaatattgttaacgtgagtcttgtaaaaccttctttttacgtttactctcgtgttaaaaatctgaattcttctagagttcctgatcttctggtctaaacgaactaaatattatattagtttttctgtttggaactttaattttagccatggcagattccaacggtactattaccgttgaagagcttaaaaagctccttgaacaatggaacctagtaataggtttcctattccttacatggatttgtcttctacaatttgcctatgccaacaggaataggtttttgtatataattaagttaattttcctctggctgttatggccagtaactttagcttgttttgtgcttgctgctgtttacagaataaattggatcaccggtggaattgctatcgcaatggcttgtcttgtaggcttgatgtggctcagctacttcattgcttctttcagactgtttgcgcgtacgcgttccatgtggtcattcaatccagaaactaacattcttctcaacgtgccactccatggcactattctgaccagaccgcttctagaaagtgaactcgtaatcggagctgtgatccttcgtggacatcttcgtattgctggacaccatctaggacgctgtgacatcaaggacctgcctaaagaaatcactgttgctacatcacgaacgctttcttattacaaattgggagcttcgcagcgtgtagcaggtgactcaggttttgctgcatacagtcgctacaggattggcaactataaattaaacacagaccattccagtagcagtgacaatattgctttgcttgtacagtaagtgacaacagatgtttcatctcgttgactttcaggttactatagcagagatattactaattattatgaggacttttaaagtttccatttggaatcttgattacatcataaacctcataattaaaaatttatctaagtcactaactgagaataaatattctcaattagatgaagagcaaccaatggagattgattaaacgaacatgaaaattattcttttcttggcactgataacactcgctacttgtgagctttatcactaccaagagtgtgttagaggtacaacagtacttttaaaagaaccttgctcttctggaacatacgagggcaattcaccatttcatcctctagctgataacaaatttgcactgacttgctttagcactcaatttgcttttgcttgtcctgacggcgtaaaacacgtctatcagttacgtgccagatcagtttcacctaaactgttcatcagacaagaggaagttcaagaactttactctccaatttttcttattgttgcggcaatagtgtttataacactttgcttcacactcaaaagaaagacagaatgattgaactttcattaattgacttctatttgtgctttttagcctttctgctattccttgttttaattatgcttattatcttttggttctcacttgaactgcaagatcataatgaaacttgtcacgcctaaacgaacatgaaatttcttgttttcttaggaatcatcacaactgtagctgcatttcaccaagaatgtagtttacagtcatgtactcaacatcaaccatatgtagttgatgacccgtgtcctattcacttctattctaaatggtatattagagtaggagctagaaaatcagcacctttaattgaattgtgcgtggatgaggctggttctaaatcacccattcagtacatcgatatcggtaattatacagtttcctgtttaccttttacaattaattgccaggaacctaaattgggtagtcttgtagtgcgttgttcgttctatgaagactttttagagtatcatgacgttcgtgttgttttagatttcatctaaacgaacaaactaaaatgtctgataatggaccccaaaatcagcgaaatgcaccccgcattacgtttggtggaccctcagattcaactggcagtaaccagaatggagaacgcagtggggcgcgatcaaaacaacgtcggccccaaggtttacccaataatactgcgtcttggttcaccgctctcactcaacatggcaaggaagaccttaaattccctcgaggacaaggcgttccaattaacaccaatagcagtccagatgaccaaattggctactaccgaagagctaccagacgaattcgtggtggtgacggtaaaatgaaagatctcagtccaagatggtatttctactacctaggaactgggccagaagctggacttccctatggtgctaacaaagacggcatcatatgggttgcaactgagggagccttgaatacaccaaaagatcacattggcacccgcaatcctgctaacaatgctgcaatcgtgctacaacttcctcaaggaacaacattgccaaaaggcttctacgcagaagggagcagaggcggcagtcaagcctcttctcgttcctcatcacgtagtcgcaacagttcaagaaattcaactccaggcagcagtaggggaacttctcctgctagaatggctggcaatggcggtgatgctgctcttgctttgctgctgcttgacagattgaaccagcttgagagcaaaatgtctggtaaaggccaacaacaacaaggccaaactgtcactaagaaatctgctgctgaggcttctaagaagcctcggcaaaaacgtactgccactaaagcatacaatgtaacacaagctttcggcagacgtggtccagaacaaacccaaggaaattttggggaccaggaactaatcagacaaggaactgattacaaacattggccgcaaattgcacaatttgcccccagcgcttcagcgttcttcggaatgtcgcgcattggcatggaagtcacaccttcgggaacgtggttgacctacacaggtgccatcaaattggatgacaaagatccaaatttcaaagatcaagtcattttgctgaataagcatattgacgcatacaaaacattcccaccaacagagcctaaaaaggacaaaaagaagaaggctgatgaaactcaagccttaccgcagagacagaagaaacagcaaactgtgactcttcttcctgctgcagatttggatgatttctccaaacaattgcaacaatccatgagcagtgctgactcaactcaggcctaaactcatgcagaccacacaaggcagatgggctatataaacgttttcgcttttccgtttacgatatatagtctactcttgtgcagaatgaattctcgtaactacatagcacaagtagatgtagttaactttaatctcacatagcaatctttaatcagtgtgtaacattagggaggacttgaaagagccaccacattttcaccgaggccacgcggagtacgatcgagtgtacagtgaacaatgctagggagagctgcctatatggaagagccctaatgtgtaaaattaattttagtagtgctatccccatgtgattttaatagcttcttaggagaatgacaaaaaaaaaaaaaaaaaaaaaaaaaaaaaaaaa

SEQ ID NO: 77 - DNA, 7912 bp, synthetic construct
  source 1..7912: mol_type = other DNA
taatacgactcactataatgggcggcgcatgagagaagcccagaccaattacctacccaaaatggagaaagttcacgttgacatcgaggaagacagcccattcctcagagctttgcagcggagcttcccgcagtttgaggtagaagccaagcaggtcactgataatgaccatgctaatgccagagcgttttcgcatctggcttcaaaactgatcgaaacggaggtggacccatccgacacgatccttgacattggaagtgcgcccgcccgcagaatgtattctaagcacaagtatcattgtatctgtccgatgagatgtgcggaagatccggacagattgtataagtatgcaactaagctgaagaaaaactgtaaggaaataactgataaggaattggacaagaaaatgaaggagctcgccgccgtcatgagcgaccctgacctggaaactgagactatgtgcctccacgacgacgagtcgtgtcgctacgaagggcaagtcgctgtttaccaggatgtatacgcggttgacggaccgacaagtctctatcaccaagccaataagggagttagagtcgcctactggataggctttgacaccaccccttttatgtttaagaacttggctggagcatatccatcatactctaccaactgggccgacgaaaccgtgttaacggctcgtaacataggcctatgcagctctgacgttatggagcggtcacgtagagggatgtccattcttagaaagaagtatttgaaaccatccaacaatgttctattctctgttggctcgaccatctaccacgagaagagggacttactgaggagctggcacctgccgtctgtatttcacttacgtggcaagcaaaattacacatgtcggtgtgagactatagttagttgcgacgggtacgtcgttaaaagaatagctatcagtccaggcctgtatgggaagccttcaggctatgctgctacgatgcaccgcgagggattcttgtgctgcaaagtgacagacacattgaacggggagagggtctcttttcccgtgtgcacgtatgtgccagctacattgtgtgaccaaatgactggcatactggcaacagatgtcagtgcggacgacgcgcaaaaactgctggttgggctcaaccagcgtatagtcgtcaacggtcgcacccagagaaacaccaataccatgaaaaattaccttttgcccgtagtggcccaggcatttgctaggtgggcaaaggaatataaggaagatcaagaagatgaaaggccactaggactacgagatagacagttagtcatggggtgttgttgggcttttagaaggcacaagataacatctatttataagcgcccggatacccaaaccatcatcaaagtgaacagcgatttccactcattcgtgctgcccaggataggcagtaacacattggagatcgggctgagaacaagaatcaggaaaatgttagaggagcacaaggagccgtcacctctcattaccgccgaggacgtacaagaagctaagtgcgcagccgatgaggctaaggaggtgcgtgaagccgaggagttgcgcgcagctctaccacctttggcagctgatgttgaggagcccactctggaagccgatgtcgacttgatgttacaagaggctggggccggctcagtggagacacctcgtggcttgataaaggttaccagctacgctggcgaggacaagatcggctcttacgctgtgctttctccgcaggctgtactcaagagtgaaaaattatcttgcatccaccctctcgctgaacaagtcatagtgataacacactctggccgaaaagggcgttatgccgtggaaccataccatggtaaagtagtggtgccagagggacatgcaatacccgtccaggactttcaagctctgagtgaaagtgccaccattgtgtacaacgaacgtgagttcgtaaacaggtacctgcaccatattgccacacatggaggagcgctgaacactgatgaagaatattacaaaactgtcaagcccagcgagcacgacggcgaatacctgtacgacatcgacaggaaacagtgcgtcaagaaagaactagtcactgggctagggctcacaggcgagctggtggatcctcccttccatgaattcgcctacgagagtctgagaacacgaccagccgctccttaccaagtaccaaccataggggtgtatggcgtgccaggatcaggcaagtctggcatcattaaaagcgcagtcaccaaaaaagatctagtggtgagcgccaagaaagaaaactgtgcagaaattataagggacgtcaagaaaatgaaagggctggacgtcaatgccagaactgtggactcagtgctcttgaatggatgcaaacaccccgtagagaccctgtatattgacgaagcttttgcttgtcatgcaggtactctcagagcgctcatagccattataagacctaaaaaggcagtgctctgcggggatcccaaacagtgcggtttttttaacatgatgtgcctgaaagtgcattttaaccacgagatttgcacacaagtcttccacaaaagcatctctcgccgttgcactaaatctgtgacttcggtcgtctcaaccttgttttacgacaaaaaaatgagaacgacgaatccgaaagagactaagattgtgattgacactaccggcagtaccaaacctaagcaggacgatctcattctcacttgtttcagagggtgggtgaagcagttgcaaatagattacaaaggcaacgaaataatgacggcagctgcctctcaagggctgacccgtaaaggtgtgtatgccgttcggtacaaggtgaatgaaaatcctctgtacgcacccacctcagaacatgtgaacgtcctactgacccgcacggaggaccgcatcgtgtggaaaacactagccggcgacccatggataaaaacactgactgccaagtaccctgggaatttcactgccacgatagaggagtggcaagcagagcatgatgccatcatgaggcacatcttggagagaccggaccctaccgacgtcttccagaataaggcaaacgtgtgttgggccaaggctttagtgccggtgctgaagaccgctggcatagacatgaccactgaacaatggaacactgtggattattttgaaacggacaaagctcactcagcagagatagtattgaaccaactatgcgtgaggttctttggactcgatctggactccggtctattttctgcacccactgttccgttatccattaggaataatcactgggataactccccgtcgcctaacatgtacgggctgaataaagaagtggtccgtcagctctctcgcaggtacccacaactgcctcgggcagttgccactggaagagtctatgacatgaacactggtacactgcgcaattatgatccgcgcataaacctagtacctgtaaacagaagactgcctcatgctttagtcctccaccataatgaacacccacagagtgacttttcttcattcgtcagcaaattgaagggcagaactgtcctggtggtcggggaaaagttgtccgtcccaggcaaaatggttgactggttgtcagaccggcctgaggctaccttcagagctcggctggatttaggcatcccaggtgatgtgcccaaatatgacataatatttgttaatgtgaggaccccatataaataccatcactatcagcagtgtgaagaccatgccattaagcttagcatgttgaccaagaaagcttgtctgcatctgaatcccggcggaacctgtgtcagcataggttatggttacgctgacagggccagcgaaagcatcattggtgctatagcgcggcagttcaagttttcccgggtatgcaaaccgaaatcctcacttgaagagacggaagttctgtttgtattcattgggtacgatcgcaaggcccgtacgcacaatccttacaagctttcatcaaccttgaccaacatttatacaggttccagactccacgaagccggatgtgcaccctcatatcatgtggtgcgaggggatattgccacggccaccgaaggagtgattataaatgctgctaacagcaaaggacaacctggcggaggggtgtgcggagcgctgtataagaaattcccggaaagcttcgatttacagccgatcgaagtaggaaaagcgcgactggtcaaaggtgcagctaaacatatcattcatgccgtaggaccaaacttcaacaaagtttcggaggttgaaggtgacaaacagttggcagaggcttatgagtccatcgctaagattgtcaacgataacaattacaagtcagtagcgattccactgttgtccaccggcatcttttccgggaacaaagatcgactaacccaatcattgaaccatttgctgacagctttagacaccactgatgcagatgtagccatatactgcagggacaagaaatgggaaatgactctcaaggaagcagtggctaggagagaagcagtggaggagatatgcatatccgacgactcttcagtgacagaacctgatgcagagctggtgagggtgcatccgaagagttctttggctggaaggaagggctacagcacaagcgatggcaaaactttctcatatttggaagggaccaagtttcaccaggcggccaaggatatagcagaaattaatgccatgtggcccgttgcaacggaggccaatgagcaggtatgcatgtatatcctcggagaaagcatgagcagtattaggtcgaaatgccccgtcgaagagtcggaagcctccacaccacctagcacgctgccttgcttgtgcatccatgccatgactccagaaagagtacagcgcctaaaagcctcacgtccagaacaaattactgtgtgctcatcctttccattgccgaagtatagaatcactggtgtgcagaagatccaatgctcccagcctatattgttctcaccgaaagtgcctgcgtatattcatccaaggaagtatctcgtggaaacaccaccggtagacgagactccggagccatcggcagagaaccaatccacagaggggacacctgaacaaccaccacttataaccgaggatgagaccaggactagaacgcctgagccgatcatcatcgaagaggaagaagaggatagcataagtttgctgtcagatggcccgacccaccaggtgctgcaagtcgaggcagacattcacgggccgccctctgtatctagctcatcctggtccattcctcatgcatccgactttgatgtggacagtttatccatacttgacaccctggagggagctagcgtgaccagcggggcaacgtcagccgagactaactcttacttcgcaaagagtatggagtttctggcgcgaccggtgcctgcgcctcgaacagtattcaggaaccctccacatcccgctccgcgcacaagaacaccgtcacttgcacccagcagggcctgctcgagaaccagcctagtttccaccccgccaggcgtgaatagggtgatcactagagaggagctcgaggcgcttaccccgtcacgcactcctagcaggtcggtctcgagaaccagcctggtctccaacccgccaggcgtaaatagggtgattacaagagaggagtttgaggcgttcgtagcacaacaacaatgacggtttgatgcgggtgcatacatcttttcctccgacaccggtcaagggcatttacaacaaaaatcagtaaggcaaacggtgctatccgaagtggtgttggagaggaccgaattggagatttcgtatgccccgcgcctcgaccaagaaaaagaagaattactacgcaagaaattacagttaaatcccacacctgctaacagaagcagataccagtccaggaaggtggagaacatgaaagccataacagctagacgtattctgcaaggcctagggcattatttgaaggcagaaggaaaagtggagtgctaccgaaccctgcatcctgttcctttgtattcatctagtgtgaaccgtgccttttcaagccccaaggtcgcagtggaagcctgtaacgccatgttgaaagagaactttccgactgtggcttcttactgtattattccagagtacgatgcctatttggacatggttgacggagcttcatgctgcttagacactgccagtttttgccctgcaaagctgcgcagctttccaaagaaacactcctatttggaacccacaatacgatcggcagtgccttcagcgatccagaacacgctccagaacgtcctggcagctgccacaaaaagaaattgcaatgtcacgcaaatgagagaattgcccgtattggattcggcggcctttaatgtggaatgcttcaagaaatatgcgtgtaataatgaatattgggaaacgtttaaagaaaaccccatcaggcttactgaagaaaacgtggtaaattacattaccaaattaaaaggaccaaaagctgctgctctttttgcgaagacacataatttgaatatgttgcaggacataccaatggacaggtttgtaatggacttaaagagagacgtgaaagtgactccaggaacaaaacatactgaagaacggcccaaggtacaggtgatccaggctgccgatccgctagcaacagcgtatctgtgcggaatccaccgagagctggttaggagattaaatgcggtcctgcttccgaacattcatacactgtttgatatgtcggctgaagactttgacgctattatagccgagcacttccagcctggggattgtgttctggaaactgacatcgcgtcgtttgataaaagtgaggacgacgccatggctctgaccgcgttaatgattctggaagacttaggtgtggacgcagagctgttgacgctgattgaggcggctttcggcgaaatttcatcaatacatttgcccactaaaactaaatttaaattcggagccatgatgaaatctggaatgttcctcacactgtttgtgaacacagtcattaacattgtaatcgcaagcagagtgttgagagaacggctaaccggatcaccatgtgcagcattcattggagatgacaatatcgtgaaaggagtcaaatcggacaaattaatggcagacaggtgcgccacctggttgaatatggaagtcaagattatagatgctgtggtgggcgagaaagcgccttatttctgtggagggtttattttgtgtgactccgtgaccggcacagcgtgccgtgtggcagaccccctaaaaaggctgtttaagcttggcaaacctctggcagcagacgatgaacatgatgatgacaggagaagggcattgcatgaagagtcaacacgctggaaccgagtgggtattctttcagagctgtgcaaggcagtagaatcaaggtatgaaaccgtaggaacttccatcatagttatggccatgactactctagctagcagtgttaaatcattcagctacctgagaggggcccctataactctctacggctaacctgaatggactacgacttatcacgcccaaacatttacagccgcggtgtcaaaaaccgcgtggacgtggttaacatccctgctgggaggatcagccgtaattattataattggcttggtgctggctactattgtggccatgtacgtgctgaccaaccagaaacataattgaatacagcagcaattggcaagctgcttacatagaactcgcggcgattggcatgccgccttaaaatttttattttattttttcttttcttttccgaatcggattttgtttttaatatttcaaaaaaaaaaaaaaaaaaaaaaaaaaaaaaaaaaaaaaaaaaaaaaaaaaaaaaaaaaaaaaaaaaaaaaaaaaaaaaaa

SEQ ID NO: 78 - DNA, 3822 bp, Severe acute respiratory syndrome coronavirus 2
  source 1..3822: mol_type = genomic DNA
atgtttgtttttcttgttttattgccactagtctctagtcagtgtgttaatcttacaaccagaactcaattaccccctgcatacactaattctttcacacgtggtgtttattaccctgacaaagttttcagatcctcagttttacattcaactcaggacttgttcttacctttcttttccaatgttacttggttccatgctatacatgtctctgggaccaatggtactaagaggtttgataaccctgtcctaccatttaatgatggtgtttattttgcttccactgagaagtctaacataataagaggctggatttttggtactactttagattcgaagacccagtccctacttattgttaataacgctactaatgttgttattaaagtctgtgaatttcaattttgtaatgatccatttttgggtgtttattaccacaaaaacaacaaaagttggatggaaagtgagttcagagtttattctagtgcgaataattgcacttttgaatatgtctctcagccttttcttatggaccttgaaggaaaacagggtaatttcaaaaatcttagggaatttgtgtttaagaatattgatggttattttaaaatatattctaagcacacgcctattaatttagtgcgtgatctccctcagggtttttcggctttagaaccattggtagatttgccaataggtattaacatcactaggtttcaaactttacttgctttacatagaagttatttgactcctggtgattcttcttcaggttggacagctggtgctgcagcttattatgtgggttatcttcaacctaggacttttctattaaaatataatgaaaatggaaccattacagatgctgtagactgtgcacttgaccctctctcagaaacaaagtgtacgttgaaatccttcactgtagaaaaaggaatctatcaaacttctaactttagagtccaaccaacagaatctattgttagatttcctaatattacaaacttgtgcccttttggtgaagtttttaacgccaccagatttgcatctgtttatgcttggaacaggaagagaatcagcaactgtgttgctgattattctgtcctatataattccgcatcattttccacttttaagtgttatggagtgtctcctactaaattaaatgatctctgctttactaatgtctatgcagattcatttgtaattagaggtgatgaagtcagacaaatcgctccagggcaaactggaaagattgctgattataattataaattaccagatgattttacaggctgcgttatagcttggaattctaacaatcttgattctaaggttggtggtaattataattacctgtatagattgtttaggaagtctaatctcaaaccttttgagagagatatttcaactgaaatctatcaggccggtagcacaccttgtaatggtgttgaaggttttaattgttactttcctttacaatcatatggtttccaacccactaatggtgttggttaccaaccatacagagtagtagtactttcttttgaacttctacatgcaccagcaactgtttgtggacctaaaaagtctactaatttggttaaaaacaaatgtgtcaatttcaacttcaatggtttaacaggcacaggtgttcttactgagtctaacaaaaagtttctgcctttccaacaatttggcagagacattgctgacactactgatgctgtccgtgatccacagacacttgagattcttgacattacaccatgttcttttggtggtgtcagtgttataacaccaggaacaaatacttctaaccaggttgctgttctttatcaggatgttaactgcacagaagtccctgttgctattcatgcagatcaacttactcctacttggcgtgtttattctacaggttctaatgtttttcaaacacgtgcaggctgtttaataggggctgaacatgtcaacaactcatatgagtgtgacatacccattggtgcaggtatatgcgctagttatcagactcagactaattctcctcggcgggcacgtagtgtagctagtcaatccatcattgcctacactatgtcacttggtgcagaaaattcagttgcttactctaataactctattgccatacccacaaattttactattagtgttaccacagaaattctaccagtgtctatgaccaagacatcagtagattgtacaatgtacatttgtggtgattcaactgaatgcagcaatcttttgttgcaatatggcagtttttgtacacaattaaaccgtgctttaactggaatagctgttgaacaagacaaaaacacccaagaagtttttgcacaagtcaaacaaatttacaaaacaccaccaattaaagattttggtggttttaatttttcacaaatattaccagatccatcaaaaccaagcaagaggtcatttattgaagatctacttttcaacaaagtgacacttgcagatgctggcttcatcaaacaatatggtgattgccttggtgatattgctgctagagacctcatttgtgcacaaaagtttaacggccttactgttttgccacctttgctcacagatgaaatgattgctcaatacacttctgcactgttagcgggtacaatcacttctggttggacctttggtgcaggtgctgcattacaaataccatttgctatgcaaatggcttataggtttaatggtattggagttacacagaatgttctctatgagaaccaaaaattgattgccaaccaatttaatagtgctattggcaaaattcaagactcactttcttccacagcaagtgcacttggaaaacttcaagatgtggtcaaccaaaatgcacaagctttaaacacgcttgttaaacaacttagctccaattttggtgcaatttcaagtgttttaaatgatatcctttcacgtcttgacaaagttgaggctgaagtgcaaattgataggttgatcacaggcagacttcaaagtttgcagacatatgtgactcaacaattaattagagctgcagaaatcagagcttctgctaatcttgctgctactaaaatgtcagagtgtgtacttggacaatcaaaaagagttgatttttgtggaaagggctatcatcttatgtccttccctcagtcagcacctcatggtgtagtcttcttgcatgtgacttatgtccctgcacaagaaaagaacttcacaactgctcctgccatttgtcatgatggaaaagcacactttcctcgtgaaggtgtctttgtttcaaatggcacacactggtttgtaacacaaaggaatttttatgaaccacaaatcattactacagacaacacatttgtgtctggtaactgtgatgttgtaataggaattgtcaacaacacagtttatgatcctttgcaacctgaattagactcattcaaggaggagttagataaatattttaagaatcatacatcaccagatgttgatttaggtgacatctctggcattaatgcttcagttgtaaacattcaaaaagaaattgaccgcctcaatgaggttgccaagaatttaaatgaatctctcatcgatctccaagaacttggaaagtatgagcagtatataaaatggccatggtacatttggctaggttttatagctggcttgattgccatagtaatggtgacaattatgctttgctgtatgaccagttgctgtagttgtctcaagggctgttgttcttgtggatcctgctgcaaatttgatgaagacgactctgagccagtgctcaaaggagtcaaattacattacacataa

SEQ ID NO: 79 - DNA, 3822 bp, synthetic construct
  source 1..3822: mol_type = other DNA
atgtttgtcttcctggtcttgctgccgctggtgagcagccagtgcgtgaatctcaccacccgcacccagcttccacctgcctacactaacagcttcacccgaggggtgtattaccctgacaaggtattccggtcctccgtcctccatagcacgcaggacctttttctgcccttcttctcaaatgtgacatggttccatgccattcacgtgagcggcacgaatggaacgaagcgctttgataaccccgtgctgcctttcaatgacggcgtctacttcgcctccactgaaaagtcaaacatcatccggggctggatctttggcaccactcttgattcaaagacccagtcactgctgattgtgaacaatgctacaaacgtggttatcaaggtgtgtgagtttcagttctgtaacgatccatttttgggagtgtactaccacaagaacaacaagtcctggatggagtctgagttcagagtgtatagctctgctaacaactgcaccttcgagtacgtgtcccagcctttccttatggacctggaaggcaaacagggcaatttcaaaaacctgagagagttcgtgtttaagaacattgacggatacttcaaaatttattctaagcacacaccaattaacttagtgcgggacctaccccaaggctttagcgccctagagcccctggttgacctgcccattgggatcaatataacaaggttccaaactctactggctctgcatagaagttatctgaccccaggagacagctctagtggttggaccgccggcgcagcagcctactatgtcgggtacttacagccacgcacgttccttctgaagtacaatgagaacgggacaatcactgacgcagtagactgtgcactggacccgctaagcgagactaagtgcacacttaaatccttcacggtggagaaaggcatttatcagacctctaacttcagggtgcagccaacagaaagcattgtgcgattcccaaatattactaatctttgccctttcggggaggtctttaatgcaactagattcgcatcagtctatgcgtggaaccgcaaacgcatttccaattgtgtcgcagactactcagtgctgtacaactctgcctctttcagtacgttcaagtgttacggagtgtcacccactaaactgaacgacctgtgctttacaaatgtctacgctgactccttcgtgattaggggagacgaggtgagacaaattgcccccggacagactgggaagattgccgactacaattataagcttcctgatgatttcactggctgtgttattgcctggaatagtaacaatctggatagcaaggtgggaggcaactataactacttatatcgactgtttaggaagagtaatctgaaaccatttgagcgggatatttccacagaaatttaccaggccgggagcacaccatgtaatggggtggagggatttaattgttacttcccactccagagctatggtttccaacccaccaatggagtgggttaccagccctatagagtcgtggtgcttagttttgagctgcttcacgccccagcaaccgtctgcggtcccaaaaagtcgaccaatctcgtgaaaaacaaatgcgtaaacttcaactttaacggcttaacaggaaccggcgtgctcaccgaaagcaacaagaaattccttccatttcagcaattcggaagggacatcgccgacacaacagacgcggtgagggacccacagactctggagatactggacatcactccttgttcgtttgggggcgtctcggtcatcacacccgggactaatactagtaatcaggtagcagttttatatcaaggcgtcaactgtaccgaagtacctgtggccatacacgctgatcagctaacgccaacatggcgagtctattccaccggctctaacgtttttcagaccagggctgggtgcctgataggggcagagcacgtcaataattcctatgagtgtgatatccccataggtgcggggatctgtgccagctatcaaacccaaaccaattcaccaaggcgagcacggtctgtggcttctcagagcataattgcatatacaatgtcactgggcgctgagaatagcgttgcatactctaataacagcatagccattcccacgaactttactatcagtgtgacaaccgaaatattgccagtttcgatgaccaaaactagcgtggattgcacgatgtacatctgtggagactctaccgaatgcagcaatctgctattacaatatggcagcttctgtacacagttaaatcgagccttgacaggcatcgcagtggaacaggacaaaaatactcaagaggtgtttgcacaggtgaagcaaatctacaaaacgccccccattaaagattttggcgggttcaatttttcacaaattctccccgacccgtctaagccgagtaagcggtccttcatcgaagatctgctctttaacaaagtaaccctcgccgatgccggctttattaagcagtatggcgactgcctgggggatatagccgctcgtgacctgatttgcgcccagaagttcaatggtctgaccgtgttgcctcctttattgaccgatgaaatgattgcccagtacactagtgccctgctggccggcactatcacgtctgggtggaccttcggagctggtgccgccttgcagataccttttgcaatgcagatggcctataggtttaatggtatcggagtgactcagaacgtactgtacgagaaccagaagctcatcgctaatcaatttaactccgctatcggaaaaatccaggacagcctctcttctacagctagcgctctgggcaaactgcaggatgtcgttaatcagaatgcccaggccctgaacaccttggttaaacaactatcttccaacttcggggccatatccagtgtgttgaatgatattctctcccgcttggataaggtggaagctgaggtgcagatcgatcgcttgatcaccggcagactgcagtccctccagacatatgtaactcagcagctgattagagccgccgagataagggcaagtgcgaatctggctgccaccaagatgagcgaatgtgtattgggccagagcaaacgagttgatttttgcggtaaggggtatcatttaatgtctttccctcaatccgcacctcatggcgtagttttcctgcatgtgacttatgtcccggctcaggagaagaattttaccacagcccccgcgatctgccatgacggaaaggcccacttcccccgggaaggcgtgtttgtatccaatgggactcactggtttgtcactcagcgaaatttttatgaaccacagatcatcaccactgacaacacatttgttagtggaaactgcgatgtggtcatcggcatcgtgaataacactgtctatgatccactgcaacctgaactggattcttttaaagaggaactcgacaagtattttaaaaaccacactagccctgacgtggatctcggtgacatttctggcatcaacgctagcgtagtgaacattcagaaagagatagatagacttaatgaggtggccaagaacctcaacgaaagtctgatcgacctccaggaactggggaaatacgagcagtacattaaatggccttggtacatatggctggggttcattgctgggctgatcgcaatagtgatggtgaccataatgctctgttgcatgactagctgctgcagctgcctgaagggctgctgtagttgtgggtcatgttgtaagtttgacgaagatgatagcgagcctgtccttaaaggagtgaagctccactacacctag

SEQ ID NO: 80 - DNA, 3822 bp, synthetic construct
  source 1..3822: mol_type = other DNA
atgttcgtatttctggtgctgctgcccctagtgagctcccagtgcgtgaacctgaccaccagaacccagcttcctcccgcctacaccaatagcttcacaaggggagtgtactaccccgataaggttttccggtcgtctgtcttgcatagcactcaggacctctttctgccgttcttctctaacgtgacttggtttcacgccattcacgtgagcggtacaaacggaactaagaggtttgataaccctgttctcccatttaacgatggggtctacttcgccagcacggagaagtctaatatcatccgcgggtggattttcggcacgacactagacagtaagacccagtcacttttaatagttaataacgcgactaatgttgtgataaaagtatgtgaattccagttctgcaatgatccgtttctcggtgtatactaccataagaataataagtcttggatggagtccgaattccgtgtttactcgtcagctaataactgtacattcgagtacgtaagccaaccctttctgatggatctggagggtaaacagggaaactttaaaaacctaagggaatttgttttcaagaatattgacggatactttaagatctattccaagcatacccctataaacttggtgagagatctgccacagggcttttccgctctagagcccttggttgacttacctattggtatcaatattactagatttcaaacgctgcttgccctacatagatcttatttgaccccgggtgactcgagttccggctggaccgcaggtgcggcggcatactacgttggttacctgcagccgcgcacttttctcctcaaatacaatgagaatgggaccatcacggatgccgtcgactgcgcattagatccgctgtccgagaccaaatgcaccctaaaaagctttactgttgaaaagggtatttaccaaacgtctaatttccgcgtacaacccactgagtcgatagttcggttccccaatatcaccaatctatgccctttcggtgaagtctttaacgcaacacgtttcgcgtccgtttacgcctggaaccgtaagcggataagcaactgcgtggctgattatagtgtgctatataactctgcgtcctttagcactttcaaatgctatggagtatcccccacgaagctgaatgacttgtgttttacgaatgtttatgccgattcgttcgtcatacgtggagacgaggtgagacagatagctccaggccagactgggaaaatcgctgactacaactacaaacttcctgacgatttcacgggttgcgtgatagcatggaacagtaataacctagattcaaaagttggcggcaattataattatttgtatcgcctgttccgtaagtccaatttaaagccatttgagcgggatataagtacagaaatctaccaagcgggttcgacgccgtgtaacggagtagaaggctttaactgctattttccgttacagtcgtacgggttccagcctaccaacggcgtggggtaccagccgtatagagtcgtagtattgtcgtttgaactcctccatgccccagcgacggtatgtgggccgaagaaatccactaacttagtcaaaaacaagtgtgttaacttcaattttaacggcttaacggggacgggggtcctcacggagtcgaataagaaattcctaccattccagcaatttggtagggacatagccgacaccactgacgcggtgagggacccgcagacgctcgagatattagacataacgccttgctcgttcggtggtgtgagcgtcataactccgggaaccaatactagcaatcaggtagcggtattatatcagggagtaaattgtactgaggtacctgttgcgatccatgctgaccaattaacacccacgtggcgcgtctactccactggcagtaatgtatttcagactcgggccgggtgcctaataggagcagaacatgtaaataacagttacgagtgcgatataccgataggcgcagggatatgtgctagttaccagacacaaactaatagcccccgtagggcgcgctccgtagcgtcccagtctattatagcgtataccatgagcctcggggctgagaacagcgtagcatatagtaacaacagcatagcgattccgacgaacttcactatatccgtgacgactgagatcttgcctgtctcgatgactaagacaagcgtagactgtacgatgtatatctgcggtgatagtacggaatgcagcaacctcctattacagtacggctccttttgtacgcagctgaaccgcgcgttgacaggcattgcggtcgagcaggataaaaatacgcaggaggtcttcgcccaagttaagcagatatacaagacgccccccataaaggactttgggggatttaatttctcgcagatccttcccgatccctctaaacctagcaagcgttcgttcattgaggatttactttttaacaaggtgacgctggcagatgcaggcttcataaagcaatacggcgactgtctgggtgacatcgcagcccgtgacctgatttgtgcgcaaaaattcaatggcctgaccgtcctaccccctctgttgactgatgaaatgattgcacagtatacgtctgccctattagcaggtacaattacaagcggttggacgtttggagcaggggccgcgctacagatacctttcgctatgcagatggcgtataggttcaacggcattggggtcactcagaacgtgctttatgaaaaccagaaactgatagctaaccagttcaacagcgctataggcaaaatacaggactcgctctcctctacggcatcagccctaggtaagctccaagacgtcgtgaatcagaatgcccaggcgttaaataccttagtgaaacaactgtcgtccaacttcggcgcgatatcgtcggtacttaatgacattttgagcagacttgacaaggtcgaggccgaggtgcaaatcgatagacttatcacaggccgcttacagagtcttcaaacctacgtaactcagcagttgataagagcggcagagattagggcaagcgctaatctagccgctacaaagatgagtgaatgtgtcctaggccagtcgaagcgcgtcgatttctgtgggaaaggctatcatctcatgtcttttccccagtcggccccgcacggcgttgtattcctccacgtgacatatgttcccgcgcaagagaagaactttacgaccgcgcctgcgatctgtcatgacggtaaagcccactttcccagggagggcgttttcgtctcgaacgggactcactggttcgtgacccagcgtaacttctacgagccgcagataattaccacggacaatacgttcgtgtcgggtaattgtgacgtggtaatcggcatagtcaataatactgtctatgaccccttgcaaccagagttagactccttcaaagaagaattggacaagtattttaagaaccacacgtcgcctgacgtagatttgggcgacatctcgggtattaatgcatctgtagtgaacatccagaaagagatagataggttaaacgaagtagctaagaatttgaatgagagcctgattgatctacaagagttgggtaaatatgagcagtacataaagtggccgtggtatatttggctcggctttatagccggtcttatagctatagtgatggttacgattatgctgtgttgcatgactagttgctgtagctgcctgaagggctgctgttcatgcggctcatgttgtaaattcgatgaggatgacagtgaaccggtgcttaagggcgtaaagctacactatacctga

SEQ ID NO: 81 - DNA, 3822 bp, synthetic construct
  source 1..3822: mol_type = other DNA
atgttcgtgttcctagtgctgctgcctctggtgagcagtcagtgtgtgaacctgaccactagaacacagctccccccagcatacactaatagctttacccgcggcgtgtactaccctgacaaagtgttccggtctagcgtcctgcatagcacccaagacctgttcctgccattcttcagcaacgtgacctggttccacgccattcacgtgagtggcaccaatgggacaaaaaggtttgacaatcccgtcctcccctttaatgatggggtctacttcgcctctactgagaaatctaatattatccgggggtggattttcggaaccactttagattcaaagacacagagcttgttgatagtgaataatgcaaccaacgtggtaatcaaagtctgtgaattccagttctgcaacgacccgttcctgggagtttattaccacaagaataataagtcctggatggagtcagaattcagagtgtatagcagcgccaataattgcacttttgagtacgtgagccagcccttcctgatggaccttgaaggaaaacagggcaacttcaagaacctgcgagagtttgtgtttaaaaacatcgacggctactttaaaatctattctaaacatactccaatcaacctcgtaagagatctgccacagggcttcagcgctctggagcccctcgtggacctcccgatcggcattaacatcactcggttccaaaccctgctggctcttcaccgcagctatttgactcctggggatagtagtagcggctggaccgccggcgcagccgcctattatgtgggctacctgcagcccaggacattcctgcttaaatataatgagaacggcaccattacagacgccgtggattgtgctctagatcccctgtcagagactaagtgcacactgaagtctttcacagttgagaagggaatttatcagacctctaatttccgcgtccagcctaccgagtccattgtcagatttcctaatataaccaatctttgtccattcggagaagtttttaatgccacccggttcgcatctgtctacgcctggaatagaaaaaggattagcaattgtgtggctgattattcagtcttgtacaattcagcatccttctccacctttaaatgctacggtgtgtcacctaccaagctgaatgatctttgcttcactaacgtttatgccgattcttttgtgatcaggggcgatgaggtgcgacagatcgcccctggccagactggcaaaattgcagactacaattacaagctgccagatgatttcaccggctgtgtaatcgcttggaactcaaacaaccttgatagcaaagtaggaggaaattataattacctttatagactgttcaggaagagcaacttgaagcctttcgagcgggatatttcaactgagatctaccaggctggaagcaccccctgtaatggtgtcgaggggtttaactgctattttcctcttcagtcctatggattccagccgaccaacggagtggggtaccagccttacagagtggtggtgctctcatttgaactcttgcatgcaccagccaccgtgtgcggaccgaagaagtctactaacctggtgaagaacaaatgcgtcaattttaatttcaatggtctaacgggtacaggagtgctcactgagtctaacaagaagttccttccctttcaacaatttggccgggacatagccgataccacagatgctgtgagagacccccagactctcgaaatcctggacataactccttgcagctttggtggggtgtcggttattacaccagggactaataccagcaaccaggtcgccgtgttgtatcagggtgtcaactgtacagaggtgccagtggcaattcacgcagatcagctgacccctacctggcgggtttacagcacaggcagcaatgtgtttcagacccgggccggatgcctgattggcgccgagcatgtcaacaacagttacgaatgtgacataccaataggcgctggcatttgtgcatcttaccagacccagacaaattctcccagaagggcccgtagcgtcgctagccagtccataatagcctacactatgtctctgggggctgagaactctgtggcgtattcaaataattcaattgccatcccaactaacttcacaattagtgtcacaaccgagattcttcctgtgtctatgaccaaaacaagtgtggactgcacaatgtacatatgcggggacagcactgaatgttccaacctcttgctccagtacgggtctttctgtacccagctgaaccgagccctgactgggattgcggtggaacaggataagaatactcaggaggtctttgcgcaggtaaagcagatttacaaaaccccccccattaaagactttgggggttttaacttttctcagatacttcccgacccctctaagccatccaagaggtccttcattgaggatcttctgtttaataaggtcacattagctgatgccggcttcattaagcaatatggcgactgtctgggtgacattgctgctagagacctgatttgcgcccagaaattcaacggactgactgtcctgccgcctctgctgaccgatgaaatgattgcccaatacacctcagccctgctcgccggaacgattactagcggatggacatttggggcaggggcagcactccaaattccatttgccatgcagatggcttatcgctttaacggcatcggcgtcactcagaatgtcctctatgaaaatcagaagctcattgcaaatcaatttaattccgcaattggaaagattcaggacagcctctcttccactgcctccgcactggggaagctgcaggacgttgtcaaccagaacgctcaggctttgaacactctcgtgaaacagctgagctcaaatttcggcgctatctcctccgtgttaaatgacattttgtcacggttagataaagtggaggccgaggttcagattgaccgcctcattaccgggagattgcagtctctgcagacctacgtgacacagcagttaatccgagctgctgagataagagccagtgccaacctggctgccacgaagatgtcggagtgtgttctgggccagagcaaaagggtggacttctgcgggaaggggtatcatctcatgagcttccctcagtctgcaccccacggggtggtttttctgcacgtcacttacgtcccagctcaagagaaaaattttaccaccgccccggcaatctgtcatgatggcaaggcccactttccccgggagggcgtttttgtaagtaatggaacacactggtttgtgactcagagaaatttctacgaaccccagatcattacgactgacaacaccttcgtgtcaggaaactgtgatgtcgtcattggaatcgtgaacaacactgtgtatgaccctctacagcccgagttggactcctttaaggaggagctggacaagtacttcaaaaatcacacgagtcccgatgttgatttgggcgatatctcaggcatcaacgcctccgtcgtgaatatccaaaaggaaatagatcgtcttaacgaggtggcaaagaatctgaacgaaagccttattgacttacaggaactgggaaagtacgaacagtacattaagtggccctggtacatctggctcggatttattgctggattgattgctatcgtgatggtcaccatcatgttgtgctgcatgacgtcctgttgctcctgccttaagggctgttgtagctgtggaagttgctgcaagtttgatgaagacgacagtgagcctgtgctcaagggggtgaagctccactacacatga

SEQ ID NO: 82 - DNA, 3822 bp, synthetic construct
  source 1..3822: mol_type = other DNA
atgtttgttttcctggtgctgcttccactagtgtcctcccagtgcgtgaaccttaccactagaacacaactccccccagcttacactaatagcttcactaggggagtgtactacccagataaagtgttccgctcctctgtgctgcatagcactcaggacctgtttctgcctttcttctctaacgttacttggttccacgccatccacgtgagtgggaccaacggcaccaagcggtttgataaccccgtcctgccatttaatgacggtgtttactttgccagcactgaaaagtctaacatcatccgtggttggatcttcggtaccacactggactctaaaacccagtcactgctgattgtgaataacgccacaaacgtggtgatcaaggtgtgcgagtttcagttctgcaatgacccattccttggcgtctactaccataaaaacaataagtcctggatggagagcgaatttagagtttactcctcagctaataattgtacctttgagtatgtttcccagcccttcctgatggatctcgaaggcaaacagggaaacttcaagaacctaagagagtttgtgtttaaaaatatcgacgggtatttcaaaatctacagcaagcatacccctatcaatctggtcagggacttgccacaggggttctctgccctggagcctctcgtcgaccttccaattggtatcaacattactagattccagaccttgctggcactccacaggagttaccttacaccaggcgattcatcgagcggctggacagccggcgctgcagcctattacgtcggctatctgcaaccccgaacattcctcctaaaatataacgagaatggaacaatcaccgatgctgtcgattgtgcgctggaccccctgtctgagactaagtgcaccttgaaatcctttacggtggaaaaaggcatatatcaaacctccaacttcagagttcagcctacagagtccattgtccggtttcctaatattaccaacctatgcccctttggagaggtcttcaatgccaccaggttcgcgtctgtgtacgcttggaataggaagaggataagtaactgtgtcgcagactatagcgtcctgtataattccgccagcttctccaccttcaagtgctacggggtgagcccaaccaaactgaatgatctgtgttttactaacgtgtatgccgactcgttcgttattcgcggtgatgaagttaggcagatagccccaggccagaccggaaagatcgccgattacaattacaaattacctgacgacttcaccgggtgtgttattgcctggaacagcaataacctcgatagtaaagttggaggtaattataactacctatatagactctttagaaaaagtaacctcaagccttttgaaagagacattagcaccgagatctaccaggcaggctcaacgccatgtaacggggtcgagggattcaactgctacttcccacttcagtcttacgggttccagccaactaacggagtgggctatcagccttatagggtggtcgtgctaagttttgagctcctccacgctcccgcaacagtgtgcggccctaaaaagagtaccaacttggtgaagaataagtgcgttaatttcaattttaatggccttaccggaaccggagtcctgacagaatctaataagaagtttttaccattccagcagttcgggcgcgacatagccgacaccaccgacgcagtgcgagacccccagacattggaaatcttggatatcacaccatgcagtttcggcggggtctcagtgatcactcctgggactaacacaagcaaccaggtagccgtgctgtatcagggtgttaactgtactgaagtgcccgtggcaatccatgctgatcagctgacacccacttggagggtgtacagcaccggcagcaatgtttttcagacacgcgcaggctgcctaatcggcgccgagcacgtaaataattcatacgagtgcgatatacctatcggggctggcatttgtgccagctaccagacacagaccaactcacctagacgcgcacggtctgtcgcctcacaaagcataattgcttataccatgtccttaggagccgagaactccgtcgcgtattccaacaatagcattgcgatccctaccaatttcactataagcgttactactgaaattcttcccgtctccatgacaaaaacctctgttgactgcactatgtatatctgtggggattccactgagtgtagtaatctcctgctgcagtacggatccttctgcacacagctgaaccgggccctgactgggattgcagttgagcaggacaagaatacccaggaagtcttcgcccaggtcaagcaaatctataaaacacctcccatcaaagattttggggggtttaactttagtcagatcctgcccgaccctagtaaaccctctaaacgctcatttattgaggacttactttttaacaaagtcactcttgctgacgccggctttatcaagcagtatggagactgtttgggcgacattgccgcccgggaccttatctgcgcccagaaattcaacgggctaaccgttctcccgcccctactgactgacgagatgatcgctcagtatacgtctgcactgctagcaggtaccatcactagcggatggacctttggcgcaggagcagccctccagatcccattcgctatgcagatggcctaccgttttaacggtatcggcgtaactcagaatgtgctctatgagaaccagaagctaattgccaatcagtttaattcagctataggcaaaattcaggatagcttatccagtacagcctccgcccttggcaaactgcaggatgtggtgaatcagaacgcacaggcccttaatacactggtgaaacagctctcatcaaatttcggggcaatttccagcgttttgaatgacatcctctctcgactggacaaggtggaggcagaggtgcagattgatcggctcatcaccggccgcctgcagtccttgcagacatatgttacacaacagttgatcagagctgccgaaataagagcctcagcaaacctggccgccactaaaatgagtgagtgcgtcctcggccagtcaaagcgggtggatttttgtgggaagggctaccacctgatgagcttcccgcagtcagccccacacggcgtggtgttcctgcatgtgacctatgtgcctgcccaggagaagaactttacaaccgccccagccatctgtcatgatggtaaggctcactttccaagggagggcgtgttcgtgtcaaatgggacccactggtttgtgacccaaaggaatttttacgaaccccagattatcacaactgacaacacttttgtgtctggcaactgcgacgtcgtcatcggcattgtcaataacaccgtgtacgaccctctccagcccgagcttgatagtttcaaggaggaactcgacaaatactttaagaaccacacctcaccggatgttgacctgggagacatcagcggcattaacgcttccgtcgttaatatccagaaggaaatcgatcgtttgaacgaggtggccaaaaatctgaacgaaagcctaattgatctccaggaactggggaaatatgagcagtacataaaatggccctggtacatctggcttgggttcatcgctggcctcattgccattgtgatggtgacaatcatgctttgttgtatgaccagttgctgctcgtgccttaagggttgttgttcttgcggaagctgctgtaagttcgatgaggacgatagcgagccagtgcttaaaggcgtgaagcttcattatacatga

SEQ ID NO: 83 - DNA, 3822 bp, synthetic construct
  source 1..3822: mol_type = other DNA
atgtttgtgttcttggtgctgctacccctggtgagtagccagtgcgtgaacctgactactaggacacagctgccccccgcctataccaactcctttacaaggggcgtgtactaccctgacaaggtattcagaagcagtgtgctgcacagcactcaggatctctttctgccattcttcagcaatgtgacttggttccatgccatccacgtgagcggaaccaacgggacaaaacggtttgacaaccctgtgcttcctttcaatgatggtgtctactttgcctccactgagaaatccaatatcatccgcggctggatcttcgggaccacactcgattctaaaacacagtcactgctgattgtgaataatgctactaatgttgtgatcaaggtctgtgaattccagttttgcaatgatcctttcctgggagtatactatcataaaaacaacaagtcttggatggagagtgagttccgcgtctatagctccgcaaacaattgtacctttgagtacgtgtcacagccttttctaatggacttagagggaaaacaggggaattttaaaaacctgagagagttcgtcttcaagaatattgatggctatttcaagatctactccaaacacacacctatcaacttggtccgcgatctacctcagggattctcagccttagaacctctggtagatcttcccatagggatcaacataacccggttccagaccttactcgccctgcataggagttacctgacccccggagactcttcgtccggatggacagccggcgctgccgcatattacgtgggctacctccagcccagaacttttctgcttaagtataatgaaaatggaacaataaccgatgcagtggattgtgccctggaccccctgtccgagaccaagtgcactctgaaaagctttaccgtggaaaaaggaatttaccaaacctcaaattttcgagtgcagcctacagagagcattgttagatttcctaacatcactaacctatgtccatttggagaagtgtttaatgccactcggttcgcttccgtttatgcatggaatcggaaacggataagcaactgtgtcgcagactacagcgtgttgtacaacagcgcttcttttagtactttcaagtgttacggagtcagtccaactaaactcaacgacctatgcttcaccaacgtctacgccgacagctttgttattagaggagacgaggtgaggcagattgctccaggtcagaccggcaagatcgccgactacaattacaagctgcctgatgattttaccgggtgcgttattgcctggaactccaacaatttggattcaaaggttgggggtaactataactatctgtacagactgtttagaaagtctaacttgaagccatttgaacgtgacatctctacagaaatatatcaggcgggaagcacgccatgtaacggggtggaggggttcaactgctattttccactgcagtcttacggttttcagcccaccaatggtgtggggtaccagccatatagggtggtggtcctgagtttcgagctcctgcacgcacctgccacagtctgtggccctaagaagagcaccaatcttgtgaagaataagtgcgtcaacttcaactttaatgggctaactggtacaggcgtgctgaccgaatcgaacaaaaagttcctccccttccaacagtttggtagagacatcgcagataccacagacgccgtgcgggatcctcagaccctcgagattctcgatatcacgccttgctcctttggcggagtctccgtgattacgccaggaacaaatacttctaaccaggtggccgtgctttatcagggggtgaattgcaccgaagtgcctgtcgctattcatgcagaccagctgactccgacctggagggtgtattcaacaggatcgaacgtatttcagactcgcgctggttgccttattggggccgagcacgtcaataacagttatgagtgcgacatccctatcggggctggcatctgcgcatcgtaccagacacagactaactctcctaggagagcccgttccgtcgcatctcagtctatcatcgcctacactatgtctctgggagccgagaatagcgtggcctatagtaataattctattgcgatacctacgaacttcactatcagtgtgacgaccgaaattctgcccgtgtccatgaccaagacaagcgttgactgcaccatgtacatctgtggtgactctaccgagtgctccaacctgcttttacagtacggctcattttgtacacagttgaaccgcgcactcaccggaatcgctgtggagcaagataaaaatacgcaggaagtcttcgctcaagttaagcagatttataagactcccccaatcaaagacttcggcggcttcaattttagtcagatactgccagatcctagcaagcccagcaagaggtccttcattgaagatctccttttcaacaaggtgactttggctgacgctggcttcatcaagcagtatggagactgtctgggcgacatagccgcacgagacctgatttgtgcgcagaaattcaacgggctgacagtgctaccacctttactgactgatgaaatgatcgcccagtacaccagtgctctattggcaggaactatcacttctggttggacctttggggcaggcgccgctcttcagattccttttgctatgcagatggcataccgctttaacggcataggtgttacccagaatgtgctgtatgagaaccagaagctcattgcgaatcagtttaactcagccattgggaagatccaggattcactgtccagtactgcgtcagcattaggaaagctgcaagatgtagtgaatcagaacgcacaggctctgaatacactcgtgaaacaactctcttctaatttcggggcaatcagctccgtactgaatgatatcttgagtagactggacaaagtggaggctgaggtgcagatcgataggctgatcacaggccgcctccagagtctgcagacttacgtgacccagcagctcatccgggccgccgagatcagagcttcagccaatctggccgccacaaaaatgtcagagtgtgtgttaggccagagtaagcgggtagacttctgtggaaagggttaccatctgatgagctttccacagagcgccccccatggagttgtttttcttcatgtgacatacgtaccggcccaggaaaagaatttcaccacagcccctgcaatttgccatgacgggaaggcccacttccctcgggagggagtgttcgtgagcaacggaacccactggtttgtaacacagcgcaatttttacgaaccccagattatcaccaccgataatacattcgtttccggcaattgtgacgtggtcataggtatcgttaataacaccgtgtatgacccgttgcagcccgaattggactccttcaaggaagaactcgataagtacttcaaaaatcacacctccccggatgtggatttaggcgatataagcggaatcaatgctagtgtcgtgaatatccagaaagagatagacagattgaatgaagtggccaagaaccttaatgagtccctgatcgacctgcaggagttgggcaaatacgagcagtacatcaaatggccctggtatatctggctgggctttattgctggactgatcgcaatcgtcatggtgaccatcatgctctgctgcatgacctcctgctgctcatgcctgaagggctgttgttcctgcgggtcttgttgtaaatttgatgaagacgacagtgagccagtattgaaaggcgtaaaacttcattatacatga

SEQ ID NO: 84 - DNA, 3822 bp, synthetic construct
  source 1..3822: mol_type = other DNA
atgttcgtgttccttgtcctcctcccgttggtaagtagtcaatgtgtaaacctcaccactcggacacaactacccccggcatacacaaactcgttcacacggggcgtatattaccccgacaaagtttttaggagctctgttctacattccacacaagacctgtttctaccatttttcagcaatgtcacatggttccatgcaatacacgtgtctggtacaaacggcaccaagcgcttcgacaatcctgtgcttcccttcaacgacggggtttactttgcgagtaccgaaaagtccaatatcattcgcggctggatattcggaacaaccctagactctaagacacagagcttactgattgtaaataatgctacgaacgtcgtcattaaagtgtgcgaatttcagttctgcaatgaccccttcctcggcgtgtattatcacaaaaataacaagtcatggatggaaagcgaattccgagtctactcaagtgccaacaactgcaccttcgagtacgtttcacagccgtttctgatggacctagaaggaaagcaaggaaatttcaaaaaccttagagagtttgtgtttaagaatattgatggatactttaaaatatattcaaaacatacacccatcaacctcgtcagggatctccctcaggggttcagcgcattagagcctctcgttgacctacccatcgggattaatatcacgaggtttcaaacattgctagcactccataggtcctatctaacgcctggagattcttcttctgggtggacagcaggggctgcagcatattatgtcggctatctgcagcccaggaccttcttattgaaatataatgagaacgggacgatcacagacgccgtcgactgtgcgctcgatcctttaagtgaaacgaagtgtacactcaaaagctttaccgtggaaaaaggtatctatcagactagcaactttagggtccaacccacagaatctatcgtaaggttccctaatattacaaatctctgtccatttggtgaagttttcaacgcaacaagatttgcatcagtatatgcgtggaatagaaaacgcatctcaaactgcgtagcggactactcggtgctatacaactctgcttcattttccacttttaaatgttacggggtatccccgactaaacttaatgatctatgttttactaatgtctatgccgatagctttgtcatacgaggggatgaggttcgacagatagcccctggccaaacggggaagattgctgattataactataaattgccggatgacttcacaggatgcgttatagcatggaactcgaataatttagattctaaagtcggaggcaattacaattacctatacagattgtttagaaaatcgaacttgaaaccttttgaacgagatatttccacagagatatatcaggctgggtcaactccgtgtaatggggttgaaggcttcaattgctatttccctctacaatcatacggcttccagccgacgaacggagtggggtaccagccctaccgagttgttgtactaagttttgagcttcttcacgcacctgcaactgtatgtgggccgaagaagagcacaaacctagtgaagaacaagtgcgtaaactttaattttaacggcttgaccgggaccggtgtcctgacggagtccaacaaaaagttcctgcctttccagcagtttggtcgtgatattgcagataccactgatgcggtgagggacccgcagaccctggaaatcctagatataaccccatgcagcttcggcggagtatccgtgatcacgccgggtacgaatacaagtaaccaggtcgctgtcctttatcaaggagtaaactgtacggaggttccagtagctatccacgcggaccaactgacgcctacgtggcgtgtttattcgacgggatcaaatgtctttcagactcgtgcggggtgcctcatcggggcggagcatgtcaataatagctatgagtgcgacatccccataggcgcaggaatatgtgcatcctaccaaacccagacaaattcaccccgtagggcacgcagtgttgcgtctcaaagcattattgcatatacgatgtcgcttggcgcggagaactctgtggcctacagtaataacagtatcgccatacccactaatttcactattagcgttactacggaaatactgccagtgtccatgacgaaaacatccgtagactgtaccatgtacatatgcggggattcgactgagtgtagcaacctattgctccaatacggatctttttgcacgcaactaaatcgggccctaacgggcatagcggttgaacaggacaaaaacacccaggaagtatttgcgcaggtgaaacaaatttataagacgcctccgattaaagattttggcggattcaacttctcgcaaatcttaccagacccctctaagccctcaaagagaagtttcatagaggatctcttattcaacaaggtcaccttggcagatgcaggttttataaagcaatatggggactgtctcggtgacatcgctgcgcgtgacctgatatgcgctcaaaaattcaatggtctgacggtgttaccgccgctgctaaccgacgagatgattgctcagtacacctcggcactgctggccggtacgattacgtcgggatggacgttcggtgcgggtgcggcactacaaataccgttcgcgatgcagatggcgtaccgctttaatgggattggcgtcacgcagaatgtgctgtacgagaaccagaagttaatagcaaaccagttcaatagcgcaattggtaaaatacaggattccctatcaagtactgcaagcgccctggggaaactccaagacgtcgtgaaccaaaatgcccaagcccttaatactcttgtaaaacagctgagttccaactttggggctattagtagtgttctgaacgacatactttcgcgacttgacaaggtggaggcggaagttcaaatcgaccggttaatcacggggaggctgcaatcactgcagacctacgtaacacaacaattgataagggccgcagaaattcgggcatccgctaatctagccgcgaccaagatgtctgaatgcgttctaggccagtcgaagcgagtggacttctgcggtaagggttaccatctaatgagctttccccagtccgctccccatggtgtagtcttcttgcatgtgacttatgtcccggcacaggaaaagaacttcacgacagcacccgctatatgccacgacggaaaggcgcactttccacgagagggggtcttcgtgagtaatggaacccattggttcgtgacacagcgtaatttttatgagcctcagatcataacgactgacaatacttttgtcagtgggaactgcgacgtagttataggaattgtgaataatacagtgtatgatcccctacaaccggagttggattcttttaaggaagagctcgataaatattttaaaaaccatactagcccggacgtcgaccttggggatataagtgggataaatgcttcagtggtgaatatccaaaaagagattgatcgcctaaacgaggtggccaagaacctaaatgaaagcttaatagatctacaagaattgggcaagtacgaacaatatataaagtggccatggtacatctggctgggctttatcgccggtctcattgccattgtcatggtcacgattatgctttgttgcatgacttcttgttgctcctgtttaaagggttgctgttcatgcggttcatgttgcaagtttgatgaggacgatagcgagcccgtcttaaaaggagttaaattacattatacctga

SEQ ID NO: 85 - DNA, 3822 bp, synthetic construct
  source 1..3822: mol_type = other DNA
atgtttgtcttcctggtcttgctgccgctcgtgtctagccagtgcgtgaatctcaccacccgcacccagcttccacctgcctacactaacagcttcacccgaggggtgtattaccctgacaaggtattccggtcctccgtcctccatagcacgcaggacctttttctgcccttcttctcaaatgtgacatggttccatgccattcacgtgagcggcacgaatggaacgaagcgctttgataaccccgtgctgcctttcaatgacggcgtctacttcgcctccactgaaaagtcaaacatcatccggggctggatctttggcaccactcttgattcaaagacccagtcactgctgattgtgaacaatgctacaaacgtggttatcaaagtctgcgagtttcagttctgtaacgatccatttttgggagtgtactaccacaagaacaacaagtcctggatggagtctgagttcagagtgtatagctctgctaacaactgcaccttcgagtacgtgtcccagcctttccttatggacctggaaggcaaacagggcaatttcaaaaacctgagagagttcgtgtttaagaacattgacggatacttcaaaatttattctaagcacacaccaattaacttagtgcgggacctaccccaaggctttagcgccctagagcccctggttgacctgcccattgggatcaatataacaaggttccaaactctactggctctgcatagaagttatctgaccccaggagacagctctagtggttggaccgccggcgcagcagcctactatgtcgggtacttacagccacgcacgttccttctgaagtacaatgagaacgggacaatcactgacgcagtagactgtgcactggacccgctaagcgagactaagtgcacacttaaatccttcacggtggagaaaggcatttatcagacctctaacttcagggtgcagccaacagaaagcattgtgcgattcccaaatattactaatctttgccctttcggggaggtctttaatgcaactagattcgcatcagtctatgcgtggaaccgcaaacgcatttccaattgtgtcgcagactactcagtgctgtacaactctgcctctttcagtacgttcaagtgttacggagtgtcacccactaaactgaacgacctgtgctttacaaatgtctacgctgactccttcgtgattaggggagacgaggtgagacaaattgcccccggacagactgggaagattgccgactacaattataagcttcctgatgatttcactggctgtgttattgcctggaatagtaacaatctggatagcaaggtgggaggcaactataactacttatatcgactgtttaggaagagtaatctgaaaccatttgagcgggatatttccacagaaatttaccaggccgggagcacaccatgtaatggggtggagggatttaattgttacttcccactccagagctatggtttccaacccaccaatggagtgggttaccagccctatagagtcgtggtgcttagttttgagctgcttcacgccccagcaaccgtctgcggtcccaaaaagtcgaccaatctcgtgaaaaacaaatgcgtaaacttcaactttaacggcttaacaggaaccggcgtgctcaccgaaagcaacaagaaattccttccatttcagcaattcggaagggacatcgccgacacaacagacgccgtcagggacccacagactctggagatactggacatcactccttgttcgtttgggggcgtctcggtcatcacacccgggactaatactagtaatcaggtagcagttttatatcaaggcgtcaactgtaccgaagtacctgtggccatacacgctgatcagctaacgccaacatggcgagtctattccaccggctctaacgtttttcagaccagggctgggtgcctgataggggcagagcacgtcaataattcctatgagtgtgatatccccataggtgcggggatctgtgccagctatcaaacccaaaccaattcaccaaggcgagcacggtctgtggcttctcagagcataattgcatatacaatgtcactgggcgctgagaatagcgttgcatactctaataacagcatagccattcccacgaactttactatcagtgtgacaaccgaaatattgccagtttcgatgaccaaaactagcgtggattgcacgatgtacatctgtggagactctaccgaatgcagcaatctgctattacaatatggcagcttctgtacacagttaaatcgagccttgacaggcatcgcagtggaacaggacaaaaatactcaagaggtgtttgcacaggtgaagcaaatctacaaaacgccccccattaaagattttggcgggttcaatttttcacaaattctccccgacccgtctaagccgagtaagcggtccttcatcgaagatctgctctttaacaaagtaaccctcgccgatgccggctttattaagcagtatggcgactgcctgggggatatagccgctcgtgacctgatttgcgcccagaagttcaatggtctgaccgtgttgcctcctttattgaccgatgaaatgattgcccagtacactagtgccctgctggccggcactatcacgtctgggtggaccttcggagctggtgccgccttgcagataccttttgcaatgcagatggcctataggtttaatggtatcggagtgactcagaacgtactgtacgagaaccagaagctcatcgctaatcaatttaactccgctatcggaaaaatccaggacagcctctcttctacagctagcgctctgggcaaactgcaggatgtcgttaatcagaatgcccaggccctgaacaccttggttaaacaactatcttccaacttcggggccatatccagtgtgttgaatgatattctctcccgcttggataaggtggaagctgaggtgcagatcgatcgcttgatcaccggcagactgcagtccctccagacatatgtaactcagcagctgattagagccgccgagataagggcaagtgcgaatctggctgccaccaagatgagcgaatgtgtattgggccagagcaaacgagttgatttttgcggtaaggggtatcatttaatgtctttccctcaatccgcacctcatggcgtagttttcctgcatgtgacttatgtcccggctcaggagaagaattttaccacagcccccgcgatctgccatgacggaaaggcccacttcccccgggaaggcgtgtttgtatccaatgggactcactggtttgtcactcagcgaaatttttatgaaccacagatcatcaccactgacaacacatttgttagtggaaactgcgatgtggtcatcggcatcgtgaataacactgtctatgatccactgcaacctgaactggattcttttaaagaggaactcgacaagtattttaaaaaccacactagccctgacgtggatctcggtgacatttctggcatcaacgctagcgtagtgaacattcagaaagagatagatagacttaatgaggtggccaagaacctcaacgaaagtctgatcgacctccaggaactggggaaatacgagcagtacattaaatggccttggtacatatggctggggttcattgctgggctgatcgcaatagtgatggtgaccataatgctctgttgcatgactagctgctgcagctgcctgaagggctgctgtagttgtgggtcatgttgtaagtttgacgaagatgatagcgagcctgtccttaaaggagtgaagctccactacacctag

SEQ ID NO: 86 - DNA, 3822 bp, synthetic construct
  source 1..3822: mol_type = other DNA
atgtttgtctttctggtcctgcttcccctcgttagttctcagtgtgtgaacctcaccacacggacgcaactccctccagcttacacaaattcttttacgcgaggcgtgtattatccggataaagttttcaggtcctccgtcctgcactccacgcaggacctttttttgccgttcttttctaacgtaacatggtttcatgccattcatgtttccgggacaaacggtacgaaacgctttgataaccctgtgctgccgttcaatgatggcgtttactttgcctctacggaaaagagtaacataatccgaggctggatcttcgggaccaccctggatagcaagactcagagtcttctcatcgttaataacgctacaaacgttgttatcaaagtctgcgaattccagttttgcaacgatccctttttgggggtatactatcacaaaaacaacaaaagttggatggaatcagagtttcgcgtgtattcttctgcgaacaactgcacgtttgaatacgttagtcagccttttctcatggacttggagggcaaacaggggaactttaaaaacttgcgggagttcgtttttaagaacatagatggttacttcaaaatttatagcaaacatacaccgatcaacctcgtgagagatctcccacagggtttttccgcactcgaaccgctcgtggatctgccgattggaattaacattacccgcttccagaccctgttggctctgcacagaagctatctgacgccaggggattccagcagtggatggacggcgggtgcggccgcgtattatgtaggctatctccaaccccgaacgttcttgctgaagtacaatgagaatgggaccattacggatgctgtggattgtgcattggatcctctctctgagacaaaatgcacccttaaaagcttcactgtagaaaagggtatttatcagactagcaacttccgcgtacaaccaacggagtctatcgttaggttccccaacattactaacttgtgcccatttggcgaagtgtttaacgcaactaggtttgctagtgtctatgcttggaatcgaaagagaataagcaattgtgtcgcagattactccgtattgtataattctgcaagcttttcaacattcaagtgctacggagtgtctcccaccaaattgaacgacctgtgttttactaacgtgtatgccgactctttcgttatccgaggcgatgaggtcaggcaaattgcccccggacaaactgggaaaattgcggattataattacaagcttccagacgactttacgggctgtgttatcgcatggaactccaacaatctcgacagcaaagtgggtggaaattataattatttgtatagattgtttcgcaagtccaacctgaagccattcgagagagacatctccaccgagatttatcaagccggctcaactccttgcaacggagtcgaaggcttcaactgttattttccgcttcagtcctatggttttcaacctacgaacggcgtgggataccagccgtatcgagtcgtggtactgtcctttgaacttttgcacgccccagcaactgtttgcggaccaaaaaagtccacaaatctcgtcaaaaacaagtgcgttaattttaattttaacgggcttacgggtactggtgtactgacggagtccaataagaaattcctgccattccaacagtttggacgggatattgctgatacgaccgacgctgtgcgagatccccagacacttgagatcctcgacataaccccctgtagttttggtggagtgtctgtaattacccccggaacgaacaccagcaaccaagttgcggtgctttatcagggtgttaattgcactgaggttcctgtcgcgatacatgccgaccaactgacgcctacatggcgagtatattcaacgggctccaacgtcttccagacgcgagccggttgtctcattggagctgaacatgtgaacaactcttatgaatgcgatataccaattggggctggaatctgcgcctcttatcagacgcagactaactcacccagacgagcacggagcgtggcaagccaatccattattgcctacaccatgtccttgggagctgagaattcagtcgcctattctaataatagcattgctataccgacgaactttacaatttccgtaactaccgaaatattgcccgtcagtatgactaagactagcgttgactgcacaatgtacatttgcggcgatagtaccgaatgctctaatcttcttctgcagtatggtagtttttgtacacaactgaatcgagctctgactgggatcgcagtcgaacaggacaaaaatacacaggaagttttcgcgcaagtgaagcaaatctacaaaacgcctcccataaaagatttcggaggattcaatttcagtcagatactccctgatccctctaaaccatctaaacgatcctttatcgaagatttgctgttcaacaaagtcacccttgctgacgctggattcataaagcagtacggggattgtcttggcgatatcgcagcccgagaccttatttgtgcccaaaaatttaacggacttacggtactccctccccttctgactgacgaaatgatagcccagtacaccagtgctctgctggctggcaccataacgagcggatggacttttggtgcgggtgcagcactgcagatccccttcgcgatgcaaatggcatacaggtttaatgggattggggtcacccagaatgtattgtacgagaaccagaagcttatagcgaatcaatttaacagtgcaattggtaagattcaggacagcctttcaagtaccgcgagtgctctcgggaagttgcaggatgtagtaaatcaaaatgcgcaggcgctgaatacgttggttaaacagctcagcagtaattttggagcaatttctagcgtgctgaatgacatcctcagcagactcgataaggtggaggctgaggtacagatagatagactcatcacgggcagattgcagagtttgcagacatacgtcacgcaacaactcattcgagcagcagaaattagagcatccgcaaatctggcggccacgaaaatgtctgagtgcgttctggggcagtccaagagagttgacttttgtgggaaaggatatcatctgatgagttttccgcagtcagcgccacatggtgtggtctttctgcacgttacttatgtccccgcacaggagaagaattttacgaccgcgccagctatttgccatgacggtaaggctcacttcccgagggaaggggtattcgtttctaacggtacgcattggtttgttacgcaacggaacttttatgaaccacagattattaccaccgacaacacattcgtaagtggaaactgtgatgtcgttatcggaatagtaaataataccgtttatgacccccttcagcctgaacttgattccttcaaggaagagctcgataaatactttaagaaccacaccagccccgatgttgacctgggtgatatatctgggatcaacgcttctgtcgtcaacattcaaaaagagatcgatcgcctgaatgaggtggccaaaaacctcaatgaaagtctcattgaccttcaagaactcggtaagtacgagcaatacatcaagtggccatggtacatatggctgggcttcattgctgggttgatagctatagtgatggttacgataatgttgtgttgtatgacatcctgctgtagctgccttaaaggttgttgttcttgcggttcttgttgtaagtttgacgaagatgattcagagcctgttctgaaaggggtgaagctccattatacttga

SEQ ID NO: 87 - DNA, 3822 bp, synthetic construct
  source 1..3822: mol_type = other DNA
atgttcgtgttcctggtgcttctccctctggtgtctagccagtgcgttaatctgaccaccagaacacaacttcctcctgcctacaccaacagcttcaccagaggcgtgtactaccctgataaggtgttcagatcttctgtgctgcacagcacccaggacctgtttctgcccttcttcagcaacgtgacctggtttcatgccattcatgtgtctggcaccaatggcaccaagaggttcgacaatcccgttctgcccttcaatgatggcgtgtattttgccagcaccgagaagagcaacatcatcaggggatggatcttcggcaccacactggacagcaaaacacagtctctgctgatcgtgaacaatgccaccaacgtggtgatcaaggtgtgcgagttccagttctgcaacgacccttttctgggcgtgtattaccacaagaacaacaagtcctggatggagagcgagttccgggtgtactctagcgccaacaactgcaccttcgagtatgtttctcagcctttcctgatggacctggagggcaaacagggcaacttcaagaacctgcgggagtttgtgttcaagaacatcgacggctacttcaagatctacagcaagcacacccccatcaacctggtgagggacctgcctcaaggattttctgcccttgaacctttagtggatctgcctatcggcatcaacatcacccggttccagaccctgttagctctgcacagaagctatctgacacctggcgattcttcttctggatggacagctggagctgccgcctattatgtgggctatttacagcctaggaccttcctgctgaagtacaacgagaatggcaccatcaccgacgctgtggattgtgctcttgatcctctgtctgagaccaagtgtaccctgaagagcttcacagtggagaagggcatctaccagaccagcaacttcagagtgcagcctacagagagcatcgtgagattccccaacatcaccaacctgtgcccatttggcgaggtgtttaatgccaccagattcgccagcgtgtatgcctggaacagaaagaggatcagcaattgcgtggccgattatagcgtgctgtacaacagcgccagcttcagcaccttcaagtgttatggcgtttctcccaccaagctgaatgacctgtgcttcaccaacgtgtacgccgacagcttcgtgattagaggcgatgaggtgagacagattgctcctggacaaacaggcaagattgccgactacaactacaagctgcccgacgactttaccggctgtgtgattgcctggaatagcaacaatctggacagcaaagtgggaggcaactacaactacctgtaccggctgttccggaagagcaacctgaagccattcgagagagatatcagcaccgagatctatcaggctggcagcacaccctgtaatggagtggagggcttcaactgctactttcctctgcagtcttatggctttcagcccaccaacggagtgggatatcagccctacagagtggttgttctgagcttcgagctgcttcatgctcctgctacagtgtgtggccctaagaagagcaccaatctggtgaagaacaagtgcgtgaacttcaacttcaacggcctgacaggcaccggagtgctgaccgagagcaacaagaagtttctgccttttcagcagtttggaagggatatcgccgacaccaccgatgccgtgagagaccctcaaacactggagattctggatattaccccttgctcttttggaggcgtgagcgtgatcacacctggcaccaataccagcaatcaggttgctgtgctgtatcagggagtgaattgcaccgaggttcctgtggccatccatgctgatcaactgacacctacctggagagtgtactctacaggcagcaacgtgtttcagaccagagccggatgtctgattggagccgaacacgtgaacaacagctatgagtgcgatatccctattggagccggcatctgtgcctcttaccagacccagaccaatagccccagaagagctagatcagttgcttctcagagcatcatcgcctacaccatgtctctgggagccgagaactctgtggcctacagcaataactctatcgccatccctaccaacttcaccatcagcgtgaccaccgagattctgcccgtgagcatgacaaagactagcgtggattgcaccatgtacatttgcggcgatagcaccgagtgcagcaacctgctgctgcaatatggcagcttttgtacccagctgaatagagcccttacaggcattgccgtggagcaggacaagaacacacaggaggtgtttgctcaggtgaagcagatctacaagaccccacccatcaaggactttggcggcttcaacttcagccagattctgcctgatcccagcaaacctagcaagcggagctttatcgaagacctgctgttcaacaaggtgacactggctgatgccggcttcatcaagcagtacggcgattgtttgggcgatattgccgctagagatctgatttgtgcccagaagttcaacggcctgacagtgctgcctcctctgctgacagatgagatgattgcccagtatacatctgctcttcttgccggcaccatcacctctggctggacctttggagctggagctgctctgcaaattccttttgctatgcaaatggcctaccggttcaacggcatcggagtgacccagaacgtgctgtacgagaaccaaaagctgattgctaaccagttcaacagcgccatcggcaagatccaggacagcctgagctctacagcttctgctttgggaaaactgcaggatgtggtgaaccagaatgctcaggccctgaacaccctggtgaaacagctgagcagcaattttggcgccatctcttctgtgctgaatgacatcctgagcaggctggacaaagtggaagccgaggtgcaaatcgacaggctgattacaggcagactgcagtctctgcagacatacgttacacaacagctgatcagagccgccgagatcagagctagcgctaatctggctgccaccaagatgtctgaatgtgtgttaggacagagcaagcgggtggacttttgcggcaagggatatcacctgatgagcttccctcaatctgctcctcatggagtggtgttcctgcatgtgacctacgtgcctgctcaggagaagaatttcacaacagctcctgccatctgccacgatggaaaagcccacttcccaagagaaggcgtgttcgtgtctaatggaacacactggttcgtgacccagcggaatttctacgagccccagatcatcaccaccgacaacacatttgtgagcggcaattgcgatgtggtgatcggcatcgtgaacaacaccgtgtacgaccctctgcaacctgaactggacagctttaaggaggagctggacaagtacttcaagaaccacaccagccctgacgtggatctgggcgatatctctggcattaatgccagcgtggtgaatatccagaaggagatcgaccggctgaatgaagtggccaagaacctgaacgaaagcctgatcgacctgcaagaactgggcaagtatgagcagtacatcaagtggccctggtacatctggctgggctttattgccggactgatcgccatcgttatggtgaccattatgctgtgctgcatgaccagctgctgctcttgtctgaagggctgttgctcttgtggctcttgctgtaagttcgatgaggacgattccgagcctgtgctgaaaggcgtgaaactgcactatacatga

SEQ ID NO: 88 - DNA, 119 bp, synthetic construct
  source 1..119: mol_type = other DNA
gtaagtttagtctttttgtcttttatttcaggtccatcggtgctgctttaacactgttgaggctcctggtggtgcaaatcaaagaactgctcctcagtggacgttgcctttacttctag

SEQ ID NO: 89 - DNA, 3822 bp, synthetic construct
  source 1..3822: mol_type = other DNA
atgtttgtcttcctggtcttgctgccgctggtgagcagccagtgcgtgaatctcaccacccgcacccagcttccacctgcctacactaacagcttcacccgaggggtgtattaccctgacaaggtattccggtcctccgtcctccatagcacgcaggacctttttctgcccttcttctcaaatgtgacatggttccatgccattcacgtgagcggcacgaatggaacgaagcgctttgataaccccgtgctgcctttcaatgacggcgtctacttcgcctccactgaaaagtcaaacatcatccggggctggatctttggcaccactcttgattcaaagacccagtcactgctgattgtgaacaatgctacaaacgtggttatcaaggtgtgtgagtttcagttctgtaacgatccatttttgggagtgtactaccacaagaacaacaagtcctggatggagtctgagttcagagtgtatagctctgctaacaactgcaccttcgagtacgtgtcccagcctttccttatggacctggaaggcaaacagggcaatttcaaaaacctgagagagttcgtgtttaagaacattgacggatacttcaaaatttattctaagcacacaccaattaacttagtgcgggacctaccccaaggctttagcgccctagagcccctggttgacctgcccattgggatcaatataacaaggttccaaactctactggctctgcatagaagttatctgaccccaggagacagctctagtggttggaccgccggcgcagcagcctactatgtcgggtacttacagccacgcacgttccttctgaagtacaatgagaacgggacaatcactgacgcagtagactgtgcactggacccgctaagcgagactaagtgcacacttaaatccttcacggtggagaaaggcatttatcagacctctaacttcagggtgcagccaacagaaagcattgtgcgattcccaaatattactaatctttgccctttcggggaggtctttaatgcaactagattcgcatcagtctatgcgtggaaccgcaaacgcatttccaattgtgtcgcagactactcagtgctgtacaactctgcctctttcagtacgttcaagtgttacggagtgtcacccactaaactgaacgacctgtgctttacaaatgtctacgctgactccttcgtgattaggggagacgaggtgagacaaattgcccccggacagactgggaagattgccgactacaattataagcttcctgatgatttcactggctgtgttattgcctggaatagtaacaatctggatagcaaggtgggaggcaactataactacttatatcgactgtttaggaagagtaatctgaaaccatttgagcgggatatttccacagaaatttaccaggccgggagcacaccatgtaatggggtggagggatttaattgttacttcccactccagagctatggtttccaacccaccaatggagtgggttaccagccctatagagtcgtggtgcttagttttgagctgcttcacgccccagcaaccgtctgcggtcccaaaaagtcgaccaatctcgtgaaaaacaaatgcgtaaacttcaactttaacggcttaacaggaaccggcgtgctcaccgaaagcaacaagaaattccttccatttcagcaattcggaagggacatcgccgacacaacagacgcggtgagggacccacagactctggagatactggacatcactccttgttcgtttgggggcgtctcggtcatcacacccgggactaatactagtaatcaggtagcagttttatatcaaggcgtcaactgtaccgaagtacctgtggccatacacgctgatcagctaacgccaacatggcgagtctattccaccggctctaacgtttttcagaccagggctgggtgcctgataggggcagagcacgtcaataattcctatgagtgtgatatccccataggtgcggggatctgtgccagctatcaaacccaaaccaattcaccagggagcgcaagctctgtggcttctcagagcataattgcatatacaatgtcactgggcgctgagaatagcgttgcatactctaataacagcatagccattcccacgaactttactatcagtgtgacaaccgaaatattgccagtttcgatgaccaaaactagcgtggattgcacgatgtacatctgtggagactctaccgaatgcagcaatctgctattacaatatggcagcttctgtacacagttaaatcgagccttgacaggcatcgcagtggaacaggacaaaaatactcaagaggtgtttgcacaggtgaagcaaatctacaaaacgccccccattaaagattttggcgggttcaatttttcacaaattctccccgacccgtctaagccgagtaagcggtccttcatcgaagatctgctctttaacaaagtaaccctcgccgatgccggctttattaagcagtatggcgactgcctgggggatatagccgctcgtgacctgatttgcgcccagaagttcaatggtctgaccgtgttgcctcctttattgaccgatgaaatgattgcccagtacactagtgccctgctggccggcactatcacgtctgggtggaccttcggagctggtgccgccttgcagataccttttgcaatgcagatggcctataggtttaatggtatcggagtgactcagaacgtactgtacgagaaccagaagctcatcgctaatcaatttaactccgctatcggaaaaatccaggacagcctctcttctacagctagcgctctgggcaaactgcaggatgtcgttaatcagaatgcccaggccctgaacaccttggttaaacaactatcttccaacttcggggccatatccagtgtgttgaatgatattctctcccgcttggatccacctgaagctgaggtgcagatcgatcgcttgatcaccggcagactgcagtccctccagacatatgtaactcagcagctgattagagccgccgagataagggcaagtgcgaatctggctgccaccaagatgagcgaatgtgtattgggccagagcaaacgagttgatttttgcggtaaggggtatcatttaatgtctttccctcaatccgcacctcatggcgtagttttcctgcatgtgacttatgtcccggctcaggagaagaattttaccacagcccccgcgatctgccatgacggaaaggcccacttcccccgggaaggcgtgtttgtatccaatgggactcactggtttgtcactcagcgaaatttttatgaaccacagatcatcaccactgacaacacatttgttagtggaaactgcgatgtggtcatcggcatcgtgaataacactgtctatgatccactgcaacctgaactggattcttttaaagaggaactcgacaagtattttaaaaaccacactagccctgacgtggatctcggtgacatttctggcatcaacgctagcgtagtgaacattcagaaagagatagatagacttaatgaggtggccaagaacctcaacgaaagtctgatcgacctccaggaactggggaaatacgagcagtacattaaatggccttggtacatatggctggggttcattgctgggctgatcgcaatagtgatggtgaccataatgctctgttgcatgactagctgctgcagctgcctgaagggctgctgtagttgtgggtcatgttgtaagtttgacgaagatgatagcgagcctgtccttaaaggagtgaagctccactacacctag

SEQ ID NO: 90 - protein, 1273 aa, synthetic construct
MFVFLVLLPLVSSQCVNLTTRTQLPPAYTNSFTRGVYYPDKVFRSSVLHSTQDLFLPFFSNVTWFHAIHVSGTNGTKRFDNPVLPFNDGVYFASTEKSNIIRGWIFGTTLDSKTQSLLIVNNATNVVIKVCEFQFCNDPFLGVYYHKNNKSWMESEFRVYSSANNCTFEYVSQPFLMDLEGKQGNFKNLREFVFKNIDGYFKIYSKHTPINLVRDLPQGFSALEPLVDLPIGINITRFQTLLALHRSYLTPGDSSSGWTAGAAAYYVGYLQPRTFLLKYNENGTITDAVDCALDPLSETKCTLKSFTVEKGIYQTSNFRVQPTESIVRFPNITNLCPFGEVFNATRFASVYAWNRKRISNCVADYSVLYNSASFSTFKCYGVSPTKLNDLCFTNVYADSFVIRGDEVRQIAPGQTGKIADYNYKLPDDFTGCVIAWNSNNLDSKVGGNYNYLYRLFRKSNLKPFERDISTEIYQAGSTPCNGVEGFNCYFPLQSYGFQPTNGVGYQPYRVVVLSFELLHAPATVCGPKKSTNLVKNKCVNFNFNGLTGTGVLTESNKKFLPFQQFGRDIADTTDAVRDPQTLEILDITPCSFGGVSVITPGTNTSNQVAVLYQGVNCTEVPVAIHADQLTPTWRVYSTGSNVFQTRAGCLIGAEHVNNSYECDIPIGAGICASYQTQTNSPGSASSVASQSIIAYTMSLGAENSVAYSNNSIAIPTNFTISVTTEILPVSMTKTSVDCTMYICGDSTECSNLLLQYGSFCTQLNRALTGIAVEQDKNTQEVFAQVKQIYKTPPIKDFGGFNFSQILPDPSKPSKRSFIEDLLFNKVTLADAGFIKQYGDCLGDIAARDLICAQKFNGLTVLPPLLTDEMIAQYTSALLAGTITSGWTFGAGAALQIPFAMQMAYRFNGIGVTQNVLYENQKLIANQFNSAIGKIQDSLSSTASALGKLQDVVNQNAQALNTLVKQLSSNFGAISSVLNDILSRLDPPEAEVQIDRLITGRLQSLQTYVTQQLIRAAEIRASANLAATKMSECVLGQSKRVDFCGKGYHLMSFPQSAPHGVVFLHVTYVPAQEKNFTTAPAICHDGKAHFPREGVFVSNGTHWFVTQRNFYEPQIITTDNTFVSGNCDVVIGIVNNTVYDPLQPELDSFKEELDKYFKNHTSPDVDLGDISGINASVVNIQKEIDRLNEVAKNLNESLIDLQELGKYEQYIKWPWYIWLGFIAGLIAIVMVTIMLCCMTSCCSCLKGCCSCGSCCKFDEDDSEPVLKGVKLHYT

SEQ ID NO: 91 - DNA, 1887 bp, synthetic construct
  source 1..1887: mol_type = other DNA
atggctggcgaggcccccttcctttacctgtacgcccttgtgtatttcctgcagagcatcaattttgtgagaatcatcatgaggctgtggctttgctggaaatgtaggagcaagaaccccctgttgtatgacgccaactactttctgtgttggcacaccaatctcgccgtgttccagagtgcctctaagatcattacactgaaaaagcggtggcagcttgcactttctaagggagtgcatttcgtttgcaacctgctcctggtgacactcaagcagggggaaatcaaagacgccacccctagcgacttcgttagagccactgccacaatcccaatccaggcttccctgcctttcggctggcttatcgtgggtgtggcactgttggctgtgcggagaccacagggactgcctaataatacagctagctggtttaccgctctgacacagcatggcaaagaagacctcaagttccctcgcggtcagggggtgcctattaacactaatagctctccagacgaccaaattgggtattacaggcgcgccacaagacggatcatggcctgcttagtggggctgatgtggctatcctattttattgctagctttcgcctgaagaaggacaagaagaagaaagctgatgagacccaggcactgccccagcgccaaaagaagcagcagacagtcacactgctccctgctgcagacctggatgacttcagcaagcagctgcaggggaactttggcgaccaggagctgattagacaggggactgactataagcattggcctcagattgctcagttcgccccaagtgcatccgccttcttcgggatgtcacgaataggaatggaagtgaccccttctgggacatggttgacatacaccggagcaatcaagattacctccggggacggtaccacgtctcctattagcgaacacgattatcagatagggggatatactgagaagtgggagtccggcgtcaaaaagatgagtgggaaaggccagcagcaacaaggccaaacagttactaaaaagtctgccgcagaagctagtaaaaagcctcgccagaagcggacagccaccaaagcttacaatgtgactcaggccttcggccgccgggggcctgaacagaccctcttgtggcccgttaccctcgcatgtttcgtgcttgcagctgtgtacaggatcaattggtttaaggatcaggttatcctgttgaacaaacatatagatgcctataagacattcccacccaccgagccaaagaaagataagaaaaagaaaactagtcctgcaaggatggccggcaatggaggagacgcagccttagccctgctcttactcgacaggctgaaccaacttgagtctaaaatgagcggtaaagggcagaagatgaaggatctgtccccaaggtggtatttctactatctgggcaccggccctgaggattgtgtcgtcctccactcatacttcactagcgattattaccagctgtatagtacacaattatctaccgacacaggcgtcgagcacgtgaccttctttatatacaataagatcgtggatgaaccagaggagcatgtgcagatccacactattgatggctctagcgggggcatcatctgggtggcaacagaaggagccctcaacaccccaaaggaccatatcggcaccaggaatccagccaacaatgccgccattgttctgcagctccctcagggcactactctccctaaaggcttctatgctgagggacccggaccaggcgccaaatttgttgctgcttggacactgaaagctgctgctgggcccggaccaggccagtacatcaaggccaactctaagtttatcggcatcaccgaattgggacctggacccggctag

SEQ ID NO: 92 - protein, 628 aa, synthetic construct
MAGEAPFLYLYALVYFLQSINFVRIIMRLWLCWKCRSKNPLLYDANYFLCWHTNLAVFQSASKIITLKKRWQLALSKGVHFVCNLLLVTLKQGEIKDATPSDFVRATATIPIQASLPFGWLIVGVALLAVRRPQGLPNNTASWFTALTQHGKEDLKFPRGQGVPINTNSSPDDQIGYYRRATRRIMACLVGLMWLSYFIASFRLKKDKKKKADETQALPQRQKKQQTVTLLPAADLDDFSKQLQGNFGDQELIRQGTDYKHWPQIAQFAPSASAFFGMSRIGMEVTPSGTWLTYTGAIKITSGDGTTSPISEHDYQIGGYTEKWESGVKKMSGKGQQQQGQTVTKKSAAEASKKPRQKRTATKAYNVTQAFGRRGPEQTLLWPVTLACFVLAAVYRINWFKDQVILLNKHIDAYKTFPPTEPKKDKKKKTSPARMAGNGGDAALALLLLDRLNQLESKMSGKGQKMKDLSPRWYFYYLGTGPEDCVVLHSYFTSDYYQLYSTQLSTDTGVEHVTFFIYNKIVDEPEEHVQIHTIDGSSGGIIWVATEGALNTPKDHIGTRNPANNAAIVLQLPQGTTLPKGFYAEGPGPGAKFVAAWTLKAAAGPGPGQYIKANSKFIGITELGPGPG

SEQ ID NO: 93 - DNA, 13746 bp, synthetic construct
  source 1..13746: mol_type = other DNA
taatacgactcactataatgggcggcgcatgagagaagcccagaccaattacctacccaaaatggagaaagttcacgttgacatcgaggaagacagcccattcctcagagctttgcagcggagcttcccgcagtttgaggtagaagccaagcaggtcactgataatgaccatgctaatgccagagcgttttcgcatctggcttcaaaactgatcgaaacggaggtggacccatccgacacgatccttgacattggaagtgcgcccgcccgcagaatgtattctaagcacaagtatcattgtatctgtccgatgagatgtgcggaagatccggacagattgtataagtatgcaactaagctgaagaaaaactgtaaggaaataactgataaggaattggacaagaaaatgaaggagctcgccgccgtcatgagcgaccctgacctggaaactgagactatgtgcctccacgacgacgagtcgtgtcgctacgaagggcaagtcgctgtttaccaggatgtatacgcggttgacggaccgacaagtctctatcaccaagccaataagggagttagagtcgcctactggataggctttgacaccaccccttttatgtttaagaacttggctggagcatatccatcatactctaccaactgggccgacgaaaccgtgttaacggctcgtaacataggcctatgcagctctgacgttatggagcggtcacgtagagggatgtccattcttagaaagaagtatttgaaaccatccaacaatgttctattctctgttggctcgaccatctaccacgagaagagggacttactgaggagctggcacctgccgtctgtatttcacttacgtggcaagcaaaattacacatgtcggtgtgagactatagttagttgcgacgggtacgtcgttaaaagaatagctatcagtccaggcctgtatgggaagccttcaggctatgctgctacgatgcaccgcgagggattcttgtgctgcaaagtgacagacacattgaacggggagagggtctcttttcccgtgtgcacgtatgtgccagctacattgtgtgaccaaatgactggcatactggcaacagatgtcagtgcggacgacgcgcaaaaactgctggttgggctcaaccagcgtatagtcgtcaacggtcgcacccagagaaacaccaataccatgaaaaattaccttttgcccgtagtggcccaggcatttgctaggtgggcaaaggaatataaggaagatcaagaagatgaaaggccactaggactacgagatagacagttagtcatggggtgttgttgggcttttagaaggcacaagataacatctatttataagcgcccggatacccaaaccatcatcaaagtgaacagcgatttccactcattcgtgctgcccaggataggcagtaacacattggagatcgggctgagaacaagaatcaggaaaatgttagaggagcacaaggagccgtcacctctcattaccgccgaggacgtacaagaagctaagtgcgcagccgatgaggctaaggaggtgcgtgaagccgaggagttgcgcgcagctctaccacctttggcagctgatgttgaggagcccactctggaagccgatgtcgacttgatgttacaagaggctggggccggctcagtggagacacctcgtggcttgataaaggttaccagctacgctggcgaggacaagatcggctcttacgctgtgctttctccgcaggctgtactcaagagtgaaaaattatcttgcatccaccctctcgctgaacaagtcatagtgataacacactctggccgaaaagggcgttatgccgtggaaccataccatggtaaagtagtggtgccagagggacatgcaatacccgtccaggactttcaagctctgagtgaaagtgccaccattgtgtacaacgaacgtgagttcgtaaacaggtacctgcaccatattgccacacatggaggagcgctgaacactgatgaagaatattacaaaactgtcaagcccagcgagcacgacggcgaatacctgtacgacatcgacaggaaacagtgcgtcaagaaagaactagtcactgggctagggctcacaggcgagctggtggatcctcccttccatgaattcgcctacgagagtctgagaacacgaccagccgctccttaccaagtaccaaccataggggtgtatggcgtgccaggatcaggcaagtctggcatcattaaaagcgcagtcaccaaaaaagatctagtggtgagcgccaagaaagaaaactgtgcagaaattataagggacgtcaagaaaatgaaagggctggacgtcaatgccagaactgtggactcagtgctcttgaatggatgcaaacaccccgtagagaccctgtatattgacgaagcttttgcttgtcatgcaggtactctcagagcgctcatagccattataagacctaaaaaggcagtgctctgcggggatcccaaacagtgcggtttttttaacatgatgtgcctgaaagtgcattttaaccacgagatttgcacacaagtcttccacaaaagcatctctcgccgttgcactaaatctgtgacttcggtcgtctcaaccttgttttacgacaaaaaaatgagaacgacgaatccgaaagagactaagattgtgattgacactaccggcagtaccaaacctaagcaggacgatctcattctcacttgtttcagagggtgggtgaagcagttgcaaatagattacaaaggcaacgaaataatgacggcagctgcctctcaagggctgacccgtaaaggtgtgtatgccgttcggtacaaggtgaatgaaaatcctctgtacgcacccacctcagaacatgtgaacgtcctactgacccgcacggaggaccgcatcgtgtggaaaacactagccggcgacccatggataaaaacactgactgccaagtaccctgggaatttcactgccacgatagaggagtggcaagcagagcatgatgccatcatgaggcacatcttggagagaccggaccctaccgacgtcttccagaataaggcaaacgtgtgttgggccaaggctttagtgccggtgctgaagaccgctggcatagacatgaccactgaacaatggaacactgtggattattttgaaacggacaaagctcactcagcagagatagtattgaaccaactatgcgtgaggttctttggactcgatctggactccggtctattttctgcacccactgttccgttatccattaggaataatcactgggataactccccgtcgcctaacatgtacgggctgaataaagaagtggtccgtcagctctctcgcaggtacccacaactgcctcgggcagttgccactggaagagtctatgacatgaacactggtacactgcgcaattatgatccgcgcataaacctagtacctgtaaacagaagactgcctcatgctttagtcctccaccataatgaacacccacagagtgacttttcttcattcgtcagcaaattgaagggcagaactgtcctggtggtcggggaaaagttgtccgtcccaggcaaaatggttgactggttgtcagaccggcctgaggctaccttcagagctcggctggatttaggcatcccaggtgatgtgcccaaatatgacataatatttgttaatgtgaggaccccatataaataccatcactatcagcagtgtgaagaccatgccattaagcttagcatgttgaccaagaaagcttgtctgcatctgaatcccggcggaacctgtgtcagcataggttatggttacgctgacagggccagcgaaagcatcattggtgctatagcgcggcagttcaagttttcccgggtatgcaaaccgaaatcctcacttgaagagacggaagttctgtttgtattcattgggtacgatcgcaaggcccgtacgcacaatccttacaagctttcatcaaccttgaccaacatttatacaggttccagactccacgaagccggatgtgcaccctcatatcatgtggtgcgaggggatattgccacggccaccgaaggagtgattataaatgctgctaacagcaaaggacaacctggcggaggggtgtgcggagcgctgtataagaaattcccggaaagcttcgatttacagccgatcgaagtaggaaaagcgcgactggtcaaaggtgcagctaaacatatcattcatgccgtaggaccaaacttcaacaaagtttcggaggttgaaggtgacaaacagttggcagaggcttatgagtccatcgctaagattgtcaacgataacaattacaagtcagtagcgattccactgttgtccaccggcatcttttccgggaacaaagatcgactaacccaatcattgaaccatttgctgacagctttagacaccactgatgcagatgtagccatatactgcagggacaagaaatgggaaatgactctcaaggaagcagtggctaggagagaagcagtggaggagatatgcatatccgacgactcttcagtgacagaacctgatgcagagctggtgagggtgcatccgaagagttctttggctggaaggaagggctacagcacaagcgatggcaaaactttctcatatttggaagggaccaagtttcaccaggcggccaaggatatagcagaaattaatgccatgtggcccgttgcaacggaggccaatgagcaggtatgcatgtatatcctcggagaaagcatgagcagtattaggtcgaaatgccccgtcgaagagtcggaagcctccacaccacctagcacgctgccttgcttgtgcatccatgccatgactccagaaagagtacagcgcctaaaagcctcacgtccagaacaaattactgtgtgctcatcctttccattgccgaagtatagaatcactggtgtgcagaagatccaatgctcccagcctatattgttctcaccgaaagtgcctgcgtatattcatccaaggaagtatctcgtggaaacaccaccggtagacgagactccggagccatcggcagagaaccaatccacagaggggacacctgaacaaccaccacttataaccgaggatgagaccaggactagaacgcctgagccgatcatcatcgaagaggaagaagaggatagcataagtttgctgtcagatggcccgacccaccaggtgctgcaagtcgaggcagacattcacgggccgccctctgtatctagctcatcctggtccattcctcatgcatccgactttgatgtggacagtttatccatacttgacaccctggagggagctagcgtgaccagcggggcaacgtcagccgagactaactcttacttcgcaaagagtatggagtttctggcgcgaccggtgcctgcgcctcgaacagtattcaggaaccctccacatcccgctccgcgcacaagaacaccgtcacttgcacccagcagggcctgctcgagaaccagcctagtttccaccccgccaggcgtgaatagggtgatcactagagaggagctcgaggcgcttaccccgtcacgcactcctagcaggtcggtctcgagaaccagcctggtctccaacccgccaggcgtaaatagggtgattacaagagaggagtttgaggcgttcgtagcacaacaacaatgacggtttgatgcgggtgcatacatcttttcctccgacaccggtcaagggcatttacaacaaaaatcagtaaggcaaacggtgctatccgaagtggtgttggagaggaccgaattggagatttcgtatgccccgcgcctcgaccaagaaaaagaagaattactacgcaagaaattacagttaaatcccacacctgctaacagaagcagataccagtccaggaaggtggagaacatgaaagccataacagctagacgtattctgcaaggcctagggcattatttgaaggcagaaggaaaagtggagtgctaccgaaccctgcatcctgttcctttgtattcatctagtgtgaaccgtgccttttcaagccccaaggtcgcagtggaagcctgtaacgccatgttgaaagagaactttccgactgtggcttcttactgtattattccagagtacgatgcctatttggacatggttgacggagcttcatgctgcttagacactgccagtttttgccctgcaaagctgcgcagctttccaaagaaacactcctatttggaacccacaatacgatcggcagtgccttcagcgatccagaacacgctccagaacgtcctggcagctgccacaaaaagaaattgcaatgtcacgcaaatgagagaattgcccgtattggattcggcggcctttaatgtggaatgcttcaagaaatatgcgtgtaataatgaatattgggaaacgtttaaagaaaaccccatcaggcttactgaagaaaacgtggtaaattacattaccaaattaaaaggaccaaaagctgctgctctttttgcgaagacacataatttgaatatgttgcaggacataccaatggacaggtttgtaatggacttaaagagagacgtgaaagtgactccaggaacaaaacatactgaagaacggcccaaggtacaggtgatccaggctgccgatccgctagcaacagcgtatctgtgcggaatccaccgagagctggttaggagattaaatgcggtcctgcttccgaacattcatacactgtttgatatgtcggctgaagactttgacgctattatagccgagcacttccagcctggggattgtgttctggaaactgacatcgcgtcgtttgataaaagtgaggacgacgccatggctctgaccgcgttaatgattctggaagacttaggtgtggacgcagagctgttgacgctgattgaggcggctttcggcgaaatttcatcaatacatttgcccactaaaactaaatttaaattcggagccatgatgaaatctggaatgttcctcacactgtttgtgaacacagtcattaacattgtaatcgcaagcagagtgttgagagaacggctaaccggatcaccatgtgcagcattcattggagatgacaatatcgtgaaaggagtcaaatcggacaaattaatggcagacaggtgcgccacctggttgaatatggaagtcaagattatagatgctgtggtgggcgagaaagcgccttatttctgtggagggtttattttgtgtgactccgtgaccggcacagcgtgccgtgtggcagaccccctaaaaaggctgtttaagcttggcaaacctctggcagcagacgatgaacatgatgatgacaggagaagggcattgcatgaagagtcaacacgctggaaccgagtgggtattctttcagagctgtgcaaggcagtagaatcaaggtatgaaaccgtaggaacttccatcatagttatggccatgactactctagctagcagtgttaaatcattcagctacctgagaggggcccctataactctctacggctaacctgaatggactacgactctagaatagtctttaattaagccaccatggctggcgaggcccccttcctttacctgtacgcccttgtgtatttcctgcagagcatcaattttgtgagaatcatcatgaggctgtggctttgctggaaatgtaggagcaagaaccccctgttgtatgacgccaactactttctgtgttggcacaccaatctcgccgtgttccagagtgcctctaagatcattacactgaaaaagcggtggcagcttgcactttctaagggagtgcatttcgtttgcaacctgctcctggtgacactcaagcagggggaaatcaaagacgccacccctagcgacttcgttagagccactgccacaatcccaatccaggcttccctgcctttcggctggcttatcgtgggtgtggcactgttggctgtgcggagaccacagggactgcctaataatacagctagctggtttaccgctctgacacagcatggcaaagaagacctcaagttccctcgcggtcagggggtgcctattaacactaatagctctccagacgaccaaattgggtattacaggcgcgccacaagacggatcatggcctgcttagtggggctgatgtggctatcctattttattgctagctttcgcctgaagaaggacaagaagaagaaagctgatgagacccaggcactgccccagcgccaaaagaagcagcagacagtcacactgctccctgctgcagacctggatgacttcagcaagcagctgcaggggaactttggcgaccaggagctgattagacaggggactgactataagcattggcctcagattgctcagttcgccccaagtgcatccgccttcttcgggatgtcacgaataggaatggaagtgaccccttctgggacatggttgacatacaccggagcaatcaagattacctccggggacggtaccacgtctcctattagcgaacacgattatcagatagggggatatactgagaagtgggagtccggcgtcaaaaagatgagtgggaaaggccagcagcaacaaggccaaacagttactaaaaagtctgccgcagaagctagtaaaaagcctcgccagaagcggacagccaccaaagcttacaatgtgactcaggccttcggccgccgggggcctgaacagaccctcttgtggcccgttaccctcgcatgtttcgtgcttgcagctgtgtacaggatcaattggtttaaggatcaggttatcctgttgaacaaacatatagatgcctataagacattcccacccaccgagccaaagaaagataagaaaaagaaaactagtcctgcaaggatggccggcaatggaggagacgcagccttagccctgctcttactcgacaggctgaaccaacttgagtctaaaatgagcggtaaagggcagaagatgaaggatctgtccccaaggtggtatttctactatctgggcaccggccctgaggattgtgtcgtcctccactcatacttcactagcgattattaccagctgtatagtacacaattatctaccgacacaggcgtcgagcacgtgaccttctttatatacaataagatcgtggatgaaccagaggagcatgtgcagatccacactattgatggctctagcgggggcatcatctgggtggcaacagaaggagccctcaacaccccaaaggaccatatcggcaccaggaatccagccaacaatgccgccattgttctgcagctccctcagggcactactctccctaaaggcttctatgctgagggacccggaccaggcgccaaatttgttgctgcttggacactgaaagctgctgctgggcccggaccaggccagtacatcaaggccaactctaagtttatcggcatcaccgaattgggacctggacccggctagtgattgggcccctataactctctacggctaacctgaatggactacgacatagtctagtccgccaaggccaccatgtttgtcttcctggtcttgctgccgctggtgagcagccagtgcgtgaatctcaccacccgcacccagcttccacctgcctacactaacagcttcacccgaggggtgtattaccctgacaaggtattccggtcctccgtcctccatagcacgcaggacctttttctgcccttcttctcaaatgtgacatggttccatgccattcacgtgagcggcacgaatggaacgaagcgctttgataaccccgtgctgcctttcaatgacggcgtctacttcgcctccactgaaaagtcaaacatcatccggggctggatctttggcaccactcttgattcaaagacccagtcactgctgattgtgaacaatgctacaaacgtggttatcaaggtgtgtgagtttcagttctgtaacgatccatttttgggagtgtactaccacaagaacaacaagtcctggatggagtctgagttcagagtgtatagctctgctaacaactgcaccttcgagtacgtgtcccagcctttccttatggacctggaaggcaaacagggcaatttcaaaaacctgagagagttcgtgtttaagaacattgacggatacttcaaaatttattctaagcacacaccaattaacttagtgcgggacctaccccaaggctttagcgccctagagcccctggttgacctgcccattgggatcaatataacaaggttccaaactctactggctctgcatagaagttatctgaccccaggagacagctctagtggttggaccgccggcgcagcagcctactatgtcgggtacttacagccacgcacgttccttctgaagtacaatgagaacgggacaatcactgacgcagtagactgtgcactggacccgctaagcgagactaagtgcacacttaaatccttcacggtggagaaaggcatttatcagacctctaacttcagggtgcagccaacagaaagcattgtgcgattcccaaatattactaatctttgccctttcggggaggtctttaatgcaactagattcgcatcagtctatgcgtggaaccgcaaacgcatttccaattgtgtcgcagactactcagtgctgtacaactctgcctctttcagtacgttcaagtgttacggagtgtcacccactaaactgaacgacctgtgctttacaaatgtctacgctgactccttcgtgattaggggagacgaggtgagacaaattgcccccggacagactgggaagattgccgactacaattataagcttcctgatgatttcactggctgtgttattgcctggaatagtaacaatctggatagcaaggtgggaggcaactataactacttatatcgactgtttaggaagagtaatctgaaaccatttgagcgggatatttccacagaaatttaccaggccgggagcacaccatgtaatggggtggagggatttaattgttacttcccactccagagctatggtttccaacccaccaatggagtgggttaccagccctatagagtcgtggtgcttagttttgagctgcttcacgccccagcaaccgtctgcggtcccaaaaagtcgaccaatctcgtgaaaaacaaatgcgtaaacttcaactttaacggcttaacaggaaccggcgtgctcaccgaaagcaacaagaaattccttccatttcagcaattcggaagggacatcgccgacacaacagacgcggtgagggacccacagactctggagatactggacatcactccttgttcgtttgggggcgtctcggtcatcacacccgggactaatactagtaatcaggtagcagttttatatcaaggcgtcaactgtaccgaagtacctgtggccatacacgctgatcagctaacgccaacatggcgagtctattccaccggctctaacgtttttcagaccagggctgggtgcctgataggggcagagcacgtcaataattcctatgagtgtgatatccccataggtgcggggatctgtgccagctatcaaacccaaaccaattcaccagggagcgcaagctctgtggcttctcagagcataattgcatatacaatgtcactgggcgctgagaatagcgttgcatactctaataacagcatagccattcccacgaactttactatcagtgtgacaaccgaaatattgccagtttcgatgaccaaaactagcgtggattgcacgatgtacatctgtggagactctaccgaatgcagcaatctgctattacaatatggcagcttctgtacacagttaaatcgagccttgacaggcatcgcagtggaacaggacaaaaatactcaagaggtgtttgcacaggtgaagcaaatctacaaaacgccccccattaaagattttggcgggttcaatttttcacaaattctccccgacccgtctaagccgagtaagcggtccttcatcgaagatctgctctttaacaaagtaaccctcgccgatgccggctttattaagcagtatggcgactgcctgggggatatagccgctcgtgacctgatttgcgcccagaagttcaatggtctgaccgtgttgcctcctttattgaccgatgaaatgattgcccagtacactagtgccctgctggccggcactatcacgtctgggtggaccttcggagctggtgccgccttgcagataccttttgcaatgcagatggcctataggtttaatggtatcggagtgactcagaacgtactgtacgagaaccagaagctcatcgctaatcaatttaactccgctatcggaaaaatccaggacagcctctcttctacagctagcgctctgggcaaactgcaggatgtcgttaatcagaatgcccaggccctgaacaccttggttaaacaactatcttccaacttcggggccatatccagtgtgttgaatgatattctctcccgcttggatccacctgaagctgaggtgcagatcgatcgcttgatcaccggcagactgcagtccctccagacatatgtaactcagcagctgattagagccgccgagataagggcaagtgcgaatctggctgccaccaagatgagcgaatgtgtattgggccagagcaaacgagttgatttttgcggtaaggggtatcatttaatgtctttccctcaatccgcacctcatggcgtagttttcctgcatgtgacttatgtcccggctcaggagaagaattttaccacagcccccgcgatctgccatgacggaaaggcccacttcccccgggaaggcgtgtttgtatccaatgggactcactggtttgtcactcagcgaaatttttatgaaccacagatcatcaccactgacaacacatttgttagtggaaactgcgatgtggtcatcggcatcgtgaataacactgtctatgatccactgcaacctgaactggattcttttaaagaggaactcgacaagtattttaaaaaccacactagccctgacgtggatctcggtgacatttctggcatcaacgctagcgtagtgaacattcagaaagagatagatagacttaatgaggtggccaagaacctcaacgaaagtctgatcgacctccaggaactggggaaatacgagcagtacattaaatggccttggtacatatggctggggttcattgctgggctgatcgcaatagtgatggtgaccataatgctctgttgcatgactagctgctgcagctgcctgaagggctgctgtagttgtgggtcatgttgtaagtttgacgaagatgatagcgagcctgtccttaaaggagtgaagctccactacacctagtaacgaacggccgtatcacgcccaaacatttacagccgcggtgtcaaaaaccgcgtggacgtggttaacatccctgctgggaggatcagccgtaattattataattggcttggtgctggctactattgtggccatgtacgtgctgaccaaccagaaacataattgaatacagcagcaattggcaagctgcttacatagaactcgcggcgattggcatgccgccttaaaatttttattttattttttcttttcttttccgaatcggattttgtttttaatatttcaaaaaaaaaaaaaaaaaaaaaaaaaaaaaaaaaaaaaaaaaaaaaaaaaaaaaaaaaaaaaaaaaaaaaaaaaaaaaaaatacgtagtttaaac

SEQ ID NO: 94 - protein, 51 aa, Severe acute respiratory syndrome coronavirus 2
EAPFLYLYALVYFLQSINFVRIIMRLWLCWKCRSKNPLLYDANYFLCWHTN

SEQ ID NO: 95 - protein, 33 aa, Severe acute respiratory syndrome coronavirus 2
LAVFQSASKIITLKKRWQLALSKGVHFVCNLLL

SEQ ID NO: 96 - protein, 43 aa, Severe acute respiratory syndrome coronavirus 2
VTLKQGEIKDATPSDFVRATATIPIQASLPFGWLIVGVALLAV

SEQ ID NO: 97 - protein, 55 aa, Severe acute respiratory syndrome coronavirus 2
RRPQGLPNNTASWFTALTQHGKEDLKFPRGQGVPINTNSSPDDQIGYYRRATRRI

SEQ ID NO: 98 - protein, 19 aa, Severe acute respiratory syndrome coronavirus 2
MACLVGLMWLSYFIASFRL

SEQ ID NO: 99 - protein, 40 aa, Severe acute respiratory syndrome coronavirus 2
KKDKKKKADETQALPQRQKKQQTVTLLPAADLDDFSKQLQ

SEQ ID NO: 100 - protein, 55 aa, Severe acute respiratory syndrome coronavirus 2
GNFGDQELIRQGTDYKHWPQIAQFAPSASAFFGMSRIGMEVTPSGTWLTYTGAIK

SEQ ID NO: 101 - protein, 30 aa, Severe acute respiratory syndrome coronavirus 2
ITSGDGTTSPISEHDYQIGGYTEKWESGVK

SEQ ID NO: 102 - protein, 50 aa, Severe acute respiratory syndrome coronavirus 2
KMSGKGQQQQGQTVTKKSAAEASKKPRQKRTATKAYNVTQAFGRRGPEQT

SEQ ID NO: 103 - protein, 20 aa, Severe acute respiratory syndrome coronavirus 2
LLWPVTLACFVLAAVYRINW

SEQ ID NO: 104 - protein, 30 aa, Severe acute respiratory syndrome coronavirus 2
FKDQVILLNKHIDAYKTFPPTEPKKDKKKK

SEQ ID NO: 105 - protein, 35 aa, Severe acute respiratory syndrome coronavirus 2
TSPARMAGNGGDAALALLLLDRLNQLESKMSGKGQ

SEQ ID NO: 106 - protein, 19 aa, Severe acute respiratory syndrome coronavirus 2
KMKDLSPRWYFYYLGTGPE

SEQ ID NO: 107 - protein, 56 aa, Severe acute respiratory syndrome coronavirus 2
DCVVLHSYFTSDYYQLYSTQLSTDTGVEHVTFFIYNKIVDEPEEHVQIHTIDGSSG

SEQ ID NO: 108 - protein, 46 aa, Severe acute respiratory syndrome coronavirus 2
GIIWVATEGALNTPKDHIGTRNPANNAAIVLQLPQGTTLPKGFYAE

SEQ ID NO: 109 - DNA, 8651 bp, synthetic construct
  source 1..8651: mol_type = other DNA
gacattgattattgactagttgttaatagtaatcaattacggggtcattagttcatagcccatatatggagttccgcgttacataacttacggtaaatggcccgcctggctgaccgcccaacgacccccgcccattgacgtcaataatgacgtatgttcccatagtaacgccaatagggactttccattgacgtcaatgggtggagtatttacggtaaactgcccacttggcagtacatcaagtgtatcatatgccaagtccgccccctattgacgtcaatgacggtaaatggcccgcctggcattatgcccagtacatgaccttacgggactttcctacttggcagtacatctacgtattagtcatcgctattaccatggtgatgcggttttggcagtacaccaatgggcgtggatagcggtttgactcacggggatttccaagtctccaccccattgacgtcaatgggagtttgttttggcaccaaaatcaacgggactttccaaaatgtcgtaataaccccgccccgttgacgcaaatgggcggtaggcgtgtacggtgggaggtctatataagcagagctcgtttagtgaaccgtcagatcgcctggaacgccatccacgctgttttgacctccatagaagacagcgatcgcgccaccatgtttgtcttcctggtcttgctgccgctggtgagcagccagtgcgtgaatctcaccacccgcacccagcttccacctgcctacactaacagcttcacccgaggggtgtattaccctgacaaggtattccggtcctccgtcctccatagcacgcaggacctttttctgcccttcttctcaaatgtgacatggttccatgccattcacgtgagcggcacgaatggaacgaagcgctttgataaccccgtgctgcctttcaatgacggcgtctacttcgcctccactgaaaagtcaaacatcatccggggctggatctttggcaccactcttgattcaaagacccagtcactgctgattgtgaacaatgctacaaacgtggttatcaaggtgtgtgagtttcagttctgtaacgatccatttttgggagtgtactaccacaagaacaacaagtcctggatggagtctgagttcagagtgtatagctctgctaacaactgcaccttcgagtacgtgtcccagcctttccttatggacctggaaggcaaacagggcaatttcaaaaacctgagagagttcgtgtttaagaacattgacggatacttcaaaatttattctaagcacacaccaattaacttagtgcgggacctaccccaaggctttagcgccctagagcccctggttgacctgcccattgggatcaatataacaaggttccaaactctactggctctgcatagaagttatctgaccccaggagacagctctagtggttggaccgccggcgcagcagcctactatgtcgggtacttacagccacgcacgttccttctgaagtacaatgagaacgggacaatcactgacgcagtagactgtgcactggacccgctaagcgagactaagtgcacacttaaatccttcacggtggagaaaggcatttatcagacctctaacttcagggtgcagccaacagaaagcattgtgcgattcccaaatattactaatctttgccctttcggggaggtctttaatgcaactagattcgcatcagtctatgcgtggaaccgcaaacgcatttccaattgtgtcgcagactactcagtgctgtacaactctgcctctttcagtacgttcaagtgttacggagtgtcacccactaaactgaacgacctgtgctttacaaatgtctacgctgactccttcgtgattaggggagacgaggtgagacaaattgcccccggacagactgggaagattgccgactacaattataagcttcctgatgatttcactggctgtgttattgcctggaatagtaacaatctggatagcaaggtgggaggcaactataactacttatatcgactgtttaggaagagtaatctgaaaccatttgagcgggatatttccacagaaatttaccaggccgggagcacaccatgtaatggggtggagggatttaattgttacttcccactccagagctatggtttccaacccaccaatggagtgggttaccagccctatagagtcgtggtgcttagttttgagctgcttcacgccccagcaaccgtctgcggtcccaaaaagtcgaccaatctcgtgaaaaacaaatgcgtaaacttcaactttaacggcttaacaggaaccggcgtgctcaccgaaagcaacaagaaattccttccatttcagcaattcggaagggacatcgccgacacaacagacgcggtgagggacccacagactctggagatactggacatcactccttgttcgtttgggggcgtctcggtcatcacacccgggactaatactagtaatcaggtagcagttttatatcaaggcgtcaactgtaccgaagtacctgtggccatacacgctgatcagctaacgccaacatggcgagtctattccaccggctctaacgtttttcagaccagggctgggtgcctgataggggcagagcacgtcaataattcctatgagtgtgatatccccataggtgcggggatctgtgccagctatcaaacccaaaccaattcaccagggagcgcaagctctgtggcttctcagagcataattgcatatacaatgtcactgggcgctgagaatagcgttgcatactctaataacagcatagccattcccacgaactttactatcagtgtgacaaccgaaatattgccagtttcgatgaccaaaactagcgtggattgcacgatgtacatctgtggagactctaccgaatgcagcaatctgctattacaatatggcagcttctgtacacagttaaatcgagccttgacaggcatcgcagtggaacaggacaaaaatactcaagaggtgtttgcacaggtgaagcaaatctacaaaacgccccccattaaagattttggcgggttcaatttttcacaaattctccccgacccgtctaagccgagtaagcggtccttcatcgaagatctgctctttaacaaagtaaccctcgccgatgccggctttattaagcagtatggcgactgcctgggggatatagccgctcgtgacctgatttgcgcccagaagttcaatggtctgaccgtgttgcctcctttattgaccgatgaaatgattgcccagtacactagtgccctgctggccggcactatcacgtctgggtggaccttcggagctggtgccgccttgcagataccttttgcaatgcagatggcctataggtttaatggtatcggagtgactcagaacgtactgtacgagaaccagaagctcatcgctaatcaatttaactccgctatcggaaaaatccaggacagcctctcttctacagctagcgctctgggcaaactgcaggatgtcgttaatcagaatgcccaggccctgaacaccttggttaaacaactatcttccaacttcggggccatatccagtgtgttgaatgatattctctcccgcttggatccacctgaagctgaggtgcagatcgatcgcttgatcaccggcagactgcagtccctccagacatatgtaactcagcagctgattagagccgccgagataagggcaagtgcgaatctggctgccaccaagatgagcgaatgtgtattgggccagagcaaacgagttgatttttgcggtaaggggtatcatttaatgtctttccctcaatccgcacctcatggcgtagttttcctgcatgtgacttatgtcccggctcaggagaagaattttaccacagcccccgcgatctgccatgacggaaaggcccacttcccccgggaaggcgtgtttgtatccaatgggactcactggtttgtcactcagcgaaatttttatgaaccacagatcatcaccactgacaacacatttgttagtggaaactgcgatgtggtcatcggcatcgtgaataacactgtctatgatccactgcaacctgaactggattcttttaaagaggaactcgacaagtattttaaaaaccacactagccctgacgtggatctcggtgacatttctggcatcaacgctagcgtagtgaacattcagaaagagatagatagacttaatgaggtggccaagaacctcaacgaaagtctgatcgacctccaggaactggggaaatacgagcagtacattaaatggccttggtacatatggctggggttcattgctgggctgatcgcaatagtgatggtgaccataatgctctgttgcatgactagctgctgcagctgcctgaagggctgctgtagttgtgggtcatgttgtaagtttgacgaagatgatagcgagcctgtccttaaaggagtgaagctccactacaccggtggaagcggtggggttcgggcagagggcagaggctcactgctcacgtgtggtgatgtagaagagaatccaggtcctatgtactcattcgtatccgaggagaccggcacgttgatcgttaattctgtattgttgtttctcgcttttgtggtatttctccttgttacgcttgcgattcttaccgcccttcgcctctgtgcttactgctgcaacattgtgaatgtctccctcgtgaagccctccttttatgtttactccagagtgaaaaacctcaatagctccagggttccagacctgctggtgggcggttctggaggtgtccgtgctgaaggacgcgggtcccttctcacctgcggcgacgttgaggaaaaccctggccctatggctgacagcaatggtactattacggtggaagaactgaaaaagctcttggaacagtggaaccttgtgatcggttttctgtttttgacctggatttgcttgctccagttcgcctatgctaatagaaacaggtttctctatataatcaagttgatttttctgtggctgctctggcccgttacgcttgcgtgttttgtcctggctgctgtgtaccggatcaattggatcactggtggcattgctatcgccatggcttgtcttgtcgggctgatgtggctttcctattttatcgcttcatttaggctgtttgctcgaaccagatcaatgtggtcatttaatccagagactaatattctcttgaatgttccgctgcacggaactatcctcacacgacccctgttggagtccgaattggttatcggtgccgtaattctcaggggccaccttagaatcgcgggccaccatttgggacggtgcgatattaaagacctgcccaaagagatcacagtggccacaagtagaacgctctcatactataaactgggagcttcccagagagtggccggggatagtggcttcgcggcatatagtcgctaccgcatcggtaactataaacttaatacggaccatagtagctctagcgataacattgccttgctggttcagtgataaatttaaatgtgagggttaatgcttcgagcagacatgataagatacattgatgagtttggacaaaccacaactagaatgcagtgaaaaaaatgctttatttgtgaaatttgtgatgctattgctttatttgtaaccattataagctgcaataaacaagttaacaacaacaattgcattcattttatgtttcaggttcagggggagatgtgggaggttttttaaagcaagtaaaacctctacaaatgtggtaaaagcgagacattgattattgactagttgttaatagtaatcaattacggggtcattagttcatagcccatatatggagttccgcgttacataacttacggtaaatggcccgcctggctgaccgcccaacgacccccgcccattgacgtcaataatgacgtatgttcccatagtaacgccaatagggactttccattgacgtcaatgggtggagtatttacggtaaactgcccacttggcagtacatcaagtgtatcatatgccaagtccgccccctattgacgtcaatgacggtaaatggcccgcctggcattatgcccagtacatgaccttacgggactttcctacttggcagtacatctacgtattagtcatcgctattaccatggtgatgcggttttggcagtacaccaatgggcgtggatagcggtttgactcacggggatttccaagtctccaccccattgacgtcaatgggagtttgttttggcaccaaaatcaacgggactttccaaaatgtcgtaataaccccgccccgttgacgcaaatgggcggtaggcgtgtacggtgggaggtctatataagcagagctcgtttagtgaaccgtcagatcgcctggaacgccatccacgctgttttgacctccatagaagacagcgatcgcgccaccatggctggcgaggcccccttcctttacctgtacgcccttgtgtatttcctgcagagcatcaattttgtgagaatcatcatgaggctgtggctttgctggaaatgtaggagcaagaaccccctgttgtatgacgccaactactttctgtgttggcacaccaatctcgccgtgttccagagtgcctctaagatcattacactgaaaaagcggtggcagcttgcactttctaagggagtgcatttcgtttgcaacctgctcctggtgacactcaagcagggggaaatcaaagacgccacccctagcgacttcgttagagccactgccacaatcccaatccaggcttccctgcctttcggctggcttatcgtgggtgtggcactgttggctgtgcggagaccacagggactgcctaataatacagctagctggtttaccgctctgacacagcatggcaaagaagacctcaagttccctcgcggtcagggggtgcctattaacactaatagctctccagacgaccaaattgggtattacaggcgcgccacaagacggatcatggcctgcttagtggggctgatgtggctatcctattttattgctagctttcgcctgaagaaggacaagaagaagaaagctgatgagacccaggcactgccccagcgccaaaagaagcagcagacagtcacactgctccctgctgcagacctggatgacttcagcaagcagctgcaggggaactttggcgaccaggagctgattagacaggggactgactataagcattggcctcagattgctcagttcgccccaagtgcatccgccttcttcgggatgtcacgaataggaatggaagtgaccccttctgggacatggttgacatacaccggagcaatcaagattacctccggggacggtaccacgtctcctattagcgaacacgattatcagatagggggatatactgagaagtgggagtccggcgtcaaaaagatgagtgggaaaggccagcagcaacaaggccaaacagttactaaaaagtctgccgcagaagctagtaaaaagcctcgccagaagcggacagccaccaaagcttacaatgtgactcaggccttcggccgccgggggcctgaacagaccctcttgtggcccgttaccctcgcatgtttcgtgcttgcagctgtgtacaggatcaattggtttaaggatcaggttatcctgttgaacaaacatatagatgcctataagacattcccacccaccgagccaaagaaagataagaaaaagaaaactagtcctgcaaggatggccggcaatggaggagacgcagccttagccctgctcttactcgacaggctgaaccaacttgagtctaaaatgagcggtaaagggcagaagatgaaggatctgtccccaaggtggtatttctactatctgggcaccggccctgaggattgtgtcgtcctccactcatacttcactagcgattattaccagctgtatagtacacaattatctaccgacacaggcgtcgagcacgtgaccttctttatatacaataagatcgtggatgaaccagaggagcatgtgcagatccacactattgatggctctagcgggggcatcatctgggtggcaacagaaggagccctcaacaccccaaaggaccatatcggcaccaggaatccagccaacaatgccgccattgttctgcagctccctcagggcactactctccctaaaggcttctatgctgagggacccggaccaggcgccaaatttgttgctgcttggacactgaaagctgctgctgggcccggaccaggccagtacatcaaggccaactctaagtttatcggcatcaccgaattgggacctggacccggctagtgagtttaaactcccatttaaatgtgagggttaatgcttcgagcagagctcgctgatcagcctcgactgtgccttctagttgccagccatctgttgtttgcccctcccccgtgccttccttgaccctggaaggtgccactcccactgtcctttcctaataaaatgaggaaattgcatcgcattgtctgagtaggtgtcattctattctggggggtggggtggggcaggacagcaagggggaggattgggaagacaatagcaggcatgctggggatgcggtgggctctatggcttctgaggcggaaagaacc

SEQ ID NO: 110 - protein, 1270 aa, synthetic construct
MFVFLVLLPLVSSQCVNLTTRTQLPPAYTNSFTRGVYYPDKVFRSSVLHSTQDLFLPFFSNVTWFHAISGTNGTKRFDNPVLPFNDGVYFASTEKSNIIRGWIFGTTLDSKTQSLLIVNNATNVVIKVCEFQFCNDPFLGVYHKNNKSWMESEFRVYSSANNCTFEYVSQPFLMDLEGKQGNFKNLREFVFKNIDGYFKIYSKHTPINLVRDLPQGFSALEPLVDLPIGINITRFQTLLALHRSYLTPGDSSSGWTAGAAAYYVGYLQPRTFLLKYNENGTITDAVDCALDPLSETKCTLKSFTVEKGIYQTSNFRVQPTESIVRFPNITNLCPFGEVFNATRFASVYAWNRKRISNCVADYSVLYNSASFSTFKCYGVSPTKLNDLCFTNVYADSFVIRGDEVRQIAPGQTGKIADYNYKLPDDFTGCVIAWNSNNLDSKVGGNYNYLYRLFRKSNLKPFERDISTEIYQAGSTPCNGVEGFNCYFPLQSYGFQPTYGVGYQPYRVVVLSFELLHAPATVCGPKKSTNLVKNKCVNFNFNGLTGTGVLTESNKKFLPFQQFGRDIDDTTDAVRDPQTLEILDITPCSFGGVSVITPGTNTSNQVAVLYQGVNCTEVPVAIHADQLTPTWRVYSTGSNVFQTRAGCLIGAEHVNNSYECDIPIGAGICASYQTQTNSHGSASSVASQSIIAYTMSLGAENSVAYSNNSIAIPINFTISVTTEILPVSMTKTSVDCTMYICGDSTECSNLLLQYGSFCTQLNRALTGIAVEQDKNTQEVFAQVKQIYKTPPIKDFGGFNFSQILPDPSKPSKRSFIEDLLFNKVTLADAGFIKQYGDCLGDIAARDLICAQKFNGLTVLPPLLTDEMIAQYTSALLAGTITSGWTFGAGAALQIPFAMQMAYRFNGIGVTQNVLYENQKLIANQFNSAIGKIQDSLSSTASALGKLQDVVNQNAQALNTLVKQLSSNFGAISSVLNDILARLDPPEAEVQIDRLITGRLQSLQTYVTQQLIRAAEIRASANLAATKMSECVLGQSKRVDFCGKGYHLMSFPQSAPHGVVFLHVTYVPAQEKNFTTAPAICHDGKAHFPREGVFVSNGTHWFVTQRNFYEPQIITTHNTFVSGNCDVVIGIVNNTVYDPLQPELDSFKEELDKYFKNHTSPDVDLGDISGINASVVNIQKEIDRLNEVAKNLNESLIDLQELGKYEQYIKWPWYIWLGFIAGLIAIVMVTIMLCCMTSCCSCLKGCCSCGSCCKFDEDDSEPVLKGVKLHYT

SEQ ID NO: 111 - DNA, 7629 bp, synthetic construct
  source 1..7629: mol_type = other DNA
gacattgattattgactagttgttaatagtaatcaattacggggtcattagttcatagcccatatatggagttccgcgttacataacttacggtaaatggcccgcctggctgaccgcccaacgacccccgcccattgacgtcaataatgacgtatgttcccatagtaacgccaatagggactttccattgacgtcaatgggtggagtatttacggtaaactgcccacttggcagtacatcaagtgtatcatatgccaagtccgccccctattgacgtcaatgacggtaaatggcccgcctggcattatgcccagtacatgaccttacgggactttcctacttggcagtacatctacgtattagtcatcgctattaccatggtgatgcggttttggcagtacaccaatgggcgtggatagcggtttgactcacggggatttccaagtctccaccccattgacgtcaatgggagtttgttttggcaccaaaatcaacgggactttccaaaatgtcgtaataaccccgccccgttgacgcaaatgggcggtaggcgtgtacggtgggaggtctatataagcagagctcgtttagtgaaccgtcagatcgcctggaacgccatccacgctgttttgacctccatagaagacagcgatcgcgccaccatgtttgtcttcctggtcttgctgccgctggtgagcagccagtgcgtgaatctcaccacccgcacccagcttccacctgcctacactaacagcttcacccgaggggtgtattaccctgacaaggtattccggtcctccgtcctccatagcacgcaggacctttttctgcccttcttctcaaatgtgacatggttccatgccattagcggcacgaatggaacgaagcgctttgataaccccgtgctgcctttcaatgacggcgtctacttcgcctccactgaaaagtcaaacatcatccggggctggatctttggcaccactcttgattcaaagacccagtcactgctgattgtgaacaatgctacaaacgtggttatcaaggtgtgtgagtttcagttctgtaacgatccatttttgggagtgtaccacaagaacaacaagtcctggatggagtctgagttcagagtgtatagctctgctaacaactgcaccttcgagtacgtgtcccagcctttccttatggacctggaaggcaaacagggcaatttcaaaaacctgagagagttcgtgtttaagaacattgacggatacttcaaaatttattctaagcacacaccaattaacttagtgcgggacctaccccaaggctttagcgccctagagcccctggttgacctgcccattgggatcaatataacaaggttccaaactctactggctctgcatagaagttatctgaccccaggagacagctctagtggttggaccgccggcgcagcagcctactatgtcgggtacttacagccacgcacgttccttctgaagtacaatgagaacgggacaatcactgacgcagtagactgtgcactggacccgctaagcgagactaagtgcacacttaaatccttcacggtggagaaaggcatttatcagacctctaacttcagggtgcagccaacagaaagcattgtgcgattcccaaatattactaatctttgccctttcggggaggtctttaatgcaactagattcgcatcagtctatgcgtggaaccgcaaacgcatttccaattgtgtcgcagactactcagtgctgtacaactctgcctctttcagtacgttcaagtgttacggagtgtcacccactaaactgaacgacctgtgctttacaaatgtctacgctgactccttcgtgattaggggagacgaggtgagacaaattgcccccggacagactgggaagattgccgactacaattataagcttcctgatgatttcactggctgtgttattgcctggaatagtaacaatctggatagcaaggtgggaggcaactataactacttatatcgactgtttaggaagagtaatctgaaaccatttgagcgggatatttccacagaaatttaccaggccgggagcacaccatgtaatggggtggagggatttaattgttacttcccactccagagctatggtttccaacccacctatggagtgggttaccagccctatagagtcgtggtgcttagttttgagctgcttcacgccccagcaaccgtctgcggtcccaaaaagtcgaccaatctcgtgaaaaacaaatgcgtaaacttcaactttaacggcttaacaggaaccggcgtgctcaccgaaagcaacaagaaattccttccatttcagcaattcggaagggacatcgatgacacaacagacgcggtgagggacccacagactctggagatactggacatcactccttgttcgtttgggggcgtctcggtcatcacacccgggactaatactagtaatcaggtagcagttttatatcaaggcgtcaactgtaccgaagtacctgtggccatacacgctgatcagctaacgccaacatggcgagtctattccaccggctctaacgtttttcagaccagggctgggtgcctgataggggcagagcacgtcaataattcctatgagtgtgatatccccataggtgcggggatctgtgccagctatcaaacccaaaccaattcacatgggagcgcaagctctgtggcttctcagagcataattgcatatacaatgtcactgggcgctgagaatagcgttgcatactctaataacagcatagccattcccataaactttactatcagtgtgacaaccgaaatattgccagtttcgatgaccaaaactagcgtggattgcacgatgtacatctgtggagactctaccgaatgcagcaatctgctattacaatatggcagcttctgtacacagttaaatcgagccttgacaggcatcgcagtggaacaggacaaaaatactcaagaggtgtttgcacaggtgaagcaaatctacaaaacgccccccattaaagattttggcgggttcaatttttcacaaattctccccgacccgtctaagccgagtaagcggtccttcatcgaagatctgctctttaacaaagtaaccctcgccgatgccggctttattaagcagtatggcgactgcctgggggatatagccgctcgtgacctgatttgcgcccagaagttcaatggtctgaccgtgttgcctcctttattgaccgatgaaatgattgcccagtacactagtgccctgctggccggcactatcacgtctgggtggaccttcggagctggtgccgccttgcagataccttttgcaatgcagatggcctataggtttaatggtatcggagtgactcagaacgtactgtacgagaaccagaagctcatcgctaatcaatttaactccgctatcggaaaaatccaggacagcctctcttctacagctagcgctctgggcaaactgcaggatgtcgttaatcagaatgcccaggccctgaacaccttggttaaacaactatcttccaacttcggggccatatccagtgtgttgaatgatattctcgcacgcttggatccacctgaagctgaggtgcagatcgatcgcttgatcaccggcagactgcagtccctccagacatatgtaactcagcagctgattagagccgccgagataagggcaagtgcgaatctggctgccaccaagatgagcgaatgtgtattgggccagagcaaacgagttgatttttgcggtaaggggtatcatttaatgtctttccctcaatccgcacctcatggcgtagttttcctgcatgtgacttatgtcccggctcaggagaagaattttaccacagcccccgcgatctgccatgacggaaaggcccacttcccccgggaaggcgtgtttgtatccaatgggactcactggtttgtcactcagcgaaatttttatgaaccacagatcatcaccactcacaacacatttgttagtggaaactgcgatgtggtcatcggcatcgtgaataacactgtctatgatccactgcaacctgaactggattcttttaaagaggaactcgacaagtattttaaaaaccacactagccctgacgtggatctcggtgacatttctggcatcaacgctagcgtagtgaacattcagaaagagatagatagacttaatgaggtggccaagaacctcaacgaaagtctgatcgacctccaggaactggggaaatacgagcagtacattaaatggccttggtacatatggctggggttcattgctgggctgatcgcaatagtgatggtgaccataatgctctgttgcatgactagctgctgcagctgcctgaagggctgctgtagttgtgggtcatgttgtaagtttgacgaagatgatagcgagcctgtccttaaaggagtgaagctccactacacctagtgggtttaaactcccatttaaatgtgagggttaatgcttcgagcagacatgataagatacattgatgagtttggacaaaccacaactagaatgcagtgaaaaaaatgctttatttgtgaaatttgtgatgctattgctttatttgtaaccattataagctgcaataaacaagttaacaacaacaattgcattcattttatgtttcaggttcagggggagatgtgggaggttttttaaagcaagtaaaacctctacaaatgtggtaaaataactataacggtcctaaggtagcgagacattgattattgactagttgttaatagtaatcaattacggggtcattagttcatagcccatatatggagttccgcgttacataacttacggtaaatggcccgcctggctgaccgcccaacgacccccgcccattgacgtcaataatgacgtatgttcccatagtaacgccaatagggactttccattgacgtcaatgggtggagtatttacggtaaactgcccacttggcagtacatcaagtgtatcatatgccaagtccgccccctattgacgtcaatgacggtaaatggcccgcctggcattatgcccagtacatgaccttacgggactttcctacttggcagtacatctacgtattagtcatcgctattaccatggtgatgcggttttggcagtacaccaatgggcgtggatagcggtttgactcacggggatttccaagtctccaccccattgacgtcaatgggagtttgttttggcaccaaaatcaacgggactttccaaaatgtcgtaataaccccgccccgttgacgcaaatgggcggtaggcgtgtacggtgggaggtctatataagcagagctcgtttagtgaaccgtcagatcgcctggaacgccatccacgctgttttgacctccatagaagacagcgatcgcgccaccatggctggcgaggcccccttcctttacctgtacgcccttgtgtatttcctgcagagcatcaattttgtgagaatcatcatgaggctgtggctttgctggaaatgtaggagcaagaaccccctgttgtatgacgccaactactttctgtgttggcacaccaatctcgccgtgttccagagtgcctctaagatcattacactgaaaaagcggtggcagcttgcactttctaagggagtgcatttcgtttgcaacctgctcctggtgacactcaagcagggggaaatcaaagacgccacccctagcgacttcgttagagccactgccacaatcccaatccaggcttccctgcctttcggctggcttatcgtgggtgtggcactgttggctgtgcggagaccacagggactgcctaataatacagctagctggtttaccgctctgacacagcatggcaaagaagacctcaagttccctcgcggtcagggggtgcctattaacactaatagctctccagacgaccaaattgggtattacaggcgcgccacaagacggatcatggcctgcttagtggggctgatgtggctatcctattttattgctagctttcgcctgaagaaggacaagaagaagaaagctgatgagacccaggcactgccccagcgccaaaagaagcagcagacagtcacactgctccctgctgcagacctggatgacttcagcaagcagctgcaggggaactttggcgaccaggagctgattagacaggggactgactataagcattggcctcagattgctcagttcgccccaagtgcatccgccttcttcgggatgtcacgaataggaatggaagtgaccccttctgggacatggttgacatacaccggagcaatcaagattacctccggggacggtaccacgtctcctattagcgaacacgattatcagatagggggatatactgagaagtgggagtccggcgtcaaaaagatgagtgggaaaggccagcagcaacaaggccaaacagttactaaaaagtctgccgcagaagctagtaaaaagcctcgccagaagcggacagccaccaaagcttacaatgtgactcaggccttcggccgccgggggcctgaacagaccctcttgtggcccgttaccctcgcatgtttcgtgcttgcagctgtgtacaggatcaattggtttaaggatcaggttatcctgttgaacaaacatatagatgcctataagacattcccacccaccgagccaaagaaagataagaaaaagaaaactagtcctgcaaggatggccggcaatggaggagacgcagccttagccctgctcttactcgacaggctgaaccaacttgagtctaaaatgagcggtaaagggcagaagatgaaggatctgtccccaaggtggtatttctactatctgggcaccggccctgaggattgtgtcgtcctccactcatacttcactagcgattattaccagctgtatagtacacaattatctaccgacacaggcgtcgagcacgtgaccttctttatatacaataagatcgtggatgaaccagaggagcatgtgcagatccacactattgatggctctagcgggggcatcatctgggtggcaacagaaggagccctcaacaccccaaaggaccatatcggcaccaggaatccagccaacaatgccgccattgttctgcagctccctcagggcactactctccctaaaggcttctatgctgagggacccggaccaggcgccaaatttgttgctgcttggacactgaaagctgctgctgggcccggaccaggccagtacatcaaggccaactctaagtttatcggcatcaccgaattgggacctggacccggctagtgagtttaaactcccatttaaatgtgagggttaatgcttcgagcagagctcgctgatcagcctcgactgtgccttctagttgccagccatctgttgtttgcccctcccccgtgccttccttgaccctggaaggtgccactcccactgtcctttcctaataaaatgaggaaattgcatcgcattgtctgagtaggtgtcattctattctggggggtggggtggggcaggacagcaagggggaggattgggaagacaatagcaggcatgctggggatgcggtgggctctatggcttctgaggcggaaagaacc

SEQ ID NO: 112 - protein, 1270 aa, synthetic construct
MFVFLVLLPLVSSQCVNFTTRTQLPPAYTNSFTRGVYYPDKVFRSSVLHSTQDLFLPFFSNVTWFHAIHVSGTNGTKRFANPVLPFNDGVYFASTEKSNIIRGWIFGTTLDSKTQSLLIVNNATNVVIKVCEFQFCNDPFLGVYYHKNNKSWMESEFRVYSSANNCTFEYVSQPFLMDLEGKQGNFKNLREFVFKNIDGYFKIYSKHTPINLVRGLPQGFSALEPLVDLPIGINITRFQTLHISYLTPGDSSSGWTAGAAAYYVGYLQPRTFLLKYNENGTITDAVDCALDPLSETKCTLKSFTVEKGIYQTSNFRVQPTESIVRFPNITNLCPFGEVFNATRFASVYAWNRKRISNCVADYSVLYNSASFSTFKCYGVSPTKLNDLCFTNVYADSFVIRGDEVRQIAPGQTGNIADYNYKLPDDFTGCVIAWNSNNLDSKVGGNYNYLYRLFRKSNLKPFERDISTEIYQAGSTPCNGVKGFNCYFPLQSYGFQPTYGVGYQPYRVVVLSFELLHAPATVCGPKKSTNLVKNKCVNFNFNGLTGTGVLTESNKKFLPFQQFGRDIADTTDAVRDPQTLEILDITPCSFGGVSVITPGTNTSNQVAVLYQGVNCTEVPVAIHADQLTPTWRVYSTGSNVFQTRAGCLIGAEHVNNSYECDIPIGAGICASYQTQTNSPGSASSVASQSIIAYTMSLGVENSVAYSNNSIAIPTNFTISVTTEILPVSMTKTSVDCTMYICGDSTECSNLLLQYGSFCTQLNRALTGIAVEQDKNTQEVFAQVKQIYKTPPIKDFGGFNFSQILPDPSKPSKRSFIEDLLFNKVTLADAGFIKQYGDCLGDIAARDLICAQKFNGLTVLPPLLTDEMIAQYTSALLAGTITSGWTFGAGAALQIPFAMQMAYRFNGIGVTQNVLYENQKLIANQFNSAIGKIQDSLSSTASALGKLQDVVNQNAQALNTLVKQLSSNFGAISSVLNDILSRLDPPEAEVQIDRLITGRLQSLQTYVTQQLIRAAEIRASANLAATKMSECVLGQSKRVDFCGKGYHLMSFPQSAPHGVVFLHVTYVPAQEKNFTTAPAICHDGKAHFPREGVFVSNGTHWFVTQRNFYEPQIITTDNTFVSGNCDVVIGIVNNTVYDPLQPELDSFKEELDKYFKNHTSPDVDLGDISGINASVVNIQKEIDRLNEVAKNLNESLIDLQELGKYEQYIKWPWYIWLGFIAGLIAIVMVTIMLCCMTSCCSCLKGCCSCGSCCKFDEDDSEPVLKGVKLHYT

SEQ ID NO: 113 - DNA, 7629 bp, synthetic construct
  source 1..7629: mol_type = other DNA
gacattgattattgactagttgttaatagtaatcaattacggggtcattagttcatagcccatatatggagttccgcgttacataacttacggtaaatggcccgcctggctgaccgcccaacgacccccgcccattgacgtcaataatgacgtatgttcccatagtaacgccaatagggactttccattgacgtcaatgggtggagtatttacggtaaactgcccacttggcagtacatcaagtgtatcatatgccaagtccgccccctattgacgtcaatgacggtaaatggcccgcctggcattatgcccagtacatgaccttacgggactttcctacttggcagtacatctacgtattagtcatcgctattaccatggtgatgcggttttggcagtacaccaatgggcgtggatagcggtttgactcacggggatttccaagtctccaccccattgacgtcaatgggagtttgttttggcaccaaaatcaacgggactttccaaaatgtcgtaataaccccgccccgttgacgcaaatgggcggtaggcgtgtacggtgggaggtctatataagcagagctcgtttagtgaaccgtcagatcgcctggaacgccatccacgctgttttgacctccatagaagacagcgatcgcgccaccatgtttgtcttcctggtcttgctgccgctggtgagcagccagtgcgtgaatttcaccacccgcacccagcttccacctgcctacactaacagcttcacccgaggggtgtattaccctgacaaggtattccggtcctccgtcctccatagcacgcaggacctttttctgcccttcttctcaaatgtgacatggttccatgccattcacgtgagcggcacgaatggaacgaagcgctttgctaaccccgtgctgcctttcaatgacggcgtctacttcgcctccactgaaaagtcaaacatcatccggggctggatctttggcaccactcttgattcaaagacccagtcactgctgattgtgaacaatgctacaaacgtggttatcaaggtgtgtgagtttcagttctgtaacgatccatttttgggagtgtactaccacaagaacaacaagtcctggatggagtctgagttcagagtgtatagctctgctaacaactgcaccttcgagtacgtgtcccagcctttccttatggacctggaaggcaaacagggcaatttcaaaaacctgagagagttcgtgtttaagaacattgacggatacttcaaaatttattctaagcacacaccaattaacttagtgcggggcctaccccaaggctttagcgccctagagcccctggttgacctgcccattgggatcaatataacaaggttccaaactctacatataagttatctgaccccaggagacagctctagtggttggaccgccggcgcagcagcctactatgtcgggtacttacagccacgcacgttccttctgaagtacaatgagaacgggacaatcactgacgcagtagactgtgcactggacccgctaagcgagactaagtgcacacttaaatccttcacggtggagaaaggcatttatcagacctctaacttcagggtgcagccaacagaaagcattgtgcgattcccaaatattactaatctttgccctttcggggaggtctttaatgcaactagattcgcatcagtctatgcgtggaaccgcaaacgcatttccaattgtgtcgcagactactcagtgctgtacaactctgcctctttcagtacgttcaagtgttacggagtgtcacccactaaactgaacgacctgtgctttacaaatgtctacgctgactccttcgtgattaggggagacgaggtgagacaaattgcccccggacagactgggaatattgccgactacaattataagcttcctgatgatttcactggctgtgttattgcctggaatagtaacaatctggatagcaaggtgggaggcaactataactacttatatcgactgtttaggaagagtaatctgaaaccatttgagcgggatatttccacagaaatttaccaggccgggagcacaccatgtaatggggtgaagggatttaattgttacttcccactccagagctatggtttccaacccacctatggagtgggttaccagccctatagagtcgtggtgcttagttttgagctgcttcacgccccagcaaccgtctgcggtcccaaaaagtcgaccaatctcgtgaaaaacaaatgcgtaaacttcaactttaacggcttaacaggaaccggcgtgctcaccgaaagcaacaagaaattccttccatttcagcaattcggaagggacatcgccgacacaacagacgcggtgagggacccacagactctggagatactggacatcactccttgttcgtttgggggcgtctcggtcatcacacccgggactaatactagtaatcaggtagcagttttatatcaaggcgtcaactgtaccgaagtacctgtggccatacacgctgatcagctaacgccaacatggcgagtctattccaccggctctaacgtttttcagaccagggctgggtgcctgataggggcagagcacgtcaataattcctatgagtgtgatatccccataggtgcggggatctgtgccagctatcaaacccaaaccaattcaccagggagcgcaagctctgtggcttctcagagcataattgcatatacaatgtcactgggcgttgagaatagcgttgcatactctaataacagcatagccattcccacgaactttactatcagtgtgacaaccgaaatattgccagtttcgatgaccaaaactagcgtggattgcacgatgtacatctgtggagactctaccgaatgcagcaatctgctattacaatatggcagcttctgtacacagttaaatcgagccttgacaggcatcgcagtggaacaggacaaaaatactcaagaggtgtttgcacaggtgaagcaaatctacaaaacgccccccattaaagattttggcgggttcaatttttcacaaattctccccgacccgtctaagccgagtaagcggtccttcatcgaagatctgctctttaacaaagtaaccctcgccgatgccggctttattaagcagtatggcgactgcctgggggatatagccgctcgtgacctgatttgcgcccagaagttcaatggtctgaccgtgttgcctcctttattgaccgatgaaatgattgcccagtacactagtgccctgctggccggcactatcacgtctgggtggaccttcggagctggtgccgccttgcagataccttttgcaatgcagatggcctataggtttaatggtatcggagtgactcagaacgtactgtacgagaaccagaagctcatcgctaatcaatttaactccgctatcggaaaaatccaggacagcctctcttctacagctagcgctctgggcaaactgcaggatgtcgttaatcagaatgcccaggccctgaacaccttggttaaacaactatcttccaacttcggggccatatccagtgtgttgaatgatattctctcccgcttggatccacctgaagctgaggtgcagatcgatcgcttgatcaccggcagactgcagtccctccagacatatgtaactcagcagctgattagagccgccgagataagggcaagtgcgaatctggctgccaccaagatgagcgaatgtgtattgggccagagcaaacgagttgatttttgcggtaaggggtatcatttaatgtctttccctcaatccgcacctcatggcgtagttttcctgcatgtgacttatgtcccggctcaggagaagaattttaccacagcccccgcgatctgccatgacggaaaggcccacttcccccgggaaggcgtgtttgtatccaatgggactcactggtttgtcactcagcgaaatttttatgaaccacagatcatcaccactgacaacacatttgttagtggaaactgcgatgtggtcatcggcatcgtgaataacactgtctatgatccactgcaacctgaactggattcttttaaagaggaactcgacaagtattttaaaaaccacactagccctgacgtggatctcggtgacatttctggcatcaacgctagcgtagtgaacattcagaaagagatagatagacttaatgaggtggccaagaacctcaacgaaagtctgatcgacctccaggaactggggaaatacgagcagtacattaaatggccttggtacatatggctggggttcattgctgggctgatcgcaatagtgatggtgaccataatgctctgttgcatgactagctgctgcagctgcctgaagggctgctgtagttgtgggtcatgttgtaagtttgacgaagatgatagcgagcctgtccttaaaggagtgaagctccactacacctagtgggtttaaactcccatttaaatgtgagggttaatgcttcgagcagacatgataagatacattgatgagtttggacaaaccacaactagaatgcagtgaaaaaaatgctttatttgtgaaatttgtgatgctattgctttatttgtaaccattataagctgcaataaacaagttaacaacaacaattgcattcattttatgtttcaggttcagggggagatgtgggaggttttttaaagcaagtaaaacctctacaaatgtggtaaaataactataacggtcctaaggtagcgagacattgattattgactagttgttaatagtaatcaattacggggtcattagttcatagcccatatatggagttccgcgttacataacttacggtaaatggcccgcctggctgaccgcccaacgacccccgcccattgacgtcaataatgacgtatgttcccatagtaacgccaatagggactttccattgacgtcaatgggtggagtatttacggtaaactgcccacttggcagtacatcaagtgtatcatatgccaagtccgccccctattgacgtcaatgacggtaaatggcccgcctggcattatgcccagtacatgaccttacgggactttcctacttggcagtacatctacgtattagtcatcgctattaccatggtgatgcggttttggcagtacaccaatgggcgtggatagcggtttgactcacggggatttccaagtctccaccccattgacgtcaatgggagtttgttttggcaccaaaatcaacgggactttccaaaatgtcgtaataaccccgccccgttgacgcaaatgggcggtaggcgtgtacggtgggaggtctatataagcagagctcgtttagtgaaccgtcagatcgcctggaacgccatccacgctgttttgacctccatagaagacagcgatcgcgccaccatggctggcgaggcccccttcctttacctgtacgcccttgtgtatttcctgcagagcatcaattttgtgagaatcatcatgaggctgtggctttgctggaaatgtaggagcaagaaccccctgttgtatgacgccaactactttctgtgttggcacaccaatctcgccgtgttccagagtgcctctaagatcattacactgaaaaagcggtggcagcttgcactttctaagggagtgcatttcgtttgcaacctgctcctggtgacactcaagcagggggaaatcaaagacgccacccctagcgacttcgttagagccactgccacaatcccaatccaggcttccctgcctttcggctggcttatcgtgggtgtggcactgttggctgtgcggagaccacagggactgcctaataatacagctagctggtttaccgctctgacacagcatggcaaagaagacctcaagttccctcgcggtcagggggtgcctattaacactaatagctctccagacgaccaaattgggtattacaggcgcgccacaagacggatcatggcctgcttagtggggctgatgtggctatcctattttattgctagctttcgcctgaagaaggacaagaagaagaaagctgatgagacccaggcactgccccagcgccaaaagaagcagcagacagtcacactgctccctgctgcagacctggatgacttcagcaagcagctgcaggggaactttggcgaccaggagctgattagacaggggactgactataagcattggcctcagattgctcagttcgccccaagtgcatccgccttcttcgggatgtcacgaataggaatggaagtgaccccttctgggacatggttgacatacaccggagcaatcaagattacctccggggacggtaccacgtctcctattagcgaacacgattatcagatagggggatatactgagaagtgggagtccggcgtcaaaaagatgagtgggaaaggccagcagcaacaaggccaaacagttactaaaaagtctgccgcagaagctagtaaaaagcctcgccagaagcggacagccaccaaagcttacaatgtgactcaggccttcggccgccgggggcctgaacagaccctcttgtggcccgttaccctcgcatgtttcgtgcttgcagctgtgtacaggatcaattggtttaaggatcaggttatcctgttgaacaaacatatagatgcctataagacattcccacccaccgagccaaagaaagataagaaaaagaaaactagtcctgcaaggatggccggcaatggaggagacgcagccttagccctgctcttactcgacaggctgaaccaacttgagtctaaaatgagcggtaaagggcagaagatgaaggatctgtccccaaggtggtatttctactatctgggcaccggccctgaggattgtgtcgtcctccactcatacttcactagcgattattaccagctgtatagtacacaattatctaccgacacaggcgtcgagcacgtgaccttctttatatacaataagatcgtggatgaaccagaggagcatgtgcagatccacactattgatggctctagcgggggcatcatctgggtggcaacagaaggagccctcaacaccccaaaggaccatatcggcaccaggaatccagccaacaatgccgccattgttctgcagctccctcagggcactactctccctaaaggcttctatgctgagggacccggaccaggcgccaaatttgttgctgcttggacactgaaagctgctgctgggcccggaccaggccagtacatcaaggccaactctaagtttatcggcatcaccgaattgggacctggacccggctagtgagtttaaactcccatttaaatgtgagggttaatgcttcgagcagagctcgctgatcagcctcgactgtgccttctagttgccagccatctgttgtttgcccctcccccgtgccttccttgaccctggaaggtgccactcccactgtcctttcctaataaaatgaggaaattgcatcgcattgtctgagtaggtgtcattctattctggggggtggggtggggcaggacagcaagggggaggattgggaagacaatagcaggcatgctggggatgcggtgggctctatggcttctgaggcggaaagaacc

SEQ ID NO: 114 - DNA, 7638 bp, synthetic construct
  source 1..7638: mol_type = other DNA
gacattgattattgactagttgttaatagtaatcaattacggggtcattagttcatagcccatatatggagttccgcgttacataacttacggtaaatggcccgcctggctgaccgcccaacgacccccgcccattgacgtcaataatgacgtatgttcccatagtaacgccaatagggactttccattgacgtcaatgggtggagtatttacggtaaactgcccacttggcagtacatcaagtgtatcatatgccaagtccgccccctattgacgtcaatgacggtaaatggcccgcctggcattatgcccagtacatgaccttacgggactttcctacttggcagtacatctacgtattagtcatcgctattaccatggtgatgcggttttggcagtacaccaatgggcgtggatagcggtttgactcacggggatttccaagtctccaccccattgacgtcaatgggagtttgttttggcaccaaaatcaacgggactttccaaaatgtcgtaataaccccgccccgttgacgcaaatgggcggtaggcgtgtacggtgggaggtctatataagcagagctcgtttagtgaaccgtcagatcgcctggaacgccatccacgctgttttgacctccatagaagacagcgatcgcgccaccatgtttgtcttcctggtcttgctgccgctggtgagcagccagtgcgtgaatctcaccacccgcacccagcttccacctgcctacactaacagcttcacccgaggggtgtattaccctgacaaggtattccggtcctccgtcctccatagcacgcaggacctttttctgcccttcttctcaaatgtgacatggttccatgccattcacgtgagcggcacgaatggaacgaagcgctttgataaccccgtgctgcctttcaatgacggcgtctacttcgcctccactgaaaagtcaaacatcatccggggctggatctttggcaccactcttgattcaaagacccagtcactgctgattgtgaacaatgctacaaacgtggttatcaaggtgtgtgagtttcagttctgtaacgatccatttttgggagtgtactaccacaagaacaacaagtcctggatggagtctgagttcagagtgtatagctctgctaacaactgcaccttcgagtacgtgtcccagcctttccttatggacctggaaggcaaacagggcaatttcaaaaacctgagagagttcgtgtttaagaacattgacggatacttcaaaatttattctaagcacacaccaattaacttagtgcgggacctaccccaaggctttagcgccctagagcccctggttgacctgcccattgggatcaatataacaaggttccaaactctactggctctgcatagaagttatctgaccccaggagacagctctagtggttggaccgccggcgcagcagcctactatgtcgggtacttacagccacgcacgttccttctgaagtacaatgagaacgggacaatcactgacgcagtagactgtgcactggacccgctaagcgagactaagtgcacacttaaatccttcacggtggagaaaggcatttatcagacctctaacttcagggtgcagccaacagaaagcattgtgcgattcccaaatattactaatctttgccctttcggggaggtctttaatgcaactagattcgcatcagtctatgcgtggaaccgcaaacgcatttccaattgtgtcgcagactactcagtgctgtacaactctgcctctttcagtacgttcaagtgttacggagtgtcacccactaaactgaacgacctgtgctttacaaatgtctacgctgactccttcgtgattaggggagacgaggtgagacaaattgcccccggacagactgggaagattgccgactacaattataagcttcctgatgatttcactggctgtgttattgcctggaatagtaacaatctggatagcaaggtgggaggcaactataactacttatatcgactgtttaggaagagtaatctgaaaccatttgagcgggatatttccacagaaatttaccaggccgggagcacaccatgtaatggggtggagggatttaattgttacttcccactccagagctatggtttccaacccaccaatggagtgggttaccagccctatagagtcgtggtgcttagttttgagctgcttcacgccccagcaaccgtctgcggtcccaaaaagtcgaccaatctcgtgaaaaacaaatgcgtaaacttcaactttaacggcttaacaggaaccggcgtgctcaccgaaagcaacaagaaattccttccatttcagcaattcggaagggacatcgccgacacaacagacgcggtgagggacccacagactctggagatactggacatcactccttgttcgtttgggggcgtctcggtcatcacacccgggactaatactagtaatcaggtagcagttttatatcaaggcgtcaactgtaccgaagtacctgtggccatacacgctgatcagctaacgccaacatggcgagtctattccaccggctctaacgtttttcagaccagggctgggtgcctgataggggcagagcacgtcaataattcctatgagtgtgatatccccataggtgcggggatctgtgccagctatcaaacccaaaccaattcaccagggagcgcaagctctgtggcttctcagagcataattgcatatacaatgtcactgggcgctgagaatagcgttgcatactctaataacagcatagccattcccacgaactttactatcagtgtgacaaccgaaatattgccagtttcgatgaccaaaactagcgtggattgcacgatgtacatctgtggagactctaccgaatgcagcaatctgctattacaatatggcagcttctgtacacagttaaatcgagccttgacaggcatcgcagtggaacaggacaaaaatactcaagaggtgtttgcacaggtgaagcaaatctacaaaacgccccccattaaagattttggcgggttcaatttttcacaaattctccccgacccgtctaagccgagtaagcggtccttcatcgaagatctgctctttaacaaagtaaccctcgccgatgccggctttattaagcagtatggcgactgcctgggggatatagccgctcgtgacctgatttgcgcccagaagttcaatggtctgaccgtgttgcctcctttattgaccgatgaaatgattgcccagtacactagtgccctgctggccggcactatcacgtctgggtggaccttcggagctggtgccgccttgcagataccttttgcaatgcagatggcctataggtttaatggtatcggagtgactcagaacgtactgtacgagaaccagaagctcatcgctaatcaatttaactccgctatcggaaaaatccaggacagcctctcttctacagctagcgctctgggcaaactgcaggatgtcgttaatcagaatgcccaggccctgaacaccttggttaaacaactatcttccaacttcggggccatatccagtgtgttgaatgatattctctcccgcttggatccacctgaagctgaggtgcagatcgatcgcttgatcaccggcagactgcagtccctccagacatatgtaactcagcagctgattagagccgccgagataagggcaagtgcgaatctggctgccaccaagatgagcgaatgtgtattgggccagagcaaacgagttgatttttgcggtaaggggtatcatttaatgtctttccctcaatccgcacctcatggcgtagttttcctgcatgtgacttatgtcccggctcaggagaagaattttaccacagcccccgcgatctgccatgacggaaaggcccacttcccccgggaaggcgtgtttgtatccaatgggactcactggtttgtcactcagcgaaatttttatgaaccacagatcatcaccactgacaacacatttgttagtggaaactgcgatgtggtcatcggcatcgtgaataacactgtctatgatccactgcaacctgaactggattcttttaaagaggaactcgacaagtattttaaaaaccacactagccctgacgtggatctcggtgacatttctggcatcaacgctagcgtagtgaacattcagaaagagatagatagacttaatgaggtggccaagaacctcaacgaaagtctgatcgacctccaggaactggggaaatacgagcagtacattaaatggccttggtacatatggctggggttcattgctgggctgatcgcaatagtgatggtgaccataatgctctgttgcatgactagctgctgcagctgcctgaagggctgctgtagttgtgggtcatgttgtaagtttgacgaagatgatagcgagcctgtccttaaaggagtgaagctccactacacctagtgggtttaaactcccatttaaatgtgagggttaatgcttcgagcagacatgataagatacattgatgagtttggacaaaccacaactagaatgcagtgaaaaaaatgctttatttgtgaaatttgtgatgctattgctttatttgtaaccattataagctgcaataaacaagttaacaacaacaattgcattcattttatgtttcaggttcagggggagatgtgggaggttttttaaagcaagtaaaacctctacaaatgtggtaaaataactataacggtcctaaggtagcgagacattgattattgactagttgttaatagtaatcaattacggggtcattagttcatagcccatatatggagttccgcgttacataacttacggtaaatggcccgcctggctgaccgcccaacgacccccgcccattgacgtcaataatgacgtatgttcccatagtaacgccaatagggactttccattgacgtcaatgggtggagtatttacggtaaactgcccacttggcagtacatcaagtgtatcatatgccaagtccgccccctattgacgtcaatgacggtaaatggcccgcctggcattatgcccagtacatgaccttacgggactttcctacttggcagtacatctacgtattagtcatcgctattaccatggtgatgcggttttggcagtacaccaatgggcgtggatagcggtttgactcacggggatttccaagtctccaccccattgacgtcaatgggagtttgttttggcaccaaaatcaacgggactttccaaaatgtcgtaataaccccgccccgttgacgcaaatgggcggtaggcgtgtacggtgggaggtctatataagcagagctcgtttagtgaaccgtcagatcgcctggaacgccatccacgctgttttgacctccatagaagacagcgatcgcgccaccatggctggcgaggcccccttcctttacctgtacgcccttgtgtatttcctgcagagcatcaattttgtgagaatcatcatgaggctgtggctttgctggaaatgtaggagcaagaaccccctgttgtatgacgccaactactttctgtgttggcacaccaatctcgccgtgttccagagtgcctctaagatcattacactgaaaaagcggtggcagcttgcactttctaagggagtgcatttcgtttgcaacctgctcctggtgacactcaagcagggggaaatcaaagacgccacccctagcgacttcgttagagccactgccacaatcccaatccaggcttccctgcctttcggctggcttatcgtgggtgtggcactgttggctgtgcggagaccacagggactgcctaataatacagctagctggtttaccgctctgacacagcatggcaaagaagacctcaagttccctcgcggtcagggggtgcctattaacactaatagctctccagacgaccaaattgggtattacaggcgcgccacaagacggatcatggcctgcttagtggggctgatgtggctatcctattttattgctagctttcgcctgaagaaggacaagaagaagaaagctgatgagacccaggcactgccccagcgccaaaagaagcagcagacagtcacactgctccctgctgcagacctggatgacttcagcaagcagctgcaggggaactttggcgaccaggagctgattagacaggggactgactataagcattggcctcagattgctcagttcgccccaagtgcatccgccttcttcgggatgtcacgaataggaatggaagtgaccccttctgggacatggttgacatacaccggagcaatcaagattacctccggggacggtaccacgtctcctattagcgaacacgattatcagatagggggatatactgagaagtgggagtccggcgtcaaaaagatgagtgggaaaggccagcagcaacaaggccaaacagttactaaaaagtctgccgcagaagctagtaaaaagcctcgccagaagcggacagccaccaaagcttacaatgtgactcaggccttcggccgccgggggcctgaacagaccctcttgtggcccgttaccctcgcatgtttcgtgcttgcagctgtgtacaggatcaattggtttaaggatcaggttatcctgttgaacaaacatatagatgcctataagacattcccacccaccgagccaaagaaagataagaaaaagaaaactagtcctgcaaggatggccggcaatggaggagacgcagccttagccctgctcttactcgacaggctgaaccaacttgagtctaaaatgagcggtaaagggcagaagatgaaggatctgtccccaaggtggtatttctactatctgggcaccggccctgaggattgtgtcgtcctccactcatacttcactagcgattattaccagctgtatagtacacaattatctaccgacacaggcgtcgagcacgtgaccttctttatatacaataagatcgtggatgaaccagaggagcatgtgcagatccacactattgatggctctagcgggggcatcatctgggtggcaacagaaggagccctcaacaccccaaaggaccatatcggcaccaggaatccagccaacaatgccgccattgttctgcagctccctcagggcactactctccctaaaggcttctatgctgagggacccggaccaggcgccaaatttgttgctgcttggacactgaaagctgctgctgggcccggaccaggccagtacatcaaggccaactctaagtttatcggcatcaccgaattgggacctggacccggctagtgagtttaaactcccatttaaatgtgagggttaatgcttcgagcagagctcgctgatcagcctcgactgtgccttctagttgccagccatctgttgtttgcccctcccccgtgccttccttgaccctggaaggtgccactcccactgtcctttcctaataaaatgaggaaattgcatcgcattgtctgagtaggtgtcattctattctggggggtggggtggggcaggacagcaagggggaggattgggaagacaatagcaggcatgctggggatgcggtgggctctatggcttctgaggcggaaagaacc

SEQ ID NO: 115 - protein, 100 aa, synthetic construct
VTNTEMFVTAPDNLGYMYEVQWPGQTQPQIANCSVYDFFVWLHYYSVRDTVTNTEMFVTAPDNLGYMYEVQWPGQTQPQIANCSVYDFFVWLHYYSVRDT

SEQ ID NO: 116 - protein, 25 aa, synthetic construct
VTNTEMFVTAPDNLGYMYEVQWPGQ

SEQ ID NO: 117 - protein, 25 aa, synthetic construct
TQPQIANCSVYDFFVWLHYYSVRDT

SEQ ID NO: 118 - DNA, 19 bp, synthetic construct
  source 1..19: mol_type = other DNA
taatacgactcactatagg

SEQ ID NO: 119 - DNA, 20 bp, synthetic construct
  source 1..20: mol_type = other DNA
taatacgactcactataggn

SEQ ID NO: 120 - DNA, 17 bp, synthetic construct
  source 1..17: mol_type = other DNA
taatacgactcactata

SEQ ID NO: 121 - DNA, 18 bp, synthetic construct
  source 1..18: mol_type = other DNA
taatacgactcactatan

SEQ ID NO: 122 - DNA, 17 bp, synthetic construct
  source 1..17: mol_type = other DNA
atttaggtgacactata

SEQ ID NO: 123 - DNA, 25 bp, synthetic construct
  source 1..25: mol_type = other DNA
cccccttcagcctgaacttgattcc

SEQ ID NO: 124 - DNA, 25 bp, synthetic construct
  source 1..25: mol_type = other DNA
tccactgcaacctgaacttgatagt

SEQ ID NO: 125 - protein, 4 aa, synthetic construct
RRAR

SEQ ID NO: 126 - protein, 4 aa, synthetic construct
GSAS

SEQ ID NO: 127 - protein, 8 aa, Severe acute respiratory syndrome coronavirus 2
MESLVPGF

SEQ ID NO: 128 - protein, 10 aa, Severe acute respiratory syndrome coronavirus 2
VELVAELEGI

SEQ ID NO: 129 - protein, 8 aa, synthetic construct
SIINFEKL

SEQ ID NO: 130 - protein, 8 aa, Severe acute respiratory syndrome coronavirus 2
  REGION 1..8: note = Table A: HLA-B*18:01M HLA-B*37:01M HLA-B*07:05H
MESLVPGF

SEQ ID NO: 131 - protein, 8 aa, Severe acute respiratory syndrome coronavirus 2
  REGION 1..8: note = Table A: HLA-B*44:05H HLA-B*08:01M HLA-B*18:01H HLA-B*14:02H HLA-B*14:01H HLA-B*37:01H HLA-B*40:02M HLA-B*07:05H HLA-B*41:02H
NEKTHVQL

SEQ ID NO: 132 - protein, 8 aa, Severe acute respiratory syndrome coronavirus 2
  REGION 1..8: note = Table A: HLA-B*57:03H
KTHVQLSL

SEQ ID NO: 133 - protein, 8 aa, Severe acute respiratory syndrome coronavirus 2
  REGION 1..8: note = Table A: HLA-B*39:06H
THVQLSLP

SEQ ID NO: 134 - protein, 8 aa, Severe acute respiratory syndrome coronavirus 2
  REGION 1..8: note = Table A: HLA-B*52:01M
VQLSLPVL

SEQ ID NO: 135 - protein, 8 aa, Severe acute respiratory syndrome coronavirus 2
  REGION 1..8: note = Table A: HLA-C*15:05H HLA-B*51:01H HLA-B*52:01H HLA-B*13:02H
LSLPVLQV

SEQ ID NO: 136 - protein, 8 aa, Severe acute respiratory syndrome coronavirus 2
  REGION 1..8: note = Table A: HLA-B*08:01H
VLQVRDVL

SEQ ID NO: 137 - protein, 8 aa, Severe acute respiratory syndrome coronavirus 2
  REGION 1..8: note = Table A: HLA-B*37:01H HLA-B*40:02H HLA-B*41:02H HLA-C*07:04H
RDVLVRGF

SEQ ID NO: 138 - protein, 8 aa, Severe acute respiratory syndrome coronavirus 2
  REGION 1..8: note = Table A: HLA-C*05:01H
FGDSVEEV

SEQ ID NO: 139 - protein, 8 aa, Severe acute respiratory syndrome coronavirus 2
  REGION 1..8: note = Table A: HLA-B*14:02H HLA-B*41:02M
VEVEKGVL

SEQ ID NO: 140 - protein, 8 aa, Severe acute respiratory syndrome coronavirus 2
  REGION 1..8: note = Table A: HLA-B*13:02H
PQLEQPYV

SEQ ID NO: 141 - protein, 8 aa, Severe acute respiratory syndrome coronavirus 2
  REGION 1..8: note = Table A: HLA-B*49:01H
LEQPYVFI

SEQ ID NO: 142 - protein, 8 aa, Severe acute respiratory syndrome coronavirus 2
  REGION 1..8: note = Table A: HLA-A*33:01H HLA-A*33:03H HLA-A*34:01M HLA-A*34:02H HLA-A*66:01H
QPYVFIKR

SEQ ID NO: 143 - protein, 8 aa, Severe acute respiratory syndrome coronavirus 2
  REGION 1..8: note = Table A: HLA-B*46:01H HLA-B*08:01H HLA-B*35:03H HLA-C*15:05H HLA-C*01:02M HLA-B*35:02H HLA-B*51:01H HLA-B*35:12H
TAPHGHVM

SEQ ID NO: 144 - protein, 8 aa, Severe acute respiratory syndrome coronavirus 2
  REGION 1..8: note = Table A: HLA-B*56:01H HLA-B*08:01H HLA-B*55:02H HLA-C*15:05H HLA-B*55:01H HLA-B*07:04H
APHGHVMV

SEQ ID NO: 145 - protein, 8 aa, Severe acute respiratory syndrome coronavirus 2
  REGION 1..8: note = Table A: HLA-B*08:01H
HGHVMVEL

SEQ ID NO: 146 - protein, 8 aa, Severe acute respiratory syndrome coronavirus 2
  REGION 1..8: note = Table A: HLA-B*39:06H
GHVMVELV

SEQ ID NO: 147 - protein, 8 aa, Severe acute respiratory syndrome coronavirus 2
  REGION 1..8: note = Table A: HLA-B*35:12H
MVELVAEL

SEQ ID NO: 148 - protein, 8 aa, Severe acute respiratory syndrome coronavirus 2
  REGION 1..8: note = Table A: HLA-B*44:02H HLA-B*44:05H HLA-C*16:04H HLA-B*46:01H HLA-B*44:03M HLA-B*18:01M HLA-B*07:05M
AELEGIQY

SEQ ID NO: 149 - protein, 8 aa, Severe acute respiratory syndrome coronavirus 2
  REGION 1..8: note = Table A: HLA-C*03:04H
YGRSGETL

SEQ ID NO: 150 - protein, 8 aa, Severe acute respiratory syndrome coronavirus 2
  REGION 1..8: note = Table A: HLA-C*15:05H HLA-C*15:02H
RSGETLGV

SEQ ID NO: 151 - protein, 8 aa, Severe acute respiratory syndrome coronavirus 2
  REGION 1..8: note = Table A: HLA-B*40:02H HLA-B*49:01M
GETLGVLV

SEQ ID NO: 152 - protein, 8 aa, Severe acute respiratory syndrome coronavirus 2
  REGION 1..8: note = Table A: HLA-B*51:01H HLA-B*52:01H
LGVLVPHV

SEQ ID NO: 153 - protein, 8 aa, Severe acute respiratory syndrome coronavirus 2
  REGION 1..8: note = Table A: HLA-B*55:01H HLA-B*39:06H HLA-B*54:01H
HVGEIPVA

SEQ ID NO: 154 - protein, 8 aa, Severe acute respiratory syndrome coronavirus 2
  REGION 1..8: note = Table A: HLA-B*18:01H HLA-B*39:01H
VGEIPVAY

SEQ ID NO: 155 - protein, 8 aa, Severe acute respiratory syndrome coronavirus 2
  REGION 1..8: note = Table A: HLA-B*49:01H
GEIPVAYR

SEQ ID NO: 156 - protein, 8 aa, Severe acute respiratory syndrome coronavirus 2
  REGION 1..8: note = Table A: HLA-B*51:01H
IPVAYRKV

SEQ ID NO: 157 - protein, 8 aa, Severe acute respiratory syndrome coronavirus 2
  REGION 1..8: note = Table A: HLA-B*07:04H
PVAYRKVL

SEQ ID NO: 158 - protein, 8 aa, Severe acute respiratory syndrome coronavirus 2
  REGION 1..8: note = Table A: HLA-B*58:02H HLA-B*08:01M HLA-C*17:01H
VAYRKVLL

SEQ ID NO: 159 - protein, 8 aa, Severe acute respiratory syndrome coronavirus 2
  REGION 1..8: note = Table A: HLA-A*30:02H
KGAGGHSY

SEQ ID NO: 160 - protein, 8 aa, Severe acute respiratory syndrome coronavirus 2
  REGION 1..8: note = Table A: HLA-B*39:01H HLA-B*15:10H
GHSYGADL

SEQ ID NO: 161 - protein, 8 aa, Severe acute respiratory syndrome coronavirus 2
  REGION 1..8: note = Table A: HLA-B*46:01H
YGADLKSF

SEQ ID NO: 162 - protein, 8 aa, Severe acute respiratory syndrome coronavirus 2
  REGION 1..8: note = Table A: HLA-B*37:01M HLA-B*40:02H HLA-B*41:02H HLA-C*07:04H
ADLKSFDL

SEQ ID NO: 163 - protein, 8 aa, Severe acute respiratory syndrome coronavirus 2
  REGION 1..8: note = Table A: HLA-C*04:01M HLA-C*04:03M HLA-C*08:02M HLA-B*39:01H
SFDLGDEL

SEQ ID NO: 164 - protein, 8 aa, Severe acute respiratory syndrome coronavirus 2
  REGION 1..8: note = Table A: HLA-B*18:01H HLA-B*07:05H
DELGTDPY

SEQ ID NO: 165 - protein, 8 aa, Severe acute respiratory syndrome coronavirus 2
  REGION 1..8: note = Table A: HLA-B*58:02M HLA-C*16:01M HLA-C*06:02H HLA-C*03:03H HLA-C*03:04M HLA-C*15:05M HLA-C*01:02H HLA-C*15:02H
SSGVTREL

SEQ ID NO: 166 - protein, 8 aa, Severe acute respiratory syndrome coronavirus 2
  REGION 1..8: note = Table A: HLA-B*38:02H
TRYVDNNF

SEQ ID NO: 167 - protein, 8 aa, Severe acute respiratory syndrome coronavirus 2
  REGION 1..8: note = Table A: HLA-C*15:05H HLA-B*51:01H
DGYPLECI

SEQ ID NO: 168 - protein, 8 aa, Severe acute respiratory syndrome coronavirus 2
  REGION 1..8: note = Table A: HLA-A*36:01H
QLDFIDTK

SEQ ID NO: 169 - protein, 8 aa, Severe acute respiratory syndrome coronavirus 2
  REGION 1..8: note = Table A: HLA-A*36:01H
IDTKRGVY

SEQ ID NO: 170 - protein, 8 aa, Severe acute respiratory syndrome coronavirus 2
  REGION 1..8: note = Table A: HLA-B*38:02H
EHEHEIAW

SEQ ID NO: 171 - protein, 8 aa, Severe acute respiratory syndrome coronavirus 2
  REGION 1..8: note = Table A: HLA-B*18:01M HLA-B*07:05H
HEHEIAWY

SEQ ID NO: 172 - protein, 8 aa, Severe acute respiratory syndrome coronavirus 2
  REGION 1..8: note = Table A: HLA-B*39:01H
EHEIAWYT

SEQ ID NO: 173 - protein, 8 aa, Severe acute respiratory syndrome coronavirus 2
  REGION 1..8: note = Table A: HLA-A*34:01H HLA-A*66:01H
EIAWYTER

SEQ ID NO: 174 - protein, 8 aa, Severe acute respiratory syndrome coronavirus 2
  REGION 1..8: note = Table A: HLA-B*56:01H HLA-B*55:02H HLA-B*55:01M HLA-B*39:06H HLA-B*54:01M
TPFEIKLA

SEQ ID NO: 175 - protein, 8 aa, Severe acute respiratory syndrome coronavirus 2
  REGION 1..8: note = Table A: HLA-B*57:03H
LAKKFDTF

SEQ ID NO: 176 - protein, 8 aa, Severe acute respiratory syndrome coronavirus 2
  REGION 1..8: note = Table A: HLA-A*74:01H HLA-A*33:03H
IIKTIQPR

SEQ ID NO: 177 - protein, 8 aa, Severe acute respiratory syndrome coronavirus 2
  REGION 1..8: note = Table A: HLA-B*58:02H
KTIQPRVE

SEQ ID NO: 178 - protein, 8 aa, Severe acute respiratory syndrome coronavirus 2
  REGION 1..8: note = Table A: HLA-A*34:01H
DGFMGRIR

SEQ ID NO: 179 - protein, 8 aa, Severe acute respiratory syndrome coronavirus 2
  REGION 1..8: note = Table A: HLA-A*02:11H HLA-A*02:02H HLA-A*02:03H
FMGRIRSV

SEQ ID NO: 180 - protein, 8 aa, Severe acute respiratory syndrome coronavirus 2
  REGION 1..8: note = Table A: HLA-B*15:02H
MGRIRSVY

SEQ ID NO: 181 - protein, 8 aa, Severe acute respiratory syndrome coronavirus 2
  REGION 1..8: note = Table A: HLA-C*15:05H
SPNECNQM

SEQ ID NO: 182 - protein, 8 aa, Severe acute respiratory syndrome coronavirus 2
  REGION 1..8: note = Table A: HLA-B*38:02H
DHCGETSW

SEQ ID NO: 183 - protein, 8 aa, Severe acute respiratory syndrome coronavirus 2
  REGION 1..8: note = Table A: HLA-B*46:01H HLA-B*08:01H HLA-B*15:02H
FVKATCEF

SEQ ID NO: 184 - protein, 8 aa, Severe acute respiratory syndrome coronavirus 2
  REGION 1..8: note = Table A: HLA-C*15:05H HLA-B*52:01H HLA-B*13:02H
PQNAVVKI

SEQ ID NO: 185 - protein, 8 aa, Severe acute respiratory syndrome coronavirus 2
  REGION 1..8: note = Table A: HLA-C*07:01H HLA-A*68:02H HLA-B*35:03H HLA-A*02:05H HLA-A*02:02H HLA-A*34:01H HLA-B*35:02H HLA-C*08:01H HLA-C*08:03H HLA-B*35:12M HLA-B*38:01H HLA-B*38:02H HLA-B*39:01M
EVGPEHSL

SEQ ID NO: 186 - protein, 8 aa, Severe acute respiratory syndrome coronavirus 2
  REGION 1..8: note = Table A: HLA-B*07:05H
PEHSLAEY

SEQ ID NO: 187 - protein, 8 aa, Severe acute respiratory syndrome coronavirus 2
  REGION 1..8: note = Table A: HLA-A*36:01H
YHNESGLK

SEQ ID NO: 188 - protein, 8 aa, Severe acute respiratory syndrome coronavirus 2
  REGION 1..8: note = Table A: HLA-B*49:01H
NESGLKTI

SEQ ID NO: 189 - protein, 8 aa, Severe acute respiratory syndrome coronavirus 2
  REGION 1..8: note = Table A: HLA-A*11:02H
SGLKTILR

SEQ ID NO: 190 - protein, 8 aa, Severe acute respiratory syndrome coronavirus 2
  REGION 1..8: note = Table A: HLA-B*57:03H HLA-C*07:04H
KGGRTIAF

SEQ ID NO: 191 - protein, 8 aa, Severe acute respiratory syndrome coronavirus 2
  REGION 1..8: note = Table A: HLA-B*54:01H
CAYWVPRA

SEQ ID NO: 192 - protein, 8 aa, Severe acute respiratory syndrome coronavirus 2
  REGION 1..8: note = Table A: HLA-B*51:01H
VPRASANI

SEQ ID NO: 193 - protein, 8 aa, Severe acute respiratory syndrome coronavirus 2
  REGION 1..8: note = Table A: HLA-B*39:01H
NHTGVVGE

SEQ ID NO: 194 - protein, 8 aa, Severe acute respiratory syndrome coronavirus 2
  REGION 1..8: note = Table A: HLA-A*34:02H
NLLEILQK

SEQ ID NO: 195 - protein, 8 aa, Severe acute respiratory syndrome coronavirus 2
  REGION 1..8: note = Table A: HLA-B*52:01H
LQKEKVNI

SEQ ID NO: 196 - protein, 8 aa, Severe acute respiratory syndrome coronavirus 2
  REGION 1..8: note = Table A: HLA-B*41:02H HLA-B*49:01H
KEKVNINI

SEQ ID NO: 197 - protein, 8 aa, Severe acute respiratory syndrome coronavirus 2
  REGION 1..8: note = Table A: HLA-A*36:01H
INIVGDFK

SEQ ID NO: 198 - protein, 8 aa, Severe acute respiratory syndrome coronavirus 2
  REGION 1..8: note = Table A: HLA-B*35:02M HLA-B*35:12H
NIVGDFKL

SEQ ID NO: 199 - protein, 8 aa, Severe acute respiratory syndrome coronavirus 2
  REGION 1..8: note = Table A: HLA-B*18:01H HLA-B*40:01H
NEEIAIIL

SEQ ID NO: 200 - protein, 8 aa, Severe acute respiratory syndrome coronavirus 2
  REGION 1..8: note = Table A: HLA-B*45:01H HLA-B*40:06H
EEIAIILA

SEQ ID NO: 201 - protein, 8 aa, Severe acute respiratory syndrome coronavirus 2
  REGION 1..8: note = Table A: HLA-B*46:01M HLA-C*03:02M HLA-C*15:05H
IAIILASF

SEQ ID NO: 202 - protein, 8 aa, Severe acute respiratory syndrome coronavirus 2
  REGION 1..8: note = Table A: HLA-B*46:01H HLA-C*15:05H HLA-B*15:01H
FSASTSAF

SEQ ID NO: 203 - protein, 8 aa, Severe acute respiratory syndrome coronavirus 2
  REGION 1..8: note = Table A: HLA-A*68:02H HLA-C*15:05H HLA-B*49:01H
TSAFVETV

SEQ ID NO: 204 - protein, 8 aa, Severe acute respiratory syndrome coronavirus 2
  REGION 1..8: note = Table A: HLA-A*36:01H HLA-A*26:01H HLA-B*38:02H HLA-B*39:01H
ETVKGLDY

SEQ ID NO: 205 - protein, 8 aa, Severe acute respiratory syndrome coronavirus 2
  REGION 1..8: note = Table A: HLA-B*39:06H
FKQIVESC

SEQ ID NO: 206 - protein, 8 aa, Severe acute respiratory syndrome coronavirus 2
  REGION 1..8: note = Table A: HLA-B*58:01M HLA-B*58:02M HLA-A*36:01H HLA-A*30:02H HLA-B*15:01H
KSILSPLY

SEQ ID NO: 207 - protein, 8 aa, Severe acute respiratory syndrome coronavirus 2
  REGION 1..8: note = Table A: HLA-A*02:04H HLA-B*37:01H
ILSPLYAF

SEQ ID NO: 208 - protein, 8 aa, Severe acute respiratory syndrome coronavirus 2
  REGION 1..8: note = Table A: HLA-B*39:06H HLA-B*54:01M
YAFASEAA

SEQ ID NO: 209 - protein, 8 aa, Severe acute respiratory syndrome coronavirus 2
  REGION 1..8: note = Table A: HLA-B*51:01H
FASEAARV

SEQ ID NO: 210 - protein, 8 aa, Severe acute respiratory syndrome coronavirus 2
  REGION 1..8: note = Table A: HLA-B*52:01H
ASEAARVV

SEQ ID NO: 211 - protein, 8 aa, Severe acute respiratory syndrome coronavirus 2
  REGION 1..8: note = Table A: HLA-B*58:02H HLA-B*52:01H
AARVVRSI

SEQ ID NO: 212 - protein, 8 aa, Severe acute respiratory syndrome coronavirus 2
  REGION 1..8: note = Table A: HLA-B*14:02H
ARVVRSIF

SEQ ID NO: 213 - protein, 8 aa, Severe acute respiratory syndrome coronavirus 2
  REGION 1..8: note = Table A: HLA-A*74:01M HLA-A*33:03H HLA-A*31:01H
VVRSIFSR

SEQ ID NO: 214 - protein, 8 aa, Severe acute respiratory syndrome coronavirus 2
  REGION 1..8: note = Table A: HLA-B*58:02H HLA-C*15:02H
RSIFSRTL

SEQ ID NO: 215 - protein, 8 aa, Severe acute respiratory syndrome coronavirus 2
  REGION 1..8: note = Table A: HLA-B*49:01H
LETAQNSV

SEQ ID NO: 216 - protein, 8 aa, Severe acute respiratory syndrome coronavirus 2
  REGION 1..8: note = Table A: HLA-A*33:03H HLA-A*26:03H HLA-A*34:01H HLA-A*66:01H
ETAQNSVR

SEQ ID NO: 217 - protein, 8 aa, Severe acute respiratory syndrome coronavirus 2
  REGION 1..8: note = Table A: HLA-B*48:01M HLA-B*58:02H HLA-B*52:01M HLA-B*15:01M HLA-B*15:03H HLA-B*41:02H
AQNSVRVL

SEQ ID NO: 218 - protein, 8 aa, Severe acute respiratory syndrome coronavirus 2
  REGION 1..8: note = Table A: HLA-A*34:02H
NSVRVLQK

SEQ ID NO: 219 - protein, 8 aa, Severe acute respiratory syndrome coronavirus 2
  REGION 1..8: note = Table A: HLA-B*55:01H
SVRVLQKA

SEQ ID NO: 220 - protein, 8 aa, Severe acute respiratory syndrome coronavirus 2
  REGION 1..8: note = Table A: HLA-B*52:01H HLA-B*13:02H
LQKAAITI

SEQ ID NO: 221 - protein, 8 aa, Severe acute respiratory syndrome coronavirus 2
  REGION 1..8: note = Table A: HLA-A*36:01H HLA-A*01:01H HLA-B*38:02H HLA-B*15:01H
ILDGISQY

SEQ ID NO: 222 - protein, 8 aa, Severe acute respiratory syndrome coronavirus 2
  REGION 1..8: note = Table A: HLA-B*35:02H
DGISQYSL

SEQ ID NO: 223 - protein, 8 aa, Severe acute respiratory syndrome coronavirus 2
  REGION 1..8: note = Table A: HLA-B*52:01H
SQYSLRLI

SEQ ID NO: 224 - protein, 8 aa, Severe acute respiratory syndrome coronavirus 2
  REGION 1..8: note = Table A: HLA-B*38:02H HLA-B*15:02M
SLRLIDAM

SEQ ID NO: 225 - protein, 8 aa, Severe acute respiratory syndrome coronavirus 2
  REGION 1..8: note = Table A: HLA-B*37:01M HLA-B*40:02H HLA-B*41:02H
SDLATNNL

SEQ ID NO: 226 - protein, 8 aa, Severe acute respiratory syndrome coronavirus 2
  REGION 1..8: note = Table A: HLA-C*15:05H
ATNNLVVM

SEQ ID NO: 227 - protein, 8 aa, Severe acute respiratory syndrome coronavirus 2
  REGION 1..8: note = Table A: HLA-B*18:01H HLA-B*15:02H HLA-B*07:05H
NNLVVMAY

SEQ ID NO: 228 - protein, 8 aa, Severe acute respiratory syndrome coronavirus 2
  REGION 1..8: note = Table A: HLA-B*51:01M HLA-B*52:01H
MAYITGGV

SEQ ID NO: 229 - protein, 8 aa, Severe acute respiratory syndrome coronavirus 2
  REGION 1..8: note = Table A: HLA-C*14:02H HLA-C*14:03H HLA-B*39:01H
AYITGGVV

SEQ ID NO: 230 - protein, 8 aa, Severe acute respiratory syndrome coronavirus 2
  REGION 1..8: note = Table A: HLA-B*58:01H HLA-C*04:03H HLA-C*07:01H HLA-A*68:02H HLA-C*15:05M HLA-C*15:02M HLA-A*02:04H HLA-C*17:01H HLA-C*08:01H HLA-B*57:03H HLA-C*07:04M
ITGGVVQL

SEQ ID NO: 231 - protein, 8 aa, Severe acute respiratory syndrome coronavirus 2
  REGION 1..8: note = Table A: HLA-B*52:01H HLA-B*15:03H
SQWLTNIF

SEQ ID NO: 232 - protein, 8 aa, Severe acute respiratory syndrome coronavirus 2
  REGION 1..8: note = Table A: HLA-B*15:02H
TNIFGTVY

SEQ ID NO: 233 - protein, 8 aa, Severe acute respiratory syndrome coronavirus 2
  REGION 1..8: note = Table A: HLA-A*36:01H
IFGTVYEK

SEQ ID NO: 234 - protein, 8 aa, Severe acute respiratory syndrome coronavirus 2
  REGION 1..8: note = Table A: HLA-B*08:01H HLA-B*40:02H HLA-B*41:02M
YEKLKPVL

SEQ ID NO: 235 - protein, 8 aa, Severe acute respiratory syndrome coronavirus 2
  REGION 1..8: note = Table A: HLA-C*14:02M HLA-C*14:03H HLA-B*46:01H HLA-A*24:07H
KFKEGVEF

SEQ ID NO: 236 - protein, 8 aa, Severe acute respiratory syndrome coronavirus 2
  REGION 1..8: note = Table A: HLA-B*18:01H HLA-B*51:01H HLA-B*15:02H HLA-B*07:05H
DGWEIVKF

SEQ ID NO: 237 - protein, 8 aa, Severe acute respiratory syndrome coronavirus 2
  REGION 1..8: note = Table A: HLA-B*44:05H HLA-B*41:02H HLA-B*49:01M
CEIVGGQI

SEQ ID NO: 238 - protein, 8 aa, Severe acute respiratory syndrome coronavirus 2
  REGION 1..8: note = Table A: HLA-C*15:05H
VGGQIVTC

SEQ ID NO: 239 - protein, 8 aa, Severe acute respiratory syndrome coronavirus 2
  REGION 1..8: note = Table A: HLA-B*37:01H
KESVQTFF

SEQ ID NO: 240 - protein, 8 aa, Severe acute respiratory syndrome coronavirus 2
  REGION 1..8: note = Table A: HLA-B*52:01H HLA-B*13:02H
VQTFFKLV

SEQ ID NO: 241 - protein, 8 aa, Severe acute respiratory syndrome coronavirus 2
  REGION 1..8: note = Table A: HLA-A*11:01H HLA-A*11:02H
TFFKLVNK

SEQ ID NO: 242 - protein, 8 aa, Severe acute respiratory syndrome coronavirus 2
  REGION 1..8: note = Table A: HLA-C*03:02H HLA-C*15:05H HLA-C*15:02H
LVNKFLAL

SEQ ID NO: 243 - protein, 8 aa, Severe acute respiratory syndrome coronavirus 2
  REGION 1..8: note = Table A: HLA-B*37:01H
ADSIIIGG

SEQ ID NO: 244 - protein, 8 aa, Severe acute respiratory syndrome coronavirus 2
  REGION 1..8: note = Table A: HLA-B*39:06H HLA-B*54:01H
DSIIIGGA

SEQ ID NO: 245 - protein, 8 aa, Severe acute respiratory syndrome coronavirus 2
  REGION 1..8: note = Table A: HLA-C*03:03H
SIIIGGAK

SEQ ID NO: 246 - protein, 8 aa, Severe acute respiratory syndrome coronavirus 2
  REGION 1..8: note = Table A: HLA-C*03:03H HLA-C*03:04H HLA-C*15:05H
IIIGGAKL

SEQ ID NO: 247 - protein, 8 aa, Severe acute respiratory syndrome coronavirus 2
  REGION 1..8: note = Table A: HLA-A*03:02H
IIGGAKLK

SEQ ID NO: 248 - protein, 8 aa, Severe acute respiratory syndrome coronavirus 2
  REGION 1..8: note = Table A: HLA-B*46:01H HLA-B*15:01H
ALNLGETF

SEQ ID NO: 249 - protein, 8 aa, Severe acute respiratory syndrome coronavirus 2
  REGION 1..8: note = Table A: HLA-A*33:03H HLA-A*68:01H HLA-A*34:01H HLA-A*34:02H HLA-A*66:01H
ETFVTHSK

SEQ ID NO: 250 - protein, 8 aa, Severe acute respiratory syndrome coronavirus 2
  REGION 1..8: note = Table A: HLA-A*30:02M
VTHSKGLY

SEQ ID NO: 251 - protein, 8 aa, Severe acute respiratory syndrome coronavirus 2
  REGION 1..8: note = Table A: HLA-B*45:01H
EETGLLMP

SEQ ID NO: 252 - protein, 8 aa, Severe acute respiratory syndrome coronavirus 2
  REGION 1..8: note = Table A: HLA-B*57:03H
KAPKEIIF

SEQ ID NO: 253 - protein, 8 aa, Severe acute respiratory syndrome coronavirus 2
  REGION 1..8: note = Table A: HLA-B*07:04H
APKEIIFL

SEQ ID NO: 254 - protein, 8 aa, Severe acute respiratory syndrome coronavirus 2
  REGION 1..8: note = Table A: HLA-C*14:02M HLA-C*14:03M
IFLEGETL

SEQ ID NO: 255 - protein, 8 aa, Severe acute respiratory syndrome coronavirus 2
  REGION 1..8: note = Table A: HLA-B*49:01H
GETLPTEV

SEQ ID NO: 256 - protein, 8 aa, Severe acute respiratory syndrome coronavirus 2
  REGION 1..8: note = Table A: HLA-B*18:01H HLA-B*07:05H HLA-B*49:01M
TEVLTEEV

SEQ ID NO: 257 - protein, 8 aa, Severe acute respiratory syndrome coronavirus 2
  REGION 1..8: note = Table A: HLA-A*36:01H
LTEEVVLK

SEQ ID NO: 258 - protein, 8 aa, Severe acute respiratory syndrome coronavirus 2
  REGION 1..8: note = Table A: HLA-B*45:01H HLA-B*50:01H
LEQPTSEA

SEQ ID NO: 259 - protein, 8 aa, Severe acute respiratory syndrome coronavirus 2
  REGION 1..8: note = Table A: HLA-B*51:01M
EAVEAPLV

SEQ ID NO: 260 - protein, 8 aa, Severe acute respiratory syndrome coronavirus 2
  REGION 1..8: note = Table A: HLA-B*55:02H HLA-C*15:05M HLA-B*55:01H HLA-B*07:05H
APLVGTPV

SEQ ID NO: 261 - protein, 8 aa, Severe acute respiratory syndrome coronavirus 2
  REGION 1..8: note = Table A: HLA-C*15:05H
TPVCINGL

SEQ ID NO: 262 - protein, 8 aa, Severe acute respiratory syndrome coronavirus 2
  REGION 1..8: note = Table A: HLA-B*51:01M
NGLMLLEI

SEQ ID NO: 263 - protein, 8 aa, Severe acute respiratory syndrome coronavirus 2
  REGION 1..8: note = Table A: HLA-B*38:02H HLA-B*13:02H
ALAPNMMV

SEQ ID NO: 264 - protein, 8 aa, Severe acute respiratory syndrome coronavirus 2
  REGION 1..8: note = Table A: HLA-B*38:02H HLA-B*15:02H
MMVTNNTF

SEQ ID NO: 265 - protein, 8 aa, Severe acute respiratory syndrome coronavirus 2
  REGION 1..8: note = Table A: HLA-B*58:01H HLA-C*03:03H HLA-C*03:04H HLA-C*15:05M HLA-C*15:02H HLA-C*08:01H HLA-C*07:04H
VTNNTFTL

SEQ ID NO: 266 - protein, 8 aa, Severe acute respiratory syndrome coronavirus 2
  REGION 1..8: note = Table A: HLA-A*03:01H HLA-A*03:02M HLA-A*11:01M HLA-A*11:02M HLA-A*34:02H
TNNTFTLK

SEQ ID NO: 267 - protein, 8 aa, Severe acute respiratory syndrome coronavirus 2
  REGION 1..8: note = Table A: HLA-B*57:03H
GAPTKVTF

SEQ ID NO: 268 - protein, 8 aa, Severe acute respiratory syndrome coronavirus 2
  REGION 1..8: note = Table A: HLA-B*40:02H
GDDTVIEV

SEQ ID NO: 269 - protein, 8 aa, Severe acute respiratory syndrome coronavirus 2
  REGION 1..8: note = Table A: HLA-A*25:01H HLA-B*46:01H HLA-A*26:01M HLA-A*26:02M HLA-A*26:03M HLA-B*18:01H HLA-B*35:01M HLA-B*38:02M HLA-B*15:01M HLA-B*15:02H HLA-B*39:01H HLA-B*07:05H
TVIEVQGY

SEQ ID NO: 270 - protein, 8 aa, Severe acute respiratory syndrome coronavirus 2
  REGION 1..8: note = Table A: HLA-B*51:01H HLA-B*52:01M
QGYKSVNI

SEQ ID NO: 271 - protein, 8 aa, Severe acute respiratory syndrome coronavirus 2
  REGION 1..8: note = Table A: HLA-B*15:03H
YKSVNITF

SEQ ID NO: 272 - protein, 8 aa, Severe acute respiratory syndrome coronavirus 2
  REGION 1..8: note = Table A: HLA-A*02:04H
SVNITFEL

SEQ ID NO: 273 - protein, 8 aa, Severe acute respiratory syndrome coronavirus 2
  REGION 1..8: note = Table A: HLA-B*18:01H HLA-B*07:05H
DERIDKVL

SEQ ID NO: 274 - protein, 8 aa, Severe acute respiratory syndrome coronavirus 2
  REGION 1..8: note = Table A: HLA-A*03:01H HLA-A*11:01H HLA-A*11:02H
IDKVLNEK

SEQ ID NO: 275 - protein, 8 aa, Severe acute respiratory syndrome coronavirus 2
  REGION 1..8: note = Table A: HLA-C*15:05H
CSAYTVEL

SEQ ID NO: 276 - protein, 8 aa, Severe acute respiratory syndrome coronavirus 2
  REGION 1..8: note = Table A: HLA-C*08:02H
TVELGTEV

SEQ ID NO: 277 - protein, 8 aa, Severe acute respiratory syndrome coronavirus 2
  REGION 1..8: note = Table A: HLA-A*03:02H HLA-A*11:02H
VVADAVIK

SEQ ID NO: 278 - protein, 8 aa, Severe acute respiratory syndrome coronavirus 2
  REGION 1..8: note = Table A: HLA-B*44:05H HLA-B*37:01M HLA-B*40:02M HLA-B*07:05H HLA-B*41:02H
ADAVIKTL

SEQ ID NO: 279 - protein, 8 aa, Severe acute respiratory syndrome coronavirus 2
  REGION 1..8: note = Table A: HLA-C*01:02H
LTPLGIDL

SEQ ID NO: 280 - protein, 8 aa, Severe acute respiratory syndrome coronavirus 2
  REGION 1..8: note = Table A: HLA-B*18:01H HLA-B*15:02H HLA-B*07:05H
DEWSMATY

SEQ ID NO: 281 - protein, 8 aa, Severe acute respiratory syndrome coronavirus 2
  REGION 1..8: note = Table A: HLA-C*14:02H HLA-C*14:03H HLA-B*46:01H HLA-C*04:01H HLA-C*04:03H HLA-C*15:05H HLA-C*08:02H HLA-B*39:01M HLA-C*05:01M
LFDESGEF

SEQ ID NO: 282 - protein, 8 aa, Severe acute respiratory syndrome coronavirus 2
  REGION 1..8: note = Table A: HLA-B*18:01H HLA-B*35:02H HLA-B*35:12H HLA-B*07:05H
DESGEFKL

SEQ ID NO: 283 - protein, 8 aa, Severe acute respiratory syndrome coronavirus 2
  REGION 1..8: note = Table A: HLA-B*15:03M
FKLASHMY

SEQ ID NO: 284 - protein, 8 aa, Severe acute respiratory syndrome coronavirus 2
  REGION 1..8: note = Table A: HLA-B*39:01H
EFEPSTQY

SEQ ID NO: 285 - protein, 8 aa, Severe acute respiratory syndrome coronavirus 2
  REGION 1..8: note = Table A: HLA-B*35:01M HLA-B*35:08H HLA-B*38:02H
EPSTQYEY

SEQ ID NO: 286 - protein, 8 aa, Severe acute respiratory syndrome coronavirus 2
  REGION 1..8: note = Table A: HLA-B*58:01H HLA-C*16:01H HLA-B*46:01H HLA-A*29:01H HLA-C*03:03H HLA-C*07:01H HLA-C*03:02H HLA-C*03:04H HLA-C*15:05M HLA-C*12:02H HLA-C*12:03H HLA-C*15:02M HLA-A*24:02H HLA-C*17:01M HLA-A*24:07H HLA-C*08:01H
  REGION 1..8: note = CONT. FROM ABOVE: HLA-A*23:01H HLA-B*38:02H HLA-B*15:01H HLA- B*15:02H HLA-B*15:03H HLA-B*39:01H HLA-B*07:05H HLA-B*57:03H HLA-C*02:02H HLA-B*13:01M HLA-B*13:02H HLA-C*07:04M
YQGKPLEF

SEQ ID NO: 287 - protein, 8 aa, Severe acute respiratory syndrome coronavirus 2
  REGION 1..8: note = Table A: HLA-B*18:01H HLA-B*40:06H HLA-B*07:05H HLA-B*50:01M
LEFGATSA

SEQ ID NO: 288 - protein, 8 aa, Severe acute respiratory syndrome coronavirus 2
  REGION 1..8: note = Table A: HLA-C*03:03H HLA-C*03:04H HLA-B*14:01H HLA-B*39:01H
FGATSAAL

SEQ ID NO: 289 - protein, 8 aa, Severe acute respiratory syndrome coronavirus 2
  REGION 1..8: note = Table A: HLA-B*58:02H HLA-C*15:05H
QTTTIQTI

SEQ ID NO: 290 - protein, 8 aa, Severe acute respiratory syndrome coronavirus 2
  REGION 1..8: note = Table A: HLA-C*15:05H HLA-B*35:02H HLA-B*35:12H
QPQLEMEL

SEQ ID NO: 291 - protein, 8 aa, Severe acute respiratory syndrome coronavirus 2
  REGION 1..8: note = Table A: HLA-B*51:01H HLA-B*52:01H HLA-B*57:03H
LTPVVQTI

SEQ ID NO: 292 - protein, 8 aa, Severe acute respiratory syndrome coronavirus 2
  REGION 1..8: note = Table A: HLA-C*15:05H
PVVQTIEV

SEQ ID NO: 293 - protein, 8 aa, Severe acute respiratory syndrome coronavirus 2
  REGION 1..8: note = Table A: HLA-A*25:01H
QTIEVNSF

SEQ ID NO: 294 - protein, 8 aa, Severe acute respiratory syndrome coronavirus 2
  REGION 1..8: note = Table A: HLA-A*26:03H
EVNSFSGY

SEQ ID NO: 295 - protein, 8 aa, Severe acute respiratory syndrome coronavirus 2
  REGION 1..8: note = Table A: HLA-A*11:01H HLA-A*11:02H HLA-A*36:01H HLA-A*34:02H
NSFSGYLK

SEQ ID NO: 296 - protein, 8 aa, Severe acute respiratory syndrome coronavirus 2
  REGION 1..8: note = Table A: HLA-A*36:01H
LTDNVYIK

SEQ ID NO: 297 - protein, 8 aa, Severe acute respiratory syndrome coronavirus 2
  REGION 1..8: note = Table A: HLA-B*08:01H HLA-B*55:01H HLA-B*07:04H
KVKPTVVV

SEQ ID NO: 298 - protein, 8 aa, Severe acute respiratory syndrome coronavirus 2
  REGION 1..8: note = Table A: HLA-B*56:01M HLA-B*55:02M HLA-C*15:05H HLA-B*55:01M HLA-B*39:06H HLA-B*54:01H HLA-B*07:05H
KPTVVVNA

SEQ ID NO: 299 - protein, 8 aa, Severe acute respiratory syndrome coronavirus 2
  REGION 1..8: note = Table A: HLA-B*15:01H HLA-B*15:02H
VVNAANVY

SEQ ID NO: 300 - protein, 8 aa, Severe acute respiratory syndrome coronavirus 2
  REGION 1..8: note = Table A: HLA-A*03:02H HLA-A*11:02H HLA-A*68:01H HLA-A*34:02H
NAANVYLK

SEQ ID NO: 301 - protein, 8 aa, Severe acute respiratory syndrome coronavirus 2
  REGION 1..8: note = Table A: HLA-C*15:05H HLA-B*14:01H HLA-C*08:03H HLA-B*39:01H
GGGVAGAL

SEQ ID NO: 302 - protein, 8 aa, Severe acute respiratory syndrome coronavirus 2
  REGION 1..8: note = Table A: HLA-A*03:02H
GVAGALNK

SEQ ID NO: 303 - protein, 8 aa, Severe acute respiratory syndrome coronavirus 2
  REGION 1..8: note = Table A: HLA-C*15:05H
ATNNAMQV

SEQ ID NO: 304 - protein, 8 aa, Severe acute respiratory syndrome coronavirus 2
  REGION 1..8: note = Table A: HLA-B*38:02H HLA-B*39:01H
MQVESDDY

SEQ ID NO: 305 - protein, 8 aa, Severe acute respiratory syndrome coronavirus 2
  REGION 1..8: note = Table A: HLA-C*03:04H
YIATNGPL

SEQ ID NO: 306 - protein, 8 aa, Severe acute respiratory syndrome coronavirus 2
  REGION 1..8: note = Table A: HLA-A*11:01H HLA-A*11:02H HLA-A*36:01H HLA-C*03:03H HLA-A*34:02H
IATNGPLK

SEQ ID NO: 307 - protein, 8 aa, Severe acute respiratory syndrome coronavirus 2
  REGION 1..8: note = Table A: HLA-A*29:01H HLA-C*15:05M HLA-C*15:02H HLA-B*13:02H
ATNGPLKV

SEQ ID NO: 308 - protein, 8 aa, Severe acute respiratory syndrome coronavirus 2
  REGION 1..8: note = Table A: HLA-B*08:01H
HNLAKHCL

SEQ ID NO: 309 - protein, 8 aa, Severe acute respiratory syndrome coronavirus 2
  REGION 1..8: note = Table A: HLA-B*14:01H HLA-B*38:01H HLA-B*38:02H HLA-B*39:06M HLA-B*39:01M HLA-B*15:10M
LHVVGPNV

SEQ ID NO: 310 - protein, 8 aa, Severe acute respiratory syndrome coronavirus 2
  REGION 1..8: note = Table A: HLA-A*11:303H HLA-A*03:01M HLA-A*03:02H HLA-A*11:01M HLA-A*11:02H HLA-A*36:01H HLA-A*30:02H HLA-A*68:01H HLA-A*34:02H HLA-C*07:27M
VVGPNVNK

SEQ ID NO: 311 - protein, 8 aa, Severe acute respiratory syndrome coronavirus 2
  REGION 1..8: note = Table A: HLA-B*38:02H HLA-B*15:01M HLA-B*15:02H HLA-B*15:03M
IQLLKSAY

SEQ ID NO: 312 - protein, 8 aa, Severe acute respiratory syndrome coronavirus 2
  REGION 1..8: note = Table A: HLA-A*68:02H
ENFNQHEV

SEQ ID NO: 313 - protein, 8 aa, Severe acute respiratory syndrome coronavirus 2
  REGION 1..8: note = Table A: HLA-C*14:02H HLA-B*08:01H HLA-B*14:02H
NFNQHEVL

SEQ ID NO: 314 - protein, 8 aa, Severe acute respiratory syndrome coronavirus 2
  REGION 1..8: note = Table A: HLA-B*39:06M
NQHEVLLA

SEQ ID NO: 315 - protein, 8 aa, Severe acute respiratory syndrome coronavirus 2
  REGION 1..8: note = Table A: HLA-B*38:02H
EVLLAPLL

SEQ ID NO: 316 - protein, 8 aa, Severe acute respiratory syndrome coronavirus 2
  REGION 1..8: note = Table A: HLA-A*02:03H
LLAPLLSA

SEQ ID NO: 317 - protein, 8 aa, Severe acute respiratory syndrome coronavirus 2
  REGION 1..8: note = Table A: HLA-C*15:05H HLA-B*07:05H
APLLSAGI

SEQ ID NO: 318 - protein, 8 aa, Severe acute respiratory syndrome coronavirus 2
  REGION 1..8: note = Table A: HLA-C*04:03H HLA-C*15:05H HLA-B*35:02H HLA-C*08:01H HLA-C*08:02H HLA-B*35:12H HLA-B*38:02H HLA-B*40:01H HLA-B*40:02H
GADPIHSL

SEQ ID NO: 319 - protein, 8 aa, Severe acute respiratory syndrome coronavirus 2
  REGION 1..8: note = Table A: HLA-C*15:05H HLA-B*51:01H HLA-B*54:01H
DPIHSLRV

SEQ ID NO: 320 - protein, 8 aa, Severe acute respiratory syndrome coronavirus 2
  REGION 1..8: note = Table A: HLA-B*37:01H
VDTVRTNV

SEQ ID NO: 321 - protein, 8 aa, Severe acute respiratory syndrome coronavirus 2
  REGION 1..8: note = Table A: HLA-B*18:01H HLA-B*35:01H HLA-B*38:02H HLA-B*15:02M
DTVRTNVY

SEQ ID NO: 322 - protein, 8 aa, Severe acute respiratory syndrome coronavirus 2
  REGION 1..8: note = Table A: HLA-C*15:02H
RTNVYLAV

SEQ ID NO: 323 - protein, 8 aa, Severe acute respiratory syndrome coronavirus 2
  REGION 1..8: note = Table A: HLA-B*46:01H HLA-B*18:01H HLA-B*37:01H HLA-B*40:02H HLA-B*15:01H HLA-B*07:05H HLA-B*41:02H
YDKLVSSF

SEQ ID NO: 324 - protein, 8 aa, Severe acute respiratory syndrome coronavirus 2
  REGION 1..8: note = Table A: HLA-C*15:05H
LVSSFLEM

SEQ ID NO: 325 - protein, 8 aa, Severe acute respiratory syndrome coronavirus 2
  REGION 1..8: note = Table A: HLA-A*36:01H
VSSFLEMK

SEQ ID NO: 326 - protein, 8 aa, Severe acute respiratory syndrome coronavirus 2
  REGION 1..8: note = Table A: HLA-B*44:05H HLA-B*18:01H HLA-B*52:01M HLA-B*37:01H HLA-B*40:02H HLA-B*07:05H HLA-B*41:02H HLA-B*49:01M
VEQKIAEI

SEQ ID NO: 327 - protein, 8 aa, Severe acute respiratory syndrome coronavirus 2
  REGION 1..8: note = Table A: HLA-B*45:01M HLA-B*40:02M HLA-B*41:02M HLA-B*49:01M HLA-B*50:01H
AEIPKEEV

SEQ ID NO: 328 - protein, 8 aa, Severe acute respiratory syndrome coronavirus 2
  REGION 1..8: note = Table A: HLA-B*18:01H HLA-B*37:01H HLA-B*40:01M HLA-B*40:02H HLA-B*07:05H HLA-B*41:02M HLA-B*49:01H
VEEVTTTL

SEQ ID NO: 329 - protein, 8 aa, Severe acute respiratory syndrome coronavirus 2
  REGION 1..8: note = Table A: HLA-A*36:01H
LTENLLLY

SEQ ID NO: 330 - protein, 8 aa, Severe acute respiratory syndrome coronavirus 2
  REGION 1..8: note = Table A: HLA-B*49:01H
TENLLLYI

SEQ ID NO: 331 - protein, 8 aa, Severe acute respiratory syndrome coronavirus 2
  REGION 1..8: note = Table A: HLA-C*04:03M HLA-C*08:02H HLA-C*05:01H
YIDINGNL

SEQ ID NO: 332 - protein, 8 aa, Severe acute respiratory syndrome coronavirus 2
  REGION 1..8: note = Table A: HLA-B*39:01H HLA-B*15:10H
LHPDSATL

SEQ ID NO: 333 - protein, 8 aa, Severe acute respiratory syndrome coronavirus 2
  REGION 1..8: note = Table A: HLA-C*15:05H HLA-B*51:01H
HPDSATLV

SEQ ID NO: 334 - protein, 8 aa, Severe acute respiratory syndrome coronavirus 2
  REGION 1..8: note = Table A: HLA-C*04:03H HLA-C*08:02H HLA-C*05:01H
VSDIDITF

SEQ ID NO: 335 - protein, 8 aa, Severe acute respiratory syndrome coronavirus 2
  REGION 1..8: note = Table A: HLA-B*44:05H HLA-B*40:01H HLA-B*40:02M HLA-B*41:02H
SDIDITFL

SEQ ID NO: 336 - protein, 8 aa, Severe acute respiratory syndrome coronavirus 2
  REGION 1..8: note = Table A: HLA-A*36:01M HLA-A*34:02H
DIDITFLK

SEQ ID NO: 337 - protein, 8 aa, Severe acute respiratory syndrome coronavirus 2
  REGION 1..8: note = Table A: HLA-A*36:01H
IDITFLKK

SEQ ID NO: 338 - protein, 8 aa, Severe acute respiratory syndrome coronavirus 2
  REGION 1..8: note = Table A: HLA-C*15:05H HLA-B*51:01H
APYIVGDV

SEQ ID NO: 339 - protein, 8 aa, Severe acute respiratory syndrome coronavirus 2
  REGION 1..8: note = Table A: HLA-B*39:01H
PYIVGDVV

SEQ ID NO: 340 - protein, 8 aa, Severe acute respiratory syndrome coronavirus 2
  REGION 1..8: note = Table A: HLA-B*35:02M HLA-B*35:12H
DVVQEGVL

SEQ ID NO: 341 - protein, 8 aa, Severe acute respiratory syndrome coronavirus 2
  REGION 1..8: note = Table A: HLA-B*07:05H HLA-B*49:01M
QEGVLTAV

SEQ ID NO: 342 - protein, 8 aa, Severe acute respiratory syndrome coronavirus 2
  REGION 1..8: note = Table A: HLA-A*11:01H HLA-A*11:02H HLA-A*34:02H HLA-B*51:01H HLA-B*54:01H
TAVVIPTK

SEQ ID NO: 343 - protein, 8 aa, Severe acute respiratory syndrome coronavirus 2
  REGION 1..8: note = Table A: HLA-A*11:303H HLA-A*03:02H HLA-A*11:01H HLA-A*11:02M HLA-C*07:27H
AVVIPTKK

SEQ ID NO: 344 - protein, 8 aa, Severe acute respiratory syndrome coronavirus 2
  REGION 1..8: note = Table A: HLA-C*15:05H
KAGGTTEM

SEQ ID NO: 345 - protein, 8 aa, Severe acute respiratory syndrome coronavirus 2
  REGION 1..8: note = Table A: HLA-A*03:01H HLA-A*11:01H HLA-A*11:02H HLA-A*36:01H HLA-A*34:02H HLA-C*07:27H
GTTEMLAK

SEQ ID NO: 346 - protein, 8 aa, Severe acute respiratory syndrome coronavirus 2
  REGION 1..8: note = Table A: HLA-B*44:02H HLA-B*44:05M HLA-B*44:03H HLA-B*18:01H HLA-B*37:01H HLA-B*40:01H HLA-B*40:02M HLA-B*07:05H HLA-B*41:02H HLA-B*49:01H
TEMLAKAL

SEQ ID NO: 347 - protein, 8 aa, Severe acute respiratory syndrome coronavirus 2
  REGION 1..8: note = Table A: HLA-B*15:03H
RKVPTDNY

SEQ ID NO: 348 - protein, 8 aa, Severe acute respiratory syndrome coronavirus 2
  REGION 1..8: note = Table A: HLA-B*18:01H HLA-B*07:05H
TDNYITTY

SEQ ID NO: 349 - protein, 8 aa, Severe acute respiratory syndrome coronavirus 2
  REGION 1..8: note = Table A: HLA-C*03:03H HLA-C*03:04H HLA-C*15:05H HLA-C*08:03H
TTYPGQGL

SEQ ID NO: 350 - protein, 8 aa, Severe acute respiratory syndrome coronavirus 2
  REGION 1..8: note = Table A: HLA-B*39:06H
NGYTVEEA

SEQ ID NO: 351 - protein, 8 aa, Severe acute respiratory syndrome coronavirus 2
  REGION 1..8: note = Table A: HLA-B*40:01H HLA-B*40:02H HLA-B*41:02M
VEEAKTVL

SEQ ID NO: 352 - protein, 8 aa, Severe acute respiratory syndrome coronavirus 2
  REGION 1..8: note = Table A: HLA-A*34:02H
EAKTVLKK

SEQ ID NO: 353 - protein, 8 aa, Severe acute respiratory syndrome coronavirus 2
  REGION 1..8: note = Table A: HLA-B*52:01M
AFYILPSI

SEQ ID NO: 354 - protein, 8 aa, Severe acute respiratory syndrome coronavirus 2
  REGION 1..8: note = Table A: HLA-B*58:02H HLA-C*16:01H
ISNEKQEI

SEQ ID NO: 355 - protein, 8 aa, Severe acute respiratory syndrome coronavirus 2
  REGION 1..8: note = Table A: HLA-B*58:02H HLA-C*03:02H
VSWNLREM

SEQ ID NO: 356 - protein, 8 aa, Severe acute respiratory syndrome coronavirus 2
  REGION 1..8: note = Table A: HLA-B*58:02H HLA-B*35:02H
HAEETRKL

SEQ ID NO: 357 - protein, 8 aa, Severe acute respiratory syndrome coronavirus 2
  REGION 1..8: note = Table A: HLA-B*41:02H
AEETRKLM

SEQ ID NO: 358 - protein, 8 aa, Severe acute respiratory syndrome coronavirus 2
  REGION 1..8: note = Table A: HLA-B*52:01H
TKAIVSTI

SEQ ID NO: 359 - protein, 8 aa, Severe acute respiratory syndrome coronavirus 2
  REGION 1..8: note = Table A: HLA-A*74:01H HLA-A*11:02H HLA-A*68:01H
AIVSTIQR

SEQ ID NO: 360 - protein, 8 aa, Severe acute respiratory syndrome coronavirus 2
  REGION 1..8: note = Table A: HLA-A*03:02H HLA-A*11:02H
IVSTIQRK

SEQ ID NO: 361 - protein, 8 aa, Severe acute respiratory syndrome coronavirus 2
  REGION 1..8: note = Table A: HLA-B*58:01H HLA-B*58:02M HLA-C*16:01H
VSTIQRKY

SEQ ID NO: 362 - protein, 8 aa, Severe acute respiratory syndrome coronavirus 2
  REGION 1..8: note = Table A: HLA-B*52:01H
IQRKYKGI

SEQ ID NO: 363 - protein, 8 aa, Severe acute respiratory syndrome coronavirus 2
  REGION 1..8: note = Table A: HLA-B*15:03H
RKYKGIKI

SEQ ID NO: 364 - protein, 8 aa, Severe acute respiratory syndrome coronavirus 2
  REGION 1..8: note = Table A: HLA-B*15:01H HLA-B*39:01H
IQEGVVDY

SEQ ID NO: 365 - protein, 8 aa, Severe acute respiratory syndrome coronavirus 2
  REGION 1..8: note = Table A: HLA-C*04:03M HLA-C*05:01H
VVDYGARF

SEQ ID NO: 366 - protein, 8 aa, Severe acute respiratory syndrome coronavirus 2
  REGION 1..8: note = Table A: HLA-C*14:03H HLA-B*52:01H
YFYTSKTT

SEQ ID NO: 367 - protein, 8 aa, Severe acute respiratory syndrome coronavirus 2
  REGION 1..8: note = Table A: HLA-B*48:01H
SKTTVASL

SEQ ID NO: 368 - protein, 8 aa, Severe acute respiratory syndrome coronavirus 2
  REGION 1..8: note = Table A: HLA-B*58:01M HLA-B*58:02M HLA-B*57:03H
KTTVASLI

SEQ ID NO: 369 - protein, 8 aa, Severe acute respiratory syndrome coronavirus 2
  REGION 1..8: note = Table A: HLA-C*15:05H
VASLINTL

SEQ ID NO: 370 - protein, 8 aa, Severe acute respiratory syndrome coronavirus 2
  REGION 1..8: note = Table A: HLA-C*08:02M
LNDLNETL

SEQ ID NO: 371 - protein, 8 aa, Severe acute respiratory syndrome coronavirus 2
  REGION 1..8: note = Table A: HLA-A*36:01H
LVTMPLGY

SEQ ID NO: 372 - protein, 8 aa, Severe acute respiratory syndrome coronavirus 2
  REGION 1..8: note = Table A: HLA-B*08:01H HLA-A*02:11H HLA-B*14:01H
LGYVTHGL

SEQ ID NO: 373 - protein, 8 aa, Severe acute respiratory syndrome coronavirus 2
  REGION 1..8: note = Table A: HLA-C*03:04H HLA-C*17:01H
YVTHGLNL

SEQ ID NO: 374 - protein, 8 aa, Severe acute respiratory syndrome coronavirus 2
  REGION 1..8: note = Table A: HLA-B*39:06H
HGLNLEEA

SEQ ID NO: 375 - protein, 8 aa, Severe acute respiratory syndrome coronavirus 2
  REGION 1..8: note = Table A: HLA-B*18:01H
LEEAARYM

SEQ ID NO: 376 - protein, 8 aa, Severe acute respiratory syndrome coronavirus 2
  REGION 1..8: note = Table A: HLA-B*07:04H
AARYMRSL

SEQ ID NO: 377 - protein, 8 aa, Severe acute respiratory syndrome coronavirus 2
  REGION 1..8: note = Table A: HLA-B*08:01H HLA-A*02:11H HLA-B*14:01H HLA-A*02:03M HLA-B*52:01H HLA-C*08:03H HLA-B*38:02M HLA-B*41:02H HLA-B*13:02H
SLKVPATV

SEQ ID NO: 378 - protein, 8 aa, Severe acute respiratory syndrome coronavirus 2
  REGION 1..8: note = Table A: HLA-B*18:01H HLA-C*15:05H HLA-B*35:01M HLA-B*35:08M HLA-B*35:07H HLA-B*38:02H HLA-B*07:05M
SPDAVTAY

SEQ ID NO: 379 - protein, 8 aa, Severe acute respiratory syndrome coronavirus 2
  REGION 1..8: note = Table A: HLA-B*18:01H HLA-B*07:05H HLA-B*49:01H
EEHFIETI

SEQ ID NO: 380 - protein, 8 aa, Severe acute respiratory syndrome coronavirus 2
  REGION 1..8: note = Table A: HLA-C*14:02M HLA-C*14:03M HLA-B*52:01H HLA-B*15:02H
HFIETISL

SEQ ID NO: 381 - protein, 8 aa, Severe acute respiratory syndrome coronavirus 2
  REGION 1..8: note = Table A: HLA-B*58:01H HLA-A*36:01H HLA-A*30:02H HLA-B*38:02H HLA-B*15:01H
GSYKDWSY

SEQ ID NO: 382 - protein, 8 aa, Severe acute respiratory syndrome coronavirus 2
  REGION 1..8: note = Table A: HLA-B*58:01H HLA-A*29:01H HLA-C*03:03H HLA-C*03:04H HLA-C*15:05M HLA-C*15:02H HLA-C*17:01H HLA-C*08:01H HLA-C*08:03H HLA-B*39:01H
YSGQSTQL

SEQ ID NO: 383 - protein, 8 aa, Severe acute respiratory syndrome coronavirus 2
  REGION 1..8: note = Table A: HLA-B*52:01H HLA-B*13:02M
GQSTQLGI

SEQ ID NO: 384 - protein, 8 aa, Severe acute respiratory syndrome coronavirus 2
  REGION 1..8: note = Table A: HLA-A*36:01H
QLGIEFLK

SEQ ID NO: 385 - protein, 8 aa, Severe acute respiratory syndrome coronavirus 2
  REGION 1..8: note = Table A: HLA-A*36:01M
RGDKSVYY

SEQ ID NO: 386 - protein, 8 aa, Severe acute respiratory syndrome coronavirus 2
  REGION 1..8: note = Table A: HLA-B*58:01H HLA-C*15:05M HLA-B*57:03H HLA-C*07:04H
YTSNPTTF

SEQ ID NO: 387 - protein, 8 aa, Severe acute respiratory syndrome coronavirus 2
  REGION 1..8: note = Table A: HLA-B*38:02H HLA-B*15:10H
FHLDGEVI

SEQ ID NO: 388 - protein, 8 aa, Severe acute respiratory syndrome coronavirus 2
  REGION 1..8: note = Table A: HLA-B*37:01H
LDGEVITF

SEQ ID NO: 389 - protein, 8 aa, Severe acute respiratory syndrome coronavirus 2
  REGION 1..8: note = Table A: HLA-A*68:02H
EVITFDNL

SEQ ID NO: 390 - protein, 8 aa, Severe acute respiratory syndrome coronavirus 2
  REGION 1..8: note = Table A: HLA-C*04:01H
TFDNLKTL

SEQ ID NO: 391 - protein, 8 aa, Severe acute respiratory syndrome coronavirus 2
  REGION 1..8: note = Table A: HLA-B*08:01H HLA-B*37:01M HLA-B*41:02H HLA-C*07:04H
FDNLKTLL

SEQ ID NO: 392 - protein, 8 aa, Severe acute respiratory syndrome coronavirus 2
  REGION 1..8: note = Table A: HLA-B*08:01H
NLKTLLSL

SEQ ID NO: 393 - protein, 8 aa, Severe acute respiratory syndrome coronavirus 2
  REGION 1..8: note = Table A: HLA-B*38:02H
TLLSLREV

SEQ ID NO: 394 - protein, 8 aa, Severe acute respiratory syndrome coronavirus 2
  REGION 1..8: note = Table A: HLA-A*02:03H HLA-B*52:01M HLA-B*38:02H
SLREVRTI

SEQ ID NO: 395 - protein, 8 aa, Severe acute respiratory syndrome coronavirus 2
  REGION 1..8: note = Table A: HLA-B*40:02H HLA-B*49:01M
REVRTIKV

SEQ ID NO: 396 - protein, 8 aa, Severe acute respiratory syndrome coronavirus 2
  REGION 1..8: note = Table A: HLA-B*15:02H
EVRTIKVF

SEQ ID NO: 397 - protein, 8 aa, Severe acute respiratory syndrome coronavirus 2
  REGION 1..8: note = Table A: HLA-B*08:01H HLA-A*02:03H HLA-B*52:01H HLA-B*38:02H HLA-B*41:02H
TIKVFTTV

SEQ ID NO: 398 - protein, 8 aa, Severe acute respiratory syndrome coronavirus 2
  REGION 1..8: note = Table A: HLA-B*08:01H
NINLHTQV

SEQ ID NO: 399 - protein, 8 aa, Severe acute respiratory syndrome coronavirus 2
  REGION 1..8: note = Table A: HLA-B*39:01H HLA-B*15:10H
LHTQVVDM

SEQ ID NO: 400 - protein, 8 aa, Severe acute respiratory syndrome coronavirus 2
  REGION 1..8: note = Table A: HLA-B*35:02H HLA-B*38:02H HLA-B*15:01H HLA-B*15:02H HLA-B*39:01H
TQVVDMSM

SEQ ID NO: 401 - protein, 8 aa, Severe acute respiratory syndrome coronavirus 2
  REGION 1..8: note = Table A: HLA-B*58:01H HLA-A*03:01H HLA-A*36:01M HLA-A*01:01M HLA-B*38:02H
VVDMSMTY

SEQ ID NO: 402 - protein, 8 aa, Severe acute respiratory syndrome coronavirus 2
  REGION 1..8: note = Table A: HLA-B*07:05H
SMTYGQQF

SEQ ID NO: 403 - protein, 8 aa, Severe acute respiratory syndrome coronavirus 2
  REGION 1..8: note = Table A: HLA-A*30:02H HLA-B*15:01M HLA-B*15:03M HLA-B*39:01H
GQQFGPTY

SEQ ID NO: 404 - protein, 8 aa, Severe acute respiratory syndrome coronavirus 2
  REGION 1..8: note = Table A: HLA-B*52:01H HLA-B*38:02H HLA-B*39:01H
QQFGPTYL

SEQ ID NO: 405 - protein, 8 aa, Severe acute respiratory syndrome coronavirus 2
  REGION 1..8: note = Table A: HLA-C*15:05H HLA-B*51:01H
DGADVTKI

SEQ ID NO: 406 - protein, 8 aa, Severe acute respiratory syndrome coronavirus 2
  REGION 1..8: note = Table A: HLA-B*49:01M
HEGKTFYV

SEQ ID NO: 407 - protein, 8 aa, Severe acute respiratory syndrome coronavirus 2
  REGION 1..8: note = Table A: HLA-B*08:01H
EGKTFYVL

SEQ ID NO: 408 - protein, 8 aa, Severe acute respiratory syndrome coronavirus 2
  REGION 1..8: note = Table A: HLA-C*15:05H
PNDDTLRV

SEQ ID NO: 409 - protein, 8 aa, Severe acute respiratory syndrome coronavirus 2
  REGION 1..8: note = Table A: HLA-A*25:01H HLA-B*18:01H HLA-B*38:02H HLA-B*15:02H HLA-B*07:05H
DTLRVEAF

SEQ ID NO: 410 - protein, 8 aa, Severe acute respiratory syndrome coronavirus 2
  REGION 1..8: note = Table A: HLA-A*36:01M
RVEAFEYY

SEQ ID NO: 411 - protein, 8 aa, Severe acute respiratory syndrome coronavirus 2
  REGION 1..8: note = Table A: HLA-B*38:01M HLA-B*38:02M HLA-B*39:06H HLA-B*39:01M HLA-B*15:10H
YHTTDPSF

SEQ ID NO: 412 - protein, 8 aa, Severe acute respiratory syndrome coronavirus 2
  REGION 1..8: note = Table A: HLA-C*15:05H HLA-C*15:02H HLA-C*17:01H HLA-C*08:03H
HTTDPSFL

SEQ ID NO: 413 - protein, 8 aa, Severe acute respiratory syndrome coronavirus 2
  REGION 1..8: note = Table A: HLA-A*36:01H
TTDPSFLG

SEQ ID NO: 414 - protein, 8 aa, Severe acute respiratory syndrome coronavirus 2
  REGION 1..8: note = Table A: HLA-B*58:02H HLA-C*15:05H
PSFLGRYM

SEQ ID NO: 415 - protein, 8 aa, Severe acute respiratory syndrome coronavirus 2
  REGION 1..8: note = Table A: HLA-C*04:03H HLA-C*08:02M HLA-C*05:01H
WADNNCYL

SEQ ID NO: 416 - protein, 8 aa, Severe acute respiratory syndrome coronavirus 2
  REGION 1..8: note = Table A: HLA-B*15:02H
NCYLATAL

SEQ ID NO: 417 - protein, 8 aa, Severe acute respiratory syndrome coronavirus 2
  REGION 1..8: note = Table A: HLA-C*03:02H HLA-C*15:05H
LATALLTL

SEQ ID NO: 418 - protein, 8 aa, Severe acute respiratory syndrome coronavirus 2
  REGION 1..8: note = Table A: HLA-A*02:04H
ALLTLQQI

SEQ ID NO: 419 - protein, 8 aa, Severe acute respiratory syndrome coronavirus 2
  REGION 1..8: note = Table A: HLA-B*45:01H HLA-B*40:06H HLA-B*50:01M
IELKFNPP

SEQ ID NO: 420 - protein, 8 aa, Severe acute respiratory syndrome coronavirus 2
  REGION 1..8: note = Table A: HLA-B*48:01H HLA-B*15:03H
LKFNPPAL

SEQ ID NO: 421 - protein, 8 aa, Severe acute respiratory syndrome coronavirus 2
  REGION 1..8: note = Table A: HLA-B*35:01H HLA-B*35:07H
PPALQDAY

SEQ ID NO: 422 - protein, 8 aa, Severe acute respiratory syndrome coronavirus 2
  REGION 1..8: note = Table A: HLA-B*58:01M HLA-B*58:02H HLA-C*15:05H HLA-B*57:03M
RAGEAANF

SEQ ID NO: 423 - protein, 8 aa, Severe acute respiratory syndrome coronavirus 2
  REGION 1..8: note = Table A: HLA-B*38:02H HLA-B*15:02H
FCALILAY

SEQ ID NO: 424 - protein, 8 aa, Severe acute respiratory syndrome coronavirus 2
  REGION 1..8: note = Table A: HLA-B*51:01H
LAYCNKTV

SEQ ID NO: 425 - protein, 8 aa, Severe acute respiratory syndrome coronavirus 2
  REGION 1..8: note = Table A: HLA-B*38:02M HLA-B*15:02H
DVRETMSY

SEQ ID NO: 426 - protein, 8 aa, Severe acute respiratory syndrome coronavirus 2
  REGION 1..8: note = Table A: HLA-B*37:01H
RETMSYLF

SEQ ID NO: 427 - protein, 8 aa, Severe acute respiratory syndrome coronavirus 2
  REGION 1..8: note = Table A: HLA-B*54:01H
MSYLFQHA

SEQ ID NO: 428 - protein, 8 aa, Severe acute respiratory syndrome coronavirus 2
  REGION 1..8: note = Table A: HLA-B*08:01H HLA-A*02:11M HLA-B*14:02H HLA-A*02:04H HLA-B*14:01H HLA-A*02:02M HLA-B*38:02H
YLFQHANL

SEQ ID NO: 429 - protein, 8 aa, Severe acute respiratory syndrome coronavirus 2
  REGION 1..8: note = Table A: HLA-B*39:06H
QHANLDSC

SEQ ID NO: 430 - protein, 8 aa, Severe acute respiratory syndrome coronavirus 2
  REGION 1..8: note = Table A: HLA-A*11:02H
RVLNVVCK

SEQ ID NO: 431 - protein, 8 aa, Severe acute respiratory syndrome coronavirus 2
  REGION 1..8: note = Table A: HLA-A*03:02H
GQQQTTLK

SEQ ID NO: 432 - protein, 8 aa, Severe acute respiratory syndrome coronavirus 2
  REGION 1..8: note = Table A: HLA-B*52:01H HLA-B*13:02H
QQTTLKGV

SEQ ID NO: 433 - protein, 8 aa, Severe acute respiratory syndrome coronavirus 2
  REGION 1..8: note = Table A: HLA-A*02:03H
TLKGVEAV

SEQ ID NO: 434 - protein, 8 aa, Severe acute respiratory syndrome coronavirus 2
  REGION 1..8: note = Table A: HLA-B*58:01H HLA-B*15:01H HLA-B*15:03H HLA-B*07:05H
KGVEAVMY

SEQ ID NO: 435 - protein, 8 aa, Severe acute respiratory syndrome coronavirus 2
  REGION 1..8: note = Table A: HLA-C*15:05H
AVMYMGTL

SEQ ID NO: 436 - protein, 8 aa, Severe acute respiratory syndrome coronavirus 2
  REGION 1..8: note = Table A: HLA-C*14:03H HLA-A*29:02H HLA-A*30:02H HLA-B*15:02H
MYMGTLSY

SEQ ID NO: 437 - protein, 8 aa, Severe acute respiratory syndrome coronavirus 2
  REGION 1..8: note = Table A: HLA-B*49:01H
YEQFKKGV

SEQ ID NO: 438 - protein, 8 aa, Severe acute respiratory syndrome coronavirus 2
  REGION 1..8: note = Table A: HLA-B*52:01H
QFKKGVQI

SEQ ID NO: 439 - protein, 8 aa, Severe acute respiratory syndrome coronavirus 2
  REGION 1..8: note = Table A: HLA-B*13:02M
KQATKYLV

SEQ ID NO: 440 - protein, 8 aa, Severe acute respiratory syndrome coronavirus 2
  REGION 1..8: note = Table A: HLA-B*52:01M HLA-B*13:02M
VQQESPFV

SEQ ID NO: 441 - protein, 8 aa, Severe acute respiratory syndrome coronavirus 2
  REGION 1..8: note = Table A: HLA-B*39:01H
QQESPFVM

SEQ ID NO: 442 - protein, 8 aa, Severe acute respiratory syndrome coronavirus 2
  REGION 1..8: note = Table A: HLA-B*44:05H HLA-B*45:01H HLA-B*18:01M HLA-B*37:01M HLA-B*40:01H HLA-B*40:02H HLA-B*07:05M HLA-B*41:02H HLA-B*49:01M HLA-B*50:01H
QESPFVMM

SEQ ID NO: 443 - protein, 8 aa, Severe acute respiratory syndrome coronavirus 2
  REGION 1..8: note = Table A: HLA-B*56:01M HLA-B*55:02M HLA-C*15:05H HLA-B*55:01M HLA-B*39:06M HLA-B*54:01M HLA-B*07:05H
SPFVMMSA

SEQ ID NO: 444 - protein, 8 aa, Severe acute respiratory syndrome coronavirus 2
  REGION 1..8: note = Table A: HLA-B*58:01M HLA-B*58:02H HLA-A*36:01H HLA-A*01:01H HLA-A*30:02H HLA-C*15:05H HLA-B*35:01H HLA-B*38:02H HLA-B*15:01H HLA-B*39:01H
MSAPPAQY

SEQ ID NO: 445 - protein, 8 aa, Severe acute respiratory syndrome coronavirus 2
  REGION 1..8: note = Table A: HLA-C*15:05M HLA-B*07:02H HLA-B*07:05H
APPAQYEL

SEQ ID NO: 446 - protein, 8 aa, Severe acute respiratory syndrome coronavirus 2
  REGION 1..8: note = Table A: HLA-B*14:02H HLA-B*37:01H
YELKHGTF

SEQ ID NO: 447 - protein, 8 aa, Severe acute respiratory syndrome coronavirus 2
  REGION 1..8: note = Table A: HLA-B*39:06H
KHGTFTCA

SEQ ID NO: 448 - protein, 8 aa, Severe acute respiratory syndrome coronavirus 2
  REGION 1..8: note = Table A: HLA-A*36:01H
ASEYTGNY

SEQ ID NO: 449 - protein, 8 aa, Severe acute respiratory syndrome coronavirus 2
  REGION 1..8: note = Table A: HLA-A*33:03H
HYKHITSK

SEQ ID NO: 450 - protein, 8 aa, Severe acute respiratory syndrome coronavirus 2
  REGION 1..8: note = Table A: HLA-B*08:01H
HITSKETL

SEQ ID NO: 451 - protein, 8 aa, Severe acute respiratory syndrome coronavirus 2
  REGION 1..8: note = Table A: HLA-B*58:01H HLA-A*36:01H
ITSKETLY

SEQ ID NO: 452 - protein, 8 aa, Severe acute respiratory syndrome coronavirus 2
  REGION 1..8: note = Table A: HLA-C*03:03H HLA-C*03:04H
YCIDGALL

SEQ ID NO: 453 - protein, 8 aa, Severe acute respiratory syndrome coronavirus 2
  REGION 1..8: note = Table A: HLA-A*03:01H HLA-A*03:02H HLA-A*11:01H HLA-A*11:02H HLA-A*36:01H HLA-A*34:02H
IDGALLTK

SEQ ID NO: 454 - protein, 8 aa, Severe acute respiratory syndrome coronavirus 2
  REGION 1..8: note = Table A: HLA-B*46:01H HLA-B*38:02H HLA-B*15:01H HLA-B*15:02H
LLTKSSEY

SEQ ID NO: 455 - protein, 8 aa, Severe acute respiratory syndrome coronavirus 2
  REGION 1..8: note = Table A: HLA-B*45:01H HLA-B*40:02H HLA-B*40:06H HLA-B*41:02H HLA-B*49:01H HLA-B*50:01H
SEYKGPIT

SEQ ID NO: 456 - protein, 8 aa, Severe acute respiratory syndrome coronavirus 2
  REGION 1..8: note = Table A: HLA-A*11:02H
PITDVFYK

SEQ ID NO: 457 - protein, 8 aa, Severe acute respiratory syndrome coronavirus 2
  REGION 1..8: note = Table A: HLA-C*14:03H
VFYKENSY

SEQ ID NO: 458 - protein, 8 aa, Severe acute respiratory syndrome coronavirus 2
  REGION 1..8: note = Table A: HLA-B*58:01M HLA-B*58:02M HLA-B*57:01M HLA-B*46:01H HLA-B*18:01H HLA-C*07:01H HLA-A*30:02H HLA-C*15:05M HLA-C*12:02H HLA-C*12:03H HLA-B*35:01H HLA-B*38:02H HLA-B*15:01H HLA-B*15:02H HLA-B*15:03H HLA-B*39:01H
  REGION 1..8: note = CONT. FROM ABOVE: HLA-B*07:05H HLA-B*57:03M HLA-C*02:02H
TTIKPVTY

SEQ ID NO: 459 - protein, 8 aa, Severe acute respiratory syndrome coronavirus 2
  REGION 1..8: note = Table A: HLA-A*02:11H
VTYKLDGV

SEQ ID NO: 460 - protein, 8 aa, Severe acute respiratory syndrome coronavirus 2
  REGION 1..8: note = Table A: HLA-B*51:01M
DGVVCTEI

SEQ ID NO: 461 - protein, 8 aa, Severe acute respiratory syndrome coronavirus 2
  REGION 1..8: note = Table A: HLA-B*38:02H HLA-B*15:02H
DPKLDNYY

SEQ ID NO: 462 - protein, 8 aa, Severe acute respiratory syndrome coronavirus 2
  REGION 1..8: note = Table A: HLA-C*04:03M HLA-C*03:03H HLA-C*03:04H HLA-C*05:01H
FTEQPIDL

SEQ ID NO: 463 - protein, 8 aa, Severe acute respiratory syndrome coronavirus 2
  REGION 1..8: note = Table A: HLA-B*49:01H
TEQPIDLV

SEQ ID NO: 464 - protein, 8 aa, Severe acute respiratory syndrome coronavirus 2
  REGION 1..8: note = Table A: HLA-C*15:05H HLA-B*38:02H HLA-B*07:05H
QPYPNASF

SEQ ID NO: 465 - protein, 8 aa, Severe acute respiratory syndrome coronavirus 2
  REGION 1..8: note = Table A: HLA-B*58:01H HLA-B*57:03H
ASFDNFKF

SEQ ID NO: 466 - protein, 8 aa, Severe acute respiratory syndrome coronavirus 2
  REGION 1..8: note = Table A: HLA-C*04:01H
SFDNFKFV

SEQ ID NO: 467 - protein, 8 aa, Severe acute respiratory syndrome coronavirus 2
  REGION 1..8: note = Table A: HLA-C*04:03H HLA-C*08:01H HLA-C*08:02H HLA-C*05:01H
FADDLNQL

SEQ ID NO: 468 - protein, 8 aa, Severe acute respiratory syndrome coronavirus 2
  REGION 1..8: note = Table A: HLA-B*38:02M HLA-B*15:02M
DLNQLTGY

SEQ ID NO: 469 - protein, 8 aa, Severe acute respiratory syndrome coronavirus 2
  REGION 1..8: note = Table A: HLA-A*33:03H
GYKKPASR

SEQ ID NO: 470 - protein, 8 aa, Severe acute respiratory syndrome coronavirus 2
  REGION 1..8: note = Table A: HLA-C*15:05H HLA-B*51:01H
PASRELKV

SEQ ID NO: 471 - protein, 8 aa, Severe acute respiratory syndrome coronavirus 2
  REGION 1..8: note = Table A: HLA-B*37:01H
RELKVTFF

SEQ ID NO: 472 - protein, 8 aa, Severe acute respiratory syndrome coronavirus 2
  REGION 1..8: note = Table A: HLA-B*18:01H HLA-B*07:05H
GDVVAIDY

SEQ ID NO: 473 - protein, 8 aa, Severe acute respiratory syndrome coronavirus 2
  REGION 1..8: note = Table A: HLA-B*15:03H
YKHYTPSF

SEQ ID NO: 474 - protein, 8 aa, Severe acute respiratory syndrome coronavirus 2
  REGION 1..8: note = Table A: HLA-A*03:01H
KHYTPSFK

SEQ ID NO: 475 - protein, 8 aa, Severe acute respiratory syndrome coronavirus 2
  REGION 1..8: note = Table A: HLA-A*36:01H
HYTPSFKK

SEQ ID NO: 476 - protein, 8 aa, Severe acute respiratory syndrome coronavirus 2
  REGION 1..8: note = Table A: HLA-B*58:01H HLA-B*57:03M HLA-B*13:01H
LLHKPIVW

SEQ ID NO: 477 - protein, 8 aa, Severe acute respiratory syndrome coronavirus 2
  REGION 1..8: note = Table A: HLA-B*52:01H
HKPIVWHV

SEQ ID NO: 478 - protein, 8 aa, Severe acute respiratory syndrome coronavirus 2
  REGION 1..8: note = Table A: HLA-A*03:02H HLA-A*34:02H
HVNNATNK

SEQ ID NO: 479 - protein, 8 aa, Severe acute respiratory syndrome coronavirus 2
  REGION 1..8: note = Table A: HLA-C*16:01H HLA-B*35:01H
NATNKATY

SEQ ID NO: 480 - protein, 8 aa, Severe acute respiratory syndrome coronavirus 2
  REGION 1..8: note = Table A: HLA-A*11:303H HLA-A*03:01H HLA-A*03:02M HLA-A*11:01H HLA-A*11:02H HLA-C*07:27H
ATNKATYK

SEQ ID NO: 481 - protein, 8 aa, Severe acute respiratory syndrome coronavirus 2
  REGION 1..8: note = Table A: HLA-B*58:01H HLA-B*58:02H HLA-B*57:01H HLA-A*32:01M HLA-B*57:03H
ATYKPNTW

SEQ ID NO: 482 - protein, 8 aa, Severe acute respiratory syndrome coronavirus 2
  REGION 1..8: note = Table A: HLA-B*35:02H
DAQGMDNL

SEQ ID NO: 483 - protein, 8 aa, Severe acute respiratory syndrome coronavirus 2
  REGION 1..8: note = Table A: HLA-B*51:01H HLA-B*38:02H HLA-B*39:01H
EVVENPTI

SEQ ID NO: 484 - protein, 8 aa, Severe acute respiratory syndrome coronavirus 2
  REGION 1..8: note = Table A: HLA-B*08:01H
NVKTTEVV

SEQ ID NO: 485 - protein, 8 aa, Severe acute respiratory syndrome coronavirus 2
  REGION 1..8: note = Table A: HLA-B*40:01H HLA-B*49:01M
TEVVGDII

SEQ ID NO: 486 - protein, 8 aa, Severe acute respiratory syndrome coronavirus 2
  REGION 1..8: note = Table A: HLA-B*35:02H
EVVGDIIL

SEQ ID NO: 487 - protein, 8 aa, Severe acute respiratory syndrome coronavirus 2
  REGION 1..8: note = Table A: HLA-A*03:02H HLA-A*11:01H HLA-A*11:02H HLA-A*34:02H
VVGDIILK

SEQ ID NO: 488 - protein, 8 aa, Severe acute respiratory syndrome coronavirus 2
  REGION 1..8: note = Table A: HLA-B*50:01H
GDIILKPA

SEQ ID NO: 489 - protein, 8 aa, Severe acute respiratory syndrome coronavirus 2
  REGION 1..8: note = Table A: HLA-C*15:05M HLA-B*51:01M
PANNSLKI

SEQ ID NO: 490 - protein, 8 aa, Severe acute respiratory syndrome coronavirus 2
  REGION 1..8: note = Table A: HLA-B*44:05H HLA-B*14:02H
EEVGHTDL

SEQ ID NO: 491 - protein, 8 aa, Severe acute respiratory syndrome coronavirus 2
  REGION 1..8: note = Table A: HLA-B*39:06M
GHTDLMAA

SEQ ID NO: 492 - protein, 8 aa, Severe acute respiratory syndrome coronavirus 2
  REGION 1..8: note = Table A: HLA-A*36:01M HLA-A*01:01H
HTDLMAAY

SEQ ID NO: 493 - protein, 8 aa, Severe acute respiratory syndrome coronavirus 2
  REGION 1..8: note = Table A: HLA-C*14:02M HLA-C*14:03H HLA-B*39:01H
AYVDNSSL

SEQ ID NO: 494 - protein, 8 aa, Severe acute respiratory syndrome coronavirus 2
  REGION 1..8: note = Table A: HLA-C*15:05H HLA-B*49:01H
VDNSSLTI

SEQ ID NO: 495 - protein, 8 aa, Severe acute respiratory syndrome coronavirus 2
  REGION 1..8: note = Table A: HLA-B*08:01M HLA-B*07:04H
TIKKPNEL

SEQ ID NO: 496 - protein, 8 aa, Severe acute respiratory syndrome coronavirus 2
  REGION 1..8: note = Table A: HLA-C*15:05H HLA-B*55:01H
KPNELSRV

SEQ ID NO: 497 - protein, 8 aa, Severe acute respiratory syndrome coronavirus 2
  REGION 1..8: note = Table A: HLA-B*07:04H
RVLGLKTL

SEQ ID NO: 498 - protein, 8 aa, Severe acute respiratory syndrome coronavirus 2
  REGION 1..8: note = Table A: HLA-B*58:02M HLA-A*02:11H HLA-B*57:03H
KTLATHGL

SEQ ID NO: 499 - protein, 8 aa, Severe acute respiratory syndrome coronavirus 2
  REGION 1..8: note = Table A: HLA-B*54:01H
LATHGLAA

SEQ ID NO: 500 - protein, 8 aa, Severe acute respiratory syndrome coronavirus 2
  REGION 1..8: note = Table A: HLA-A*02:03H
GLAAVNSV

SEQ ID NO: 501 - protein, 8 aa, Severe acute respiratory syndrome coronavirus 2
  REGION 1..8: note = Table A: HLA-B*58:01H
AAVNSVPW

SEQ ID NO: 502 - protein, 8 aa, Severe acute respiratory syndrome coronavirus 2
  REGION 1..8: note = Table A: HLA-A*34:02H
YAKPFLNK

SEQ ID NO: 503 - protein, 8 aa, Severe acute respiratory syndrome coronavirus 2
  REGION 1..8: note = Table A: HLA-B*56:01H HLA-B*08:01H HLA-B*55:02M HLA-C*15:05H HLA-B*55:01M HLA-B*51:01H HLA-B*52:01H HLA-B*54:01H HLA-B*07:02H HLA-B*07:04M
KPFLNKVV

SEQ ID NO: 504 - protein, 8 aa, Severe acute respiratory syndrome coronavirus 2
  REGION 1..8: note = Table A: HLA-A*74:01M HLA-A*03:02H HLA-A*11:01M HLA-A*11:02M HLA-B*57:01H HLA-A*33:01H HLA-A*33:03H HLA-A*26:03H HLA-A*68:01H HLA-A*68:02H HLA-A*34:01H HLA-A*34:02M HLA-C*07:27H HLA-A*31:01M HLA-A*66:01M
TTTNIVTR

SEQ ID NO: 505 - protein, 8 aa, Severe acute respiratory syndrome coronavirus 2
  REGION 1..8: note = Table A: HLA-C*15:05H HLA-B*51:01H
MPYFFTLL

SEQ ID NO: 506 - protein, 8 aa, Severe acute respiratory syndrome coronavirus 2
  REGION 1..8: note = Table A: HLA-A*24:07H
PYFFTLLL

SEQ ID NO: 507 - protein, 8 aa, Severe acute respiratory syndrome coronavirus 2
  REGION 1..8: note = Table A: HLA-B*08:01H
NSRIKASM

SEQ ID NO: 508 - protein, 8 aa, Severe acute respiratory syndrome coronavirus 2
  REGION 1..8: note = Table A: HLA-B*58:02H HLA-C*15:05H HLA-B*57:03H
KASMPTTI

SEQ ID NO: 509 - protein, 8 aa, Severe acute respiratory syndrome coronavirus 2
  REGION 1..8: note = Table A: HLA-A*03:01H HLA-A*03:02H HLA-A*11:01H HLA-A*11:02H
SMPTTIAK

SEQ ID NO: 510 - protein, 8 aa, Severe acute respiratory syndrome coronavirus 2
  REGION 1..8: note = Table A: HLA-B*51:01H HLA-B*54:01H
MPTTIAKN

SEQ ID NO: 511 - protein, 8 aa, Severe acute respiratory syndrome coronavirus 2
  REGION 1..8: note = Table A: HLA-A*26:01H HLA-A*26:02H HLA-A*26:03H
TVKSVGKF

SEQ ID NO: 512 - protein, 8 aa, Severe acute respiratory syndrome coronavirus 2
  REGION 1..8: note = Table A: HLA-B*18:01H HLA-B*49:01H
LEASFNYL

SEQ ID NO: 513 - protein, 8 aa, Severe acute respiratory syndrome coronavirus 2
  REGION 1..8: note = Table A: HLA-A*36:01H HLA-A*34:01H HLA-A*34:02H
EASFNYLK

SEQ ID NO: 514 - protein, 8 aa, Severe acute respiratory syndrome coronavirus 2
  REGION 1..8: note = Table A: HLA-C*14:02H HLA-C*14:03H HLA-A*24:02M HLA-A*24:07M HLA-A*23:01M
NYLKSPNF

SEQ ID NO: 515 - protein, 8 aa, Severe acute respiratory syndrome coronavirus 2
  REGION 1..8: note = Table A: HLA-C*15:05H
SPNFSKLI

SEQ ID NO: 516 - protein, 8 aa, Severe acute respiratory syndrome coronavirus 2
  REGION 1..8: note = Table A: HLA-B*13:02H
YSTAALGV

SEQ ID NO: 517 - protein, 8 aa, Severe acute respiratory syndrome coronavirus 2
  REGION 1..8: note = Table A: HLA-C*15:05H
STAALGVL

SEQ ID NO: 518 - protein, 8 aa, Severe acute respiratory syndrome coronavirus 2
  REGION 1..8: note = Table A: HLA-C*16:01H HLA-C*03:04H HLA-B*35:03H HLA-C*15:05H HLA-B*35:01H HLA-B*35:02H HLA-B*51:01H HLA-C*17:01H HLA-B*35:12H HLA-B*38:02H HLA-B*15:02H
TAALGVLM

SEQ ID NO: 519 - protein, 8 aa, Severe acute respiratory syndrome coronavirus 2
  REGION 1..8: note = Table A: HLA-B*35:01H
MPSYCTGY

SEQ ID NO: 520 - protein, 8 aa, Severe acute respiratory syndrome coronavirus 2
  REGION 1..8: note = Table A: HLA-B*18:01M HLA-C*07:01H HLA-A*30:02H HLA-B*35:01H HLA-B*38:02H HLA-B*15:01H HLA-B*15:02H HLA-B*39:01H HLA-B*07:05M
TNVTIATY

SEQ ID NO: 521 - protein, 8 aa, Severe acute respiratory syndrome coronavirus 2
  REGION 1..8: note = Table A: HLA-C*15:05H
TGSIPCSV

SEQ ID NO: 522 - protein, 8 aa, Severe acute respiratory syndrome coronavirus 2
  REGION 1..8: note = Table A: HLA-C*15:05H
PSLETIQI

SEQ ID NO: 523 - protein, 8 aa, Severe acute respiratory syndrome coronavirus 2
  REGION 1..8: note = Table A: HLA-B*49:01M
LETIQITI

SEQ ID NO: 524 - protein, 8 aa, Severe acute respiratory syndrome coronavirus 2
  REGION 1..8: note = Table A: HLA-B*46:01H HLA-B*52:01H HLA-B*38:02H HLA-B*15:01H HLA-B*15:02H HLA-B*15:03M
IQITISSF

SEQ ID NO: 525 - protein, 8 aa, Severe acute respiratory syndrome coronavirus 2
  REGION 1..8: note = Table A: HLA-B*58:01M HLA-B*58:02H HLA-B*57:01H HLA-B*57:03M
ITISSFKW

SEQ ID NO: 526 - protein, 8 aa, Severe acute respiratory syndrome coronavirus 2
  REGION 1..8: note = Table A: HLA-C*16:01H
ISSFKWDL

SEQ ID NO: 527 - protein, 8 aa, Severe acute respiratory syndrome coronavirus 2
  REGION 1..8: note = Table A: HLA-B*15:03H
FKWDLTAF

SEQ ID NO: 528 - protein, 8 aa, Severe acute respiratory syndrome coronavirus 2
  REGION 1..8: note = Table A: HLA-A*36:01H
VAEWFLAY

SEQ ID NO: 529 - protein, 8 aa, Severe acute respiratory syndrome coronavirus 2
  REGION 1..8: note = Table A: HLA-A*29:02H
ILFTRFFY

SEQ ID NO: 530 - protein, 8 aa, Severe acute respiratory syndrome coronavirus 2
  REGION 1..8: note = Table A: HLA-C*14:03H
FYVLGLAA

SEQ ID NO: 531 - protein, 8 aa, Severe acute respiratory syndrome coronavirus 2
  REGION 1..8: note = Table A: HLA-B*58:02H HLA-B*57:03H
FSYFAVHF

SEQ ID NO: 532 - protein, 8 aa, Severe acute respiratory syndrome coronavirus 2
  REGION 1..8: note = Table A: HLA-C*14:03H HLA-A*24:02H HLA-A*24:07H HLA-B*52:01H HLA-C*08:01H
SYFAVHFI

SEQ ID NO: 533 - protein, 8 aa, Severe acute respiratory syndrome coronavirus 2
  REGION 1..8: note = Table A: HLA-B*38:02M
VHFISNSW

SEQ ID NO: 534 - protein, 8 aa, Severe acute respiratory syndrome coronavirus 2
  REGION 1..8: note = Table A: HLA-A*02:11M HLA-A*02:04H
LMWLIINL

SEQ ID NO: 535 - protein, 8 aa, Severe acute respiratory syndrome coronavirus 2
  REGION 1..8: note = Table A: HLA-B*39:06M
VQMAPISA

SEQ ID NO: 536 - protein, 8 aa, Severe acute respiratory syndrome coronavirus 2
  REGION 1..8: note = Table A: HLA-C*15:05H HLA-B*38:02M HLA-B*15:01H HLA-B*15:02M HLA-B*07:05H
QMAPISAM

SEQ ID NO: 537 - protein, 8 aa, Severe acute respiratory syndrome coronavirus 2
  REGION 1..8: note = Table A: HLA-C*15:05H HLA-B*51:01H HLA-B*52:01H
MAPISAMV

SEQ ID NO: 538 - protein, 8 aa, Severe acute respiratory syndrome coronavirus 2
  REGION 1..8: note = Table A: HLA-A*34:01H HLA-A*66:01H
APISAMVR

SEQ ID NO: 539 - protein, 8 aa, Severe acute respiratory syndrome coronavirus 2
  REGION 1..8: note = Table A: HLA-C*15:05H
PISAMVRM

SEQ ID NO: 540 - protein, 8 aa, Severe acute respiratory syndrome coronavirus 2
  REGION 1..8: note = Table A: HLA-B*58:02H
ISAMVRMY

SEQ ID NO: 541 - protein, 8 aa, Severe acute respiratory syndrome coronavirus 2
  REGION 1..8: note = Table A: HLA-B*38:02H
YIFFASFY

SEQ ID NO: 542 - protein, 8 aa, Severe acute respiratory syndrome coronavirus 2
  REGION 1..8: note = Table A: HLA-C*14:03H HLA-A*29:02H
IFFASFYY

SEQ ID NO: 543 - protein, 8 aa, Severe acute respiratory syndrome coronavirus 2
  REGION 1..8: note = Table A: HLA-C*14:02H HLA-C*14:03M HLA-B*46:01H
FYYVWKSY

SEQ ID NO: 544 - protein, 8 aa, Severe acute respiratory syndrome coronavirus 2
  REGION 1..8: note = Table A: HLA-C*08:01H
YVHVVDGC

SEQ ID NO: 545 - protein, 8 aa, Severe acute respiratory syndrome coronavirus 2
  REGION 1..8: note = Table A: HLA-B*14:01H
NRATRVEC

SEQ ID NO: 546 - protein, 8 aa, Severe acute respiratory syndrome coronavirus 2
  REGION 1..8: note = Table A: HLA-A*34:01H HLA-A*66:01M
TTIVNGVR

SEQ ID NO: 547 - protein, 8 aa, Severe acute respiratory syndrome coronavirus 2
  REGION 1..8: note = Table A: HLA-B*46:01H HLA-C*03:04H
YANGGKGF

SEQ ID NO: 548 - protein, 8 aa, Severe acute respiratory syndrome coronavirus 2
  REGION 1..8: note = Table A: HLA-A*68:02H HLA-B*39:01H
STFISDEV

SEQ ID NO: 549 - protein, 8 aa, Severe acute respiratory syndrome coronavirus 2
  REGION 1..8: note = Table A: HLA-B*41:02H
SDEVARDL

SEQ ID NO: 550 - protein, 8 aa, Severe acute respiratory syndrome coronavirus 2
  REGION 1..8: note = Table A: HLA-B*35:02H
EVARDLSL

SEQ ID NO: 551 - protein, 8 aa, Severe acute respiratory syndrome coronavirus 2
  REGION 1..8: note = Table A: HLA-B*35:01H
NPTDQSSY

SEQ ID NO: 552 - protein, 8 aa, Severe acute respiratory syndrome coronavirus 2
  REGION 1..8: note = Table A: HLA-C*15:05H HLA-B*51:01H HLA-B*52:01M HLA-B*39:06H HLA-B*13:02H
SSYIVDSV

SEQ ID NO: 553 - protein, 8 aa, Severe acute respiratory syndrome coronavirus 2
  REGION 1..8: note = Table A: HLA-A*02:11H HLA-A*68:02H HLA-C*15:05H HLA-B*14:01H HLA-A*02:01H HLA-C*08:01H HLA-B*38:02H HLA-B*39:01H HLA-B*13:02H HLA-B*49:01H
YIVDSVTV

SEQ ID NO: 554 - protein, 8 aa, Severe acute respiratory syndrome coronavirus 2
  REGION 1..8: note = Table A: HLA-A*03:01H HLA-A*03:02M HLA-A*11:01H HLA-A*11:02H HLA-A*36:01H HLA-A*34:02H
IVDSVTVK

SEQ ID NO: 555 - protein, 8 aa, Severe acute respiratory syndrome coronavirus 2
  REGION 1..8: note = Table A: HLA-A*30:02H
KNGSIHLY

SEQ ID NO: 556 - protein, 8 aa, Severe acute respiratory syndrome coronavirus 2
  REGION 1..8: note = Table A: HLA-A*36:01H HLA-C*04:01H
YFDKAGQK

SEQ ID NO: 557 - protein, 8 aa, Severe acute respiratory syndrome coronavirus 2
  REGION 1..8: note = Table A: HLA-B*58:02H HLA-C*16:01H HLA-A*32:01H HLA-B*57:03H
KTYERHSL

SEQ ID NO: 558 - protein, 8 aa, Severe acute respiratory syndrome coronavirus 2
  REGION 1..8: note = Table A: HLA-A*02:02H
SLSHFVNL

SEQ ID NO: 559 - protein, 8 aa, Severe acute respiratory syndrome coronavirus 2
  REGION 1..8: note = Table A: HLA-B*52:01H
GSLPINVI

SEQ ID NO: 560 - protein, 8 aa, Severe acute respiratory syndrome coronavirus 2
  REGION 1..8: note = Table A: HLA-B*35:03H HLA-C*15:05H HLA-B*35:01M HLA-B*51:01H HLA-B*35:07M HLA-B*38:02H HLA-B*54:01H HLA-B*15:02H HLA-B*07:05H HLA-B*15:11H
LPINVIVF

SEQ ID NO: 561 - protein, 8 aa, Severe acute respiratory syndrome coronavirus 2
  REGION 1..8: note = Table A: HLA-A*11:02H
IVFDGKSK

SEQ ID NO: 562 - protein, 8 aa, Severe acute respiratory syndrome coronavirus 2
  REGION 1..8: note = Table A: HLA-B*46:01H HLA-C*12:02H HLA-B*38:02H HLA-B*15:01M HLA-B*15:02H HLA-B*15:11H
SAKSASVY

SEQ ID NO: 563 - protein, 8 aa, Severe acute respiratory syndrome coronavirus 2
  REGION 1..8: note = Table A: HLA-B*15:03H
AKSASVYY

SEQ ID NO: 564 - protein, 8 aa, Severe acute respiratory syndrome coronavirus 2
  REGION 1..8: note = Table A: HLA-B*15:02H
SVYYSQLM

SEQ ID NO: 565 - protein, 8 aa, Severe acute respiratory syndrome coronavirus 2
  REGION 1..8: note = Table A: HLA-B*14:01H HLA-B*51:01H HLA-B*38:02H
DQALVSDV

SEQ ID NO: 566 - protein, 8 aa, Severe acute respiratory syndrome coronavirus 2
  REGION 1..8: note = Table A: HLA-A*34:02H
DSAEVAVK

SEQ ID NO: 567 - protein, 8 aa, Severe acute respiratory syndrome coronavirus 2
  REGION 1..8: note = Table A: HLA-C*04:03H HLA-B*35:01H HLA-B*35:02H HLA-B*35:12H HLA-C*05:01H
SAEVAVKM

SEQ ID NO: 568 - protein, 8 aa, Severe acute respiratory syndrome coronavirus 2
  REGION 1..8: note = Table A: HLA-B*44:02H HLA-B*44:05M HLA-B*44:03H HLA-B*18:01H HLA-B*37:01H HLA-B*40:02H HLA-B*07:05H HLA-B*41:02M HLA-B*49:01H
AEVAVKMF

SEQ ID NO: 569 - protein, 8 aa, Severe acute respiratory syndrome coronavirus 2
  REGION 1..8: note = Table A: HLA-B*54:01H
VAVKMFDA

SEQ ID NO: 570 - protein, 8 aa, Severe acute respiratory syndrome coronavirus 2
  REGION 1..8: note = Table A: HLA-A*30:02H HLA-B*15:01H
AVKMFDAY

SEQ ID NO: 571 - protein, 8 aa, Severe acute respiratory syndrome coronavirus 2
  REGION 1..8: note = Table A: HLA-B*44:05H HLA-B*18:01H HLA-B*37:01H HLA-B*38:02H HLA-B*40:02H HLA-B*07:05H HLA-B*41:02H HLA-C*07:04H
FDAYVNTF

SEQ ID NO: 572 - protein, 8 aa, Severe acute respiratory syndrome coronavirus 2
  REGION 1..8: note = Table A: HLA-A*03:01H HLA-A*03:02H HLA-A*11:01H HLA-A*11:02H HLA-A*33:03H HLA-A*34:02H
TFNVPMEK

SEQ ID NO: 573 - protein, 8 aa, Severe acute respiratory syndrome coronavirus 2
  REGION 1..8: note = Table A: HLA-B*41:02H
MEKLKTLV

SEQ ID NO: 574 - protein, 8 aa, Severe acute respiratory syndrome coronavirus 2
  REGION 1..8: note = Table A: HLA-B*39:06H
EKLKTLVA

SEQ ID NO: 575 - protein, 8 aa, Severe acute respiratory syndrome coronavirus 2
  REGION 1..8: note = Table A: HLA-B*39:06H
LKTLVATA

SEQ ID NO: 576 - protein, 8 aa, Severe acute respiratory syndrome coronavirus 2
  REGION 1..8: note = Table A: HLA-B*39:06H
TLVATAEA

SEQ ID NO: 577 - protein, 8 aa, Severe acute respiratory syndrome coronavirus 2
  REGION 1..8: note = Table A: HLA-A*11:303H HLA-C*03:03H HLA-C*03:04H HLA-C*15:05H HLA-B*35:02M HLA-C*17:01H HLA-C*08:01H HLA-B*35:12H
VATAEAEL

SEQ ID NO: 578 - protein, 8 aa, Severe acute respiratory syndrome coronavirus 2
  REGION 1..8: note = Table A: HLA-B*08:01H HLA-B*14:01H
ELAKNVSL

SEQ ID NO: 579 - protein, 8 aa, Severe acute respiratory syndrome coronavirus 2
  REGION 1..8: note = Table A: HLA-B*35:03H HLA-B*35:02H HLA-B*35:12H
NVSLDNVL

SEQ ID NO: 580 - protein, 8 aa, Severe acute respiratory syndrome coronavirus 2
  REGION 1..8: note = Table A: HLA-B*37:01M
LDNVLSTF

SEQ ID NO: 581 - protein, 8 aa, Severe acute respiratory syndrome coronavirus 2
  REGION 1..8: note = Table A: HLA-B*51:01H
DNVLSTFI

SEQ ID NO: 582 - protein, 8 aa, Severe acute respiratory syndrome coronavirus 2
  REGION 1..8: note = Table A: HLA-B*39:06H HLA-B*54:01H
LSTFISAA

SEQ ID NO: 583 - protein, 8 aa, Severe acute respiratory syndrome coronavirus 2
  REGION 1..8: note = Table A: HLA-A*74:01H HLA-A*11:02H HLA-A*33:03H HLA-A*26:03H HLA-C*03:03H HLA-A*68:01H HLA-A*34:01M HLA-A*34:02H HLA-A*31:01H HLA-A*66:01M
STFISAAR

SEQ ID NO: 584 - protein, 8 aa, Severe acute respiratory syndrome coronavirus 2
  REGION 1..8: note = Table A: HLA-C*16:01H
ISAARQGF

SEQ ID NO: 585 - protein, 8 aa, Severe acute respiratory syndrome coronavirus 2
  REGION 1..8: note = Table A: HLA-B*35:02H
FVDSDVET

SEQ ID NO: 586 - protein, 8 aa, Severe acute respiratory syndrome coronavirus 2
  REGION 1..8: note = Table A: HLA-B*39:06H HLA-B*39:01H
SHQSDIEV

SEQ ID NO: 587 - protein, 8 aa, Severe acute respiratory syndrome coronavirus 2
  REGION 1..8: note = Table A: HLA-A*02:11H
YMLTYNKV

SEQ ID NO: 588 - protein, 8 aa, Severe acute respiratory syndrome coronavirus 2
  REGION 1..8: note = Table A: HLA-B*14:01H HLA-B*39:06H
ARHINAQV

SEQ ID NO: 589 - protein, 8 aa, Severe acute respiratory syndrome coronavirus 2
  REGION 1..8: note = Table A: HLA-B*39:06M
RHINAQVA

SEQ ID NO: 590 - protein, 8 aa, Severe acute respiratory syndrome coronavirus 2
  REGION 1..8: note = Table A: HLA-A*03:02H
HINAQVAK

SEQ ID NO: 591 - protein, 8 aa, Severe acute respiratory syndrome coronavirus 2
  REGION 1..8: note = Table A: HLA-B*58:02H HLA-B*57:03H
KSHNIALI

SEQ ID NO: 592 - protein, 8 aa, Severe acute respiratory syndrome coronavirus 2
  REGION 1..8: note = Table A: HLA-B*38:02H
SHNIALIW

SEQ ID NO: 593 - protein, 8 aa, Severe acute respiratory syndrome coronavirus 2
  REGION 1..8: note = Table A: HLA-A*02:11H
NIALIWNV

SEQ ID NO: 594 - protein, 8 aa, Severe acute respiratory syndrome coronavirus 2
  REGION 1..8: note = Table A: HLA-A*02:02H HLA-B*38:02H HLA-B*39:01H
FMSLSEQL

SEQ ID NO: 595 - protein, 8 aa, Severe acute respiratory syndrome coronavirus 2
  REGION 1..8: note = Table A: HLA-B*41:02M HLA-B*49:01H
SEQLRKQI

SEQ ID NO: 596 - protein, 8 aa, Severe acute respiratory syndrome coronavirus 2
  REGION 1..8: note = Table A: HLA-B*56:01M HLA-B*55:02M HLA-C*15:05H HLA-B*55:01M HLA-B*51:01H HLA-B*39:06H HLA-B*54:01H
LPFKLTCA

SEQ ID NO: 597 - protein, 8 aa, Severe acute respiratory syndrome coronavirus 2
  REGION 1..8: note = Table A: HLA-C*16:01H
CATTRQVV

SEQ ID NO: 598 - protein, 8 aa, Severe acute respiratory syndrome coronavirus 2
  REGION 1..8: note = Table A: HLA-B*52:01H
TTRQVVNV

SEQ ID NO: 599 - protein, 8 aa, Severe acute respiratory syndrome coronavirus 2
  REGION 1..8: note = Table A: HLA-B*14:01M HLA-B*39:06M HLA-B*39:01H
TRQVVNVV

SEQ ID NO: 600 - protein, 8 aa, Severe acute respiratory syndrome coronavirus 2
  REGION 1..8: note = Table A: HLA-A*03:01M HLA-A*03:02H HLA-A*11:01M HLA-A*11:02H HLA-A*30:02H HLA-A*34:02H HLA-C*07:27H
VVNVVTTK

SEQ ID NO: 601 - protein, 8 aa, Severe acute respiratory syndrome coronavirus 2
  REGION 1..8: note = Table A: HLA-C*15:05H HLA-B*52:01M
VNVVTTKI

SEQ ID NO: 602 - protein, 8 aa, Severe acute respiratory syndrome coronavirus 2
  REGION 1..8: note = Table A: HLA-C*16:01M HLA-B*08:01M HLA-C*15:05H HLA-B*14:02H HLA-B*14:01H HLA-B*07:02H HLA-B*07:04H HLA-C*07:04H
VVTTKIAL

SEQ ID NO: 603 - protein, 8 aa, Severe acute respiratory syndrome coronavirus 2
  REGION 1..8: note = Table A: HLA-A*11:303H HLA-A*03:01H HLA-A*03:02M HLA-A*11:01M HLA-A*11:02M HLA-A*36:01H HLA-A*30:02H HLA-A*34:02M HLA-C*07:27H
VTTKIALK

SEQ ID NO: 604 - protein, 8 aa, Severe acute respiratory syndrome coronavirus 2
  REGION 1..8: note = Table A: HLA-B*58:02H HLA-B*51:01H
IALKGGKI

SEQ ID NO: 605 - protein, 8 aa, Severe acute respiratory syndrome coronavirus 2
  REGION 1..8: note = Table A: HLA-A*11:02H HLA-A*36:01H
KIVNNWLK

SEQ ID NO: 606 - protein, 8 aa, Severe acute respiratory syndrome coronavirus 2
  REGION 1..8: note = Table A: HLA-B*48:01M HLA-B*08:01H
KQLIKVTL

SEQ ID NO: 607 - protein, 8 aa, Severe acute respiratory syndrome coronavirus 2
  REGION 1..8: note = Table A: HLA-A*02:03H HLA-B*52:01H HLA-B*38:02H HLA-B*13:02H
QLIKVTLV

SEQ ID NO: 608 - protein, 8 aa, Severe acute respiratory syndrome coronavirus 2
  REGION 1..8: note = Table A: HLA-B*08:01H
LIKVTLVF

SEQ ID NO: 609 - protein, 8 aa, Severe acute respiratory syndrome coronavirus 2
  REGION 1..8: note = Table A: HLA-B*58:01H HLA-B*58:02H HLA-B*57:03H
KVTLVFLF

SEQ ID NO: 610 - protein, 8 aa, Severe acute respiratory syndrome coronavirus 2
  REGION 1..8: note = Table A: HLA-B*54:01H
LVFLFVAA

SEQ ID NO: 611 - protein, 8 aa, Severe acute respiratory syndrome coronavirus 2
  REGION 1..8: note = Table A: HLA-B*15:02H
FLFVAAIF

SEQ ID NO: 612 - protein, 8 aa, Severe acute respiratory syndrome coronavirus 2
  REGION 1..8: note = Table A: HLA-A*02:04H
FVAAIFYL

SEQ ID NO: 613 - protein, 8 aa, Severe acute respiratory syndrome coronavirus 2
  REGION 1..8: note = Table A: HLA-C*14:03H
FYLITPVH

SEQ ID NO: 614 - protein, 8 aa, Severe acute respiratory syndrome coronavirus 2
  REGION 1..8: note = Table A: HLA-C*04:03H HLA-A*02:11M HLA-A*68:02H HLA-A*02:04H HLA-A*02:02H HLA-A*02:03H HLA-C*17:01H HLA-B*38:02H HLA-B*13:02H
YLITPVHV

SEQ ID NO: 615 - protein, 8 aa, Severe acute respiratory syndrome coronavirus 2
  REGION 1..8: note = Table A: HLA-C*03:02H HLA-B*15:02H HLA-C*07:04H
LITPVHVM

SEQ ID NO: 616 - protein, 8 aa, Severe acute respiratory syndrome coronavirus 2
  REGION 1..8: note = Table A: HLA-C*04:03H HLA-C*08:02M HLA-C*05:01H
HTDFSSEI

SEQ ID NO: 617 - protein, 8 aa, Severe acute respiratory syndrome coronavirus 2
  REGION 1..8: note = Table A: HLA-B*35:01H HLA-B*38:02H HLA-B*15:01H
FSSEIIGY

SEQ ID NO: 618 - protein, 8 aa, Severe acute respiratory syndrome coronavirus 2
  REGION 1..8: note = Table A: HLA-A*11:01H
SSEIIGYK

SEQ ID NO: 619 - protein, 8 aa, Severe acute respiratory syndrome coronavirus 2
  REGION 1..8: note = Table A: HLA-B*45:01H HLA-B*18:01H HLA-B*39:06H HLA-B*40:02H HLA-B*40:06M HLA-B*07:05H HLA-B*41:02H HLA-B*50:01M
SEIIGYKA

SEQ ID NO: 620 - protein, 8 aa, Severe acute respiratory syndrome coronavirus 2
  REGION 1..8: note = Table A: HLA-B*51:01H
DGGVTRDI

SEQ ID NO: 621 - protein, 8 aa, Severe acute respiratory syndrome coronavirus 2
  REGION 1..8: note = Table A: HLA-C*15:05H HLA-B*35:02H HLA-B*35:08H HLA-B*35:12H HLA-B*38:02H
IASTDTCF

SEQ ID NO: 622 - protein, 8 aa, Severe acute respiratory syndrome coronavirus 2
  REGION 1..8: note = Table A: HLA-C*16:01H HLA-B*46:01H HLA-B*08:01H HLA-C*03:02H HLA-C*03:04H HLA-C*12:02H HLA-C*12:03H HLA-C*02:02H
FANKHADF

SEQ ID NO: 623 - protein, 8 aa, Severe acute respiratory syndrome coronavirus 2
  REGION 1..8: note = Table A: HLA-B*38:02H
KHADFDTW

SEQ ID NO: 624 - protein, 8 aa, Severe acute respiratory syndrome coronavirus 2
  REGION 1..8: note = Table A: HLA-C*04:03M HLA-C*05:01H
HADFDTWF

SEQ ID NO: 625 - protein, 8 aa, Severe acute respiratory syndrome coronavirus 2
  REGION 1..8: note = Table A: HLA-A*66:01H
FDTWFSQR

SEQ ID NO: 626 - protein, 8 aa, Severe acute respiratory syndrome coronavirus 2
  REGION 1..8: note = Table A: HLA-C*16:01H HLA-B*46:01H HLA-A*30:02H
FSQRGGSY

SEQ ID NO: 627 - protein, 8 aa, Severe acute respiratory syndrome coronavirus 2
  REGION 1..8: note = Table A: HLA-C*15:05H HLA-B*51:01M HLA-B*07:05H
CPLIAAVI

SEQ ID NO: 628 - protein, 8 aa, Severe acute respiratory syndrome coronavirus 2
  REGION 1..8: note = Table A: HLA-C*16:01H HLA-C*03:02H HLA-B*52:01H
AAVITREV

SEQ ID NO: 629 - protein, 8 aa, Severe acute respiratory syndrome coronavirus 2
  REGION 1..8: note = Table A: HLA-B*40:06H HLA-B*50:01M
REVGFVVP

SEQ ID NO: 630 - protein, 8 aa, Severe acute respiratory syndrome coronavirus 2
  REGION 1..8: note = Table A: HLA-B*51:01H HLA-B*52:01H HLA-B*40:02H
VGFVVPGL

SEQ ID NO: 631 - protein, 8 aa, Severe acute respiratory syndrome coronavirus 2
  REGION 1..8: note = Table A: HLA-C*15:05M HLA-B*51:01H
VPGLPGTI

SEQ ID NO: 632 - protein, 8 aa, Severe acute respiratory syndrome coronavirus 2
  REGION 1..8: note = Table A: HLA-C*04:03H HLA-C*08:02H
NGDFLHFL

SEQ ID NO: 633 - protein, 8 aa, Severe acute respiratory syndrome coronavirus 2
  REGION 1..8: note = Table A: HLA-B*40:06H
GDFLHFLP

SEQ ID NO: 634 - protein, 8 aa, Severe acute respiratory syndrome coronavirus 2
  REGION 1..8: note = Table A: HLA-B*58:02H HLA-B*15:03H HLA-B*15:10H
LHFLPRVF

SEQ ID NO: 635 - protein, 8 aa, Severe acute respiratory syndrome coronavirus 2
  REGION 1..8: note = Table A: HLA-B*56:01H HLA-B*08:01H HLA-B*55:02H HLA-C*15:05H HLA-B*55:01M HLA-B*51:01M HLA-B*54:01M HLA-B*07:02H HLA-B*07:04H HLA-B*07:05H
LPRVFSAV

SEQ ID NO: 636 - protein, 8 aa, Severe acute respiratory syndrome coronavirus 2
  REGION 1..8: note = Table A: HLA-B*35:01H HLA-B*38:02H HLA-B*15:02H
SAVGNICY

SEQ ID NO: 637 - protein, 8 aa, Severe acute respiratory syndrome coronavirus 2
  REGION 1..8: note = Table A: HLA-B*18:01H HLA-C*15:05H HLA-B*35:01M HLA-B*35:08H HLA-B*35:07M HLA-B*38:02H HLA-B*15:02H HLA-B*07:05H HLA-B*15:11H
TPSKLIEY

SEQ ID NO: 638 - protein, 8 aa, Severe acute respiratory syndrome coronavirus 2
  REGION 1..8: note = Table A: HLA-B*39:06H HLA-B*50:01H
TDFATSAC

SEQ ID NO: 639 - protein, 8 aa, Severe acute respiratory syndrome coronavirus 2
  REGION 1..8: note = Table A: HLA-C*03:03H HLA-C*03:04H HLA-B*35:03H HLA-C*17:01H
FATSACVL

SEQ ID NO: 640 - protein, 8 aa, Severe acute respiratory syndrome coronavirus 2
  REGION 1..8: note = Table A: HLA-B*58:01H HLA-A*36:01H
ASGKPVPY

SEQ ID NO: 641 - protein, 8 aa, Severe acute respiratory syndrome coronavirus 2
  REGION 1..8: note = Table A: HLA-A*33:03H
ESLRPDTR

SEQ ID NO: 642 - protein, 8 aa, Severe acute respiratory syndrome coronavirus 2
  REGION 1..8: note = Table A: HLA-B*38:02H
SLRPDTRY

SEQ ID NO: 643 - protein, 8 aa, Severe acute respiratory syndrome coronavirus 2
  REGION 1..8: note = Table A: HLA-B*42:01M HLA-B*08:01H HLA-C*15:05M HLA-B*35:12H HLA-B*07:02M HLA-B*07:04M HLA-B*07:05H
RPDTRYVL

SEQ ID NO: 644 - protein, 8 aa, Severe acute respiratory syndrome coronavirus 2
  REGION 1..8: note = Table A: HLA-B*37:01H
MDGSIIQF

SEQ ID NO: 645 - protein, 8 aa, Severe acute respiratory syndrome coronavirus 2
  REGION 1..8: note = Table A: HLA-A*33:03H
TYLEGSVR

SEQ ID NO: 646 - protein, 8 aa, Severe acute respiratory syndrome coronavirus 2
  REGION 1..8: note = Table A: HLA-B*40:02H HLA-B*41:02H HLA-B*49:01M HLA-B*50:01H
LEGSVRVV

SEQ ID NO: 647 - protein, 8 aa, Severe acute respiratory syndrome coronavirus 2
  REGION 1..8: note = Table A: HLA-B*46:01H HLA-B*38:02H HLA-B*15:01H HLA-B*15:02M HLA-B*07:05H
SVRVVTTF

SEQ ID NO: 648 - protein, 8 aa, Severe acute respiratory syndrome coronavirus 2
  REGION 1..8: note = Table A: HLA-A*36:01H
VTTFDSEY

SEQ ID NO: 649 - protein, 8 aa, Severe acute respiratory syndrome coronavirus 2
  REGION 1..8: note = Table A: HLA-C*16:01H
STSGRWVL

SEQ ID NO: 650 - protein, 8 aa, Severe acute respiratory syndrome coronavirus 2
  REGION 1..8: note = Table A: HLA-B*38:02H
WVLNNDYY

SEQ ID NO: 651 - protein, 8 aa, Severe acute respiratory syndrome coronavirus 2
  REGION 1..8: note = Table A: HLA-A*74:01H
VLNNDYYR

SEQ ID NO: 652 - protein, 8 aa, Severe acute respiratory syndrome coronavirus 2
  REGION 1..8: note = Table A: HLA-C*15:05H
LPGVFCGV

SEQ ID NO: 653 - protein, 8 aa, Severe acute respiratory syndrome coronavirus 2
  REGION 1..8: note = Table A: HLA-C*04:03H
GVDAVNLL

SEQ ID NO: 654 - protein, 8 aa, Severe acute respiratory syndrome coronavirus 2
  REGION 1..8: note = Table A: HLA-C*15:05H HLA-B*51:01H
QPIGALDI

SEQ ID NO: 655 - protein, 8 aa, Severe acute respiratory syndrome coronavirus 2
  REGION 1..8: note = Table A: HLA-C*15:05H
VAGGIVAI

SEQ ID NO: 656 - protein, 8 aa, Severe acute respiratory syndrome coronavirus 2
  REGION 1..8: note = Table A: HLA-A*11:303H HLA-B*46:01H HLA-B*08:01H HLA-C*03:02H HLA-C*03:04H HLA-C*15:05H HLA-B*14:01H HLA-B*51:01H HLA-C*17:01H HLA-B*38:02H HLA-B*07:05H
VAIVVTCL

SEQ ID NO: 657 - protein, 8 aa, Severe acute respiratory syndrome coronavirus 2
  REGION 1..8: note = Table A: HLA-C*03:02H
LAYYFMRF

SEQ ID NO: 658 - protein, 8 aa, Severe acute respiratory syndrome coronavirus 2
  REGION 1..8: note = Table A: HLA-B*45:01M HLA-B*39:06H HLA-B*40:02H HLA-B*40:06M HLA-B*41:02H HLA-B*49:01H HLA-B*50:01H
GEYSHVVA

SEQ ID NO: 659 - protein, 8 aa, Severe acute respiratory syndrome coronavirus 2
  REGION 1..8: note = Table A: HLA-B*39:06H
SHVVAFNT

SEQ ID NO: 660 - protein, 8 aa, Severe acute respiratory syndrome coronavirus 2
  REGION 1..8: note = Table A: HLA-B*46:01H
YSFLPGVY

SEQ ID NO: 661 - protein, 8 aa, Severe acute respiratory syndrome coronavirus 2
  REGION 1..8: note = Table A: HLA-B*53:01H HLA-C*15:05H HLA-B*51:01M
LPGVYSVI

SEQ ID NO: 662 - protein, 8 aa, Severe acute respiratory syndrome coronavirus 2
  REGION 1..8: note = Table A: HLA-A*68:02H
DVSFLAHI

SEQ ID NO: 663 - protein, 8 aa, Severe acute respiratory syndrome coronavirus 2
  REGION 1..8: note = Table A: HLA-C*14:03H HLA-A*24:07H
SFLAHIQW

SEQ ID NO: 664 - protein, 8 aa, Severe acute respiratory syndrome coronavirus 2
  REGION 1..8: note = Table A: HLA-A*02:02H
FLAHIQWM

SEQ ID NO: 665 - protein, 8 aa, Severe acute respiratory syndrome coronavirus 2
  REGION 1..8: note = Table A: HLA-B*56:01H HLA-B*55:02H HLA-B*55:01H HLA-B*54:01H
VPFWITIA

SEQ ID NO: 666 - protein, 8 aa, Severe acute respiratory syndrome coronavirus 2
  REGION 1..8: note = Table A: HLA-B*58:01M HLA-B*58:02M HLA-B*57:01M HLA-A*24:07H HLA-B*57:03H
ISTKHFYW

SEQ ID NO: 667 - protein, 8 aa, Severe acute respiratory syndrome coronavirus 2
  REGION 1..8: note = Table A: HLA-C*14:03H
FYWFFSNY

SEQ ID NO: 668 - protein, 8 aa, Severe acute respiratory syndrome coronavirus 2
  REGION 1..8: note = Table A: HLA-B*08:01M
YLKRRVVF

SEQ ID NO: 669 - protein, 8 aa, Severe acute respiratory syndrome coronavirus 2
  REGION 1..8: note = Table A: HLA-C*14:02H HLA-C*14:03H HLA-B*46:01M HLA-C*03:02H HLA-C*03:04H HLA-C*15:05H HLA-C*12:02H HLA-B*38:02H HLA-B*15:01H HLA-B*07:05H HLA-B*57:03H
VVFNGVSF

SEQ ID NO: 670 - protein, 8 aa, Severe acute respiratory syndrome coronavirus 2
  REGION 1..8: note = Table A: HLA-B*18:01H
NGVSFSTF

SEQ ID NO: 671 - protein, 8 aa, Severe acute respiratory syndrome coronavirus 2
  REGION 1..8: note = Table A: HLA-A*68:02H HLA-B*38:02H HLA-B*39:01H
STFEEAAL

SEQ ID NO: 672 - protein, 8 aa, Severe acute respiratory syndrome coronavirus 2
  REGION 1..8: note = Table A: HLA-B*44:05H HLA-B*18:01M HLA-B*07:05H
EEAALCTF

SEQ ID NO: 673 - protein, 8 aa, Severe acute respiratory syndrome coronavirus 2
  REGION 1..8: note = Table A: HLA-C*14:02H HLA-C*14:03H HLA-B*15:02H
TFLLNKEM

SEQ ID NO: 674 - protein, 8 aa, Severe acute respiratory syndrome coronavirus 2
  REGION 1..8: note = Table A: HLA-B*38:02H
FLLNKEMY

SEQ ID NO: 675 - protein, 8 aa, Severe acute respiratory syndrome coronavirus 2
  REGION 1..8: note = Table A: HLA-A*02:11H HLA-A*02:04H HLA-A*02:02M HLA-C*17:01H
LLNKEMYL

SEQ ID NO: 676 - protein, 8 aa, Severe acute respiratory syndrome coronavirus 2
  REGION 1..8: note = Table A: HLA-B*40:02H HLA-B*40:06H
SDVLLPLT

SEQ ID NO: 677 - protein, 8 aa, Severe acute respiratory syndrome coronavirus 2
  REGION 1..8: note = Table A: HLA-B*46:01H HLA-B*38:02M HLA-B*15:01H HLA-B*15:02H HLA-B*15:03H
VLLPLTQY

SEQ ID NO: 678 - protein, 8 aa, Severe acute respiratory syndrome coronavirus 2
  REGION 1..8: note = Table A: HLA-B*58:02H
LTQYNRYL

SEQ ID NO: 679 - protein, 8 aa, Severe acute respiratory syndrome coronavirus 2
  REGION 1..8: note = Table A: HLA-B*46:01M HLA-A*30:02H HLA-B*35:01H HLA-B*38:02H HLA-B*15:01M HLA-B*15:02H HLA-B*15:03H HLA-B*07:05H HLA-B*15:11H
GAMDTTSY

SEQ ID NO: 680 - protein, 8 aa, Severe acute respiratory syndrome coronavirus 2
  REGION 1..8: note = Table A: HLA-A*36:01H
AMDTTSYR

SEQ ID NO: 681 - protein, 8 aa, Severe acute respiratory syndrome coronavirus 2
  REGION 1..8: note = Table A: HLA-B*46:01H
LAKALNDF

SEQ ID NO: 682 - protein, 8 aa, Severe acute respiratory syndrome coronavirus 2
  REGION 1..8: note = Table A: HLA-B*51:01H HLA-B*52:01M HLA-B*13:02H
YQPPQTSI

SEQ ID NO: 683 - protein, 8 aa, Severe acute respiratory syndrome coronavirus 2
  REGION 1..8: note = Table A: HLA-C*15:05H
TSITSAVL

SEQ ID NO: 684 - protein, 8 aa, Severe acute respiratory syndrome coronavirus 2
  REGION 1..8: note = Table A: HLA-C*15:05H
SAVLQSGF

SEQ ID NO: 685 - protein, 8 aa, Severe acute respiratory syndrome coronavirus 2
  REGION 1..8: note = Table A: HLA-A*34:01H HLA-A*66:01H
AVLQSGFR

SEQ ID NO: 686 - protein, 8 aa, Severe acute respiratory syndrome coronavirus 2
  REGION 1..8: note = Table A: HLA-A*03:02H HLA-A*11:02H
VLQSGFRK

SEQ ID NO: 687 - protein, 8 aa, Severe acute respiratory syndrome coronavirus 2
  REGION 1..8: note = Table A: HLA-C*15:05H HLA-B*51:01M HLA-B*52:01H HLA-B*54:01H
MAFPSGKV

SEQ ID NO: 688 - protein, 8 aa, Severe acute respiratory syndrome coronavirus 2
  REGION 1..8: note = Table A: HLA-B*49:01H
VEGCMVQV

SEQ ID NO: 689 - protein, 8 aa, Severe acute respiratory syndrome coronavirus 2
  REGION 1..8: note = Table A: HLA-B*58:01H
TTTLNGLW

SEQ ID NO: 690 - protein, 8 aa, Severe acute respiratory syndrome coronavirus 2
  REGION 1..8: note = Table A: HLA-B*07:05H
EDMLNPNY

SEQ ID NO: 691 - protein, 8 aa, Severe acute respiratory syndrome coronavirus 2
  REGION 1..8: note = Table A: HLA-B*35:02H HLA-B*35:12H
NPNYEDLL

SEQ ID NO: 692 - protein, 8 aa, Severe acute respiratory syndrome coronavirus 2
  REGION 1..8: note = Table A: HLA-B*58:02H HLA-C*15:02H
KSNHNFLV

SEQ ID NO: 693 - protein, 8 aa, Severe acute respiratory syndrome coronavirus 2
  REGION 1..8: note = Table A: HLA-B*39:06H
NHNFLVQA

SEQ ID NO: 694 - protein, 8 aa, Severe acute respiratory syndrome coronavirus 2
  REGION 1..8: note = Table A: HLA-B*48:01H HLA-A*02:05H HLA-B*39:01H
VQAGNVQL

SEQ ID NO: 695 - protein, 8 aa, Severe acute respiratory syndrome coronavirus 2
  REGION 1..8: note = Table A: HLA-A*33:03H HLA-A*68:01H
QAGNVQLR

SEQ ID NO: 696 - protein, 8 aa, Severe acute respiratory syndrome coronavirus 2
  REGION 1..8: note = Table A: HLA-C*15:02H
AGNVQLRV

SEQ ID NO: 697 - protein, 8 aa, Severe acute respiratory syndrome coronavirus 2
  REGION 1..8: note = Table A: HLA-B*52:01H HLA-B*15:01M
VQLRVIGH

SEQ ID NO: 698 - protein, 8 aa, Severe acute respiratory syndrome coronavirus 2
  REGION 1..8: note = Table A: HLA-B*14:02M HLA-B*14:01M
LRVIGHSM

SEQ ID NO: 699 - protein, 8 aa, Severe acute respiratory syndrome coronavirus 2
  REGION 1..8: note = Table A: HLA-B*52:01H
MQNCVLKL

SEQ ID NO: 700 - protein, 8 aa, Severe acute respiratory syndrome coronavirus 2
  REGION 1..8: note = Table A: HLA-B*39:06H
LKLKVDTA

SEQ ID NO: 701 - protein, 8 aa, Severe acute respiratory syndrome coronavirus 2
  REGION 1..8: note = Table A: HLA-A*03:02M HLA-A*11:01H HLA-A*36:01H
KVDTANPK

SEQ ID NO: 702 - protein, 8 aa, Severe acute respiratory syndrome coronavirus 2
  REGION 1..8: note = Table A: HLA-C*15:05H
QPGQTFSV

SEQ ID NO: 703 - protein, 8 aa, Severe acute respiratory syndrome coronavirus 2
  REGION 1..8: note = Table A: HLA-A*02:03H
YNGSPSGV

SEQ ID NO: 704 - protein, 8 aa, Severe acute respiratory syndrome coronavirus 2
  REGION 1..8: note = Table A: HLA-B*39:01M
NGSPSGVY

SEQ ID NO: 705 - protein, 8 aa, Severe acute respiratory syndrome coronavirus 2
  REGION 1..8: note = Table A: HLA-C*15:05H
SPSGVYQC

SEQ ID NO: 706 - protein, 8 aa, Severe acute respiratory syndrome coronavirus 2
  REGION 1..8: note = Table A: HLA-B*58:02H HLA-B*52:01M HLA-B*38:02H HLA-B*13:02H
AMRPNFTI

SEQ ID NO: 707 - protein, 8 aa, Severe acute respiratory syndrome coronavirus 2
  REGION 1..8: note = Table A: HLA-C*03:03M HLA-C*03:04M HLA-C*15:05H HLA-C*15:02H HLA-C*17:01M HLA-A*66:01H
FTIKGSFL

SEQ ID NO: 708 - protein, 8 aa, Severe acute respiratory syndrome coronavirus 2
  REGION 1..8: note = Table A: HLA-B*37:01H
IDYDCVSF

SEQ ID NO: 709 - protein, 8 aa, Severe acute respiratory syndrome coronavirus 2
  REGION 1..8: note = Table A: HLA-C*14:02M HLA-C*14:03M
CYMHHMEL

SEQ ID NO: 710 - protein, 8 aa, Severe acute respiratory syndrome coronavirus 2
  REGION 1..8: note = Table A: HLA-B*18:01H
MELPTGVH

SEQ ID NO: 711 - protein, 8 aa, Severe acute respiratory syndrome coronavirus 2
  REGION 1..8: note = Table A: HLA-B*07:05H
TDLEGNFY

SEQ ID NO: 712 - protein, 8 aa, Severe acute respiratory syndrome coronavirus 2
  REGION 1..8: note = Table A: HLA-A*11:02H HLA-A*33:01H HLA-A*33:03M HLA-C*06:02H HLA-C*03:03H HLA-A*34:02H HLA-A*31:01H
FYGPFVDR

SEQ ID NO: 713 - protein, 8 aa, Severe acute respiratory syndrome coronavirus 2
  REGION 1..8: note = Table A: HLA-B*14:01H
DRQTAQAA

SEQ ID NO: 714 - protein, 8 aa, Severe acute respiratory syndrome coronavirus 2
  REGION 1..8: note = Table A: HLA-C*15:05H
GTDTTITV

SEQ ID NO: 715 - protein, 8 aa, Severe acute respiratory syndrome coronavirus 2
  REGION 1..8: note = Table A: HLA-A*68:02H
DTTITVNV

SEQ ID NO: 716 - protein, 8 aa, Severe acute respiratory syndrome coronavirus 2
  REGION 1..8: note = Table A: HLA-C*15:05H
TTITVNVL

SEQ ID NO: 717 - protein, 8 aa, Severe acute respiratory syndrome coronavirus 2
  REGION 1..8: note = Table A: HLA-B*58:01H
ITVNVLAW

SEQ ID NO: 718 - protein, 8 aa, Severe acute respiratory syndrome coronavirus 2
  REGION 1..8: note = Table A: HLA-B*58:01H HLA-B*44:03H HLA-B*15:13H HLA-B*57:03H HLA-B*13:01H
AVINGDRW

SEQ ID NO: 719 - protein, 8 aa, Severe acute respiratory syndrome coronavirus 2
  REGION 1..8: note = Table A: HLA-B*18:01H HLA-B*40:02H HLA-B*07:05H
NDFNLVAM

SEQ ID NO: 720 - protein, 8 aa, Severe acute respiratory syndrome coronavirus 2
  REGION 1..8: note = Table A: HLA-A*36:01H HLA-A*29:02H HLA-B*15:02H
FNLVAMKY

SEQ ID NO: 721 - protein, 8 aa, Severe acute respiratory syndrome coronavirus 2
  REGION 1..8: note = Table A: HLA-B*51:01H
EPLTQDHV

SEQ ID NO: 722 - protein, 8 aa, Severe acute respiratory syndrome coronavirus 2
  REGION 1..8: note = Table A: HLA-B*39:06H HLA-B*39:01H
DHVDILGP

SEQ ID NO: 723 - protein, 8 aa, Severe acute respiratory syndrome coronavirus 2
  REGION 1..8: note = Table A: HLA-C*08:02H
HVDILGPL

SEQ ID NO: 724 - protein, 8 aa, Severe acute respiratory syndrome coronavirus 2
  REGION 1..8: note = Table A: HLA-B*48:01M HLA-B*52:01H HLA-B*15:01H HLA-B*39:01H
AQTGIAVL

SEQ ID NO: 725 - protein, 8 aa, Severe acute respiratory syndrome coronavirus 2
  REGION 1..8: note = Table A: HLA-C*16:01H
CASLKELL

SEQ ID NO: 726 - protein, 8 aa, Severe acute respiratory syndrome coronavirus 2
  REGION 1..8: note = Table A: HLA-B*37:01M HLA-B*40:02H HLA-B*41:02H
KELLQNGM

SEQ ID NO: 727 - protein, 8 aa, Severe acute respiratory syndrome coronavirus 2
  REGION 1..8: note = Table A: HLA-B*51:01H
NGMNGRTI

SEQ ID NO: 728 - protein, 8 aa, Severe acute respiratory syndrome coronavirus 2
  REGION 1..8: note = Table A: HLA-C*03:03H HLA-C*03:04H HLA-C*15:05H
RTILGSAL

SEQ ID NO: 729 - protein, 8 aa, Severe acute respiratory syndrome coronavirus 2
  REGION 1..8: note = Table A: HLA-B*18:01H
LEDEFTPF

SEQ ID NO: 730 - protein, 8 aa, Severe acute respiratory syndrome coronavirus 2
  REGION 1..8: note = Table A: HLA-B*18:01M HLA-B*07:05M
DEFTPFDV

SEQ ID NO: 731 - protein, 8 aa, Severe acute respiratory syndrome coronavirus 2
  REGION 1..8: note = Table A: HLA-B*39:06M HLA-B*50:01H
SGVTFQSA

SEQ ID NO: 732 - protein, 8 aa, Severe acute respiratory syndrome coronavirus 2
  REGION 1..8: note = Table A: HLA-A*03:02H HLA-A*11:01H HLA-A*11:02H HLA-C*03:03H HLA-A*34:02H
VTFQSAVK

SEQ ID NO: 733 - protein, 8 aa, Severe acute respiratory syndrome coronavirus 2
  REGION 1..8: note = Table A: HLA-A*33:03H
TFQSAVKR

SEQ ID NO: 734 - protein, 8 aa, Severe acute respiratory syndrome coronavirus 2
  REGION 1..8: note = Table A: HLA-B*58:02H HLA-B*52:01H
QSAVKRTI

SEQ ID NO: 735 - protein, 8 aa, Severe acute respiratory syndrome coronavirus 2
  REGION 1..8: note = Table A: HLA-A*32:01H
TIKGTHHW

SEQ ID NO: 736 - protein, 8 aa, Severe acute respiratory syndrome coronavirus 2
  REGION 1..8: note = Table A: HLA-B*58:02H
KGTHHWLL

SEQ ID NO: 737 - protein, 8 aa, Severe acute respiratory syndrome coronavirus 2
  REGION 1..8: note = Table A: HLA-B*52:01H HLA-B*38:02H
HHWLLLTI

SEQ ID NO: 738 - protein, 8 aa, Severe acute respiratory syndrome coronavirus 2
  REGION 1..8: note = Table A: HLA-B*58:01M HLA-B*15:13M HLA-B*38:02H
VLVQSTQW

SEQ ID NO: 739 - protein, 8 aa, Severe acute respiratory syndrome coronavirus 2
  REGION 1..8: note = Table A: HLA-C*14:02H HLA-C*14:03H
FFLYENAF

SEQ ID NO: 740 - protein, 8 aa, Severe acute respiratory syndrome coronavirus 2
  REGION 1..8: note = Table A: HLA-C*16:01H HLA-C*03:02H HLA-B*35:03M HLA-C*15:05H HLA-C*12:03H HLA-B*35:01M HLA-B*35:02H HLA-B*51:01H HLA-B*35:07M HLA-C*08:01H HLA-B*35:12H HLA-B*38:02H HLA-B*54:01H HLA-B*15:02H HLA-B*07:05H
NAFLPFAM

SEQ ID NO: 741 - protein, 8 aa, Severe acute respiratory syndrome coronavirus 2
  REGION 1..8: note = Table A: HLA-C*15:05M HLA-B*51:01H HLA-B*54:01H HLA-B*07:05H
LPFAMGII

SEQ ID NO: 742 - protein, 8 aa, Severe acute respiratory syndrome coronavirus 2
  REGION 1..8: note = Table A: HLA-C*03:02H HLA-B*35:01H HLA-B*35:07H HLA-B*15:02H
FAMGIIAM

SEQ ID NO: 743 - protein, 8 aa, Severe acute respiratory syndrome coronavirus 2
  REGION 1..8: note = Table A: HLA-B*39:06H
MGIIAMSA

SEQ ID NO: 744 - protein, 8 aa, Severe acute respiratory syndrome coronavirus 2
  REGION 1..8: note = Table A: HLA-B*35:01H
IAMSAFAM

SEQ ID NO: 745 - protein, 8 aa, Severe acute respiratory syndrome coronavirus 2
  REGION 1..8: note = Table A: HLA-B*58:01H
MSAFAMMF

SEQ ID NO: 746 - protein, 8 aa, Severe acute respiratory syndrome coronavirus 2
  REGION 1..8: note = Table A: HLA-C*15:05H HLA-B*51:01M HLA-B*52:01H
SAFAMMFV

SEQ ID NO: 747 - protein, 8 aa, Severe acute respiratory syndrome coronavirus 2
  REGION 1..8: note = Table A: HLA-C*03:02H
FAMMFVKH

SEQ ID NO: 748 - protein, 8 aa, Severe acute respiratory syndrome coronavirus 2
  REGION 1..8: note = Table A: HLA-A*11:02H
AMMFVKHK

SEQ ID NO: 749 - protein, 8 aa, Severe acute respiratory syndrome coronavirus 2
  REGION 1..8: note = Table A: HLA-B*08:01H
FVKHKHAF

SEQ ID NO: 750 - protein, 8 aa, Severe acute respiratory syndrome coronavirus 2
  REGION 1..8: note = Table A: HLA-A*02:07H
LLPSLATV

SEQ ID NO: 751 - protein, 8 aa, Severe acute respiratory syndrome coronavirus 2
  REGION 1..8: note = Table A: HLA-B*55:02H HLA-B*54:01H
LPSLATVA

SEQ ID NO: 752 - protein, 8 aa, Severe acute respiratory syndrome coronavirus 2
  REGION 1..8: note = Table A: HLA-B*38:02H
VAYFNMVY

SEQ ID NO: 753 - protein, 8 aa, Severe acute respiratory syndrome coronavirus 2
  REGION 1..8: note = Table A: HLA-C*14:03H
AYFNMVYM

SEQ ID NO: 754 - protein, 8 aa, Severe acute respiratory syndrome coronavirus 2
  REGION 1..8: note = Table A: HLA-B*58:01H HLA-B*57:01H HLA-A*25:01H HLA-B*53:01H HLA-B*38:02H HLA-A*32:01H HLA-B*57:03H
MVYMPASW

SEQ ID NO: 755 - protein, 8 aa, Severe acute respiratory syndrome coronavirus 2
  REGION 1..8: note = Table A: HLA-C*14:03H
VYMPASWV

SEQ ID NO: 756 - protein, 8 aa, Severe acute respiratory syndrome coronavirus 2
  REGION 1..8: note = Table A: HLA-A*34:01H
MPASWVMR

SEQ ID NO: 757 - protein, 8 aa, Severe acute respiratory syndrome coronavirus 2
  REGION 1..8: note = Table A: HLA-C*15:05H
PASWVMRI

SEQ ID NO: 758 - protein, 8 aa, Severe acute respiratory syndrome coronavirus 2
  REGION 1..8: note = Table A: HLA-B*35:02H HLA-B*37:01H HLA-B*40:02H HLA-B*41:02H
LDMVDTSL

SEQ ID NO: 759 - protein, 8 aa, Severe acute respiratory syndrome coronavirus 2
  REGION 1..8: note = Table A: HLA-B*37:01H
VDTSLSGF

SEQ ID NO: 760 - protein, 8 aa, Severe acute respiratory syndrome coronavirus 2
  REGION 1..8: note = Table A: HLA-B*58:02H HLA-C*15:05H HLA-C*08:01H HLA-B*57:03H
TSLSGFKL

SEQ ID NO: 761 - protein, 8 aa, Severe acute respiratory syndrome coronavirus 2
  REGION 1..8: note = Table A: HLA-B*52:01M
VMYASAVV

SEQ ID NO: 762 - protein, 8 aa, Severe acute respiratory syndrome coronavirus 2
  REGION 1..8: note = Table A: HLA-C*17:01M
YASAVVLL

SEQ ID NO: 763 - protein, 8 aa, Severe acute respiratory syndrome coronavirus 2
  REGION 1..8: note = Table A: HLA-C*15:05H HLA-C*15:02H HLA-B*52:01H HLA-B*13:02H
ASAVVLLI

SEQ ID NO: 764 - protein, 8 aa, Severe acute respiratory syndrome coronavirus 2
  REGION 1..8: note = Table A: HLA-C*03:02H HLA-C*15:05H
SAVVLLIL

SEQ ID NO: 765 - protein, 8 aa, Severe acute respiratory syndrome coronavirus 2
  REGION 1..8: note = Table A: HLA-B*14:01H HLA-B*52:01H HLA-B*38:02H
ILMTARTV

SEQ ID NO: 766 - protein, 8 aa, Severe acute respiratory syndrome coronavirus 2
  REGION 1..8: note = Table A: HLA-A*34:01H
TVYDDGAR

SEQ ID NO: 767 - protein, 8 aa, Severe acute respiratory syndrome coronavirus 2
  REGION 1..8: note = Table A: HLA-A*02:11H
RVWTLMNV

SEQ ID NO: 768 - protein, 8 aa, Severe acute respiratory syndrome coronavirus 2
  REGION 1..8: note = Table A: HLA-C*15:05H HLA-A*02:04H HLA-A*02:01H HLA-B*38:02H
TLMNVLTL

SEQ ID NO: 769 - protein, 8 aa, Severe acute respiratory syndrome coronavirus 2
  REGION 1..8: note = Table A: HLA-B*15:02H HLA-B*07:05H
MNVLTLVY

SEQ ID NO: 770 - protein, 8 aa, Severe acute respiratory syndrome coronavirus 2
  REGION 1..8: note = Table A: HLA-A*11:02H HLA-A*34:02H
NVLTLVYK

SEQ ID NO: 771 - protein, 8 aa, Severe acute respiratory syndrome coronavirus 2
  REGION 1..8: note = Table A: HLA-A*02:11H HLA-A*02:04H HLA-A*02:02H HLA-B*13:02H
VLTLVYKV

SEQ ID NO: 772 - protein, 8 aa, Severe acute respiratory syndrome coronavirus 2
  REGION 1..8: note = Table A: HLA-C*03:04H HLA-C*15:05H
KVYYGNAL

SEQ ID NO: 773 - protein, 8 aa, Severe acute respiratory syndrome coronavirus 2
  REGION 1..8: note = Table A: HLA-B*46:01H HLA-A*30:02H HLA-B*38:02H HLA-B*15:01M
IISVTSNY

SEQ ID NO: 774 - protein, 8 aa, Severe acute respiratory syndrome coronavirus 2
  REGION 1..8: note = Table A: HLA-A*02:11H HLA-A*68:02H HLA-C*15:05M HLA-C*12:03H HLA-C*15:02M HLA-A*02:06H HLA-B*14:01H HLA-A*02:01H HLA-A*02:03M HLA-B*51:01M HLA-B*52:01H HLA-C*08:01H HLA-B*38:02H HLA-B*39:06H HLA-B*39:01H HLA-B*07:05H
  REGION 1..8: note = CONT. FROM ABOVE: HLA-B*13:02H HLA-B*49:01M
YSGVVTTV

SEQ ID NO: 775 - protein, 8 aa, Severe acute respiratory syndrome coronavirus 2
  REGION 1..8: note = Table A: HLA-B*18:01H HLA-C*15:05H HLA-B*15:02H HLA-B*07:05H HLA-B*41:02H
SGVVTTVM

SEQ ID NO: 776 - protein, 8 aa, Severe acute respiratory syndrome coronavirus 2
  REGION 1..8: note = Table A: HLA-C*15:05M HLA-C*15:02H HLA-C*17:01H HLA-C*07:04H
VVTTVMFL

SEQ ID NO: 777 - protein, 8 aa, Severe acute respiratory syndrome coronavirus 2
  REGION 1..8: note = Table A: HLA-A*66:01H
TTVMFLAR

SEQ ID NO: 778 - protein, 8 aa, Severe acute respiratory syndrome coronavirus 2
  REGION 1..8: note = Table A: HLA-B*58:02H HLA-B*52:01M
VMFLARGI

SEQ ID NO: 779 - protein, 8 aa, Severe acute respiratory syndrome coronavirus 2
  REGION 1..8: note = Table A: HLA-B*15:02H
FLARGIVF

SEQ ID NO: 780 - protein, 8 aa, Severe acute respiratory syndrome coronavirus 2
  REGION 1..8: note = Table A: HLA-B*15:02H
IVFMCVEY

SEQ ID NO: 781 - protein, 8 aa, Severe acute respiratory syndrome coronavirus 2
  REGION 1..8: note = Table A: HLA-C*14:02H HLA-C*14:03H HLA-C*03:03H HLA-C*03:04H HLA-C*01:02M
FFITGNTL

SEQ ID NO: 782 - protein, 8 aa, Severe acute respiratory syndrome coronavirus 2
  REGION 1..8: note = Table A: HLA-B*14:02M HLA-B*14:01H
NRYFRLTL

SEQ ID NO: 783 - protein, 8 aa, Severe acute respiratory syndrome coronavirus 2
  REGION 1..8: note = Table A: HLA-A*02:02H
TLGVYDYL

SEQ ID NO: 784 - protein, 8 aa, Severe acute respiratory syndrome coronavirus 2
  REGION 1..8: note = Table A: HLA-B*46:01M HLA-B*38:02H HLA-B*15:01H HLA-B*15:02H
YLVSTQEF

SEQ ID NO: 785 - protein, 8 aa, Severe acute respiratory syndrome coronavirus 2
  REGION 1..8: note = Table A: HLA-B*58:01M HLA-A*36:01H HLA-A*30:02H
VSTQEFRY

SEQ ID NO: 786 - protein, 8 aa, Severe acute respiratory syndrome coronavirus 2
  REGION 1..8: note = Table A: HLA-C*14:02H
RYMNSQGL

SEQ ID NO: 787 - protein, 8 aa, Severe acute respiratory syndrome coronavirus 2
  REGION 1..8: note = Table A: HLA-A*03:01H HLA-A*03:02H HLA-A*11:01M HLA-A*11:02M
SQGLLPPK

SEQ ID NO: 788 - protein, 8 aa, Severe acute respiratory syndrome coronavirus 2
  REGION 1..8: note = Table A: HLA-C*08:01H
NSIDAFKL

SEQ ID NO: 789 - protein, 8 aa, Severe acute respiratory syndrome coronavirus 2
  REGION 1..8: note = Table A: HLA-A*34:02H HLA-B*51:01H
DAFKLNIK

SEQ ID NO: 790 - protein, 8 aa, Severe acute respiratory syndrome coronavirus 2
  REGION 1..8: note = Table A: HLA-C*15:05H
PCIKVATV

SEQ ID NO: 791 - protein, 8 aa, Severe acute respiratory syndrome coronavirus 2
  REGION 1..8: note = Table A: HLA-A*03:02H
KVATVQSK

SEQ ID NO: 792 - protein, 8 aa, Severe acute respiratory syndrome coronavirus 2
  REGION 1..8: note = Table A: HLA-C*16:01H HLA-C*15:05H HLA-B*51:01H
VATVQSKM

SEQ ID NO: 793 - protein, 8 aa, Severe acute respiratory syndrome coronavirus 2
  REGION 1..8: note = Table A: HLA-B*52:01M HLA-B*13:02H
VQSKMSDV

SEQ ID NO: 794 - protein, 8 aa, Severe acute respiratory syndrome coronavirus 2
  REGION 1..8: note = Table A: HLA-B*40:02H
SDVKCTSV

SEQ ID NO: 795 - protein, 8 aa, Severe acute respiratory syndrome coronavirus 2
  REGION 1..8: note = Table A: HLA-C*15:05H HLA-B*51:01H HLA-B*52:01H
TSVVLLSV

SEQ ID NO: 796 - protein, 8 aa, Severe acute respiratory syndrome coronavirus 2
  REGION 1..8: note = Table A: HLA-C*15:05H
SVVLLSVL

SEQ ID NO: 797 - protein, 8 aa, Severe acute respiratory syndrome coronavirus 2
  REGION 1..8: note = Table A: HLA-A*02:04M HLA-B*14:01H HLA-A*02:02H HLA-A*02:03H
LLSVLQQL

SEQ ID NO: 798 - protein, 8 aa, Severe acute respiratory syndrome coronavirus 2
  REGION 1..8: note = Table A: HLA-B*13:02H
SVLQQLRV

SEQ ID NO: 799 - protein, 8 aa, Severe acute respiratory syndrome coronavirus 2
  REGION 1..8: note = Table A: HLA-B*44:02H HLA-B*44:03M
VESSSKLW

SEQ ID NO: 800 - protein, 8 aa, Severe acute respiratory syndrome coronavirus 2
  REGION 1..8: note = Table A: HLA-B*39:06H
LHNDILLA

SEQ ID NO: 801 - protein, 8 aa, Severe acute respiratory syndrome coronavirus 2
  REGION 1..8: note = Table A: HLA-A*36:01H
HNDILLAK

SEQ ID NO: 802 - protein, 8 aa, Severe acute respiratory syndrome coronavirus 2
  REGION 1..8: note = Table A: HLA-A*34:02H
DTTEAFEK

SEQ ID NO: 803 - protein, 8 aa, Severe acute respiratory syndrome coronavirus 2
  REGION 1..8: note = Table A: HLA-B*49:01H
TEAFEKMV

SEQ ID NO: 804 - protein, 8 aa, Severe acute respiratory syndrome coronavirus 2
  REGION 1..8: note = Table A: HLA-B*40:02H HLA-B*41:02M
FEKMVSLL

SEQ ID NO: 805 - protein, 8 aa, Severe acute respiratory syndrome coronavirus 2
  REGION 1..8: note = Table A: HLA-B*52:01H
KMVSLLSV

SEQ ID NO: 806 - protein, 8 aa, Severe acute respiratory syndrome coronavirus 2
  REGION 1..8: note = Table A: HLA-C*15:05H HLA-C*17:01H HLA-B*40:02H
GAVDINKL

SEQ ID NO: 807 - protein, 8 aa, Severe acute respiratory syndrome coronavirus 2
  REGION 1..8: note = Table A: HLA-B*45:01H
EEMLDNRA

SEQ ID NO: 808 - protein, 8 aa, Severe acute respiratory syndrome coronavirus 2
  REGION 1..8: note = Table A: HLA-B*08:01H HLA-A*02:11H HLA-B*14:01H HLA-C*08:02H HLA-B*07:02H
MLDNRATL

SEQ ID NO: 809 - protein, 8 aa, Severe acute respiratory syndrome coronavirus 2
  REGION 1..8: note = Table A: HLA-B*14:02H HLA-B*14:01M
NRATLQAI

SEQ ID NO: 810 - protein, 8 aa, Severe acute respiratory syndrome coronavirus 2
  REGION 1..8: note = Table A: HLA-B*46:01H HLA-B*38:02H HLA-B*15:01M HLA-B*15:02M HLA-B*15:03H HLA-B*39:01H
LQAIASEF

SEQ ID NO: 811 - protein, 8 aa, Severe acute respiratory syndrome coronavirus 2
  REGION 1..8: note = Table A: HLA-C*03:03H HLA-C*03:02H HLA-C*03:04H HLA-C*15:05H HLA-C*08:01H HLA-B*38:02H HLA-B*07:05H
IASEFSSL

SEQ ID NO: 812 - protein, 8 aa, Severe acute respiratory syndrome coronavirus 2
  REGION 1..8: note = Table A: HLA-B*39:06H HLA-B*54:01H
SSLPSYAA

SEQ ID NO: 813 - protein, 8 aa, Severe acute respiratory syndrome coronavirus 2
  REGION 1..8: note = Table A: HLA-B*46:01H HLA-B*35:01M HLA-B*35:07H HLA-B*38:02H HLA-B*39:01H
FATAQEAY

SEQ ID NO: 814 - protein, 8 aa, Severe acute respiratory syndrome coronavirus 2
  REGION 1..8: note = Table A: HLA-B*49:01H
QEAYEQAV

SEQ ID NO: 815 - protein, 8 aa, Severe acute respiratory syndrome coronavirus 2
  REGION 1..8: note = Table A: HLA-B*39:06H HLA-B*54:01H
EAYEQAVA

SEQ ID NO: 816 - protein, 8 aa, Severe acute respiratory syndrome coronavirus 2
  REGION 1..8: note = Table A: HLA-C*04:03H HLA-B*35:02M HLA-C*08:01H HLA-C*08:02M HLA-B*35:12M HLA-B*39:01H HLA-C*05:01M
NGDSEVVL

SEQ ID NO: 817 - protein, 8 aa, Severe acute respiratory syndrome coronavirus 2
  REGION 1..8: note = Table A: HLA-A*03:02H HLA-A*11:01H HLA-A*11:02H HLA-A*36:01H HLA-B*27:02H HLA-B*37:01M
GDSEVVLK

SEQ ID NO: 818 - protein, 8 aa, Severe acute respiratory syndrome coronavirus 2
  REGION 1..8: note = Table A: HLA-A*36:01H
DSEVVLKK

SEQ ID NO: 819 - protein, 8 aa, Severe acute respiratory syndrome coronavirus 2
  REGION 1..8: note = Table A: HLA-B*44:05H HLA-B*44:03H HLA-B*18:01H HLA-B*40:01H HLA-B*40:02H HLA-B*40:06H HLA-B*07:05H HLA-B*41:02M HLA-B*49:01M
SEVVLKKL

SEQ ID NO: 820 - protein, 8 aa, Severe acute respiratory syndrome coronavirus 2
  REGION 1..8: note = Table A: HLA-B*45:01H HLA-B*50:01H
SEFDRDAA

SEQ ID NO: 821 - protein, 8 aa, Severe acute respiratory syndrome coronavirus 2
  REGION 1..8: note = Table A: HLA-C*04:01H HLA-B*35:02H
EFDRDAAM

SEQ ID NO: 822 - protein, 8 aa, Severe acute respiratory syndrome coronavirus 2
  REGION 1..8: note = Table A: HLA-B*51:01H
DAAMQRKL

SEQ ID NO: 823 - protein, 8 aa, Severe acute respiratory syndrome coronavirus 2
  REGION 1..8: note = Table A: HLA-B*52:01M HLA-B*38:02H HLA-B*15:01H HLA-B*15:02H
MQRKLEKM

SEQ ID NO: 824 - protein, 8 aa, Severe acute respiratory syndrome coronavirus 2
  REGION 1..8: note = Table A: HLA-B*45:01H HLA-B*18:01H HLA-B*50:01H
LEKMADQA

SEQ ID NO: 825 - protein, 8 aa, Severe acute respiratory syndrome coronavirus 2
  REGION 1..8: note = Table A: HLA-B*37:01M HLA-B*41:02H
ADQAMTQM

SEQ ID NO: 826 - protein, 8 aa, Severe acute respiratory syndrome coronavirus 2
  REGION 1..8: note = Table A: HLA-B*18:01H HLA-B*35:01H HLA-B*38:02H HLA-B*15:01M HLA-B*15:02H HLA-B*15:03H HLA-B*39:01H HLA-B*07:05H HLA-B*15:11H
DQAMTQMY

SEQ ID NO: 827 - protein, 8 aa, Severe acute respiratory syndrome coronavirus 2
  REGION 1..8: note = Table A: HLA-A*03:01H HLA-A*03:02H HLA-A*11:01H HLA-A*11:02H HLA-A*36:01H HLA-A*34:02H
QAMTQMYK

SEQ ID NO: 828 - protein, 8 aa, Severe acute respiratory syndrome coronavirus 2
  REGION 1..8: note = Table A: HLA-B*49:01H
SEDKRAKV

SEQ ID NO: 829 - protein, 8 aa, Severe acute respiratory syndrome coronavirus 2
  REGION 1..8: note = Table A: HLA-B*08:01H HLA-B*07:04H HLA-B*15:01H
RAKVTSAM

SEQ ID NO: 830 - protein, 8 aa, Severe acute respiratory syndrome coronavirus 2
  REGION 1..8: note = Table A: HLA-C*15:05H
VTSAMQTM

SEQ ID NO: 831 - protein, 8 aa, Severe acute respiratory syndrome coronavirus 2
  REGION 1..8: note = Table A: HLA-C*15:05H
SAMQTMLF

SEQ ID NO: 832 - protein, 8 aa, Severe acute respiratory syndrome coronavirus 2
  REGION 1..8: note = Table A: HLA-B*52:01H
MQTMLFTM

SEQ ID NO: 833 - protein, 8 aa, Severe acute respiratory syndrome coronavirus 2
  REGION 1..8: note = Table A: HLA-C*15:05H
QTMLFTML

SEQ ID NO: 834 - protein, 8 aa, Severe acute respiratory syndrome coronavirus 2
  REGION 1..8: note = Table A: HLA-B*51:01M
DGCVPLNI

SEQ ID NO: 835 - protein, 8 aa, Severe acute respiratory syndrome coronavirus 2
  REGION 1..8: note = Table A: HLA-C*15:05H
VPLNIIPL

SEQ ID NO: 836 - protein, 8 aa, Severe acute respiratory syndrome coronavirus 2
  REGION 1..8: note = Table A: HLA-B*39:06H HLA-B*54:01H
NIIPLTTA

SEQ ID NO: 837 - protein, 8 aa, Severe acute respiratory syndrome coronavirus 2
  REGION 1..8: note = Table A: HLA-C*15:05H HLA-B*51:01M HLA-B*52:01H
TAAKLMVV

SEQ ID NO: 838 - protein, 8 aa, Severe acute respiratory syndrome coronavirus 2
  REGION 1..8: note = Table A: HLA-B*08:01H HLA-B*52:01H
AAKLMVVI

SEQ ID NO: 839 - protein, 8 aa, Severe acute respiratory syndrome coronavirus 2
  REGION 1..8: note = Table A: HLA-B*46:01H HLA-B*15:02H HLA-B*07:05H
LMVVIPDY

SEQ ID NO: 840 - protein, 8 aa, Severe acute respiratory syndrome coronavirus 2
  REGION 1..8: note = Table A: HLA-C*14:02H HLA-C*14:03H
TFTYASAL

SEQ ID NO: 841 - protein, 8 aa, Severe acute respiratory syndrome coronavirus 2
  REGION 1..8: note = Table A: HLA-B*38:02H
YASALWEI

SEQ ID NO: 842 - protein, 8 aa, Severe acute respiratory syndrome coronavirus 2
  REGION 1..8: note = Table A: HLA-A*02:11M HLA-A*02:04M HLA-A*02:07H HLA-B*14:01H HLA-A*02:01H HLA-A*02:03H HLA-B*52:01H HLA-B*38:02H HLA-B*40:06H HLA-B*13:02H
ALWEIQQV

SEQ ID NO: 843 - protein, 8 aa, Severe acute respiratory syndrome coronavirus 2
  REGION 1..8: note = Table A: HLA-C*08:02H HLA-C*05:01H
VVDADSKI

SEQ ID NO: 844 - protein, 8 aa, Severe acute respiratory syndrome coronavirus 2
  REGION 1..8: note = Table A: HLA-B*48:01H HLA-B*44:05M HLA-B*45:01H HLA-C*15:05H HLA-A*02:02H HLA-B*37:01H HLA-B*40:01H HLA-B*40:02M HLA-B*07:05H HLA-B*41:02M HLA-C*07:04M
ADSKIVQL

SEQ ID NO: 845 - protein, 8 aa, Severe acute respiratory syndrome coronavirus 2
  REGION 1..8: note = Table A: HLA-C*15:05H
KIVQLSEI

SEQ ID NO: 846 - protein, 8 aa, Severe acute respiratory syndrome coronavirus 2
  REGION 1..8: note = Table A: HLA-C*04:03H HLA-C*08:02H
SMDNSPNL

SEQ ID NO: 847 - protein, 8 aa, Severe acute respiratory syndrome coronavirus 2
  REGION 1..8: note = Table A: HLA-B*08:01H HLA-B*35:03H HLA-C*15:05M HLA-B*51:01H HLA-B*35:07H HLA-B*38:02H HLA-B*15:02H HLA-B*07:05M
WPLIVTAL

SEQ ID NO: 848 - protein, 8 aa, Severe acute respiratory syndrome coronavirus 2
  REGION 1..8: note = Table A: HLA-A*34:01H HLA-A*66:01H
PLIVTALR

SEQ ID NO: 849 - protein, 8 aa, Severe acute respiratory syndrome coronavirus 2
  REGION 1..8: note = Table A: HLA-B*58:01H HLA-B*58:02M HLA-C*15:05M HLA-C*15:02H HLA-C*17:01H HLA-B*57:03H HLA-C*07:04H
RANSAVKL

SEQ ID NO: 850 - protein, 8 aa, Severe acute respiratory syndrome coronavirus 2
  REGION 1..8: note = Table A: HLA-B*44:05H HLA-B*18:01M HLA-B*14:01H HLA-B*40:01M HLA-B*40:02M HLA-B*39:01H HLA-B*07:05M HLA-B*41:02M
NELSPVAL

SEQ ID NO: 851 - protein, 8 aa, Severe acute respiratory syndrome coronavirus 2
  REGION 1..8: note = Table A: HLA-A*33:03H HLA-A*26:03H HLA-A*68:01H HLA-A*34:01M HLA-A*34:02H HLA-A*66:01H
ELSPVALR

SEQ ID NO: 852 - protein, 8 aa, Severe acute respiratory syndrome coronavirus 2
  REGION 1..8: note = Table A: HLA-C*15:05M HLA-B*55:01H HLA-B*07:02H HLA-B*07:04M HLA-B*07:05M
SPVALRQM

SEQ ID NO: 853 - protein, 8 aa, Severe acute respiratory syndrome coronavirus 2
  REGION 1..8: note = Table A: HLA-A*36:01M HLA-A*01:01H HLA-B*18:01H HLA-B*35:01H HLA-B*39:01H HLA-B*07:05H
TDDNALAY

SEQ ID NO: 854 - protein, 8 aa, Severe acute respiratory syndrome coronavirus 2
  REGION 1..8: note = Table A: HLA-B*07:05H
DDNALAYY

SEQ ID NO: 855 - protein, 8 aa, Severe acute respiratory syndrome coronavirus 2
  REGION 1..8: note = Table A: HLA-A*34:02H
LAYYNTTK

SEQ ID NO: 856 - protein, 8 aa, Severe acute respiratory syndrome coronavirus 2
  REGION 1..8: note = Table A: HLA-A*36:01H
LSDLQDLK

SEQ ID NO: 857 - protein, 8 aa, Severe acute respiratory syndrome coronavirus 2
  REGION 1..8: note = Table A: HLA-B*44:05H HLA-B*44:03H
SDLQDLKW

SEQ ID NO: 858 - protein, 8 aa, Severe acute respiratory syndrome coronavirus 2
  REGION 1..8: note = Table A: HLA-B*37:01H
QDLKWARF

SEQ ID NO: 859 - protein, 8 aa, Severe acute respiratory syndrome coronavirus 2
  REGION 1..8: note = Table A: HLA-B*51:01H
DTPKGPKV

SEQ ID NO: 860 - protein, 8 aa, Severe acute respiratory syndrome coronavirus 2
  REGION 1..8: note = Table A: HLA-B*08:01H
FIKGLNNL

SEQ ID NO: 861 - protein, 8 aa, Severe acute respiratory syndrome coronavirus 2
  REGION 1..8: note = Table A: HLA-B*08:01H
NLNRGMVL

SEQ ID NO: 862 - protein, 8 aa, Severe acute respiratory syndrome coronavirus 2
  REGION 1..8: note = Table A: HLA-C*15:05M HLA-B*07:05H
RGMVLGSL

SEQ ID NO: 863 - protein, 8 aa, Severe acute respiratory syndrome coronavirus 2
  REGION 1..8: note = Table A: HLA-B*54:01H
MVLGSLAA

SEQ ID NO: 864 - protein, 8 aa, Severe acute respiratory syndrome coronavirus 2
  REGION 1..8: note = Table A: HLA-A*02:02H HLA-C*17:01H
SLAATVRL

SEQ ID NO: 865 - protein, 8 aa, Severe acute respiratory syndrome coronavirus 2
  REGION 1..8: note = Table A: HLA-C*16:01H HLA-B*55:01H HLA-B*54:01H
AATVRLQA

SEQ ID NO: 866 - protein, 8 aa, Severe acute respiratory syndrome coronavirus 2
  REGION 1..8: note = Table A: HLA-C*15:05H
QAGNATEV

SEQ ID NO: 867 - protein, 8 aa, Severe acute respiratory syndrome coronavirus 2
  REGION 1..8: note = Table A: HLA-B*35:03M HLA-C*15:05M HLA-B*35:01H HLA-B*35:02H HLA-B*35:12H HLA-B*07:02H HLA-B*39:01H HLA-B*07:05M
VPANSTVL

SEQ ID NO: 868 - protein, 8 aa, Severe acute respiratory syndrome coronavirus 2
  REGION 1..8: note = Table A: HLA-B*54:01H
CAFAVDAA

SEQ ID NO: 869 - protein, 8 aa, Severe acute respiratory syndrome coronavirus 2
  REGION 1..8: note = Table A: HLA-B*54:01H
FAVDAAKA

SEQ ID NO: 870 - protein, 8 aa, Severe acute respiratory syndrome coronavirus 2
  REGION 1..8: note = Table A: HLA-B*15:01H HLA-B*07:05H
AVDAAKAY

SEQ ID NO: 871 - protein, 8 aa, Severe acute respiratory syndrome coronavirus 2
  REGION 1..8: note = Table A: HLA-A*02:11H
KAYKDYLA

SEQ ID NO: 872 - protein, 8 aa, Severe acute respiratory syndrome coronavirus 2
  REGION 1..8: note = Table A: HLA-B*52:01M HLA-B*13:02H
GQPITNCV

SEQ ID NO: 873 - protein, 8 aa, Severe acute respiratory syndrome coronavirus 2
  REGION 1..8: note = Table A: HLA-B*39:06H
THTGTGQA

SEQ ID NO: 874 - protein, 8 aa, Severe acute respiratory syndrome coronavirus 2
  REGION 1..8: note = Table A: HLA-C*15:05H HLA-B*38:02H
HTGTGQAI

SEQ ID NO: 875 - protein, 8 aa, Severe acute respiratory syndrome coronavirus 2
  REGION 1..8: note = Table A: HLA-B*45:01H HLA-B*55:01H HLA-B*39:06H HLA-B*54:01H
AITVTPEA

SEQ ID NO: 876 - protein, 8 aa, Severe acute respiratory syndrome coronavirus 2
  REGION 1..8: note = Table A: HLA-B*35:02H HLA-B*35:12H
TVTPEANM

SEQ ID NO: 877 - protein, 8 aa, Severe acute respiratory syndrome coronavirus 2
  REGION 1..8: note = Table A: HLA-A*03:02H HLA-A*36:01H
HIDHPNPK

SEQ ID NO: 878 - protein, 8 aa, Severe acute respiratory syndrome coronavirus 2
  REGION 1..8: note = Table A: HLA-B*39:06M
VQIPTTCA

SEQ ID NO: 879 - protein, 8 aa, Severe acute respiratory syndrome coronavirus 2
  REGION 1..8: note = Table A: HLA-B*44:05H HLA-C*15:05H HLA-C*01:02H HLA-C*08:01H HLA-C*08:03H HLA-B*37:01H HLA-B*40:02H HLA-B*39:01H HLA-B*07:05H HLA-B*41:02H HLA-C*07:04H
NDPVGFTL

SEQ ID NO: 880 - protein, 8 aa, Severe acute respiratory syndrome coronavirus 2
  REGION 1..8: note = Table A: HLA-A*34:01H HLA-A*34:02H
DPVGFTLK

SEQ ID NO: 881 - protein, 8 aa, Severe acute respiratory syndrome coronavirus 2
  REGION 1..8: note = Table A: HLA-A*02:11H
GMWKGYGC

SEQ ID NO: 882 - protein, 8 aa, Severe acute respiratory syndrome coronavirus 2
  REGION 1..8: note = Table A: HLA-B*14:01H HLA-B*35:02H HLA-B*52:01H HLA-B*38:01H HLA-B*38:02M HLA-B*39:06H HLA-B*15:02H
DQLREPML

SEQ ID NO: 883 - protein, 8 aa, Severe acute respiratory syndrome coronavirus 2
  REGION 1..8: note = Table A: HLA-B*50:01H
REPMLQSA

SEQ ID NO: 884 - protein, 8 aa, Severe acute respiratory syndrome coronavirus 2
  REGION 1..8: note = Table A: HLA-C*04:03M HLA-C*08:02M HLA-C*05:01M
SADAQSFL

SEQ ID NO: 885 - protein, 8 aa, Severe acute respiratory syndrome coronavirus 2
  REGION 1..8: note = Table A: HLA-A*33:01H HLA-A*33:03H HLA-A*68:01H HLA-A*34:01H HLA-A*34:02M HLA-A*66:01M
DAQSFLNR

SEQ ID NO: 886 - protein, 8 aa, Severe acute respiratory syndrome coronavirus 2
  REGION 1..8: note = Table A: HLA-B*52:01M HLA-B*13:02H
AQSFLNRV

SEQ ID NO: 887 - protein, 8 aa, Severe acute respiratory syndrome coronavirus 2
  REGION 1..8: note = Table A: HLA-A*02:11H HLA-A*02:03H
FLNRVCGV

SEQ ID NO: 888 - protein, 8 aa, Severe acute respiratory syndrome coronavirus 2
  REGION 1..8: note = Table A: HLA-B*39:06H
NRVCGVSA

SEQ ID NO: 889 - protein, 8 aa, Severe acute respiratory syndrome coronavirus 2
  REGION 1..8: note = Table A: HLA-A*33:01H HLA-A*33:03M HLA-A*68:01M HLA-A*34:01H HLA-A*34:02H HLA-A*66:01H
TSTDVVYR

SEQ ID NO: 890 - protein, 8 aa, Severe acute respiratory syndrome coronavirus 2
  REGION 1..8: note = Table A: HLA-B*37:01H
TDVVYRAF

SEQ ID NO: 891 - protein, 8 aa, Severe acute respiratory syndrome coronavirus 2
  REGION 1..8: note = Table A: HLA-A*68:02H HLA-B*38:02H HLA-B*40:02H HLA-B*39:01H HLA-B*13:02H HLA-B*49:01H
FDIYNDKV

SEQ ID NO: 892 - protein, 8 aa, Severe acute respiratory syndrome coronavirus 2
  REGION 1..8: note = Table A: HLA-C*04:03H HLA-C*05:01H
YNDKVAGF

SEQ ID NO: 893 - protein, 8 aa, Severe acute respiratory syndrome coronavirus 2
  REGION 1..8: note = Table A: HLA-B*58:02H HLA-C*03:04H HLA-C*15:02H HLA-C*17:01H
VAGFAKFL

SEQ ID NO: 894 - protein, 8 aa, Severe acute respiratory syndrome coronavirus 2
  REGION 1..8: note = Table A: HLA-A*11:02H
AGFAKFLK

SEQ ID NO: 895 - protein, 8 aa, Severe acute respiratory syndrome coronavirus 2
  REGION 1..8: note = Table A: HLA-B*18:01H HLA-B*35:01H HLA-B*07:05H
DDNLIDSY

SEQ ID NO: 896 - protein, 8 aa, Severe acute respiratory syndrome coronavirus 2
  REGION 1..8: note = Table A: HLA-A*11:01H HLA-A*11:02H HLA-A*36:01H
IDSYFVVK

SEQ ID NO: 897 - protein, 8 aa, Severe acute respiratory syndrome coronavirus 2
  REGION 1..8: note = Table A: HLA-A*33:01M HLA-A*33:03M HLA-A*68:01M HLA-A*34:01M HLA-A*34:02H HLA-B*51:01H HLA-A*66:01M
DSYFVVKR

SEQ ID NO: 898 - protein, 8 aa, Severe acute respiratory syndrome coronavirus 2
  REGION 1..8: note = Table A: HLA-B*08:01H HLA-B*57:03H
FVVKRHTF

SEQ ID NO: 899 - protein, 8 aa, Severe acute respiratory syndrome coronavirus 2
  REGION 1..8: note = Table A: HLA-B*35:08H HLA-B*38:02H HLA-B*15:01H HLA-B*15:02H HLA-B*15:03H
YQHEETIY

SEQ ID NO: 900 - protein, 8 aa, Severe acute respiratory syndrome coronavirus 2
  REGION 1..8: note = Table A: HLA-B*18:01H HLA-B*37:01H HLA-B*40:01H HLA-B*40:02H HLA-B*41:02H
HEETIYNL

SEQ ID NO: 901 - protein, 8 aa, Severe acute respiratory syndrome coronavirus 2
  REGION 1..8: note = Table A: HLA-B*44:05H
EETIYNLL

SEQ ID NO: 902 - protein, 8 aa, Severe acute respiratory syndrome coronavirus 2
  REGION 1..8: note = Table A: HLA-A*34:02H
ETIYNLLK

SEQ ID NO: 903 - protein, 8 aa, Severe acute respiratory syndrome coronavirus 2
  REGION 1..8: note = Table A: HLA-A*03:02H HLA-B*37:01H
KDCPAVAK

SEQ ID NO: 904 - protein, 8 aa, Severe acute respiratory syndrome coronavirus 2
  REGION 1..8: note = Table A: HLA-C*15:05H HLA-B*51:01M
DGDMVPHI

SEQ ID NO: 905 - protein, 8 aa, Severe acute respiratory syndrome coronavirus 2
  REGION 1..8: note = Table A: HLA-A*33:01M HLA-A*33:03H HLA-A*68:01H HLA-A*34:01H HLA-A*66:01H
DMVPHISR

SEQ ID NO: 906 - protein, 8 aa, Severe acute respiratory syndrome coronavirus 2
  REGION 1..8: note = Table A: HLA-B*08:01H HLA-B*14:02H HLA-B*14:01H
QRLTKYTM

SEQ ID NO: 907 - protein, 8 aa, Severe acute respiratory syndrome coronavirus 2
  REGION 1..8: note = Table A: HLA-B*38:02H
YTMADLVY

SEQ ID NO: 908 - protein, 8 aa, Severe acute respiratory syndrome coronavirus 2
  REGION 1..8: note = Table A: HLA-C*04:03M HLA-B*35:03M HLA-C*15:05H HLA-B*35:01H HLA-B*35:02M HLA-B*35:08H HLA-B*35:07H HLA-C*08:01H HLA-C*08:02M HLA-B*35:12H HLA-B*38:02M HLA-B*15:02H HLA-B*39:01H HLA-B*07:05H HLA-C*05:01H
MADLVYAL

SEQ ID NO: 909 - protein, 8 aa, Severe acute respiratory syndrome coronavirus 2
  REGION 1..8: note = Table A: HLA-C*04:03M
FVENPDIL

SEQ ID NO: 910 - protein, 8 aa, Severe acute respiratory syndrome coronavirus 2
  REGION 1..8: note = Table A: HLA-B*35:01H HLA-B*35:07H HLA-B*15:02H
NPDILRVY

SEQ ID NO: 911 - protein, 8 aa, Severe acute respiratory syndrome coronavirus 2
  REGION 1..8: note = Table A: HLA-B*51:01H
YANLGERV

SEQ ID NO: 912 - protein, 8 aa, Severe acute respiratory syndrome coronavirus 2
  REGION 1..8: note = Table A: HLA-B*40:02H HLA-B*41:02H
GERVRQAL

SEQ ID NO: 913 - protein, 8 aa, Severe acute respiratory syndrome coronavirus 2
  REGION 1..8: note = Table A: HLA-B*52:01H HLA-B*13:02H
RQALLKTV

SEQ ID NO: 914 - protein, 8 aa, Severe acute respiratory syndrome coronavirus 2
  REGION 1..8: note = Table A: HLA-A*02:03H
LLKTVQFC

SEQ ID NO: 915 - protein, 8 aa, Severe acute respiratory syndrome coronavirus 2
  REGION 1..8: note = Table A: HLA-C*15:05H HLA-B*51:01M
DAMRNAGI

SEQ ID NO: 916 - protein, 8 aa, Severe acute respiratory syndrome coronavirus 2
  REGION 1..8: note = Table A: HLA-B*35:03H HLA-C*15:05M HLA-B*14:02H HLA-C*12:03H HLA-B*35:01H HLA-B*35:02H HLA-B*51:01H HLA-C*17:01H HLA-C*08:01H HLA-C*08:03H HLA-B*39:01H
NAGIVGVL

SEQ ID NO: 917 - protein, 8 aa, Severe acute respiratory syndrome coronavirus 2
  REGION 1..8: note = Table A: HLA-C*08:02H
NQDLNGNW

SEQ ID NO: 918 - protein, 8 aa, Severe acute respiratory syndrome coronavirus 2
  REGION 1..8: note = Table A: HLA-B*40:06H HLA-B*50:01H
GDFIQTTP

SEQ ID NO: 919 - protein, 8 aa, Severe acute respiratory syndrome coronavirus 2
  REGION 1..8: note = Table A: HLA-C*15:05H
TPGSGVPV

SEQ ID NO: 920 - protein, 8 aa, Severe acute respiratory syndrome coronavirus 2
  REGION 1..8: note = Table A: HLA-B*35:01H HLA-B*38:02H
VPVVDSYY

SEQ ID NO: 921 - protein, 8 aa, Severe acute respiratory syndrome coronavirus 2
  REGION 1..8: note = Table A: HLA-C*04:03H
VVDSYYSL

SEQ ID NO: 922 - protein, 8 aa, Severe acute respiratory syndrome coronavirus 2
  REGION 1..8: note = Table A: HLA-C*03:02H HLA-B*52:01H
YSLLMPIL

SEQ ID NO: 923 - protein, 8 aa, Severe acute respiratory syndrome coronavirus 2
  REGION 1..8: note = Table A: HLA-A*02:11H HLA-A*02:04M HLA-A*02:01H HLA-A*02:02H HLA-A*02:03H HLA-B*38:02H
LLMPILTL

SEQ ID NO: 924 - protein, 8 aa, Severe acute respiratory syndrome coronavirus 2
  REGION 1..8: note = Table A: HLA-A*34:01M HLA-A*34:02H HLA-B*51:01H HLA-B*54:01H HLA-A*66:01H
MPILTLTR

SEQ ID NO: 925 - protein, 8 aa, Severe acute respiratory syndrome coronavirus 2
  REGION 1..8: note = Table A: HLA-B*35:02H
ESHVDTDL

SEQ ID NO: 926 - protein, 8 aa, Severe acute respiratory syndrome coronavirus 2
  REGION 1..8: note = Table A: HLA-B*39:01H
SHVDTDLT

SEQ ID NO: 927 - protein, 8 aa, Severe acute respiratory syndrome coronavirus 2
  REGION 1..8: note = Table A: HLA-A*36:01H
HVDTDLTK

SEQ ID NO: 928 - protein, 8 aa, Severe acute respiratory syndrome coronavirus 2
  REGION 1..8: note = Table A: HLA-B*58:02H HLA-B*57:01H HLA-B*57:03M
LTKPYIKW

SEQ ID NO: 929 - protein, 8 aa, Severe acute respiratory syndrome coronavirus 2
  REGION 1..8: note = Table A: HLA-B*08:01M
KPYIKWDL

SEQ ID NO: 930 - protein, 8 aa, Severe acute respiratory syndrome coronavirus 2
  REGION 1..8: note = Table A: HLA-A*24:07H
PYIKWDLL

SEQ ID NO: 931 - protein, 8 aa, Severe acute respiratory syndrome coronavirus 2
  REGION 1..8: note = Table A: HLA-A*36:01H
KYDFTEER

SEQ ID NO: 932 - protein, 8 aa, Severe acute respiratory syndrome coronavirus 2
  REGION 1..8: note = Table A: HLA-A*02:11H HLA-A*68:02H HLA-A*02:05H HLA-A*02:02H HLA-C*08:01H HLA-B*38:02H HLA-B*40:01H HLA-B*40:02H
YDFTEERL

SEQ ID NO: 933 - protein, 8 aa, Severe acute respiratory syndrome coronavirus 2
  REGION 1..8: note = Table A: HLA-A*30:02H
RLKLFDRY

SEQ ID NO: 934 - protein, 8 aa, Severe acute respiratory syndrome coronavirus 2
  REGION 1..8: note = Table A: HLA-A*36:01H
LFDRYFKY

SEQ ID NO: 935 - protein, 8 aa, Severe acute respiratory syndrome coronavirus 2
  REGION 1..8: note = Table A: HLA-B*15:03M
FKYWDQTY

SEQ ID NO: 936 - protein, 8 aa, Severe acute respiratory syndrome coronavirus 2
  REGION 1..8: note = Table A: HLA-B*14:02H
DQTYHPNC

SEQ ID NO: 937 - protein, 8 aa, Severe acute respiratory syndrome coronavirus 2
  REGION 1..8: note = Table A: HLA-B*39:06H
DRCILHCA

SEQ ID NO: 938 - protein, 8 aa, Severe acute respiratory syndrome coronavirus 2
  REGION 1..8: note = Table A: HLA-B*15:02H
NVLFSTVF

SEQ ID NO: 939 - protein, 8 aa, Severe acute respiratory syndrome coronavirus 2
  REGION 1..8: note = Table A: HLA-B*58:01H HLA-B*57:01H HLA-B*46:01H HLA-C*03:02H HLA-C*15:05H HLA-C*12:02H HLA-B*35:01H HLA-B*35:07H HLA-B*38:02M HLA-B*15:01H HLA-B*15:02M HLA-B*39:01H HLA-B*07:05H HLA-B*57:03H
TVFPPTSF

SEQ ID NO: 940 - protein, 8 aa, Severe acute respiratory syndrome coronavirus 2
  REGION 1..8: note = Table A: HLA-A*33:03H HLA-A*68:01H HLA-A*34:01H HLA-A*34:02H HLA-A*66:01H
TSFGPLVR

SEQ ID NO: 941 - protein, 8 aa, Severe acute respiratory syndrome coronavirus 2
  REGION 1..8: note = Table A: HLA-A*11:02H
SFGPLVRK

SEQ ID NO: 942 - protein, 8 aa, Severe acute respiratory syndrome coronavirus 2
  REGION 1..8: note = Table A: HLA-B*58:02H HLA-B*51:01H HLA-B*52:01H
FGPLVRKI

SEQ ID NO: 943 - protein, 8 aa, Severe acute respiratory syndrome coronavirus 2
  REGION 1..8: note = Table A: HLA-B*07:04H
GPLVRKIF

SEQ ID NO: 944 - protein, 8 aa, Severe acute respiratory syndrome coronavirus 2
  REGION 1..8: note = Table A: HLA-C*14:02H HLA-C*14:03H
IFVDGVPF

SEQ ID NO: 945 - protein, 8 aa, Severe acute respiratory syndrome coronavirus 2
  REGION 1..8: note = Table A: HLA-C*04:03H HLA-A*02:11H HLA-A*02:07H HLA-C*05:01H
FVDGVPFV

SEQ ID NO: 946 - protein, 8 aa, Severe acute respiratory syndrome coronavirus 2
  REGION 1..8: note = Table A: HLA-C*08:03H
VDGVPFVV

SEQ ID NO: 947 - protein, 8 aa, Severe acute respiratory syndrome coronavirus 2
  REGION 1..8: note = Table A: HLA-C*15:05H
VPFVVSTG

SEQ ID NO: 948 - protein, 8 aa, Severe acute respiratory syndrome coronavirus 2
  REGION 1..8: note = Table A: HLA-B*58:01H HLA-A*24:07H
VVSTGYHF

SEQ ID NO: 949 - protein, 8 aa, Severe acute respiratory syndrome coronavirus 2
  REGION 1..8: note = Table A: HLA-C*03:02H
TGYHFREL

SEQ ID NO: 950 - protein, 8 aa, Severe acute respiratory syndrome coronavirus 2
  REGION 1..8: note = Table A: HLA-B*38:02H HLA-B*39:06H
YHFRELGV

SEQ ID NO: 951 - protein, 8 aa, Severe acute respiratory syndrome coronavirus 2
  REGION 1..8: note = Table A: HLA-B*52:01H
HFRELGVV

SEQ ID NO: 952 - protein, 8 aa, Severe acute respiratory syndrome coronavirus 2
  REGION 1..8: note = Table A: HLA-B*38:01M HLA-B*38:02H HLA-B*39:01H
VHNQDVNL

SEQ ID NO: 953 - protein, 8 aa, Severe acute respiratory syndrome coronavirus 2
  REGION 1..8: note = Table A: HLA-A*33:01M HLA-A*33:03H HLA-A*34:01H HLA-A*66:01H
DVNLHSSR

SEQ ID NO: 954 - protein, 8 aa, Severe acute respiratory syndrome coronavirus 2
  REGION 1..8: note = Table A: HLA-C*15:02H HLA-B*13:02H
LSFKELLV

SEQ ID NO: 955 - protein, 8 aa, Severe acute respiratory syndrome coronavirus 2
  REGION 1..8: note = Table A: HLA-B*46:01H HLA-B*38:02H HLA-B*15:02H
SFKELLVY

SEQ ID NO: 956 - protein, 8 aa, Severe acute respiratory syndrome coronavirus 2
  REGION 1..8: note = Table A: HLA-B*45:01H HLA-B*18:01H HLA-B*39:06H HLA-B*40:06M HLA-B*50:01H
KELLVYAA

SEQ ID NO: 957 - protein, 8 aa, Severe acute respiratory syndrome coronavirus 2
  REGION 1..8: note = Table A: HLA-B*39:01H
VYAADPAM

SEQ ID NO: 958 - protein, 8 aa, Severe acute respiratory syndrome coronavirus 2
  REGION 1..8: note = Table A: HLA-C*15:05H HLA-C*08:01H HLA-C*08:02H
AADPAMHA

SEQ ID NO: 959 - protein, 8 aa, Severe acute respiratory syndrome coronavirus 2
  REGION 1..8: note = Table A: HLA-B*45:01H HLA-B*39:06H HLA-B*40:06H HLA-B*50:01H
ADPAMHAA

SEQ ID NO: 960 - protein, 8 aa, Severe acute respiratory syndrome coronavirus 2
  REGION 1..8: note = Table A: HLA-B*38:02H HLA-B*39:01M HLA-B*15:10H
MHAASGNL

SEQ ID NO: 961 - protein, 8 aa, Severe acute respiratory syndrome coronavirus 2
  REGION 1..8: note = Table A: HLA-C*03:04H HLA-B*35:03H HLA-C*15:05H HLA-C*17:01H HLA-B*38:02H
HAASGNLL

SEQ ID NO: 962 - protein, 8 aa, Severe acute respiratory syndrome coronavirus 2
  REGION 1..8: note = Table A: HLA-C*15:05H
AASGNLLL

SEQ ID NO: 963 - protein, 8 aa, Severe acute respiratory syndrome coronavirus 2
  REGION 1..8: note = Table A: HLA-B*51:01H
VAALTNNV

SEQ ID NO: 964 - protein, 8 aa, Severe acute respiratory syndrome coronavirus 2
  REGION 1..8: note = Table A: HLA-B*57:03H
QTVKPGNF

SEQ ID NO: 965 - protein, 8 aa, Severe acute respiratory syndrome coronavirus 2
  REGION 1..8: note = Table A: HLA-B*37:01H HLA-B*40:02H HLA-B*40:06H
KDFYDFAV

SEQ ID NO: 966 - protein, 8 aa, Severe acute respiratory syndrome coronavirus 2
  REGION 1..8: note = Table A: HLA-A*11:01H HLA-A*11:02H HLA-A*36:01M
FYDFAVSK

SEQ ID NO: 967 - protein, 8 aa, Severe acute respiratory syndrome coronavirus 2
  REGION 1..8: note = Table A: HLA-A*03:02H HLA-A*11:01H HLA-A*11:02M HLA-A*36:01H HLA-A*34:02H HLA-C*07:27H
AVSKGFFK

SEQ ID NO: 968 - protein, 8 aa, Severe acute respiratory syndrome coronavirus 2
  REGION 1..8: note = Table A: HLA-C*14:02H HLA-C*14:03H HLA-C*12:03H
FFKEGSSV

SEQ ID NO: 969 - protein, 8 aa, Severe acute respiratory syndrome coronavirus 2
  REGION 1..8: note = Table A: HLA-B*40:01M HLA-B*40:02H HLA-B*41:02H
KEGSSVEL

SEQ ID NO: 970 - protein, 8 aa, Severe acute respiratory syndrome coronavirus 2
  REGION 1..8: note = Table A: HLA-B*37:01H
VELKHFFF

SEQ ID NO: 971 - protein, 8 aa, Severe acute respiratory syndrome coronavirus 2
  REGION 1..8: note = Table A: HLA-C*08:02H
AQDGNAAI

SEQ ID NO: 972 - protein, 8 aa, Severe acute respiratory syndrome coronavirus 2
  REGION 1..8: note = Table A: HLA-A*36:01H
ISDYDYYR

SEQ ID NO: 973 - protein, 8 aa, Severe acute respiratory syndrome coronavirus 2
  REGION 1..8: note = Table A: HLA-B*37:01H
YDYYRYNL

SEQ ID NO: 974 - protein, 8 aa, Severe acute respiratory syndrome coronavirus 2
  REGION 1..8: note = Table A: HLA-B*14:01H
YRYNLPTM

SEQ ID NO: 975 - protein, 8 aa, Severe acute respiratory syndrome coronavirus 2
  REGION 1..8: note = Table A: HLA-A*02:11H HLA-B*38:02H
LLFVVEVV

SEQ ID NO: 976 - protein, 8 aa, Severe acute respiratory syndrome coronavirus 2
  REGION 1..8: note = Table A: HLA-A*34:02H
FVVEVVDK

SEQ ID NO: 977 - protein, 8 aa, Severe acute respiratory syndrome coronavirus 2
  REGION 1..8: note = Table A: HLA-A*36:01H HLA-A*01:01H HLA-B*39:01H
VVEVVDKY

SEQ ID NO: 978 - protein, 8 aa, Severe acute respiratory syndrome coronavirus 2
  REGION 1..8: note = Table A: HLA-B*14:02H HLA-A*02:05H HLA-B*14:01M HLA-B*52:01M HLA-B*38:02H HLA-B*39:01H
NQVIVNNL

SEQ ID NO: 979 - protein, 8 aa, Severe acute respiratory syndrome coronavirus 2
  REGION 1..8: note = Table A: HLA-A*36:01H
VIVNNLDK

SEQ ID NO: 980 - protein, 8 aa, Severe acute respiratory syndrome coronavirus 2
  REGION 1..8: note = Table A: HLA-C*05:01H
NLDKSAGF

SEQ ID NO: 981 - protein, 8 aa, Severe acute respiratory syndrome coronavirus 2
  REGION 1..8: note = Table A: HLA-A*11:303H HLA-A*03:02M HLA-A*11:01M HLA-A*11:02M HLA-A*36:01H HLA-A*33:03H HLA-A*68:01H HLA-A*34:02H HLA-C*07:27H
SAGFPFNK

SEQ ID NO: 982 - protein, 8 aa, Severe acute respiratory syndrome coronavirus 2
  REGION 1..8: note = Table A: HLA-B*58:01H HLA-B*57:03H
AGFPFNKW

SEQ ID NO: 983 - protein, 8 aa, Severe acute respiratory syndrome coronavirus 2
  REGION 1..8: note = Table A: HLA-C*14:02H HLA-C*14:03M HLA-A*30:02H
LYYDSMSY

SEQ ID NO: 984 - protein, 8 aa, Severe acute respiratory syndrome coronavirus 2
  REGION 1..8: note = Table A: HLA-B*38:02H HLA-B*15:02H
DQDALFAY

SEQ ID NO: 985 - protein, 8 aa, Severe acute respiratory syndrome coronavirus 2
  REGION 1..8: note = Table A: HLA-B*27:02H HLA-A*34:02H
DALFAYTK

SEQ ID NO: 986 - protein, 8 aa, Severe acute respiratory syndrome coronavirus 2
  REGION 1..8: note = Table A: HLA-A*74:01H
ALFAYTKR

SEQ ID NO: 987 - protein, 8 aa, Severe acute respiratory syndrome coronavirus 2
  REGION 1..8: note = Table A: HLA-B*08:01H HLA-B*51:01H
FAYTKRNV

SEQ ID NO: 988 - protein, 8 aa, Severe acute respiratory syndrome coronavirus 2
  REGION 1..8: note = Table A: HLA-C*15:05H
VIPTITQM

SEQ ID NO: 989 - protein, 8 aa, Severe acute respiratory syndrome coronavirus 2
  REGION 1..8: note = Table A: HLA-C*15:05H
PTITQMNL

SEQ ID NO: 990 - protein, 8 aa, Severe acute respiratory syndrome coronavirus 2
  REGION 1..8: note = Table A: HLA-B*58:01H HLA-A*36:01H HLA-A*30:02H
ITQMNLKY

SEQ ID NO: 991 - protein, 8 aa, Severe acute respiratory syndrome coronavirus 2
  REGION 1..8: note = Table A: HLA-B*08:01H
QMNLKYAI

SEQ ID NO: 992 - protein, 8 aa, Severe acute respiratory syndrome coronavirus 2
  REGION 1..8: note = Table A: HLA-A*33:01H HLA-A*33:03M HLA-A*26:03H HLA-A*68:01M HLA-A*34:01M HLA-A*34:02H HLA-A*66:01M
YAISAKNR

SEQ ID NO: 993 - protein, 8 aa, Severe acute respiratory syndrome coronavirus 2
  REGION 1..8: note = Table A: HLA-B*58:01H HLA-B*58:02H HLA-B*57:03H
RTVAGVSI

SEQ ID NO: 994 - protein, 8 aa, Severe acute respiratory syndrome coronavirus 2
  REGION 1..8: note = Table A: HLA-B*58:02M HLA-C*16:01H
STMTNRQF

SEQ ID NO: 995 - protein, 8 aa, Severe acute respiratory syndrome coronavirus 2
  REGION 1..8: note = Table A: HLA-B*14:02H HLA-B*14:01H
NRQFHQKL

SEQ ID NO: 996 - protein, 8 aa, Severe acute respiratory syndrome coronavirus 2
  REGION 1..8: note = Table A: HLA-B*58:02M HLA-B*52:01H
RQFHQKLL

SEQ ID NO: 997 - protein, 8 aa, Severe acute respiratory syndrome coronavirus 2
  REGION 1..8: note = Table A: HLA-B*52:01H HLA-B*15:01H HLA-B*13:02H
HQKLLKSI

SEQ ID NO: 998 - protein, 8 aa, Severe acute respiratory syndrome coronavirus 2
  REGION 1..8: note = Table A: HLA-C*03:03H
TVVIGTSK

SEQ ID NO: 999 - protein, 8 aa, Severe acute respiratory syndrome coronavirus 2
  REGION 1..8: note = Table A: HLA-B*15:01H
VVIGTSKF

SEQ ID NO: 1000 - protein, 8 aa, Severe acute respiratory syndrome coronavirus 2
  REGION 1..8: note = Table A: HLA-C*14:02H
FYGGWHNM

SEQ ID NO: 1001 - protein, 8 aa, Severe acute respiratory syndrome coronavirus 2
  REGION 1..8: note = Table A: HLA-C*06:02H HLA-B*08:01H HLA-C*03:04M HLA-B*14:02H HLA-C*15:02H HLA-A*02:02H HLA-C*17:01H HLA-C*08:01H
YGGWHNML

SEQ ID NO: 1002 - protein, 8 aa, Severe acute respiratory syndrome coronavirus 2
  REGION 1..8: note = Table A: HLA-B*39:06H
WHNMLKTV

SEQ ID NO: 1003 - protein, 8 aa, Severe acute respiratory syndrome coronavirus 2
  REGION 1..8: note = Table A: HLA-B*08:01H HLA-B*15:02M
HNMLKTVY

SEQ ID NO: 1004 - protein, 8 aa, Severe acute respiratory syndrome coronavirus 2
  REGION 1..8: note = Table A: HLA-B*44:05M HLA-B*37:01H HLA-B*40:01H HLA-B*40:02H HLA-B*41:02M
SDVENPHL

SEQ ID NO: 1005 - protein, 8 aa, Severe acute respiratory syndrome coronavirus 2
  REGION 1..8: note = Table A: HLA-B*35:02H HLA-B*35:12H
DVENPHLM

SEQ ID NO: 1006 - protein, 8 aa, Severe acute respiratory syndrome coronavirus 2
  REGION 1..8: note = Table A: HLA-B*14:02H HLA-B*14:01M HLA-B*39:01H
DRAMPNML

SEQ ID NO: 1007 - protein, 8 aa, Severe acute respiratory syndrome coronavirus 2
  REGION 1..8: note = Table A: HLA-A*74:01H
RAMPNMLR

SEQ ID NO: 1008 - protein, 8 aa, Severe acute respiratory syndrome coronavirus 2
  REGION 1..8: note = Table A: HLA-B*52:01H
AMPNMLRI

SEQ ID NO: 1009 - protein, 8 aa, Severe acute respiratory syndrome coronavirus 2
  REGION 1..8: note = Table A: HLA-B*08:01H HLA-B*35:03H HLA-C*15:05H HLA-B*35:07H HLA-B*07:04H
MPNMLRIM

SEQ ID NO: 1010 - protein, 8 aa, Severe acute respiratory syndrome coronavirus 2
  REGION 1..8: note = Table A: HLA-B*08:01H
MLRIMASL

SEQ ID NO: 1011 - protein, 8 aa, Severe acute respiratory syndrome coronavirus 2
  REGION 1..8: note = Table A: HLA-A*36:01H HLA-A*33:03H HLA-A*68:01H HLA-A*34:01H HLA-A*34:02H HLA-A*66:01H
MASLVLAR

SEQ ID NO: 1012 - protein, 8 aa, Severe acute respiratory syndrome coronavirus 2
  REGION 1..8: note = Table A: HLA-A*11:01H HLA-A*11:02H
ASLVLARK

SEQ ID NO: 1013 - protein, 8 aa, Severe acute respiratory syndrome coronavirus 2
  REGION 1..8: note = Table A: HLA-B*58:02H
CSLSHRFY

SEQ ID NO: 1014 - protein, 8 aa, Severe acute respiratory syndrome coronavirus 2
  REGION 1..8: note = Table A: HLA-A*74:01H
SLSHRFYR

SEQ ID NO: 1015 - protein, 8 aa, Severe acute respiratory syndrome coronavirus 2
  REGION 1..8: note = Table A: HLA-B*58:02H
LSHRFYRL

SEQ ID NO: 1016 - protein, 8 aa, Severe acute respiratory syndrome coronavirus 2
  REGION 1..8: note = Table A: HLA-A*11:303H HLA-B*46:01H HLA-C*03:02H
CAQVLSEM

SEQ ID NO: 1017 - protein, 8 aa, Severe acute respiratory syndrome coronavirus 2
  REGION 1..8: note = Table A: HLA-B*52:01M HLA-B*13:02M
AQVLSEMV

SEQ ID NO: 1018 - protein, 8 aa, Severe acute respiratory syndrome coronavirus 2
  REGION 1..8: note = Table A: HLA-B*35:02H
QVLSEMVM

SEQ ID NO: 1019 - protein, 8 aa, Severe acute respiratory syndrome coronavirus 2
  REGION 1..8: note = Table A: HLA-B*46:01H HLA-C*15:05H HLA-B*35:01H HLA-B*51:01H HLA-B*38:02H HLA-B*15:02M
TAYANSVF

SEQ ID NO: 1020 - protein, 8 aa, Severe acute respiratory syndrome coronavirus 2
  REGION 1..8: note = Table A: HLA-B*58:01H HLA-C*15:05H HLA-B*51:01M HLA-B*38:02H
YANSVFNI

SEQ ID NO: 1021 - protein, 8 aa, Severe acute respiratory syndrome coronavirus 2
  REGION 1..8: note = Table A: HLA-B*52:01M
CQAVTANV

SEQ ID NO: 1022 - protein, 8 aa, Severe acute respiratory syndrome coronavirus 2
  REGION 1..8: note = Table A: HLA-C*15:05H
VTANVNAL

SEQ ID NO: 1023 - protein, 8 aa, Severe acute respiratory syndrome coronavirus 2
  REGION 1..8: note = Table A: HLA-C*03:03H HLA-C*03:04H HLA-C*15:05H HLA-C*08:01H HLA-C*08:02H HLA-C*08:03H HLA-B*38:02H
TANVNALL

SEQ ID NO: 1024 - protein, 8 aa, Severe acute respiratory syndrome coronavirus 2
  REGION 1..8: note = Table A: HLA-A*30:02H
GNKIADKY

SEQ ID NO: 1025 - protein, 8 aa, Severe acute respiratory syndrome coronavirus 2
  REGION 1..8: note = Table A: HLA-A*74:01H
KIADKYVR

SEQ ID NO: 1026 - protein, 8 aa, Severe acute respiratory syndrome coronavirus 2
  REGION 1..8: note = Table A: HLA-B*37:01H HLA-B*40:02H HLA-B*41:02H
ADKYVRNL

SEQ ID NO: 1027 - protein, 8 aa, Severe acute respiratory syndrome coronavirus 2
  REGION 1..8: note = Table A: HLA-A*33:03H
YVRNLQHR

SEQ ID NO: 1028 - protein, 8 aa, Severe acute respiratory syndrome coronavirus 2
  REGION 1..8: note = Table A: HLA-C*03:02H HLA-B*35:07H HLA-B*38:02H
FVNEFYAY

SEQ ID NO: 1029 - protein, 8 aa, Severe acute respiratory syndrome coronavirus 2
  REGION 1..8: note = Table A: HLA-B*08:01H HLA-C*03:02H
YAYLRKHF

SEQ ID NO: 1030 - protein, 8 aa, Severe acute respiratory syndrome coronavirus 2
  REGION 1..8: note = Table A: HLA-B*08:01H
YLRKHFSM

SEQ ID NO: 1031 - protein, 8 aa, Severe acute respiratory syndrome coronavirus 2
  REGION 1..8: note = Table A: HLA-B*44:05H HLA-B*37:01M HLA-B*07:05H
SDDAVVCF

SEQ ID NO: 1032 - protein, 8 aa, Severe acute respiratory syndrome coronavirus 2
  REGION 1..8: note = Table A: HLA-C*15:05H
STYASQGL

SEQ ID NO: 1033 - protein, 8 aa, Severe acute respiratory syndrome coronavirus 2
  REGION 1..8: note = Table A: HLA-C*03:04H HLA-C*15:05H HLA-B*51:01H HLA-B*38:02H HLA-B*54:01H
YASQGLVA

SEQ ID NO: 1034 - protein, 8 aa, Severe acute respiratory syndrome coronavirus 2
  REGION 1..8: note = Table A: HLA-C*15:05H HLA-A*02:05H HLA-A*02:03H HLA-B*52:01H HLA-B*38:02H HLA-B*15:01H HLA-B*39:01H HLA-B*13:01H HLA-B*13:02M HLA-B*49:01H
SQGLVASI

SEQ ID NO: 1035 - protein, 8 aa, Severe acute respiratory syndrome coronavirus 2
  REGION 1..8: note = Table A: HLA-B*08:01H
IKNFKSVL

SEQ ID NO: 1036 - protein, 8 aa, Severe acute respiratory syndrome coronavirus 2
  REGION 1..8: note = Table A: HLA-B*58:01H HLA-B*15:03H
KNFKSVLY

SEQ ID NO: 1037 - protein, 8 aa, Severe acute respiratory syndrome coronavirus 2
  REGION 1..8: note = Table A: HLA-C*14:03H HLA-A*29:02H
NFKSVLYY

SEQ ID NO: 1038 - protein, 8 aa, Severe acute respiratory syndrome coronavirus 2
  REGION 1..8: note = Table A: HLA-C*14:02H
LYYQNNVF

SEQ ID NO: 1039 - protein, 8 aa, Severe acute respiratory syndrome coronavirus 2
  REGION 1..8: note = Table A: HLA-C*14:02M HLA-C*14:03M
YYQNNVFM

SEQ ID NO: 1040 - protein, 8 aa, Severe acute respiratory syndrome coronavirus 2
  REGION 1..8: note = Table A: HLA-C*03:03H
NVFMSEAK

SEQ ID NO: 1041 - protein, 8 aa, Severe acute respiratory syndrome coronavirus 2
  REGION 1..8: note = Table A: HLA-B*58:02M HLA-B*57:01H HLA-B*57:03M
LTKGPHEF

SEQ ID NO: 1042 - protein, 8 aa, Severe acute respiratory syndrome coronavirus 2
  REGION 1..8: note = Table A: HLA-A*03:01H HLA-A*11:01H HLA-A*11:02H HLA-A*30:02H HLA-B*52:01H HLA-B*13:02H
SQHTMLVK

SEQ ID NO: 1043 - protein, 8 aa, Severe acute respiratory syndrome coronavirus 2
  REGION 1..8: note = Table A: HLA-C*05:01H
QGDDYVYL

SEQ ID NO: 1044 - protein, 8 aa, Severe acute respiratory syndrome coronavirus 2
  REGION 1..8: note = Table A: HLA-B*53:01H HLA-C*03:04H HLA-B*35:03H HLA-C*15:05M HLA-B*35:01H HLA-B*35:02H HLA-B*35:08H HLA-B*51:01H HLA-B*35:07H HLA-C*08:02H HLA-B*35:12H HLA-B*07:02H HLA-B*15:10H
YPDPSRIL

SEQ ID NO: 1045 - protein, 8 aa, Severe acute respiratory syndrome coronavirus 2
  REGION 1..8: note = Table A: HLA-B*55:01H HLA-B*54:01H
DPSRILGA

SEQ ID NO: 1046 - protein, 8 aa, Severe acute respiratory syndrome coronavirus 2
  REGION 1..8: note = Table A: HLA-C*04:03M HLA-A*02:07H HLA-C*08:02H HLA-C*05:01H
FVDDIVKT

SEQ ID NO: 1047 - protein, 8 aa, Severe acute respiratory syndrome coronavirus 2
  REGION 1..8: note = Table A: HLA-C*04:03H HLA-C*08:01H
MIERFVSL

SEQ ID NO: 1048 - protein, 8 aa, Severe acute respiratory syndrome coronavirus 2
  REGION 1..8: note = Table A: HLA-B*35:03H
LAIDAYPL

SEQ ID NO: 1049 - protein, 8 aa, Severe acute respiratory syndrome coronavirus 2
  REGION 1..8: note = Table A: HLA-A*03:01H HLA-A*03:02H HLA-A*11:01M HLA-A*11:02H HLA-A*36:01M HLA-C*03:03H HLA-B*27:02H HLA-A*34:02H HLA-A*23:01H
IDAYPLTK

SEQ ID NO: 1050 - protein, 8 aa, Severe acute respiratory syndrome coronavirus 2
  REGION 1..8: note = Table A: HLA-B*51:01H
DAYPLTKH

SEQ ID NO: 1051 - protein, 8 aa, Severe acute respiratory syndrome coronavirus 2
  REGION 1..8: note = Table A: HLA-B*15:03M
TKHPNQEY

SEQ ID NO: 1052 - protein, 8 aa, Severe acute respiratory syndrome coronavirus 2
  REGION 1..8: note = Table A: HLA-B*58:01H HLA-A*36:01M HLA-A*01:01H HLA-C*04:03M HLA-C*03:02H HLA-B*35:01H HLA-B*35:08H HLA-B*35:07H HLA-B*38:02H
YADVFHLY

SEQ ID NO: 1053 - protein, 8 aa, Severe acute respiratory syndrome coronavirus 2
  REGION 1..8: note = Table A: HLA-B*37:01H HLA-B*40:02H
ADVFHLYL

SEQ ID NO: 1054 - protein, 8 aa, Severe acute respiratory syndrome coronavirus 2
  REGION 1..8: note = Table A: HLA-B*38:02H
FHLYLQYI

SEQ ID NO: 1055 - protein, 8 aa, Severe acute respiratory syndrome coronavirus 2
  REGION 1..8: note = Table A: HLA-A*02:04H
YLQYIRKL

SEQ ID NO: 1056 - protein, 8 aa, Severe acute respiratory syndrome coronavirus 2
  REGION 1..8: note = Table A: HLA-B*14:02H HLA-B*14:01H
IRKLHDEL

SEQ ID NO: 1057 - protein, 8 aa, Severe acute respiratory syndrome coronavirus 2
  REGION 1..8: note = Table A: HLA-B*44:05H HLA-B*18:01H HLA-B*14:02M HLA-B*14:01H HLA-B*40:01H HLA-B*40:02H HLA-B*07:05H HLA-B*41:02H
DELTGHML

SEQ ID NO: 1058 - protein, 8 aa, Severe acute respiratory syndrome coronavirus 2
  REGION 1..8: note = Table A: HLA-B*35:01H
TGHMLDMY

SEQ ID NO: 1059 - protein, 8 aa, Severe acute respiratory syndrome coronavirus 2
  REGION 1..8: note = Table A: HLA-A*02:11H HLA-B*52:01M HLA-B*38:02H HLA-B*13:02H
HMLDMYSV

SEQ ID NO: 1060 - protein, 8 aa, Severe acute respiratory syndrome coronavirus 2
  REGION 1..8: note = Table A: HLA-B*39:06H HLA-B*40:06H HLA-B*50:01H
WEPEFYEA

SEQ ID NO: 1061 - protein, 8 aa, Severe acute respiratory syndrome coronavirus 2
  REGION 1..8: note = Table A: HLA-A*02:11H HLA-B*14:01H HLA-A*02:01H HLA-A*02:02H HLA-A*02:03M HLA-B*52:01H HLA-B*38:02H HLA-B*13:02H HLA-B*49:01H
AMYTPHTV

SEQ ID NO: 1062 - protein, 8 aa, Severe acute respiratory syndrome coronavirus 2
  REGION 1..8: note = Table A: HLA-C*14:02H HLA-C*14:03H HLA-B*08:01H HLA-C*07:01H HLA-C*07:02H HLA-B*14:02M HLA-B*14:01H HLA-A*24:02H HLA-A*24:07H HLA-B*39:01H HLA-B*41:02H HLA-B*15:10H
MYTPHTVL

SEQ ID NO: 1063 - protein, 8 aa, Severe acute respiratory syndrome coronavirus 2
  REGION 1..8: note = Table A: HLA-B*56:01H HLA-B*55:02H HLA-C*15:05H HLA-B*55:01M HLA-B*39:06M HLA-B*54:01M
TPHTVLQA

SEQ ID NO: 1064 - protein, 8 aa, Severe acute respiratory syndrome coronavirus 2
  REGION 1..8: note = Table A: HLA-B*39:06M
PHTVLQAV

SEQ ID NO: 1065 - protein, 8 aa, Severe acute respiratory syndrome coronavirus 2
  REGION 1..8: note = Table A: HLA-B*38:02H
QAVGACVL

SEQ ID NO: 1066 - protein, 8 aa, Severe acute respiratory syndrome coronavirus 2
  REGION 1..8: note = Table A: HLA-B*50:01H
YDHVISTS

SEQ ID NO: 1067 - protein, 8 aa, Severe acute respiratory syndrome coronavirus 2
  REGION 1..8: note = Table A: HLA-B*38:02H HLA-B*39:06M HLA-B*15:02H HLA-B*39:01H HLA-B*15:10H
DHVISTSH

SEQ ID NO: 1068 - protein, 8 aa, Severe acute respiratory syndrome coronavirus 2
  REGION 1..8: note = Table A: HLA-A*34:02H
HVISTSHK

SEQ ID NO: 1069 - protein, 8 aa, Severe acute respiratory syndrome coronavirus 2
  REGION 1..8: note = Table A: HLA-A*02:02H
VISTSHKL

SEQ ID NO: 1070 - protein, 8 aa, Severe acute respiratory syndrome coronavirus 2
  REGION 1..8: note = Table A: HLA-C*16:01H HLA-C*15:05H HLA-C*15:02H
STSHKLVL

SEQ ID NO: 1071 - protein, 8 aa, Severe acute respiratory syndrome coronavirus 2
  REGION 1..8: note = Table A: HLA-B*52:01H HLA-B*39:06M
SHKLVLSV

SEQ ID NO: 1072 - protein, 8 aa, Severe acute respiratory syndrome coronavirus 2
  REGION 1..8: note = Table A: HLA-C*15:05H HLA-B*14:01H HLA-B*35:02H HLA-B*38:02H
DVTDVTQL

SEQ ID NO: 1073 - protein, 8 aa, Severe acute respiratory syndrome coronavirus 2
  REGION 1..8: note = Table A: HLA-B*58:01M HLA-A*36:01H HLA-A*01:01H HLA-C*04:03H
VTDVTQLY

SEQ ID NO: 1074 - protein, 8 aa, Severe acute respiratory syndrome coronavirus 2
  REGION 1..8: note = Table A: HLA-B*40:02H
TDVTQLYL

SEQ ID NO: 1075 - protein, 8 aa, Severe acute respiratory syndrome coronavirus 2
  REGION 1..8: note = Table A: HLA-C*14:02H HLA-C*14:03M
LYLGGMSY

SEQ ID NO: 1076 - protein, 8 aa, Severe acute respiratory syndrome coronavirus 2
  REGION 1..8: note = Table A: HLA-A*26:01H HLA-A*29:02H HLA-B*38:02M
YLGGMSYY

SEQ ID NO: 1077 - protein, 8 aa, Severe acute respiratory syndrome coronavirus 2
  REGION 1..8: note = Table A: HLA-B*38:02H HLA-B*15:03H
SHKPPISF

SEQ ID NO: 1078 - protein, 8 aa, Severe acute respiratory syndrome coronavirus 2
  REGION 1..8: note = Table A: HLA-C*15:05H
KPPISFPL

SEQ ID NO: 1079 - protein, 8 aa, Severe acute respiratory syndrome coronavirus 2
  REGION 1..8: note = Table A: HLA-B*56:01H HLA-C*15:05H HLA-B*55:01H
PPISFPLC

SEQ ID NO: 1080 - protein, 8 aa, Severe acute respiratory syndrome coronavirus 2
  REGION 1..8: note = Table A: HLA-A*30:02H HLA-B*39:01H
NGQVFGLY

SEQ ID NO: 1081 - protein, 8 aa, Severe acute respiratory syndrome coronavirus 2
  REGION 1..8: note = Table A: HLA-A*11:01H HLA-A*11:02H HLA-A*36:01H
GQVFGLYK

SEQ ID NO: 1082 - protein, 8 aa, Severe acute respiratory syndrome coronavirus 2
  REGION 1..8: note = Table A: HLA-B*35:03H HLA-B*35:02H HLA-B*35:12H
TNAGDYIL

SEQ ID NO: 1083 - protein, 8 aa, Severe acute respiratory syndrome coronavirus 2
  REGION 1..8: note = Table A: HLA-B*39:06M
ERLKLFAA

SEQ ID NO: 1084 - protein, 8 aa, Severe acute respiratory syndrome coronavirus 2
  REGION 1..8: note = Table A: HLA-A*02:11H HLA-A*02:02H HLA-C*08:03H HLA-B*38:02H HLA-B*13:01H
KLFAAETL

SEQ ID NO: 1085 - protein, 8 aa, Severe acute respiratory syndrome coronavirus 2
  REGION 1..8: note = Table A: HLA-B*51:01H HLA-B*54:01H
FAAETLKA

SEQ ID NO: 1086 - protein, 8 aa, Severe acute respiratory syndrome coronavirus 2
  REGION 1..8: note = Table A: HLA-C*04:03H
ATEETFKL

SEQ ID NO: 1087 - protein, 8 aa, Severe acute respiratory syndrome coronavirus 2
  REGION 1..8: note = Table A: HLA-B*44:03M HLA-B*18:01H HLA-B*07:05H
EETFKLSY

SEQ ID NO: 1088 - protein, 8 aa, Severe acute respiratory syndrome coronavirus 2
  REGION 1..8: note = Table A: HLA-B*51:01H HLA-B*52:01M HLA-B*49:01H
LSYGIATV

SEQ ID NO: 1089 - protein, 8 aa, Severe acute respiratory syndrome coronavirus 2
  REGION 1..8: note = Table A: HLA-A*33:03H
SYGIATVR

SEQ ID NO: 1090 - protein, 8 aa, Severe acute respiratory syndrome coronavirus 2
  REGION 1..8: note = Table A: HLA-B*14:01H HLA-A*02:03M HLA-B*38:02H
GIATVREV

SEQ ID NO: 1091 - protein, 8 aa, Severe acute respiratory syndrome coronavirus 2
  REGION 1..8: note = Table A: HLA-C*16:01H HLA-B*08:01M HLA-C*03:03H HLA-C*03:02H HLA-C*03:04H HLA-C*15:05H HLA-B*14:02M HLA-C*08:01H HLA-B*35:12H HLA-B*07:02H HLA-B*41:02H
IATVREVL

SEQ ID NO: 1092 - protein, 8 aa, Severe acute respiratory syndrome coronavirus 2
  REGION 1..8: note = Table A: HLA-C*04:03H HLA-C*15:02H HLA-C*17:01H HLA-C*08:02H HLA-C*05:01H
LSDRELHL

SEQ ID NO: 1093 - protein, 8 aa, Severe acute respiratory syndrome coronavirus 2
  REGION 1..8: note = Table A: HLA-B*38:02H
ELHLSWEV

SEQ ID NO: 1094 - protein, 8 aa, Severe acute respiratory syndrome coronavirus 2
  REGION 1..8: note = Table A: HLA-B*08:01H HLA-A*30:01H HLA-B*07:04H
VGKPRPPL

SEQ ID NO: 1095 - protein, 8 aa, Severe acute respiratory syndrome coronavirus 2
  REGION 1..8: note = Table A: HLA-A*74:01H
KPRPPLNR

SEQ ID NO: 1096 - protein, 8 aa, Severe acute respiratory syndrome coronavirus 2
  REGION 1..8: note = Table A: HLA-B*15:03H
RNYVFTGY

SEQ ID NO: 1097 - protein, 8 aa, Severe acute respiratory syndrome coronavirus 2
  REGION 1..8: note = Table A: HLA-A*02:11M HLA-A*68:02H HLA-B*38:02H HLA-B*54:01H HLA-B*13:02H HLA-A*66:01H
YVFTGYRV

SEQ ID NO: 1098 - protein, 8 aa, Severe acute respiratory syndrome coronavirus 2
  REGION 1..8: note = Table A: HLA-A*34:02H
FTGYRVTK

SEQ ID NO: 1099 - protein, 8 aa, Severe acute respiratory syndrome coronavirus 2
  REGION 1..8: note = Table A: HLA-B*15:03M HLA-B*39:01H
SKVQIGEY

SEQ ID NO: 1100 - protein, 8 aa, Severe acute respiratory syndrome coronavirus 2
  REGION 1..8: note = Table A: HLA-B*38:02H HLA-B*15:01H HLA-B*13:01H
VQIGEYTF

SEQ ID NO: 1101 - protein, 8 aa, Severe acute respiratory syndrome coronavirus 2
  REGION 1..8: note = Table A: HLA-A*36:01H
IGEYTFEK

SEQ ID NO: 1102 - protein, 8 aa, Severe acute respiratory syndrome coronavirus 2
  REGION 1..8: note = Table A: HLA-C*07:01H HLA-B*35:01H HLA-B*38:02H HLA-B*39:01H
DYGDAVVY

SEQ ID NO: 1103 - protein, 8 aa, Severe acute respiratory syndrome coronavirus 2
  REGION 1..8: note = Table A: HLA-A*33:03H HLA-A*68:01H
YGDAVVYR

SEQ ID NO: 1104 - protein, 8 aa, Severe acute respiratory syndrome coronavirus 2
  REGION 1..8: note = Table A: HLA-A*30:02H HLA-B*15:03H
VYRGTTTY

SEQ ID NO: 1105 - protein, 8 aa, Severe acute respiratory syndrome coronavirus 2
  REGION 1..8: note = Table A: HLA-B*58:01H
RGTTTYKL

SEQ ID NO: 1106 - protein, 8 aa, Severe acute respiratory syndrome coronavirus 2
  REGION 1..8: note = Table A: HLA-B*15:03H
YKLNVGDY

SEQ ID NO: 1107 - protein, 8 aa, Severe acute respiratory syndrome coronavirus 2
  REGION 1..8: note = Table A: HLA-B*35:03H HLA-B*35:02H HLA-C*08:01H
NVGDYFVL

SEQ ID NO: 1108 - protein, 8 aa, Severe acute respiratory syndrome coronavirus 2
  REGION 1..8: note = Table A: HLA-A*02:11M HLA-B*38:02H
FVLTSHTV

SEQ ID NO: 1109 - protein, 8 aa, Severe acute respiratory syndrome coronavirus 2
  REGION 1..8: note = Table A: HLA-B*08:01H HLA-B*14:02H
VLTSHTVM

SEQ ID NO: 1110 - protein, 8 aa, Severe acute respiratory syndrome coronavirus 2
  REGION 1..8: note = Table A: HLA-C*03:04H HLA-C*15:05H HLA-C*08:03H
TSHTVMPL

SEQ ID NO: 1111 - protein, 8 aa, Severe acute respiratory syndrome coronavirus 2
  REGION 1..8: note = Table A: HLA-B*39:06H
SHTVMPLS

SEQ ID NO: 1112 - protein, 8 aa, Severe acute respiratory syndrome coronavirus 2
  REGION 1..8: note = Table A: HLA-B*42:01H HLA-B*53:01H HLA-B*35:03M HLA-C*15:05M HLA-B*55:01H HLA-B*35:01M HLA-B*35:02H HLA-B*51:01M HLA-B*35:07M HLA-B*35:12H HLA-B*38:02H HLA-B*54:01H HLA-B*07:02H HLA-B*15:02H HLA-B*07:05M
MPLSAPTL

SEQ ID NO: 1113 - protein, 8 aa, Severe acute respiratory syndrome coronavirus 2
  REGION 1..8: note = Table A: HLA-B*15:02H
YVRITGLY

SEQ ID NO: 1114 - protein, 8 aa, Severe acute respiratory syndrome coronavirus 2
  REGION 1..8: note = Table A: HLA-B*58:01H HLA-C*15:05H HLA-C*15:02H HLA-B*57:03H
ITGLYPTL

SEQ ID NO: 1115 - protein, 8 aa, Severe acute respiratory syndrome coronavirus 2
  REGION 1..8: note = Table A: HLA-B*52:01H HLA-B*13:02H
GLYPTLNI

SEQ ID NO: 1116 - protein, 8 aa, Severe acute respiratory syndrome coronavirus 2
  REGION 1..8: note = Table A: HLA-B*18:01H HLA-B*07:05H HLA-B*50:01H
DEFSSNVA

SEQ ID NO: 1117 - protein, 8 aa, Severe acute respiratory syndrome coronavirus 2
  REGION 1..8: note = Table A: HLA-A*30:02H HLA-B*15:01H
FSSNVANY

SEQ ID NO: 1118 - protein, 8 aa, Severe acute respiratory syndrome coronavirus 2
  REGION 1..8: note = Table A: HLA-B*08:01H
ANYQKVGM

SEQ ID NO: 1119 - protein, 8 aa, Severe acute respiratory syndrome coronavirus 2
  REGION 1..8: note = Table A: HLA-A*03:01H HLA-A*11:01H HLA-A*11:02H HLA-A*30:01H HLA-A*34:02H
YQKVGMQK

SEQ ID NO: 1120 - protein, 8 aa, Severe acute respiratory syndrome coronavirus 2
  REGION 1..8: note = Table A: HLA-B*15:03H
QKVGMQKY

SEQ ID NO: 1121 - protein, 8 aa, Severe acute respiratory syndrome coronavirus 2
  REGION 1..8: note = Table A: HLA-B*39:01H
LQGPPGTG

SEQ ID NO: 1122 - protein, 8 aa, Severe acute respiratory syndrome coronavirus 2
  REGION 1..8: note = Table A: HLA-B*58:02M HLA-B*57:03H
KSHFAIGL

SEQ ID NO: 1123 - protein, 8 aa, Severe acute respiratory syndrome coronavirus 2
  REGION 1..8: note = Table A: HLA-B*39:06H
SHFAIGLA

SEQ ID NO: 1124 - protein, 8 aa, Severe acute respiratory syndrome coronavirus 2
  REGION 1..8: note = Table A: HLA-C*14:02H HLA-C*14:03H
HFAIGLAL

SEQ ID NO: 1125 - protein, 8 aa, Severe acute respiratory syndrome coronavirus 2
  REGION 1..8: note = Table A: HLA-C*03:02H HLA-B*38:02H
FAIGLALY

SEQ ID NO: 1126 - protein, 8 aa, Severe acute respiratory syndrome coronavirus 2
  REGION 1..8: note = Table A: HLA-B*54:01H
LALYYPSA

SEQ ID NO: 1127 - protein, 8 aa, Severe acute respiratory syndrome coronavirus 2
  REGION 1..8: note = Table A: HLA-A*74:01M HLA-A*03:01H HLA-A*11:02H HLA-A*33:03H HLA-A*34:01H HLA-A*31:01H HLA-A*66:01H
ALYYPSAR

SEQ ID NO: 1128 - protein, 8 aa, Severe acute respiratory syndrome coronavirus 2
  REGION 1..8: note = Table A: HLA-B*53:01H HLA-B*35:01M HLA-B*35:08H HLA-B*35:07H HLA-B*38:02H HLA-B*15:02H
YPSARIVY

SEQ ID NO: 1129 - protein, 8 aa, Severe acute respiratory syndrome coronavirus 2
  REGION 1..8: note = Table A: HLA-B*39:06H HLA-B*54:01H
SARIVYTA

SEQ ID NO: 1130 - protein, 8 aa, Severe acute respiratory syndrome coronavirus 2
  REGION 1..8: note = Table A: HLA-B*39:06H
ARIVYTAC

SEQ ID NO: 1131 - protein, 8 aa, Severe acute respiratory syndrome coronavirus 2
  REGION 1..8: note = Table A: HLA-B*14:01H HLA-B*38:01M HLA-B*38:02M HLA-B*39:06H HLA-B*39:01H HLA-B*15:10M
SHAAVDAL

SEQ ID NO: 1132 - protein, 8 aa, Severe acute respiratory syndrome coronavirus 2
  REGION 1..8: note = Table A: HLA-B*35:02H
HAAVDALC

SEQ ID NO: 1133 - protein, 8 aa, Severe acute respiratory syndrome coronavirus 2
  REGION 1..8: note = Table A: HLA-B*35:02H
DALCEKAL

SEQ ID NO: 1134 - protein, 8 aa, Severe acute respiratory syndrome coronavirus 2
  REGION 1..8: note = Table A: HLA-B*39:06H
SRIIPARA

SEQ ID NO: 1135 - protein, 8 aa, Severe acute respiratory syndrome coronavirus 2
  REGION 1..8: note = Table A: HLA-A*74:01H
RIIPARAR

SEQ ID NO: 1136 - protein, 8 aa, Severe acute respiratory syndrome coronavirus 2
  REGION 1..8: note = Table A: HLA-C*14:02H
KFKVNSTL

SEQ ID NO: 1137 - protein, 8 aa, Severe acute respiratory syndrome coronavirus 2
  REGION 1..8: note = Table A: HLA-B*58:01H HLA-B*57:03H
STLEQYVF

SEQ ID NO: 1138 - protein, 8 aa, Severe acute respiratory syndrome coronavirus 2
  REGION 1..8: note = Table A: HLA-B*51:01H HLA-B*52:01H HLA-B*38:02H HLA-B*39:06M HLA-B*13:02H HLA-B*49:01H
EQYVFCTV

SEQ ID NO: 1139 - protein, 8 aa, Severe acute respiratory syndrome coronavirus 2
  REGION 1..8: note = Table A: HLA-C*14:02H HLA-C*14:03H
VFCTVNAL

SEQ ID NO: 1140 - protein, 8 aa, Severe acute respiratory syndrome coronavirus 2
  REGION 1..8: note = Table A: HLA-A*68:02H HLA-B*51:01H HLA-C*08:01M HLA-B*38:02H
DIVVFDEI

SEQ ID NO: 1141 - protein, 8 aa, Severe acute respiratory syndrome coronavirus 2
  REGION 1..8: note = Table A: HLA-B*14:01H HLA-A*02:02H
SMATNYDL

SEQ ID NO: 1142 - protein, 8 aa, Severe acute respiratory syndrome coronavirus 2
  REGION 1..8: note = Table A: HLA-A*02:01H
YDLSVVNA

SEQ ID NO: 1143 - protein, 8 aa, Severe acute respiratory syndrome coronavirus 2
  REGION 1..8: note = Table A: HLA-A*33:01M HLA-A*33:03H HLA-A*68:01H HLA-A*34:01H
DLSVVNAR

SEQ ID NO: 1144 - protein, 8 aa, Severe acute respiratory syndrome coronavirus 2
  REGION 1..8: note = Table A: HLA-A*34:01M HLA-A*66:01H
SVVNARLR

SEQ ID NO: 1145 - protein, 8 aa, Severe acute respiratory syndrome coronavirus 2
  REGION 1..8: note = Table A: HLA-B*14:02H
LRAKHYVY

SEQ ID NO: 1146 - protein, 8 aa, Severe acute respiratory syndrome coronavirus 2
  REGION 1..8: note = Table A: HLA-B*58:02H
RAKHYVYI

SEQ ID NO: 1147 - protein, 8 aa, Severe acute respiratory syndrome coronavirus 2
  REGION 1..8: note = Table A: HLA-A*29:01H HLA-C*04:03M HLA-C*03:03H HLA-A*02:11H HLA-C*03:04H HLA-C*15:05H HLA-C*15:02H HLA-A*02:04H HLA-A*02:05H HLA-A*02:02H HLA-A*02:03H HLA-C*17:01M HLA-C*08:01H HLA-C*08:03H HLA-B*39:01H HLA-C*05:01H
  REGION 1..8: note = CONT. FROM ABOVE: HLA-C*07:04H
YIGDPAQL

SEQ ID NO: 1148 - protein, 8 aa, Severe acute respiratory syndrome coronavirus 2
  REGION 1..8: note = Table A: HLA-A*33:03H HLA-A*66:01H
PAQLPAPR

SEQ ID NO: 1149 - protein, 8 aa, Severe acute respiratory syndrome coronavirus 2
  REGION 1..8: note = Table A: HLA-B*08:01M HLA-C*15:05H HLA-B*07:02M HLA-B*07:04H
LPAPRTLL

SEQ ID NO: 1150 - protein, 8 aa, Severe acute respiratory syndrome coronavirus 2
  REGION 1..8: note = Table A: HLA-A*33:03M
EYFNSVCR

SEQ ID NO: 1151 - protein, 8 aa, Severe acute respiratory syndrome coronavirus 2
  REGION 1..8: note = Table A: HLA-B*58:01H HLA-B*58:02H HLA-B*57:03M
KTIGPDMF

SEQ ID NO: 1152 - protein, 8 aa, Severe acute respiratory syndrome coronavirus 2
  REGION 1..8: note = Table A: HLA-C*03:04H HLA-B*35:03H HLA-C*15:05H HLA-C*15:02H HLA-A*02:05H HLA-B*35:02H HLA-C*17:01H HLA-C*08:01H HLA-B*35:12H
TIGPDMFL

SEQ ID NO: 1153 - protein, 8 aa, Severe acute respiratory syndrome coronavirus 2
  REGION 1..8: note = Table A: HLA-A*33:01H HLA-A*34:01H
DMFLGTCR

SEQ ID NO: 1154 - protein, 8 aa, Severe acute respiratory syndrome coronavirus 2
  REGION 1..8: note = Table A: HLA-C*04:03M HLA-C*15:05H HLA-C*08:02M HLA-C*05:01H
IVDTVSAL

SEQ ID NO: 1155 - protein, 8 aa, Severe acute respiratory syndrome coronavirus 2
  REGION 1..8: note = Table A: HLA-B*35:01H HLA-B*38:02H HLA-B*15:02H HLA-B*07:05H
DTVSALVY

SEQ ID NO: 1156 - protein, 8 aa, Severe acute respiratory syndrome coronavirus 2
  REGION 1..8: note = Table A: HLA-A*11:02H HLA-A*34:02H
LVYDNKLK

SEQ ID NO: 1157 - protein, 8 aa, Severe acute respiratory syndrome coronavirus 2
  REGION 1..8: note = Table A: HLA-B*37:01H
KDKSAQCF

SEQ ID NO: 1158 - protein, 8 aa, Severe acute respiratory syndrome coronavirus 2
  REGION 1..8: note = Table A: HLA-B*38:01H HLA-B*38:02M HLA-B*39:01M HLA-B*15:10H
THDVSSAI

SEQ ID NO: 1159 - protein, 8 aa, Severe acute respiratory syndrome coronavirus 2
  REGION 1..8: note = Table A: HLA-A*33:01H HLA-A*33:03H HLA-A*68:01M HLA-A*34:01M HLA-A*66:01H
DVSSAINR

SEQ ID NO: 1160 - protein, 8 aa, Severe acute respiratory syndrome coronavirus 2
  REGION 1..8: note = Table A: HLA-B*58:02H HLA-C*16:01H HLA-B*51:01H HLA-B*07:04H
SAINRPQI

SEQ ID NO: 1161 - protein, 8 aa, Severe acute respiratory syndrome coronavirus 2
  REGION 1..8: note = Table A: HLA-A*74:01H
VVREFLTR

SEQ ID NO: 1162 - protein, 8 aa, Severe acute respiratory syndrome coronavirus 2
  REGION 1..8: note = Table A: HLA-B*58:01M HLA-B*57:01H HLA-B*53:01H HLA-B*15:13H HLA-B*38:02H HLA-A*32:01H HLA-B*57:03H HLA-B*13:01H
FLTRNPAW

SEQ ID NO: 1163 - protein, 8 aa, Severe acute respiratory syndrome coronavirus 2
  REGION 1..8: note = Table A: HLA-B*07:04H
NPAWRKAV

SEQ ID NO: 1164 - protein, 8 aa, Severe acute respiratory syndrome coronavirus 2
  REGION 1..8: note = Table A: HLA-B*35:07H HLA-B*07:04H
PAWRKAVF

SEQ ID NO: 1165 - protein, 8 aa, Severe acute respiratory syndrome coronavirus 2
  REGION 1..8: note = Table A: HLA-B*55:02H HLA-B*55:01H
SPYNSQNA

SEQ ID NO: 1166 - protein, 8 aa, Severe acute respiratory syndrome coronavirus 2
  REGION 1..8: note = Table A: HLA-C*03:04H
NAVASKIL

SEQ ID NO: 1167 - protein, 8 aa, Severe acute respiratory syndrome coronavirus 2
  REGION 1..8: note = Table A: HLA-C*15:05M HLA-C*15:02M HLA-C*17:01H HLA-B*07:05H HLA-C*07:04H
VASKILGL

SEQ ID NO: 1168 - protein, 8 aa, Severe acute respiratory syndrome coronavirus 2
  REGION 1..8: note = Table A: HLA-A*02:03H
ILGLPTQT

SEQ ID NO: 1169 - protein, 8 aa, Severe acute respiratory syndrome coronavirus 2
  REGION 1..8: note = Table A: HLA-B*51:01H HLA-B*52:01H
LGLPTQTV

SEQ ID NO: 1170 - protein, 8 aa, Severe acute respiratory syndrome coronavirus 2
  REGION 1..8: note = Table A: HLA-B*08:01H HLA-B*51:01H HLA-B*52:01H
VAITRAKV

SEQ ID NO: 1171 - protein, 8 aa, Severe acute respiratory syndrome coronavirus 2
  REGION 1..8: note = Table A: HLA-B*14:01H
TRAKVGIL

SEQ ID NO: 1172 - protein, 8 aa, Severe acute respiratory syndrome coronavirus 2
  REGION 1..8: note = Table A: HLA-A*36:01H
IMSDRDLY

SEQ ID NO: 1173 - protein, 8 aa, Severe acute respiratory syndrome coronavirus 2
  REGION 1..8: note = Table A: HLA-B*08:01H HLA-B*38:02H HLA-B*15:02H
DLYDKLQF

SEQ ID NO: 1174 - protein, 8 aa, Severe acute respiratory syndrome coronavirus 2
  REGION 1..8: note = Table A: HLA-B*14:02H
DKLQFTSL

SEQ ID NO: 1175 - protein, 8 aa, Severe acute respiratory syndrome coronavirus 2
  REGION 1..8: note = Table A: HLA-B*52:01M HLA-B*38:02H HLA-B*13:02M
LQFTSLEI

SEQ ID NO: 1176 - protein, 8 aa, Severe acute respiratory syndrome coronavirus 2
  REGION 1..8: note = Table A: HLA-B*44:05M HLA-B*37:01M HLA-B*07:05H HLA-B*41:02H
AENVTGLF

SEQ ID NO: 1177 - protein, 8 aa, Severe acute respiratory syndrome coronavirus 2
  REGION 1..8: note = Table A: HLA-A*34:02H
ENVTGLFK

SEQ ID NO: 1178 - protein, 8 aa, Severe acute respiratory syndrome coronavirus 2
  REGION 1..8: note = Table A: HLA-C*15:05H
PTQAPTHL

SEQ ID NO: 1179 - protein, 8 aa, Severe acute respiratory syndrome coronavirus 2
  REGION 1..8: note = Table A: HLA-B*51:01M HLA-B*52:01H
QAPTHLSV

SEQ ID NO: 1180 - protein, 8 aa, Severe acute respiratory syndrome coronavirus 2
  REGION 1..8: note = Table A: HLA-B*38:02H
HLSVDTKF

SEQ ID NO: 1181 - protein, 8 aa, Severe acute respiratory syndrome coronavirus 2
  REGION 1..8: note = Table A: HLA-B*48:01H
TKFKTEGL

SEQ ID NO: 1182 - protein, 8 aa, Severe acute respiratory syndrome coronavirus 2
  REGION 1..8: note = Table A: HLA-A*11:01H HLA-A*11:02H HLA-A*36:01H
VDIPGIPK

SEQ ID NO: 1183 - protein, 8 aa, Severe acute respiratory syndrome coronavirus 2
  REGION 1..8: note = Table A: HLA-C*15:05H
IPGIPKDM

SEQ ID NO: 1184 - protein, 8 aa, Severe acute respiratory syndrome coronavirus 2
  REGION 1..8: note = Table A: HLA-A*33:03H
IPKDMTYR

SEQ ID NO: 1185 - protein, 8 aa, Severe acute respiratory syndrome coronavirus 2
  REGION 1..8: note = Table A: HLA-B*58:01H HLA-B*58:02H HLA-C*15:05H HLA-B*57:03H
ISMMGFKM

SEQ ID NO: 1186 - protein, 8 aa, Severe acute respiratory syndrome coronavirus 2
  REGION 1..8: note = Table A: HLA-B*15:02H
MNYQVNGY

SEQ ID NO: 1187 - protein, 8 aa, Severe acute respiratory syndrome coronavirus 2
  REGION 1..8: note = Table A: HLA-B*51:01H HLA-B*52:01H
NGYPNMFI

SEQ ID NO: 1188 - protein, 8 aa, Severe acute respiratory syndrome coronavirus 2
  REGION 1..8: note = Table A: HLA-A*33:03H HLA-A*34:01H HLA-A*66:01H
YPNMFITR

SEQ ID NO: 1189 - protein, 8 aa, Severe acute respiratory syndrome coronavirus 2
  REGION 1..8: note = Table A: HLA-B*49:01H
REEAIRHV

SEQ ID NO: 1190 - protein, 8 aa, Severe acute respiratory syndrome coronavirus 2
  REGION 1..8: note = Table A: HLA-A*02:11H HLA-B*13:02H
RAWIGFDV

SEQ ID NO: 1191 - protein, 8 aa, Severe acute respiratory syndrome coronavirus 2
  REGION 1..8: note = Table A: HLA-B*37:01H HLA-B*40:01M HLA-B*40:02H HLA-B*41:02H
REAVGTNL

SEQ ID NO: 1192 - protein, 8 aa, Severe acute respiratory syndrome coronavirus 2
  REGION 1..8: note = Table A: HLA-C*15:05H
AVGTNLPL

SEQ ID NO: 1193 - protein, 8 aa, Severe acute respiratory syndrome coronavirus 2
  REGION 1..8: note = Table A: HLA-C*15:05M HLA-C*15:02M HLA-C*07:04H
GTNLPLQL

SEQ ID NO: 1194 - protein, 8 aa, Severe acute respiratory syndrome coronavirus 2
  REGION 1..8: note = Table A: HLA-A*02:01H HLA-A*02:03H
QLGFSTGV

SEQ ID NO: 1195 - protein, 8 aa, Severe acute respiratory syndrome coronavirus 2
  REGION 1..8: note = Table A: HLA-B*39:06H
TGVNLVAV

SEQ ID NO: 1196 - protein, 8 aa, Severe acute respiratory syndrome coronavirus 2
  REGION 1..8: note = Table A: HLA-B*38:02H HLA-B*15:01H HLA-B*15:02H HLA-B*39:01H
LVAVPTGY

SEQ ID NO: 1197 - protein, 8 aa, Severe acute respiratory syndrome coronavirus 2
  REGION 1..8: note = Table A: HLA-B*51:01H
VAVPTGYV

SEQ ID NO: 1198 - protein, 8 aa, Severe acute respiratory syndrome coronavirus 2
  REGION 1..8: note = Table A: HLA-B*39:06H HLA-B*50:01H
TDFSRVSA

SEQ ID NO: 1199 - protein, 8 aa, Severe acute respiratory syndrome coronavirus 2
  REGION 1..8: note = Table A: HLA-C*15:05H HLA-B*07:05H
KPPPGDQF

SEQ ID NO: 1200 - protein, 8 aa, Severe acute respiratory syndrome coronavirus 2
  REGION 1..8: note = Table A: HLA-A*36:01H HLA-B*38:02H HLA-B*15:03M
KHLIPLMY

SEQ ID NO: 1201 - protein, 8 aa, Severe acute respiratory syndrome coronavirus 2
  REGION 1..8: note = Table A: HLA-A*11:02H
HLIPLMYK

SEQ ID NO: 1202 - protein, 8 aa, Severe acute respiratory syndrome coronavirus 2
  REGION 1..8: note = Table A: HLA-A*02:11H HLA-B*53:01M HLA-C*15:05H HLA-B*51:01H HLA-B*35:07H HLA-B*52:01H HLA-C*08:01H HLA-B*54:01M HLA-B*07:05H
LPWNVVRI

SEQ ID NO: 1203 - protein, 8 aa, Severe acute respiratory syndrome coronavirus 2
  REGION 1..8: note = Table A: HLA-B*14:01H
VRIKIVQM

SEQ ID NO: 1204 - protein, 8 aa, Severe acute respiratory syndrome coronavirus 2
  REGION 1..8: note = Table A: HLA-B*08:01H HLA-B*07:04H
RIKIVQML

SEQ ID NO: 1205 - protein, 8 aa, Severe acute respiratory syndrome coronavirus 2
  REGION 1..8: note = Table A: HLA-B*14:01H HLA-B*15:01H HLA-B*39:01H
VQMLSDTL

SEQ ID NO: 1206 - protein, 8 aa, Severe acute respiratory syndrome coronavirus 2
  REGION 1..8: note = Table A: HLA-C*04:03H HLA-C*03:04H HLA-C*08:02H
LSDTLKNL

SEQ ID NO: 1207 - protein, 8 aa, Severe acute respiratory syndrome coronavirus 2
  REGION 1..8: note = Table A: HLA-C*04:03H HLA-C*15:02H HLA-C*05:01M
LSDRVVFV

SEQ ID NO: 1208 - protein, 8 aa, Severe acute respiratory syndrome coronavirus 2
  REGION 1..8: note = Table A: HLA-B*37:01H HLA-B*40:02H HLA-B*41:02M
SDRVVFVL

SEQ ID NO: 1209 - protein, 8 aa, Severe acute respiratory syndrome coronavirus 2
  REGION 1..8: note = Table A: HLA-B*38:02H
DRVVFVLW

SEQ ID NO: 1210 - protein, 8 aa, Severe acute respiratory syndrome coronavirus 2
  REGION 1..8: note = Table A: HLA-B*46:01H
VVFVLWAH

SEQ ID NO: 1211 - protein, 8 aa, Severe acute respiratory syndrome coronavirus 2
  REGION 1..8: note = Table A: HLA-C*03:04H HLA-C*08:01H
LWAHGFEL

SEQ ID NO: 1212 - protein, 8 aa, Severe acute respiratory syndrome coronavirus 2
  REGION 1..8: note = Table A: HLA-B*46:01H HLA-B*18:01H HLA-C*03:02H HLA-C*15:05H HLA-B*51:01H HLA-B*52:01M HLA-B*38:02H HLA-B*39:06H HLA-B*15:02M HLA-B*07:05H
HGFELTSM

SEQ ID NO: 1213 - protein, 8 aa, Severe acute respiratory syndrome coronavirus 2
  REGION 1..8: note = Table A: HLA-B*44:03H HLA-B*18:01M HLA-C*07:01H HLA-B*07:05H
FELTSMKY

SEQ ID NO: 1214 - protein, 8 aa, Severe acute respiratory syndrome coronavirus 2
  REGION 1..8: note = Table A: HLA-A*11:02H
TSMKYFVK

SEQ ID NO: 1215 - protein, 8 aa, Severe acute respiratory syndrome coronavirus 2
  REGION 1..8: note = Table A: HLA-B*52:01H
SMKYFVKI

SEQ ID NO: 1216 - protein, 8 aa, Severe acute respiratory syndrome coronavirus 2
  REGION 1..8: note = Table A: HLA-A*33:03H HLA-A*34:01H HLA-A*66:01H
FVKIGPER

SEQ ID NO: 1217 - protein, 8 aa, Severe acute respiratory syndrome coronavirus 2
  REGION 1..8: note = Table A: HLA-B*58:01H HLA-B*35:01H HLA-B*39:01H
FSTASDTY

SEQ ID NO: 1218 - protein, 8 aa, Severe acute respiratory syndrome coronavirus 2
  REGION 1..8: note = Table A: HLA-B*58:01H
ASDTYACW

SEQ ID NO: 1219 - protein, 8 aa, Severe acute respiratory syndrome coronavirus 2
  REGION 1..8: note = Table A: HLA-B*38:02H
HHSIGFDY

SEQ ID NO: 1220 - protein, 8 aa, Severe acute respiratory syndrome coronavirus 2
  REGION 1..8: note = Table A: HLA-B*37:01H
FDYVYNPF

SEQ ID NO: 1221 - protein, 8 aa, Severe acute respiratory syndrome coronavirus 2
  REGION 1..8: note = Table A: HLA-A*02:11H HLA-B*51:01H
YVYNPFMI

SEQ ID NO: 1222 - protein, 8 aa, Severe acute respiratory syndrome coronavirus 2
  REGION 1..8: note = Table A: HLA-B*38:02H
FMIDVQQW

SEQ ID NO: 1223 - protein, 8 aa, Severe acute respiratory syndrome coronavirus 2
  REGION 1..8: note = Table A: HLA-B*37:01H
IDVQQWGF

SEQ ID NO: 1224 - protein, 8 aa, Severe acute respiratory syndrome coronavirus 2
  REGION 1..8: note = Table A: HLA-A*30:02H HLA-B*15:01H HLA-B*39:01H
LQSNHDLY

SEQ ID NO: 1225 - protein, 8 aa, Severe acute respiratory syndrome coronavirus 2
  REGION 1..8: note = Table A: HLA-B*39:06M
VHGNAHVA

SEQ ID NO: 1226 - protein, 8 aa, Severe acute respiratory syndrome coronavirus 2
  REGION 1..8: note = Table A: HLA-B*39:06H
AHVASCDA

SEQ ID NO: 1227 - protein, 8 aa, Severe acute respiratory syndrome coronavirus 2
  REGION 1..8: note = Table A: HLA-B*08:01H HLA-C*15:05H HLA-B*14:02H HLA-B*14:01H HLA-B*35:02H HLA-B*51:01M HLA-B*35:12H HLA-B*38:02H HLA-B*15:02H HLA-B*07:05H
DAIMTRCL

SEQ ID NO: 1228 - protein, 8 aa, Severe acute respiratory syndrome coronavirus 2
  REGION 1..8: note = Table A: HLA-A*11:02H
AVHECFVK

SEQ ID NO: 1229 - protein, 8 aa, Severe acute respiratory syndrome coronavirus 2
  REGION 1..8: note = Table A: HLA-B*49:01H
HECFVKRV

SEQ ID NO: 1230 - protein, 8 aa, Severe acute respiratory syndrome coronavirus 2
  REGION 1..8: note = Table A: HLA-A*36:01M
RVDWTIEY

SEQ ID NO: 1231 - protein, 8 aa, Severe acute respiratory syndrome coronavirus 2
  REGION 1..8: note = Table A: HLA-B*42:01H HLA-B*08:01H HLA-C*03:03H HLA-B*53:01H HLA-C*03:02H HLA-C*03:04H HLA-B*35:03H HLA-C*15:05H HLA-B*14:02H HLA-B*14:01H HLA-A*34:01H HLA-B*35:01H HLA-B*35:02H HLA-B*35:08M HLA-B*51:01M HLA-B*35:07M
  REGION 1..8: note = CONT. FROM ABOVE: HLA-C*08:01M HLA-B*35:12H HLA-B*38:01H HLA- B*38:02M HLA-B*40:01H HLA-B*54:01H HLA-B*07:02H HLA-B*15:02H HLA-B*39:01M HLA-B*07:05M HLA-B*15:10H
YPIIGDEL

SEQ ID NO: 1232 - protein, 8 aa, Severe acute respiratory syndrome coronavirus 2
  REGION 1..8: note = Table A: HLA-C*15:02H
IIGDELKI

SEQ ID NO: 1233 - protein, 8 aa, Severe acute respiratory syndrome coronavirus 2
  REGION 1..8: note = Table A: HLA-B*45:01H HLA-B*18:01H HLA-B*39:06M HLA-B*40:06H HLA-B*54:01H HLA-B*07:05M HLA-B*50:01H
DELKINAA

SEQ ID NO: 1234 - protein, 8 aa, Severe acute respiratory syndrome coronavirus 2
  REGION 1..8: note = Table A: HLA-B*15:03H
RKVQHMVV

SEQ ID NO: 1235 - protein, 8 aa, Severe acute respiratory syndrome coronavirus 2
  REGION 1..8: note = Table A: HLA-A*03:02H HLA-A*11:01H HLA-A*11:02H HLA-A*30:02H
KVQHMVVK

SEQ ID NO: 1236 - protein, 8 aa, Severe acute respiratory syndrome coronavirus 2
  REGION 1..8: note = Table A: HLA-A*02:05H HLA-B*52:01M HLA-B*38:02H HLA-B*39:06H HLA-B*15:01M HLA-B*13:02H
VQHMVVKA

SEQ ID NO: 1237 - protein, 8 aa, Severe acute respiratory syndrome coronavirus 2
  REGION 1..8: note = Table A: HLA-B*45:01H HLA-B*39:06H HLA-B*15:10H HLA-B*50:01H
QHMVVKAA

SEQ ID NO: 1238 - protein, 8 aa, Severe acute respiratory syndrome coronavirus 2
  REGION 1..8: note = Table A: HLA-B*08:01M HLA-B*14:02H HLA-B*14:01H
HMVVKAAL

SEQ ID NO: 1239 - protein, 8 aa, Severe acute respiratory syndrome coronavirus 2
  REGION 1..8: note = Table A: HLA-A*68:02H HLA-C*15:05H HLA-B*38:02H
MVVKAALL

SEQ ID NO: 1240 - protein, 8 aa, Severe acute respiratory syndrome coronavirus 2
  REGION 1..8: note = Table A: HLA-C*04:03M HLA-C*03:02H HLA-C*15:05H HLA-C*08:01H HLA-C*08:02H HLA-B*35:12H HLA-C*05:01H
LADKFPVL

SEQ ID NO: 1241 - protein, 8 aa, Severe acute respiratory syndrome coronavirus 2
  REGION 1..8: note = Table A: HLA-B*45:01H HLA-B*40:02H HLA-B*40:06H
HDIGNPKA

SEQ ID NO: 1242 - protein, 8 aa, Severe acute respiratory syndrome coronavirus 2
  REGION 1..8: note = Table A: HLA-B*53:01H
VPQADVEW

SEQ ID NO: 1243 - protein, 8 aa, Severe acute respiratory syndrome coronavirus 2
  REGION 1..8: note = Table A: HLA-C*04:03M HLA-B*35:02H HLA-B*35:08H HLA-B*35:12H HLA-C*05:01H
QADVEWKF

SEQ ID NO: 1244 - protein, 8 aa, Severe acute respiratory syndrome coronavirus 2
  REGION 1..8: note = Table A: HLA-B*40:06M HLA-B*50:01H
VEWKFYDA

SEQ ID NO: 1245 - protein, 8 aa, Severe acute respiratory syndrome coronavirus 2
  REGION 1..8: note = Table A: HLA-A*02:11H HLA-C*15:05H HLA-B*57:03H
KAYKIEEL

SEQ ID NO: 1246 - protein, 8 aa, Severe acute respiratory syndrome coronavirus 2
  REGION 1..8: note = Table A: HLA-B*15:03H
YKIEELFY

SEQ ID NO: 1247 - protein, 8 aa, Severe acute respiratory syndrome coronavirus 2
  REGION 1..8: note = Table A: HLA-B*18:01M HLA-B*07:05M
IEELFYSY

SEQ ID NO: 1248 - protein, 8 aa, Severe acute respiratory syndrome coronavirus 2
  REGION 1..8: note = Table A: HLA-B*58:01H HLA-B*53:01H HLA-B*35:01H HLA-B*35:02H HLA-B*35:08H HLA-B*39:01H
YATHSDKF

SEQ ID NO: 1249 - protein, 8 aa, Severe acute respiratory syndrome coronavirus 2
  REGION 1..8: note = Table A: HLA-C*04:03M
FTDGVCLF

SEQ ID NO: 1250 - protein, 8 aa, Severe acute respiratory syndrome coronavirus 2
  REGION 1..8: note = Table A: HLA-B*14:02M HLA-B*14:01M HLA-B*51:01H HLA-B*38:02H HLA-B*39:01H
DRYPANSI

SEQ ID NO: 1251 - protein, 8 aa, Severe acute respiratory syndrome coronavirus 2
  REGION 1..8: note = Table A: HLA-B*56:01H HLA-B*55:02H HLA-B*35:03H HLA-C*15:05H HLA-B*35:01H HLA-B*35:02H HLA-B*51:01H HLA-B*54:01M
YPANSIVC

SEQ ID NO: 1252 - protein, 8 aa, Severe acute respiratory syndrome coronavirus 2
  REGION 1..8: note = Table A: HLA-A*11:01H HLA-A*11:02H HLA-A*33:01H HLA-A*33:03M HLA-A*68:01H
PANSIVCR

SEQ ID NO: 1253 - protein, 8 aa, Severe acute respiratory syndrome coronavirus 2
  REGION 1..8: note = Table A: HLA-C*15:05H
DTRVLSNL

SEQ ID NO: 1254 - protein, 8 aa, Severe acute respiratory syndrome coronavirus 2
  REGION 1..8: note = Table A: HLA-C*14:02H
LYVNKHAF

SEQ ID NO: 1255 - protein, 8 aa, Severe acute respiratory syndrome coronavirus 2
  REGION 1..8: note = Table A: HLA-B*58:02H HLA-B*46:01H HLA-B*53:01H HLA-C*03:02H HLA-B*35:01H HLA-B*51:01H HLA-B*35:07M HLA-B*38:02H HLA-B*54:01H HLA-B*15:02M HLA-B*57:03H
HAFHTPAF

SEQ ID NO: 1256 - protein, 8 aa, Severe acute respiratory syndrome coronavirus 2
  REGION 1..8: note = Table A: HLA-C*04:01H HLA-C*04:03H
AFDKSAFV

SEQ ID NO: 1257 - protein, 8 aa, Severe acute respiratory syndrome coronavirus 2
  REGION 1..8: note = Table A: HLA-B*58:02H HLA-A*36:01H HLA-A*30:02M HLA-B*15:01H HLA-B*15:03M
KQLPFFYY

SEQ ID NO: 1258 - protein, 8 aa, Severe acute respiratory syndrome coronavirus 2
  REGION 1..8: note = Table A: HLA-A*36:01H HLA-A*34:02H
DIDYVPLK

SEQ ID NO: 1259 - protein, 8 aa, Severe acute respiratory syndrome coronavirus 2
  REGION 1..8: note = Table A: HLA-B*39:06H HLA-B*54:01H
DYVPLKSA

SEQ ID NO: 1260 - protein, 8 aa, Severe acute respiratory syndrome coronavirus 2
  REGION 1..8: note = Table A: HLA-C*15:05H HLA-B*51:01H
VPLKSATC

SEQ ID NO: 1261 - protein, 8 aa, Severe acute respiratory syndrome coronavirus 2
  REGION 1..8: note = Table A: HLA-B*38:01M HLA-B*38:02M HLA-B*39:01H HLA-B*13:01H HLA-B*15:10H
HHANEYRL

SEQ ID NO: 1262 - protein, 8 aa, Severe acute respiratory syndrome coronavirus 2
  REGION 1..8: note = Table A: HLA-B*58:02H HLA-C*16:01H
HANEYRLY

SEQ ID NO: 1263 - protein, 8 aa, Severe acute respiratory syndrome coronavirus 2
  REGION 1..8: note = Table A: HLA-C*14:03H
LYLDAYNM

SEQ ID NO: 1264 - protein, 8 aa, Severe acute respiratory syndrome coronavirus 2
  REGION 1..8: note = Table A: HLA-B*18:01H HLA-B*38:02H HLA-B*15:02H HLA-B*07:05H
NMMISAGF

SEQ ID NO: 1265 - protein, 8 aa, Severe acute respiratory syndrome coronavirus 2
  REGION 1..8: note = Table A: HLA-B*58:01H HLA-B*57:01H HLA-B*57:03H
ISAGFSLW

SEQ ID NO: 1266 - protein, 8 aa, Severe acute respiratory syndrome coronavirus 2
  REGION 1..8: note = Table A: HLA-A*30:02M
VYKQFDTY

SEQ ID NO: 1267 - protein, 8 aa, Severe acute respiratory syndrome coronavirus 2
  REGION 1..8: note = Table A: HLA-B*48:01H HLA-A*02:11M HLA-A*02:05H HLA-A*02:02H HLA-B*13:02H
KQFDTYNL

SEQ ID NO: 1268 - protein, 8 aa, Severe acute respiratory syndrome coronavirus 2
  REGION 1..8: note = Table A: HLA-A*24:02H
TYNLWNTF

SEQ ID NO: 1269 - protein, 8 aa, Severe acute respiratory syndrome coronavirus 2
  REGION 1..8: note = Table A: HLA-B*18:01H HLA-B*49:01H
LENVAFNV

SEQ ID NO: 1270 - protein, 8 aa, Severe acute respiratory syndrome coronavirus 2
  REGION 1..8: note = Table A: HLA-A*03:01H HLA-A*03:02M HLA-A*11:01M HLA-A*11:02M HLA-A*68:01H HLA-A*34:02H HLA-C*07:27H
VAFNVVNK

SEQ ID NO: 1271 - protein, 8 aa, Severe acute respiratory syndrome coronavirus 2
  REGION 1..8: note = Table A: HLA-B*40:01H HLA-B*40:02M HLA-B*41:02H HLA-B*49:01M
GEVPVSII

SEQ ID NO: 1272 - protein, 8 aa, Severe acute respiratory syndrome coronavirus 2
  REGION 1..8: note = Table A: HLA-B*52:01H
VSIINNTV

SEQ ID NO: 1273 - protein, 8 aa, Severe acute respiratory syndrome coronavirus 2
  REGION 1..8: note = Table A: HLA-B*46:01H HLA-B*38:02H HLA-B*15:01H HLA-B*15:02H
SIINNTVY

SEQ ID NO: 1274 - protein, 8 aa, Severe acute respiratory syndrome coronavirus 2
  REGION 1..8: note = Table A: HLA-A*03:02H
INNTVYTK

SEQ ID NO: 1275 - protein, 8 aa, Severe acute respiratory syndrome coronavirus 2
  REGION 1..8: note = Table A: HLA-B*50:01H
FENKTTLP

SEQ ID NO: 1276 - protein, 8 aa, Severe acute respiratory syndrome coronavirus 2
  REGION 1..8: note = Table A: HLA-C*15:05H HLA-C*15:02H
KTTLPVNV

SEQ ID NO: 1277 - protein, 8 aa, Severe acute respiratory syndrome coronavirus 2
  REGION 1..8: note = Table A: HLA-B*38:02H
TLPVNVAF

SEQ ID NO: 1278 - protein, 8 aa, Severe acute respiratory syndrome coronavirus 2
  REGION 1..8: note = Table A: HLA-B*35:03H
PVNVAFEL

SEQ ID NO: 1279 - protein, 8 aa, Severe acute respiratory syndrome coronavirus 2
  REGION 1..8: note = Table A: HLA-A*11:02H
VAFELWAK

SEQ ID NO: 1280 - protein, 8 aa, Severe acute respiratory syndrome coronavirus 2
  REGION 1..8: note = Table A: HLA-B*08:01H HLA-B*55:01H HLA-A*02:03H HLA-B*51:01H HLA-B*52:01H HLA-B*38:02H HLA-B*54:01H
NIKPVPEV

SEQ ID NO: 1281 - protein, 8 aa, Severe acute respiratory syndrome coronavirus 2
  REGION 1..8: note = Table A: HLA-C*15:05H
KPVPEVKI

SEQ ID NO: 1282 - protein, 8 aa, Severe acute respiratory syndrome coronavirus 2
  REGION 1..8: note = Table A: HLA-B*40:02H HLA-B*41:02H HLA-B*49:01H
VDIAANTV

SEQ ID NO: 1283 - protein, 8 aa, Severe acute respiratory syndrome coronavirus 2
  REGION 1..8: note = Table A: HLA-B*58:01H
IAANTVIW

SEQ ID NO: 1284 - protein, 8 aa, Severe acute respiratory syndrome coronavirus 2
  REGION 1..8: note = Table A: HLA-B*51:01H
DAPAHIST

SEQ ID NO: 1285 - protein, 8 aa, Severe acute respiratory syndrome coronavirus 2
  REGION 1..8: note = Table A: HLA-B*56:01H HLA-B*55:02H HLA-C*15:05H HLA-B*55:01M HLA-B*51:01M HLA-B*07:02H HLA-B*07:04H HLA-B*07:05H
APAHISTI

SEQ ID NO: 1286 - protein, 8 aa, Severe acute respiratory syndrome coronavirus 2
  REGION 1..8: note = Table A: HLA-B*39:06M HLA-B*15:10H
AHISTIGV

SEQ ID NO: 1287 - protein, 8 aa, Severe acute respiratory syndrome coronavirus 2
  REGION 1..8: note = Table A: HLA-A*03:02H
SMTDIAKK

SEQ ID NO: 1288 - protein, 8 aa, Severe acute respiratory syndrome coronavirus 2
  REGION 1..8: note = Table A: HLA-B*56:01H HLA-B*55:02H HLA-B*55:01H
KPTETICA

SEQ ID NO: 1289 - protein, 8 aa, Severe acute respiratory syndrome coronavirus 2
  REGION 1..8: note = Table A: HLA-B*51:01H
DGRVDGQV

SEQ ID NO: 1290 - protein, 8 aa, Severe acute respiratory syndrome coronavirus 2
  REGION 1..8: note = Table A: HLA-C*04:03H HLA-C*08:02H HLA-C*05:01H
RVDGQVDL

SEQ ID NO: 1291 - protein, 8 aa, Severe acute respiratory syndrome coronavirus 2
  REGION 1..8: note = Table A: HLA-B*37:01H
VDGQVDLF

SEQ ID NO: 1292 - protein, 8 aa, Severe acute respiratory syndrome coronavirus 2
  REGION 1..8: note = Table A: HLA-B*51:01H
NARNGVLI

SEQ ID NO: 1293 - protein, 8 aa, Severe acute respiratory syndrome coronavirus 2
  REGION 1..8: note = Table A: HLA-C*03:03H
LITEGSVK

SEQ ID NO: 1294 - protein, 8 aa, Severe acute respiratory syndrome coronavirus 2
  REGION 1..8: note = Table A: HLA-B*44:05H HLA-B*40:02H HLA-B*41:02H
TEGSVKGL

SEQ ID NO: 1295 - protein, 8 aa, Severe acute respiratory syndrome coronavirus 2
  REGION 1..8: note = Table A: HLA-C*15:05H HLA-C*01:02H
VGPKQASL

SEQ ID NO: 1296 - protein, 8 aa, Severe acute respiratory syndrome coronavirus 2
  REGION 1..8: note = Table A: HLA-A*02:03H
SLNGVTLI

SEQ ID NO: 1297 - protein, 8 aa, Severe acute respiratory syndrome coronavirus 2
  REGION 1..8: note = Table A: HLA-B*44:05M HLA-B*44:03H HLA-B*18:01H HLA-B*37:01M HLA-B*40:02H HLA-B*07:05H HLA-B*41:02H
GEAVKTQF

SEQ ID NO: 1298 - protein, 8 aa, Severe acute respiratory syndrome coronavirus 2
  REGION 1..8: note = Table A: HLA-A*30:02H HLA-B*15:01H
AVKTQFNY

SEQ ID NO: 1299 - protein, 8 aa, Severe acute respiratory syndrome coronavirus 2
  REGION 1..8: note = Table A: HLA-B*15:03H
VKTQFNYY

SEQ ID NO: 1300 - protein, 8 aa, Severe acute respiratory syndrome coronavirus 2
  REGION 1..8: note = Table A: HLA-A*36:01H
KTQFNYYK

SEQ ID NO: 1301 - protein, 8 aa, Severe acute respiratory syndrome coronavirus 2
  REGION 1..8: note = Table A: HLA-A*11:02H
TQFNYYKK

SEQ ID NO: 1302 - protein, 8 aa, Severe acute respiratory syndrome coronavirus 2
  REGION 1..8: note = Table A: HLA-B*44:05H HLA-C*08:03H HLA-B*37:01M HLA-B*40:02H HLA-B*41:02H
VDGVVQQL

SEQ ID NO: 1303 - protein, 8 aa, Severe acute respiratory syndrome coronavirus 2
  REGION 1..8: note = Table A: HLA-B*15:01M HLA-B*15:03H
VQQLPETY

SEQ ID NO: 1304 - protein, 8 aa, Severe acute respiratory syndrome coronavirus 2
  REGION 1..8: note = Table A: HLA-A*33:03H HLA-A*34:01M HLA-A*34:02H HLA-A*66:01M
ETYFTQSR

SEQ ID NO: 1305 - protein, 8 aa, Severe acute respiratory syndrome coronavirus 2
  REGION 1..8: note = Table A: HLA-C*14:02H HLA-C*14:03H
YFTQSRNL

SEQ ID NO: 1306 - protein, 8 aa, Severe acute respiratory syndrome coronavirus 2
  REGION 1..8: note = Table A: HLA-B*46:01H
QSRNLQEF

SEQ ID NO: 1307 - protein, 8 aa, Severe acute respiratory syndrome coronavirus 2
  REGION 1..8: note = Table A: HLA-B*08:01H
EFKPRSQM

SEQ ID NO: 1308 - protein, 8 aa, Severe acute respiratory syndrome coronavirus 2
  REGION 1..8: note = Table A: HLA-B*18:01H HLA-B*38:02H HLA-B*40:01H HLA-B*40:02H HLA-B*07:05H HLA-B*41:02H HLA-B*49:01M HLA-B*50:01H
MEIDFLEL

SEQ ID NO: 1309 - protein, 8 aa, Severe acute respiratory syndrome coronavirus 2
  REGION 1..8: note = Table A: HLA-B*18:01H HLA-B*07:05H
LELAMDEF

SEQ ID NO: 1310 - protein, 8 aa, Severe acute respiratory syndrome coronavirus 2
  REGION 1..8: note = Table A: HLA-A*36:01H
AMDEFIER

SEQ ID NO: 1311 - protein, 8 aa, Severe acute respiratory syndrome coronavirus 2
  REGION 1..8: note = Table A: HLA-A*36:01H HLA-B*18:01H
MDEFIERY

SEQ ID NO: 1312 - protein, 8 aa, Severe acute respiratory syndrome coronavirus 2
  REGION 1..8: note = Table A: HLA-B*08:01H
EFIERYKL

SEQ ID NO: 1313 - protein, 8 aa, Severe acute respiratory syndrome coronavirus 2
  REGION 1..8: note = Table A: HLA-B*15:03H
YKLEGYAF

SEQ ID NO: 1314 - protein, 8 aa, Severe acute respiratory syndrome coronavirus 2
  REGION 1..8: note = Table A: HLA-B*18:01H
LEGYAFEH

SEQ ID NO: 1315 - protein, 8 aa, Severe acute respiratory syndrome coronavirus 2
  REGION 1..8: note = Table A: HLA-B*51:01H HLA-B*52:01H
EGYAFEHI

SEQ ID NO: 1316 - protein, 8 aa, Severe acute respiratory syndrome coronavirus 2
  REGION 1..8: note = Table A: HLA-C*14:02H HLA-C*14:03H HLA-C*16:01M HLA-C*16:04H HLA-B*46:01M HLA-C*06:02H HLA-B*08:01H HLA-C*07:01H HLA-C*03:02H HLA-C*03:04H HLA-C*12:02M HLA-C*12:03M HLA-B*35:01M HLA-B*35:08H HLA-B*35:07H HLA-B*38:02M
  REGION 1..8: note = CONT. FROM ABOVE: HLA-B*15:01H HLA-B*15:02H HLA-B*15:03H HLA- C*02:02H HLA-B*15:11H
YAFEHIVY

SEQ ID NO: 1317 - protein, 8 aa, Severe acute respiratory syndrome coronavirus 2
  REGION 1..8: note = Table A: HLA-B*38:02H HLA-B*39:01H
EHIVYGDF

SEQ ID NO: 1318 - protein, 8 aa, Severe acute respiratory syndrome coronavirus 2
  REGION 1..8: note = Table A: HLA-B*14:02H HLA-C*08:03H HLA-B*37:01M HLA-B*40:01H HLA-B*40:02M HLA-B*41:02M
GDFSHSQL

SEQ ID NO: 1319 - protein, 8 aa, Severe acute respiratory syndrome coronavirus 2
  REGION 1..8: note = Table A: HLA-A*02:04H HLA-A*02:02M
QLGGLHLL

SEQ ID NO: 1320 - protein, 8 aa, Severe acute respiratory syndrome coronavirus 2
  REGION 1..8: note = Table A: HLA-C*15:02H
LGGLHLLI

SEQ ID NO: 1321 - protein, 8 aa, Severe acute respiratory syndrome coronavirus 2
  REGION 1..8: note = Table A: HLA-A*36:01H HLA-A*34:02H
HLLIGLAK

SEQ ID NO: 1322 - protein, 8 aa, Severe acute respiratory syndrome coronavirus 2
  REGION 1..8: note = Table A: HLA-B*37:01H
MDSTVKNY

SEQ ID NO: 1323 - protein, 8 aa, Severe acute respiratory syndrome coronavirus 2
  REGION 1..8: note = Table A: HLA-B*58:01H HLA-B*58:02H HLA-B*57:03H
STVKNYFI

SEQ ID NO: 1324 - protein, 8 aa, Severe acute respiratory syndrome coronavirus 2
  REGION 1..8: note = Table A: HLA-C*04:03H HLA-A*02:07H HLA-C*08:02H HLA-C*05:01H
LLDDFVEI

SEQ ID NO: 1325 - protein, 8 aa, Severe acute respiratory syndrome coronavirus 2
  REGION 1..8: note = Table A: HLA-A*03:02H HLA-A*11:01M HLA-A*11:02H HLA-B*37:01H
QDLSVVSK

SEQ ID NO: 1326 - protein, 8 aa, Severe acute respiratory syndrome coronavirus 2
  REGION 1..8: note = Table A: HLA-B*14:01H HLA-A*02:03H HLA-B*51:01H HLA-B*38:02H HLA-B*07:05H
DLSVVSKV

SEQ ID NO: 1327 - protein, 8 aa, Severe acute respiratory syndrome coronavirus 2
  REGION 1..8: note = Table A: HLA-B*52:01H
LSVVSKVV

SEQ ID NO: 1328 - protein, 8 aa, Severe acute respiratory syndrome coronavirus 2
  REGION 1..8: note = Table A: HLA-A*02:11H HLA-C*15:05M HLA-C*15:02H HLA-A*02:05H HLA-A*02:06H HLA-A*02:08H HLA-A*02:01H HLA-A*02:02H HLA-A*02:03H HLA-B*52:01H HLA-B*37:01H HLA-B*38:02H HLA-B*07:05H HLA-B*13:02H HLA-C*07:04H
VVSKVVKV

SEQ ID NO: 1329 - protein, 8 aa, Severe acute respiratory syndrome coronavirus 2
  REGION 1..8: note = Table A: HLA-B*46:01M HLA-A*30:02H HLA-C*12:02H HLA-B*38:02H HLA-B*15:01M HLA-B*15:02H
VVKVTIDY

SEQ ID NO: 1330 - protein, 8 aa, Severe acute respiratory syndrome coronavirus 2
  REGION 1..8: note = Table A: HLA-B*37:01H
IDYTEISF

SEQ ID NO: 1331 - protein, 8 aa, Severe acute respiratory syndrome coronavirus 2
  REGION 1..8: note = Table A: HLA-B*44:03H
TEISFMLW

SEQ ID NO: 1332 - protein, 8 aa, Severe acute respiratory syndrome coronavirus 2
  REGION 1..8: note = Table A: HLA-B*37:01H
KDGHVETF

SEQ ID NO: 1333 - protein, 8 aa, Severe acute respiratory syndrome coronavirus 2
  REGION 1..8: note = Table A: HLA-B*38:02H
DGHVETFY

SEQ ID NO: 1334 - protein, 8 aa, Severe acute respiratory syndrome coronavirus 2
  REGION 1..8: note = Table A: HLA-A*36:01H
HVETFYPK

SEQ ID NO: 1335 - protein, 8 aa, Severe acute respiratory syndrome coronavirus 2
  REGION 1..8: note = Table A: HLA-B*18:01H HLA-B*40:02M HLA-B*07:05H HLA-B*49:01H
VETFYPKL

SEQ ID NO: 1336 - protein, 8 aa, Severe acute respiratory syndrome coronavirus 2
  REGION 1..8: note = Table A: HLA-B*52:01M HLA-B*13:02M
SQAWQPGV

SEQ ID NO: 1337 - protein, 8 aa, Severe acute respiratory syndrome coronavirus 2
  REGION 1..8: note = Table A: HLA-C*14:02H HLA-C*14:03H
AWQPGVAM

SEQ ID NO: 1338 - protein, 8 aa, Severe acute respiratory syndrome coronavirus 2
  REGION 1..8: note = Table A: HLA-A*11:01H HLA-A*11:02H HLA-A*36:01H HLA-A*34:02H
VAMPNLYK

SEQ ID NO: 1339 - protein, 8 aa, Severe acute respiratory syndrome coronavirus 2
  REGION 1..8: note = Table A: HLA-C*14:02H HLA-A*24:02H HLA-B*39:01H
NYGDSATL

SEQ ID NO: 1340 - protein, 8 aa, Severe acute respiratory syndrome coronavirus 2
  REGION 1..8: note = Table A: HLA-A*11:01H
GDSATLPK

SEQ ID NO: 1341 - protein, 8 aa, Severe acute respiratory syndrome coronavirus 2
  REGION 1..8: note = Table A: HLA-B*46:01H HLA-A*30:02H HLA-B*38:02M HLA-B*15:01M HLA-B*15:02H HLA-B*07:05H
IMMNVAKY

SEQ ID NO: 1342 - protein, 8 aa, Severe acute respiratory syndrome coronavirus 2
  REGION 1..8: note = Table A: HLA-C*15:05H
NVAKYTQL

SEQ ID NO: 1343 - protein, 8 aa, Severe acute respiratory syndrome coronavirus 2
  REGION 1..8: note = Table A: HLA-C*14:02H HLA-C*14:03H
QYLNTLTL

SEQ ID NO: 1344 - protein, 8 aa, Severe acute respiratory syndrome coronavirus 2
  REGION 1..8: note = Table A: HLA-B*38:02H
TLAVPYNM

SEQ ID NO: 1345 - protein, 8 aa, Severe acute respiratory syndrome coronavirus 2
  REGION 1..8: note = Table A: HLA-C*15:05M HLA-B*55:01M HLA-B*51:01H HLA-B*52:01H HLA-C*08:01H HLA-B*54:01H HLA-B*07:04H HLA-B*07:05H
VPYNMRVI

SEQ ID NO: 1346 - protein, 8 aa, Severe acute respiratory syndrome coronavirus 2
  REGION 1..8: note = Table A: HLA-B*14:02H HLA-B*39:06H
MRVIHFGA

SEQ ID NO: 1347 - protein, 8 aa, Severe acute respiratory syndrome coronavirus 2
  REGION 1..8: note = Table A: HLA-C*15:05H HLA-C*01:02H HLA-B*51:01H
VAPGTAVL

SEQ ID NO: 1348 - protein, 8 aa, Severe acute respiratory syndrome coronavirus 2
  REGION 1..8: note = Table A: HLA-A*68:01H HLA-A*34:01H
APGTAVLR

SEQ ID NO: 1349 - protein, 8 aa, Severe acute respiratory syndrome coronavirus 2
  REGION 1..8: note = Table A: HLA-B*58:02H HLA-B*57:01H HLA-B*57:03H
GTAVLRQW

SEQ ID NO: 1350 - protein, 8 aa, Severe acute respiratory syndrome coronavirus 2
  REGION 1..8: note = Table A: HLA-C*15:05H HLA-B*51:01M
LPTGTLLV

SEQ ID NO: 1351 - protein, 8 aa, Severe acute respiratory syndrome coronavirus 2
  REGION 1..8: note = Table A: HLA-C*08:02H HLA-C*05:01H
VSDADSTL

SEQ ID NO: 1352 - protein, 8 aa, Severe acute respiratory syndrome coronavirus 2
  REGION 1..8: note = Table A: HLA-B*58:01M HLA-B*57:01H HLA-B*53:01M HLA-B*15:13H HLA-B*57:03H
TVHTANKW

SEQ ID NO: 1353 - protein, 8 aa, Severe acute respiratory syndrome coronavirus 2
  REGION 1..8: note = Table A: HLA-B*35:01H HLA-B*38:02H HLA-B*15:02M
DLIISDMY

SEQ ID NO: 1354 - protein, 8 aa, Severe acute respiratory syndrome coronavirus 2
  REGION 1..8: note = Table A: HLA-A*36:01H
ISDMYDPK

SEQ ID NO: 1355 - protein, 8 aa, Severe acute respiratory syndrome coronavirus 2
  REGION 1..8: note = Table A: HLA-A*33:01H HLA-A*33:03H HLA-A*34:02H
DMYDPKTK

SEQ ID NO: 1356 - protein, 8 aa, Severe acute respiratory syndrome coronavirus 2
  REGION 1..8: note = Table A: HLA-A*02:11H HLA-B*37:01H
YDPKTKNV

SEQ ID NO: 1357 - protein, 8 aa, Severe acute respiratory syndrome coronavirus 2
  REGION 1..8: note = Table A: HLA-B*08:01H
DPKTKNVT

SEQ ID NO: 1358 - protein, 8 aa, Severe acute respiratory syndrome coronavirus 2
  REGION 1..8: note = Table A: HLA-B*49:01M
KEGFFTYI

SEQ ID NO: 1359 - protein, 8 aa, Severe acute respiratory syndrome coronavirus 2
  REGION 1..8: note = Table A: HLA-B*08:01M
FIQQKLAL

SEQ ID NO: 1360 - protein, 8 aa, Severe acute respiratory syndrome coronavirus 2
  REGION 1..8: note = Table A: HLA-B*38:02H
ALGGSVAI

SEQ ID NO: 1361 - protein, 8 aa, Severe acute respiratory syndrome coronavirus 2
  REGION 1..8: note = Table A: HLA-A*11:303H HLA-B*46:01M HLA-C*03:02H HLA-C*12:02H HLA-B*15:01H
VAIKITEH

SEQ ID NO: 1362 - protein, 8 aa, Severe acute respiratory syndrome coronavirus 2
  REGION 1..8: note = Table A: HLA-B*39:01H
EHSWNADL

SEQ ID NO: 1363 - protein, 8 aa, Severe acute respiratory syndrome coronavirus 2
  REGION 1..8: note = Table A: HLA-B*58:01H HLA-A*36:01H HLA-B*35:07H
HSWNADLY

SEQ ID NO: 1364 - protein, 8 aa, Severe acute respiratory syndrome coronavirus 2
  REGION 1..8: note = Table A: HLA-C*04:03H
NADLYKLM

SEQ ID NO: 1365 - protein, 8 aa, Severe acute respiratory syndrome coronavirus 2
  REGION 1..8: note = Table A: HLA-A*32:01H
KLMGHFAW

SEQ ID NO: 1366 - protein, 8 aa, Severe acute respiratory syndrome coronavirus 2
  REGION 1..8: note = Table A: HLA-B*39:06H
GHFAWWTA

SEQ ID NO: 1367 - protein, 8 aa, Severe acute respiratory syndrome coronavirus 2
  REGION 1..8: note = Table A: HLA-B*35:01H
NASSSEAF

SEQ ID NO: 1368 - protein, 8 aa, Severe acute respiratory syndrome coronavirus 2
  REGION 1..8: note = Table A: HLA-B*58:01H
SSSEAFLI

SEQ ID NO: 1369 - protein, 8 aa, Severe acute respiratory syndrome coronavirus 2
  REGION 1..8: note = Table A: HLA-B*45:01H HLA-B*50:01H
SEAFLIGC

SEQ ID NO: 1370 - protein, 8 aa, Severe acute respiratory syndrome coronavirus 2
  REGION 1..8: note = Table A: HLA-C*14:02H HLA-C*14:03M
AFLIGCNY

SEQ ID NO: 1371 - protein, 8 aa, Severe acute respiratory syndrome coronavirus 2
  REGION 1..8: note = Table A: HLA-B*38:02H HLA-B*15:02H HLA-B*39:01H
EQIDGYVM

SEQ ID NO: 1372 - protein, 8 aa, Severe acute respiratory syndrome coronavirus 2
  REGION 1..8: note = Table A: HLA-B*38:02H
MHANYIFW

SEQ ID NO: 1373 - protein, 8 aa, Severe acute respiratory syndrome coronavirus 2
  REGION 1..8: note = Table A: HLA-A*33:01H HLA-A*33:03H
HANYIFWR

SEQ ID NO: 1374 - protein, 8 aa, Severe acute respiratory syndrome coronavirus 2
  REGION 1..8: note = Table A: HLA-C*15:05H HLA-C*15:02H
RNTNPIQL

SEQ ID NO: 1375 - protein, 8 aa, Severe acute respiratory syndrome coronavirus 2
  REGION 1..8: note = Table A: HLA-B*18:01H HLA-C*15:05H HLA-B*35:01M HLA-B*35:08H HLA-B*35:07H HLA-B*38:02H HLA-B*15:02M HLA-B*07:05M HLA-B*15:11M
NPIQLSSY

SEQ ID NO: 1376 - protein, 8 aa, Severe acute respiratory syndrome coronavirus 2
  REGION 1..8: note = Table A: HLA-C*15:05H
SSYSLFDM

SEQ ID NO: 1377 - protein, 8 aa, Severe acute respiratory syndrome coronavirus 2
  REGION 1..8: note = Table A: HLA-A*34:02H
DMSKFPLK

SEQ ID NO: 1378 - protein, 8 aa, Severe acute respiratory syndrome coronavirus 2
  REGION 1..8: note = Table A: HLA-B*58:02M HLA-C*16:01H HLA-B*57:01H HLA-B*08:01H HLA-C*07:01H HLA-C*15:05H HLA-C*15:02H HLA-C*17:01H HLA-C*08:03H HLA-B*07:04H HLA-B*57:03H
MSKFPLKL

SEQ ID NO: 1379 - protein, 8 aa, Severe acute respiratory syndrome coronavirus 2
  REGION 1..8: note = Table A: HLA-C*15:05H
RGTAVMSL

SEQ ID NO: 1380 - protein, 8 aa, Severe acute respiratory syndrome coronavirus 2
  REGION 1..8: note = Table A: HLA-A*03:01H HLA-A*03:02H HLA-A*11:01H HLA-A*11:02H
GTAVMSLK

SEQ ID NO: 1381 - protein, 8 aa, Severe acute respiratory syndrome coronavirus 2
  REGION 1..8: note = Table A: HLA-A*11:02H HLA-A*34:02H
MILSLLSK

SEQ ID NO: 1382 - protein, 8 aa, Severe acute respiratory syndrome coronavirus 2
  REGION 1..8: note = Table A: HLA-B*58:02H
LLSKGRLI

SEQ ID NO: 1383 - protein, 8 aa, Severe acute respiratory syndrome coronavirus 2
  REGION 1..8: note = Table A: HLA-B*41:02H
RENNRVVI

SEQ ID NO: 1384 - protein, 8 aa, Severe acute respiratory syndrome coronavirus 2
  REGION 1..8: note = Table A: HLA-B*35:02H HLA-C*08:01H HLA-B*35:12H HLA-B*38:02H HLA-B*39:01H
VVISSDVL

SEQ ID NO: 1385 - protein, 9 aa, Severe acute respiratory syndrome coronavirus 2
  REGION 1..9: note = Table A: HLA-A*11:303H HLA-A*03:02H HLA-A*11:01H HLA-A*11:02H HLA-A*34:02H
SLVPGFNEK

SEQ ID NO: 1386 - protein, 9 aa, Severe acute respiratory syndrome coronavirus 2
  REGION 1..9: note = Table A: HLA-C*04:03H
FNEKTHVQL

SEQ ID NO: 1387 - protein, 9 aa, Severe acute respiratory syndrome coronavirus 2
  REGION 1..9: note = Table A: HLA-B*38:02H HLA-B*15:10H
THVQLSLPV

SEQ ID NO: 1388 - protein, 9 aa, Severe acute respiratory syndrome coronavirus 2
  REGION 1..9: note = Table A: HLA-B*35:03H HLA-C*15:05H HLA-A*02:04H HLA-B*38:02H HLA-B*15:02H
HVQLSLPVL

SEQ ID NO: 1389 - protein, 9 aa, Severe acute respiratory syndrome coronavirus 2
  REGION 1..9: note = Table A: HLA-A*02:04H HLA-A*02:03H HLA-B*38:02M HLA-B*13:02M
QLSLPVLQV

SEQ ID NO: 1390 - protein, 9 aa, Severe acute respiratory syndrome coronavirus 2
  REGION 1..9: note = Table A: HLA-A*74:01H HLA-A*31:01H
LSLPVLQVR

SEQ ID NO: 1391 - protein, 9 aa, Severe acute respiratory syndrome coronavirus 2
  REGION 1..9: note = Table A: HLA-B*56:01H HLA-B*55:02H HLA-C*15:05H HLA-B*51:01H HLA-B*54:01M
LPVLQVRDV

SEQ ID NO: 1392 - protein, 9 aa, Severe acute respiratory syndrome coronavirus 2
  REGION 1..9: note = Table A: HLA-B*27:05H
VRDVLVRGF

SEQ ID NO: 1393 - protein, 9 aa, Severe acute respiratory syndrome coronavirus 2
  REGION 1..9: note = Table A: HLA-B*38:02H
LVRGFGDSV

SEQ ID NO: 1394 - protein, 9 aa, Severe acute respiratory syndrome coronavirus 2
  REGION 1..9: note = Table A: HLA-C*04:03M HLA-B*35:03M HLA-A*02:07H HLA-B*35:02M HLA-B*35:08H HLA-C*08:01M HLA-C*08:02M HLA-B*35:12M HLA-B*38:02H HLA-B*39:01H HLA-C*05:01H
FGDSVEEVL

SEQ ID NO: 1395 - protein, 9 aa, Severe acute respiratory syndrome coronavirus 2
  REGION 1..9: note = Table A: HLA-A*02:05H
SVEEVLSEA

SEQ ID NO: 1396 - protein, 9 aa, Severe acute respiratory syndrome coronavirus 2
  REGION 1..9: note = Table A: HLA-A*34:02H
EVLSEARQH

SEQ ID NO: 1397 - protein, 9 aa, Severe acute respiratory syndrome coronavirus 2
  REGION 1..9: note = Table A: HLA-A*02:11M HLA-A*02:04H HLA-A*02:05H HLA-B*14:01H HLA-A*02:01H HLA-A*02:02H HLA-A*02:03M HLA-B*38:02M HLA-B*13:01H HLA-B*13:02H
VLSEARQHL

SEQ ID NO: 1398 - protein, 9 aa, Severe acute respiratory syndrome coronavirus 2
  REGION 1..9: note = Table A: HLA-A*26:03H HLA-B*08:01H HLA-A*02:02M HLA-A*02:03M HLA-B*38:02M
HLKDGTCGL

SEQ ID NO: 1399 - protein, 9 aa, Severe acute respiratory syndrome coronavirus 2
  REGION 1..9: note = Table A: HLA-A*02:02H HLA-B*13:02H
GLVEVEKGV

SEQ ID NO: 1400 - protein, 9 aa, Severe acute respiratory syndrome coronavirus 2
  REGION 1..9: note = Table A: HLA-B*45:01M HLA-B*40:02H HLA-B*40:06H HLA-B*41:02H HLA-B*49:01H HLA-B*50:01H
VEVEKGVLP

SEQ ID NO: 1401 - protein, 9 aa, Severe acute respiratory syndrome coronavirus 2
  REGION 1..9: note = Table A: HLA-B*44:05H HLA-B*45:01H HLA-B*40:01H HLA-B*40:02M HLA-B*40:06H HLA-B*41:02H HLA-B*49:01H HLA-B*50:01H
VEKGVLPQL

SEQ ID NO: 1402 - protein, 9 aa, Severe acute respiratory syndrome coronavirus 2
  REGION 1..9: note = Table A: HLA-B*56:01H HLA-B*55:02H HLA-C*15:05H HLA-B*51:01M HLA-B*54:01H
LPQLEQPYV

SEQ ID NO: 1403 - protein, 9 aa, Severe acute respiratory syndrome coronavirus 2
  REGION 1..9: note = Table A: HLA-A*24:02H HLA-A*24:07M HLA-A*23:01H
PQLEQPYVF

SEQ ID NO: 1404 - protein, 9 aa, Severe acute respiratory syndrome coronavirus 2
  REGION 1..9: note = Table A: HLA-A*33:01H HLA-A*33:03M HLA-A*26:03H HLA-A*68:01M HLA-A*34:01M HLA-A*34:02H HLA-A*66:01M
EQPYVFIKR

SEQ ID NO: 1405 - protein, 9 aa, Severe acute respiratory syndrome coronavirus 2
  REGION 1..9: note = Table A: HLA-B*58:01H HLA-B*58:02M HLA-C*16:01H HLA-C*03:04H HLA-A*30:02H HLA-C*15:05H HLA-C*15:02M HLA-A*02:08H HLA-A*02:02H HLA-B*07:04M HLA-B*15:01H HLA-B*57:03H HLA-C*07:04M
RTAPHGHVM

SEQ ID NO: 1406 - protein, 9 aa, Severe acute respiratory syndrome coronavirus 2
  REGION 1..9: note = Table A: HLA-B*51:01H
TAPHGHVMV

SEQ ID NO: 1407 - protein, 9 aa, Severe acute respiratory syndrome coronavirus 2
  REGION 1..9: note = Table A: HLA-B*38:02H
PHGHVMVEL

SEQ ID NO: 1408 - protein, 9 aa, Severe acute respiratory syndrome coronavirus 2
  REGION 1..9: note = Table A: HLA-B*39:06H
GHVMVELVA

SEQ ID NO: 1409 - protein, 9 aa, Severe acute respiratory syndrome coronavirus 2
  REGION 1..9: note = Table A: HLA-B*48:01H HLA-C*14:03H HLA-A*11:303M HLA-B*46:01H HLA-A*02:11H HLA-A*68:02H HLA-C*15:05H HLA-A*02:04M HLA-A*02:05M HLA-A*02:06M HLA-A*02:07M HLA-B*14:01M HLA-A*02:01H HLA-A*02:02H HLA-A*02:03M
  REGION 1..9: note = CONT. FROM ABOVE: HLA-A*24:02H HLA-C*08:01H HLA-B*38:02M HLA- B*15:01H HLA-B*39:01H HLA-B*07:05H
VMVELVAEL

SEQ ID NO: 1410 - protein, 9 aa, Severe acute respiratory syndrome coronavirus 2
  REGION 1..9: note = Table A: HLA-A*68:02H HLA-B*38:02H
ELVAELEGI

SEQ ID NO: 1411 - protein, 9 aa, Severe acute respiratory syndrome coronavirus 2
  REGION 1..9: note = Table A: HLA-A*36:01H HLA-A*01:01M HLA-B*35:01H HLA-B*35:08M HLA-B*38:02H HLA-B*15:01H HLA-B*39:01H
VAELEGIQY

SEQ ID NO: 1412 - protein, 9 aa, Severe acute respiratory syndrome coronavirus 2
  REGION 1..9: note = Table A: HLA-B*45:01M HLA-B*49:01H
AELEGIQYG

SEQ ID NO: 1413 - protein, 9 aa, Severe acute respiratory syndrome coronavirus 2
  REGION 1..9: note = Table A: HLA-A*33:01M HLA-A*33:03M HLA-A*26:03H HLA-A*68:01M HLA-A*34:01M HLA-A*66:01H
ELEGIQYGR

SEQ ID NO: 1414 - protein, 9 aa, Severe acute respiratory syndrome coronavirus 2
  REGION 1..9: note = Table A: HLA-B*45:01M HLA-B*40:06M HLA-B*50:01M
GETLGVLVP

SEQ ID NO: 1415 - protein, 9 aa, Severe acute respiratory syndrome coronavirus 2
  REGION 1..9: note = Table A: HLA-A*33:01H HLA-A*33:03M HLA-A*34:01H HLA-A*34:02H HLA-A*66:01H
ETLGVLVPH

SEQ ID NO: 1416 - protein, 9 aa, Severe acute respiratory syndrome coronavirus 2
  REGION 1..9: note = Table A: HLA-A*02:11M HLA-A*02:04M HLA-A*02:06H HLA-A*02:07H HLA-A*02:01M HLA-A*02:02M HLA-A*02:03M
TLGVLVPHV

SEQ ID NO: 1417 - protein, 9 aa, Severe acute respiratory syndrome coronavirus 2
  REGION 1..9: note = Table A: HLA-A*11:303H HLA-A*02:11H HLA-C*15:05H HLA-A*02:04H HLA-A*02:05H HLA-A*02:06H HLA-A*02:01H HLA-A*02:02M HLA-A*02:03M HLA-B*38:02M HLA-B*13:02H
VLVPHVGEI

SEQ ID NO: 1418 - protein, 9 aa, Severe acute respiratory syndrome coronavirus 2
  REGION 1..9: note = Table A: HLA-B*56:01M HLA-B*55:02M HLA-B*35:03H HLA-C*15:05H HLA-B*55:01H HLA-B*35:02M HLA-B*35:08H HLA-B*51:01H HLA-B*35:07H HLA-C*08:01H HLA-B*35:12H HLA-B*54:01H
VPHVGEIPV

SEQ ID NO: 1419 - protein, 9 aa, Severe acute respiratory syndrome coronavirus 2
  REGION 1..9: note = Table A: HLA-B*39:06H
PHVGEIPVA

SEQ ID NO: 1420 - protein, 9 aa, Severe acute respiratory syndrome coronavirus 2
  REGION 1..9: note = Table A: HLA-C*16:04H HLA-A*25:01H HLA-B*46:01H HLA-A*26:01M HLA-A*26:02M HLA-A*26:03H HLA-A*29:01M HLA-A*29:02M HLA-B*18:01M HLA-B*53:01H HLA-A*30:02M HLA-A*68:01H HLA-A*68:02H HLA-B*35:03H HLA-C*15:05H HLA-C*12:02H
  REGION 1..9: note = CONT. FROM ABOVE: HLA-A*34:01H HLA-A*34:02H HLA-B*35:01H HLA- B*35:02H HLA-B*35:08M HLA-B*35:07H HLA-B*35:12H HLA-B*38:02H HLA-B*15:01M HLA-B*15:02H HLA-B*39:01H HLA-B*07:05M HLA-B*57 :03H HLA-B*15:11H
HVGEIPVAY

SEQ ID NO: 1421 - protein, 9 aa, Severe acute respiratory syndrome coronavirus 2
  REGION 1..9: note = Table A: HLA-A*36:01H HLA-A*33:01H HLA-A*33:03H HLA-A*68:01H HLA-A*31:01H
VGEIPVAYR

SEQ ID NO: 1422 - protein, 9 aa, Severe acute respiratory syndrome coronavirus 2
  REGION 1..9: note = Table A: HLA-B*42:01H HLA-B*07:02H HLA-B*07:04H
IPVAYRKVL

SEQ ID NO: 1423 - protein, 9 aa, Severe acute respiratory syndrome coronavirus 2
  REGION 1..9: note = Table A: HLA-A*74:01M HLA-A*34:02H
VAYRKVLLR

SEQ ID NO: 1424 - protein, 9 aa, Severe acute respiratory syndrome coronavirus 2
  REGION 1..9: note = Table A: HLA-B*15:03H
NKGAGGHSY

SEQ ID NO: 1425 - protein, 9 aa, Severe acute respiratory syndrome coronavirus 2
  REGION 1..9: note = Table A: HLA-C*14:02H HLA-C*14:03H HLA-A*24:02H
SYGADLKSF

SEQ ID NO: 1426 - protein, 9 aa, Severe acute respiratory syndrome coronavirus 2
  REGION 1..9: note = Table A: HLA-C*04:03H HLA-B*35:02H HLA-C*08:01H HLA-C*08:02H HLA-C*05:01H
GADLKSFDL

SEQ ID NO: 1427 - protein, 9 aa, Severe acute respiratory syndrome coronavirus 2
  REGION 1..9: note = Table A: HLA-B*48:01H HLA-B*58:01H HLA-B*58:02H HLA-A*11:303H HLA-A*02:11H HLA-C*15:05H HLA-C*15:02H HLA-A*02:05H HLA-A*02:08M HLA-A*02:02H HLA-C*08:01M HLA-C*08:03H HLA-B*38:02H HLA-B*40:01H HLA-B*39:01H
  REGION 1..9: note = CONT. FROM ABOVE: HLA-B*57:03H HLA-B*13:01H
KSFDLGDEL

SEQ ID NO: 1428 - protein, 9 aa, Severe acute respiratory syndrome coronavirus 2
  REGION 1..9: note = Table A: HLA-A*24:02H HLA-A*24:07M HLA-A*23:01H
PYEDFQENW

SEQ ID NO: 1429 - protein, 9 aa, Severe acute respiratory syndrome coronavirus 2
  REGION 1..9: note = Table A: HLA-A*33:01H HLA-A*33:03H
DFQENWNTK

SEQ ID NO: 1430 - protein, 9 aa, Severe acute respiratory syndrome coronavirus 2
  REGION 1..9: note = Table A: HLA-B*45:01H
QENWNTKHS

SEQ ID NO: 1431 - protein, 9 aa, Severe acute respiratory syndrome coronavirus 2
  REGION 1..9: note = Table A: HLA-B*58:01H HLA-B*58:02H HLA-A*11:303H HLA-C*16:01M HLA-C*16:04M HLA-B*57:01H HLA-C*06:02H HLA-C*03:03M HLA-C*07:01H HLA-B*53:01H HLA-C*03:02H HLA-C*03:04M HLA-A*68:01H HLA-A*68:02M HLA-B*35:03M
  REGION 1..9: note = CONT. FROM ABOVE: HLA-C*15:05M HLA-C*01:02H HLA-C*12:02H HLA- C*12:03H HLA-C*15:02M HLA-A*02:05H HLA-A*02:02M HLA-A*02:03H HLA-A*34:01H HLA-A*34:02H HLA-C*07:27H HLA-B*35:01H HLA-C*08 :01H HLA-B*38:02M HLA-B*07:02H HLA-B*07:04M HLA-B*07:05H
  REGION 1..9: note = CONT. FROM ABOVE: HLA-B*57:03M HLA-C*02:02H HLA-B*13:02H HLA- B*15:10H HLA-C*07:04M HLA-A*66:01H
HSSGVTREL

SEQ ID NO: 1432 - protein, 9 aa, Severe acute respiratory syndrome coronavirus 2
  REGION 1..9: note = Table A: HLA-C*15:05H HLA-B*57:03H
SSGVTRELM

SEQ ID NO: 1433 - protein, 9 aa, Severe acute respiratory syndrome coronavirus 2
  REGION 1..9: note = Table A: HLA-B*58:02H HLA-C*16:01H HLA-A*30:01H HLA-C*15:02H HLA-B*07:04H HLA-B*57:03H
VTRELMREL

SEQ ID NO: 1434 - protein, 9 aa, Severe acute respiratory syndrome coronavirus 2
  REGION 1..9: note = Table A: HLA-B*38:02H HLA-B*39:01M
MRELNGGAY

SEQ ID NO: 1435 - protein, 9 aa, Severe acute respiratory syndrome coronavirus 2
  REGION 1..9: note = Table A: HLA-A*74:01M HLA-A*33:01H HLA-A*33:03H HLA-A*26:03H HLA-A*68:01H HLA-A*34:01H HLA-A*34:02M HLA-A*66:01M
ELNGGAYTR

SEQ ID NO: 1436 - protein, 9 aa, Severe acute respiratory syndrome coronavirus 2
  REGION 1..9: note = Table A: HLA-B*58:01H HLA-B*58:02H HLA-B*57:01M HLA-B*46:01H HLA-C*03:02H HLA-C*12:02H HLA-B*38:02H HLA-B*15:01H HLA-B*15:02H HLA-B*57:03H HLA-C*02:02H
YTRYVDNNF

SEQ ID NO: 1437 - protein, 9 aa, Severe acute respiratory syndrome coronavirus 2
  REGION 1..9: note = Table A: HLA-B*38:02H
TRYVDNNFC

SEQ ID NO: 1438 - protein, 9 aa, Severe acute respiratory syndrome coronavirus 2
  REGION 1..9: note = Table A: HLA-B*35:03H
FCGPDGYPL

SEQ ID NO: 1439 - protein, 9 aa, Severe acute respiratory syndrome coronavirus 2
  REGION 1..9: note = Table A: HLA-C*15:05M
GPDGYPLEC

SEQ ID NO: 1440 - protein, 9 aa, Severe acute respiratory syndrome coronavirus 2
  REGION 1..9: note = Table A: HLA-B*07:04H
YPLECIKDL

SEQ ID NO: 1441 - protein, 9 aa, Severe acute respiratory syndrome coronavirus 2
  REGION 1..9: note = Table A: HLA-A*33:01H HLA-A*33:03M HLA-A*26:03M HLA-A*68:01H HLA-A*34:01H HLA-A*34:02M HLA-A*66:01H
ECIKDLLAR

SEQ ID NO: 1442 - protein, 9 aa, Severe acute respiratory syndrome coronavirus 2
  REGION 1..9: note = Table A: HLA-A*02:03H
CIKDLLARA

SEQ ID NO: 1443 - protein, 9 aa, Severe acute respiratory syndrome coronavirus 2
  REGION 1..9: note = Table A: HLA-C*15:05H
RAGKASCTL

SEQ ID NO: 1444 - protein, 9 aa, Severe acute respiratory syndrome coronavirus 2
  REGION 1..9: note = Table A: HLA-A*02:04H HLA-A*02:05H HLA-A*02:01H HLA-A*02:02M HLA-B*38:02H
TLSEQLDFI

SEQ ID NO: 1445 - protein, 9 aa, Severe acute respiratory syndrome coronavirus 2
  REGION 1..9: note = Table A: HLA-B*45:01H
SEQLDFIDT

SEQ ID NO: 1446 - protein, 9 aa, Severe acute respiratory syndrome coronavirus 2
  REGION 1..9: note = Table A: HLA-B*27:02H HLA-A*68:02H HLA-A*34:02H HLA-B*39:01H
EQLDFIDTK

SEQ ID NO: 1447 - protein, 9 aa, Severe acute respiratory syndrome coronavirus 2
  REGION 1..9: note = Table A: HLA-A*34:01H
QLDFIDTKR

SEQ ID NO: 1448 - protein, 9 aa, Severe acute respiratory syndrome coronavirus 2
  REGION 1..9: note = Table A: HLA-A*36:01M HLA-A*01:01H HLA-B*38:02H HLA-B*15:02H
FIDTKRGVY

SEQ ID NO: 1449 - protein, 9 aa, Severe acute respiratory syndrome coronavirus 2
  REGION 1..9: note = Table A: HLA-B*37:01H
IDTKRGVYC

SEQ ID NO: 1450 - protein, 9 aa, Severe acute respiratory syndrome coronavirus 2
  REGION 1..9: note = Table A: HLA-B*58:01H HLA-B*44:02H HLA-B*44:05H HLA-B*45:01H HLA-B*44:03M HLA-B*37:01H HLA-A*32:01H HLA-B*40:01H HLA-B*40:02H HLA-B*40:06H HLA-B*41:02H HLA-B*57:03H HLA-B*13:01M
REHEHEIAW

SEQ ID NO: 1451 - protein, 9 aa, Severe acute respiratory syndrome coronavirus 2
  REGION 1..9: note = Table A: HLA-B*38:02H HLA-B*39:01M
EHEHEIAWY

SEQ ID NO: 1452 - protein, 9 aa, Severe acute respiratory syndrome coronavirus 2
  REGION 1..9: note = Table A: HLA-B*45:01H HLA-B*40:06M
HEHEIAWYT

SEQ ID NO: 1453 - protein, 9 aa, Severe acute respiratory syndrome coronavirus 2
  REGION 1..9: note = Table A: HLA-A*74:01H HLA-A*34:01H HLA-A*66:01H
HEIAWYTER

SEQ ID NO: 1454 - protein, 9 aa, Severe acute respiratory syndrome coronavirus 2
  REGION 1..9: note = Table A: HLA-B*58:01H HLA-A*36:01H HLA-A*01:01M
YTERSEKSY

SEQ ID NO: 1455 - protein, 9 aa, Severe acute respiratory syndrome coronavirus 2
  REGION 1..9: note = Table A: HLA-B*14:02H HLA-B*14:01H HLA-B*38:01H HLA-B*38:02M HLA-B*39:01M
ERSEKSYEL

SEQ ID NO: 1456 - protein, 9 aa, Severe acute respiratory syndrome coronavirus 2
  REGION 1..9: note = Table A: HLA-B*45:01H HLA-B*40:02H HLA-B*41:02H
SEKSYELQT

SEQ ID NO: 1457 - protein, 9 aa, Severe acute respiratory syndrome coronavirus 2
  REGION 1..9: note = Table A: HLA-B*58:01M HLA-B*58:02H HLA-B*57:01H HLA-C*15:05H HLA-C*12:02H HLA-B*15:01H HLA-B*15:03H HLA-B*57:03H
KSYELQTPF

SEQ ID NO: 1458 - protein, 9 aa, Severe acute respiratory syndrome coronavirus 2
  REGION 1..9: note = Table A: HLA-B*44:05H HLA-B*18:01H HLA-B*38:02H HLA-B*40:01H HLA-B*40:02H HLA-B*40:06H HLA-B*41:02H HLA-B*13:02H HLA-B*49:01H
YELQTPFEI

SEQ ID NO: 1459 - protein, 9 aa, Severe acute respiratory syndrome coronavirus 2
  REGION 1..9: note = Table A: HLA-A*34:02M
ELQTPFEIK

SEQ ID NO: 1460 - protein, 9 aa, Severe acute respiratory syndrome coronavirus 2
  REGION 1..9: note = Table A: HLA-B*48:01H HLA-A*11:303H HLA-C*06:02H HLA-A*02:11H HLA-C*03:04H HLA-A*68:02H HLA-C*15:02H HLA-A*02:04M HLA-A*02:05M HLA-A*02:06H HLA-A*02:07H HLA-A*02:08H HLA-A*02:01H HLA-A*02:02H HLA-C*17:01M
  REGION 1..9: note = CONT. FROM ABOVE: HLA-C*08:01H HLA-B*38:01H HLA-B*38:02M HLA- B*40:06H HLA-B*57:03H HLA-B*13:01H HLA-B*13:02M HLA-C*07:04H
LQTPFEIKL

SEQ ID NO: 1461 - protein, 9 aa, Severe acute respiratory syndrome coronavirus 2
  REGION 1..9: note = Table A: HLA-A*68:02H HLA-A*02:05H
QTPFEIKLA

SEQ ID NO: 1462 - protein, 9 aa, Severe acute respiratory syndrome coronavirus 2
  REGION 1..9: note = Table A: HLA-A*34:01H HLA-A*34:02M HLA-A*66:01H
TPFEIKLAK

SEQ ID NO: 1463 - protein, 9 aa, Severe acute respiratory syndrome coronavirus 2
  REGION 1..9: note = Table A: HLA-B*44:03H
FEIKLAKKF

SEQ ID NO: 1464 - protein, 9 aa, Severe acute respiratory syndrome coronavirus 2
  REGION 1..9: note = Table A: HLA-A*02:02H HLA-A*24:07H HLA-A*32:01H HLA-B*57:03H HLA-B*13:01M
KLAKKFDTF

SEQ ID NO: 1465 - protein, 9 aa, Severe acute respiratory syndrome coronavirus 2
  REGION 1..9: note = Table A: HLA-B*45:01H HLA-B*40:06H HLA-B*50:01M
GECPNFVFP

SEQ ID NO: 1466 - protein, 9 aa, Severe acute respiratory syndrome coronavirus 2
  REGION 1..9: note = Table A: HLA-B*38:02H
FVFPLNSII

SEQ ID NO: 1467 - protein, 9 aa, Severe acute respiratory syndrome coronavirus 2
  REGION 1..9: note = Table A: HLA-B*56:01H HLA-B*55:02H HLA-B*35:07H HLA-B*54:01M
FPLNSIIKT

SEQ ID NO: 1468 - protein, 9 aa, Severe acute respiratory syndrome coronavirus 2
  REGION 1..9: note = Table A: HLA-A*02:04H HLA-A*02:02H HLA-A*02:03H
PLNSIIKTI

SEQ ID NO: 1469 - protein, 9 aa, Severe acute respiratory syndrome coronavirus 2
  REGION 1..9: note = Table A: HLA-A*74:01H HLA-A*11:01H HLA-A*11:02M HLA-A*33:01H HLA-A*33:03M HLA-A*26:03M HLA-A*68:01M HLA-A*34:01H HLA-A*34:02H HLA-A*31:01H HLA-A*66:01H
SIIKTIQPR

SEQ ID NO: 1470 - protein, 9 aa, Severe acute respiratory syndrome coronavirus 2
  REGION 1..9: note = Table A: HLA-A*02:11H HLA-A*30:01H HLA-B*13:02H
IIKTIQPRV

SEQ ID NO: 1471 - protein, 9 aa, Severe acute respiratory syndrome coronavirus 2
  REGION 1..9: note = Table A: HLA-A*11:303M HLA-A*74:01M HLA-A*03:01M HLA-A*03:02M HLA-A*11:01H HLA-A*11:02H HLA-A*36:01H HLA-A*30:01M HLA-A*30:02H HLA-A*34:02M HLA-C*07:27M HLA-A*31:01H HLA-B*57:03H HLA-A*66:01H
KTIQPRVEK

SEQ ID NO: 1472 - protein, 9 aa, Severe acute respiratory syndrome coronavirus 2
  REGION 1..9: note = Table A: HLA-A*03:02H
TIQPRVEKK

SEQ ID NO: 1473 - protein, 9 aa, Severe acute respiratory syndrome coronavirus 2
  REGION 1..9: note = Table A: HLA-B*07:02H HLA-B*07:04M
QPRVEKKKL

SEQ ID NO: 1474 - protein, 9 aa, Severe acute respiratory syndrome coronavirus 2
  REGION 1..9: note = Table A: HLA-B*13:01H
KLDGFMGRI

SEQ ID NO: 1475 - protein, 9 aa, Severe acute respiratory syndrome coronavirus 2
  REGION 1..9: note = Table A: HLA-C*14:03H
GFMGRIRSV

SEQ ID NO: 1476 - protein, 9 aa, Severe acute respiratory syndrome coronavirus 2
  REGION 1..9: note = Table A: HLA-A*30:02H HLA-B*38:02H HLA-B*15:02H
FMGRIRSVY

SEQ ID NO: 1477 - protein, 9 aa, Severe acute respiratory syndrome coronavirus 2
  REGION 1..9: note = Table A: HLA-B*27:05H
GRIRSVYPV

SEQ ID NO: 1478 - protein, 9 aa, Severe acute respiratory syndrome coronavirus 2
  REGION 1..9: note = Table A: HLA-A*30:01H
RIRSVYPVA

SEQ ID NO: 1479 - protein, 9 aa, Severe acute respiratory syndrome coronavirus 2
  REGION 1..9: note = Table A: HLA-B*56:01M HLA-B*55:02M HLA-B*35:03M HLA-C*15:05M HLA-B*55:01H HLA-B*35:01H HLA-B*35:02H HLA-B*51:01H HLA-B*35:12H HLA-B*38:02H HLA-B*39:06H HLA-B*54:01H HLA-B*07:05H
YPVASPNEC

SEQ ID NO: 1480 - protein, 9 aa, Severe acute respiratory syndrome coronavirus 2
  REGION 1..9: note = Table A: HLA-C*15:05H
SPNECNQMC

SEQ ID NO: 1481 - protein, 9 aa, Severe acute respiratory syndrome coronavirus 2
  REGION 1..9: note = Table A: HLA-B*38:02H HLA-B*15:02H
NQMCLSTLM

SEQ ID NO: 1482 - protein, 9 aa, Severe acute respiratory syndrome coronavirus 2
  REGION 1..9: note = Table A: HLA-A*25:01H HLA-A*26:01H HLA-A*26:02H HLA-A*66:01H
ETSWQTGDF

SEQ ID NO: 1483 - protein, 9 aa, Severe acute respiratory syndrome coronavirus 2
  REGION 1..9: note = Table A: HLA-B*13:02H
TSWQTGDFV

SEQ ID NO: 1484 - protein, 9 aa, Severe acute respiratory syndrome coronavirus 2
  REGION 1..9: note = Table A: HLA-A*02:05H HLA-A*02:06H
WQTGDFVKA

SEQ ID NO: 1485 - protein, 9 aa, Severe acute respiratory syndrome coronavirus 2
  REGION 1..9: note = Table A: HLA-A*68:02H
QTGDFVKAT

SEQ ID NO: 1486 - protein, 9 aa, Severe acute respiratory syndrome coronavirus 2
  REGION 1..9: note = Table A: HLA-C*14:03H HLA-A*24:02H HLA-A*24:07H HLA-A*23:01H HLA-B*38:02H HLA-B*15:02H HLA-B*07:05H
DFVKATCEF

SEQ ID NO: 1487 - protein, 9 aa, Severe acute respiratory syndrome coronavirus 2
  REGION 1..9: note = Table A: HLA-B*44:05H HLA-B*40:01H HLA-B*40:02H HLA-B*41:02H HLA-B*49:01H
CEFCGTENL

SEQ ID NO: 1488 - protein, 9 aa, Severe acute respiratory syndrome coronavirus 2
  REGION 1..9: note = Table A: HLA-A*34:02H
FCGTENLTK

SEQ ID NO: 1489 - protein, 9 aa, Severe acute respiratory syndrome coronavirus 2
  REGION 1..9: note = Table A: HLA-B*45:01M HLA-B*50:01H
TENLTKEGA

SEQ ID NO: 1490 - protein, 9 aa, Severe acute respiratory syndrome coronavirus 2
  REGION 1..9: note = Table A: HLA-A*02:08H HLA-A*02:03H
LTKEGATTC

SEQ ID NO: 1491 - protein, 9 aa, Severe acute respiratory syndrome coronavirus 2
  REGION 1..9: note = Table A: HLA-B*44:03H
KEGATTCGY

SEQ ID NO: 1492 - protein, 9 aa, Severe acute respiratory syndrome coronavirus 2
  REGION 1..9: note = Table A: HLA-B*52:01H
CGYLPQNAV

SEQ ID NO: 1493 - protein, 9 aa, Severe acute respiratory syndrome coronavirus 2
  REGION 1..9: note = Table A: HLA-C*14:03H HLA-B*39:01H
GYLPQNAVV

SEQ ID NO: 1494 - protein, 9 aa, Severe acute respiratory syndrome coronavirus 2
  REGION 1..9: note = Table A: HLA-A*34:02H
YLPQNAVVK

SEQ ID NO: 1495 - protein, 9 aa, Severe acute respiratory syndrome coronavirus 2
  REGION 1..9: note = Table A: HLA-B*42:01H HLA-B*56:01H HLA-B*53:01H HLA-B*55:02H HLA-B*35:03H HLA-C*15:05M HLA-B*35:01H HLA-B*35:02H HLA-B*51:01H HLA-B*35:07H HLA-B*35:12H HLA-B*38:02H HLA-B*54:01H HLA-B*07:04H HLA-B*07:05H
LPQNAVVKI

SEQ ID NO: 1496 - protein, 9 aa, Severe acute respiratory syndrome coronavirus 2
  REGION 1..9: note = Table A: HLA-A*30:02H HLA-B*15:01H
PQNAVVKIY

SEQ ID NO: 1497 - protein, 9 aa, Severe acute respiratory syndrome coronavirus 2
  REGION 1..9: note = Table A: HLA-B*56:01H HLA-B*55:02H HLA-A*02:05H
AVVKIYCPA

SEQ ID NO: 1498 - protein, 9 aa, Severe acute respiratory syndrome coronavirus 2
  REGION 1..9: note = Table A: HLA-C*15:05H
CPACHNSEV

SEQ ID NO: 1499 - protein, 9 aa, Severe acute respiratory syndrome coronavirus 2
  REGION 1..9: note = Table A: HLA-B*35:01H HLA-B*07:05H
HNSEVGPEH

SEQ ID NO: 1500 - protein, 9 aa, Severe acute respiratory syndrome coronavirus 2
  REGION 1..9: note = Table A: HLA-B*48:01M HLA-A*11:303H HLA-B*44:02M HLA-B*44:05H HLA-C*16:04M HLA-B*45:01M HLA-B*44:03H HLA-B*18:01H HLA-B*27:02H HLA-A*68:02H HLA-B*35:03H HLA-A*02:05H HLA-B*14:01H HLA-B*35:02M HLA-C*08:01H
  REGION 1..9: note = CONT. FROM ABOVE: HLA-B*35:12M HLA-B*37:01M HLA-B*38:01H HLA- B*38:02H HLA-B*40:01H HLA-B*40:02H HLA-B*40:06H HLA-B*39:01H HLA-B*07:05H HLA-B*41:02H HLA-B*13:01H HLA-B*49:01M HLA-C*07 :04H HLA-B*50:01M
SEVGPEHSL

SEQ ID NO: 1501 - protein, 9 aa, Severe acute respiratory syndrome coronavirus 2
  REGION 1..9: note = Table A: HLA-A*26:03M HLA-A*68:02H HLA-A*34:01M
EVGPEHSLA

SEQ ID NO: 1502 - protein, 9 aa, Severe acute respiratory syndrome coronavirus 2
  REGION 1..9: note = Table A: HLA-B*35:01M HLA-B*35:08H HLA-B*35:07H HLA-B*07:05H
GPEHSLAEY

SEQ ID NO: 1503 - protein, 9 aa, Severe acute respiratory syndrome coronavirus 2
  REGION 1..9: note = Table A: HLA-A*02:02M
SLAEYHNES

SEQ ID NO: 1504 - protein, 9 aa, Severe acute respiratory syndrome coronavirus 2
  REGION 1..9: note = Table A: HLA-B*44:05M HLA-B*45:01M HLA-B*44:03H HLA-B*37:01H HLA-B*40:01H HLA-B*40:02M HLA-B*41:02M HLA-B*49:01H HLA-B*50:01M
AEYHNESGL

SEQ ID NO: 1505 - protein, 9 aa, Severe acute respiratory syndrome coronavirus 2
  REGION 1..9: note = Table A: HLA-A*33:03H HLA-A*34:02H
EYHNESGLK

SEQ ID NO: 1506 - protein, 9 aa, Severe acute respiratory syndrome coronavirus 2
  REGION 1..9: note = Table A: HLA-B*38:01H HLA-B*38:02M HLA-B*39:06H HLA-B*39:01M HLA-B*15:10M
YHNESGLKT

SEQ ID NO: 1507 - protein, 9 aa, Severe acute respiratory syndrome coronavirus 2
  REGION 1..9: note = Table A: HLA-B*44:02H HLA-B*44:05H HLA-B*45:01H HLA-B*44:03M HLA-B*18:01M HLA-B*40:01H HLA-B*40:02H HLA-B*39:01H HLA-B*07:05M HLA-B*41:02H HLA-B*49:01H
NESGLKTIL

SEQ ID NO: 1508 - protein, 9 aa, Severe acute respiratory syndrome coronavirus 2
  REGION 1..9: note = Table A: HLA-A*33:01H HLA-A*33:03H HLA-A*26:03H HLA-A*68:01M HLA-A*34:01H HLA-A*34:02M HLA-A*66:01M
ESGLKTILR

SEQ ID NO: 1509 - protein, 9 aa, Severe acute respiratory syndrome coronavirus 2
  REGION 1..9: note = Table A: HLA-A*11:303H HLA-A*03:01H HLA-A*11:01M HLA-A*11:02M HLA-A*34:02M HLA-C*07:27H
SGLKTILRK

SEQ ID NO: 1510 - protein, 9 aa, Severe acute respiratory syndrome coronavirus 2
  REGION 1..9: note = Table A: HLA-B*38:02H
ILRKGGRTI

SEQ ID NO: 1511 - protein, 9 aa, Severe acute respiratory syndrome coronavirus 2
  REGION 1..9: note = Table A: HLA-B*15:03M
RKGGRTIAF

SEQ ID NO: 1512 - protein, 9 aa, Severe acute respiratory syndrome coronavirus 2
  REGION 1..9: note = Table A: HLA-B*38:02H HLA-B*15:01H HLA-B*15:02M HLA-B*07:05H
TIAFGGCVF

SEQ ID NO: 1513 - protein, 9 aa, Severe acute respiratory syndrome coronavirus 2
  REGION 1..9: note = Table A: HLA-A*29:01H HLA-A*29:02H
AFGGCVFSY

SEQ ID NO: 1514 - protein, 9 aa, Severe acute respiratory syndrome coronavirus 2
  REGION 1..9: note = Table A: HLA-A*11:02H HLA-A*34:02M
FSYVGCHNK

SEQ ID NO: 1515 - protein, 9 aa, Severe acute respiratory syndrome coronavirus 2
  REGION 1..9: note = Table A: HLA-C*14:03H HLA-B*56:01H HLA-B*55:02H HLA-B*55:01H HLA-B*39:06H HLA-B*54:01H
AYWVPRASA

SEQ ID NO: 1516 - protein, 9 aa, Severe acute respiratory syndrome coronavirus 2
  REGION 1..9: note = Table A: HLA-B*39:01M
NHTGVVGEG

SEQ ID NO: 1517 - protein, 9 aa, Severe acute respiratory syndrome coronavirus 2
  REGION 1..9: note = Table A: HLA-A*02:05M HLA-A*02:08H HLA-A*02:02H
VVGEGSEGL

SEQ ID NO: 1518 - protein, 9 aa, Severe acute respiratory syndrome coronavirus 2
  REGION 1..9: note = Table A: HLA-B*44:05M HLA-B*40:01H HLA-B*40:02H HLA-B*41:02H
SEGLNDNLL

SEQ ID NO: 1519 - protein, 9 aa, Severe acute respiratory syndrome coronavirus 2
  REGION 1..9: note = Table A: HLA-A*02:04M HLA-A*02:01M HLA-A*02:02H HLA-A*02:03H HLA-B*38:02H HLA-B*13:02H
GLNDNLLEI

SEQ ID NO: 1520 - protein, 9 aa, Severe acute respiratory syndrome coronavirus 2
  REGION 1..9: note = Table A: HLA-B*40:02H HLA-B*41:02H HLA-B*49:01M
LEILQKEKV

SEQ ID NO: 1521 - protein, 9 aa, Severe acute respiratory syndrome coronavirus 2
  REGION 1..9: note = Table A: HLA-A*02:11H HLA-B*13:01H HLA-B*13:02H
ILQKEKVNI

SEQ ID NO: 1522 - protein, 9 aa, Severe acute respiratory syndrome coronavirus 2
  REGION 1..9: note = Table A: HLA-B*45:01M HLA-B*40:02M HLA-B*40:06M HLA-B*41:02M HLA-B*49:01M HLA-B*50:01H
KEKVNINIV

SEQ ID NO: 1523 - protein, 9 aa, Severe acute respiratory syndrome coronavirus 2
  REGION 1..9: note = Table A: HLA-A*26:01H
VNINIVGDF

SEQ ID NO: 1524 - protein, 9 aa, Severe acute respiratory syndrome coronavirus 2
  REGION 1..9: note = Table A: HLA-B*40:02H
GDFKLNEEI

SEQ ID NO: 1525 - protein, 9 aa, Severe acute respiratory syndrome coronavirus 2
  REGION 1..9: note = Table A: HLA-A*02:11M HLA-A*02:04H HLA-A*02:02M HLA-A*02:03H HLA-B*38:02H HLA-B*13:01H HLA-B*13:02H
KLNEEIAII

SEQ ID NO: 1526 - protein, 9 aa, Severe acute respiratory syndrome coronavirus 2
  REGION 1..9: note = Table A: HLA-B*45:01M
NEEIAIILA

SEQ ID NO: 1527 - protein, 9 aa, Severe acute respiratory syndrome coronavirus 2
  REGION 1..9: note = Table A: HLA-A*25:01H HLA-A*26:01H HLA-A*26:02H HLA-A*26:03H HLA-A*68:02M HLA-A*34:01M HLA-A*34:02H HLA-B*35:01H HLA-B*38:02H HLA-B*15:02H HLA-B*07:05H HLA-A*66:01H
EIAIILASF

SEQ ID NO: 1528 - protein, 9 aa, Severe acute respiratory syndrome coronavirus 2
  REGION 1..9: note = Table A: HLA-B*55:02H
AIILASFSA

SEQ ID NO: 1529 - protein, 9 aa, Severe acute respiratory syndrome coronavirus 2
  REGION 1..9: note = Table A: HLA-A*02:02H HLA-A*02:03H HLA-B*38:02H
ILASFSAST

SEQ ID NO: 1530 - protein, 9 aa, Severe acute respiratory syndrome coronavirus 2
  REGION 1..9: note = Table A: HLA-C*14:02H HLA-C*14:03H HLA-B*46:01H HLA-C*04:01H HLA-C*15:05H HLA-A*24:07H HLA-B*38:02H HLA-B*15:01H HLA-B*15:02M HLA-B*07:05M
SFSASTSAF

SEQ ID NO: 1531 - protein, 9 aa, Severe acute respiratory syndrome coronavirus 2
  REGION 1..9: note = Table A: HLA-A*68:02H
FSASTSAFV

SEQ ID NO: 1532 - protein, 9 aa, Severe acute respiratory syndrome coronavirus 2
  REGION 1..9: note = Table A: HLA-C*16:04H HLA-A*02:11H HLA-A*68:02H HLA-C*15:05M HLA-C*15:02H HLA-A*02:04H HLA-A*02:05M HLA-A*02:06H HLA-A*02:08M HLA-A*02:01M HLA-A*02:02H HLA-A*02:03H HLA-B*38:02M HLA-B*07:05H HLA-B*13:02H
STSAFVETV

SEQ ID NO: 1533 - protein, 9 aa, Severe acute respiratory syndrome coronavirus 2
  REGION 1..9: note = Table A: HLA-A*03:02H HLA-A*11:01M HLA-A*11:02H HLA-A*36:01H HLA-B*27:02H HLA-A*68:01M HLA-A*68:02H HLA-A*34:02M
TSAFVETVK

SEQ ID NO: 1534 - protein, 9 aa, Severe acute respiratory syndrome coronavirus 2
  REGION 1..9: note = Table A: HLA-C*14:02H HLA-C*14:03M
AFVETVKGL

SEQ ID NO: 1535 - protein, 9 aa, Severe acute respiratory syndrome coronavirus 2
  REGION 1..9: note = Table A: HLA-B*44:02H HLA-B*44:03M HLA-B*18:01H HLA-B*07:05H
VETVKGLDY

SEQ ID NO: 1536 - protein, 9 aa, Severe acute respiratory syndrome coronavirus 2
  REGION 1..9: note = Table A: HLA-A*36:01H HLA-A*33:03H HLA-A*26:03H HLA-A*68:01H HLA-A*68:02H HLA-A*34:01H HLA-A*34:02H HLA-A*66:01H
ETVKGLDYK

SEQ ID NO: 1537 - protein, 9 aa, Severe acute respiratory syndrome coronavirus 2
  REGION 1..9: note = Table A: HLA-A*11:02H HLA-A*36:01H HLA-A*30:01H HLA-A*30:02H
KGLDYKAFK

SEQ ID NO: 1538 - protein, 9 aa, Severe acute respiratory syndrome coronavirus 2
  REGION 1..9: note = Table A: HLA-B*57:03H
KAFKQIVES

SEQ ID NO: 1539 - protein, 9 aa, Severe acute respiratory syndrome coronavirus 2
  REGION 1..9: note = Table A: HLA-B*08:01H HLA-B*38:02H HLA-B*39:06H
AFKQIVESC

SEQ ID NO: 1540 - protein, 9 aa, Severe acute respiratory syndrome coronavirus 2
  REGION 1..9: note = Table A: HLA-A*26:02H HLA-B*15:02H
QIVESCGNF

SEQ ID NO: 1541 - protein, 9 aa, Severe acute respiratory syndrome coronavirus 2
  REGION 1..9: note = Table A: HLA-A*03:02H
IVESCGNFK

SEQ ID NO: 1542 - protein, 9 aa, Severe acute respiratory syndrome coronavirus 2
  REGION 1..9: note = Table A: HLA-B*49:01H
VESCGNFKV

SEQ ID NO: 1543 - protein, 9 aa, Severe acute respiratory syndrome coronavirus 2
  REGION 1..9: note = Table A: HLA-A*11:01H HLA-A*11:02H HLA-A*34:02H
SCGNFKVTK

SEQ ID NO: 1544 - protein, 9 aa, Severe acute respiratory syndrome coronavirus 2
  REGION 1..9: note = Table A: HLA-A*03:02H HLA-A*11:02H HLA-A*34:02H
GNFKVTKGK

SEQ ID NO: 1545 - protein, 9 aa, Severe acute respiratory syndrome coronavirus 2
  REGION 1..9: note = Table A: HLA-B*58:02H HLA-B*07:04H HLA-B*57:03M
KAKKGAWNI

SEQ ID NO: 1546 - protein, 9 aa, Severe acute respiratory syndrome coronavirus 2
  REGION 1..9: note = Table A: HLA-A*11:01H HLA-A*11:02H HLA-B*27:02H HLA-A*68:01H HLA-A*34:02M
GAWNIGEQK

SEQ ID NO: 1547 - protein, 9 aa, Severe acute respiratory syndrome coronavirus 2
  REGION 1..9: note = Table A: HLA-B*45:01H HLA-B*40:02H HLA-B*40:06M HLA-B*41:02H HLA-B*50:01M
GEQKSILSP

SEQ ID NO: 1548 - protein, 9 aa, Severe acute respiratory syndrome coronavirus 2
  REGION 1..9: note = Table A: HLA-B*15:03M
QKSILSPLY

SEQ ID NO: 1549 - protein, 9 aa, Severe acute respiratory syndrome coronavirus 2
  REGION 1..9: note = Table A: HLA-C*15:02H
KSILSPLYA

SEQ ID NO: 1550 - protein, 9 aa, Severe acute respiratory syndrome coronavirus 2
  REGION 1..9: note = Table A: HLA-A*11:303H HLA-A*29:02H HLA-A*02:04H HLA-B*38:02H HLA-B*15:02H
SILSPLYAF

SEQ ID NO: 1551 - protein, 9 aa, Severe acute respiratory syndrome coronavirus 2
  REGION 1..9: note = Table A: HLA-A*02:11H HLA-A*02:07H HLA-A*02:01H HLA-A*02:02M HLA-A*02:03H HLA-B*38:02H
ILSPLYAFA

SEQ ID NO: 1552 - protein, 9 aa, Severe acute respiratory syndrome coronavirus 2
  REGION 1..9: note = Table A: HLA-A*33:01H HLA-A*33:03H HLA-A*26:03H HLA-A*68:01M HLA-A*34:01M HLA-A*34:02H HLA-A*66:01M
YAFASEAAR

SEQ ID NO: 1553 - protein, 9 aa, Severe acute respiratory syndrome coronavirus 2
  REGION 1..9: note = Table A: HLA-B*58:02H HLA-A*11:303M HLA-C*16:01H HLA-C*16:04M HLA-B*46:01H HLA-C*06:02M HLA-C*03:03M HLA-C*12:05H HLA-B*53:01H HLA-C*03:02M HLA-C*03:04H HLA-A*68:02H HLA-B*35:03M HLA-C*15:05M HLA-C*12:02M
  REGION 1..9: note = CONT. FROM ABOVE: HLA-C*12:03H HLA-C*15:02M HLA-A*02:05H HLA- A*02:06H HLA-A*02:02H HLA-A*02:03H HLA-A*34:01H HLA-C*07:27H HLA-B*35:01H HLA-B*35:02H HLA-B*51:01M HLA-C*17:01H HLA-B*35 :07H HLA-C*08:01H HLA-B*38:02M HLA-B*07:04M HLA-C*02:02M
  REGION 1..9: note = CONT. FROM ABOVE: HLA-B*13:02H HLA-B*15:10H HLA-C*07:04H
FASEAARVV

SEQ ID NO: 1554 - protein, 9 aa, Severe acute respiratory syndrome coronavirus 2
  REGION 1..9: note = Table A: HLA-A*74:01H HLA-A*68:01H HLA-A*31:01H
ASEAARVVR

SEQ ID NO: 1555 - protein, 9 aa, Severe acute respiratory syndrome coronavirus 2
  REGION 1..9: note = Table A: HLA-B*45:01H
SEAARVVRS

SEQ ID NO: 1556 - protein, 9 aa, Severe acute respiratory syndrome coronavirus 2
  REGION 1..9: note = Table A: HLA-B*58:02H HLA-A*25:01H HLA-B*53:01H HLA-A*68:02M HLA-A*34:01H HLA-B*51:01H HLA-B*38:02H
EAARVVRSI

SEQ ID NO: 1557 - protein, 9 aa, Severe acute respiratory syndrome coronavirus 2
  REGION 1..9: note = Table A: HLA-B*46:01H HLA-C*03:02H HLA-C*12:02H HLA-B*07:02M HLA-B*07:04M HLA-B*57:03H
AARVVRSIF

SEQ ID NO: 1558 - protein, 9 aa, Severe acute respiratory syndrome coronavirus 2
  REGION 1..9: note = Table A: HLA-A*74:01H HLA-A*11:01H HLA-A*11:02H HLA-A*31:01M HLA-A*66:01H
RVVRSIFSR

SEQ ID NO: 1559 - protein, 9 aa, Severe acute respiratory syndrome coronavirus 2
  REGION 1..9: note = Table A: HLA-A*74:01H HLA-A*30:01H HLA-A*31:01H
VVRSIFSRT

SEQ ID NO: 1560 - protein, 9 aa, Severe acute respiratory syndrome coronavirus 2
  REGION 1..9: note = Table A: HLA-C*06:02H HLA-C*07:01H HLA-B*14:02H
VRSIFSRTL

SEQ ID NO: 1561 - protein, 9 aa, Severe acute respiratory syndrome coronavirus 2
  REGION 1..9: note = Table A: HLA-A*03:01H HLA-A*11:02H HLA-B*08:01H HLA-A*02:11H HLA-C*03:02H HLA-A*68:02H HLA-C*15:05H HLA-C*12:03H HLA-C*15:02H HLA-A*02:03H HLA-A*34:02H HLA-B*38:02H HLA-B*13:02H
SIFSRTLET

SEQ ID NO: 1562 - protein, 9 aa, Severe acute respiratory syndrome coronavirus 2
  REGION 1..9: note = Table A: HLA-B*38:02H HLA-B*39:01H
TLETAQNSV

SEQ ID NO: 1563 - protein, 9 aa, Severe acute respiratory syndrome coronavirus 2
  REGION 1..9: note = Table A: HLA-B*49:01H
LETAQNSVR

SEQ ID NO: 1564 - protein, 9 aa, Severe acute respiratory syndrome coronavirus 2
  REGION 1..9: note = Table A: HLA-A*33:03H HLA-A*26:01M HLA-A*26:02M HLA-A*26:03H HLA-A*68:01M HLA-A*68:02H HLA-A*34:01M HLA-A*34:02M HLA-A*66:01M
ETAQNSVRV

SEQ ID NO: 1565 - protein, 9 aa, Severe acute respiratory syndrome coronavirus 2
  REGION 1..9: note = Table A: HLA-B*42:01H HLA-B*58:02M HLA-C*14:03H HLA-A*11:303M HLA-C*16:01H HLA-C*16:04H HLA-B*46:01H HLA-C*06:02M HLA-C*03:03H HLA-C*12:05H HLA-B*53:01H HLA-C*03:02M HLA-C*03:04H HLA-B*35:03H HLA-C*15:05M
  REGION 1..9: note = CONT. FROM ABOVE: HLA-C*01:02H HLA-C*12:02M HLA-C*12:03H HLA- C*15:02H HLA-C*07:27M HLA-B*35:01H HLA-C*17:01M HLA-B*35:07H HLA-C*08:01M HLA-B*38:02M HLA-B*07:02H HLA-B*07:04H HLA-B*15 :02H HLA-B*39:01H HLA-B*41:02H HLA-C*02:02H HLA-B*15:10H
  REGION 1..9: note = CONT. FROM ABOVE: HLA-C*07:04M
TAQNSVRVL

SEQ ID NO: 1566 - protein, 9 aa, Severe acute respiratory syndrome coronavirus 2
  REGION 1..9: note = Table A: HLA-A*31:01H
AQNSVRVLQ

SEQ ID NO: 1567 - protein, 9 aa, Severe acute respiratory syndrome coronavirus 2
  REGION 1..9: note = Table A: HLA-A*34:02H
QNSVRVLQK

SEQ ID NO: 1568 - protein, 9 aa, Severe acute respiratory syndrome coronavirus 2
  REGION 1..9: note = Table A: HLA-A*02:05H
NSVRVLQKA

SEQ ID NO: 1569 - protein, 9 aa, Severe acute respiratory syndrome coronavirus 2
  REGION 1..9: note = Table A: HLA-B*55:02H HLA-B*55:01H
SVRVLQKAA

SEQ ID NO: 1570 - protein, 9 aa, Severe acute respiratory syndrome coronavirus 2
  REGION 1..9: note = Table A: HLA-B*14:02H HLA-B*14:01H
VRVLQKAAI

SEQ ID NO: 1571 - protein, 9 aa, Severe acute respiratory syndrome coronavirus 2
  REGION 1..9: note = Table A: HLA-B*52:01H HLA-B*13:02H
VLQKAAITI

SEQ ID NO: 1572 - protein, 9 aa, Severe acute respiratory syndrome coronavirus 2
  REGION 1..9: note = Table A: HLA-B*15:01H
LQKAAITIL

SEQ ID NO: 1573 - protein, 9 aa, Severe acute respiratory syndrome coronavirus 2
  REGION 1..9: note = Table A: HLA-C*12:05M HLA-A*02:11H HLA-A*68:02H HLA-A*02:05M HLA-A*02:06H HLA-A*02:08H HLA-C*08:01H HLA-B*38:02M HLA-B*13:02H
AAITILDGI

SEQ ID NO: 1574 - protein, 9 aa, Severe acute respiratory syndrome coronavirus 2
  REGION 1..9: note = Table A: HLA-C*14:03H HLA-A*11:303M HLA-A*25:01M HLA-B*46:01H HLA-A*26:01M HLA-A*26:02H HLA-A*26:03M HLA-A*29:01M HLA-A*29:02M HLA-B*44:03H HLA-B*18:01H HLA-C*07:01H HLA-B*27:02H HLA-C*03:02M HLA-A*30:02M
  REGION 1..9: note = CONT. FROM ABOVE: HLA-C*15:05H HLA-C*12:02M HLA-C*12:03H HLA- A*02:03H HLA-A*34:01H HLA-A*34:02H HLA-B*35:01H HLA-B*35:08H HLA-B*35:07M HLA-B*15:13H HLA-B*38:02H HLA-B*15:01H HLA-B*15 :02H HLA-B*15:03H HLA-B*39:01M HLA-B*07:05M HLA-C*02:02H
  REGION 1..9: note = CONT. FROM ABOVE: HLA-B*15:11M
TILDGISQY

SEQ ID NO: 1575 - protein, 9 aa, Severe acute respiratory syndrome coronavirus 2
  REGION 1..9: note = Table A: HLA-A*33:01M HLA-A*33:03H HLA-A*26:03M HLA-A*68:01H HLA-A*34:01M HLA-A*66:01M
DGISQYSLR

SEQ ID NO: 1576 - protein, 9 aa, Severe acute respiratory syndrome coronavirus 2
  REGION 1..9: note = Table A: HLA-B*58:02M HLA-C*15:02H
ISQYSLRLI

SEQ ID NO: 1577 - protein, 9 aa, Severe acute respiratory syndrome coronavirus 2
  REGION 1..9: note = Table A: HLA-C*08:01H HLA-B*57:03H
YSLRLIDAM

SEQ ID NO: 1578 - protein, 9 aa, Severe acute respiratory syndrome coronavirus 2
  REGION 1..9: note = Table A: HLA-B*38:02H HLA-B*15:02M
SLRLIDAMM

SEQ ID NO: 1579 - protein, 9 aa, Severe acute respiratory syndrome coronavirus 2
  REGION 1..9: note = Table A: HLA-B*13:02H
RLIDAMMFT

SEQ ID NO: 1580 - protein, 9 aa, Severe acute respiratory syndrome coronavirus 2
  REGION 1..9: note = Table A: HLA-A*68:02H HLA-B*35:03H HLA-C*15:05M HLA-A*34:01H HLA-B*35:01H HLA-B*51:01M HLA-B*38:02H HLA-B*07:05M
DAMMFTSDL

SEQ ID NO: 1581 - protein, 9 aa, Severe acute respiratory syndrome coronavirus 2
  REGION 1..9: note = Table A: HLA-B*38:02H
MMFTSDLAT

SEQ ID NO: 1582 - protein, 9 aa, Severe acute respiratory syndrome coronavirus 2
  REGION 1..9: note = Table A: HLA-C*04:03M HLA-C*15:05H HLA-C*08:02H HLA-B*38:02H HLA-B*39:01H HLA-C*05:01M
TSDLATNNL

SEQ ID NO: 1583 - protein, 9 aa, Severe acute respiratory syndrome coronavirus 2
  REGION 1..9: note = Table A: HLA-B*38:02H
DLATNNLVV

SEQ ID NO: 1584 - protein, 9 aa, Severe acute respiratory syndrome coronavirus 2
  REGION 1..9: note = Table A: HLA-A*11:303H HLA-C*03:03H HLA-C*12:05H HLA-C*03:02H HLA-C*03:04H
LATNNLVVM

SEQ ID NO: 1585 - protein, 9 aa, Severe acute respiratory syndrome coronavirus 2
  REGION 1..9: note = Table A: HLA-A*68:02H HLA-A*02:08H
ATNNLVVMA

SEQ ID NO: 1586 - protein, 9 aa, Severe acute respiratory syndrome coronavirus 2
  REGION 1..9: note = Table A: HLA-B*18:01H HLA-B*35:01H HLA-B*38:02H HLA-B*15:01H HLA-B*15:02H HLA-B*07:05H
TNNLVVMAY

SEQ ID NO: 1587 - protein, 9 aa, Severe acute respiratory syndrome coronavirus 2
  REGION 1..9: note = Table A: HLA-A*02:11H HLA-A*02:02H HLA-A*02:03M
VMAYITGGV

SEQ ID NO: 1588 - protein, 9 aa, Severe acute respiratory syndrome coronavirus 2
  REGION 1..9: note = Table A: HLA-C*15:05H HLA-B*51:01H HLA-B*38:02H
MAYITGGVV

SEQ ID NO: 1589 - protein, 9 aa, Severe acute respiratory syndrome coronavirus 2
  REGION 1..9: note = Table A: HLA-A*11:303H HLA-C*04:03H HLA-C*03:03H HLA-A*02:11H HLA-C*03:04M HLA-A*68:02H HLA-B*35:03H HLA-C*15:05H HLA-C*15:02H HLA-A*02:04M HLA-A*02:05M HLA-A*02:06H HLA-A*02:07H HLA-A*02:08H HLA-B*14:01H
  REGION 1..9: note = CONT. FROM ABOVE: HLA-A*02:01H HLA-A*02:02M HLA-A*02:03H HLA- C*17:01H HLA-C*08:01H HLA-B*38:02M HLA-B*39:01H HLA-C*02:02H HLA-C*07:04M
YITGGVVQL

SEQ ID NO: 1590 - protein, 9 aa, Severe acute respiratory syndrome coronavirus 2
  REGION 1..9: note = Table A: HLA-A*68:02H
ITGGVVQLT

SEQ ID NO: 1591 - protein, 9 aa, Severe acute respiratory syndrome coronavirus 2
  REGION 1..9: note = Table A: HLA-B*58:01H HLA-B*57:01H HLA-A*25:01M HLA-B*44:03H HLA-B*27:02H HLA-B*53:01H HLA-B*15:13H HLA-B*38:02H HLA-B*15:01H HLA-B*57:03M HLA-B*13:01H
GVVQLTSQW

SEQ ID NO: 1592 - protein, 9 aa, Severe acute respiratory syndrome coronavirus 2
  REGION 1..9: note = Table A: HLA-A*02:03H HLA-B*38:02H
WLTNIFGTV

SEQ ID NO: 1593 - protein, 9 aa, Severe acute respiratory syndrome coronavirus 2
  REGION 1..9: note = Table A: HLA-B*58:01H HLA-A*36:01H HLA-B*46:01M HLA-A*29:02H HLA-C*03:02H HLA-A*30:02M HLA-B*38:02H HLA-B*15:01H HLA-B*15:02H HLA-B*15:03H HLA-B*07:05H
LTNIFGTVY

SEQ ID NO: 1594 - protein, 9 aa, Severe acute respiratory syndrome coronavirus 2
  REGION 1..9: note = Table A: HLA-A*03:02H HLA-A*11:01H HLA-A*11:02M HLA-A*68:01H HLA-A*34:01H HLA-A*34:02M
NIFGTVYEK

SEQ ID NO: 1595 - protein, 9 aa, Severe acute respiratory syndrome coronavirus 2
  REGION 1..9: note = Table A: HLA-A*02:02H HLA-A*24:02H HLA-A*24:07H HLA-A*23:01H
IFGTVYEKL

SEQ ID NO: 1596 - protein, 9 aa, Severe acute respiratory syndrome coronavirus 2
  REGION 1..9: note = Table A: HLA-A*02:11H HLA-A*68:02H HLA-A*02:03H HLA-B*38:02H
TVYEKLKPV

SEQ ID NO: 1597 - protein, 9 aa, Severe acute respiratory syndrome coronavirus 2
  REGION 1..9: note = Table A: HLA-A*24:07M HLA-A*23:01H
VYEKLKPVL

SEQ ID NO: 1598 - protein, 9 aa, Severe acute respiratory syndrome coronavirus 2
  REGION 1..9: note = Table A: HLA-A*02:11H HLA-A*02:04M HLA-A*02:05H HLA-A*02:08H HLA-A*02:02H HLA-A*02:03H
KLKPVLDWL

SEQ ID NO: 1599 - protein, 9 aa, Severe acute respiratory syndrome coronavirus 2
  REGION 1..9: note = Table A: HLA-C*04:03H HLA-A*02:07M HLA-B*13:01H
VLDWLEEKF

SEQ ID NO: 1600 - protein, 9 aa, Severe acute respiratory syndrome coronavirus 2
  REGION 1..9: note = Table A: HLA-B*49:01H
LEEKFKEGV

SEQ ID NO: 1601 - protein, 9 aa, Severe acute respiratory syndrome coronavirus 2
  REGION 1..9: note = Table A: HLA-B*38:02H HLA-B*15:03H
EKFKEGVEF

SEQ ID NO: 1602 - protein, 9 aa, Severe acute respiratory syndrome coronavirus 2
  REGION 1..9: note = Table A: HLA-B*58:02H HLA-C*14:02H HLA-C*14:03H HLA-A*02:11H HLA-A*30:01M HLA-A*02:05H HLA-A*02:08H HLA-A*02:02M HLA-A*02:03H HLA-A*24:02H HLA-A*24:07M HLA-A*23:01H HLA-B*38:02H HLA-B*57:03H
KFKEGVEFL

SEQ ID NO: 1603 - protein, 9 aa, Severe acute respiratory syndrome coronavirus 2
  REGION 1..9: note = Table A: HLA-A*24:07H
EFLRDGWEI

SEQ ID NO: 1604 - protein, 9 aa, Severe acute respiratory syndrome coronavirus 2
  REGION 1..9: note = Table A: HLA-B*51:01M
DGWEIVKFI

SEQ ID NO: 1605 - protein, 9 aa, Severe acute respiratory syndrome coronavirus 2
  REGION 1..9: note = Table A: HLA-B*45:01H HLA-B*40:02H HLA-B*40:06M HLA-B*49:01H HLA-B*50:01M
WEIVKFIST

SEQ ID NO: 1606 - protein, 9 aa, Severe acute respiratory syndrome coronavirus 2
  REGION 1..9: note = Table A: HLA-A*26:01H HLA-A*26:02H HLA-A*26:03H HLA-A*68:02H HLA-A*02:05H HLA-B*38:02H
EIVKFISTC

SEQ ID NO: 1607 - protein, 9 aa, Severe acute respiratory syndrome coronavirus 2
  REGION 1..9: note = Table A: HLA-B*44:05H HLA-B*45:01H HLA-B*40:01H HLA-B*40:02M HLA-B*41:02M HLA-B*49:01H HLA-B*50:01M
CEIVGGQIV

SEQ ID NO: 1608 - protein, 9 aa, Severe acute respiratory syndrome coronavirus 2
  REGION 1..9: note = Table A: HLA-A*68:02H HLA-C*15:05H HLA-A*02:05H HLA-A*02:08M HLA-A*02:03H HLA-B*38:02H
IVGGQIVTC

SEQ ID NO: 1609 - protein, 9 aa, Severe acute respiratory syndrome coronavirus 2
  REGION 1..9: note = Table A: HLA-B*40:01H HLA-B*40:02M HLA-B*40:06H HLA-B*41:02H HLA-B*49:01H
KEIKESVQT

SEQ ID NO: 1610 - protein, 9 aa, Severe acute respiratory syndrome coronavirus 2
  REGION 1..9: note = Table A: HLA-A*25:01H HLA-B*46:01H HLA-A*26:01H HLA-A*26:02H HLA-A*26:03H HLA-B*08:01H HLA-A*68:02H HLA-C*12:02H HLA-A*34:01M HLA-B*38:02M HLA-B*15:01M HLA-B*15:02M
EIKESVQTF

SEQ ID NO: 1611 - protein, 9 aa, Severe acute respiratory syndrome coronavirus 2
  REGION 1..9: note = Table A: HLA-B*15:03H
IKESVQTFF

SEQ ID NO: 1612 - protein, 9 aa, Severe acute respiratory syndrome coronavirus 2
  REGION 1..9: note = Table A: HLA-A*68:02M HLA-A*34:02H
ESVQTFFKL

SEQ ID NO: 1613 - protein, 9 aa, Severe acute respiratory syndrome coronavirus 2
  REGION 1..9: note = Table A: HLA-A*68:02H HLA-C*15:02H HLA-A*02:04H HLA-A*02:06H HLA-A*02:07H
SVQTFFKLV

SEQ ID NO: 1614 - protein, 9 aa, Severe acute respiratory syndrome coronavirus 2
  REGION 1..9: note = Table A: HLA-A*11:303H HLA-A*74:01H HLA-A*03:01H HLA-A*03:02H HLA-A*11:01M HLA-A*11:02H HLA-A*36:01H HLA-A*33:03H HLA-A*30:01H HLA-A*68:01H HLA-A*68:02H HLA-A*34:01H HLA-A*34:02H HLA-C*07:27H HLA-A*66:01H
QTFFKLVNK

SEQ ID NO: 1615 - protein, 9 aa, Severe acute respiratory syndrome coronavirus 2
  REGION 1..9: note = Table A: HLA-A*24:07M HLA-A*23:01H
TFFKLVNKF

SEQ ID NO: 1616 - protein, 9 aa, Severe acute respiratory syndrome coronavirus 2
  REGION 1..9: note = Table A: HLA-A*11:303H HLA-A*74:01H HLA-A*03:01H HLA-B*08:01H HLA-A*02:11M HLA-C*03:02H HLA-C*03:04H HLA-C*15:02M HLA-A*02:04M HLA-A*02:06H HLA-A*02:07H HLA-A*02:01H HLA-A*02:02M HLA-A*02:03H HLA-C*08:01H
  REGION 1..9: note = CONT. FROM ABOVE: HLA-B*38:02H HLA-A*32:01H HLA-B*40:06M HLA- B*07:04H HLA-B*13:01H HLA-B*13:02H
KLVNKFLAL

SEQ ID NO: 1617 - protein, 9 aa, Severe acute respiratory syndrome coronavirus 2
  REGION 1..9: note = Table A: HLA-B*38:02H
FLALCADSI

SEQ ID NO: 1618 - protein, 9 aa, Severe acute respiratory syndrome coronavirus 2
  REGION 1..9: note = Table A: HLA-B*45:01H HLA-B*50:01H
ADSIIIGGA

SEQ ID NO: 1619 - protein, 9 aa, Severe acute respiratory syndrome coronavirus 2
  REGION 1..9: note = Table A: HLA-A*26:03H HLA-A*68:01H HLA-A*34:01M HLA-A*34:02H HLA-A*66:01H
DSIIIGGAK

SEQ ID NO: 1620 - protein, 9 aa, Severe acute respiratory syndrome coronavirus 2
  REGION 1..9: note = Table A: HLA-A*11:303M HLA-B*44:05H HLA-C*03:03H HLA-C*03:04H HLA-C*15:05H HLA-A*02:05M HLA-A*02:08M HLA-A*02:02H HLA-A*34:01H HLA-C*08:01H HLA-B*38:02H HLA-B*15:01H
SIIIGGAKL

SEQ ID NO: 1621 - protein, 9 aa, Severe acute respiratory syndrome coronavirus 2
  REGION 1..9: note = Table A: HLA-A*03:01H HLA-A*03:02H HLA-A*11:01H HLA-A*11:02H HLA-A*30:01H HLA-A*34:01H HLA-A*34:02M HLA-A*66:01H
IIIGGAKLK

SEQ ID NO: 1622 - protein, 9 aa, Severe acute respiratory syndrome coronavirus 2
  REGION 1..9: note = Table A: HLA-B*08:01H HLA-B*07:04H
GAKLKALNL

SEQ ID NO: 1623 - protein, 9 aa, Severe acute respiratory syndrome coronavirus 2
  REGION 1..9: note = Table A: HLA-B*58:01H HLA-B*58:02M HLA-A*11:303H HLA-B*57:01M HLA-C*15:05H HLA-C*12:02H HLA-B*35:01H HLA-A*24:07H HLA-C*08:01H HLA-A*23:01H HLA-B*38:02H HLA-B*15:01H HLA-B*15:03M HLA-B*07:05H HLA-B*57:03H
  REGION 1..9: note = CONT. FROM ABOVE: HLA-B*13:01H
KALNLGETF

SEQ ID NO: 1624 - protein, 9 aa, Severe acute respiratory syndrome coronavirus 2
  REGION 1..9: note = Table A: HLA-A*02:02H HLA-A*02:03H HLA-B*38:02H
ALNLGETFV

SEQ ID NO: 1625 - protein, 9 aa, Severe acute respiratory syndrome coronavirus 2
  REGION 1..9: note = Table A: HLA-A*11:303H HLA-B*38:02H HLA-B*15:02H HLA-B*07:05H
NLGETFVTH

SEQ ID NO: 1626 - protein, 9 aa, Severe acute respiratory syndrome coronavirus 2
  REGION 1..9: note = Table A: HLA-A*11:01H HLA-A*11:02H HLA-B*45:01H HLA-B*44:03H HLA-B*27:02H HLA-A*30:02H HLA-B*40:02H HLA-B*40:06H HLA-B*49:01M HLA-B*50:01H
GETFVTHSK

SEQ ID NO: 1627 - protein, 9 aa, Severe acute respiratory syndrome coronavirus 2
  REGION 1..9: note = Table A: HLA-A*34:01H HLA-A*34:02H HLA-A*66:01H
ETFVTHSKG

SEQ ID NO: 1628 - protein, 9 aa, Severe acute respiratory syndrome coronavirus 2
  REGION 1..9: note = Table A: HLA-A*36:01H HLA-A*26:01H HLA-A*29:02M HLA-A*30:02H HLA-A*34:02H HLA-B*38:02H HLA-B*15:02H
FVTHSKGLY

SEQ ID NO: 1629 - protein, 9 aa, Severe acute respiratory syndrome coronavirus 2
  REGION 1..9: note = Table A: HLA-A*11:303H HLA-A*74:01H HLA-A*03:01M HLA-A*11:01H HLA-A*11:02M HLA-A*36:01H HLA-A*33:01H HLA-A*33:03M HLA-A*26:03H HLA-A*68:01H HLA-A*34:01M HLA-A*34:02H HLA-A*31:01H HLA-A*66:01H
VTHSKGLYR

SEQ ID NO: 1630 - protein, 9 aa, Severe acute respiratory syndrome coronavirus 2
  REGION 1..9: note = Table A: HLA-B*58:02H HLA-B*57:03M
KSREETGLL

SEQ ID NO: 1631 - protein, 9 aa, Severe acute respiratory syndrome coronavirus 2
  REGION 1..9: note = Table A: HLA-B*38:01H HLA-B*38:02H HLA-B*39:01H
SREETGLLM

SEQ ID NO: 1632 - protein, 9 aa, Severe acute respiratory syndrome coronavirus 2
  REGION 1..9: note = Table A: HLA-B*45:01H HLA-B*50:01H
REETGLLMP

SEQ ID NO: 1633 - protein, 9 aa, Severe acute respiratory syndrome coronavirus 2
  REGION 1..9: note = Table A: HLA-A*11:01H HLA-A*11:02H HLA-A*34:02H
ETGLLMPLK

SEQ ID NO: 1634 - protein, 9 aa, Severe acute respiratory syndrome coronavirus 2
  REGION 1..9: note = Table A: HLA-B*39:06H HLA-B*54:01H
TGLLMPLKA

SEQ ID NO: 1635 - protein, 9 aa, Severe acute respiratory syndrome coronavirus 2
  REGION 1..9: note = Table A: HLA-A*74:01H HLA-A*11:02H HLA-A*34:02H
LLMPLKAPK

SEQ ID NO: 1636 - protein, 9 aa, Severe acute respiratory syndrome coronavirus 2
  REGION 1..9: note = Table A: HLA-B*42:01H HLA-B*53:01H HLA-C*15:05H HLA-B*51:01M HLA-B*54:01H HLA-B*07:04M HLA-B*07:05H
MPLKAPKEI

SEQ ID NO: 1637 - protein, 9 aa, Severe acute respiratory syndrome coronavirus 2
  REGION 1..9: note = Table A: HLA-B*15:03H
LKAPKEIIF

SEQ ID NO: 1638 - protein, 9 aa, Severe acute respiratory syndrome coronavirus 2
  REGION 1..9: note = Table A: HLA-B*58:02H HLA-C*04:03M HLA-A*02:11M HLA-C*01:02H HLA-C*15:02H HLA-A*02:04H HLA-A*02:05H HLA-A*02:06H HLA-A*02:07H HLA-A*02:08H HLA-A*02:02H HLA-C*17:01M HLA-C*08:01H HLA-B*57:03M HLA-C*07:04M
KAPKEIIFL

SEQ ID NO: 1639 - protein, 9 aa, Severe acute respiratory syndrome coronavirus 2
  REGION 1..9: note = Table A: HLA-A*11:303H HLA-A*02:11H HLA-C*03:04H HLA-C*15:05H HLA-A*02:05H HLA-A*02:02H HLA-C*08:01M HLA-B*38:01H HLA-B*38:02H HLA-B*15:01H HLA-B*13:01H
IIFLEGETL

SEQ ID NO: 1640 - protein, 9 aa, Severe acute respiratory syndrome coronavirus 2
  REGION 1..9: note = Table A: HLA-B*48:01H HLA-B*44:05M HLA-B*45:01H HLA-B*40:01H HLA-B*40:02H HLA-B*41:02H HLA-B*49:01M HLA-B*50:01H
GETLPTEVL

SEQ ID NO: 1641 - protein, 9 aa, Severe acute respiratory syndrome coronavirus 2
  REGION 1..9: note = Table A: HLA-B*49:01H
TEVLTEEVV

SEQ ID NO: 1642 - protein, 9 aa, Severe acute respiratory syndrome coronavirus 2
  REGION 1..9: note = Table A: HLA-B*35:02H HLA-B*35:12H
EVLTEEVVL

SEQ ID NO: 1643 - protein, 9 aa, Severe acute respiratory syndrome coronavirus 2
  REGION 1..9: note = Table A: HLA-A*11:303H HLA-A*03:01H HLA-A*03:02H HLA-A*11:01H HLA-A*11:02H HLA-A*36:01H HLA-B*27:02H HLA-A*34:02H HLA-A*23:01H
VLTEEVVLK

SEQ ID NO: 1644 - protein, 9 aa, Severe acute respiratory syndrome coronavirus 2
  REGION 1..9: note = Table A: HLA-A*01:01H
LTEEVVLKT

SEQ ID NO: 1645 - protein, 9 aa, Severe acute respiratory syndrome coronavirus 2
  REGION 1..9: note = Table A: HLA-A*25:01H HLA-A*26:01H HLA-A*26:02H HLA-A*26:03H HLA-A*34:01M HLA-A*66:01H
EVVLKTGDL

SEQ ID NO: 1646 - protein, 9 aa, Severe acute respiratory syndrome coronavirus 2
  REGION 1..9: note = Table A: HLA-B*45:01H HLA-B*41:02H HLA-B*49:01M HLA-B*50:01H
LEQPTSEAV

SEQ ID NO: 1647 - protein, 9 aa, Severe acute respiratory syndrome coronavirus 2
  REGION 1..9: note = Table A: HLA-B*56:01H HLA-B*55:02H HLA-B*35:02H
QPTSEAVEA

SEQ ID NO: 1648 - protein, 9 aa, Severe acute respiratory syndrome coronavirus 2
  REGION 1..9: note = Table A: HLA-B*35:02H HLA-B*35:12H
TSEAVEAPL

SEQ ID NO: 1649 - protein, 9 aa, Severe acute respiratory syndrome coronavirus 2
  REGION 1..9: note = Table A: HLA-B*44:05H HLA-B*45:01M HLA-B*40:01H HLA-B*40:02H HLA-B*41:02H HLA-B*49:01H
SEAVEAPLV

SEQ ID NO: 1650 - protein, 9 aa, Severe acute respiratory syndrome coronavirus 2
  REGION 1..9: note = Table A: HLA-B*45:01M HLA-B*40:06H HLA-B*49:01H HLA-B*50:01H
VEAPLVGTP

SEQ ID NO: 1651 - protein, 9 aa, Severe acute respiratory syndrome coronavirus 2
  REGION 1..9: note = Table A: HLA-A*68:01H HLA-A*68:02M HLA-C*15:05H HLA-A*34:01H HLA-A*34:02H HLA-B*51:01M HLA-B*54:01H HLA-A*66:01H
EAPLVGTPV

SEQ ID NO: 1652 - protein, 9 aa, Severe acute respiratory syndrome coronavirus 2
  REGION 1..9: note = Table A: HLA-B*56:01M HLA-B*55:02M HLA-C*15:05M HLA-B*55:01M HLA-B*54:01H HLA-B*07:05H
APLVGTPVC

SEQ ID NO: 1653 - protein, 9 aa, Severe acute respiratory syndrome coronavirus 2
  REGION 1..9: note = Table A: HLA-B*13:02H
PLVGTPVCI

SEQ ID NO: 1654 - protein, 9 aa, Severe acute respiratory syndrome coronavirus 2
  REGION 1..9: note = Table A: HLA-B*58:01M HLA-B*44:02H HLA-B*44:05M HLA-C*16:04H HLA-B*46:01H HLA-B*44:03H HLA-B*18:01H HLA-C*07:01H HLA-A*30:02H HLA-B*35:01H HLA-B*38:02H HLA-B*40:01H HLA-B*40:02H HLA-B*15:01M HLA-B*15:03H HLA-B*39:01H
  REGION 1..9: note = CONT. FROM ABOVE: HLA-B*07:05M HLA-B*49:01H
LEIKDTEKY

SEQ ID NO: 1655 - protein, 9 aa, Severe acute respiratory syndrome coronavirus 2
  REGION 1..9: note = Table A: HLA-B*37:01H
KDTEKYCAL

SEQ ID NO: 1656 - protein, 9 aa, Severe acute respiratory syndrome coronavirus 2
  REGION 1..9: note = Table A: HLA-C*15:05H
CALAPNMMV

SEQ ID NO: 1657 - protein, 9 aa, Severe acute respiratory syndrome coronavirus 2
  REGION 1..9: note = Table A: HLA-B*38:02H
ALAPNMMVT

SEQ ID NO: 1658 - protein, 9 aa, Severe acute respiratory syndrome coronavirus 2
  REGION 1..9: note = Table A: HLA-B*46:01H HLA-C*15:05H HLA-A*24:02H HLA-B*35:01H HLA-B*15:13H HLA-B*38:02M HLA-B*15:01H HLA-B*15:02H HLA-B*07:05M
NMMVTNNTF

SEQ ID NO: 1659 - protein, 9 aa, Severe acute respiratory syndrome coronavirus 2
  REGION 1..9: note = Table A: HLA-A*68:02H HLA-B*35:03M HLA-C*15:05H HLA-A*02:04H HLA-A*02:05H HLA-A*02:06H HLA-A*02:08H HLA-A*02:02H HLA-A*34:02H HLA-B*35:01H HLA-B*35:02H HLA-C*08:01H HLA-B*35:12H HLA-B*38:02H HLA-B*40:06H HLA-B*39:01H
  REGION 1..9: note = CONT. FROM ABOVE: HLA-B*07:05H HLA-B*13:02H HLA-C*07:04H
MVTNNTFTL

SEQ ID NO: 1660 - protein, 9 aa, Severe acute respiratory syndrome coronavirus 2
  REGION 1..9: note = Table A: HLA-A*11:303M HLA-A*74:01H HLA-A*03:01H HLA-A*03:02H HLA-A*11:01H HLA-A*11:02H HLA-A*36:01M HLA-A*33:03H HLA-A*30:01H HLA-A*30:02M HLA-A*68:01H HLA-A*34:02H HLA-C*07:27H HLA-A*23:01H HLA-A*31:01H
  REGION 1..9: note = CONT. FROM ABOVE: HLA-A*66:01H
VTNNTFTLK

SEQ ID NO: 1661 - protein, 9 aa, Severe acute respiratory syndrome coronavirus 2
  REGION 1..9: note = Table A: HLA-A*03:01H HLA-A*03:02H HLA-A*30:01H HLA-A*34:02H
TLKGGAPTK

SEQ ID NO: 1662 - protein, 9 aa, Severe acute respiratory syndrome coronavirus 2
  REGION 1..9: note = Table A: HLA-B*48:01H HLA-B*58:01M HLA-A*11:303H HLA-B*44:05M HLA-B*46:01H HLA-C*15:05H HLA-B*35:01H HLA-B*38:02H HLA-B*40:02H HLA-B*07:02H HLA-B*15:01H HLA-B*15:02H HLA-B*15:03M HLA-B*07:05H HLA-B*41:02H
  REGION 1..9: note = CONT. FROM ABOVE: HLA-B*57:03M HLA-C*07:04H
GGAPTKVTF

SEQ ID NO: 1663 - protein, 9 aa, Severe acute respiratory syndrome coronavirus 2
  REGION 1..9: note = Table A: HLA-A*11:303M HLA-C*04:01H HLA-C*04:03M HLA-C*03:03H HLA-C*12:05H HLA-C*03:04H HLA-A*68:02H HLA-B*35:03M HLA-C*15:05H HLA-C*15:02H HLA-A*02:05H HLA-A*02:06H HLA-A*02:07M HLA-A*02:01H HLA-B*35:01H
  REGION 1..9: note = CONT. FROM ABOVE: HLA-B*35:02H HLA-C*08:01M HLA-C*08:02M HLA- B*38:02M HLA-B*39:01M HLA-C*05:01M HLA-B*13:02H HLA-C*07:04H
FGDDTVIEV

SEQ ID NO: 1664 - protein, 9 aa, Severe acute respiratory syndrome coronavirus 2
  REGION 1..9: note = Table A: HLA-A*25:01H HLA-A*26:01H HLA-A*26:02H HLA-A*26:03H HLA-B*18:01H HLA-A*68:01H HLA-A*34:02H HLA-B*35:01H HLA-B*38:02H HLA-B*15:02H HLA-B*07:05H
DTVIEVQGY

SEQ ID NO: 1665 - protein, 9 aa, Severe acute respiratory syndrome coronavirus 2
  REGION 1..9: note = Table A: HLA-A*03:01H HLA-A*03:02H HLA-A*11:01H HLA-A*11:02M HLA-A*30:02H HLA-A*68:01H HLA-A*34:01H HLA-A*34:02H HLA-C*07:27H HLA-A*66:01M
TVIEVQGYK

SEQ ID NO: 1666 - protein, 9 aa, Severe acute respiratory syndrome coronavirus 2
  REGION 1..9: note = Table A: HLA-B*45:01H HLA-B*40:02M HLA-B*40:06H HLA-B*41:02M HLA-B*49:01H HLA-B*50:01M
IEVQGYKSV

SEQ ID NO: 1667 - protein, 9 aa, Severe acute respiratory syndrome coronavirus 2
  REGION 1..9: note = Table A: HLA-C*14:03H HLA-A*24:02M HLA-A*24:07M HLA-A*23:01M HLA-B*15:01H
GYKSVNITF

SEQ ID NO: 1668 - protein, 9 aa, Severe acute respiratory syndrome coronavirus 2
  REGION 1..9: note = Table A: HLA-B*48:01H HLA-B*58:01H HLA-B*58:02H HLA-C*16:04H HLA-B*57:01H HLA-C*07:01H HLA-A*02:11H HLA-C*03:04H HLA-A*68:02M HLA-C*15:05H HLA-C*12:03H HLA-C*15:02H HLA-A*02:05H HLA-A*02:06H HLA-A*02:08M HLA-A*02:02H
  REGION 1..9: note = CONT. FROM ABOVE: HLA-C*08:01H HLA-A*32:01H HLA-B*40:06H HLA- B*57:03H HLA-B*13:02H HLA-C*07:04H
KSVNITFEL

SEQ ID NO: 1669 - protein, 9 aa, Severe acute respiratory syndrome coronavirus 2
  REGION 1..9: note = Table A: HLA-A*02:11M HLA-A*68:02H HLA-A*02:05H HLA-A*02:02H HLA-B*57:03M
ITFELDERI

SEQ ID NO: 1670 - protein, 9 aa, Severe acute respiratory syndrome coronavirus 2
  REGION 1..9: note = Table A: HLA-A*02:11H HLA-A*02:07H HLA-B*38:02H
ELDERIDKV

SEQ ID NO: 1671 - protein, 9 aa, Severe acute respiratory syndrome coronavirus 2
  REGION 1..9: note = Table A: HLA-A*03:01M HLA-A*03:02M HLA-A*11:01H HLA-A*11:02H HLA-A*36:01H
RIDKVLNEK

SEQ ID NO: 1672 - protein, 9 aa, Severe acute respiratory syndrome coronavirus 2
  REGION 1..9: note = Table A: HLA-A*11:303H HLA-A*03:01H HLA-B*46:01M HLA-A*30:02H HLA-B*38:02M HLA-B*15:01H HLA-B*15:02M
VLNEKCSAY

SEQ ID NO: 1673 - protein, 9 aa, Severe acute respiratory syndrome coronavirus 2
  REGION 1..9: note = Table A: HLA-A*11:303H HLA-C*16:04M HLA-B*46:01H HLA-A*26:01H HLA-C*03:03H HLA-C*12:05H HLA-A*02:11H HLA-C*03:02H HLA-C*03:04H HLA-A*68:02H HLA-C*15:05H HLA-C*12:03H HLA-C*15:02H HLA-A*02:05M HLA-A*02:06M
  REGION 1..9: note = CONT. FROM ABOVE: HLA-A*02:07H HLA-A*02:08H HLA-A*02:01H HLA- A*02:02H HLA-A*02:03H HLA-C*08:01H HLA-B*38:02M HLA-B*39:01H HLA-B*13:02H HLA-B*49:01H HLA-A*66:01H
YTVELGTEV

SEQ ID NO: 1674 - protein, 9 aa, Severe acute respiratory syndrome coronavirus 2
  REGION 1..9: note = Table A: HLA-A*26:02M HLA-A*26:03H HLA-B*38:02H HLA-B*15:02H
ELGTEVNEF

SEQ ID NO: 1675 - protein, 9 aa, Severe acute respiratory syndrome coronavirus 2
  REGION 1..9: note = Table A: HLA-B*44:05H HLA-B*45:01H HLA-B*40:01H HLA-B*40:02M HLA-B*40:06H HLA-B*41:02H HLA-B*49:01H HLA-B*50:01M
TEVNEFACV

SEQ ID NO: 1676 - protein, 9 aa, Severe acute respiratory syndrome coronavirus 2
  REGION 1..9: note = Table A: HLA-A*68:02M HLA-B*38:02H
EVNEFACVV

SEQ ID NO: 1677 - protein, 9 aa, Severe acute respiratory syndrome coronavirus 2
  REGION 1..9: note = Table A: HLA-A*11:01H
CVVADAVIK

SEQ ID NO: 1678 - protein, 9 aa, Severe acute respiratory syndrome coronavirus 2
  REGION 1..9: note = Table A: HLA-A*68:01H HLA-A*68:02H HLA-A*02:05M HLA-A*02:06H HLA-A*02:08M HLA-A*02:03H
VVADAVIKT

SEQ ID NO: 1679 - protein, 9 aa, Severe acute respiratory syndrome coronavirus 2
  REGION 1..9: note = Table A: HLA-B*58:01H HLA-B*58:02H HLA-A*11:303H HLA-C*16:01H HLA-C*16:04H HLA-C*04:03H HLA-C*03:03H HLA-C*12:05H HLA-A*02:11H HLA-B*53:01M HLA-C*03:02H HLA-C*03:04H HLA-A*68:02H HLA-B*35:03M HLA-C*15:05M
  REGION 1..9: note = CONT. FROM ABOVE: HLA-C*12:02H HLA-C*12:03M HLA-C*15:02M HLA- A*02:06H HLA-A*02:07H HLA-C*07:27M HLA-B*35:01H HLA-B*35:02M HLA-B*51:01H HLA-C*17:01H HLA-C*08:01H HLA-C*08:02H HLA-B*35 :12H HLA-B*38:01H HLA-B*38:02M HLA-B*07:04H HLA-B*07:05H
  REGION 1..9: note = CONT. FROM ABOVE: HLA-B*57:03H HLA-C*02:02H HLA-C*05:01M HLA- C*07:04H
VADAVIKTL

SEQ ID NO: 1680 - protein, 9 aa, Severe acute respiratory syndrome coronavirus 2
  REGION 1..9: note = Table A: HLA-A*11:303H HLA-B*46:01H HLA-A*26:03H HLA-A*02:11M HLA-A*68:02M HLA-C*15:05H HLA-A*02:04H HLA-A*02:05H HLA-A*02:06M HLA-A*02:07H HLA-A*02:08H HLA-B*14:01H HLA-A*02:01M HLA-A*02:02H HLA-A*02:03M
  REGION 1..9: note = CONT. FROM ABOVE: HLA-C*08:01H HLA-C*08:03H HLA-B*38:02M HLA- B*40:06H HLA-B*13:02H
AVIKTLQPV

SEQ ID NO: 1681 - protein, 9 aa, Severe acute respiratory syndrome coronavirus 2
  REGION 1..9: note = Table A: HLA-B*58:01H HLA-B*58:02H HLA-A*11:303H HLA-A*02:11H HLA-C*15:05H HLA-C*15:02H HLA-A*02:08H HLA-B*57:03H
KTLQPVSEL

SEQ ID NO: 1682 - protein, 9 aa, Severe acute respiratory syndrome coronavirus 2
  REGION 1..9: note = Table A: HLA-A*02:11H HLA-A*02:04H HLA-A*02:01H HLA-A*02:02M HLA-B*38:02H
TLQPVSELL

SEQ ID NO: 1683 - protein, 9 aa, Severe acute respiratory syndrome coronavirus 2
  REGION 1..9: note = Table A: HLA-B*44:05M HLA-B*44:03H HLA-B*40:02H HLA-B*13:02H HLA-B*49:01M
SELLTPLGI

SEQ ID NO: 1684 - protein, 9 aa, Severe acute respiratory syndrome coronavirus 2
  REGION 1..9: note = Table A: HLA-A*02:02H
LLTPLGIDL

SEQ ID NO: 1685 - protein, 9 aa, Severe acute respiratory syndrome coronavirus 2
  REGION 1..9: note = Table A: HLA-B*18:01H HLA-B*07:05H
DEWSMATYY

SEQ ID NO: 1686 - protein, 9 aa, Severe acute respiratory syndrome coronavirus 2
  REGION 1..9: note = Table A: HLA-C*14:02H HLA-C*14:03H HLA-A*11:303M HLA-A*25:01H HLA-B*46:01H HLA-A*26:01H HLA-A*26:02H HLA-A*26:03H HLA-A*29:01H HLA-A*29:02H HLA-C*03:03H HLA-B*53:01H HLA-C*03:02M HLA-C*03:04H HLA-B*35:03H
  REGION 1..9: note = CONT. FROM ABOVE: HLA-C*15:05H HLA-C*12:02H HLA-A*02:07H HLA- A*02:02H HLA-A*02:03H HLA-A*34:01H HLA-C*07:27H HLA-B*35:01M HLA-B*35:02H HLA-B*35:08H HLA-B*35:07M HLA-C*08:01H HLA-C*08 :02H HLA-B*38:01H HLA-B*38:02H HLA-B*15:01M HLA-B*15:02H
  REGION 1..9: note = CONT. FROM ABOVE: HLA-B*15:03H HLA-B*39:01M HLA-B*07:05H HLA- C*02:02H HLA-B*13:01H HLA-A*66:01H
YLFDESGEF

SEQ ID NO: 1687 - protein, 9 aa, Severe acute respiratory syndrome coronavirus 2
  REGION 1..9: note = Table A: HLA-A*36:01H
LFDESGEFK

SEQ ID NO: 1688 - protein, 9 aa, Severe acute respiratory syndrome coronavirus 2
  REGION 1..9: note = Table A: HLA-B*35:03H HLA-B*35:02H HLA-B*35:12H HLA-B*38:02H
FDESGEFKL

SEQ ID NO: 1689 - protein, 9 aa, Severe acute respiratory syndrome coronavirus 2
  REGION 1..9: note = Table A: HLA-B*45:01M HLA-B*50:01H
DESGEFKLA

SEQ ID NO: 1690 - protein, 9 aa, Severe acute respiratory syndrome coronavirus 2
  REGION 1..9: note = Table A: HLA-B*44:05H HLA-B*40:01M HLA-B*40:02M HLA-B*07:05H HLA-B*49:01H
GEFKLASHM

SEQ ID NO: 1691 - protein, 9 aa, Severe acute respiratory syndrome coronavirus 2
  REGION 1..9: note = Table A: HLA-A*30:02H HLA-B*15:02H
EFKLASHMY

SEQ ID NO: 1692 - protein, 9 aa, Severe acute respiratory syndrome coronavirus 2
  REGION 1..9: note = Table A: HLA-A*30:02H
ASHMYCSFY

SEQ ID NO: 1693 - protein, 9 aa, Severe acute respiratory syndrome coronavirus 2
  REGION 1..9: note = Table A: HLA-B*45:01H
EEEEFEPST

SEQ ID NO: 1694 - protein, 9 aa, Severe acute respiratory syndrome coronavirus 2
  REGION 1..9: note = Table A: HLA-B*44:02M HLA-B*44:05M HLA-C*16:04H HLA-B*45:01H HLA-B*44:03H HLA-B*18:01H HLA-B*27:02H HLA-B*35:01H HLA-B*38:02M HLA-B*15:01H HLA-B*15:02M HLA-B*15:03H HLA-B*07:05H HLA-B*15:11M HLA-B*50:01H
EEFEPSTQY

SEQ ID NO: 1695 - protein, 9 aa, Severe acute respiratory syndrome coronavirus 2
  REGION 1..9: note = Table A: HLA-B*46:01H HLA-A*29:01H HLA-A*29:02H HLA-B*18:01H HLA-C*07:01H HLA-B*07:05H
FEPSTQYEY

SEQ ID NO: 1696 - protein, 9 aa, Severe acute respiratory syndrome coronavirus 2
  REGION 1..9: note = Table A: HLA-B*18:01H HLA-B*27:02H HLA-B*39:01H HLA-B*07:05H
YEYGTEDDY

SEQ ID NO: 1697 - protein, 9 aa, Severe acute respiratory syndrome coronavirus 2
  REGION 1..9: note = Table A: HLA-A*11:01H
GTEDDYQGK

SEQ ID NO: 1698 - protein, 9 aa, Severe acute respiratory syndrome coronavirus 2
  REGION 1..9: note = Table A: HLA-B*45:01H HLA-B*50:01H
TEDDYQGKP

SEQ ID NO: 1699 - protein, 9 aa, Severe acute respiratory syndrome coronavirus 2
  REGION 1..9: note = Table A: HLA-C*14:02M HLA-C*14:03M HLA-A*33:01H HLA-A*33:03H HLA-A*29:01H HLA-C*07:01H HLA-C*07:02H HLA-C*15:05H HLA-A*24:02H HLA-A*24:07H HLA-C*08:01H HLA-A*23:01M HLA-B*38:02H HLA-B*39:01H HLA-B*07:05H
DYQGKPLEF

SEQ ID NO: 1700 - protein, 9 aa, Severe acute respiratory syndrome coronavirus 2
  REGION 1..9: note = Table A: HLA-B*39:06H
QGKPLEFGA

SEQ ID NO: 1701 - protein, 9 aa, Severe acute respiratory syndrome coronavirus 2
  REGION 1..9: note = Table A: HLA-B*56:01H HLA-B*55:02M HLA-C*15:05H HLA-B*55:01H HLA-B*54:01H HLA-B*07:05H
KPLEFGATS

SEQ ID NO: 1702 - protein, 9 aa, Severe acute respiratory syndrome coronavirus 2
  REGION 1..9: note = Table A: HLA-B*45:01H HLA-B*40:06H HLA-B*50:01H
LEFGATSAA

SEQ ID NO: 1703 - protein, 9 aa, Severe acute respiratory syndrome coronavirus 2
  REGION 1..9: note = Table A: HLA-B*44:05H HLA-B*45:01H HLA-B*44:03H HLA-B*38:02H HLA-B*40:01M HLA-B*40:02H HLA-B*41:02H HLA-B*49:01H
SEDNQTTTI

SEQ ID NO: 1704 - protein, 9 aa, Severe acute respiratory syndrome coronavirus 2
  REGION 1..9: note = Table A: HLA-C*15:05H HLA-A*02:05M HLA-A*02:06H HLA-B*52:01H HLA-B*38:01M HLA-B*38:02H HLA-B*39:01H HLA-B*13:01H HLA-B*13:02H
NQTTTIQTI

SEQ ID NO: 1705 - protein, 9 aa, Severe acute respiratory syndrome coronavirus 2
  REGION 1..9: note = Table A: HLA-A*68:02M HLA-C*15:02H
QTTTIQTIV

SEQ ID NO: 1706 - protein, 9 aa, Severe acute respiratory syndrome coronavirus 2
  REGION 1..9: note = Table A: HLA-A*11:303H HLA-C*16:04H HLA-A*11:01H HLA-A*26:01H HLA-A*26:02H HLA-A*26:03H HLA-C*12:05H HLA-A*02:11H HLA-A*68:01H HLA-A*68:02H HLA-C*15:05M HLA-C*12:03H HLA-C*15:02M HLA-A*02:04M HLA-A*02:05H
  REGION 1..9: note = CONT. FROM ABOVE: HLA-A*02:06H HLA-A*02:07H HLA-A*02:08H HLA- A*02:01M HLA-A*02:02H HLA-A*02:03M HLA-A*34:02H HLA-C*08:01H HLA-B*38:02M HLA-B*40:06H HLA-B*39:01H HLA-B*07:05H HLA-B*13 :02M
TTIQTIVEV

SEQ ID NO: 1707 - protein, 9 aa, Severe acute respiratory syndrome coronavirus 2
  REGION 1..9: note = Table A: HLA-B*48:01H HLA-B*58:01H HLA-A*11:303M HLA-B*44:05H HLA-C*03:03H HLA-A*02:11M HLA-C*03:04M HLA-A*68:02M HLA-B*35:03M HLA-C*15:05H HLA-A*02:04M HLA-A*02:05M HLA-A*02:06M HLA-A*02:07M HLA-A*02:08H
  REGION 1..9: note = CONT. FROM ABOVE: HLA-B*14:01H HLA-A*02:01H HLA-A*02:02M HLA- B*35:01M HLA-B*35:02M HLA-C*08:01M HLA-B*35:12M HLA-B*38:01H HLA-B*38:02M HLA-B*40:02H HLA-B*40:06H HLA-B*15:02H HLA-B*39 :01H HLA-B*07:05H HLA-B*41:02H HLA-B*57:03H HLA-B*13:02H
  REGION 1..9: note = CONT. FROM ABOVE: HLA-C*07:04H
TIVEVQPQL

SEQ ID NO: 1708 - protein, 9 aa, Severe acute respiratory syndrome coronavirus 2
  REGION 1..9: note = Table A: HLA-B*44:05M HLA-B*44:03H HLA-B*18:01H HLA-B*40:01M HLA-B*40:02M HLA-B*07:05H HLA-B*41:02M HLA-B*49:01M
VEVQPQLEM

SEQ ID NO: 1709 - protein, 9 aa, Severe acute respiratory syndrome coronavirus 2
  REGION 1..9: note = Table A: HLA-B*45:01H HLA-B*18:01H HLA-B*40:02H HLA-B*40:06H HLA-B*07:05H HLA-B*41:02H HLA-B*49:01M HLA-B*50:01M
LEMELTPVV

SEQ ID NO: 1710 - protein, 9 aa, Severe acute respiratory syndrome coronavirus 2
  REGION 1..9: note = Table A: HLA-B*44:05H HLA-A*25:01H HLA-A*68:02H HLA-A*02:04H HLA-A*02:05H HLA-A*02:02M HLA-A*02:03H HLA-A*24:02H HLA-B*38:01H HLA-B*38:02H HLA-B*13:02H
ELTPVVQTI

SEQ ID NO: 1711 - protein, 9 aa, Severe acute respiratory syndrome coronavirus 2
  REGION 1..9: note = Table A: HLA-B*42:01H HLA-B*56:01M HLA-B*53:01H HLA-B*55:02H HLA-B*35:03M HLA-C*15:05H HLA-B*55:01M HLA-B*35:01M HLA-B*35:02H HLA-B*51:01M HLA-B*35:07H HLA-C*08:01H HLA-B*35:12H HLA-B*38:02H HLA-B*39:06H HLA-B*54:01H
  REGION 1..9: note = CONT. FROM ABOVE: HLA-B*07:02H HLA-B*39:01H HLA-B*07:05M
TPVVQTIEV

SEQ ID NO: 1712 - protein, 9 aa, Severe acute respiratory syndrome coronavirus 2
  REGION 1..9: note = Table A: HLA-B*44:05H HLA-B*27:02H HLA-A*24:02H HLA-B*38:01H HLA-B*38:02H HLA-B*15:01H HLA-B*15:03H HLA-B*39:01H HLA-B*13:01H
VQTIEVNSF

SEQ ID NO: 1713 - protein, 9 aa, Severe acute respiratory syndrome coronavirus 2
  REGION 1..9: note = Table A: HLA-B*44:03H HLA-B*18:01M HLA-B*27:02H HLA-B*07:05H HLA-B*49:01H HLA-B*50:01H
IEVNSFSGY

SEQ ID NO: 1714 - protein, 9 aa, Severe acute respiratory syndrome coronavirus 2
  REGION 1..9: note = Table A: HLA-A*33:03H HLA-A*26:01H HLA-A*26:02H HLA-A*26:03H HLA-A*68:02M HLA-A*34:01M HLA-A*34:02H HLA-A*66:01M
EVNSFSGYL

SEQ ID NO: 1715 - protein, 9 aa, Severe acute respiratory syndrome coronavirus 2
  REGION 1..9: note = Table A: HLA-A*11:01H HLA-A*11:02H HLA-A*36:01H HLA-A*34:02H
VNSFSGYLK

SEQ ID NO: 1716 - protein, 9 aa, Severe acute respiratory syndrome coronavirus 2
  REGION 1..9: note = Table A: HLA-B*53:01H HLA-A*68:01H HLA-A*68:02H HLA-C*15:05H HLA-C*12:03H HLA-C*15:02M HLA-A*34:02H HLA-C*17:01H HLA-C*08:01H HLA-B*38:02H HLA-B*57:03H HLA-A*66:01H
NSFSGYLKL

SEQ ID NO: 1717 - protein, 9 aa, Severe acute respiratory syndrome coronavirus 2
  REGION 1..9: note = Table A: HLA-B*46:01H HLA-B*38:02M HLA-B*15:01M HLA-B*15:02H HLA-B*15:11H
YLKLTDNVY

SEQ ID NO: 1718 - protein, 9 aa, Severe acute respiratory syndrome coronavirus 2
  REGION 1..9: note = Table A: HLA-A*74:01H HLA-A*03:01H HLA-A*03:02M HLA-A*11:01H HLA-A*11:02H HLA-A*36:01H HLA-A*30:02H
KLTDNVYIK

SEQ ID NO: 1719 - protein, 9 aa, Severe acute respiratory syndrome coronavirus 2
  REGION 1..9: note = Table A: HLA-A*68:02H HLA-A*02:05H HLA-A*02:08M HLA-A*02:01H HLA-A*02:02H
KNADIVEEA

SEQ ID NO: 1720 - protein, 9 aa, Severe acute respiratory syndrome coronavirus 2
  REGION 1..9: note = Table A: HLA-B*35:02H HLA-B*35:12H
NADIVEEAK

SEQ ID NO: 1721 - protein, 9 aa, Severe acute respiratory syndrome coronavirus 2
  REGION 1..9: note = Table A: HLA-A*68:02H
DIVEEAKKV

SEQ ID NO: 1722 - protein, 9 aa, Severe acute respiratory syndrome coronavirus 2
  REGION 1..9: note = Table A: HLA-A*34:02H
IVEEAKKVK

SEQ ID NO: 1723 - protein, 9 aa, Severe acute respiratory syndrome coronavirus 2
  REGION 1..9: note = Table A: HLA-B*45:01H
VEEAKKVKP

SEQ ID NO: 1724 - protein, 9 aa, Severe acute respiratory syndrome coronavirus 2
  REGION 1..9: note = Table A: HLA-B*51:01H
EAKKVKPTV

SEQ ID NO: 1725 - protein, 9 aa, Severe acute respiratory syndrome coronavirus 2
  REGION 1..9: note = Table A: HLA-B*48:01H HLA-B*15:03M
KKVKPTVVV

SEQ ID NO: 1726 - protein, 9 aa, Severe acute respiratory syndrome coronavirus 2
  REGION 1..9: note = Table A: HLA-B*56:01H HLA-B*55:02H HLA-C*15:05M HLA-B*55:01H HLA-B*39:06M HLA-B*40:06H HLA-B*54:01M HLA-B*07:02H HLA-B*07:05H HLA-B*50:01H
KPTVVVNAA

SEQ ID NO: 1727 - protein, 9 aa, Severe acute respiratory syndrome coronavirus 2
  REGION 1..9: note = Table A: HLA-A*68:02H
TVVVNAANV

SEQ ID NO: 1728 - protein, 9 aa, Severe acute respiratory syndrome coronavirus 2
  REGION 1..9: note = Table A: HLA-A*30:02H HLA-B*35:01H HLA-B*38:02M HLA-B*15:01M HLA-B*15:02M HLA-B*07:05H
VVVNAANVY

SEQ ID NO: 1729 - protein, 9 aa, Severe acute respiratory syndrome coronavirus 2
  REGION 1..9: note = Table A: HLA-C*15:05H HLA-C*07:04H
VVNAANVYL

SEQ ID NO: 1730 - protein, 9 aa, Severe acute respiratory syndrome coronavirus 2
  REGION 1..9: note = Table A: HLA-A*03:02H HLA-A*11:01H HLA-A*11:02H HLA-A*34:02H
VNAANVYLK

SEQ ID NO: 1731 - protein, 9 aa, Severe acute respiratory syndrome coronavirus 2
  REGION 1..9: note = Table A: HLA-C*16:04M HLA-A*29:01H HLA-A*29:02H HLA-B*53:01M HLA-C*03:02H HLA-A*68:01M HLA-C*15:05H HLA-C*12:02H HLA-C*12:03H HLA-A*34:01H HLA-A*34:02H HLA-B*35:01M HLA-B*35:07M HLA-B*38:02H HLA-B*07:05H HLA-C*02:02H
NAANVYLKH

SEQ ID NO: 1732 - protein, 9 aa, Severe acute respiratory syndrome coronavirus 2
  REGION 1..9: note = Table A: HLA-B*55:01H HLA-A*02:03H HLA-B*38:02H
YLKHGGGVA

SEQ ID NO: 1733 - protein, 9 aa, Severe acute respiratory syndrome coronavirus 2
  REGION 1..9: note = Table A: HLA-B*35:03H HLA-C*15:05H HLA-B*35:01H HLA-B*35:02H HLA-C*08:03H HLA-B*38:02H HLA-B*39:01M HLA-B*07:05H
HGGGVAGAL

SEQ ID NO: 1734 - protein, 9 aa, Severe acute respiratory syndrome coronavirus 2
  REGION 1..9: note = Table A: HLA-A*11:01H
GGVAGALNK

SEQ ID NO: 1735 - protein, 9 aa, Severe acute respiratory syndrome coronavirus 2
  REGION 1..9: note = Table A: HLA-A*02:05H HLA-A*02:06H HLA-A*02:08H HLA-A*02:02M HLA-A*02:03M HLA-B*38:02H
GVAGALNKA

SEQ ID NO: 1736 - protein, 9 aa, Severe acute respiratory syndrome coronavirus 2
  REGION 1..9: note = Table A: HLA-A*02:02M HLA-A*02:03M HLA-B*38:02H
ALNKATNNA

SEQ ID NO: 1737 - protein, 9 aa, Severe acute respiratory syndrome coronavirus 2
  REGION 1..9: note = Table A: HLA-C*12:05H HLA-C*15:05H HLA-C*15:02H HLA-B*13:02H
KATNNAMQV

SEQ ID NO: 1738 - protein, 9 aa, Severe acute respiratory syndrome coronavirus 2
  REGION 1..9: note = Table A: HLA-A*30:02H HLA-B*15:01H HLA-B*39:01H
AMQVESDDY

SEQ ID NO: 1739 - protein, 9 aa, Severe acute respiratory syndrome coronavirus 2
  REGION 1..9: note = Table A: HLA-A*02:05H HLA-B*38:01M HLA-B*38:02M HLA-B*39:01H HLA-B*13:01M HLA-B*13:02H
MQVESDDYI

SEQ ID NO: 1740 - protein, 9 aa, Severe acute respiratory syndrome coronavirus 2
  REGION 1..9: note = Table A: HLA-B*35:02H
QVESDDYIA

SEQ ID NO: 1741 - protein, 9 aa, Severe acute respiratory syndrome coronavirus 2
  REGION 1..9: note = Table A: HLA-B*39:01H
DYIATNGPL

SEQ ID NO: 1742 - protein, 9 aa, Severe acute respiratory syndrome coronavirus 2
  REGION 1..9: note = Table A: HLA-A*11:303H HLA-A*03:01M HLA-A*03:02M HLA-A*11:01M HLA-A*11:02M HLA-A*36:01H HLA-A*68:01H HLA-A*34:01H HLA-A*34:02H HLA-C*07:27H HLA-A*66:01H
YIATNGPLK

SEQ ID NO: 1743 - protein, 9 aa, Severe acute respiratory syndrome coronavirus 2
  REGION 1..9: note = Table A: HLA-C*16:01H HLA-A*29:01H HLA-C*12:05H HLA-C*15:05M HLA-C*12:03H HLA-C*15:02H HLA-A*02:03H HLA-B*51:01M HLA-C*17:01H HLA-B*38:02H HLA-B*13:02M HLA-B*49:01H
IATNGPLKV

SEQ ID NO: 1744 - protein, 9 aa, Severe acute respiratory syndrome coronavirus 2
  REGION 1..9: note = Table A: HLA-C*15:05M HLA-B*07:02H HLA-B*07:05M
GPLKVGGSC

SEQ ID NO: 1745 - protein, 9 aa, Severe acute respiratory syndrome coronavirus 2
  REGION 1..9: note = Table A: HLA-A*11:303H HLA-C*03:04H HLA-C*08:01H
SCVLSGHNL

SEQ ID NO: 1746 - protein, 9 aa, Severe acute respiratory syndrome coronavirus 2
  REGION 1..9: note = Table A: HLA-A*03:01M HLA-A*03:02H HLA-A*11:01H HLA-A*11:02H HLA-A*36:01H HLA-A*34:02H
VLSGHNLAK

SEQ ID NO: 1747 - protein, 9 aa, Severe acute respiratory syndrome coronavirus 2
  REGION 1..9: note = Table A: HLA-B*38:02H HLA-B*15:10M
GHNLAKHCL

SEQ ID NO: 1748 - protein, 9 aa, Severe acute respiratory syndrome coronavirus 2
  REGION 1..9: note = Table A: HLA-A*02:02H
NLAKHCLHV

SEQ ID NO: 1749 - protein, 9 aa, Severe acute respiratory syndrome coronavirus 2
  REGION 1..9: note = Table A: HLA-A*02:11M HLA-A*02:04H HLA-A*02:07H HLA-A*02:01H HLA-A*02:02M HLA-A*02:03H HLA-B*38:02H HLA-B*13:02H
CLHVVGPNV

SEQ ID NO: 1750 - protein, 9 aa, Severe acute respiratory syndrome coronavirus 2
  REGION 1..9: note = Table A: HLA-B*39:01H
LHVVGPNVN

SEQ ID NO: 1751 - protein, 9 aa, Severe acute respiratory syndrome coronavirus 2
  REGION 1..9: note = Table A: HLA-A*11:303M HLA-A*74:01H HLA-A*03:01M HLA-A*03:02H HLA-A*11:01H HLA-A*11:02H HLA-A*36:01H HLA-A*33:01H HLA-A*33:03M HLA-A*26:03M HLA-B*27:05H HLA-A*30:01H HLA-A*30:02H HLA-A*68:01H HLA-A*68:02H
  REGION 1..9: note = CONT. FROM ABOVE: HLA-A*34:01H HLA-A*34:02H HLA-C*07:27M HLA- A*31:01H HLA-A*66:01H
HVVGPNVNK

SEQ ID NO: 1752 - protein, 9 aa, Severe acute respiratory syndrome coronavirus 2
  REGION 1..9: note = Table A: HLA-A*03:02H HLA-A*11:01H HLA-A*36:01M
KGEDIQLLK

SEQ ID NO: 1753 - protein, 9 aa, Severe acute respiratory syndrome coronavirus 2
  REGION 1..9: note = Table A: HLA-B*45:01H HLA-B*39:06H HLA-B*50:01H
EDIQLLKSA

SEQ ID NO: 1754 - protein, 9 aa, Severe acute respiratory syndrome coronavirus 2
  REGION 1..9: note = Table A: HLA-B*18:01H HLA-B*38:02H HLA-B*15:02M HLA-B*07:05H
DIQLLKSAY

SEQ ID NO: 1755 - protein, 9 aa, Severe acute respiratory syndrome coronavirus 2
  REGION 1..9: note = Table A: HLA-B*38:02H HLA-B*15:01H
LLKSAYENF

SEQ ID NO: 1756 - protein, 9 aa, Severe acute respiratory syndrome coronavirus 2
  REGION 1..9: note = Table A: HLA-A*11:303M HLA-C*16:04M HLA-A*03:01H HLA-A*11:01M HLA-A*11:02M HLA-B*46:01H HLA-C*03:02M HLA-A*68:01H HLA-C*15:05H HLA-C*12:02H HLA-C*12:03H HLA-A*34:02M HLA-C*07:27H HLA-B*35:01H HLA-C*08:01H
  REGION 1..9: note = CONT. FROM ABOVE: HLA-B*38:02H HLA-B*07:05H HLA-A*66:01H
SAYENFNQH

SEQ ID NO: 1757 - protein, 9 aa, Severe acute respiratory syndrome coronavirus 2
  REGION 1..9: note = Table A: HLA-B*44:02H HLA-B*44:05M HLA-C*16:04H HLA-B*45:01H HLA-B*44:03H HLA-B*18:01H HLA-A*02:11H HLA-A*68:02M HLA-C*15:02H HLA-A*02:05H HLA-A*02:02H HLA-C*08:01H HLA-B*37:01H HLA-B*38:02H HLA-B*40:01H HLA-B*40:02H
  REGION 1..9: note = CONT. FROM ABOVE: HLA-B*40:06M HLA-B*54:01H HLA-B*07:05H HLA- B*41:02H HLA-B*13:02H HLA-B*49:01H HLA-B*50:01M
YENFNQHEV

SEQ ID NO: 1758 - protein, 9 aa, Severe acute respiratory syndrome coronavirus 2
  REGION 1..9: note = Table A: HLA-A*68:02M HLA-B*14:02H
ENFNQHEVL

SEQ ID NO: 1759 - protein, 9 aa, Severe acute respiratory syndrome coronavirus 2
  REGION 1..9: note = Table A: HLA-C*04:03H HLA-A*02:02H HLA-A*24:07H
NFNQHEVLL

SEQ ID NO: 1760 - protein, 9 aa, Severe acute respiratory syndrome coronavirus 2
  REGION 1..9: note = Table A: HLA-B*39:06H
NQHEVLLAP

SEQ ID NO: 1761 - protein, 9 aa, Severe acute respiratory syndrome coronavirus 2
  REGION 1..9: note = Table A: HLA-B*38:02M HLA-B*39:01H
QHEVLLAPL

SEQ ID NO: 1762 - protein, 9 aa, Severe acute respiratory syndrome coronavirus 2
  REGION 1..9: note = Table A: HLA-B*44:05H HLA-B*44:03H HLA-B*40:01M HLA-B*40:02M HLA-B*40:06M HLA-B*41:02H HLA-B*49:01H
HEVLLAPLL

SEQ ID NO: 1763 - protein, 9 aa, Severe acute respiratory syndrome coronavirus 2
  REGION 1..9: note = Table A: HLA-A*11:303H HLA-A*02:01H HLA-A*02:03H HLA-B*38:02H HLA-B*54:01H
VLLAPLLSA

SEQ ID NO: 1764 - protein, 9 aa, Severe acute respiratory syndrome coronavirus 2
  REGION 1..9: note = Table A: HLA-C*15:05M HLA-B*35:01H HLA-B*07:02H HLA-B*07:05M
APLLSAGIF

SEQ ID NO: 1765 - protein, 9 aa, Severe acute respiratory syndrome coronavirus 2
  REGION 1..9: note = Table A: HLA-A*02:01H HLA-A*02:03H
LLSAGIFGA

SEQ ID NO: 1766 - protein, 9 aa, Severe acute respiratory syndrome coronavirus 2
  REGION 1..9: note = Table A: HLA-B*38:02H
AGIFGADPI

SEQ ID NO: 1767 - protein, 9 aa, Severe acute respiratory syndrome coronavirus 2
  REGION 1..9: note = Table A: HLA-B*48:01H HLA-A*11:303H HLA-C*16:01M HLA-C*16:04M HLA-B*46:01M HLA-C*06:02H HLA-B*08:01H HLA-C*04:03H HLA-C*03:03H HLA-C*12:05M HLA-A*02:11M HLA-C*03:02M HLA-C*03:04H HLA-A*68:02M HLA-B*35:03M
  REGION 1..9: note = CONT. FROM ABOVE: HLA-C*15:05H HLA-C*12:02M HLA-C*12:03M HLA- C*15:02H HLA-A*02:04M HLA-A*02:05H HLA-A*02:06H HLA-A*02:07H HLA-A*02:08H HLA-B*14:01H HLA-A*02:01H HLA-A*02:02H HLA-A*02 :03H HLA-A*34:01H HLA-C*07:27M HLA-B*35:01M HLA-B*35:02M
  REGION 1..9: note = CONT. FROM ABOVE: HLA-B*35:08H HLA-C*17:01M HLA-B*35:07H HLA- C*08:01H HLA-C*08:02M HLA-C*08:03H HLA-B*35:12H HLA-B*38:01H HLA-B*38:02M HLA-B*40:01H HLA-B*40:02H HLA-B*07:04H HLA-B*39 :01M HLA-B*41:02H HLA-B*57:03H HLA-C*02:02H HLA-B*15:10H
  REGION 1..9: note = CONT. FROM ABOVE: HLA-C*07:04M HLA-A*66:01H
FGADPIHSL

SEQ ID NO: 1768 - protein, 9 aa, Severe acute respiratory syndrome coronavirus 2
  REGION 1..9: note = Table A: HLA-A*33:03H HLA-A*68:01H HLA-A*34:01H HLA-A*34:02H HLA-A*66:01H
GADPIHSLR

SEQ ID NO: 1769 - protein, 9 aa, Severe acute respiratory syndrome coronavirus 2
  REGION 1..9: note = Table A: HLA-B*54:01H
DPIHSLRVC

SEQ ID NO: 1770 - protein, 9 aa, Severe acute respiratory syndrome coronavirus 2
  REGION 1..9: note = Table A: HLA-A*02:03H HLA-B*38:02M
SLRVCVDTV

SEQ ID NO: 1771 - protein, 9 aa, Severe acute respiratory syndrome coronavirus 2
  REGION 1..9: note = Table A: HLA-C*04:03H HLA-A*02:11M HLA-A*02:06H HLA-A*02:07M HLA-A*02:01H
CVDTVRTNV

SEQ ID NO: 1772 - protein, 9 aa, Severe acute respiratory syndrome coronavirus 2
  REGION 1..9: note = Table A: HLA-C*16:01H HLA-B*18:01H HLA-B*37:01H
VDTVRTNVY

SEQ ID NO: 1773 - protein, 9 aa, Severe acute respiratory syndrome coronavirus 2
  REGION 1..9: note = Table A: HLA-A*26:01H HLA-A*68:02M HLA-A*34:01H HLA-A*34:02H HLA-B*57:03H HLA-A*66:01M
DTVRTNVYL

SEQ ID NO: 1774 - protein, 9 aa, Severe acute respiratory syndrome coronavirus 2
  REGION 1..9: note = Table A: HLA-C*06:02H HLA-B*27:05H HLA-B*13:02H
VRTNVYLAV

SEQ ID NO: 1775 - protein, 9 aa, Severe acute respiratory syndrome coronavirus 2
  REGION 1..9: note = Table A: HLA-B*58:01M HLA-B*58:02M HLA-A*74:01H HLA-A*36:01H HLA-B*57:01M HLA-C*07:01H HLA-A*30:02H HLA-C*15:05H HLA-C*15:02M HLA-A*32:01H HLA-B*57:03H
RTNVYLAVF

SEQ ID NO: 1776 - protein, 9 aa, Severe acute respiratory syndrome coronavirus 2
  REGION 1..9: note = Table A: HLA-A*34:02M
NVYLAVFDK

SEQ ID NO: 1777 - protein, 9 aa, Severe acute respiratory syndrome coronavirus 2
  REGION 1..9: note = Table A: HLA-A*02:11H HLA-A*02:04H HLA-A*02:02H HLA-A*02:03H
YLAVFDKNL

SEQ ID NO: 1778 - protein, 9 aa, Severe acute respiratory syndrome coronavirus 2
  REGION 1..9: note = Table A: HLA-A*36:01H HLA-B*35:01H HLA-B*35:08H HLA-B*35:07M
LAVFDKNLY

SEQ ID NO: 1779 - protein, 9 aa, Severe acute respiratory syndrome coronavirus 2
  REGION 1..9: note = Table A: HLA-A*36:01H HLA-C*04:03H
VFDKNLYDK

SEQ ID NO: 1780 - protein, 9 aa, Severe acute respiratory syndrome coronavirus 2
  REGION 1..9: note = Table A: HLA-A*02:02H HLA-B*40:02H
FDKNLYDKL

SEQ ID NO: 1781 - protein, 9 aa, Severe acute respiratory syndrome coronavirus 2
  REGION 1..9: note = Table A: HLA-C*14:02H HLA-C*14:03H HLA-C*04:01M HLA-C*04:03H HLA-C*07:02H HLA-A*02:07H HLA-A*24:02M HLA-A*24:07M HLA-C*08:01H HLA-A*23:01H
LYDKLVSSF

SEQ ID NO: 1782 - protein, 9 aa, Severe acute respiratory syndrome coronavirus 2
  REGION 1..9: note = Table A: HLA-B*37:01H HLA-B*41:02H
YDKLVSSFL

SEQ ID NO: 1783 - protein, 9 aa, Severe acute respiratory syndrome coronavirus 2
  REGION 1..9: note = Table A: HLA-A*11:303H HLA-C*15:05H HLA-C*15:02H HLA-A*02:06H HLA-A*02:07H HLA-C*08:01H HLA-B*38:02H HLA-B*40:06H HLA-B*15:01H HLA-B*13:01H HLA-B*13:02H
KLVSSFLEM

SEQ ID NO: 1784 - protein, 9 aa, Severe acute respiratory syndrome coronavirus 2
  REGION 1..9: note = Table A: HLA-A*03:02H HLA-A*11:01H HLA-A*11:02M HLA-A*36:01H HLA-A*34:02M
LVSSFLEMK

SEQ ID NO: 1785 - protein, 9 aa, Severe acute respiratory syndrome coronavirus 2
  REGION 1..9: note = Table A: HLA-C*14:03H
SFLEMKSEK

SEQ ID NO: 1786 - protein, 9 aa, Severe acute respiratory syndrome coronavirus 2
  REGION 1..9: note = Table A: HLA-B*41:02H HLA-B*49:01M
LEMKSEKQV

SEQ ID NO: 1787 - protein, 9 aa, Severe acute respiratory syndrome coronavirus 2
  REGION 1..9: note = Table A: HLA-B*44:02M HLA-B*44:05H HLA-B*45:01H HLA-B*44:03M HLA-B*38:02H HLA-B*40:01H HLA-B*40:02H HLA-B*41:02H HLA-B*13:02M HLA-B*49:01H
SEKQVEQKI

SEQ ID NO: 1788 - protein, 9 aa, Severe acute respiratory syndrome coronavirus 2
  REGION 1..9: note = Table A: HLA-A*68:02H HLA-A*02:05H HLA-A*02:08H HLA-B*38:02H
QVEQKIAEI

SEQ ID NO: 1789 - protein, 9 aa, Severe acute respiratory syndrome coronavirus 2
  REGION 1..9: note = Table A: HLA-B*45:01M HLA-B*40:06H
VEQKIAEIP

SEQ ID NO: 1790 - protein, 9 aa, Severe acute respiratory syndrome coronavirus 2
  REGION 1..9: note = Table A: HLA-C*04:03H HLA-C*08:01H HLA-C*08:02H HLA-C*05:01H
IAEIPKEEV

SEQ ID NO: 1791 - protein, 9 aa, Severe acute respiratory syndrome coronavirus 2
  REGION 1..9: note = Table A: HLA-B*45:01H
AEIPKEEVK

SEQ ID NO: 1792 - protein, 9 aa, Severe acute respiratory syndrome coronavirus 2
  REGION 1..9: note = Table A: HLA-B*42:01H HLA-B*35:07H HLA-B*07:04M
IPKEEVKPF

SEQ ID NO: 1793 - protein, 9 aa, Severe acute respiratory syndrome coronavirus 2
  REGION 1..9: note = Table A: HLA-A*26:01H HLA-A*26:03H
EVKPFITES

SEQ ID NO: 1794 - protein, 9 aa, Severe acute respiratory syndrome coronavirus 2
  REGION 1..9: note = Table A: HLA-A*11:303H HLA-C*16:01H HLA-C*03:03H HLA-A*02:11M HLA-C*03:02H HLA-C*03:04H HLA-A*02:04H HLA-A*02:06M HLA-A*02:07H HLA-B*14:01H HLA-A*02:01H HLA-A*02:02H HLA-A*02:03H HLA-C*08:01H HLA-B*38:02H
  REGION 1..9: note = CONT. FROM ABOVE: HLA-B*13:02H
FITESKPSV

SEQ ID NO: 1795 - protein, 9 aa, Severe acute respiratory syndrome coronavirus 2
  REGION 1..9: note = Table A: HLA-A*33:01M HLA-A*33:03H HLA-A*26:03H HLA-A*68:01M HLA-A*68:02H HLA-A*34:01M HLA-A*34:02H HLA-A*31:01H HLA-A*66:01M
ESKPSVEQR

SEQ ID NO: 1796 - protein, 9 aa, Severe acute respiratory syndrome coronavirus 2
  REGION 1..9: note = Table A: HLA-B*13:01H
KQDDKKIKA

SEQ ID NO: 1797 - protein, 9 aa, Severe acute respiratory syndrome coronavirus 2
  REGION 1..9: note = Table A: HLA-A*02:08H HLA-A*02:03H
KIKACVEEV

SEQ ID NO: 1798 - protein, 9 aa, Severe acute respiratory syndrome coronavirus 2
  REGION 1..9: note = Table A: HLA-A*11:303M HLA-C*04:03M HLA-A*02:11H HLA-A*68:02H HLA-B*35:03H HLA-C*15:05H HLA-A*02:05M HLA-A*02:06H HLA-A*02:07M HLA-A*02:08H HLA-A*02:01H HLA-A*02:02H HLA-B*35:02H HLA-C*08:01H HLA-C*08:02M
  REGION 1..9: note = CONT. FROM ABOVE: HLA-B*35:12H HLA-B*38:02H HLA-B*39:01H HLA- B*07:05H HLA-C*05:01H
CVEEVTTTL

SEQ ID NO: 1799 - protein, 9 aa, Severe acute respiratory syndrome coronavirus 2
  REGION 1..9: note = Table A: HLA-A*11:01H
VTTTLEETK

SEQ ID NO: 1800 - protein, 9 aa, Severe acute respiratory syndrome coronavirus 2
  REGION 1..9: note = Table A: HLA-B*58:01H HLA-B*35:02H HLA-B*35:08H HLA-B*57:03H
TTTLEETKF

SEQ ID NO: 1801 - protein, 9 aa, Severe acute respiratory syndrome coronavirus 2
  REGION 1..9: note = Table A: HLA-A*68:02H
TTLEETKFL

SEQ ID NO: 1802 - protein, 9 aa, Severe acute respiratory syndrome coronavirus 2
  REGION 1..9: note = Table A: HLA-B*45:01H
EETKFLTEN

SEQ ID NO: 1803 - protein, 9 aa, Severe acute respiratory syndrome coronavirus 2
  REGION 1..9: note = Table A: HLA-A*33:03H HLA-A*68:02M
ETKFLTENL

SEQ ID NO: 1804 - protein, 9 aa, Severe acute respiratory syndrome coronavirus 2
  REGION 1..9: note = Table A: HLA-A*24:07M HLA-A*23:01H
KFLTENLLL

SEQ ID NO: 1805 - protein, 9 aa, Severe acute respiratory syndrome coronavirus 2
  REGION 1..9: note = Table A: HLA-A*29:01H HLA-A*29:02M HLA-B*38:02H
FLTENLLLY

SEQ ID NO: 1806 - protein, 9 aa, Severe acute respiratory syndrome coronavirus 2
  REGION 1..9: note = Table A: HLA-C*14:02H HLA-C*14:03M HLA-A*29:02H HLA-A*30:02H HLA-A*24:02M HLA-A*24:07H HLA-C*08:01H HLA-A*23:01M HLA-B*39:01H
LYIDINGNL

SEQ ID NO: 1807 - protein, 9 aa, Severe acute respiratory syndrome coronavirus 2
  REGION 1..9: note = Table A: HLA-C*04:03H
YIDINGNLH

SEQ ID NO: 1808 - protein, 9 aa, Severe acute respiratory syndrome coronavirus 2
  REGION 1..9: note = Table A: HLA-B*50:01H
IDINGNLHP

SEQ ID NO: 1809 - protein, 9 aa, Severe acute respiratory syndrome coronavirus 2
  REGION 1..9: note = Table A: HLA-B*39:06H
NGNLHPDSA

SEQ ID NO: 1810 - protein, 9 aa, Severe acute respiratory syndrome coronavirus 2
  REGION 1..9: note = Table A: HLA-A*11:303H HLA-B*35:03H HLA-A*02:05H HLA-B*14:01H HLA-A*02:02H HLA-A*02:03H HLA-B*35:02H HLA-C*08:01H HLA-B*35:12H HLA-B*38:01H HLA-B*38:02M HLA-B*15:02H HLA-B*39:01H HLA-B*15:10H
NLHPDSATL

SEQ ID NO: 1811 - protein, 9 aa, Severe acute respiratory syndrome coronavirus 2
  REGION 1..9: note = Table A: HLA-B*38:02H
LHPDSATLV

SEQ ID NO: 1812 - protein, 9 aa, Severe acute respiratory syndrome coronavirus 2
  REGION 1..9: note = Table A: HLA-B*58:01H HLA-C*16:04H HLA-B*53:01H HLA-A*68:02H HLA-B*35:03M HLA-A*02:05H HLA-A*02:06H HLA-A*02:07H HLA-A*02:08H HLA-A*02:02H HLA-B*35:01M HLA-B*35:02M HLA-B*35:08H HLA-B*35:07H HLA-B*35:12M HLA-B*38:01H
  REGION 1..9: note = CONT. FROM ABOVE: HLA-B*38:02H HLA-B*15:01H HLA-B*15:02H HLA- B*57:03M HLA-B*13:01H
LVSDIDITF

SEQ ID NO: 1813 - protein, 9 aa, Severe acute respiratory syndrome coronavirus 2
  REGION 1..9: note = Table A: HLA-C*04:03H HLA-A*02:07H HLA-C*17:01H HLA-C*08:01H HLA-C*08:02M HLA-C*05:01M
VSDIDITFL

SEQ ID NO: 1814 - protein, 9 aa, Severe acute respiratory syndrome coronavirus 2
  REGION 1..9: note = Table A: HLA-B*27:02H
SDIDITFLK

SEQ ID NO: 1815 - protein, 9 aa, Severe acute respiratory syndrome coronavirus 2
  REGION 1..9: note = Table A: HLA-A*36:01H HLA-A*34:02M
DIDITFLKK

SEQ ID NO: 1816 - protein, 9 aa, Severe acute respiratory syndrome coronavirus 2
  REGION 1..9: note = Table A: HLA-B*08:01H HLA-A*02:11H HLA-A*02:04H HLA-A*02:02M HLA-A*02:03H HLA-B*38:02H
FLKKDAPYI

SEQ ID NO: 1817 - protein, 9 aa, Severe acute respiratory syndrome coronavirus 2
  REGION 1..9: note = Table A: HLA-A*26:01H HLA-A*68:02H HLA-B*51:01M
DAPYIVGDV

SEQ ID NO: 1818 - protein, 9 aa, Severe acute respiratory syndrome coronavirus 2
  REGION 1..9: note = Table A: HLA-B*42:01H HLA-B*56:01M HLA-B*55:02H HLA-B*35:03H HLA-C*15:05H HLA-B*55:01M HLA-B*35:02H HLA-B*51:01M HLA-C*08:01H HLA-B*38:02H HLA-B*39:06H HLA-B*54:01M HLA-B*07:02M HLA-B*07:04H HLA-B*07:05M
APYIVGDVV

SEQ ID NO: 1819 - protein, 9 aa, Severe acute respiratory syndrome coronavirus 2
  REGION 1..9: note = Table A: HLA-A*02:07H
VGDVVQEGV

SEQ ID NO: 1820 - protein, 9 aa, Severe acute respiratory syndrome coronavirus 2
  REGION 1..9: note = Table A: HLA-B*40:01H HLA-B*40:02H HLA-B*41:02H
GDVVQEGVL

SEQ ID NO: 1821 - protein, 9 aa, Severe acute respiratory syndrome coronavirus 2
  REGION 1..9: note = Table A: HLA-A*11:303H HLA-B*55:02H HLA-B*55:01H HLA-A*02:05H HLA-A*02:06H HLA-A*02:08H HLA-A*02:01H HLA-A*02:03H HLA-B*38:02H
VVQEGVLTA

SEQ ID NO: 1822 - protein, 9 aa, Severe acute respiratory syndrome coronavirus 2
  REGION 1..9: note = Table A: HLA-A*02:05H HLA-A*02:06H HLA-A*02:01H HLA-B*52:01H HLA-B*38:02H HLA-B*39:01H HLA-B*13:02M
VQEGVLTAV

SEQ ID NO: 1823 - protein, 9 aa, Severe acute respiratory syndrome coronavirus 2
  REGION 1..9: note = Table A: HLA-B*49:01H
QEGVLTAVV

SEQ ID NO: 1824 - protein, 9 aa, Severe acute respiratory syndrome coronavirus 2
  REGION 1..9: note = Table A: HLA-A*02:01H
VLTAVVIPT

SEQ ID NO: 1825 - protein, 9 aa, Severe acute respiratory syndrome coronavirus 2
  REGION 1..9: note = Table A: HLA-A*11:303M HLA-A*74:01H HLA-A*03:01M HLA-A*03:02M HLA-A*11:01H HLA-A*11:02M HLA-A*36:01H HLA-B*57:01H HLA-A*30:01H HLA-A*30:02H HLA-A*68:01M HLA-A*68:02H HLA-A*34:02H HLA-C*07:27H HLA-B*57:03H
LTAVVIPTK

SEQ ID NO: 1826 - protein, 9 aa, Severe acute respiratory syndrome coronavirus 2
  REGION 1..9: note = Table A: HLA-A*68:01M HLA-A*34:01H HLA-A*34:02M HLA-A*66:01H
TAVVIPTKK

SEQ ID NO: 1827 - protein, 9 aa, Severe acute respiratory syndrome coronavirus 2
  REGION 1..9: note = Table A: HLA-A*02:08H
AVVIPTKKA

SEQ ID NO: 1828 - protein, 9 aa, Severe acute respiratory syndrome coronavirus 2
  REGION 1..9: note = Table A: HLA-B*15:03M
KKAGGTTEM

SEQ ID NO: 1829 - protein, 9 aa, Severe acute respiratory syndrome coronavirus 2
  REGION 1..9: note = Table A: HLA-C*15:05H
KAGGTTEML

SEQ ID NO: 1830 - protein, 9 aa, Severe acute respiratory syndrome coronavirus 2
  REGION 1..9: note = Table A: HLA-A*11:01H HLA-A*36:01H
GGTTEMLAK

SEQ ID NO: 1831 - protein, 9 aa, Severe acute respiratory syndrome coronavirus 2
  REGION 1..9: note = Table A: HLA-A*02:05M HLA-A*02:06H HLA-A*02:08M HLA-A*02:02H
GTTEMLAKA

SEQ ID NO: 1832 - protein, 9 aa, Severe acute respiratory syndrome coronavirus 2
  REGION 1..9: note = Table A: HLA-A*34:02M
EMLAKALRK

SEQ ID NO: 1833 - protein, 9 aa, Severe acute respiratory syndrome coronavirus 2
  REGION 1..9: note = Table A: HLA-A*02:11H HLA-A*02:02M HLA-A*02:03M HLA-B*38:02H
MLAKALRKV

SEQ ID NO: 1834 - protein, 9 aa, Severe acute respiratory syndrome coronavirus 2
  REGION 1..9: note = Table A: HLA-B*27:05H HLA-C*07:02H HLA-B*27:02H HLA-A*30:02H HLA-B*38:02H
LRKVPTDNY

SEQ ID NO: 1835 - protein, 9 aa, Severe acute respiratory syndrome coronavirus 2
  REGION 1..9: note = Table A: HLA-B*38:02H HLA-B*15:03H
RKVPTDNYI

SEQ ID NO: 1836 - protein, 9 aa, Severe acute respiratory syndrome coronavirus 2
  REGION 1..9: note = Table A: HLA-B*56:01H HLA-B*55:02M HLA-C*15:05H HLA-B*54:01H
VPTDNYITT

SEQ ID NO: 1837 - protein, 9 aa, Severe acute respiratory syndrome coronavirus 2
  REGION 1..9: note = Table A: HLA-B*58:01H HLA-A*36:01M HLA-A*01:01H
PTDNYITTY

SEQ ID NO: 1838 - protein, 9 aa, Severe acute respiratory syndrome coronavirus 2
  REGION 1..9: note = Table A: HLA-A*11:303H HLA-C*03:03M HLA-C*03:04M HLA-A*68:02H HLA-C*15:05H HLA-C*08:01H HLA-C*08:03H HLA-A*66:01H
ITTYPGQGL

SEQ ID NO: 1839 - protein, 9 aa, Severe acute respiratory syndrome coronavirus 2
  REGION 1..9: note = Table A: HLA-B*35:01M HLA-B*35:08H HLA-B*35:07M HLA-B*38:02H HLA-B*07:05H HLA-B*15:11H
YPGQGLNGY

SEQ ID NO: 1840 - protein, 9 aa, Severe acute respiratory syndrome coronavirus 2
  REGION 1..9: note = Table A: HLA-B*13:02M
GQGLNGYTV

SEQ ID NO: 1841 - protein, 9 aa, Severe acute respiratory syndrome coronavirus 2
  REGION 1..9: note = Table A: HLA-A*11:303H HLA-C*12:05H HLA-A*02:11H HLA-C*03:04H HLA-A*68:02M HLA-C*15:05H HLA-C*12:03H HLA-C*15:02H HLA-A*02:05M HLA-A*02:06M HLA-A*02:08H HLA-A*02:02H HLA-A*02:03H HLA-C*08:01H HLA-B*38:02H
YTVEEAKTV

SEQ ID NO: 1842 - protein, 9 aa, Severe acute respiratory syndrome coronavirus 2
  REGION 1..9: note = Table A: HLA-A*11:303H HLA-C*04:03H HLA-C*03:04H HLA-B*35:03H HLA-C*15:05M HLA-C*01:02H HLA-A*02:05H HLA-B*14:01H HLA-B*35:01H HLA-B*35:02H HLA-B*35:08H HLA-C*08:01H HLA-C*08:02M HLA-B*35:12H HLA-B*38:01H
  REGION 1..9: note = CONT. FROM ABOVE: HLA-B*38:02M HLA-B*40:01H HLA-B*07:02H HLA- B*07:04H HLA-B*15:02M HLA-B*39:01M HLA-B*07:05H HLA-B*41:02H HLA-C*05:01H HLA-B*15:10H HLA-C*07:04H
TVEEAKTVL

SEQ ID NO: 1843 - protein, 9 aa, Severe acute respiratory syndrome coronavirus 2
  REGION 1..9: note = Table A: HLA-B*49:01H
VEEAKTVLK

SEQ ID NO: 1844 - protein, 9 aa, Severe acute respiratory syndrome coronavirus 2
  REGION 1..9: note = Table A: HLA-A*68:01H HLA-A*34:01H HLA-A*34:02M
EEAKTVLKK

SEQ ID NO: 1845 - protein, 9 aa, Severe acute respiratory syndrome coronavirus 2
  REGION 1..9: note = Table A: HLA-C*12:05H HLA-A*02:11H HLA-C*03:02H HLA-A*68:02H HLA-C*12:03H HLA-A*02:04H HLA-B*51:01H HLA-C*08:01H HLA-B*38:02H HLA-B*54:01H HLA-B*57:03H
SAFYILPSI

SEQ ID NO: 1846 - protein, 9 aa, Severe acute respiratory syndrome coronavirus 2
  REGION 1..9: note = Table A: HLA-C*14:03H HLA-B*52:01H
AFYILPSII

SEQ ID NO: 1847 - protein, 9 aa, Severe acute respiratory syndrome coronavirus 2
  REGION 1..9: note = Table A: HLA-A*34:02H
LPSIISNEK

SEQ ID NO: 1848 - protein, 9 aa, Severe acute respiratory syndrome coronavirus 2
  REGION 1..9: note = Table A: HLA-B*13:01H HLA-B*13:02H
IISNEKQEI

SEQ ID NO: 1849 - protein, 9 aa, Severe acute respiratory syndrome coronavirus 2
  REGION 1..9: note = Table A: HLA-B*58:01H HLA-B*58:02H HLA-C*16:01H HLA-C*03:04H HLA-C*15:05H HLA-C*15:02H HLA-B*57:03M
ISNEKQEIL

SEQ ID NO: 1850 - protein, 9 aa, Severe acute respiratory syndrome coronavirus 2
  REGION 1..9: note = Table A: HLA-B*45:01H
NEKQEILGT

SEQ ID NO: 1851 - protein, 9 aa, Severe acute respiratory syndrome coronavirus 2
  REGION 1..9: note = Table A: HLA-B*58:01H HLA-B*44:02H HLA-B*44:05H HLA-C*16:04M HLA-B*45:01M HLA-B*44:03H HLA-B*18:01H HLA-B*27:02H HLA-B*15:13H HLA-B*38:02H HLA-B*40:01H HLA-B*40:02H HLA-B*07:05H HLA-B*41:02H HLA-B*49:01H HLA-B*50:01H
QEILGTVSW

SEQ ID NO: 1852 - protein, 9 aa, Severe acute respiratory syndrome coronavirus 2
  REGION 1..9: note = Table A: HLA-A*02:11M HLA-A*02:04M HLA-A*02:07H HLA-A*02:01M HLA-A*02:02H HLA-B*38:02H
ILGTVSWNL

SEQ ID NO: 1853 - protein, 9 aa, Severe acute respiratory syndrome coronavirus 2
  REGION 1..9: note = Table A: HLA-C*16:01H HLA-B*07:04H
TVSWNLREM

SEQ ID NO: 1854 - protein, 9 aa, Severe acute respiratory syndrome coronavirus 2
  REGION 1..9: note = Table A: HLA-A*02:11M HLA-B*57:03M
VSWNLREML

SEQ ID NO: 1855 - protein, 9 aa, Severe acute respiratory syndrome coronavirus 2
  REGION 1..9: note = Table A: HLA-A*02:02H HLA-A*02:03M HLA-B*38:02H
NLREMLAHA

SEQ ID NO: 1856 - protein, 9 aa, Severe acute respiratory syndrome coronavirus 2
  REGION 1..9: note = Table A: HLA-A*34:01H
MLAHAEETR

SEQ ID NO: 1857 - protein, 9 aa, Severe acute respiratory syndrome coronavirus 2
  REGION 1..9: note = Table A: HLA-B*38:01M HLA-B*38:02H HLA-B*39:01M HLA-B*15:10H
AHAEETRKL

SEQ ID NO: 1858 - protein, 9 aa, Severe acute respiratory syndrome coronavirus 2
  REGION 1..9: note = Table A: HLA-B*53:01M HLA-B*35:03H HLA-B*35:01H HLA-B*35:02H HLA-B*35:07H HLA-B*35:12H HLA-B*38:02H
HAEETRKLM

SEQ ID NO: 1859 - protein, 9 aa, Severe acute respiratory syndrome coronavirus 2
  REGION 1..9: note = Table A: HLA-B*45:01H HLA-B*50:01H
AEETRKLMP

SEQ ID NO: 1860 - protein, 9 aa, Severe acute respiratory syndrome coronavirus 2
  REGION 1..9: note = Table A: HLA-A*02:11M HLA-A*02:01M
KLMPVCVET

SEQ ID NO: 1861 - protein, 9 aa, Severe acute respiratory syndrome coronavirus 2
  REGION 1..9: note = Table A: HLA-B*56:01H HLA-B*55:02H HLA-B*35:02H HLA-B*35:12H HLA-B*54:01H
MPVCVETKA

SEQ ID NO: 1862 - protein, 9 aa, Severe acute respiratory syndrome coronavirus 2
  REGION 1..9: note = Table A: HLA-B*40:02H HLA-B*40:06H
VETKAIVST

SEQ ID NO: 1863 - protein, 9 aa, Severe acute respiratory syndrome coronavirus 2
  REGION 1..9: note = Table A: HLA-B*57:01H HLA-A*25:01M HLA-A*26:01M HLA-A*26:02H HLA-A*26:03H HLA-A*68:02H HLA-B*38:02H HLA-B*57:03H
ETKAIVSTI

SEQ ID NO: 1864 - protein, 9 aa, Severe acute respiratory syndrome coronavirus 2
  REGION 1..9: note = Table A: HLA-B*58:02H HLA-A*74:01H HLA-A*03:01H HLA-A*11:01H HLA-A*11:02H HLA-B*57:01H HLA-A*33:03H HLA-A*30:02H HLA-A*68:01M HLA-A*34:01M HLA-A*34:02H HLA-A*31:01M HLA-B*57:03H HLA-A*66:01M
KAIVSTIQR

SEQ ID NO: 1865 - protein, 9 aa, Severe acute respiratory syndrome coronavirus 2
  REGION 1..9: note = Table A: HLA-A*11:303H HLA-A*03:01H HLA-A*03:02H HLA-A*11:01H HLA-A*11:02H HLA-A*30:02H HLA-A*34:02H HLA-C*07:27M HLA-B*13:02H
AIVSTIQRK

SEQ ID NO: 1866 - protein, 9 aa, Severe acute respiratory syndrome coronavirus 2
  REGION 1..9: note = Table A: HLA-B*58:01M HLA-B*58:02M HLA-C*16:01M HLA-A*03:01H HLA-B*57:01M HLA-A*26:01H HLA-A*29:01M HLA-A*29:02H HLA-A*30:02H HLA-C*15:05H HLA-C*12:02H HLA-C*12:03H HLA-A*34:02H HLA-B*35:01H HLA-B*35:07H HLA-B*38:02M
  REGION 1..9: note = CONT. FROM ABOVE: HLA-A*32:01H HLA-B*15:01M HLA-B*15:02H HLA- B*07:05H HLA-B*57:03H HLA-C*02:02H
IVSTIQRKY

SEQ ID NO: 1867 - protein, 9 aa, Severe acute respiratory syndrome coronavirus 2
  REGION 1..9: note = Table A: HLA-A*02:11M HLA-A*02:05H HLA-A*02:08M HLA-A*02:01H HLA-A*02:02H HLA-B*13:02M
KGIKIQEGV

SEQ ID NO: 1868 - protein, 9 aa, Severe acute respiratory syndrome coronavirus 2
  REGION 1..9: note = Table A: HLA-B*58:01H HLA-C*14:03H HLA-A*11:303H HLA-A*03:02H HLA-A*36:01H HLA-B*46:01M HLA-A*30:02M HLA-C*12:02H HLA-B*38:02H HLA-B*15:01H HLA-B*15:02H HLA-B*15:03H HLA-B*39:01H HLA-B*07:05H
KIQEGVVDY

SEQ ID NO: 1869 - protein, 9 aa, Severe acute respiratory syndrome coronavirus 2
  REGION 1..9: note = Table A: HLA-B*45:01H
QEGVVDYGA

SEQ ID NO: 1870 - protein, 9 aa, Severe acute respiratory syndrome coronavirus 2
  REGION 1..9: note = Table A: HLA-A*26:03H HLA-A*34:01H HLA-A*66:01H
EGVVDYGAR

SEQ ID NO: 1871 - protein, 9 aa, Severe acute respiratory syndrome coronavirus 2
  REGION 1..9: note = Table A: HLA-A*26:02H HLA-A*34:01H HLA-B*15:01H HLA-A*66:01H
GVVDYGARF

SEQ ID NO: 1872 - protein, 9 aa, Severe acute respiratory syndrome coronavirus 2
  REGION 1..9: note = Table A: HLA-A*36:01M HLA-A*29:02H HLA-A*01:01H HLA-C*04:03H HLA-A*30:02H
VVDYGARFY

SEQ ID NO: 1873 - protein, 9 aa, Severe acute respiratory syndrome coronavirus 2
  REGION 1..9: note = Table A: HLA-A*33:01H
DYGARFYFY

SEQ ID NO: 1874 - protein, 9 aa, Severe acute respiratory syndrome coronavirus 2
  REGION 1..9: note = Table A: HLA-B*27:05M
ARFYFYTSK

SEQ ID NO: 1875 - protein, 9 aa, Severe acute respiratory syndrome coronavirus 2
  REGION 1..9: note = Table A: HLA-C*14:03H
FYFYTSKTT

SEQ ID NO: 1876 - protein, 9 aa, Severe acute respiratory syndrome coronavirus 2
  REGION 1..9: note = Table A: HLA-C*14:02M HLA-C*14:03H HLA-B*08:01H HLA-A*02:11H HLA-C*15:05H HLA-A*02:03H HLA-B*51:01M HLA-B*52:01H HLA-B*38:02H HLA-B*54:01H HLA-B*15:02H HLA-B*07:05H HLA-B*49:01H
YFYTSKTTV

SEQ ID NO: 1877 - protein, 9 aa, Severe acute respiratory syndrome coronavirus 2
  REGION 1..9: note = Table A: HLA-C*14:02H HLA-C*14:03H
FYTSKTTVA

SEQ ID NO: 1878 - protein, 9 aa, Severe acute respiratory syndrome coronavirus 2
  REGION 1..9: note = Table A: HLA-B*46:01H HLA-B*08:01M HLA-C*15:05H HLA-A*02:08H HLA-A*02:03H HLA-B*38:02H HLA-B*07:04H HLA-B*41:02H
TSKTTVASL

SEQ ID NO: 1879 - protein, 9 aa, Severe acute respiratory syndrome coronavirus 2
  REGION 1..9: note = Table A: HLA-A*11:303H HLA-C*16:04H HLA-A*25:01H HLA-A*26:01H HLA-A*26:02M HLA-A*26:03H HLA-A*02:11H HLA-A*68:01H HLA-A*68:02H HLA-B*35:03M HLA-C*15:05M HLA-A*02:04M HLA-A*02:05H HLA-A*02:06M HLA-A*02:07H
  REGION 1..9: note = CONT. FROM ABOVE: HLA-A*02:08H HLA-B*14:01H HLA-A*02:01H HLA- A*02:02H HLA-A*02:03M HLA-A*34:01H HLA-B*35:01M HLA-B*35:02H HLA-C*08:01M HLA-B*35:12H HLA-B*38:01H HLA-B*38:02H HLA-B*40 :06H HLA-B*07:02H HLA-B*15:01H HLA-B*15:02M HLA-B*39:01M
  REGION 1..9: note = CONT. FROM ABOVE: HLA-B*07:05M HLA-B*57:03H HLA-B*13:02H HLA- C*07:04H
TVASLINTL

SEQ ID NO: 1880 - protein, 9 aa, Severe acute respiratory syndrome coronavirus 2
  REGION 1..9: note = Table A: HLA-A*11:303H HLA-A*02:04M HLA-A*02:05M HLA-A*02:01H HLA-A*02:02M HLA-A*02:03M HLA-B*38:02H
SLINTLNDL

SEQ ID NO: 1881 - protein, 9 aa, Severe acute respiratory syndrome coronavirus 2
  REGION 1..9: note = Table A: HLA-A*11:303H HLA-A*02:11H HLA-B*35:03H HLA-A*02:04M HLA-A*02:05M HLA-A*02:07H HLA-B*14:01H HLA-A*02:01M HLA-A*02:02H HLA-A*02:03H HLA-B*38:01H HLA-B*38:02M HLA-B*39:01H
TLNDLNETL

SEQ ID NO: 1882 - protein, 9 aa, Severe acute respiratory syndrome coronavirus 2
  REGION 1..9: note = Table A: HLA-A*26:02H HLA-B*35:03H HLA-C*15:05H HLA-A*02:04M HLA-B*14:01H HLA-A*02:01H HLA-B*35:01H HLA-B*35:02H HLA-B*35:12H HLA-B*38:02M HLA-B*15:02H HLA-B*39:01H HLA-B*07:05H
DLNETLVTM

SEQ ID NO: 1883 - protein, 9 aa, Severe acute respiratory syndrome coronavirus 2
  REGION 1..9: note = Table A: HLA-B*44:05H HLA-B*18:01H HLA-B*40:01H HLA-B*40:02H HLA-B*07:05H
NETLVTMPL

SEQ ID NO: 1884 - protein, 9 aa, Severe acute respiratory syndrome coronavirus 2
  REGION 1..9: note = Table A: HLA-A*29:01M HLA-A*29:02M HLA-B*27:02H HLA-C*15:05H HLA-B*35:01H HLA-B*38:02M HLA-B*15:01H HLA-B*15:02M HLA-B*07:05M
TLVTMPLGY

SEQ ID NO: 1885 - protein, 9 aa, Severe acute respiratory syndrome coronavirus 2
  REGION 1..9: note = Table A: HLA-A*68:02H
LVTMPLGYV

SEQ ID NO: 1886 - protein, 9 aa, Severe acute respiratory syndrome coronavirus 2
  REGION 1..9: note = Table A: HLA-B*54:01H
MPLGYVTHG

SEQ ID NO: 1887 - protein, 9 aa, Severe acute respiratory syndrome coronavirus 2
  REGION 1..9: note = Table A: HLA-A*02:04H HLA-A*02:02H
PLGYVTHGL

SEQ ID NO: 1888 - protein, 9 aa, Severe acute respiratory syndrome coronavirus 2
  REGION 1..9: note = Table A: HLA-C*14:03H HLA-A*24:07H HLA-A*23:01H
GYVTHGLNL

SEQ ID NO: 1889 - protein, 9 aa, Severe acute respiratory syndrome coronavirus 2
  REGION 1..9: note = Table A: HLA-B*39:06M
THGLNLEEA

SEQ ID NO: 1890 - protein, 9 aa, Severe acute respiratory syndrome coronavirus 2
  REGION 1..9: note = Table A: HLA-B*39:06H
HGLNLEEAA

SEQ ID NO: 1891 - protein, 9 aa, Severe acute respiratory syndrome coronavirus 2
  REGION 1..9: note = Table A: HLA-A*29:01H HLA-A*29:02H
LNLEEAARY

SEQ ID NO: 1892 - protein, 9 aa, Severe acute respiratory syndrome coronavirus 2
  REGION 1..9: note = Table A: HLA-B*15:02H
NLEEAARYM

SEQ ID NO: 1893 - protein, 9 aa, Severe acute respiratory syndrome coronavirus 2
  REGION 1..9: note = Table A: HLA-A*25:01H HLA-A*34:01M HLA-A*34:02H HLA-A*66:01H
EAARYMRSL

SEQ ID NO: 1894 - protein, 9 aa, Severe acute respiratory syndrome coronavirus 2
  REGION 1..9: note = Table A: HLA-C*06:02H HLA-B*14:02H
ARYMRSLKV

SEQ ID NO: 1895 - protein, 9 aa, Severe acute respiratory syndrome coronavirus 2
  REGION 1..9: note = Table A: HLA-B*54:01H
YMRSLKVPA

SEQ ID NO: 1896 - protein, 9 aa, Severe acute respiratory syndrome coronavirus 2
  REGION 1..9: note = Table A: HLA-B*14:01H
MRSLKVPAT

SEQ ID NO: 1897 - protein, 9 aa, Severe acute respiratory syndrome coronavirus 2
  REGION 1..9: note = Table A: HLA-B*58:01H HLA-B*58:02M HLA-A*02:11M HLA-C*15:05M HLA-C*15:02M HLA-A*02:06H HLA-A*02:01H HLA-B*52:01M HLA-B*57:03M HLA-B*13:02M HLA-B*49:01H
RSLKVPATV

SEQ ID NO: 1898 - protein, 9 aa, Severe acute respiratory syndrome coronavirus 2
  REGION 1..9: note = Table A: HLA-B*38:02H
SLKVPATVS

SEQ ID NO: 1899 - protein, 9 aa, Severe acute respiratory syndrome coronavirus 2
  REGION 1..9: note = Table A: HLA-B*38:02H HLA-B*15:03H
LKVPATVSV

SEQ ID NO: 1900 - protein, 9 aa, Severe acute respiratory syndrome coronavirus 2
  REGION 1..9: note = Table A: HLA-B*56:01H HLA-B*55:02H HLA-C*15:05H HLA-B*07:05H
VPATVSVSS

SEQ ID NO: 1901 - protein, 9 aa, Severe acute respiratory syndrome coronavirus 2
  REGION 1..9: note = Table A: HLA-C*14:02H HLA-C*14:03H HLA-A*25:01H HLA-B*46:01M HLA-A*26:01M HLA-A*26:02H HLA-A*26:03H HLA-A*30:02H HLA-A*68:01H HLA-C*01:02H HLA-C*12:02M HLA-A*34:02H HLA-B*35:01H HLA-B*35:08H HLA-B*38:02M HLA-B*15:01M
  REGION 1..9: note = CONT. FROM ABOVE: HLA-B*15:02M HLA-B*15:03H HLA-B*39:01H HLA- B*07:05H HLA-B*15:11H
SSPDAVTAY

SEQ ID NO: 1902 - protein, 9 aa, Severe acute respiratory syndrome coronavirus 2
  REGION 1..9: note = Table A: HLA-A*25:01M HLA-A*26:01M HLA-A*26:02H HLA-A*26:03H HLA-B*35:01M HLA-B*35:07H HLA-B*38:02H
DAVTAYNGY

SEQ ID NO: 1903 - protein, 9 aa, Severe acute respiratory syndrome coronavirus 2
  REGION 1..9: note = Table A: HLA-C*15:05H HLA-B*54:01H
TAYNGYLTS

SEQ ID NO: 1904 - protein, 9 aa, Severe acute respiratory syndrome coronavirus 2
  REGION 1..9: note = Table A: HLA-A*03:01H HLA-A*34:02H
NGYLTSSSK

SEQ ID NO: 1905 - protein, 9 aa, Severe acute respiratory syndrome coronavirus 2
  REGION 1..9: note = Table A: HLA-B*58:02H HLA-B*57:01H HLA-B*46:01H HLA-C*12:02H HLA-B*15:01H HLA-B*57:03M HLA-C*02:02H
SSKTPEEHF

SEQ ID NO: 1906 - protein, 9 aa, Severe acute respiratory syndrome coronavirus 2
  REGION 1..9: note = Table A: HLA-B*38:01H HLA-B*38:02H
SKTPEEHFI

SEQ ID NO: 1907 - protein, 9 aa, Severe acute respiratory syndrome coronavirus 2
  REGION 1..9: note = Table A: HLA-B*35:12H
TPEEHFIET

SEQ ID NO: 1908 - protein, 9 aa, Severe acute respiratory syndrome coronavirus 2
  REGION 1..9: note = Table A: HLA-B*49:01H
PEEHFIETI

SEQ ID NO: 1909 - protein, 9 aa, Severe acute respiratory syndrome coronavirus 2
  REGION 1..9: note = Table A: HLA-B*14:02H HLA-B*38:01H HLA-B*38:02H HLA-B*39:06M HLA-B*39:01H HLA-B*15:10H
EHFIETISL

SEQ ID NO: 1910 - protein, 9 aa, Severe acute respiratory syndrome coronavirus 2
  REGION 1..9: note = Table A: HLA-A*25:01H HLA-A*26:01H HLA-A*26:02H HLA-A*26:03H HLA-A*30:02H HLA-A*68:01H HLA-A*34:01H HLA-A*34:02M HLA-B*35:01H HLA-B*38:02H HLA-B*15:02H HLA-B*39:01H HLA-A*66:01H
ETISLAGSY

SEQ ID NO: 1911 - protein, 9 aa, Severe acute respiratory syndrome coronavirus 2
  REGION 1..9: note = Table A: HLA-A*34:02H
TISLAGSYK

SEQ ID NO: 1912 - protein, 9 aa, Severe acute respiratory syndrome coronavirus 2
  REGION 1..9: note = Table A: HLA-C*16:01M HLA-A*36:01H HLA-A*30:02M
AGSYKDWSY

SEQ ID NO: 1913 - protein, 9 aa, Severe acute respiratory syndrome coronavirus 2
  REGION 1..9: note = Table A: HLA-A*33:03H
SYKDWSYSG

SEQ ID NO: 1914 - protein, 9 aa, Severe acute respiratory syndrome coronavirus 2
  REGION 1..9: note = Table A: HLA-C*14:02M HLA-C*14:03M HLA-C*07:02H HLA-C*15:05H HLA-A*24:02M HLA-A*24:07H HLA-A*23:01H HLA-B*38:02H HLA-B*39:01M HLA-B*07:05H
SYSGQSTQL

SEQ ID NO: 1915 - protein, 9 aa, Severe acute respiratory syndrome coronavirus 2
  REGION 1..9: note = Table A: HLA-B*13:02H
SGQSTQLGI

SEQ ID NO: 1916 - protein, 9 aa, Severe acute respiratory syndrome coronavirus 2
  REGION 1..9: note = Table A: HLA-B*58:01H HLA-C*15:05H HLA-B*57:03M
QSTQLGIEF

SEQ ID NO: 1917 - protein, 9 aa, Severe acute respiratory syndrome coronavirus 2
  REGION 1..9: note = Table A: HLA-A*68:02H HLA-A*02:04H
STQLGIEFL

SEQ ID NO: 1918 - protein, 9 aa, Severe acute respiratory syndrome coronavirus 2
  REGION 1..9: note = Table A: HLA-A*11:02H HLA-B*27:02H
TQLGIEFLK

SEQ ID NO: 1919 - protein, 9 aa, Severe acute respiratory syndrome coronavirus 2
  REGION 1..9: note = Table A: HLA-B*15:03M
LKRGDKSVY

SEQ ID NO: 1920 - protein, 9 aa, Severe acute respiratory syndrome coronavirus 2
  REGION 1..9: note = Table A: HLA-C*06:02H HLA-C*07:01H HLA-C*07:02H
KRGDKSVYY

SEQ ID NO: 1921 - protein, 9 aa, Severe acute respiratory syndrome coronavirus 2
  REGION 1..9: note = Table A: HLA-C*14:02M HLA-C*14:03M HLA-C*07:02H HLA-B*27:02H HLA-C*15:05H HLA-A*24:02H HLA-A*24:07H HLA-C*08:01H HLA-A*23:01H HLA-B*39:01H
YYTSNPTTF

SEQ ID NO: 1922 - protein, 9 aa, Severe acute respiratory syndrome coronavirus 2
  REGION 1..9: note = Table A: HLA-C*12:02H HLA-A*34:01H HLA-A*34:02H HLA-A*66:01M
YTSNPTTFH

SEQ ID NO: 1923 - protein, 9 aa, Severe acute respiratory syndrome coronavirus 2
  REGION 1..9: note = Table A: HLA-B*58:01H HLA-B*58:02H HLA-A*11:303H HLA-B*44:05H HLA-C*16:01H HLA-C*16:04H HLA-A*11:01H HLA-A*11:02H HLA-B*57:01H HLA-C*03:03H HLA-C*07:01M HLA-A*02:11H HLA-B*53:01M HLA-C*03:02H HLA-C*03:04M
  REGION 1..9: note = CONT. FROM ABOVE: HLA-A*30:02H HLA-A*68:02M HLA-B*35:03M HLA- C*15:05M HLA-C*12:02H HLA-C*12:03H HLA-C*15:02H HLA-A*02:04M HLA-A*02:05H HLA-A*02:06H HLA-A*02:08H HLA-A*02:02M HLA-A*34 :02H HLA-C*07:27H HLA-B*35:01H HLA-C*17:01H HLA-B*35:07H
  REGION 1..9: note = CONT. FROM ABOVE: HLA-C*08:01M HLA-B*38:02M HLA-A*32:01H HLA- B*07:05H HLA-B*57:03H HLA-C*02:02H HLA-B*13:02H HLA-C*07:04H HLA-A*66:01H
TSNPTTFHL

SEQ ID NO: 1924 - protein, 9 aa, Severe acute respiratory syndrome coronavirus 2
  REGION 1..9: note = Table A: HLA-A*11:303H HLA-C*04:01H HLA-C*04:03M HLA-B*53:01H HLA-A*02:07M HLA-B*35:01H HLA-B*35:02H HLA-B*35:08M HLA-B*35:07H HLA-C*08:01H HLA-C*08:02H HLA-B*35:12H HLA-B*38:01M HLA-B*38:02M HLA-B*15:01H
  REGION 1..9: note = CONT. FROM ABOVE: HLA-B*15:02M HLA-B*39:01H HLA-B*57:03H HLA- C*05:01H HLA-B*13:01H
HLDGEVITF

SEQ ID NO: 1925 - protein, 9 aa, Severe acute respiratory syndrome coronavirus 2
  REGION 1..9: note = Table A: HLA-B*44:05M HLA-B*44:03H HLA-B*40:01H HLA-B*40:02M HLA-B*40:06H HLA-B*41:02H HLA-B*49:01M
GEVITFDNL

SEQ ID NO: 1926 - protein, 9 aa, Severe acute respiratory syndrome coronavirus 2
  REGION 1..9: note = Table A: HLA-A*33:03H HLA-A*26:03H HLA-A*68:01M HLA-A*68:02H HLA-A*34:01M HLA-A*34:02H HLA-A*66:01M
EVITFDNLK

SEQ ID NO: 1927 - protein, 9 aa, Severe acute respiratory syndrome coronavirus 2
  REGION 1..9: note = Table A: HLA-B*58:02H HLA-A*02:11H HLA-C*03:04H HLA-A*68:02M HLA-C*15:02H HLA-A*02:04H HLA-A*02:05H HLA-A*02:08H HLA-A*02:02H HLA-A*02:03H HLA-B*57:03H
ITFDNLKTL

SEQ ID NO: 1928 - protein, 9 aa, Severe acute respiratory syndrome coronavirus 2
  REGION 1..9: note = Table A: HLA-C*04:01H HLA-C*04:03H HLA-A*02:07M HLA-A*24:07H HLA-C*08:02H HLA-B*38:02H
TFDNLKTLL

SEQ ID NO: 1929 - protein, 9 aa, Severe acute respiratory syndrome coronavirus 2
  REGION 1..9: note = Table A: HLA-C*15:05H
DNLKTLLSL

SEQ ID NO: 1930 - protein, 9 aa, Severe acute respiratory syndrome coronavirus 2
  REGION 1..9: note = Table A: HLA-A*74:01H HLA-A*33:01H HLA-A*33:03H HLA-A*34:01H
NLKTLLSLR

SEQ ID NO: 1931 - protein, 9 aa, Severe acute respiratory syndrome coronavirus 2
  REGION 1..9: note = Table A: HLA-B*58:02M HLA-A*02:11H HLA-C*15:02M HLA-A*02:06H HLA-A*02:01H HLA-B*57:03H
KTLLSLREV

SEQ ID NO: 1932 - protein, 9 aa, Severe acute respiratory syndrome coronavirus 2
  REGION 1..9: note = Table A: HLA-B*58:02H HLA-B*57:01H HLA-B*57:03M
LSLREVRTI

SEQ ID NO: 1933 - protein, 9 aa, Severe acute respiratory syndrome coronavirus 2
  REGION 1..9: note = Table A: HLA-B*44:03H HLA-B*40:02H HLA-B*40:06M
REVRTIKVF

SEQ ID NO: 1934 - protein, 9 aa, Severe acute respiratory syndrome coronavirus 2
  REGION 1..9: note = Table A: HLA-A*68:02H
EVRTIKVFT

SEQ ID NO: 1935 - protein, 9 aa, Severe acute respiratory syndrome coronavirus 2
  REGION 1..9: note = Table A: HLA-B*58:01H HLA-B*58:02M HLA-A*02:11H HLA-A*68:02M HLA-C*15:05H HLA-C*15:02H HLA-A*02:04H HLA-A*02:05M HLA-A*02:06M HLA-A*02:07H HLA-A*02:08M HLA-A*02:01H HLA-A*02:02H HLA-A*02:03H HLA-C*08:01H HLA-B*38:02H
  REGION 1..9: note = CONT. FROM ABOVE: HLA-B*40:06M HLA-B*57:03M HLA-B*13:02M
RTIKVFTTV

SEQ ID NO: 1936 - protein, 9 aa, Severe acute respiratory syndrome coronavirus 2
  REGION 1..9: note = Table A: HLA-B*58:01H HLA-B*58:02H HLA-A*02:11H HLA-A*68:02H HLA-A*02:05M HLA-A*02:06H HLA-A*02:08H HLA-A*02:02H HLA-B*38:02H HLA-A*32:01H HLA-B*57:03M HLA-B*13:01H HLA-B*13:02H
KVFTTVDNI

SEQ ID NO: 1937 - protein, 9 aa, Severe acute respiratory syndrome coronavirus 2
  REGION 1..9: note = Table A: HLA-C*03:04H HLA-A*68:02H HLA-C*17:01H HLA-C*08:01H
FTTVDNINL

SEQ ID NO: 1938 - protein, 9 aa, Severe acute respiratory syndrome coronavirus 2
  REGION 1..9: note = Table A: HLA-A*11:01H HLA-A*11:02H HLA-A*68:01H HLA-A*34:02M
TTVDNINLH

SEQ ID NO: 1939 - protein, 9 aa, Severe acute respiratory syndrome coronavirus 2
  REGION 1..9: note = Table A: HLA-A*02:07M HLA-B*13:02H
TVDNINLHT

SEQ ID NO: 1940 - protein, 9 aa, Severe acute respiratory syndrome coronavirus 2
  REGION 1..9: note = Table A: HLA-A*68:02M HLA-C*15:05H
DNINLHTQV

SEQ ID NO: 1941 - protein, 9 aa, Severe acute respiratory syndrome coronavirus 2
  REGION 1..9: note = Table A: HLA-B*08:01H HLA-C*15:05H HLA-C*15:02H HLA-B*38:02H
NINLHTQVV

SEQ ID NO: 1942 - protein, 9 aa, Severe acute respiratory syndrome coronavirus 2
  REGION 1..9: note = Table A: HLA-A*11:303H HLA-B*14:01H HLA-B*38:02M HLA-B*15:02M HLA-B*39:01H
NLHTQVVDM

SEQ ID NO: 1943 - protein, 9 aa, Severe acute respiratory syndrome coronavirus 2
  REGION 1..9: note = Table A: HLA-A*11:303H HLA-B*35:03H HLA-C*15:05H HLA-B*35:02H HLA-B*35:12H HLA-B*38:02H HLA-B*57:03H
HTQVVDMSM

SEQ ID NO: 1944 - protein, 9 aa, Severe acute respiratory syndrome coronavirus 2
  REGION 1..9: note = Table A: HLA-B*58:01M HLA-A*11:303H HLA-C*16:04H HLA-A*03:01H HLA-A*11:01H HLA-A*11:02H HLA-A*36:01H HLA-A*25:01M HLA-B*46:01H HLA-A*26:01H HLA-A*26:02M HLA-A*26:03M HLA-A*29:01H HLA-A*29:02M HLA-B*44:03H
  REGION 1..9: note = CONT. FROM ABOVE: HLA-B*18:01H HLA-B*27:02H HLA-B*53:01H HLA- C*03:02H HLA-A*30:02M HLA-A*68:01H HLA-C*15:05H HLA-A*34:01H HLA-A*34:02M HLA-C*07:27H HLA-B*35:01H HLA-B*35:08M HLA-B*35 :07H HLA-B*15:13M HLA-B*38:01H HLA-B*38:02H HLA-B*15:01H
  REGION 1..9: note = CONT. FROM ABOVE: HLA-B*15:02H HLA-B*15:03H HLA-B*39:01M HLA- B*07:05H HLA-B*15:11M HLA-A*66:01H
QVVDMSMTY

SEQ ID NO: 1945 - protein, 9 aa, Severe acute respiratory syndrome coronavirus 2
  REGION 1..9: note = Table A: HLA-B*58:01M HLA-A*11:303H HLA-C*16:01H HLA-B*57:01H HLA-B*46:01H HLA-C*03:02H HLA-C*15:05H HLA-C*12:02H HLA-B*38:02H HLA-B*15:01H HLA-B*07:05H HLA-B*57:03M
MSMTYGQQF

SEQ ID NO: 1946 - protein, 9 aa, Severe acute respiratory syndrome coronavirus 2
  REGION 1..9: note = Table A: HLA-A*68:02H
MTYGQQFGP

SEQ ID NO: 1947 - protein, 9 aa, Severe acute respiratory syndrome coronavirus 2
  REGION 1..9: note = Table A: HLA-C*16:04H HLA-C*03:02H HLA-A*30:02H HLA-B*35:01H HLA-B*38:02H HLA-B*15:02H HLA-B*15:03H HLA-B*39:01H
YGQQFGPTY

SEQ ID NO: 1948 - protein, 9 aa, Severe acute respiratory syndrome coronavirus 2
  REGION 1..9: note = Table A: HLA-B*48:01M HLA-A*02:04H HLA-A*02:03H HLA-C*17:01H HLA-C*08:03H HLA-B*38:02H HLA-B*15:01M HLA-B*15:03H HLA-B*39:01M HLA-B*13:01H HLA-B*13:02H
GQQFGPTYL

SEQ ID NO: 1949 - protein, 9 aa, Severe acute respiratory syndrome coronavirus 2
  REGION 1..9: note = Table A: HLA-A*34:02H
DGADVTKIK

SEQ ID NO: 1950 - protein, 9 aa, Severe acute respiratory syndrome coronavirus 2
  REGION 1..9: note = Table A: HLA-B*15:03H
TKIKPHNSH

SEQ ID NO: 1951 - protein, 9 aa, Severe acute respiratory syndrome coronavirus 2
  REGION 1..9: note = Table A: HLA-B*46:01H HLA-B*15:02H
NSHEGKTFY

SEQ ID NO: 1952 - protein, 9 aa, Severe acute respiratory syndrome coronavirus 2
  REGION 1..9: note = Table A: HLA-B*38:01H HLA-B*38:02H HLA-B*39:01H HLA-B*15:10H
SHEGKTFYV

SEQ ID NO: 1953 - protein, 9 aa, Severe acute respiratory syndrome coronavirus 2
  REGION 1..9: note = Table A: HLA-B*40:01M HLA-B*40:02M HLA-B*40:06H
HEGKTFYVL

SEQ ID NO: 1954 - protein, 9 aa, Severe acute respiratory syndrome coronavirus 2
  REGION 1..9: note = Table A: HLA-A*11:303H HLA-A*02:11H HLA-C*03:04H HLA-B*35:03M HLA-C*15:05H HLA-A*02:04H HLA-A*02:05M HLA-A*02:06M HLA-A*02:07H HLA-A*02:08H HLA-A*02:01H HLA-A*02:02H HLA-B*35:01H HLA-B*35:02H HLA-B*35:08H
  REGION 1..9: note = CONT. FROM ABOVE: HLA-C*08:01M HLA-B*35:12M HLA-B*38:01H HLA- B*38:02M HLA-B*39:01M HLA-B*13:01H
YVLPNDDTL

SEQ ID NO: 1955 - protein, 9 aa, Severe acute respiratory syndrome coronavirus 2
  REGION 1..9: note = Table A: HLA-B*56:01H HLA-B*53:01M HLA-B*35:03M HLA-C*15:05M HLA-B*35:01H HLA-B*35:02M HLA-B*35:08H HLA-B*51:01H HLA-B*35:07H HLA-B*35:12H HLA-B*54:01H
LPNDDTLRV

SEQ ID NO: 1956 - protein, 9 aa, Severe acute respiratory syndrome coronavirus 2
  REGION 1..9: note = Table A: HLA-B*18:01M HLA-B*14:02M HLA-B*37:01M HLA-B*07:05H
DDTLRVEAF

SEQ ID NO: 1957 - protein, 9 aa, Severe acute respiratory syndrome coronavirus 2
  REGION 1..9: note = Table A: HLA-B*46:01H HLA-A*29:02H HLA-A*30:02H HLA-B*35:07H HLA-B*38:02M HLA-B*15:01H HLA-B*15:02H HLA-B*15:03H
TLRVEAFEY

SEQ ID NO: 1958 - protein, 9 aa, Severe acute respiratory syndrome coronavirus 2
  REGION 1..9: note = Table A: HLA-B*27:02H HLA-B*38:02H
LRVEAFEYY

SEQ ID NO: 1959 - protein, 9 aa, Severe acute respiratory syndrome coronavirus 2
  REGION 1..9: note = Table A: HLA-A*68:02M HLA-B*54:01H
EAFEYYHTT

SEQ ID NO: 1960 - protein, 9 aa, Severe acute respiratory syndrome coronavirus 2
  REGION 1..9: note = Table A: HLA-B*45:01H HLA-B*40:06H HLA-B*50:01M
FEYYHTTDP

SEQ ID NO: 1961 - protein, 9 aa, Severe acute respiratory syndrome coronavirus 2
  REGION 1..9: note = Table A: HLA-C*14:02M HLA-C*14:03M HLA-C*04:01H HLA-C*07:02H HLA-B*35:03H HLA-A*24:02M HLA-A*24:07H HLA-C*08:01M HLA-A*23:01M HLA-B*38:02H HLA-B*39:01H
YYHTTDPSF

SEQ ID NO: 1962 - protein, 9 aa, Severe acute respiratory syndrome coronavirus 2
  REGION 1..9: note = Table A: HLA-B*38:01H HLA-B*38:02H HLA-B*39:01M HLA-B*15:10M
YHTTDPSFL

SEQ ID NO: 1963 - protein, 9 aa, Severe acute respiratory syndrome coronavirus 2
  REGION 1..9: note = Table A: HLA-A*34:02H
HTTDPSFLG

SEQ ID NO: 1964 - protein, 9 aa, Severe acute respiratory syndrome coronavirus 2
  REGION 1..9: note = Table A: HLA-A*11:303M HLA-A*74:01H HLA-A*03:01M HLA-A*03:02H HLA-A*11:01H HLA-A*11:02H HLA-A*36:01M HLA-A*33:01H HLA-A*33:03M HLA-A*26:03M HLA-A*01:01H HLA-C*03:03H HLA-A*68:01H HLA-A*34:01M HLA-A*34:02H
  REGION 1..9: note = CONT. FROM ABOVE: HLA-C*07:27M HLA-A*31:01M HLA-A*66:01H
TTDPSFLGR

SEQ ID NO: 1965 - protein, 9 aa, Severe acute respiratory syndrome coronavirus 2
  REGION 1..9: note = Table A: HLA-A*34:01M HLA-A*66:01H
DPSFLGRYM

SEQ ID NO: 1966 - protein, 9 aa, Severe acute respiratory syndrome coronavirus 2
  REGION 1..9: note = Table A: HLA-A*02:02H
FLGRYMSAL

SEQ ID NO: 1967 - protein, 9 aa, Severe acute respiratory syndrome coronavirus 2
  REGION 1..9: note = Table A: HLA-B*27:05M HLA-B*27:02H
GRYMSALNH

SEQ ID NO: 1968 - protein, 9 aa, Severe acute respiratory syndrome coronavirus 2
  REGION 1..9: note = Table A: HLA-A*74:01H HLA-A*03:02H HLA-A*36:01H HLA-A*30:02H HLA-A*02:02H HLA-A*34:02H HLA-B*38:02H
YMSALNHTK

SEQ ID NO: 1969 - protein, 9 aa, Severe acute respiratory syndrome coronavirus 2
  REGION 1..9: note = Table A: HLA-A*34:02H
MSALNHTKK

SEQ ID NO: 1970 - protein, 9 aa, Severe acute respiratory syndrome coronavirus 2
  REGION 1..9: note = Table A: HLA-B*58:01H HLA-B*58:02H HLA-B*57:01H HLA-B*53:01H HLA-B*57:03M
SALNHTKKW

SEQ ID NO: 1971 - protein, 9 aa, Severe acute respiratory syndrome coronavirus 2
  REGION 1..9: note = Table A: HLA-B*48:01H HLA-B*38:02H HLA-B*15:03H
WKYPQVNGL

SEQ ID NO: 1972 - protein, 9 aa, Severe acute respiratory syndrome coronavirus 2
  REGION 1..9: note = Table A: HLA-B*54:01H
YPQVNGLTS

SEQ ID NO: 1973 - protein, 9 aa, Severe acute respiratory syndrome coronavirus 2
  REGION 1..9: note = Table A: HLA-B*13:02H
PQVNGLTSI

SEQ ID NO: 1974 - protein, 9 aa, Severe acute respiratory syndrome coronavirus 2
  REGION 1..9: note = Table A: HLA-A*03:02H HLA-A*11:01H HLA-A*34:02M
QVNGLTSIK

SEQ ID NO: 1975 - protein, 9 aa, Severe acute respiratory syndrome coronavirus 2
  REGION 1..9: note = Table A: HLA-B*15:03M
IKWADNNCY

SEQ ID NO: 1976 - protein, 9 aa, Severe acute respiratory syndrome coronavirus 2
  REGION 1..9: note = Table A: HLA-A*02:02H
KWADNNCYL

SEQ ID NO: 1977 - protein, 9 aa, Severe acute respiratory syndrome coronavirus 2
  REGION 1..9: note = Table A: HLA-A*02:11H HLA-C*15:05H HLA-A*02:04M HLA-A*02:05H HLA-A*02:07H HLA-B*14:01H HLA-A*02:01M HLA-A*02:02M HLA-A*02:03M HLA-B*38:02M HLA-B*13:02H
YLATALLTL

SEQ ID NO: 1978 - protein, 9 aa, Severe acute respiratory syndrome coronavirus 2
  REGION 1..9: note = Table A: HLA-B*53:01H HLA-C*15:05H HLA-B*51:01H HLA-C*08:01H HLA-B*38:02M HLA-B*13:02H
TALLTLQQI

SEQ ID NO: 1979 - protein, 9 aa, Severe acute respiratory syndrome coronavirus 2
  REGION 1..9: note = Table A: HLA-A*02:04H HLA-A*02:01H HLA-A*02:02H
LLTLQQIEL

SEQ ID NO: 1980 - protein, 9 aa, Severe acute respiratory syndrome coronavirus 2
  REGION 1..9: note = Table A: HLA-A*11:01H HLA-A*11:02H HLA-A*36:01H HLA-A*34:02M
LTLQQIELK

SEQ ID NO: 1981 - protein, 9 aa, Severe acute respiratory syndrome coronavirus 2
  REGION 1..9: note = Table A: HLA-A*24:07H HLA-B*38:02M HLA-B*15:01H HLA-B*15:02H HLA-B*13:01H
TLQQIELKF

SEQ ID NO: 1982 - protein, 9 aa, Severe acute respiratory syndrome coronavirus 2
  REGION 1..9: note = Table A: HLA-B*45:01M HLA-B*39:06H HLA-B*40:06M HLA-B*54:01H HLA-B*50:01H
IELKFNPPA

SEQ ID NO: 1983 - protein, 9 aa, Severe acute respiratory syndrome coronavirus 2
  REGION 1..9: note = Table A: HLA-A*25:01H HLA-A*26:03H HLA-B*08:01M HLA-A*68:02H HLA-A*02:04H HLA-A*02:02H HLA-A*02:03H HLA-B*38:02H HLA-B*07:04H
ELKFNPPAL

SEQ ID NO: 1984 - protein, 9 aa, Severe acute respiratory syndrome coronavirus 2
  REGION 1..9: note = Table A: HLA-B*35:01H HLA-B*35:08M HLA-B*35:07M HLA-B*39:01H HLA-B*07:05M
NPPALQDAY

SEQ ID NO: 1985 - protein, 9 aa, Severe acute respiratory syndrome coronavirus 2
  REGION 1..9: note = Table A: HLA-A*02:02H
ALQDAYYRA

SEQ ID NO: 1986 - protein, 9 aa, Severe acute respiratory syndrome coronavirus 2
  REGION 1..9: note = Table A: HLA-A*74:01H
LQDAYYRAR

SEQ ID NO: 1987 - protein, 9 aa, Severe acute respiratory syndrome coronavirus 2
  REGION 1..9: note = Table A: HLA-B*38:02H HLA-B*39:06H
YRARAGEAA

SEQ ID NO: 1988 - protein, 9 aa, Severe acute respiratory syndrome coronavirus 2
  REGION 1..9: note = Table A: HLA-B*27:05H HLA-B*27:02M HLA-B*38:01H HLA-B*38:02H HLA-B*39:01M
ARAGEAANF

SEQ ID NO: 1989 - protein, 9 aa, Severe acute respiratory syndrome coronavirus 2
  REGION 1..9: note = Table A: HLA-B*44:05M HLA-B*45:01H HLA-B*18:01H HLA-B*40:01H HLA-B*40:02H HLA-B*07:05H HLA-B*41:02M HLA-B*49:01M HLA-B*50:01M
GEAANFCAL

SEQ ID NO: 1990 - protein, 9 aa, Severe acute respiratory syndrome coronavirus 2
  REGION 1..9: note = Table A: HLA-A*68:02M
EAANFCALI

SEQ ID NO: 1991 - protein, 9 aa, Severe acute respiratory syndrome coronavirus 2
  REGION 1..9: note = Table A: HLA-C*15:05H HLA-C*15:02H
AANFCALIL

SEQ ID NO: 1992 - protein, 9 aa, Severe acute respiratory syndrome coronavirus 2
  REGION 1..9: note = Table A: HLA-C*14:03H HLA-A*29:01M HLA-A*29:02H HLA-B*35:01H HLA-B*38:02H HLA-B*15:02H HLA-B*07:05H
NFCALILAY

SEQ ID NO: 1993 - protein, 9 aa, Severe acute respiratory syndrome coronavirus 2
  REGION 1..9: note = Table A: HLA-C*15:05H HLA-B*38:02H
YCNKTVGEL

SEQ ID NO: 1994 - protein, 9 aa, Severe acute respiratory syndrome coronavirus 2
  REGION 1..9: note = Table A: HLA-A*02:08H
KTVGELGDV

SEQ ID NO: 1995 - protein, 9 aa, Severe acute respiratory syndrome coronavirus 2
  REGION 1..9: note = Table A: HLA-A*68:01H HLA-A*34:01H HLA-A*66:01H
TVGELGDVR

SEQ ID NO: 1996 - protein, 9 aa, Severe acute respiratory syndrome coronavirus 2
  REGION 1..9: note = Table A: HLA-B*40:02M HLA-B*40:06H HLA-B*41:02H HLA-B*49:01H HLA-B*50:01H
GELGDVRET

SEQ ID NO: 1997 - protein, 9 aa, Severe acute respiratory syndrome coronavirus 2
  REGION 1..9: note = Table A: HLA-A*02:11H HLA-A*68:02H HLA-A*02:02M HLA-A*34:01H HLA-B*38:02H HLA-B*15:02H HLA-B*39:01H
ELGDVRETM

SEQ ID NO: 1998 - protein, 9 aa, Severe acute respiratory syndrome coronavirus 2
  REGION 1..9: note = Table A: HLA-A*33:01H HLA-A*26:01H HLA-A*26:02H HLA-A*26:03H HLA-A*34:01M HLA-A*34:02H HLA-B*38:02H HLA-A*66:01H
DVRETMSYL

SEQ ID NO: 1999 - protein, 9 aa, Severe acute respiratory syndrome coronavirus 2
  REGION 1..9: note = Table A: HLA-A*11:01H HLA-A*11:02H HLA-A*33:03M HLA-A*68:01H HLA-A*68:02H HLA-A*34:02H HLA-A*66:01H
ETMSYLFQH

SEQ ID NO: 2000 - protein, 9 aa, Severe acute respiratory syndrome coronavirus 2
  REGION 1..9: note = Table A: HLA-A*02:02H
TMSYLFQHA

SEQ ID NO: 2001 - protein, 9 aa, Severe acute respiratory syndrome coronavirus 2
  REGION 1..9: note = Table A: HLA-C*14:02M HLA-C*14:03M HLA-A*24:02H HLA-A*24:07H HLA-C*08:01H HLA-A*23:01M
SYLFQHANL

SEQ ID NO: 2002 - protein, 9 aa, Severe acute respiratory syndrome coronavirus 2
  REGION 1..9: note = Table A: HLA-A*02:05H HLA-C*08:01H HLA-B*38:02M HLA-B*39:06H HLA-B*39:01H
FQHANLDSC

SEQ ID NO: 2003 - protein, 9 aa, Severe acute respiratory syndrome coronavirus 2
  REGION 1..9: note = Table A: HLA-A*33:03H
HANLDSCKR

SEQ ID NO: 2004 - protein, 9 aa, Severe acute respiratory syndrome coronavirus 2
  REGION 1..9: note = Table A: HLA-B*51:01H
DSCKRVLNV

SEQ ID NO: 2005 - protein, 9 aa, Severe acute respiratory syndrome coronavirus 2
  REGION 1..9: note = Table A: HLA-B*27:05M
KRVLNVVCK

SEQ ID NO: 2006 - protein, 9 aa, Severe acute respiratory syndrome coronavirus 2
  REGION 1..9: note = Table A: HLA-A*02:11H HLA-A*02:06H HLA-B*13:02H
RVLNVVCKT

SEQ ID NO: 2007 - protein, 9 aa, Severe acute respiratory syndrome coronavirus 2
  REGION 1..9: note = Table A: HLA-C*15:05H
TCGQQQTTL

SEQ ID NO: 2008 - protein, 9 aa, Severe acute respiratory syndrome coronavirus 2
  REGION 1..9: note = Table A: HLA-A*03:02H HLA-A*11:01H
CGQQQTTLK

SEQ ID NO: 2009 - protein, 9 aa, Severe acute respiratory syndrome coronavirus 2
  REGION 1..9: note = Table A: HLA-B*13:02M
GQQQTTLKG

SEQ ID NO: 2010 - protein, 9 aa, Severe acute respiratory syndrome coronavirus 2
  REGION 1..9: note = Table A: HLA-A*02:05H HLA-A*02:06H HLA-A*02:08H HLA-A*02:03H HLA-B*52:01H HLA-B*38:02H HLA-B*13:02H
QQQTTLKGV

SEQ ID NO: 2011 - protein, 9 aa, Severe acute respiratory syndrome coronavirus 2
  REGION 1..9: note = Table A: HLA-A*02:11M HLA-A*68:02M HLA-C*15:05H HLA-A*02:06M HLA-A*02:08M HLA-A*02:01M HLA-A*02:03H HLA-B*38:02H HLA-B*13:02H
TTLKGVEAV

SEQ ID NO: 2012 - protein, 9 aa, Severe acute respiratory syndrome coronavirus 2
  REGION 1..9: note = Table A: HLA-A*11:303H HLA-B*46:01H HLA-B*08:01H HLA-A*30:02H HLA-A*02:02M HLA-A*02:03H HLA-B*38:02H HLA-B*15:01M HLA-B*15:02H
TLKGVEAVM

SEQ ID NO: 2013 - protein, 9 aa, Severe acute respiratory syndrome coronavirus 2
  REGION 1..9: note = Table A: HLA-C*15:02H HLA-C*07:04H
KGVEAVMYM

SEQ ID NO: 2014 - protein, 9 aa, Severe acute respiratory syndrome coronavirus 2
  REGION 1..9: note = Table A: HLA-A*25:01M HLA-A*26:01H HLA-A*26:02H HLA-A*26:03H HLA-A*68:02H HLA-B*35:03H HLA-A*34:01H
EAVMYMGTL

SEQ ID NO: 2015 - protein, 9 aa, Severe acute respiratory syndrome coronavirus 2
  REGION 1..9: note = Table A: HLA-C*14:03H HLA-A*11:303H HLA-A*03:01M HLA-A*36:01H HLA-B*46:01M HLA-A*29:01H HLA-A*29:02H HLA-C*03:02H HLA-A*30:02M HLA-C*15:05H HLA-B*38:02H HLA-B*15:01H HLA-B*15:02H HLA-B*15:03M HLA-B*07:05M
  REGION 1..9: note = CONT. FROM ABOVE: HLA-B*15:11H
VMYMGTLSY

SEQ ID NO: 2016 - protein, 9 aa, Severe acute respiratory syndrome coronavirus 2
  REGION 1..9: note = Table A: HLA-B*35:03H HLA-B*35:01H HLA-B*35:08H HLA-B*38:02H HLA-B*39:01H
MGTLSYEQF

SEQ ID NO: 2017 - protein, 9 aa, Severe acute respiratory syndrome coronavirus 2
  REGION 1..9: note = Table A: HLA-A*11:303H HLA-A*03:01H HLA-A*03:02H HLA-A*11:01H HLA-A*11:02H HLA-A*36:01H HLA-A*30:02H HLA-A*34:02M HLA-C*07:27M
GTLSYEQFK

SEQ ID NO: 2018 - protein, 9 aa, Severe acute respiratory syndrome coronavirus 2
  REGION 1..9: note = Table A: HLA-A*68:02H HLA-B*52:01M HLA-B*38:01H HLA-B*38:02M HLA-B*13:01H HLA-B*13:02M
EQFKKGVQI

SEQ ID NO: 2019 - protein, 9 aa, Severe acute respiratory syndrome coronavirus 2
  REGION 1..9: note = Table A: HLA-A*11:02H
VQIPCTCGK

SEQ ID NO: 2020 - protein, 9 aa, Severe acute respiratory syndrome coronavirus 2
  REGION 1..9: note = Table A: HLA-B*46:01H HLA-B*38:02M HLA-B*15:01H HLA-B*15:02M
YLVQQESPF

SEQ ID NO: 2021 - protein, 9 aa, Severe acute respiratory syndrome coronavirus 2
  REGION 1..9: note = Table A: HLA-A*02:11H HLA-A*68:02H HLA-A*02:04H HLA-A*02:05H HLA-A*02:06H HLA-A*02:07H HLA-A*02:01H HLA-B*38:02H HLA-B*39:01H HLA-B*13:02H
LVQQESPFV

SEQ ID NO: 2022 - protein, 9 aa, Severe acute respiratory syndrome coronavirus 2
  REGION 1..9: note = Table A: HLA-B*48:01H HLA-A*11:303H HLA-C*16:04H HLA-C*12:03H HLA-A*02:04H HLA-C*08:01H HLA-B*38:02M HLA-B*15:01M HLA-B*15:02H HLA-B*15:03H HLA-B*39:01M HLA-B*07:05H HLA-B*13:01H HLA-B*13:02H HLA-C*07:04H
VQQESPFVM

SEQ ID NO: 2023 - protein, 9 aa, Severe acute respiratory syndrome coronavirus 2
  REGION 1..9: note = Table A: HLA-B*38:02H HLA-B*13:01H
QQESPFVMM

SEQ ID NO: 2024 - protein, 9 aa, Severe acute respiratory syndrome coronavirus 2
  REGION 1..9: note = Table A: HLA-B*45:01M
QESPFVMMS

SEQ ID NO: 2025 - protein, 9 aa, Severe acute respiratory syndrome coronavirus 2
  REGION 1..9: note = Table A: HLA-A*11:303H HLA-A*03:02H HLA-A*36:01H HLA-B*46:01H HLA-A*29:01M HLA-A*29:02M HLA-B*18:01H HLA-A*30:02M HLA-B*35:01H HLA-B*38:02M HLA-B*15:01H HLA-B*15:02M HLA-B*39:01H HLA-B*07:05M HLA-B*15:11H
MMSAPPAQY

SEQ ID NO: 2026 - protein, 9 aa, Severe acute respiratory syndrome coronavirus 2
  REGION 1..9: note = Table A: HLA-B*42:01H HLA-B*48:01H HLA-B*58:01H HLA-C*14:03H HLA-A*11:303H HLA-C*16:01H HLA-B*46:01H HLA-C*06:02H HLA-C*04:03M HLA-C*03:03H HLA-C*07:01H HLA-C*07:02H HLA-A*02:11H HLA-B*53:01H HLA-C*03:02H HLA-C*03:04H
  REGION 1..9: note = CONT. FROM ABOVE: HLA-A*68:01H HLA-A*68:02H HLA-B*35:03M HLA- C*15:05M HLA-C*01:02H HLA-C*12:02H HLA-A*02:05M HLA-A*02:06H HLA-A*02:07M HLA-A*02:02H HLA-B*35:01H HLA-B*35:02M HLA-C*17 :01H HLA-C*08:01M HLA-B*35:12M HLA-B*37:01H HLA-B*38:02H
  REGION 1..9: note = CONT. FROM ABOVE: HLA-B*40:02H HLA-B*39:01H HLA-B*07:05H HLA- B*57:03M HLA-C*07:04H
SAPPAQYEL

SEQ ID NO: 2027 - protein, 9 aa, Severe acute respiratory syndrome coronavirus 2
  REGION 1..9: note = Table A: HLA-A*02:11H
AQYELKHGT

SEQ ID NO: 2028 - protein, 9 aa, Severe acute respiratory syndrome coronavirus 2
  REGION 1..9: note = Table A: HLA-A*24:07H
QYELKHGTF

SEQ ID NO: 2029 - protein, 9 aa, Severe acute respiratory syndrome coronavirus 2
  REGION 1..9: note = Table A: HLA-B*49:01H
YELKHGTFT

SEQ ID NO: 2030 - protein, 9 aa, Severe acute respiratory syndrome coronavirus 2
  REGION 1..9: note = Table A: HLA-B*15:01H
GTFTCASEY

SEQ ID NO: 2031 - protein, 9 aa, Severe acute respiratory syndrome coronavirus 2
  REGION 1..9: note = Table A: HLA-B*46:01H HLA-A*30:02H HLA-B*35:01H
CASEYTGNY

SEQ ID NO: 2032 - protein, 9 aa, Severe acute respiratory syndrome coronavirus 2
  REGION 1..9: note = Table A: HLA-B*44:05H HLA-C*16:04H HLA-B*45:01H HLA-B*44:03H HLA-B*18:01H HLA-A*68:02H HLA-A*02:01H HLA-B*39:06H HLA-B*40:01H HLA-B*40:02M HLA-B*40:06H HLA-B*07:05H HLA-B*41:02M HLA-B*49:01H HLA-B*50:01H
SEYTGNYQC

SEQ ID NO: 2033 - protein, 9 aa, Severe acute respiratory syndrome coronavirus 2
  REGION 1..9: note = Table A: HLA-A*33:03H HLA-A*26:03H
EYTGNYQCG

SEQ ID NO: 2034 - protein, 9 aa, Severe acute respiratory syndrome coronavirus 2
  REGION 1..9: note = Table A: HLA-A*30:02H
TGNYQCGHY

SEQ ID NO: 2035 - protein, 9 aa, Severe acute respiratory syndrome coronavirus 2
  REGION 1..9: note = Table A: HLA-A*03:01H HLA-A*11:01H HLA-A*11:02H HLA-B*15:03H
GHYKHITSK

SEQ ID NO: 2036 - protein, 9 aa, Severe acute respiratory syndrome coronavirus 2
  REGION 1..9: note = Table A: HLA-B*48:01H HLA-B*38:01M HLA-B*38:02M HLA-B*15:03H HLA-B*39:01H HLA-B*15:10M
KHITSKETL

SEQ ID NO: 2037 - protein, 9 aa, Severe acute respiratory syndrome coronavirus 2
  REGION 1..9: note = Table A: HLA-A*36:01H HLA-B*38:02M HLA-B*15:01H HLA-B*15:02H
HITSKETLY

SEQ ID NO: 2038 - protein, 9 aa, Severe acute respiratory syndrome coronavirus 2
  REGION 1..9: note = Table A: HLA-A*11:303H HLA-A*03:01M HLA-A*03:02M HLA-A*11:01M HLA-A*11:02M HLA-A*36:01H HLA-A*34:02M HLA-C*07:27H
CIDGALLTK

SEQ ID NO: 2039 - protein, 9 aa, Severe acute respiratory syndrome coronavirus 2
  REGION 1..9: note = Table A: HLA-C*14:03H HLA-A*11:303M HLA-A*03:01H HLA-B*46:01M HLA-A*29:01H HLA-A*29:02H HLA-C*03:02H HLA-A*30:02M HLA-C*07:27H HLA-B*38:02H HLA-B*15:01H HLA-B*15:02H HLA-B*15:03M HLA-B*07:05H
ALLTKSSEY

SEQ ID NO: 2040 - protein, 9 aa, Severe acute respiratory syndrome coronavirus 2
  REGION 1..9: note = Table A: HLA-C*07:02H HLA-B*38:01H HLA-B*38:02M HLA-B*15:03H HLA-B*39:01H
YKGPITDVF

SEQ ID NO: 2041 - protein, 9 aa, Severe acute respiratory syndrome coronavirus 2
  REGION 1..9: note = Table A: HLA-A*36:01H HLA-A*30:02H
KGPITDVFY

SEQ ID NO: 2042 - protein, 9 aa, Severe acute respiratory syndrome coronavirus 2
  REGION 1..9: note = Table A: HLA-B*27:02H HLA-A*34:02H
GPITDVFYK

SEQ ID NO: 2043 - protein, 9 aa, Severe acute respiratory syndrome coronavirus 2
  REGION 1..9: note = Table A: HLA-A*26:01M HLA-A*26:02H HLA-A*26:03H HLA-A*34:01H HLA-B*35:01H HLA-B*35:07H HLA-B*38:02M HLA-B*15:02H
DVFYKENSY

SEQ ID NO: 2044 - protein, 9 aa, Severe acute respiratory syndrome coronavirus 2
  REGION 1..9: note = Table A: HLA-A*33:03H HLA-C*07:02H
FYKENSYTT

SEQ ID NO: 2045 - protein, 9 aa, Severe acute respiratory syndrome coronavirus 2
  REGION 1..9: note = Table A: HLA-B*44:02H HLA-B*44:05M HLA-B*45:01M HLA-B*44:03M HLA-B*52:01H HLA-B*37:01H HLA-B*40:01M HLA-B*40:02M HLA-B*40:06H HLA-B*41:02H HLA-B*13:02H HLA-B*49:01H HLA-B*50:01M
KENSYTTTI

SEQ ID NO: 2046 - protein, 9 aa, Severe acute respiratory syndrome coronavirus 2
  REGION 1..9: note = Table A: HLA-A*34:02M
ENSYTTTIK

SEQ ID NO: 2047 - protein, 9 aa, Severe acute respiratory syndrome coronavirus 2
  REGION 1..9: note = Table A: HLA-C*14:03H
SYTTTIKPV

SEQ ID NO: 2048 - protein, 9 aa, Severe acute respiratory syndrome coronavirus 2
  REGION 1..9: note = Table A: HLA-B*58:01H HLA-C*16:01H HLA-A*68:02H HLA-B*57:03H
YTTTIKPVT

SEQ ID NO: 2049 - protein, 9 aa, Severe acute respiratory syndrome coronavirus 2
  REGION 1..9: note = Table A: HLA-B*58:01H HLA-B*58:02H HLA-C*16:01M HLA-A*36:01H HLA-B*57:01M HLA-A*29:02H HLA-B*18:01H HLA-C*07:01H HLA-A*30:02H HLA-C*15:05H HLA-A*34:02H HLA-B*35:01M HLA-B*38:02H HLA-B*15:01H HLA-B*15:02H HLA-B*39:01H
  REGION 1..9: note = CONT. FROM ABOVE: HLA-B*07:05M HLA-B*57:03M
TTTIKPVTY

SEQ ID NO: 2050 - protein, 9 aa, Severe acute respiratory syndrome coronavirus 2
  REGION 1..9: note = Table A: HLA-A*11:303M HLA-A*74:01H HLA-A*03:01H HLA-A*03:02M HLA-A*11:01H HLA-A*11:02H HLA-A*36:01H HLA-A*33:03H HLA-A*26:03H HLA-A*30:01H HLA-A*68:01M HLA-A*34:01M HLA-A*34:02H HLA-C*07:27M HLA-A*31:01H
  REGION 1..9: note = CONT. FROM ABOVE: HLA-A*66:01H
TTIKPVTYK

SEQ ID NO: 2051 - protein, 9 aa, Severe acute respiratory syndrome coronavirus 2
  REGION 1..9: note = Table A: HLA-B*42:01H HLA-B*08:01H HLA-A*02:11H HLA-A*30:02H HLA-A*02:04H HLA-A*02:05H HLA-A*02:02M HLA-A*02:03H HLA-B*07:04M HLA-B*57:03H
TIKPVTYKL

SEQ ID NO: 2052 - protein, 9 aa, Severe acute respiratory syndrome coronavirus 2
  REGION 1..9: note = Table A: HLA-A*11:303H HLA-A*02:11H HLA-C*03:04H HLA-B*35:03H HLA-A*02:05H HLA-A*02:06M HLA-A*02:01H HLA-A*02:02H HLA-B*35:02M HLA-C*08:01M HLA-B*35:12M HLA-B*38:02M HLA-B*57:03H
VCTEIDPKL

SEQ ID NO: 2053 - protein, 9 aa, Severe acute respiratory syndrome coronavirus 2
  REGION 1..9: note = Table A: HLA-A*36:01M HLA-A*01:01H HLA-B*35:08H HLA-B*39:01H
EIDPKLDNY

SEQ ID NO: 2054 - protein, 9 aa, Severe acute respiratory syndrome coronavirus 2
  REGION 1..9: note = Table A: HLA-A*36:01H
IDPKLDNYY

SEQ ID NO: 2055 - protein, 9 aa, Severe acute respiratory syndrome coronavirus 2
  REGION 1..9: note = Table A: HLA-A*33:01H
DPKLDNYYK

SEQ ID NO: 2056 - protein, 9 aa, Severe acute respiratory syndrome coronavirus 2
  REGION 1..9: note = Table A: HLA-C*14:02H HLA-C*14:03H HLA-B*15:02H
NYYKKDNSY

SEQ ID NO: 2057 - protein, 9 aa, Severe acute respiratory syndrome coronavirus 2
  REGION 1..9: note = Table A: HLA-C*14:02M HLA-C*14:03M HLA-A*33:03H HLA-A*29:02H HLA-A*24:02M HLA-A*24:07H HLA-C*08:01H HLA-A*23:01M
YYKKDNSYF

SEQ ID NO: 2058 - protein, 9 aa, Severe acute respiratory syndrome coronavirus 2
  REGION 1..9: note = Table A: HLA-A*68:02H HLA-C*08:03H
NSYFTEQPI

SEQ ID NO: 2059 - protein, 9 aa, Severe acute respiratory syndrome coronavirus 2
  REGION 1..9: note = Table A: HLA-C*14:02H HLA-C*14:03M HLA-C*04:01H HLA-C*04:03H HLA-A*24:07H HLA-B*39:01H
YFTEQPIDL

SEQ ID NO: 2060 - protein, 9 aa, Severe acute respiratory syndrome coronavirus 2
  REGION 1..9: note = Table A: HLA-A*01:01H HLA-C*04:03M HLA-A*68:02H
FTEQPIDLV

SEQ ID NO: 2061 - protein, 9 aa, Severe acute respiratory syndrome coronavirus 2
  REGION 1..9: note = Table A: HLA-B*45:01M HLA-B*40:06H HLA-B*50:01H
TEQPIDLVP

SEQ ID NO: 2062 - protein, 9 aa, Severe acute respiratory syndrome coronavirus 2
  REGION 1..9: note = Table A: HLA-B*56:01H HLA-B*55:02H HLA-C*15:05H HLA-B*55:01H HLA-B*51:01H HLA-B*54:01H
VPNQPYPNA

SEQ ID NO: 2063 - protein, 9 aa, Severe acute respiratory syndrome coronavirus 2
  REGION 1..9: note = Table A: HLA-C*14:03H HLA-B*38:02H HLA-B*15:01M HLA-B*15:02M HLA-B*15:03H HLA-B*07:05H
NQPYPNASF

SEQ ID NO: 2064 - protein, 9 aa, Severe acute respiratory syndrome coronavirus 2
  REGION 1..9: note = Table A: HLA-B*53:01M HLA-B*35:03M HLA-C*15:05H HLA-B*35:01M HLA-B*35:02H HLA-B*35:08M HLA-B*35:07M HLA-B*35:12M HLA-B*38:01H HLA-B*38:02H HLA-B*07:05H
YPNASFDNF

SEQ ID NO: 2065 - protein, 9 aa, Severe acute respiratory syndrome coronavirus 2
  REGION 1..9: note = Table A: HLA-B*53:01H HLA-B*35:01H HLA-B*35:02H HLA-B*35:08H HLA-B*35:07H
NASFDNFKF

SEQ ID NO: 2066 - protein, 9 aa, Severe acute respiratory syndrome coronavirus 2
  REGION 1..9: note = Table A: HLA-C*06:02H HLA-A*02:11H HLA-A*68:02H HLA-C*12:03H HLA-C*15:02M HLA-A*02:06H HLA-B*40:06H
ASFDNFKFV

SEQ ID NO: 2067 - protein, 9 aa, Severe acute respiratory syndrome coronavirus 2
  REGION 1..9: note = Table A: HLA-A*24:07M
KFVCDNIKF

SEQ ID NO: 2068 - protein, 9 aa, Severe acute respiratory syndrome coronavirus 2
  REGION 1..9: note = Table A: HLA-C*14:02H HLA-C*14:03H HLA-A*02:05H HLA-A*02:08H HLA-A*02:02H HLA-A*24:02H HLA-A*24:07H HLA-C*08:01H HLA-A*23:01H HLA-B*38:02H
KFADDLNQL

SEQ ID NO: 2069 - protein, 9 aa, Severe acute respiratory syndrome coronavirus 2
  REGION 1..9: note = Table A: HLA-B*18:01H HLA-B*38:02H HLA-B*07:05H
DDLNQLTGY

SEQ ID NO: 2070 - protein, 9 aa, Severe acute respiratory syndrome coronavirus 2
  REGION 1..9: note = Table A: HLA-A*34:01H HLA-A*34:02M HLA-A*66:01H
DLNQLTGYK

SEQ ID NO: 2071 - protein, 9 aa, Severe acute respiratory syndrome coronavirus 2
  REGION 1..9: note = Table A: HLA-A*74:01M HLA-A*03:01H HLA-A*33:01H HLA-A*33:03M HLA-B*08:01H HLA-A*68:01H HLA-A*34:01H HLA-A*34:02H HLA-A*31:01H HLA-A*66:01H
TGYKKPASR

SEQ ID NO: 2072 - protein, 9 aa, Severe acute respiratory syndrome coronavirus 2
  REGION 1..9: note = Table A: HLA-B*07:04M HLA-B*15:03M
YKKPASREL

SEQ ID NO: 2073 - protein, 9 aa, Severe acute respiratory syndrome coronavirus 2
  REGION 1..9: note = Table A: HLA-C*15:05H HLA-B*07:02H HLA-B*07:04M
KPASRELKV

SEQ ID NO: 2074 - protein, 9 aa, Severe acute respiratory syndrome coronavirus 2
  REGION 1..9: note = Table A: HLA-B*58:02H HLA-B*57:01H HLA-B*57:03H
ASRELKVTF

SEQ ID NO: 2075 - protein, 9 aa, Severe acute respiratory syndrome coronavirus 2
  REGION 1..9: note = Table A: HLA-B*40:06H
RELKVTFFP

SEQ ID NO: 2076 - protein, 9 aa, Severe acute respiratory syndrome coronavirus 2
  REGION 1..9: note = Table A: HLA-B*55:02H HLA-B*35:03M HLA-C*15:05M HLA-B*35:01H HLA-B*35:02H HLA-B*35:08M HLA-B*51:01H HLA-B*35:07H HLA-C*08:01H HLA-B*35:12H HLA-B*38:02M HLA-B*54:01H HLA-B*39:01M HLA-B*07:05H
FPDLNGDVV

SEQ ID NO: 2077 - protein, 9 aa, Severe acute respiratory syndrome coronavirus 2
  REGION 1..9: note = Table A: HLA-B*38:02H
DLNGDVVAI

SEQ ID NO: 2078 - protein, 9 aa, Severe acute respiratory syndrome coronavirus 2
  REGION 1..9: note = Table A: HLA-A*01:01H HLA-B*35:01H HLA-B*39:01H
NGDVVAIDY

SEQ ID NO: 2079 - protein, 9 aa, Severe acute respiratory syndrome coronavirus 2
  REGION 1..9: note = Table A: HLA-B*27:02H
GDVVAIDYK

SEQ ID NO: 2080 - protein, 9 aa, Severe acute respiratory syndrome coronavirus 2
  REGION 1..9: note = Table A: HLA-A*30:02H
VVAIDYKHY

SEQ ID NO: 2081 - protein, 9 aa, Severe acute respiratory syndrome coronavirus 2
  REGION 1..9: note = Table A: HLA-A*33:01H HLA-A*33:03H HLA-A*26:01H HLA-B*08:01H HLA-C*07:01H HLA-A*24:02M HLA-A*24:07M HLA-A*23:01M
DYKHYTPSF

SEQ ID NO: 2082 - protein, 9 aa, Severe acute respiratory syndrome coronavirus 2
  REGION 1..9: note = Table A: HLA-B*58:01M HLA-B*58:02M HLA-A*74:01H HLA-B*57:01H HLA-A*24:07M HLA-A*23:01H HLA-A*32:01H HLA-B*57:03H HLA-B*13:01M
KLLHKPIVW

SEQ ID NO: 2083 - protein, 9 aa, Severe acute respiratory syndrome coronavirus 2
  REGION 1..9: note = Table A: HLA-A*02:11H HLA-A*30:01H HLA-A*02:02H HLA-B*38:02M
LHKPIVWHV

SEQ ID NO: 2084 - protein, 9 aa, Severe acute respiratory syndrome coronavirus 2
  REGION 1..9: note = Table A: HLA-A*02:05H
PIVWHVNNA

SEQ ID NO: 2085 - protein, 9 aa, Severe acute respiratory syndrome coronavirus 2
  REGION 1..9: note = Table A: HLA-A*02:11H
IVWHVNNAT

SEQ ID NO: 2086 - protein, 9 aa, Severe acute respiratory syndrome coronavirus 2
  REGION 1..9: note = Table A: HLA-A*02:08H HLA-B*38:02H
HVNNATNKA

SEQ ID NO: 2087 - protein, 9 aa, Severe acute respiratory syndrome coronavirus 2
  REGION 1..9: note = Table A: HLA-B*35:01H HLA-B*38:02H HLA-B*15:02H HLA-B*07:05H
NNATNKATY

SEQ ID NO: 2088 - protein, 9 aa, Severe acute respiratory syndrome coronavirus 2
  REGION 1..9: note = Table A: HLA-A*34:02M
NATNKATYK

SEQ ID NO: 2089 - protein, 9 aa, Severe acute respiratory syndrome coronavirus 2
  REGION 1..9: note = Table A: HLA-B*58:01H HLA-B*58:02M HLA-C*16:01H HLA-B*57:01M HLA-B*53:01H HLA-A*32:01H HLA-B*57:03H
KATYKPNTW

SEQ ID NO: 2090 - protein, 9 aa, Severe acute respiratory syndrome coronavirus 2
  REGION 1..9: note = Table A: HLA-A*24:02M HLA-A*24:07H HLA-A*23:01M
TYKPNTWCI

SEQ ID NO: 2091 - protein, 9 aa, Severe acute respiratory syndrome coronavirus 2
  REGION 1..9: note = Table A: HLA-B*42:01H HLA-B*58:01H HLA-B*44:05H HLA-B*56:01H HLA-B*27:02H HLA-B*53:01M HLA-B*55:02H HLA-B*35:03M HLA-C*15:05H HLA-B*35:01H HLA-B*35:02H HLA-B*35:08H HLA-B*35:07M HLA-C*08:01H HLA-B*15:13H HLA-B*35:12H
  REGION 1..9: note = CONT. FROM ABOVE: HLA-B*38:01H HLA-B*38:02M HLA-B*07:02M HLA- B*07:04H HLA-B*15:01H HLA-B*15:02M HLA-B*15:03H HLA-B*07:05H HLA-B*57:03H HLA-B*15:11H
KPVETSNSF

SEQ ID NO: 2092 - protein, 9 aa, Severe acute respiratory syndrome coronavirus 2
  REGION 1..9: note = Table A: HLA-A*68:02M HLA-B*39:01H
ETSNSFDVL

SEQ ID NO: 2093 - protein, 9 aa, Severe acute respiratory syndrome coronavirus 2
  REGION 1..9: note = Table A: HLA-A*11:303H HLA-A*03:02H HLA-A*11:01M HLA-A*11:02M HLA-A*36:01H HLA-A*30:02H HLA-A*68:01H HLA-A*34:02M HLA-C*07:27H
TSNSFDVLK

SEQ ID NO: 2094 - protein, 9 aa, Severe acute respiratory syndrome coronavirus 2
  REGION 1..9: note = Table A: HLA-B*35:02H
DAQGMDNLA

SEQ ID NO: 2095 - protein, 9 aa, Severe acute respiratory syndrome coronavirus 2
  REGION 1..9: note = Table A: HLA-B*08:01H HLA-A*02:11H HLA-A*68:02M HLA-A*02:05H HLA-B*14:01H HLA-A*02:02M HLA-A*02:03H HLA-B*38:02H HLA-B*15:02H HLA-B*13:02H
DLKPVSEEV

SEQ ID NO: 2096 - protein, 9 aa, Severe acute respiratory syndrome coronavirus 2
  REGION 1..9: note = Table A: HLA-B*44:02H HLA-B*44:05H HLA-B*45:01M HLA-B*44:03M HLA-B*38:01H HLA-B*38:02H HLA-B*40:01H HLA-B*40:02M HLA-B*41:02H HLA-B*49:01H
EEVVENPTI

SEQ ID NO: 2097 - protein, 9 aa, Severe acute respiratory syndrome coronavirus 2
  REGION 1..9: note = Table A: HLA-A*11:303M HLA-A*03:01M HLA-A*03:02H HLA-A*11:01H HLA-A*11:02H HLA-A*36:01H HLA-A*30:02H HLA-A*68:01M HLA-A*34:01H HLA-A*34:02H HLA-C*07:27M HLA-A*66:01H
VVENPTIQK

SEQ ID NO: 2098 - protein, 9 aa, Severe acute respiratory syndrome coronavirus 2
  REGION 1..9: note = Table A: HLA-B*35:03M HLA-C*15:05H HLA-B*35:01H HLA-B*35:02M HLA-B*35:12H HLA-B*07:02H HLA-B*07:05H
NPTIQKDVL

SEQ ID NO: 2099 - protein, 9 aa, Severe acute respiratory syndrome coronavirus 2
  REGION 1..9: note = Table A: HLA-B*58:01H HLA-B*58:02H HLA-A*02:08H HLA-B*57:03M
KTTEVVGDI

SEQ ID NO: 2100 - protein, 9 aa, Severe acute respiratory syndrome coronavirus 2
  REGION 1..9: note = Table A: HLA-B*44:05H HLA-B*35:03H HLA-B*40:01H HLA-B*40:02M HLA-B*41:02M HLA-B*49:01H
TEVVGDIIL

SEQ ID NO: 2101 - protein, 9 aa, Severe acute respiratory syndrome coronavirus 2
  REGION 1..9: note = Table A: HLA-A*11:01H HLA-A*11:02H HLA-A*33:03H HLA-A*26:03M HLA-A*68:01H HLA-A*68:02M HLA-A*34:01H HLA-A*34:02H HLA-A*66:01M
EVVGDIILK

SEQ ID NO: 2102 - protein, 9 aa, Severe acute respiratory syndrome coronavirus 2
  REGION 1..9: note = Table A: HLA-A*11:01H HLA-A*34:02H
VVGDIILKP

SEQ ID NO: 2103 - protein, 9 aa, Severe acute respiratory syndrome coronavirus 2
  REGION 1..9: note = Table A: HLA-A*11:303H HLA-B*46:01H HLA-B*08:01M HLA-C*01:02H HLA-A*02:05H HLA-B*14:01H HLA-A*02:02H HLA-A*02:03M HLA-B*38:02M HLA-B*07:02H HLA-B*07:04M HLA-B*15:01M HLA-B*15:02M HLA-B*41:02H
ILKPANNSL

SEQ ID NO: 2104 - protein, 9 aa, Severe acute respiratory syndrome coronavirus 2
  REGION 1..9: note = Table A: HLA-B*53:01H HLA-C*15:05M HLA-B*51:01H HLA-B*07:02H HLA-B*07:04H HLA-B*07:05H
KPANNSLKI

SEQ ID NO: 2105 - protein, 9 aa, Severe acute respiratory syndrome coronavirus 2
  REGION 1..9: note = Table A: HLA-A*02:11H HLA-A*68:02H HLA-C*15:05H HLA-A*02:06H
NSLKITEEV

SEQ ID NO: 2106 - protein, 9 aa, Severe acute respiratory syndrome coronavirus 2
  REGION 1..9: note = Table A: HLA-B*44:05H HLA-B*40:01H HLA-B*40:02H HLA-B*39:01H HLA-B*41:02M
TEEVGHTDL

SEQ ID NO: 2107 - protein, 9 aa, Severe acute respiratory syndrome coronavirus 2
  REGION 1..9: note = Table A: HLA-B*44:02H HLA-B*44:05M HLA-B*44:03M HLA-B*18:01H HLA-A*68:02H HLA-B*40:01H HLA-B*40:02H HLA-B*39:01H HLA-B*49:01H
EEVGHTDLM

SEQ ID NO: 2108 - protein, 9 aa, Severe acute respiratory syndrome coronavirus 2
  REGION 1..9: note = Table A: HLA-B*27:02H HLA-A*30:02H HLA-B*38:02H HLA-B*15:03H HLA-B*39:01H
GHTDLMAAY

SEQ ID NO: 2109 - protein, 9 aa, Severe acute respiratory syndrome coronavirus 2
  REGION 1..9: note = Table A: HLA-A*36:01H HLA-C*04:01H HLA-C*04:03M HLA-A*68:02H
HTDLMAAYV

SEQ ID NO: 2110 - protein, 9 aa, Severe acute respiratory syndrome coronavirus 2
  REGION 1..9: note = Table A: HLA-B*48:01M HLA-C*14:02H HLA-C*14:03H HLA-A*11:303H HLA-C*16:01H HLA-C*16:04H HLA-B*46:01M HLA-C*03:03H HLA-C*12:05H HLA-C*03:02M HLA-C*03:04H HLA-B*35:03M HLA-C*15:05H HLA-C*01:02M HLA-C*12:02M
  REGION 1..9: note = CONT. FROM ABOVE: HLA-C*12:03H HLA-A*02:05H HLA-A*02:08H HLA- B*14:01H HLA-C*07:27M HLA-B*35:01H HLA-B*35:02H HLA-C*17:01M HLA-C*08:01H HLA-C*08:02M HLA-C*08:03H HLA-B*35:12H HLA-B*38 :02M HLA-B*40:01H HLA-B*40:02H HLA-B*07:02M HLA-B*15:01H
  REGION 1..9: note = CONT. FROM ABOVE: HLA-B*15:02H HLA-B*15:03H HLA-B*39:01H HLA- B*07:05H HLA-B*41:02H HLA-B*57:03H HLA-B*15:10H
AAYVDNSSL

SEQ ID NO: 2111 - protein, 9 aa, Severe acute respiratory syndrome coronavirus 2
  REGION 1..9: note = Table A: HLA-A*11:303H HLA-A*01:01H HLA-C*04:03H HLA-C*03:03H HLA-B*53:01H HLA-C*03:04H HLA-A*68:02H HLA-B*35:03H HLA-C*15:05M HLA-C*15:02H HLA-A*02:06M HLA-A*02:07H HLA-A*02:01H HLA-B*35:02H HLA-B*51:01H
  REGION 1..9: note = CONT. FROM ABOVE: HLA-C*08:01M HLA-C*08:02M HLA-B*38:01M HLA- B*38:02H HLA-B*39:01H HLA-C*05:01H HLA-B*13:01M HLA-B*13:02H HLA-B*49:01H
YVDNSSLTI

SEQ ID NO: 2112 - protein, 9 aa, Severe acute respiratory syndrome coronavirus 2
  REGION 1..9: note = Table A: HLA-A*11:01H HLA-A*34:02H
VDNSSLTIK

SEQ ID NO: 2113 - protein, 9 aa, Severe acute respiratory syndrome coronavirus 2
  REGION 1..9: note = Table A: HLA-A*33:01H HLA-A*68:01H HLA-A*34:02M
DNSSLTIKK

SEQ ID NO: 2114 - protein, 9 aa, Severe acute respiratory syndrome coronavirus 2
  REGION 1..9: note = Table A: HLA-B*58:02H HLA-C*03:03H HLA-C*03:04H HLA-C*15:05H HLA-C*15:02H HLA-A*02:05H HLA-A*02:08H HLA-A*02:02H HLA-C*17:01H HLA-B*57:03M
LTIKKPNEL

SEQ ID NO: 2115 - protein, 9 aa, Severe acute respiratory syndrome coronavirus 2
  REGION 1..9: note = Table A: HLA-B*42:01M HLA-B*58:02H HLA-B*56:01H HLA-B*08:01H HLA-C*07:01H HLA-B*53:01H HLA-B*55:02H HLA-B*35:03H HLA-C*15:05M HLA-B*55:01M HLA-B*07:02H HLA-B*07:04H HLA-B*07:05M
KPNELSRVL

SEQ ID NO: 2116 - protein, 9 aa, Severe acute respiratory syndrome coronavirus 2
  REGION 1..9: note = Table A: HLA-B*44:05H HLA-B*44:03H HLA-B*14:02H HLA-B*14:01H HLA-B*37:01M HLA-B*40:02H HLA-B*41:02H HLA-C*07:04H
NELSRVLGL

SEQ ID NO: 2117 - protein, 9 aa, Severe acute respiratory syndrome coronavirus 2
  REGION 1..9: note = Table A: HLA-A*34:01H HLA-A*34:02M
ELSRVLGLK

SEQ ID NO: 2118 - protein, 9 aa, Severe acute respiratory syndrome coronavirus 2
  REGION 1..9: note = Table A: HLA-C*06:02H HLA-B*27:05H HLA-B*14:02H HLA-B*14:01H
SRVLGLKTL

SEQ ID NO: 2119 - protein, 9 aa, Severe acute respiratory syndrome coronavirus 2
  REGION 1..9: note = Table A: HLA-B*08:01H
VLGLKTLAT

SEQ ID NO: 2120 - protein, 9 aa, Severe acute respiratory syndrome coronavirus 2
  REGION 1..9: note = Table A: HLA-C*15:05H HLA-A*02:02H HLA-A*02:03M HLA-B*38:02M HLA-B*39:06H HLA-B*15:02M HLA-B*13:02H
TLATHGLAA

SEQ ID NO: 2121 - protein, 9 aa, Severe acute respiratory syndrome coronavirus 2
  REGION 1..9: note = Table A: HLA-A*11:303H HLA-C*03:02H HLA-A*68:02H HLA-A*02:06H
LATHGLAAV

SEQ ID NO: 2122 - protein, 9 aa, Severe acute respiratory syndrome coronavirus 2
  REGION 1..9: note = Table A: HLA-C*15:05H HLA-A*02:06H HLA-B*14:01H HLA-B*51:01M HLA-B*52:01M HLA-B*38:02H HLA-B*39:06H HLA-B*54:01H HLA-B*13:02H
HGLAAVNSV

SEQ ID NO: 2123 - protein, 9 aa, Severe acute respiratory syndrome coronavirus 2
  REGION 1..9: note = Table A: HLA-B*58:01H HLA-B*53:01H
LAAVNSVPW

SEQ ID NO: 2124 - protein, 9 aa, Severe acute respiratory syndrome coronavirus 2
  REGION 1..9: note = Table A: HLA-B*56:01H HLA-A*29:01M HLA-A*29:02M HLA-B*18:01H HLA-B*53:01M HLA-B*55:02H HLA-A*30:02M HLA-B*35:03H HLA-C*15:05H HLA-A*34:02H HLA-B*35:01H HLA-B*35:08M HLA-B*51:01H HLA-B*35:07H HLA-B*38:02M HLA-B*54:01H
  REGION 1..9: note = CONT. FROM ABOVE: HLA-B*15:02M HLA-B*15:03H HLA-B*39:01H HLA- B*07:05M HLA-B*15:11M
VPWDTIANY

SEQ ID NO: 2125 - protein, 9 aa, Severe acute respiratory syndrome coronavirus 2
  REGION 1..9: note = Table A: HLA-A*26:01H HLA-A*26:03M HLA-A*68:01H HLA-A*68:02H HLA-A*66:01M
DTIANYAKP

SEQ ID NO: 2126 - protein, 9 aa, Severe acute respiratory syndrome coronavirus 2
  REGION 1..9: note = Table A: HLA-B*58:02H HLA-C*16:01M HLA-C*03:03H HLA-C*03:04H HLA-C*15:02H HLA-C*08:01H HLA-B*07:04H HLA-B*57:03H
IANYAKPFL

SEQ ID NO: 2127 - protein, 9 aa, Severe acute respiratory syndrome coronavirus 2
  REGION 1..9: note = Table A: HLA-A*03:01H HLA-A*11:01H HLA-A*11:02H HLA-A*36:01H HLA-A*33:01M HLA-A*33:03M HLA-A*34:02M HLA-A*23:01H HLA-A*31:01H
NYAKPFLNK

SEQ ID NO: 2128 - protein, 9 aa, Severe acute respiratory syndrome coronavirus 2
  REGION 1..9: note = Table A: HLA-C*16:01H HLA-B*46:01H HLA-C*06:02H HLA-B*08:01H HLA-C*12:05H HLA-A*02:11H HLA-C*03:02H HLA-A*68:02H HLA-B*55:01H HLA-C*12:02H HLA-C*12:03M HLA-C*15:02H HLA-A*02:04H HLA-A*02:05M HLA-A*02:06H HLA-A*02:02M
  REGION 1..9: note = CONT. FROM ABOVE: HLA-A*02:03M HLA-B*51:01M HLA-B*52:01H HLA- B*38:02H HLA-B*54:01H HLA-B*07:04H HLA-C*02:02M
YAKPFLNKV

SEQ ID NO: 2129 - protein, 9 aa, Severe acute respiratory syndrome coronavirus 2
  REGION 1..9: note = Table A: HLA-B*56:01M HLA-B*55:02M HLA-B*55:01H HLA-B*54:01H
KPFLNKVVS

SEQ ID NO: 2130 - protein, 9 aa, Severe acute respiratory syndrome coronavirus 2
  REGION 1..9: note = Table A: HLA-A*02:11M HLA-A*02:02M HLA-A*02:03M HLA-B*38:02H
FLNKVVSTT

SEQ ID NO: 2131 - protein, 9 aa, Severe acute respiratory syndrome coronavirus 2
  REGION 1..9: note = Table A: HLA-B*58:01H HLA-B*58:02H HLA-A*02:11H HLA-C*15:05H HLA-A*02:05M HLA-A*02:06H HLA-A*02:08H HLA-A*02:03H HLA-B*38:02H HLA-B*57:03M HLA-B*13:02M
KVVSTTTNI

SEQ ID NO: 2132 - protein, 9 aa, Severe acute respiratory syndrome coronavirus 2
  REGION 1..9: note = Table A: HLA-A*02:05H HLA-A*02:08H HLA-A*02:03H HLA-B*38:02H
VVSTTTNIV

SEQ ID NO: 2133 - protein, 9 aa, Severe acute respiratory syndrome coronavirus 2
  REGION 1..9: note = Table A: HLA-A*11:303H HLA-A*74:01H HLA-A*03:01M HLA-A*03:02M HLA-A*11:01H HLA-A*11:02H HLA-A*36:01H HLA-B*57:01H HLA-A*33:01H HLA-A*33:03H HLA-A*26:03M HLA-A*30:02H HLA-A*68:01H HLA-A*68:02M HLA-A*34:01M
  REGION 1..9: note = CONT. FROM ABOVE: HLA-A*34:02H HLA-C*07:27H HLA-A*31:01H HLA- A*66:01H
STTTNIVTR

SEQ ID NO: 2134 - protein, 9 aa, Severe acute respiratory syndrome coronavirus 2
  REGION 1..9: note = Table A: HLA-A*68:01H HLA-A*68:02H HLA-A*02:05H HLA-A*02:06H HLA-A*02:08M HLA-A*34:02H
TTTNIVTRC

SEQ ID NO: 2135 - protein, 9 aa, Severe acute respiratory syndrome coronavirus 2
  REGION 1..9: note = Table A: HLA-B*58:02H HLA-C*15:05H HLA-C*15:02H
TTNIVTRCL

SEQ ID NO: 2136 - protein, 9 aa, Severe acute respiratory syndrome coronavirus 2
  REGION 1..9: note = Table A: HLA-C*14:02H HLA-C*14:03M HLA-A*29:02H HLA-C*07:01H HLA-C*07:02M HLA-A*02:04M HLA-A*24:02H HLA-A*24:07H HLA-C*08:01M HLA-A*23:01H HLA-B*40:06M HLA-C*07:04H
NYMPYFFTL

SEQ ID NO: 2137 - protein, 9 aa, Severe acute respiratory syndrome coronavirus 2
  REGION 1..9: note = Table A: HLA-C*04:03H HLA-A*02:07H HLA-A*02:02H HLA-A*24:07H HLA-C*08:01H
YMPYFFTLL

SEQ ID NO: 2138 - protein, 9 aa, Severe acute respiratory syndrome coronavirus 2
  REGION 1..9: note = Table A: HLA-B*53:01H HLA-B*35:03H HLA-C*15:05H HLA-A*34:02H HLA-B*51:01M HLA-B*35:07H HLA-B*38:02H HLA-B*54:01H
MPYFFTLLL

SEQ ID NO: 2139 - protein, 9 aa, Severe acute respiratory syndrome coronavirus 2
  REGION 1..9: note = Table A: HLA-C*14:03H
YFFTLLLQL

SEQ ID NO: 2140 - protein, 9 aa, Severe acute respiratory syndrome coronavirus 2
  REGION 1..9: note = Table A: HLA-B*38:02H HLA-B*15:02H
TLLLQLCTF

SEQ ID NO: 2141 - protein, 9 aa, Severe acute respiratory syndrome coronavirus 2
  REGION 1..9: note = Table A: HLA-A*74:01H
LLQLCTFTR

SEQ ID NO: 2142 - protein, 9 aa, Severe acute respiratory syndrome coronavirus 2
  REGION 1..9: note = Table A: HLA-A*33:03H
TFTRSTNSR

SEQ ID NO: 2143 - protein, 9 aa, Severe acute respiratory syndrome coronavirus 2
  REGION 1..9: note = Table A: HLA-B*07:05H
TNSRIKASM

SEQ ID NO: 2144 - protein, 9 aa, Severe acute respiratory syndrome coronavirus 2
  REGION 1..9: note = Table A: HLA-B*07:04H
RIKASMPTT

SEQ ID NO: 2145 - protein, 9 aa, Severe acute respiratory syndrome coronavirus 2
  REGION 1..9: note = Table A: HLA-B*38:02H HLA-B*15:03H
IKASMPTTI

SEQ ID NO: 2146 - protein, 9 aa, Severe acute respiratory syndrome coronavirus 2
  REGION 1..9: note = Table A: HLA-B*56:01H HLA-B*55:02H HLA-B*55:01H
KASMPTTIA

SEQ ID NO: 2147 - protein, 9 aa, Severe acute respiratory syndrome coronavirus 2
  REGION 1..9: note = Table A: HLA-A*11:303H HLA-A*74:01H HLA-A*03:01H HLA-A*03:02H HLA-A*11:01H HLA-A*11:02H HLA-A*36:01H HLA-B*46:01H HLA-B*27:05H HLA-A*30:01M HLA-A*30:02M HLA-A*68:01M HLA-C*15:05H HLA-A*34:01H HLA-A*34:02H
  REGION 1..9: note = CONT. FROM ABOVE: HLA-C*07:27H HLA-B*37:01H HLA-A*31:01H HLA- B*57:03H HLA-A*66:01M
ASMPTTIAK

SEQ ID NO: 2148 - protein, 9 aa, Severe acute respiratory syndrome coronavirus 2
  REGION 1..9: note = Table A: HLA-B*54:01H
MPTTIAKNT

SEQ ID NO: 2149 - protein, 9 aa, Severe acute respiratory syndrome coronavirus 2
  REGION 1..9: note = Table A: HLA-A*11:303H HLA-A*03:01H HLA-A*03:02H HLA-A*11:01M HLA-A*11:02M HLA-A*33:03H HLA-A*26:03H HLA-A*68:01H HLA-A*34:01H HLA-A*34:02H HLA-C*07:27H HLA-A*66:01M
TTIAKNTVK

SEQ ID NO: 2150 - protein, 9 aa, Severe acute respiratory syndrome coronavirus 2
  REGION 1..9: note = Table A: HLA-C*16:01H HLA-B*08:01H HLA-C*12:05H HLA-C*12:03H HLA-A*02:03M HLA-B*51:01H HLA-B*38:02H HLA-B*07:04M HLA-C*02:02H
IAKNTVKSV

SEQ ID NO: 2151 - protein, 9 aa, Severe acute respiratory syndrome coronavirus 2
  REGION 1..9: note = Table A: HLA-B*58:01H HLA-A*25:01M HLA-A*26:01M HLA-A*26:02H HLA-A*26:03H HLA-A*68:01H HLA-A*34:01H HLA-A*34:02M HLA-B*57:03H HLA-A*66:01M
NTVKSVGKF

SEQ ID NO: 2152 - protein, 9 aa, Severe acute respiratory syndrome coronavirus 2
  REGION 1..9: note = Table A: HLA-B*07:04H
TVKSVGKFC

SEQ ID NO: 2153 - protein, 9 aa, Severe acute respiratory syndrome coronavirus 2
  REGION 1..9: note = Table A: HLA-B*15:03M
GKFCLEASF

SEQ ID NO: 2154 - protein, 9 aa, Severe acute respiratory syndrome coronavirus 2
  REGION 1..9: note = Table A: HLA-A*29:02H
FCLEASFNY

SEQ ID NO: 2155 - protein, 9 aa, Severe acute respiratory syndrome coronavirus 2
  REGION 1..9: note = Table A: HLA-C*03:02H HLA-C*03:04H HLA-C*15:02H HLA-B*38:02H
FNYLKSPNF

SEQ ID NO: 2156 - protein, 9 aa, Severe acute respiratory syndrome coronavirus 2
  REGION 1..9: note = Table A: HLA-A*74:01H HLA-A*34:02H HLA-A*66:01H
YLKSPNFSK

SEQ ID NO: 2157 - protein, 9 aa, Severe acute respiratory syndrome coronavirus 2
  REGION 1..9: note = Table A: HLA-B*15:03H
LKSPNFSKL

SEQ ID NO: 2158 - protein, 9 aa, Severe acute respiratory syndrome coronavirus 2
  REGION 1..9: note = Table A: HLA-B*58:02M HLA-B*57:03M
KSPNFSKLI

SEQ ID NO: 2159 - protein, 9 aa, Severe acute respiratory syndrome coronavirus 2
  REGION 1..9: note = Table A: HLA-B*57:03H
KLINIIIWF

SEQ ID NO: 2160 - protein, 9 aa, Severe acute respiratory syndrome coronavirus 2
  REGION 1..9: note = Table A: HLA-A*02:04M
LINIIIWFL

SEQ ID NO: 2161 - protein, 9 aa, Severe acute respiratory syndrome coronavirus 2
  REGION 1..9: note = Table A: HLA-C*15:02H HLA-A*02:04H
NIIIWFLLL

SEQ ID NO: 2162 - protein, 9 aa, Severe acute respiratory syndrome coronavirus 2
  REGION 1..9: note = Table A: HLA-A*02:11H
IIWFLLLSV

SEQ ID NO: 2163 - protein, 9 aa, Severe acute respiratory syndrome coronavirus 2
  REGION 1..9: note = Table A: HLA-B*15:02H
SVCLGSLIY

SEQ ID NO: 2164 - protein, 9 aa, Severe acute respiratory syndrome coronavirus 2
  REGION 1..9: note = Table A: HLA-B*56:01H HLA-B*55:02H HLA-B*54:01H
LGSLIYSTA

SEQ ID NO: 2165 - protein, 9 aa, Severe acute respiratory syndrome coronavirus 2
  REGION 1..9: note = Table A: HLA-B*39:06M HLA-B*50:01H
GSLIYSTAA

SEQ ID NO: 2166 - protein, 9 aa, Severe acute respiratory syndrome coronavirus 2
  REGION 1..9: note = Table A: HLA-C*14:03H HLA-A*11:303M HLA-B*46:01M HLA-A*26:03M HLA-C*03:03H HLA-A*02:11H HLA-C*03:04H HLA-C*15:05H HLA-C*01:02M HLA-A*02:04M HLA-A*02:05H HLA-B*14:01H HLA-A*02:01H HLA-A*02:02M HLA-A*02:03M
  REGION 1..9: note = CONT. FROM ABOVE: HLA-A*34:01H HLA-C*08:01H HLA-B*38:02M HLA- B*15:01H HLA-B*15:02M HLA-B*07:05H HLA-B*15:10H
SLIYSTAAL

SEQ ID NO: 2167 - protein, 9 aa, Severe acute respiratory syndrome coronavirus 2
  REGION 1..9: note = Table A: HLA-C*14:03H
IYSTAALGV

SEQ ID NO: 2168 - protein, 9 aa, Severe acute respiratory syndrome coronavirus 2
  REGION 1..9: note = Table A: HLA-A*68:02H HLA-C*15:05H HLA-B*57:03H
STAALGVLM

SEQ ID NO: 2169 - protein, 9 aa, Severe acute respiratory syndrome coronavirus 2
  REGION 1..9: note = Table A: HLA-A*02:02M HLA-A*02:03H
ALGVLMSNL

SEQ ID NO: 2170 - protein, 9 aa, Severe acute respiratory syndrome coronavirus 2
  REGION 1..9: note = Table A: HLA-B*58:01H HLA-A*36:01H HLA-B*46:01H HLA-A*01:01H HLA-A*30:02M HLA-B*35:01H HLA-B*15:01H
MSNLGMPSY

SEQ ID NO: 2171 - protein, 9 aa, Severe acute respiratory syndrome coronavirus 2
  REGION 1..9: note = Table A: HLA-B*15:01H
GMPSYCTGY

SEQ ID NO: 2172 - protein, 9 aa, Severe acute respiratory syndrome coronavirus 2
  REGION 1..9: note = Table A: HLA-A*34:01M HLA-A*34:02H HLA-A*66:01H
MPSYCTGYR

SEQ ID NO: 2173 - protein, 9 aa, Severe acute respiratory syndrome coronavirus 2
  REGION 1..9: note = Table A: HLA-A*68:02H HLA-C*15:05H HLA-B*51:01M HLA-B*52:01H HLA-B*39:01H
EGYLNSTNV

SEQ ID NO: 2174 - protein, 9 aa, Severe acute respiratory syndrome coronavirus 2
  REGION 1..9: note = Table A: HLA-A*02:11H HLA-C*15:05H HLA-A*02:04M HLA-B*14:01H HLA-A*02:01M HLA-A*02:02M HLA-A*02:03M HLA-B*38:01H HLA-B*38:02H HLA-B*13:02M
YLNSTNVTI

SEQ ID NO: 2175 - protein, 9 aa, Severe acute respiratory syndrome coronavirus 2
  REGION 1..9: note = Table A: HLA-A*68:02H
NSTNVTIAT

SEQ ID NO: 2176 - protein, 9 aa, Severe acute respiratory syndrome coronavirus 2
  REGION 1..9: note = Table A: HLA-B*58:01H HLA-B*58:02H HLA-C*14:03H HLA-A*11:303H HLA-B*44:02H HLA-C*16:01H HLA-C*16:04H HLA-A*03:01H HLA-A*03:02H HLA-A*11:01M HLA-A*11:02H HLA-A*36:01H HLA-B*57:01M HLA-A*25:01M HLA-B*46:01M
  REGION 1..9: note = CONT. FROM ABOVE: HLA-A*26:01M HLA-A*26:02M HLA-A*26:03H HLA- A*29:01M HLA-A*29:02M HLA-B*44:03H HLA-B*18:01H HLA-C*07:01H HLA-C*03:02H HLA-A*30:02H HLA-A*68:01H HLA-C*15:05M HLA-C*12 :02H HLA-A*02:03H HLA-A*34:02M HLA-C*07:27H HLA-B*35:01H
  REGION 1..9: note = CONT. FROM ABOVE: HLA-B*35:08H HLA-B*35:07H HLA-B*38:02M HLA- A*32:01H HLA-B*15:01H HLA-B*15:02M HLA-B*15:03H HLA-B*39:01H HLA-A*31:01H HLA-B*07:05H HLA-B*57:03H HLA-C*02:02H HLA-B*15 :11H
STNVTIATY

SEQ ID NO: 2177 - protein, 9 aa, Severe acute respiratory syndrome coronavirus 2
  REGION 1..9: note = Table A: HLA-A*68:02H
TNVTIATYC

SEQ ID NO: 2178 - protein, 9 aa, Severe acute respiratory syndrome coronavirus 2
  REGION 1..9: note = Table A: HLA-A*68:02H HLA-C*15:05H HLA-A*02:03H
CTGSIPCSV

SEQ ID NO: 2179 - protein, 9 aa, Severe acute respiratory syndrome coronavirus 2
  REGION 1..9: note = Table A: HLA-C*15:05H
GSIPCSVCL

SEQ ID NO: 2180 - protein, 9 aa, Severe acute respiratory syndrome coronavirus 2
  REGION 1..9: note = Table A: HLA-B*35:01H HLA-B*39:01H
SGLDSLDTY

SEQ ID NO: 2181 - protein, 9 aa, Severe acute respiratory syndrome coronavirus 2
  REGION 1..9: note = Table A: HLA-A*25:01H HLA-A*68:02H HLA-B*35:03H HLA-C*15:05H HLA-B*35:01H HLA-C*08:01H HLA-B*38:02H HLA-B*39:01H HLA-B*07:05H
DSLDTYPSL

SEQ ID NO: 2182 - protein, 9 aa, Severe acute respiratory syndrome coronavirus 2
  REGION 1..9: note = Table A: HLA-A*25:01M HLA-A*26:02H HLA-A*68:02H HLA-C*15:05M HLA-A*02:05H HLA-B*51:01H HLA-C*08:01H HLA-B*38:02M
DTYPSLETI

SEQ ID NO: 2183 - protein, 9 aa, Severe acute respiratory syndrome coronavirus 2
  REGION 1..9: note = Table A: HLA-B*53:01M HLA-B*35:03H HLA-C*15:05H HLA-B*35:02H HLA-B*51:01M HLA-B*35:12H HLA-B*38:02H HLA-B*54:01H
YPSLETIQI

SEQ ID NO: 2184 - protein, 9 aa, Severe acute respiratory syndrome coronavirus 2
  REGION 1..9: note = Table A: HLA-A*26:03H
ETIQITISS

SEQ ID NO: 2185 - protein, 9 aa, Severe acute respiratory syndrome coronavirus 2
  REGION 1..9: note = Table A: HLA-A*25:01H HLA-B*46:01H HLA-A*26:02H HLA-B*38:02H HLA-B*15:01M HLA-B*15:02M HLA-B*07:05H
TIQITISSF

SEQ ID NO: 2186 - protein, 9 aa, Severe acute respiratory syndrome coronavirus 2
  REGION 1..9: note = Table A: HLA-B*58:01H HLA-B*53:01H HLA-B*15:13H HLA-B*57:03H
QITISSFKW

SEQ ID NO: 2187 - protein, 9 aa, Severe acute respiratory syndrome coronavirus 2
  REGION 1..9: note = Table A: HLA-C*14:02M HLA-C*14:03M HLA-B*46:01M HLA-A*24:02H HLA-A*24:07H HLA-A*23:01H HLA-B*15:02H
SFKWDLTAF

SEQ ID NO: 2188 - protein, 9 aa, Severe acute respiratory syndrome coronavirus 2
  REGION 1..9: note = Table A: HLA-C*04:03H
KWDLTAFGL

SEQ ID NO: 2189 - protein, 9 aa, Severe acute respiratory syndrome coronavirus 2
  REGION 1..9: note = Table A: HLA-B*58:01M HLA-C*16:04H HLA-B*57:01M HLA-A*25:01H HLA-B*53:01H HLA-A*68:02H HLA-B*35:03H HLA-C*12:03H HLA-B*35:01M HLA-B*35:07H HLA-B*38:02M HLA-B*57:03M
TAFGLVAEW

SEQ ID NO: 2190 - protein, 9 aa, Severe acute respiratory syndrome coronavirus 2
  REGION 1..9: note = Table A: HLA-A*36:01H HLA-A*29:01H HLA-A*29:02M HLA-C*03:02H HLA-A*34:02H
LVAEWFLAY

SEQ ID NO: 2191 - protein, 9 aa, Severe acute respiratory syndrome coronavirus 2
  REGION 1..9: note = Table A: HLA-C*04:03H
VAEWFLAYI

SEQ ID NO: 2192 - protein, 9 aa, Severe acute respiratory syndrome coronavirus 2
  REGION 1..9: note = Table A: HLA-A*74:01M HLA-A*34:01H HLA-A*66:01H
FLAYILFTR

SEQ ID NO: 2193 - protein, 9 aa, Severe acute respiratory syndrome coronavirus 2
  REGION 1..9: note = Table A: HLA-B*57:03H
LAYILFTRF

SEQ ID NO: 2194 - protein, 9 aa, Severe acute respiratory syndrome coronavirus 2
  REGION 1..9: note = Table A: HLA-C*14:02H HLA-C*14:03H HLA-C*06:02H HLA-A*24:02H HLA-A*24:07M HLA-A*23:01H
AYILFTRFF

SEQ ID NO: 2195 - protein, 9 aa, Severe acute respiratory syndrome coronavirus 2
  REGION 1..9: note = Table A: HLA-A*29:02M
YILFTRFFY

SEQ ID NO: 2196 - protein, 9 aa, Severe acute respiratory syndrome coronavirus 2
  REGION 1..9: note = Table A: HLA-A*02:11H HLA-A*68:02H HLA-C*15:02H HLA-A*02:04H HLA-A*02:06H HLA-A*02:07M HLA-A*02:02M HLA-A*02:03H HLA-C*08:01H HLA-B*40:06H
ILFTRFFYV

SEQ ID NO: 2197 - protein, 9 aa, Severe acute respiratory syndrome coronavirus 2
  REGION 1..9: note = Table A: HLA-A*24:07M
LFTRFFYVL

SEQ ID NO: 2198 - protein, 9 aa, Severe acute respiratory syndrome coronavirus 2
  REGION 1..9: note = Table A: HLA-C*06:02M HLA-B*27:05M HLA-C*07:01H HLA-C*07:02H HLA-B*27:02H HLA-B*14:02H HLA-B*14:01H HLA-B*38:02H
TRFFYVLGL

SEQ ID NO: 2199 - protein, 9 aa, Severe acute respiratory syndrome coronavirus 2
  REGION 1..9: note = Table A: HLA-C*14:03H
FFYVLGLAA

SEQ ID NO: 2200 - protein, 9 aa, Severe acute respiratory syndrome coronavirus 2
  REGION 1..9: note = Table A: HLA-C*14:03H HLA-A*24:02H
FYVLGLAAI

SEQ ID NO: 2201 - protein, 9 aa, Severe acute respiratory syndrome coronavirus 2
  REGION 1..9: note = Table A: HLA-B*35:03H HLA-B*35:01H HLA-B*38:02H HLA-B*15:02H
YVLGLAAIM

SEQ ID NO: 2202 - protein, 9 aa, Severe acute respiratory syndrome coronavirus 2
  REGION 1..9: note = Table A: HLA-A*02:02H HLA-B*38:02H HLA-B*15:01H HLA-B*13:02H
GLAAIMQLF

SEQ ID NO: 2203 - protein, 9 aa, Severe acute respiratory syndrome coronavirus 2
  REGION 1..9: note = Table A: HLA-B*58:01H HLA-B*57:03H
LAAIMQLFF

SEQ ID NO: 2204 - protein, 9 aa, Severe acute respiratory syndrome coronavirus 2
  REGION 1..9: note = Table A: HLA-A*11:01H HLA-A*11:02H HLA-A*29:01H HLA-A*29:02M HLA-A*30:02M
AIMQLFFSY

SEQ ID NO: 2205 - protein, 9 aa, Severe acute respiratory syndrome coronavirus 2
  REGION 1..9: note = Table A: HLA-C*14:02M HLA-C*14:03M HLA-A*29:02H HLA-C*04:03H HLA-A*24:07M HLA-A*23:01H
FFSYFAVHF

SEQ ID NO: 2206 - protein, 9 aa, Severe acute respiratory syndrome coronavirus 2
  REGION 1..9: note = Table A: HLA-B*58:02M HLA-A*02:11M HLA-A*68:02M HLA-C*15:02M HLA-A*02:02H HLA-C*17:01H HLA-C*08:01H HLA-B*38:02H HLA-B*57:03M
FSYFAVHFI

SEQ ID NO: 2207 - protein, 9 aa, Severe acute respiratory syndrome coronavirus 2
  REGION 1..9: note = Table A: HLA-B*58:01H HLA-B*57:01M HLA-A*25:01M HLA-B*44:03H HLA-B*53:01H HLA-B*15:13M HLA-B*38:02H HLA-A*32:01H HLA-B*57:03H HLA-B*13:01M
AVHFISNSW

SEQ ID NO: 2208 - protein, 9 aa, Severe acute respiratory syndrome coronavirus 2
  REGION 1..9: note = Table A: HLA-B*38:02H HLA-B*15:10H
VHFISNSWL

SEQ ID NO: 2209 - protein, 9 aa, Severe acute respiratory syndrome coronavirus 2
  REGION 1..9: note = Table A: HLA-C*14:03H HLA-A*29:02H HLA-A*24:07M
HFISNSWLM

SEQ ID NO: 2210 - protein, 9 aa, Severe acute respiratory syndrome coronavirus 2
  REGION 1..9: note = Table A: HLA-C*15:02H
ISNSWLMWL

SEQ ID NO: 2211 - protein, 9 aa, Severe acute respiratory syndrome coronavirus 2
  REGION 1..9: note = Table A: HLA-A*02:11H HLA-A*02:04M HLA-A*02:02H
WLMWLIINL

SEQ ID NO: 2212 - protein, 9 aa, Severe acute respiratory syndrome coronavirus 2
  REGION 1..9: note = Table A: HLA-A*02:11H HLA-A*02:04H HLA-A*02:07H
LMWLIINLV

SEQ ID NO: 2213 - protein, 9 aa, Severe acute respiratory syndrome coronavirus 2
  REGION 1..9: note = Table A: HLA-A*02:04H
WLIINLVQM

SEQ ID NO: 2214 - protein, 9 aa, Severe acute respiratory syndrome coronavirus 2
  REGION 1..9: note = Table A: HLA-B*54:01H
LVQMAPISA

SEQ ID NO: 2215 - protein, 9 aa, Severe acute respiratory syndrome coronavirus 2
  REGION 1..9: note = Table A: HLA-B*48:01M HLA-C*14:03H HLA-A*11:303M HLA-B*46:01M HLA-C*03:02H HLA-C*03:04H HLA-C*15:05M HLA-C*12:02H HLA-B*14:01H HLA-C*07:27H HLA-B*52:01H HLA-B*37:01H HLA-B*38:02M HLA-B*40:02H HLA-B*15:01H
  REGION 1..9: note = CONT. FROM ABOVE: HLA-B*15:02H HLA-B*15:03H HLA-B*39:01H HLA- B*07:05M HLA-B*41:02H HLA-B*13:01H HLA-B*13:02M HLA-B*15:11H
VQMAPISAM

SEQ ID NO: 2216 - protein, 9 aa, Severe acute respiratory syndrome coronavirus 2
  REGION 1..9: note = Table A: HLA-A*02:11H HLA-A*68:02M HLA-C*15:05H HLA-A*02:04H HLA-A*02:05M HLA-A*02:06H HLA-A*02:07H HLA-A*02:08M HLA-A*02:01M HLA-A*02:02H HLA-A*02:03H HLA-B*52:01M HLA-B*38:02H HLA-B*39:01H HLA-B*07:05H HLA-B*13:02M
QMAPISAMV

SEQ ID NO: 2217 - protein, 9 aa, Severe acute respiratory syndrome coronavirus 2
  REGION 1..9: note = Table A: HLA-A*34:01H
MAPISAMVR

SEQ ID NO: 2218 - protein, 9 aa, Severe acute respiratory syndrome coronavirus 2
  REGION 1..9: note = Table A: HLA-B*42:01H HLA-B*56:01H HLA-B*53:01M HLA-B*55:02H HLA-B*35:03M HLA-C*15:05H HLA-B*55:01H HLA-A*34:01H HLA-B*35:01M HLA-B*35:02H HLA-B*35:07M HLA-B*35:12H HLA-B*07:02M HLA-B*07:04M HLA-B*07:05H
APISAMVRM

SEQ ID NO: 2219 - protein, 9 aa, Severe acute respiratory syndrome coronavirus 2
  REGION 1..9: note = Table A: HLA-C*16:01H
SAMVRMYIF

SEQ ID NO: 2220 - protein, 9 aa, Severe acute respiratory syndrome coronavirus 2
  REGION 1..9: note = Table A: HLA-A*32:01H HLA-B*15:03H
RMYIFFASF

SEQ ID NO: 2221 - protein, 9 aa, Severe acute respiratory syndrome coronavirus 2
  REGION 1..9: note = Table A: HLA-C*14:03H HLA-A*29:02M
MYIFFASFY

SEQ ID NO: 2222 - protein, 9 aa, Severe acute respiratory syndrome coronavirus 2
  REGION 1..9: note = Table A: HLA-A*29:02M
YIFFASFYY

SEQ ID NO: 2223 - protein, 9 aa, Severe acute respiratory syndrome coronavirus 2
  REGION 1..9: note = Table A: HLA-A*24:07H
FFASFYYVW

SEQ ID NO: 2224 - protein, 9 aa, Severe acute respiratory syndrome coronavirus 2
  REGION 1..9: note = Table A: HLA-A*34:02H
FASFYYVWK

SEQ ID NO: 2225 - protein, 9 aa, Severe acute respiratory syndrome coronavirus 2
  REGION 1..9: note = Table A: HLA-C*14:02H HLA-C*14:03M HLA-A*29:02H HLA-A*30:02H
SFYYVWKSY

SEQ ID NO: 2226 - protein, 9 aa, Severe acute respiratory syndrome coronavirus 2
  REGION 1..9: note = Table A: HLA-C*14:03H HLA-C*06:02H
FYYVWKSYV

SEQ ID NO: 2227 - protein, 9 aa, Severe acute respiratory syndrome coronavirus 2
  REGION 1..9: note = Table A: HLA-C*14:03H
YYVWKSYVH

SEQ ID NO: 2228 - protein, 9 aa, Severe acute respiratory syndrome coronavirus 2
  REGION 1..9: note = Table A: HLA-A*02:11H HLA-A*68:02H HLA-A*02:04H HLA-A*02:06M HLA-A*02:07M HLA-A*02:02H HLA-C*08:01H HLA-B*40:06H HLA-B*13:02H
YVWKSYVHV

SEQ ID NO: 2229 - protein, 9 aa, Severe acute respiratory syndrome coronavirus 2
  REGION 1..9: note = Table A: HLA-A*24:07H
VWKSYVHVV

SEQ ID NO: 2230 - protein, 9 aa, Severe acute respiratory syndrome coronavirus 2
  REGION 1..9: note = Table A: HLA-B*57:03H
KSYVHVVDG

SEQ ID NO: 2231 - protein, 9 aa, Severe acute respiratory syndrome coronavirus 2
  REGION 1..9: note = Table A: HLA-C*15:05H HLA-B*57:03H
ATRVECTTI

SEQ ID NO: 2232 - protein, 9 aa, Severe acute respiratory syndrome coronavirus 2
  REGION 1..9: note = Table A: HLA-A*68:02M HLA-B*38:02H
ECTTIVNGV

SEQ ID NO: 2233 - protein, 9 aa, Severe acute respiratory syndrome coronavirus 2
  REGION 1..9: note = Table A: HLA-A*34:02H HLA-A*66:01H
CTTIVNGVR

SEQ ID NO: 2234 - protein, 9 aa, Severe acute respiratory syndrome coronavirus 2
  REGION 1..9: note = Table A: HLA-A*74:01M HLA-A*11:01H HLA-A*33:01H HLA-A*33:03M HLA-A*26:03H HLA-A*68:01H HLA-A*34:01H HLA-A*34:02M HLA-A*31:01H HLA-A*66:01H
TTIVNGVRR

SEQ ID NO: 2235 - protein, 9 aa, Severe acute respiratory syndrome coronavirus 2
  REGION 1..9: note = Table A: HLA-A*32:01H HLA-B*07:04H
IVNGVRRSF

SEQ ID NO: 2236 - protein, 9 aa, Severe acute respiratory syndrome coronavirus 2
  REGION 1..9: note = Table A: HLA-A*30:01H HLA-A*30:02H HLA-B*38:02H
GVRRSFYVY

SEQ ID NO: 2237 - protein, 9 aa, Severe acute respiratory syndrome coronavirus 2
  REGION 1..9: note = Table A: HLA-C*14:03H
SFYVYANGG

SEQ ID NO: 2238 - protein, 9 aa, Severe acute respiratory syndrome coronavirus 2
  REGION 1..9: note = Table A: HLA-A*66:01H
YVYANGGKG

SEQ ID NO: 2239 - protein, 9 aa, Severe acute respiratory syndrome coronavirus 2
  REGION 1..9: note = Table A: HLA-C*14:02M HLA-C*14:03M HLA-A*24:02H HLA-A*24:07M HLA-A*23:01H
VYANGGKGF

SEQ ID NO: 2240 - protein, 9 aa, Severe acute respiratory syndrome coronavirus 2
  REGION 1..9: note = Table A: HLA-B*58:02H HLA-B*57:03M
KGFCKLHNW

SEQ ID NO: 2241 - protein, 9 aa, Severe acute respiratory syndrome coronavirus 2
  REGION 1..9: note = Table A: HLA-A*25:01M HLA-A*26:01H HLA-A*26:02H HLA-A*34:01H HLA-B*38:02H HLA-B*15:02M HLA-B*07:05H HLA-A*66:01H
DTFCAGSTF

SEQ ID NO: 2242 - protein, 9 aa, Severe acute respiratory syndrome coronavirus 2
  REGION 1..9: note = Table A: HLA-A*68:02H HLA-C*08:03H HLA-B*13:02M
GSTFISDEV

SEQ ID NO: 2243 - protein, 9 aa, Severe acute respiratory syndrome coronavirus 2
  REGION 1..9: note = Table A: HLA-A*33:03H HLA-A*68:01H HLA-A*34:01H HLA-A*66:01H
TFISDEVAR

SEQ ID NO: 2244 - protein, 9 aa, Severe acute respiratory syndrome coronavirus 2
  REGION 1..9: note = Table A: HLA-B*58:02H HLA-A*11:303M HLA-C*04:01H HLA-C*04:03H HLA-C*03:03M HLA-C*03:04M HLA-C*15:05M HLA-C*15:02H HLA-A*02:07M HLA-B*35:02H HLA-C*08:01H HLA-C*08:02H HLA-B*38:02H HLA-C*05:01M
ISDEVARDL

SEQ ID NO: 2245 - protein, 9 aa, Severe acute respiratory syndrome coronavirus 2
  REGION 1..9: note = Table A: HLA-B*44:05H HLA-B*44:03H HLA-B*18:01M HLA-B*14:02H HLA-B*14:01M HLA-B*40:01H HLA-B*40:02H HLA-B*07:05M HLA-B*41:02H
DEVARDLSL

SEQ ID NO: 2246 - protein, 9 aa, Severe acute respiratory syndrome coronavirus 2
  REGION 1..9: note = Table A: HLA-A*11:303H HLA-C*16:01H HLA-B*57:01H HLA-B*46:01M HLA-C*03:02M HLA-C*15:05H HLA-C*12:02M HLA-B*35:07H HLA-B*38:02H HLA-B*15:01H HLA-B*15:02H HLA-B*15:03H HLA-B*57:03M HLA-C*02:02H
VARDLSLQF

SEQ ID NO: 2247 - protein, 9 aa, Severe acute respiratory syndrome coronavirus 2
  REGION 1..9: note = Table A: HLA-B*58:02M
LSLQFKRPI

SEQ ID NO: 2248 - protein, 9 aa, Severe acute respiratory syndrome coronavirus 2
  REGION 1..9: note = Table A: HLA-A*02:11H
LQFKRPINP

SEQ ID NO: 2249 - protein, 9 aa, Severe acute respiratory syndrome coronavirus 2
  REGION 1..9: note = Table A: HLA-B*55:02H HLA-C*15:05H HLA-B*07:05H
RPINPTDQS

SEQ ID NO: 2250 - protein, 9 aa, Severe acute respiratory syndrome coronavirus 2
  REGION 1..9: note = Table A: HLA-B*53:01H HLA-B*51:01H
NPTDQSSYI

SEQ ID NO: 2251 - protein, 9 aa, Severe acute respiratory syndrome coronavirus 2
  REGION 1..9: note = Table A: HLA-A*68:02M HLA-A*02:08H HLA-B*38:02H HLA-B*13:02H
QSSYIVDSV

SEQ ID NO: 2252 - protein, 9 aa, Severe acute respiratory syndrome coronavirus 2
  REGION 1..9: note = Table A: HLA-C*14:02H HLA-C*14:03M HLA-C*04:01H HLA-A*68:02H HLA-C*15:05H HLA-A*24:02H HLA-A*24:07H HLA-C*08:01M HLA-A*23:01M HLA-B*38:02H HLA-B*39:01M HLA-B*49:01H
SYIVDSVTV

SEQ ID NO: 2253 - protein, 9 aa, Severe acute respiratory syndrome coronavirus 2
  REGION 1..9: note = Table A: HLA-A*11:303H HLA-A*03:01H HLA-A*03:02H HLA-A*11:01H HLA-A*11:02H HLA-A*36:01H HLA-B*46:01H HLA-A*26:03H HLA-C*03:03H HLA-B*27:02H HLA-A*68:01M HLA-A*68:02H HLA-A*02:03H HLA-A*34:01M HLA-A*34:02H
  REGION 1..9: note = CONT. FROM ABOVE: HLA-C*07:27H HLA-C*17:01H HLA-B*38:02M HLA- B*15:02H HLA-A*66:01M
YIVDSVTVK

SEQ ID NO: 2254 - protein, 9 aa, Severe acute respiratory syndrome coronavirus 2
  REGION 1..9: note = Table A: HLA-C*04:03H HLA-A*02:07H
IVDSVTVKN

SEQ ID NO: 2255 - protein, 9 aa, Severe acute respiratory syndrome coronavirus 2
  REGION 1..9: note = Table A: HLA-B*42:01H HLA-A*02:05H HLA-A*02:08M HLA-A*02:02H HLA-A*02:03H HLA-A*34:01H HLA-B*38:02H HLA-B*07:04M HLA-B*15:01H HLA-B*15:02H HLA-A*66:01H
TVKNGSIHL

SEQ ID NO: 2256 - protein, 9 aa, Severe acute respiratory syndrome coronavirus 2
  REGION 1..9: note = Table A: HLA-A*30:02H HLA-B*15:03M
VKNGSIHLY

SEQ ID NO: 2257 - protein, 9 aa, Severe acute respiratory syndrome coronavirus 2
  REGION 1..9: note = Table A: HLA-B*57:03H
KNGSIHLYF

SEQ ID NO: 2258 - protein, 9 aa, Severe acute respiratory syndrome coronavirus 2
  REGION 1..9: note = Table A: HLA-A*11:01H HLA-A*11:02H HLA-A*36:01H
GSIHLYFDK

SEQ ID NO: 2259 - protein, 9 aa, Severe acute respiratory syndrome coronavirus 2
  REGION 1..9: note = Table A: HLA-A*33:03H HLA-A*34:02H
LYFDKAGQK

SEQ ID NO: 2260 - protein, 9 aa, Severe acute respiratory syndrome coronavirus 2
  REGION 1..9: note = Table A: HLA-B*46:01H HLA-B*38:02H HLA-B*15:11H
FDKAGQKTY

SEQ ID NO: 2261 - protein, 9 aa, Severe acute respiratory syndrome coronavirus 2
  REGION 1..9: note = Table A: HLA-A*74:01H
KAGQKTYER

SEQ ID NO: 2262 - protein, 9 aa, Severe acute respiratory syndrome coronavirus 2
  REGION 1..9: note = Table A: HLA-A*68:02H
ERHSLSHFV

SEQ ID NO: 2263 - protein, 9 aa, Severe acute respiratory syndrome coronavirus 2
  REGION 1..9: note = Table A: HLA-B*58:02M HLA-C*03:03H HLA-A*02:11H HLA-C*03:04H HLA-A*68:02H HLA-C*15:05H HLA-C*15:02H HLA-A*02:04H HLA-A*02:06H HLA-A*34:02H HLA-C*17:01H HLA-C*08:01H HLA-B*38:02H HLA-B*57:03M HLA-C*07:04M
HSLSHFVNL

SEQ ID NO: 2264 - protein, 9 aa, Severe acute respiratory syndrome coronavirus 2
  REGION 1..9: note = Table A: HLA-B*48:01H HLA-C*08:01H HLA-B*38:01H HLA-B*38:02H HLA-B*39:06H HLA-B*39:01H HLA-B*15:10M
SHFVNLDNL

SEQ ID NO: 2265 - protein, 9 aa, Severe acute respiratory syndrome coronavirus 2
  REGION 1..9: note = Table A: HLA-A*33:03H
HFVNLDNLR

SEQ ID NO: 2266 - protein, 9 aa, Severe acute respiratory syndrome coronavirus 2
  REGION 1..9: note = Table A: HLA-B*54:01H
FVNLDNLRA

SEQ ID NO: 2267 - protein, 9 aa, Severe acute respiratory syndrome coronavirus 2
  REGION 1..9: note = Table A: HLA-B*37:01H
LDNLRANNT

SEQ ID NO: 2268 - protein, 9 aa, Severe acute respiratory syndrome coronavirus 2
  REGION 1..9: note = Table A: HLA-C*03:04H HLA-C*15:05H HLA-B*07:02M HLA-B*07:04M
RANNTKGSL

SEQ ID NO: 2269 - protein, 9 aa, Severe acute respiratory syndrome coronavirus 2
  REGION 1..9: note = Table A: HLA-B*13:02H
GSLPINVIV

SEQ ID NO: 2270 - protein, 9 aa, Severe acute respiratory syndrome coronavirus 2
  REGION 1..9: note = Table A: HLA-A*24:07H HLA-B*15:02H
SLPINVIVF

SEQ ID NO: 2271 - protein, 9 aa, Severe acute respiratory syndrome coronavirus 2
  REGION 1..9: note = Table A: HLA-B*45:01M HLA-B*50:01M
CEESSAKSA

SEQ ID NO: 2272 - protein, 9 aa, Severe acute respiratory syndrome coronavirus 2
  REGION 1..9: note = Table A: HLA-B*58:01H HLA-A*30:02H HLA-B*38:02H HLA-B*15:01M HLA-B*15:02H HLA-B*15:03H
SSAKSASVY

SEQ ID NO: 2273 - protein, 9 aa, Severe acute respiratory syndrome coronavirus 2
  REGION 1..9: note = Table A: HLA-B*58:02H HLA-A*11:303H HLA-C*16:01H HLA-C*16:04H HLA-B*57:01H HLA-B*46:01H HLA-A*26:01H HLA-C*03:02H HLA-A*30:02M HLA-C*12:02H HLA-C*12:03M HLA-A*34:01H HLA-C*07:27H HLA-B*35:01H HLA-B*35:07M
  REGION 1..9: note = CONT. FROM ABOVE: HLA-B*38:02M HLA-B*15:01H HLA-B*15:02M HLA- B*15:03H HLA-B*57:03H HLA-C*02:02H HLA-B*15:11H
SAKSASVYY

SEQ ID NO: 2274 - protein, 9 aa, Severe acute respiratory syndrome coronavirus 2
  REGION 1..9: note = Table A: HLA-A*11:303H HLA-C*16:01H HLA-B*53:01H HLA-C*03:04H HLA-B*35:03M HLA-C*15:05M HLA-C*17:01H HLA-C*08:01H HLA-B*38:02H HLA-C*07:04H
SASVYYSQL

SEQ ID NO: 2275 - protein, 9 aa, Severe acute respiratory syndrome coronavirus 2
  REGION 1..9: note = Table A: HLA-C*15:02H
ASVYYSQLM

SEQ ID NO: 2276 - protein, 9 aa, Severe acute respiratory syndrome coronavirus 2
  REGION 1..9: note = Table A: HLA-B*48:01H HLA-B*15:10H
SQLMCQPIL

SEQ ID NO: 2277 - protein, 9 aa, Severe acute respiratory syndrome coronavirus 2
  REGION 1..9: note = Table A: HLA-A*02:01H HLA-B*38:02H
QLMCQPILL

SEQ ID NO: 2278 - protein, 9 aa, Severe acute respiratory syndrome coronavirus 2
  REGION 1..9: note = Table A: HLA-B*56:01M HLA-B*55:02H HLA-B*55:01H HLA-B*39:06H HLA-B*54:01M
QPILLLDQA

SEQ ID NO: 2279 - protein, 9 aa, Severe acute respiratory syndrome coronavirus 2
  REGION 1..9: note = Table A: HLA-B*39:01H
DQALVSDVG

SEQ ID NO: 2280 - protein, 9 aa, Severe acute respiratory syndrome coronavirus 2
  REGION 1..9: note = Table A: HLA-A*68:02H HLA-A*02:05H HLA-A*02:08H HLA-C*08:01H HLA-B*38:02H HLA-B*39:01H
LVSDVGDSA

SEQ ID NO: 2281 - protein, 9 aa, Severe acute respiratory syndrome coronavirus 2
  REGION 1..9: note = Table A: HLA-B*35:02H HLA-C*08:02M HLA-B*39:01H HLA-C*05:01H
VGDSAEVAV

SEQ ID NO: 2282 - protein, 9 aa, Severe acute respiratory syndrome coronavirus 2
  REGION 1..9: note = Table A: HLA-A*26:01H HLA-A*26:02M HLA-A*68:01M HLA-A*68:02M HLA-B*35:03H HLA-C*15:05H HLA-A*34:01H HLA-A*34:02H HLA-B*35:01M HLA-B*35:02H HLA-B*51:01H HLA-B*35:12H HLA-B*38:02H HLA-B*15:02H HLA-B*07:05M HLA-A*66:01H
DSAEVAVKM

SEQ ID NO: 2283 - protein, 9 aa, Severe acute respiratory syndrome coronavirus 2
  REGION 1..9: note = Table A: HLA-C*04:03H HLA-B*35:01H
SAEVAVKMF

SEQ ID NO: 2284 - protein, 9 aa, Severe acute respiratory syndrome coronavirus 2
  REGION 1..9: note = Table A: HLA-B*58:01H HLA-C*16:04H HLA-A*36:01H HLA-C*03:02H HLA-B*35:01M HLA-B*35:08H HLA-B*35:07M HLA-C*08:01H HLA-B*38:02H HLA-B*07:05H
VAVKMFDAY

SEQ ID NO: 2285 - protein, 9 aa, Severe acute respiratory syndrome coronavirus 2
  REGION 1..9: note = Table A: HLA-A*68:02H HLA-B*38:02H
AVKMFDAYV

SEQ ID NO: 2286 - protein, 9 aa, Severe acute respiratory syndrome coronavirus 2
  REGION 1..9: note = Table A: HLA-A*02:11M HLA-A*02:02H
KMFDAYVNT

SEQ ID NO: 2287 - protein, 9 aa, Severe acute respiratory syndrome coronavirus 2
  REGION 1..9: note = Table A: HLA-C*14:02H HLA-C*14:03M HLA-C*04:01H HLA-C*04:03H HLA-B*18:01H HLA-A*02:07H HLA-A*24:02H HLA-B*35:01H HLA-B*35:08H HLA-A*24:07H HLA-C*08:02H HLA-A*23:01H HLA-B*38:01H HLA-B*38:02M HLA-B*15:02H HLA-B*39:01H
  REGION 1..9: note = CONT. FROM ABOVE: HLA-B*07:05H HLA-C*05:01H
MFDAYVNTF

SEQ ID NO: 2288 - protein, 9 aa, Severe acute respiratory syndrome coronavirus 2
  REGION 1..9: note = Table A: HLA-B*58:01H HLA-A*11:303H HLA-A*25:01M HLA-B*46:01M HLA-A*26:01M HLA-A*26:02H HLA-A*26:03H HLA-B*53:01H HLA-C*03:02M HLA-C*03:04H HLA-C*15:05M HLA-C*12:02M HLA-A*34:01H HLA-B*35:01M HLA-B*35:07H
  REGION 1..9: note = CONT. FROM ABOVE: HLA-B*15:13H HLA-B*38:02M HLA-B*15:01M HLA- B*15:02H HLA-B*15:03H HLA-B*07:05H HLA-B*57:03H HLA-C*02:02H HLA-B*15:11H HLA-C*07:04H HLA-A*66:01H
YVNTFSSTF

SEQ ID NO: 2289 - protein, 9 aa, Severe acute respiratory syndrome coronavirus 2
  REGION 1..9: note = Table A: HLA-A*02:11H HLA-A*68:02H HLA-A*02:06H
NTFSSTFNV

SEQ ID NO: 2290 - protein, 9 aa, Severe acute respiratory syndrome coronavirus 2
  REGION 1..9: note = Table A: HLA-C*07:04H
FSSTFNVPM

SEQ ID NO: 2291 - protein, 9 aa, Severe acute respiratory syndrome coronavirus 2
  REGION 1..9: note = Table A: HLA-A*11:303H HLA-A*74:01H HLA-A*03:01H HLA-A*03:02H HLA-A*11:01H HLA-A*11:02H HLA-A*36:01H HLA-B*57:01H HLA-A*33:03H HLA-A*30:01H HLA-A*30:02H HLA-A*68:01M HLA-A*68:02H HLA-A*34:02H HLA-C*07:27H
  REGION 1..9: note = CONT. FROM ABOVE: HLA-A*31:01H HLA-B*13:02H HLA-A*66:01M
STFNVPMEK

SEQ ID NO: 2292 - protein, 9 aa, Severe acute respiratory syndrome coronavirus 2
  REGION 1..9: note = Table A: HLA-B*07:05H
TFNVPMEKL

SEQ ID NO: 2293 - protein, 9 aa, Severe acute respiratory syndrome coronavirus 2
  REGION 1..9: note = Table A: HLA-B*42:01H HLA-B*56:01H HLA-B*08:01H HLA-B*53:01H HLA-B*55:02M HLA-B*35:03H HLA-C*15:05H HLA-B*14:02H HLA-B*55:01M HLA-B*51:01M HLA-C*08:01H HLA-B*38:02H HLA-B*54:01H HLA-B*07:02H HLA-B*07:04H HLA-B*07:05M
VPMEKLKTL

SEQ ID NO: 2294 - protein, 9 aa, Severe acute respiratory syndrome coronavirus 2
  REGION 1..9: note = Table A: HLA-B*45:01M HLA-B*40:06H HLA-B*50:01M
MEKLKTLVA

SEQ ID NO: 2295 - protein, 9 aa, Severe acute respiratory syndrome coronavirus 2
  REGION 1..9: note = Table A: HLA-A*02:11H HLA-A*02:05H HLA-A*02:08H HLA-A*02:02M HLA-A*02:03M HLA-B*38:02H
KLKTLVATA

SEQ ID NO: 2296 - protein, 9 aa, Severe acute respiratory syndrome coronavirus 2
  REGION 1..9: note = Table A: HLA-A*02:11H HLA-C*15:05H HLA-A*02:06H HLA-A*02:08H
KTLVATAEA

SEQ ID NO: 2297 - protein, 9 aa, Severe acute respiratory syndrome coronavirus 2
  REGION 1..9: note = Table A: HLA-B*35:03H HLA-C*15:05H HLA-A*02:05M HLA-A*02:08H HLA-A*02:02H HLA-B*35:02M HLA-B*35:12M HLA-B*38:02H HLA-B*39:01H
LVATAEAEL

SEQ ID NO: 2298 - protein, 9 aa, Severe acute respiratory syndrome coronavirus 2
  REGION 1..9: note = Table A: HLA-A*11:303H HLA-A*03:02H HLA-A*11:01M HLA-A*11:02H HLA-A*36:01H HLA-A*34:02H HLA-C*07:27H
ATAEAELAK

SEQ ID NO: 2299 - protein, 9 aa, Severe acute respiratory syndrome coronavirus 2
  REGION 1..9: note = Table A: HLA-B*44:02M HLA-B*44:05M HLA-C*16:04M HLA-B*45:01H HLA-B*44:03H HLA-A*68:02H HLA-A*02:05H HLA-B*37:01H HLA-B*40:02M HLA-B*40:06H HLA-B*41:02H HLA-B*49:01H HLA-B*50:01M
AEAELAKNV

SEQ ID NO: 2300 - protein, 9 aa, Severe acute respiratory syndrome coronavirus 2
  REGION 1..9: note = Table A: HLA-B*48:01H HLA-B*44:02M HLA-B*44:05H HLA-C*16:04H HLA-B*45:01M HLA-B*44:03M HLA-B*14:02H HLA-B*14:01H HLA-B*37:01H HLA-B*40:01H HLA-B*40:02H HLA-B*40:06H HLA-B*07:05H HLA-B*41:02H HLA-B*49:01M HLA-C*07:04H
  REGION 1..9: note = CONT. FROM ABOVE: HLA-B*50:01H
AELAKNVSL

SEQ ID NO: 2301 - protein, 9 aa, Severe acute respiratory syndrome coronavirus 2
  REGION 1..9: note = Table A: HLA-A*11:303H HLA-B*46:01H HLA-C*04:03H HLA-A*02:07H HLA-C*08:02H HLA-B*38:02M HLA-B*15:01H HLA-B*15:02H HLA-B*07:05H HLA-C*05:01H
SLDNVLSTF

SEQ ID NO: 2302 - protein, 9 aa, Severe acute respiratory syndrome coronavirus 2
  REGION 1..9: note = Table A: HLA-B*56:01H HLA-B*55:02M HLA-A*68:02H HLA-B*55:01H HLA-A*02:06M HLA-A*02:07H HLA-A*02:01H HLA-C*08:01H HLA-B*38:02H HLA-B*39:06H HLA-B*40:06H HLA-B*54:01H HLA-B*07:05H
NVLSTFISA

SEQ ID NO: 2303 - protein, 9 aa, Severe acute respiratory syndrome coronavirus 2
  REGION 1..9: note = Table A: HLA-A*02:11H HLA-B*55:02H HLA-A*02:04H HLA-A*02:05H HLA-B*14:01H HLA-A*02:01M HLA-A*02:02M HLA-A*02:03M HLA-B*38:02M HLA-B*39:06H
VLSTFISAA

SEQ ID NO: 2304 - protein, 9 aa, Severe acute respiratory syndrome coronavirus 2
  REGION 1..9: note = Table A: HLA-A*74:01M HLA-A*36:01H HLA-A*33:03H HLA-A*26:03H HLA-A*68:01M HLA-A*68:02H HLA-A*34:01M HLA-A*34:02M HLA-A*31:01H HLA-A*66:01H
LSTFISAAR

SEQ ID NO: 2305 - protein, 9 aa, Severe acute respiratory syndrome coronavirus 2
  REGION 1..9: note = Table A: HLA-B*38:02H HLA-B*15:02H
FISAARQGF

SEQ ID NO: 2306 - protein, 9 aa, Severe acute respiratory syndrome coronavirus 2
  REGION 1..9: note = Table A: HLA-B*13:01H HLA-B*13:02H
RQGFVDSDV

SEQ ID NO: 2307 - protein, 9 aa, Severe acute respiratory syndrome coronavirus 2
  REGION 1..9: note = Table A: HLA-A*03:02H HLA-A*36:01H HLA-C*04:03H HLA-A*02:07H HLA-A*34:02H
FVDSDVETK

SEQ ID NO: 2308 - protein, 9 aa, Severe acute respiratory syndrome coronavirus 2
  REGION 1..9: note = Table A: HLA-B*40:02H HLA-B*41:02H
SDVETKDVV

SEQ ID NO: 2309 - protein, 9 aa, Severe acute respiratory syndrome coronavirus 2
  REGION 1..9: note = Table A: HLA-B*45:01H HLA-B*49:01H HLA-B*50:01H
VETKDVVEC

SEQ ID NO: 2310 - protein, 9 aa, Severe acute respiratory syndrome coronavirus 2
  REGION 1..9: note = Table A: HLA-A*25:01M HLA-A*26:01M HLA-A*26:02M HLA-A*26:03H HLA-A*68:02H HLA-A*02:05H HLA-A*02:02H HLA-B*38:02H
ETKDVVECL

SEQ ID NO: 2311 - protein, 9 aa, Severe acute respiratory syndrome coronavirus 2
  REGION 1..9: note = Table A: HLA-B*39:06H HLA-B*39:01H
SHQSDIEVT

SEQ ID NO: 2312 - protein, 9 aa, Severe acute respiratory syndrome coronavirus 2
  REGION 1..9: note = Table A: HLA-B*38:01H HLA-B*38:02H HLA-B*39:01H HLA-B*13:01H HLA-B*13:02H
HQSDIEVTG

SEQ ID NO: 2313 - protein, 9 aa, Severe acute respiratory syndrome coronavirus 2
  REGION 1..9: note = Table A: HLA-A*03:01H HLA-A*11:01H HLA-A*29:01H HLA-A*29:02H HLA-B*35:01H HLA-B*38:02H HLA-B*07:05H
SCNNYMLTY

SEQ ID NO: 2314 - protein, 9 aa, Severe acute respiratory syndrome coronavirus 2
  REGION 1..9: note = Table A: HLA-A*24:02H
NYMLTYNKV

SEQ ID NO: 2315 - protein, 9 aa, Severe acute respiratory syndrome coronavirus 2
  REGION 1..9: note = Table A: HLA-A*02:11M HLA-A*68:02H HLA-A*02:05H HLA-A*02:08H HLA-A*02:02H HLA-B*57:03H
LTYNKVENM

SEQ ID NO: 2316 - protein, 9 aa, Severe acute respiratory syndrome coronavirus 2
  REGION 1..9: note = Table A: HLA-A*34:01H
NKVENMTPR

SEQ ID NO: 2317 - protein, 9 aa, Severe acute respiratory syndrome coronavirus 2
  REGION 1..9: note = Table A: HLA-B*44:05M HLA-B*44:03H HLA-B*40:02H HLA-B*41:02M
VENMTPRDL

SEQ ID NO: 2318 - protein, 9 aa, Severe acute respiratory syndrome coronavirus 2
  REGION 1..9: note = Table A: HLA-C*15:05M HLA-B*51:01H HLA-B*07:02H HLA-B*07:04H
TPRDLGACI

SEQ ID NO: 2319 - protein, 9 aa, Severe acute respiratory syndrome coronavirus 2
  REGION 1..9: note = Table A: HLA-C*12:05H HLA-A*02:11H HLA-A*30:01H HLA-A*68:02H HLA-C*15:05M HLA-B*55:01H HLA-A*02:03H HLA-B*51:01H HLA-B*38:02H HLA-B*07:02H HLA-B*07:04M
SARHINAQV

SEQ ID NO: 2320 - protein, 9 aa, Severe acute respiratory syndrome coronavirus 2
  REGION 1..9: note = Table A: HLA-B*45:01H HLA-B*39:06M
ARHINAQVA

SEQ ID NO: 2321 - protein, 9 aa, Severe acute respiratory syndrome coronavirus 2
  REGION 1..9: note = Table A: HLA-B*27:05H HLA-B*15:10H
RHINAQVAK

SEQ ID NO: 2322 - protein, 9 aa, Severe acute respiratory syndrome coronavirus 2
  REGION 1..9: note = Table A: HLA-A*02:05M HLA-A*02:06H HLA-A*02:08H HLA-B*52:01H HLA-B*38:01H HLA-B*38:02M HLA-B*13:01H HLA-B*13:02H HLA-B*49:01H
AQVAKSHNI

SEQ ID NO: 2323 - protein, 9 aa, Severe acute respiratory syndrome coronavirus 2
  REGION 1..9: note = Table A: HLA-B*42:01H HLA-A*11:303M HLA-C*16:01M HLA-B*46:01M HLA-B*08:01M HLA-C*03:03H HLA-C*12:05H HLA-C*03:02H HLA-C*03:04M HLA-C*15:05H HLA-C*12:02M HLA-C*12:03H HLA-C*07:27H HLA-C*17:01H HLA-C*08:01H
  REGION 1..9: note = CONT. FROM ABOVE: HLA-B*38:02H HLA-B*07:02H HLA-B*07:04H HLA- B*15:01H HLA-B*41:02H HLA-B*57:03H HLA-C*02:02H HLA-C*07:04H
VAKSHNIAL

SEQ ID NO: 2324 - protein, 9 aa, Severe acute respiratory syndrome coronavirus 2
  REGION 1..9: note = Table A: HLA-B*58:01H HLA-B*58:02H HLA-B*57:01H HLA-B*53:01H HLA-C*15:02H HLA-A*32:01M HLA-B*57:03H HLA-B*13:01H
KSHNIALIW

SEQ ID NO: 2325 - protein, 9 aa, Severe acute respiratory syndrome coronavirus 2
  REGION 1..9: note = Table A: HLA-A*02:11H HLA-A*68:02H HLA-C*15:02H HLA-A*02:04H HLA-A*02:07H HLA-B*40:06H HLA-B*13:02H
HNIALIWNV

SEQ ID NO: 2326 - protein, 9 aa, Severe acute respiratory syndrome coronavirus 2
  REGION 1..9: note = Table A: HLA-A*02:11M HLA-A*02:07H
LIWNVKDFM

SEQ ID NO: 2327 - protein, 9 aa, Severe acute respiratory syndrome coronavirus 2
  REGION 1..9: note = Table A: HLA-B*38:02H HLA-B*39:01H HLA-B*07:05H
DFMSLSEQL

SEQ ID NO: 2328 - protein, 9 aa, Severe acute respiratory syndrome coronavirus 2
  REGION 1..9: note = Table A: HLA-A*11:02H HLA-A*34:02M
MSLSEQLRK

SEQ ID NO: 2329 - protein, 9 aa, Severe acute respiratory syndrome coronavirus 2
  REGION 1..9: note = Table A: HLA-B*08:01H HLA-B*55:01H HLA-A*02:03M HLA-B*38:02H HLA-B*07:04H
QLRKQIRSA

SEQ ID NO: 2330 - protein, 9 aa, Severe acute respiratory syndrome coronavirus 2
  REGION 1..9: note = Table A: HLA-B*42:01H HLA-B*46:01M HLA-C*03:02H HLA-C*15:05H HLA-C*12:02H HLA-B*07:04M HLA-B*15:01H HLA-B*57:03H HLA-C*02:02H
AAKKNNLPF

SEQ ID NO: 2331 - protein, 9 aa, Severe acute respiratory syndrome coronavirus 2
  REGION 1..9: note = Table A: HLA-B*48:01H HLA-C*07:01H HLA-C*07:02H HLA-B*15:03H
KKNNLPFKL

SEQ ID NO: 2332 - protein, 9 aa, Severe acute respiratory syndrome coronavirus 2
  REGION 1..9: note = Table A: HLA-A*02:03H
NLPFKLTCA

SEQ ID NO: 2333 - protein, 9 aa, Severe acute respiratory syndrome coronavirus 2
  REGION 1..9: note = Table A: HLA-B*56:01H HLA-B*55:02H HLA-B*54:01H
LPFKLTCAT

SEQ ID NO: 2334 - protein, 9 aa, Severe acute respiratory syndrome coronavirus 2
  REGION 1..9: note = Table A: HLA-A*02:11H HLA-A*68:02M HLA-C*15:05H HLA-C*15:02M HLA-A*02:05H HLA-A*02:06H HLA-A*02:08M HLA-B*57:03H HLA-B*13:02H
ATTRQVVNV

SEQ ID NO: 2335 - protein, 9 aa, Severe acute respiratory syndrome coronavirus 2
  REGION 1..9: note = Table A: HLA-A*30:01H HLA-A*68:02M HLA-C*15:05H HLA-C*15:02H HLA-A*02:03H HLA-B*51:01H HLA-B*52:01H HLA-B*38:02M HLA-B*07:04H HLA-B*57:03H HLA-B*13:02H
TTRQVVNVV

SEQ ID NO: 2336 - protein, 9 aa, Severe acute respiratory syndrome coronavirus 2
  REGION 1..9: note = Table A: HLA-B*39:06H HLA-B*39:01H
TRQVVNVVT

SEQ ID NO: 2337 - protein, 9 aa, Severe acute respiratory syndrome coronavirus 2
  REGION 1..9: note = Table A: HLA-B*48:01H HLA-A*02:08H HLA-B*15:01H HLA-B*13:02H
RQVVNVVTT

SEQ ID NO: 2338 - protein, 9 aa, Severe acute respiratory syndrome coronavirus 2
  REGION 1..9: note = Table A: HLA-A*11:303H HLA-A*74:01H HLA-A*03:01H HLA-A*03:02H HLA-A*11:01H HLA-A*11:02H HLA-B*57:01H HLA-A*33:03H HLA-A*26:03M HLA-B*27:02M HLA-A*30:02H HLA-A*68:01H HLA-A*68:02M HLA-A*02:05H HLA-A*34:01M
  REGION 1..9: note = CONT. FROM ABOVE: HLA-A*34:02H HLA-C*07:27H HLA-B*35:01H HLA- A*23:01H HLA-B*38:02H HLA-A*66:01M
QVVNVVTTK

SEQ ID NO: 2339 - protein, 9 aa, Severe acute respiratory syndrome coronavirus 2
  REGION 1..9: note = Table A: HLA-B*58:01M HLA-B*58:02H HLA-A*03:01H HLA-B*57:01H HLA-A*02:11M HLA-A*68:02H HLA-C*15:05M HLA-C*15:02H HLA-A*02:05H HLA-A*02:06H HLA-A*02:07H HLA-A*02:08H HLA-A*02:02H HLA-A*02:03H HLA-A*24:02H HLA-B*51:01H
  REGION 1..9: note = CONT. FROM ABOVE: HLA-B*52:01H HLA-C*08:01H HLA-A*23:01H HLA- B*38:02M HLA-B*07:05M HLA-B*57:03M HLA-B*13:02M
VVNVVTTKI

SEQ ID NO: 2340 - protein, 9 aa, Severe acute respiratory syndrome coronavirus 2
  REGION 1..9: note = Table A: HLA-A*11:303H HLA-C*03:04H HLA-A*68:02H HLA-B*35:03M HLA-C*15:05H HLA-B*14:02H HLA-A*02:05H HLA-A*02:06H HLA-A*02:08H HLA-B*14:01H HLA-B*35:01H HLA-B*35:02H HLA-C*08:01M HLA-B*35:12H HLA-B*38:02H
  REGION 1..9: note = CONT. FROM ABOVE: HLA-B*15:02M HLA-B*39:01H HLA-B*07:05H HLA- C*07:04H
NVVTTKIAL

SEQ ID NO: 2341 - protein, 9 aa, Severe acute respiratory syndrome coronavirus 2
  REGION 1..9: note = Table A: HLA-A*11:303M HLA-A*74:01M HLA-A*03:01H HLA-A*03:02M HLA-A*11:01H HLA-A*11:02H HLA-A*36:01H HLA-A*33:03H HLA-A*26:03H HLA-A*30:01M HLA-A*30:02M HLA-A*68:01H HLA-A*68:02H HLA-A*34:01H HLA-A*34:02H
  REGION 1..9: note = CONT. FROM ABOVE: HLA-C*07:27M HLA-A*23:01H HLA-A*31:01H HLA- A*66:01H
VVTTKIALK

SEQ ID NO: 2342 - protein, 9 aa, Severe acute respiratory syndrome coronavirus 2
  REGION 1..9: note = Table A: HLA-B*58:01H HLA-B*57:03H
VTTKIALKG

SEQ ID NO: 2343 - protein, 9 aa, Severe acute respiratory syndrome coronavirus 2
  REGION 1..9: note = Table A: HLA-B*58:01M HLA-B*58:02H HLA-B*57:01H HLA-B*57:03H
KGGKIVNNW

SEQ ID NO: 2344 - protein, 9 aa, Severe acute respiratory syndrome coronavirus 2
  REGION 1..9: note = Table A: HLA-C*15:02H HLA-A*02:04H HLA-A*02:02H HLA-B*07:04H
IVNNWLKQL

SEQ ID NO: 2345 - protein, 9 aa, Severe acute respiratory syndrome coronavirus 2
  REGION 1..9: note = Table A: HLA-C*15:02H
VNNWLKQLI

SEQ ID NO: 2346 - protein, 9 aa, Severe acute respiratory syndrome coronavirus 2
  REGION 1..9: note = Table A: HLA-A*02:11H HLA-A*02:06H HLA-A*02:08H HLA-B*52:01H HLA-B*13:02M
KQLIKVTLV

SEQ ID NO: 2347 - protein, 9 aa, Severe acute respiratory syndrome coronavirus 2
  REGION 1..9: note = Table A: HLA-A*24:07H HLA-B*38:02M HLA-B*15:01H HLA-B*15:02M HLA-B*57:03H
QLIKVTLVF

SEQ ID NO: 2348 - protein, 9 aa, Severe acute respiratory syndrome coronavirus 2
  REGION 1..9: note = Table A: HLA-B*08:01H HLA-A*02:04H
LIKVTLVFL

SEQ ID NO: 2349 - protein, 9 aa, Severe acute respiratory syndrome coronavirus 2
  REGION 1..9: note = Table A: HLA-A*36:01H HLA-A*02:11H HLA-A*68:02H HLA-C*15:02H HLA-A*02:06M HLA-A*02:07H HLA-C*08:01H HLA-B*40:06H HLA-B*13:02M
KVTLVFLFV

SEQ ID NO: 2350 - protein, 9 aa, Severe acute respiratory syndrome coronavirus 2
  REGION 1..9: note = Table A: HLA-B*54:01H
TLVFLFVAA

SEQ ID NO: 2351 - protein, 9 aa, Severe acute respiratory syndrome coronavirus 2
  REGION 1..9: note = Table A: HLA-A*68:02H
LVFLFVAAI

SEQ ID NO: 2352 - protein, 9 aa, Severe acute respiratory syndrome coronavirus 2
  REGION 1..9: note = Table A: HLA-C*14:02H HLA-C*14:03H HLA-A*29:02H HLA-A*24:02H HLA-A*24:07M HLA-A*23:01H
VFLFVAAIF

SEQ ID NO: 2353 - protein, 9 aa, Severe acute respiratory syndrome coronavirus 2
  REGION 1..9: note = Table A: HLA-A*29:02H HLA-B*38:02H HLA-B*15:02H
FLFVAAIFY

SEQ ID NO: 2354 - protein, 9 aa, Severe acute respiratory syndrome coronavirus 2
  REGION 1..9: note = Table A: HLA-A*02:11H HLA-A*68:02M HLA-A*02:02H HLA-C*08:01H HLA-B*38:02H HLA-B*13:02H
FVAAIFYLI

SEQ ID NO: 2355 - protein, 9 aa, Severe acute respiratory syndrome coronavirus 2
  REGION 1..9: note = Table A: HLA-A*02:11H HLA-A*68:02H
AIFYLITPV

SEQ ID NO: 2356 - protein, 9 aa, Severe acute respiratory syndrome coronavirus 2
  REGION 1..9: note = Table A: HLA-C*14:03H
IFYLITPVH

SEQ ID NO: 2357 - protein, 9 aa, Severe acute respiratory syndrome coronavirus 2
  REGION 1..9: note = Table A: HLA-C*14:02H HLA-C*14:03M HLA-A*29:02H HLA-C*04:01H HLA-C*04:03M HLA-A*02:11H HLA-A*24:02H HLA-A*24:07M HLA-C*08:01H HLA-A*23:01H
FYLITPVHV

SEQ ID NO: 2358 - protein, 9 aa, Severe acute respiratory syndrome coronavirus 2
  REGION 1..9: note = Table A: HLA-C*14:02H HLA-C*14:03M HLA-A*11:303M HLA-C*16:01H HLA-B*46:01M HLA-A*26:01H HLA-A*26:03M HLA-B*08:01H HLA-C*03:03M HLA-A*02:11H HLA-C*03:02M HLA-C*03:04M HLA-A*68:02H HLA-B*35:03H HLA-C*12:02M
  REGION 1..9: note = CONT. FROM ABOVE: HLA-C*12:03H HLA-A*02:04M HLA-A*02:05H HLA- A*02:06H HLA-A*02:07H HLA-B*14:01H HLA-A*02:01H HLA-A*02:02H HLA-A*02:03M HLA-A*34:01H HLA-C*07:27H HLA-B*35:01H HLA-C*17 :01H HLA-B*35:07H HLA-C*08:01H HLA-B*38:02M HLA-B*07:04H
  REGION 1..9: note = CONT. FROM ABOVE: HLA-B*15:01M HLA-B*15:02H HLA-C*02:02H HLA- C*07:04H HLA-A*66:01H
YLITPVHVM

SEQ ID NO: 2359 - protein, 9 aa, Severe acute respiratory syndrome coronavirus 2
  REGION 1..9: note = Table A: HLA-A*03:01H HLA-A*11:01H HLA-A*11:02H HLA-A*36:01H HLA-A*34:02M
ITPVHVMSK

SEQ ID NO: 2360 - protein, 9 aa, Severe acute respiratory syndrome coronavirus 2
  REGION 1..9: note = Table A: HLA-A*34:01H HLA-B*38:02H HLA-B*15:02M
HVMSKHTDF

SEQ ID NO: 2361 - protein, 9 aa, Severe acute respiratory syndrome coronavirus 2
  REGION 1..9: note = Table A: HLA-B*38:01H HLA-B*38:02M HLA-B*39:01H HLA-B*15:10H
KHTDFSSEI

SEQ ID NO: 2362 - protein, 9 aa, Severe acute respiratory syndrome coronavirus 2
  REGION 1..9: note = Table A: HLA-C*08:02H
HTDFSSEII

SEQ ID NO: 2363 - protein, 9 aa, Severe acute respiratory syndrome coronavirus 2
  REGION 1..9: note = Table A: HLA-B*38:02H HLA-B*39:01H HLA-B*07:05H
DFSSEIIGY

SEQ ID NO: 2364 - protein, 9 aa, Severe acute respiratory syndrome coronavirus 2
  REGION 1..9: note = Table A: HLA-A*11:01H HLA-A*11:02H HLA-A*36:01H HLA-A*33:03H HLA-A*30:02H HLA-A*68:01H HLA-A*68:02H HLA-A*34:01H HLA-A*34:02H HLA-A*66:01M
FSSEIIGYK

SEQ ID NO: 2365 - protein, 9 aa, Severe acute respiratory syndrome coronavirus 2
  REGION 1..9: note = Table A: HLA-B*44:02M HLA-B*44:05H HLA-B*45:01M HLA-B*44:03H HLA-B*40:01H HLA-B*40:02M HLA-B*40:06H HLA-B*41:02M HLA-B*49:01H HLA-B*50:01M
SEIIGYKAI

SEQ ID NO: 2366 - protein, 9 aa, Severe acute respiratory syndrome coronavirus 2
  REGION 1..9: note = Table A: HLA-B*58:01H HLA-A*11:303H HLA-A*74:01M HLA-A*11:01H HLA-A*11:02H HLA-B*57:01H HLA-A*33:03H HLA-B*46:01H HLA-A*26:03H HLA-C*03:03H HLA-A*30:02H HLA-A*68:01M HLA-C*12:02H HLA-A*34:01M HLA-A*34:02H
  REGION 1..9: note = CONT. FROM ABOVE: HLA-C*07:27H HLA-B*38:02H HLA-A*31:01H HLA- B*57:03H HLA-A*66:01H
KAIDGGVTR

SEQ ID NO: 2367 - protein, 9 aa, Severe acute respiratory syndrome coronavirus 2
  REGION 1..9: note = Table A: HLA-A*02:08H
GVTRDIAST

SEQ ID NO: 2368 - protein, 9 aa, Severe acute respiratory syndrome coronavirus 2
  REGION 1..9: note = Table A: HLA-A*26:01H HLA-A*26:02M HLA-B*35:03H HLA-B*35:01H HLA-B*35:02M HLA-B*35:08H HLA-B*35:12H HLA-B*38:01H HLA-B*38:02M HLA-B*15:02H HLA-B*39:01H HLA-B*07:05H
DIASTDTCF

SEQ ID NO: 2369 - protein, 9 aa, Severe acute respiratory syndrome coronavirus 2
  REGION 1..9: note = Table A: HLA-A*11:303M HLA-A*03:01M HLA-A*03:02H HLA-A*11:01H HLA-A*11:02M HLA-A*36:01H HLA-A*34:02H HLA-C*07:27M
STDTCFANK

SEQ ID NO: 2370 - protein, 9 aa, Severe acute respiratory syndrome coronavirus 2
  REGION 1..9: note = Table A: HLA-B*38:02H
NKHADFDTW

SEQ ID NO: 2371 - protein, 9 aa, Severe acute respiratory syndrome coronavirus 2
  REGION 1..9: note = Table A: HLA-B*38:01H HLA-B*38:02M HLA-B*15:03H
KHADFDTWF

SEQ ID NO: 2372 - protein, 9 aa, Severe acute respiratory syndrome coronavirus 2
  REGION 1..9: note = Table A: HLA-A*36:01H HLA-A*33:01H HLA-A*33:03H HLA-A*34:02H HLA-A*66:01H
DFDTWFSQR

SEQ ID NO: 2373 - protein, 9 aa, Severe acute respiratory syndrome coronavirus 2
  REGION 1..9: note = Table A: HLA-C*03:03H HLA-C*03:04M HLA-A*68:02H HLA-A*02:02H
YTNDKACPL

SEQ ID NO: 2374 - protein, 9 aa, Severe acute respiratory syndrome coronavirus 2
  REGION 1..9: note = Table A: HLA-B*39:06H
DKACPLIAA

SEQ ID NO: 2375 - protein, 9 aa, Severe acute respiratory syndrome coronavirus 2
  REGION 1..9: note = Table A: HLA-A*02:11M HLA-B*55:02H HLA-A*68:02H HLA-C*15:05H HLA-A*02:06H HLA-B*13:02H
KACPLIAAV

SEQ ID NO: 2376 - protein, 9 aa, Severe acute respiratory syndrome coronavirus 2
  REGION 1..9: note = Table A: HLA-A*74:01H HLA-A*26:03H HLA-A*68:01H HLA-A*34:01H HLA-A*66:01H
PLIAAVITR

SEQ ID NO: 2377 - protein, 9 aa, Severe acute respiratory syndrome coronavirus 2
  REGION 1..9: note = Table A: HLA-B*58:02H HLA-A*11:303H HLA-C*16:01M HLA-C*16:04H HLA-B*46:01H HLA-C*06:02H HLA-C*12:05M HLA-A*02:11M HLA-C*03:02H HLA-C*03:04H HLA-A*68:02H HLA-C*15:05H HLA-C*12:03M HLA-C*15:02H HLA-A*02:05H
  REGION 1..9: note = CONT. FROM ABOVE: HLA-A*02:06H HLA-A*02:02H HLA-A*02:03H HLA- B*51:01M HLA-C*08:01H HLA-B*38:02H HLA-B*07:04H HLA-C*02:02H
IAAVITREV

SEQ ID NO: 2378 - protein, 9 aa, Severe acute respiratory syndrome coronavirus 2
  REGION 1..9: note = Table A: HLA-B*58:01H HLA-A*25:01H HLA-A*26:01H HLA-A*26:02H HLA-B*38:02H HLA-B*15:01M HLA-B*15:02H HLA-B*57:03M HLA-B*13:01H HLA-C*07:04H
AVITREVGF

SEQ ID NO: 2379 - protein, 9 aa, Severe acute respiratory syndrome coronavirus 2
  REGION 1..9: note = Table A: HLA-A*30:01H HLA-A*68:02H HLA-C*15:02H HLA-B*57:03H
ITREVGFVV

SEQ ID NO: 2380 - protein, 9 aa, Severe acute respiratory syndrome coronavirus 2
  REGION 1..9: note = Table A: HLA-A*25:01H HLA-A*26:01H HLA-A*26:02M HLA-A*26:03M HLA-A*68:01H HLA-A*68:02M HLA-A*34:01M
EVGFVVPGL

SEQ ID NO: 2381 - protein, 9 aa, Severe acute respiratory syndrome coronavirus 2
  REGION 1..9: note = Table A: HLA-A*02:05H HLA-A*02:06M
FVVPGLPGT

SEQ ID NO: 2382 - protein, 9 aa, Severe acute respiratory syndrome coronavirus 2
  REGION 1..9: note = Table A: HLA-B*42:01H HLA-B*35:03H HLA-C*15:05H HLA-B*07:02M HLA-B*07:04M HLA-B*07:05H
VPGLPGTIL

SEQ ID NO: 2383 - protein, 9 aa, Severe acute respiratory syndrome coronavirus 2
  REGION 1..9: note = Table A: HLA-B*13:02H
GLPGTILRT

SEQ ID NO: 2384 - protein, 9 aa, Severe acute respiratory syndrome coronavirus 2
  REGION 1..9: note = Table A: HLA-B*39:01H
LRTTNGDFL

SEQ ID NO: 2385 - protein, 9 aa, Severe acute respiratory syndrome coronavirus 2
  REGION 1..9: note = Table A: HLA-B*58:01M HLA-B*57:01H HLA-A*25:01H HLA-A*33:03H HLA-A*29:02H HLA-B*53:01H HLA-C*15:05H HLA-C*15:02H HLA-A*34:02M HLA-A*24:07H HLA-B*57:03M HLA-A*66:01H
TTNGDFLHF

SEQ ID NO: 2386 - protein, 9 aa, Severe acute respiratory syndrome coronavirus 2
  REGION 1..9: note = Table A: HLA-C*16:01H HLA-A*02:11H HLA-C*03:02H HLA-A*24:07H HLA-B*38:02H
FLHFLPRVF

SEQ ID NO: 2387 - protein, 9 aa, Severe acute respiratory syndrome coronavirus 2
  REGION 1..9: note = Table A: HLA-C*14:02H HLA-C*14:03M HLA-B*08:01H HLA-A*02:11H HLA-B*39:06H HLA-B*40:06H HLA-B*54:01H
HFLPRVFSA

SEQ ID NO: 2388 - protein, 9 aa, Severe acute respiratory syndrome coronavirus 2
  REGION 1..9: note = Table A: HLA-A*02:11M HLA-A*68:02H HLA-C*01:02H HLA-A*02:04H HLA-A*02:06H HLA-A*02:07M HLA-A*02:01H HLA-A*02:02H HLA-A*02:03H HLA-B*38:02H HLA-B*13:02H
FLPRVFSAV

SEQ ID NO: 2389 - protein, 9 aa, Severe acute respiratory syndrome coronavirus 2
  REGION 1..9: note = Table A: HLA-A*02:11H HLA-A*02:08H
RVFSAVGNI

SEQ ID NO: 2390 - protein, 9 aa, Severe acute respiratory syndrome coronavirus 2
  REGION 1..9: note = Table A: HLA-A*01:01H HLA-B*38:02H HLA-B*15:01H HLA-B*15:02H
FSAVGNICY

SEQ ID NO: 2391 - protein, 9 aa, Severe acute respiratory syndrome coronavirus 2
  REGION 1..9: note = Table A: HLA-A*68:02H
SAVGNICYT

SEQ ID NO: 2392 - protein, 9 aa, Severe acute respiratory syndrome coronavirus 2
  REGION 1..9: note = Table A: HLA-C*14:02H HLA-C*14:03M HLA-C*16:01H HLA-A*36:01H HLA-B*46:01M HLA-C*06:02H HLA-A*26:01H HLA-A*29:02H HLA-C*03:02M HLA-C*12:02H HLA-C*12:03H HLA-A*34:02H HLA-C*02:02H
YTPSKLIEY

SEQ ID NO: 2393 - protein, 9 aa, Severe acute respiratory syndrome coronavirus 2
  REGION 1..9: note = Table A: HLA-B*15:03M
SKLIEYTDF

SEQ ID NO: 2394 - protein, 9 aa, Severe acute respiratory syndrome coronavirus 2
  REGION 1..9: note = Table A: HLA-A*02:11M HLA-A*02:05M HLA-A*02:08H HLA-A*02:01H HLA-A*02:02M HLA-A*02:03H HLA-B*38:02H
KLIEYTDFA

SEQ ID NO: 2395 - protein, 9 aa, Severe acute respiratory syndrome coronavirus 2
  REGION 1..9: note = Table A: HLA-B*49:01M HLA-B*50:01H
IEYTDFATS

SEQ ID NO: 2396 - protein, 9 aa, Severe acute respiratory syndrome coronavirus 2
  REGION 1..9: note = Table A: HLA-B*38:02H
TDFATSACV

SEQ ID NO: 2397 - protein, 9 aa, Severe acute respiratory syndrome coronavirus 2
  REGION 1..9: note = Table A: HLA-C*15:05H
ATSACVLAA

SEQ ID NO: 2398 - protein, 9 aa, Severe acute respiratory syndrome coronavirus 2
  REGION 1..9: note = Table A: HLA-B*15:01H
VLAAECTIF

SEQ ID NO: 2399 - protein, 9 aa, Severe acute respiratory syndrome coronavirus 2
  REGION 1..9: note = Table A: HLA-A*11:01H HLA-A*11:02H HLA-A*34:02M
LAAECTIFK

SEQ ID NO: 2400 - protein, 9 aa, Severe acute respiratory syndrome coronavirus 2
  REGION 1..9: note = Table A: HLA-B*45:01H HLA-B*40:06M HLA-B*50:01H
AECTIFKDA

SEQ ID NO: 2401 - protein, 9 aa, Severe acute respiratory syndrome coronavirus 2
  REGION 1..9: note = Table A: HLA-A*03:02H HLA-A*34:02H
TIFKDASGK

SEQ ID NO: 2402 - protein, 9 aa, Severe acute respiratory syndrome coronavirus 2
  REGION 1..9: note = Table A: HLA-A*68:01H HLA-A*34:01H HLA-B*35:01M HLA-B*35:02H HLA-B*35:08H HLA-B*35:07H HLA-B*38:02H HLA-A*66:01H
DASGKPVPY

SEQ ID NO: 2403 - protein, 9 aa, Severe acute respiratory syndrome coronavirus 2
  REGION 1..9: note = Table A: HLA-A*30:02M
SGKPVPYCY

SEQ ID NO: 2404 - protein, 9 aa, Severe acute respiratory syndrome coronavirus 2
  REGION 1..9: note = Table A: HLA-B*51:01H
VPYCYDTNV

SEQ ID NO: 2405 - protein, 9 aa, Severe acute respiratory syndrome coronavirus 2
  REGION 1..9: note = Table A: HLA-C*14:03H HLA-A*11:303M HLA-A*25:01H HLA-B*46:01M HLA-A*26:01H HLA-A*26:02H HLA-A*26:03H HLA-A*29:01M HLA-A*29:02H HLA-B*18:01H HLA-C*03:02H HLA-A*34:01H HLA-A*34:02H HLA-B*35:01H HLA-B*35:08H
  REGION 1..9: note = CONT. FROM ABOVE: HLA-B*35:07H HLA-B*15:13H HLA-B*38:02H HLA- B*15:01M HLA-B*15:02H HLA-B*15:03H HLA-B*39:01M HLA-B*07:05H HLA-B*15:11H
NVLEGSVAY

SEQ ID NO: 2406 - protein, 9 aa, Severe acute respiratory syndrome coronavirus 2
  REGION 1..9: note = Table A: HLA-B*35:03H HLA-B*38:02H HLA-B*39:01H
EGSVAYESL

SEQ ID NO: 2407 - protein, 9 aa, Severe acute respiratory syndrome coronavirus 2
  REGION 1..9: note = Table A: HLA-A*34:02H
ESLRPDTRY

SEQ ID NO: 2408 - protein, 9 aa, Severe acute respiratory syndrome coronavirus 2
  REGION 1..9: note = Table A: HLA-A*02:02H HLA-A*02:03M HLA-B*38:02M HLA-B*07:04H
SLRPDTRYV

SEQ ID NO: 2409 - protein, 9 aa, Severe acute respiratory syndrome coronavirus 2
  REGION 1..9: note = Table A: HLA-C*06:02H HLA-C*07:01M HLA-C*07:02M HLA-B*14:02H
LRPDTRYVL

SEQ ID NO: 2410 - protein, 9 aa, Severe acute respiratory syndrome coronavirus 2
  REGION 1..9: note = Table A: HLA-B*42:01H HLA-C*04:01H HLA-C*04:03H HLA-B*53:01H HLA-B*35:03H HLA-C*15:05M HLA-B*35:02H HLA-B*35:07H HLA-B*35:12M HLA-B*07:02M HLA-B*07:04M HLA-B*07:05H
RPDTRYVLM

SEQ ID NO: 2411 - protein, 9 aa, Severe acute respiratory syndrome coronavirus 2
  REGION 1..9: note = Table A: HLA-C*04:01H HLA-C*04:03M HLA-A*02:07M HLA-B*38:02H HLA-B*13:01H
LMDGSIIQF

SEQ ID NO: 2412 - protein, 9 aa, Severe acute respiratory syndrome coronavirus 2
  REGION 1..9: note = Table A: HLA-C*16:04H HLA-B*46:01H HLA-A*29:02H HLA-C*03:02H HLA-A*30:02M HLA-C*12:02H HLA-B*35:01H HLA-B*38:02M HLA-B*15:01M HLA-B*15:02M HLA-B*15:03H HLA-B*07:05M HLA-C*02:02H
SIIQFPNTY

SEQ ID NO: 2413 - protein, 9 aa, Severe acute respiratory syndrome coronavirus 2
  REGION 1..9: note = Table A: HLA-A*11:303H HLA-C*04:03H HLA-C*03:03H HLA-C*03:04H HLA-C*08:01H HLA-C*08:02H
IIQFPNTYL

SEQ ID NO: 2414 - protein, 9 aa, Severe acute respiratory syndrome coronavirus 2
  REGION 1..9: note = Table A: HLA-A*33:03H HLA-A*68:01M HLA-A*34:01M HLA-A*34:02M HLA-A*66:01M
NTYLEGSVR

SEQ ID NO: 2415 - protein, 9 aa, Severe acute respiratory syndrome coronavirus 2
  REGION 1..9: note = Table A: HLA-C*14:03H HLA-A*33:03H HLA-A*24:02M HLA-A*24:07H HLA-C*08:01H HLA-A*23:01M HLA-B*39:01H
TYLEGSVRV

SEQ ID NO: 2416 - protein, 9 aa, Severe acute respiratory syndrome coronavirus 2
  REGION 1..9: note = Table A: HLA-A*11:303H HLA-A*02:11M HLA-C*03:02H HLA-C*03:04H HLA-C*15:02H HLA-A*02:04M HLA-A*02:05H HLA-A*02:06H HLA-A*02:07H HLA-B*14:01H HLA-A*02:01H HLA-A*02:02M HLA-A*02:03M HLA-B*38:02M HLA-B*15:02H
  REGION 1..9: note = CONT. FROM ABOVE: HLA-B*15:10H HLA-B*49:01H
YLEGSVRVV

SEQ ID NO: 2417 - protein, 9 aa, Severe acute respiratory syndrome coronavirus 2
  REGION 1..9: note = Table A: HLA-B*41:02H
LEGSVRVVT

SEQ ID NO: 2418 - protein, 9 aa, Severe acute respiratory syndrome coronavirus 2
  REGION 1..9: note = Table A: HLA-B*58:01H HLA-B*58:02M HLA-B*57:01M HLA-C*15:05H HLA-C*12:02H HLA-B*15:01H HLA-B*15:03H HLA-B*07:05H HLA-B*57:03H
GSVRVVTTF

SEQ ID NO: 2419 - protein, 9 aa, Severe acute respiratory syndrome coronavirus 2
  REGION 1..9: note = Table A: HLA-B*46:01H HLA-A*29:01H HLA-A*29:02H HLA-B*27:02H HLA-A*30:02H HLA-B*35:01H HLA-B*38:02H HLA-B*15:01H HLA-B*15:02H HLA-B*07:05H
VVTTFDSEY

SEQ ID NO: 2420 - protein, 9 aa, Severe acute respiratory syndrome coronavirus 2
  REGION 1..9: note = Table A: HLA-A*74:01H HLA-A*11:01H HLA-A*11:02H HLA-A*33:03H HLA-A*68:01M HLA-A*68:02H HLA-A*34:01H HLA-A*34:02H HLA-A*66:01H
TTFDSEYCR

SEQ ID NO: 2421 - protein, 9 aa, Severe acute respiratory syndrome coronavirus 2
  REGION 1..9: note = Table A: HLA-B*38:02H HLA-B*39:01M
ERSEAGVCV

SEQ ID NO: 2422 - protein, 9 aa, Severe acute respiratory syndrome coronavirus 2
  REGION 1..9: note = Table A: HLA-B*45:01H HLA-B*40:02H HLA-B*41:02H
SEAGVCVST

SEQ ID NO: 2423 - protein, 9 aa, Severe acute respiratory syndrome coronavirus 2
  REGION 1..9: note = Table A: HLA-B*58:02H HLA-C*16:01M HLA-C*15:02H HLA-B*57:03H
VSTSGRWVL

SEQ ID NO: 2424 - protein, 9 aa, Severe acute respiratory syndrome coronavirus 2
  REGION 1..9: note = Table A: HLA-B*27:05H HLA-B*27:02M
GRWVLNNDY

SEQ ID NO: 2425 - protein, 9 aa, Severe acute respiratory syndrome coronavirus 2
  REGION 1..9: note = Table A: HLA-A*34:01H HLA-A*66:01H
WVLNNDYYR

SEQ ID NO: 2426 - protein, 9 aa, Severe acute respiratory syndrome coronavirus 2
  REGION 1..9: note = Table A: HLA-C*14:02H HLA-C*14:03H HLA-C*07:02H HLA-A*24:07M
YYRSLPGVF

SEQ ID NO: 2427 - protein, 9 aa, Severe acute respiratory syndrome coronavirus 2
  REGION 1..9: note = Table A: HLA-A*02:11M HLA-A*68:02H HLA-A*02:04H HLA-A*02:05H HLA-A*02:06M HLA-A*02:07H HLA-A*02:01H HLA-A*02:02H HLA-A*02:03H HLA-B*38:02H HLA-B*13:02H
SLPGVFCGV

SEQ ID NO: 2428 - protein, 9 aa, Severe acute respiratory syndrome coronavirus 2
  REGION 1..9: note = Table A: HLA-A*02:11H HLA-A*68:02H HLA-A*02:05H HLA-A*02:06H HLA-A*02:08H HLA-B*38:02H
GVFCGVDAV

SEQ ID NO: 2429 - protein, 9 aa, Severe acute respiratory syndrome coronavirus 2
  REGION 1..9: note = Table A: HLA-B*13:02H
GVDAVNLLT

SEQ ID NO: 2430 - protein, 9 aa, Severe acute respiratory syndrome coronavirus 2
  REGION 1..9: note = Table A: HLA-A*26:02M HLA-A*26:03H HLA-A*68:02H HLA-B*35:03H HLA-C*15:05H HLA-A*34:01H HLA-B*35:01M HLA-B*35:02H HLA-B*51:01H HLA-B*35:07H HLA-B*38:02H HLA-A*66:01H
DAVNLLTNM

SEQ ID NO: 2431 - protein, 9 aa, Severe acute respiratory syndrome coronavirus 2
  REGION 1..9: note = Table A: HLA-C*15:05H HLA-B*15:01H HLA-B*07:05H
AVNLLTNMF

SEQ ID NO: 2432 - protein, 9 aa, Severe acute respiratory syndrome coronavirus 2
  REGION 1..9: note = Table A: HLA-A*02:04H HLA-B*57:03H
LTNMFTPLI

SEQ ID NO: 2433 - protein, 9 aa, Severe acute respiratory syndrome coronavirus 2
  REGION 1..9: note = Table A: HLA-A*68:02H
MFTPLIQPI

SEQ ID NO: 2434 - protein, 9 aa, Severe acute respiratory syndrome coronavirus 2
  REGION 1..9: note = Table A: HLA-B*56:01H HLA-B*55:02H HLA-C*15:05H HLA-B*55:01M HLA-B*39:06M HLA-B*54:01H HLA-B*07:05H
TPLIQPIGA

SEQ ID NO: 2435 - protein, 9 aa, Severe acute respiratory syndrome coronavirus 2
  REGION 1..9: note = Table A: HLA-B*13:02H
IQPIGALDI

SEQ ID NO: 2436 - protein, 9 aa, Severe acute respiratory syndrome coronavirus 2
  REGION 1..9: note = Table A: HLA-A*11:303H HLA-C*15:05H HLA-B*38:02H HLA-B*13:02H
GALDISASI

SEQ ID NO: 2437 - protein, 9 aa, Severe acute respiratory syndrome coronavirus 2
  REGION 1..9: note = Table A: HLA-B*50:01H
LDISASIVA

SEQ ID NO: 2438 - protein, 9 aa, Severe acute respiratory syndrome coronavirus 2
  REGION 1..9: note = Table A: HLA-C*15:05H
ASIVAGGIV

SEQ ID NO: 2439 - protein, 9 aa, Severe acute respiratory syndrome coronavirus 2
  REGION 1..9: note = Table A: HLA-A*25:01H HLA-A*02:11H HLA-A*68:02M HLA-C*15:05M HLA-A*02:04H HLA-A*02:05M HLA-A*02:06M HLA-A*02:08H HLA-B*14:01H HLA-A*02:01H HLA-A*02:02H HLA-A*02:03M HLA-C*08:01H HLA-B*38:02M HLA-B*15:01H HLA-B*07:05H
  REGION 1..9: note = CONT. FROM ABOVE: HLA-B*57:03H HLA-B*13:02H
IVAGGIVAI

SEQ ID NO: 2440 - protein, 9 aa, Severe acute respiratory syndrome coronavirus 2
  REGION 1..9: note = Table A: HLA-C*12:05H HLA-A*68:02H HLA-C*15:05H HLA-C*12:03H
VAGGIVAIV

SEQ ID NO: 2441 - protein, 9 aa, Severe acute respiratory syndrome coronavirus 2
  REGION 1..9: note = Table A: HLA-A*02:05H HLA-A*02:08H HLA-A*02:01H HLA-A*02:03H HLA-B*40:06H
GIVAIVVTC

SEQ ID NO: 2442 - protein, 9 aa, Severe acute respiratory syndrome coronavirus 2
  REGION 1..9: note = Table A: HLA-A*68:02H HLA-C*15:05H HLA-A*02:05M HLA-A*02:06H HLA-A*02:08M HLA-A*02:02H HLA-A*02:03H HLA-B*38:02H HLA-B*07:05H
IVAIVVTCL

SEQ ID NO: 2443 - protein, 9 aa, Severe acute respiratory syndrome coronavirus 2
  REGION 1..9: note = Table A: HLA-B*15:02H
AIVVTCLAY

SEQ ID NO: 2444 - protein, 9 aa, Severe acute respiratory syndrome coronavirus 2
  REGION 1..9: note = Table A: HLA-A*74:01H HLA-A*66:01H
LAYYFMRFR

SEQ ID NO: 2445 - protein, 9 aa, Severe acute respiratory syndrome coronavirus 2
  REGION 1..9: note = Table A: HLA-C*14:02H HLA-A*24:07H
YFMRFRRAF

SEQ ID NO: 2446 - protein, 9 aa, Severe acute respiratory syndrome coronavirus 2
  REGION 1..9: note = Table A: HLA-A*30:02H
RFRRAFGEY

SEQ ID NO: 2447 - protein, 9 aa, Severe acute respiratory syndrome coronavirus 2
  REGION 1..9: note = Table A: HLA-C*16:04M HLA-C*06:02H HLA-C*12:05H HLA-A*02:11M HLA-A*68:02H HLA-C*15:05H HLA-C*12:03M HLA-C*15:02M HLA-A*02:05M HLA-A*02:06H HLA-A*02:08H HLA-A*02:02H HLA-A*02:03H HLA-C*17:01H HLA-C*08:01M HLA-B*38:02H
  REGION 1..9: note = CONT. FROM ABOVE: HLA-B*57:03H HLA-C*02:02H HLA-B*13:02M HLA- B*49:01H
RAFGEYSHV

SEQ ID NO: 2448 - protein, 9 aa, Severe acute respiratory syndrome coronavirus 2
  REGION 1..9: note = Table A: HLA-C*14:03H HLA-A*02:02H
AFGEYSHVV

SEQ ID NO: 2449 - protein, 9 aa, Severe acute respiratory syndrome coronavirus 2
  REGION 1..9: note = Table A: HLA-B*48:01H HLA-B*44:02M HLA-B*44:05H HLA-C*16:04M HLA-B*46:01H HLA-B*45:01M HLA-B*44:03H HLA-B*18:01H HLA-B*27:05H HLA-C*07:01H HLA-B*27:02H HLA-C*15:05H HLA-B*14:02H HLA-B*37:01H HLA-B*38:02H HLA-B*40:01H
  REGION 1..9: note = CONT. FROM ABOVE: HLA-B*40:02H HLA-B*40:06M HLA-B*15:01M HLA- B*15:02H HLA-B*15:03M HLA-B*07:05H HLA-B*41:02H HLA-B*49:01H HLA-C*07:04M HLA-B*50:01H
GEYSHVVAF

SEQ ID NO: 2450 - protein, 9 aa, Severe acute respiratory syndrome coronavirus 2
  REGION 1..9: note = Table A: HLA-B*48:01H HLA-B*38:01H HLA-B*38:02H HLA-B*39:01H HLA-B*15:10H
SHVVAFNTL

SEQ ID NO: 2451 - protein, 9 aa, Severe acute respiratory syndrome coronavirus 2
  REGION 1..9: note = Table A: HLA-A*68:02M HLA-C*15:05H HLA-C*15:02H HLA-A*02:05H HLA-A*02:06H HLA-A*02:08H HLA-A*02:02H HLA-C*17:01H HLA-C*08:01H HLA-B*38:02M HLA-B*57:03H
HVVAFNTLL

SEQ ID NO: 2452 - protein, 9 aa, Severe acute respiratory syndrome coronavirus 2
  REGION 1..9: note = Table A: HLA-C*03:03H HLA-C*12:05M HLA-C*03:02H HLA-C*03:04H HLA-A*68:02H HLA-C*12:03H HLA-C*15:02H HLA-A*02:04H HLA-C*17:01M HLA-C*08:01H HLA-B*38:02H
VAFNTLLFL

SEQ ID NO: 2453 - protein, 9 aa, Severe acute respiratory syndrome coronavirus 2
  REGION 1..9: note = Table A: HLA-A*02:11H
LLFLMSFTV

SEQ ID NO: 2454 - protein, 9 aa, Severe acute respiratory syndrome coronavirus 2
  REGION 1..9: note = Table A: HLA-C*14:03H
LFLMSFTVL

SEQ ID NO: 2455 - protein, 9 aa, Severe acute respiratory syndrome coronavirus 2
  REGION 1..9: note = Table A: HLA-A*29:01H HLA-B*35:01M HLA-B*35:07H HLA-B*38:02H HLA-B*15:02H HLA-B*07:05H
TVLCLTPVY

SEQ ID NO: 2456 - protein, 9 aa, Severe acute respiratory syndrome coronavirus 2
  REGION 1..9: note = Table A: HLA-A*02:04H HLA-A*02:01H HLA-A*02:02H HLA-A*02:03H HLA-B*38:02H
CLTPVYSFL

SEQ ID NO: 2457 - protein, 9 aa, Severe acute respiratory syndrome coronavirus 2
  REGION 1..9: note = Table A: HLA-A*29:02H HLA-A*30:02H
VYSFLPGVY

SEQ ID NO: 2458 - protein, 9 aa, Severe acute respiratory syndrome coronavirus 2
  REGION 1..9: note = Table A: HLA-C*14:02H HLA-C*14:03M HLA-A*02:11H HLA-A*02:04H HLA-A*02:01H HLA-B*38:02H
SFLPGVYSV

SEQ ID NO: 2459 - protein, 9 aa, Severe acute respiratory syndrome coronavirus 2
  REGION 1..9: note = Table A: HLA-A*02:11H HLA-A*02:07H HLA-A*02:02H HLA-B*38:02H
FLPGVYSVI

SEQ ID NO: 2460 - protein, 9 aa, Severe acute respiratory syndrome coronavirus 2
  REGION 1..9: note = Table A: HLA-B*35:01H HLA-B*35:07H
LPGVYSVIY

SEQ ID NO: 2461 - protein, 9 aa, Severe acute respiratory syndrome coronavirus 2
  REGION 1..9: note = Table A: HLA-A*29:01H HLA-A*29:02M HLA-A*30:02H
GVYSVIYLY

SEQ ID NO: 2462 - protein, 9 aa, Severe acute respiratory syndrome coronavirus 2
  REGION 1..9: note = Table A: HLA-A*24:02M HLA-A*24:07M HLA-C*08:01H HLA-A*23:01H
VYSVIYLYL

SEQ ID NO: 2463 - protein, 9 aa, Severe acute respiratory syndrome coronavirus 2
  REGION 1..9: note = Table A: HLA-A*25:01H HLA-A*26:01H HLA-A*29:02H
SVIYLYLTF

SEQ ID NO: 2464 - protein, 9 aa, Severe acute respiratory syndrome coronavirus 2
  REGION 1..9: note = Table A: HLA-A*24:02H HLA-A*24:07M HLA-A*23:01H
IYLYLTFYL

SEQ ID NO: 2465 - protein, 9 aa, Severe acute respiratory syndrome coronavirus 2
  REGION 1..9: note = Table A: HLA-A*68:02H
LTFYLTNDV

SEQ ID NO: 2466 - protein, 9 aa, Severe acute respiratory syndrome coronavirus 2
  REGION 1..9: note = Table A: HLA-C*14:02M HLA-C*14:03H HLA-A*29:02H HLA-C*07:02H HLA-A*24:02M HLA-A*24:07M HLA-C*08:01H HLA-A*23:01M
FYLTNDVSF

SEQ ID NO: 2467 - protein, 9 aa, Severe acute respiratory syndrome coronavirus 2
  REGION 1..9: note = Table A: HLA-A*11:303H HLA-A*02:11H HLA-A*02:04H HLA-A*02:05M HLA-A*02:06H HLA-A*02:07H HLA-A*02:01M HLA-A*02:02H HLA-A*02:03M HLA-C*17:01M HLA-C*08:01H HLA-B*38:02M
YLTNDVSFL

SEQ ID NO: 2468 - protein, 9 aa, Severe acute respiratory syndrome coronavirus 2
  REGION 1..9: note = Table A: HLA-A*68:02H
LTNDVSFLA

SEQ ID NO: 2469 - protein, 9 aa, Severe acute respiratory syndrome coronavirus 2
  REGION 1..9: note = Table A: HLA-A*68:02H
NDVSFLAHI

SEQ ID NO: 2470 - protein, 9 aa, Severe acute respiratory syndrome coronavirus 2
  REGION 1..9: note = Table A: HLA-B*58:01M HLA-B*58:02M HLA-B*57:01M HLA-B*57:03H
VSFLAHIQW

SEQ ID NO: 2471 - protein, 9 aa, Severe acute respiratory syndrome coronavirus 2
  REGION 1..9: note = Table A: HLA-C*14:02H HLA-C*14:03M
SFLAHIQWM

SEQ ID NO: 2472 - protein, 9 aa, Severe acute respiratory syndrome coronavirus 2
  REGION 1..9: note = Table A: HLA-A*02:11H HLA-A*68:02M HLA-A*02:04M HLA-A*02:07H HLA-A*02:01H HLA-A*02:02H HLA-A*02:03H HLA-B*38:02H HLA-B*13:02H
FLAHIQWMV

SEQ ID NO: 2473 - protein, 9 aa, Severe acute respiratory syndrome coronavirus 2
  REGION 1..9: note = Table A: HLA-B*38:01H HLA-B*38:02M HLA-B*15:03H HLA-B*15:10H
AHIQWMVMF

SEQ ID NO: 2474 - protein, 9 aa, Severe acute respiratory syndrome coronavirus 2
  REGION 1..9: note = Table A: HLA-B*46:01H
VMFTPLVPF

SEQ ID NO: 2475 - protein, 9 aa, Severe acute respiratory syndrome coronavirus 2
  REGION 1..9: note = Table A: HLA-A*24:02H HLA-A*24:07M HLA-A*23:01H
MFTPLVPFW

SEQ ID NO: 2476 - protein, 9 aa, Severe acute respiratory syndrome coronavirus 2
  REGION 1..9: note = Table A: HLA-C*04:03M HLA-A*68:02H
FTPLVPFWI

SEQ ID NO: 2477 - protein, 9 aa, Severe acute respiratory syndrome coronavirus 2
  REGION 1..9: note = Table A: HLA-A*29:02H HLA-B*55:02H HLA-B*35:01M HLA-B*35:07H HLA-B*38:02H HLA-B*15:02H HLA-B*15:11M
VPFWITIAY

SEQ ID NO: 2478 - protein, 9 aa, Severe acute respiratory syndrome coronavirus 2
  REGION 1..9: note = Table A: HLA-B*58:02H HLA-A*68:02H HLA-C*15:05H HLA-C*15:02H HLA-B*57:03H HLA-B*13:02H
ITIAYIICI

SEQ ID NO: 2479 - protein, 9 aa, Severe acute respiratory syndrome coronavirus 2
  REGION 1..9: note = Table A: HLA-B*58:01H HLA-B*58:02M HLA-B*57:03M
ISTKHFYWF

SEQ ID NO: 2480 - protein, 9 aa, Severe acute respiratory syndrome coronavirus 2
  REGION 1..9: note = Table A: HLA-B*58:02H HLA-B*57:01H HLA-A*24:07H HLA-B*57:03M
STKHFYWFF

SEQ ID NO: 2481 - protein, 9 aa, Severe acute respiratory syndrome coronavirus 2
  REGION 1..9: note = Table A: HLA-C*14:02H HLA-C*14:03M HLA-A*29:02M HLA-A*30:02H
HFYWFFSNY

SEQ ID NO: 2482 - protein, 9 aa, Severe acute respiratory syndrome coronavirus 2
  REGION 1..9: note = Table A: HLA-C*14:02H HLA-C*14:03M HLA-C*06:02H HLA-A*29:02H HLA-A*24:07H HLA-C*08:01H
FYWFFSNYL

SEQ ID NO: 2483 - protein, 9 aa, Severe acute respiratory syndrome coronavirus 2
  REGION 1..9: note = Table A: HLA-A*24:07M HLA-A*23:01H
NYLKRRVVF

SEQ ID NO: 2484 - protein, 9 aa, Severe acute respiratory syndrome coronavirus 2
  REGION 1..9: note = Table A: HLA-B*58:01M HLA-A*11:303H HLA-B*57:01H HLA-B*46:01H HLA-C*15:05M HLA-A*24:07H HLA-C*08:01H HLA-B*38:02H HLA-A*32:01H HLA-B*07:04H HLA-B*15:01M HLA-B*15:02H HLA-B*15:03M HLA-B*07:05H HLA-B*57:03H
  REGION 1..9: note = CONT. FROM ABOVE: HLA-B*13:01H
RVVFNGVSF

SEQ ID NO: 2485 - protein, 9 aa, Severe acute respiratory syndrome coronavirus 2
  REGION 1..9: note = Table A: HLA-A*29:01H HLA-A*29:02H
VFNGVSFST

SEQ ID NO: 2486 - protein, 9 aa, Severe acute respiratory syndrome coronavirus 2
  REGION 1..9: note = Table A: HLA-C*16:04H HLA-A*68:02H HLA-A*02:05H HLA-C*08:01H HLA-B*54:01H
VSFSTFEEA

SEQ ID NO: 2487 - protein, 9 aa, Severe acute respiratory syndrome coronavirus 2
  REGION 1..9: note = Table A: HLA-A*11:303H HLA-C*03:03H HLA-C*03:04H HLA-B*35:03H HLA-B*35:02H HLA-B*35:12H
FSTFEEAAL

SEQ ID NO: 2488 - protein, 9 aa, Severe acute respiratory syndrome coronavirus 2
  REGION 1..9: note = Table A: HLA-A*68:02M HLA-A*02:05H HLA-A*02:08H
STFEEAALC

SEQ ID NO: 2489 - protein, 9 aa, Severe acute respiratory syndrome coronavirus 2
  REGION 1..9: note = Table A: HLA-B*44:05H HLA-B*18:01H HLA-B*40:01H
FEEAALCTF

SEQ ID NO: 2490 - protein, 9 aa, Severe acute respiratory syndrome coronavirus 2
  REGION 1..9: note = Table A: HLA-B*44:05H
EEAALCTFL

SEQ ID NO: 2491 - protein, 9 aa, Severe acute respiratory syndrome coronavirus 2
  REGION 1..9: note = Table A: HLA-A*68:02H
EAALCTFLL

SEQ ID NO: 2492 - protein, 9 aa, Severe acute respiratory syndrome coronavirus 2
  REGION 1..9: note = Table A: HLA-A*03:01H HLA-A*11:01H HLA-A*11:02H
ALCTFLLNK

SEQ ID NO: 2493 - protein, 9 aa, Severe acute respiratory syndrome coronavirus 2
  REGION 1..9: note = Table A: HLA-C*14:03H HLA-A*29:02H HLA-B*15:02M
TFLLNKEMY

SEQ ID NO: 2494 - protein, 9 aa, Severe acute respiratory syndrome coronavirus 2
  REGION 1..9: note = Table A: HLA-A*11:303H HLA-B*08:01H HLA-A*02:11H HLA-C*03:04H HLA-A*02:04H HLA-A*02:06H HLA-A*02:07M HLA-A*02:01H HLA-A*02:02H HLA-A*02:03H HLA-C*17:01M HLA-C*08:01H HLA-B*38:02M HLA-B*13:01H
FLLNKEMYL

SEQ ID NO: 2495 - protein, 9 aa, Severe acute respiratory syndrome coronavirus 2
  REGION 1..9: note = Table A: HLA-A*74:01H HLA-A*03:02H
LLNKEMYLK

SEQ ID NO: 2496 - protein, 9 aa, Severe acute respiratory syndrome coronavirus 2
  REGION 1..9: note = Table A: HLA-B*08:01M HLA-A*02:02M
YLKLRSDVL

SEQ ID NO: 2497 - protein, 9 aa, Severe acute respiratory syndrome coronavirus 2
  REGION 1..9: note = Table A: HLA-A*36:01H
RSDVLLPLT

SEQ ID NO: 2498 - protein, 9 aa, Severe acute respiratory syndrome coronavirus 2
  REGION 1..9: note = Table A: HLA-A*25:01M HLA-A*26:01M HLA-A*26:02H HLA-A*26:03M HLA-B*18:01H HLA-C*15:05H HLA-A*34:01M HLA-A*34:02M HLA-B*35:01H HLA-B*35:08H HLA-B*35:07H HLA-B*38:02H HLA-B*15:02H HLA-B*39:01H HLA-B*07:05M HLA-B*15:11H
  REGION 1..9: note = CONT. FROM ABOVE: HLA-A*66:01H
DVLLPLTQY

SEQ ID NO: 2499 - protein, 9 aa, Severe acute respiratory syndrome coronavirus 2
  REGION 1..9: note = Table A: HLA-A*74:01H
LLPLTQYNR

SEQ ID NO: 2500 - protein, 9 aa, Severe acute respiratory syndrome coronavirus 2
  REGION 1..9: note = Table A: HLA-B*53:01M HLA-B*35:01M HLA-B*35:07M
LPLTQYNRY

SEQ ID NO: 2501 - protein, 9 aa, Severe acute respiratory syndrome coronavirus 2
  REGION 1..9: note = Table A: HLA-B*48:01H HLA-C*14:03H HLA-A*11:303H HLA-C*16:01H HLA-B*08:01M HLA-C*03:03H HLA-A*02:11H HLA-C*03:02H HLA-C*03:04H HLA-C*15:05H HLA-B*14:02H HLA-C*15:02H HLA-A*02:04H HLA-A*02:05H HLA-A*02:06H
  REGION 1..9: note = CONT. FROM ABOVE: HLA-B*14:01M HLA-A*02:03H HLA-B*52:01H HLA- C*08:01H HLA-B*38:02M HLA-B*15:01H HLA-B*15:02M HLA-B*15:03M HLA-B*13:01H HLA-B*13:02M HLA-B*15:10M
TQYNRYLAL

SEQ ID NO: 2502 - protein, 9 aa, Severe acute respiratory syndrome coronavirus 2
  REGION 1..9: note = Table A: HLA-A*29:02H HLA-A*30:02M
QYNRYLALY

SEQ ID NO: 2503 - protein, 9 aa, Severe acute respiratory syndrome coronavirus 2
  REGION 1..9: note = Table A: HLA-B*27:05H
NRYLALYNK

SEQ ID NO: 2504 - protein, 9 aa, Severe acute respiratory syndrome coronavirus 2
  REGION 1..9: note = Table A: HLA-C*14:02H HLA-C*14:03M HLA-A*36:01H HLA-A*29:02H HLA-C*07:02H HLA-A*30:02H HLA-A*24:02H HLA-A*24:07H HLA-A*23:01H
RYLALYNKY

SEQ ID NO: 2505 - protein, 9 aa, Severe acute respiratory syndrome coronavirus 2
  REGION 1..9: note = Table A: HLA-A*29:02H
LALYNKYKY

SEQ ID NO: 2506 - protein, 9 aa, Severe acute respiratory syndrome coronavirus 2
  REGION 1..9: note = Table A: HLA-A*74:01H HLA-A*03:01H HLA-A*02:11H HLA-A*02:02H
ALYNKYKYF

SEQ ID NO: 2507 - protein, 9 aa, Severe acute respiratory syndrome coronavirus 2
  REGION 1..9: note = Table A: HLA-A*11:303H HLA-B*46:01M HLA-A*30:02H HLA-C*07:27H HLA-B*35:01M HLA-B*35:08M HLA-B*38:02M HLA-B*15:01H HLA-B*15:02M HLA-B*15:03H HLA-B*39:01M HLA-B*07:05M HLA-B*15:11M
SGAMDTTSY

SEQ ID NO: 2508 - protein, 9 aa, Severe acute respiratory syndrome coronavirus 2
  REGION 1..9: note = Table A: HLA-A*11:303H HLA-A*74:01H HLA-A*03:02H HLA-A*11:01M HLA-A*11:02M HLA-A*33:01H HLA-A*33:03M HLA-A*26:03M HLA-A*30:02H HLA-A*68:01M HLA-A*34:01H HLA-A*34:02M HLA-C*07:27H HLA-A*31:01H HLA-A*66:01H
GAMDTTSYR

SEQ ID NO: 2509 - protein, 9 aa, Severe acute respiratory syndrome coronavirus 2
  REGION 1..9: note = Table A: HLA-B*55:02H HLA-B*54:01H HLA-B*50:01H
MDTTSYREA

SEQ ID NO: 2510 - protein, 9 aa, Severe acute respiratory syndrome coronavirus 2
  REGION 1..9: note = Table A: HLA-A*34:02H
EAACCHLAK

SEQ ID NO: 2511 - protein, 9 aa, Severe acute respiratory syndrome coronavirus 2
  REGION 1..9: note = Table A: HLA-A*02:02H HLA-B*38:02M HLA-B*15:01H HLA-B*15:02M HLA-B*13:01H
HLAKALNDF

SEQ ID NO: 2512 - protein, 9 aa, Severe acute respiratory syndrome coronavirus 2
  REGION 1..9: note = Table A: HLA-C*03:04H HLA-B*35:03H HLA-C*08:01H HLA-B*38:02H HLA-B*39:01H
FSNSGSDVL

SEQ ID NO: 2513 - protein, 9 aa, Severe acute respiratory syndrome coronavirus 2
  REGION 1..9: note = Table A: HLA-B*38:02H
VLYQPPQTS

SEQ ID NO: 2514 - protein, 9 aa, Severe acute respiratory syndrome coronavirus 2
  REGION 1..9: note = Table A: HLA-C*14:02H HLA-C*14:03M HLA-A*24:02M HLA-A*24:07M HLA-C*08:01H HLA-A*23:01H
LYQPPQTSI

SEQ ID NO: 2515 - protein, 9 aa, Severe acute respiratory syndrome coronavirus 2
  REGION 1..9: note = Table A: HLA-B*56:01H HLA-B*55:02H HLA-C*15:05H HLA-B*55:01H
PPQTSITSA

SEQ ID NO: 2516 - protein, 9 aa, Severe acute respiratory syndrome coronavirus 2
  REGION 1..9: note = Table A: HLA-B*58:01H HLA-B*44:05H HLA-B*57:01M HLA-C*15:05H HLA-B*35:01H HLA-B*38:02H HLA-B*15:01H HLA-B*07:05M HLA-B*57:03H
TSAVLQSGF

SEQ ID NO: 2517 - protein, 9 aa, Severe acute respiratory syndrome coronavirus 2
  REGION 1..9: note = Table A: HLA-A*68:01H HLA-A*34:01H HLA-A*34:02H HLA-A*66:01H
SAVLQSGFR

SEQ ID NO: 2518 - protein, 9 aa, Severe acute respiratory syndrome coronavirus 2
  REGION 1..9: note = Table A: HLA-A*11:303M HLA-A*74:01H HLA-A*03:01H HLA-A*03:02H HLA-A*11:01H HLA-A*11:02H HLA-A*30:02H HLA-A*34:02M HLA-C*07:27M
AVLQSGFRK

SEQ ID NO: 2519 - protein, 9 aa, Severe acute respiratory syndrome coronavirus 2
  REGION 1..9: note = Table A: HLA-C*16:01H
QSGFRKMAF

SEQ ID NO: 2520 - protein, 9 aa, Severe acute respiratory syndrome coronavirus 2
  REGION 1..9: note = Table A: HLA-A*02:11H HLA-A*02:02H HLA-B*38:02H HLA-B*13:02H
KMAFPSGKV

SEQ ID NO: 2521 - protein, 9 aa, Severe acute respiratory syndrome coronavirus 2
  REGION 1..9: note = Table A: HLA-B*58:01H HLA-B*57:01M HLA-B*57:03M
GTTTLNGLW

SEQ ID NO: 2522 - protein, 9 aa, Severe acute respiratory syndrome coronavirus 2
  REGION 1..9: note = Table A: HLA-B*15:01H HLA-B*15:02H
GLWLDDVVY

SEQ ID NO: 2523 - protein, 9 aa, Severe acute respiratory syndrome coronavirus 2
  REGION 1..9: note = Table A: HLA-A*02:01H
LWLDDVVYC

SEQ ID NO: 2524 - protein, 9 aa, Severe acute respiratory syndrome coronavirus 2
  REGION 1..9: note = Table A: HLA-B*38:02H HLA-B*15:02M
HVICTSEDM

SEQ ID NO: 2525 - protein, 9 aa, Severe acute respiratory syndrome coronavirus 2
  REGION 1..9: note = Table A: HLA-B*44:02H HLA-B*44:05M HLA-B*44:03M HLA-B*18:01H HLA-B*07:05M
SEDMLNPNY

SEQ ID NO: 2526 - protein, 9 aa, Severe acute respiratory syndrome coronavirus 2
  REGION 1..9: note = Table A: HLA-A*11:303H HLA-B*35:03H HLA-C*01:02H HLA-A*02:04H HLA-A*02:02M HLA-A*02:03H HLA-B*38:02M HLA-B*39:01H
MLNPNYEDL

SEQ ID NO: 2527 - protein, 9 aa, Severe acute respiratory syndrome coronavirus 2
  REGION 1..9: note = Table A: HLA-B*53:01M HLA-B*35:03H HLA-C*15:05H HLA-B*35:02H HLA-B*51:01H
NPNYEDLLI

SEQ ID NO: 2528 - protein, 9 aa, Severe acute respiratory syndrome coronavirus 2
  REGION 1..9: note = Table A: HLA-B*50:01H
YEDLLIRKS

SEQ ID NO: 2529 - protein, 9 aa, Severe acute respiratory syndrome coronavirus 2
  REGION 1..9: note = Table A: HLA-B*57:03H
LIRKSNHNF

SEQ ID NO: 2530 - protein, 9 aa, Severe acute respiratory syndrome coronavirus 2
  REGION 1..9: note = Table A: HLA-C*06:02H
IRKSNHNFL

SEQ ID NO: 2531 - protein, 9 aa, Severe acute respiratory syndrome coronavirus 2
  REGION 1..9: note = Table A: HLA-B*45:01H HLA-B*55:02H HLA-A*68:02H HLA-B*39:06M HLA-B*40:06H HLA-B*54:01H HLA-B*50:01H
SNHNFLVQA

SEQ ID NO: 2532 - protein, 9 aa, Severe acute respiratory syndrome coronavirus 2
  REGION 1..9: note = Table A: HLA-B*38:02H HLA-B*39:06M HLA-B*39:01M
NHNFLVQAG

SEQ ID NO: 2533 - protein, 9 aa, Severe acute respiratory syndrome coronavirus 2
  REGION 1..9: note = Table A: HLA-A*02:08H
LVQAGNVQL

SEQ ID NO: 2534 - protein, 9 aa, Severe acute respiratory syndrome coronavirus 2
  REGION 1..9: note = Table A: HLA-A*74:01H HLA-B*27:02H HLA-A*68:01H HLA-A*34:01H HLA-A*31:01M
VQAGNVQLR

SEQ ID NO: 2535 - protein, 9 aa, Severe acute respiratory syndrome coronavirus 2
  REGION 1..9: note = Table A: HLA-C*12:05H HLA-A*68:02H HLA-C*15:05H HLA-C*15:02H HLA-B*51:01H HLA-B*38:02H HLA-B*13:02H
QAGNVQLRV

SEQ ID NO: 2536 - protein, 9 aa, Severe acute respiratory syndrome coronavirus 2
  REGION 1..9: note = Table A: HLA-B*58:02H
AGNVQLRVI

SEQ ID NO: 2537 - protein, 9 aa, Severe acute respiratory syndrome coronavirus 2
  REGION 1..9: note = Table A: HLA-B*08:01H HLA-A*02:02H HLA-B*38:02M HLA-B*07:02H HLA-B*07:04H HLA-B*15:01H HLA-B*15:02M
QLRVIGHSM

SEQ ID NO: 2538 - protein, 9 aa, Severe acute respiratory syndrome coronavirus 2
  REGION 1..9: note = Table A: HLA-B*48:01H HLA-B*38:01H HLA-B*38:02M HLA-B*39:01M HLA-B*15:10H
GHSMQNCVL

SEQ ID NO: 2539 - protein, 9 aa, Severe acute respiratory syndrome coronavirus 2
  REGION 1..9: note = Table A: HLA-A*03:02H HLA-A*11:01M HLA-A*11:02M HLA-A*34:02M HLA-C*07:27H
HSMQNCVLK

SEQ ID NO: 2540 - protein, 9 aa, Severe acute respiratory syndrome coronavirus 2
  REGION 1..9: note = Table A: HLA-C*15:05H HLA-B*38:02H
SMQNCVLKL

SEQ ID NO: 2541 - protein, 9 aa, Severe acute respiratory syndrome coronavirus 2
  REGION 1..9: note = Table A: HLA-B*08:01M HLA-A*02:05H HLA-A*02:02M HLA-A*02:03M HLA-B*38:02H
VLKLKVDTA

SEQ ID NO: 2542 - protein, 9 aa, Severe acute respiratory syndrome coronavirus 2
  REGION 1..9: note = Table A: HLA-A*02:01H
KVDTANPKT

SEQ ID NO: 2543 - protein, 9 aa, Severe acute respiratory syndrome coronavirus 2
  REGION 1..9: note = Table A: HLA-B*50:01H
VDTANPKTP

SEQ ID NO: 2544 - protein, 9 aa, Severe acute respiratory syndrome coronavirus 2
  REGION 1..9: note = Table A: HLA-A*33:01M HLA-A*33:03M HLA-A*26:03H HLA-A*68:01M HLA-A*34:01H HLA-A*34:02H HLA-A*66:01H
DTANPKTPK

SEQ ID NO: 2545 - protein, 9 aa, Severe acute respiratory syndrome coronavirus 2
  REGION 1..9: note = Table A: HLA-B*58:01H HLA-B*58:02H HLA-A*11:303H HLA-C*16:01M HLA-A*03:01H HLA-A*11:01H HLA-A*11:02H HLA-A*36:01H HLA-B*57:01H HLA-B*46:01M HLA-A*26:01H HLA-A*29:02H HLA-B*53:01H HLA-C*03:02M HLA-A*30:02M
  REGION 1..9: note = CONT. FROM ABOVE: HLA-B*35:03H HLA-C*15:05H HLA-C*12:02M HLA- C*12:03H HLA-A*34:02M HLA-C*07:27H HLA-B*35:01H HLA-B*35:08M HLA-B*35:07H HLA-B*38:02M HLA-B*15:01M HLA-B*15:02M HLA-B*15 :03H HLA-B*07:05H HLA-B*57:03H HLA-C*02:02H HLA-B*15:11M
TANPKTPKY

SEQ ID NO: 2546 - protein, 9 aa, Severe acute respiratory syndrome coronavirus 2
  REGION 1..9: note = Table A: HLA-B*42:01H HLA-B*07:04M
NPKTPKYKF

SEQ ID NO: 2547 - protein, 9 aa, Severe acute respiratory syndrome coronavirus 2
  REGION 1..9: note = Table A: HLA-A*74:01M
KTPKYKFVR

SEQ ID NO: 2548 - protein, 9 aa, Severe acute respiratory syndrome coronavirus 2
  REGION 1..9: note = Table A: HLA-B*42:01H HLA-B*08:01H HLA-B*55:01H HLA-B*07:04M
TPKYKFVRI

SEQ ID NO: 2549 - protein, 9 aa, Severe acute respiratory syndrome coronavirus 2
  REGION 1..9: note = Table A: HLA-B*44:05H HLA-C*16:04M HLA-B*46:01H HLA-C*06:02H HLA-B*27:05M HLA-C*07:01H HLA-C*07:02H HLA-B*27:02H HLA-C*15:05H HLA-B*14:02H HLA-B*14:01H HLA-A*24:02H HLA-A*23:01H HLA-B*38:01M HLA-B*38:02H HLA-B*15:01M
  REGION 1..9: note = CONT. FROM ABOVE: HLA-B*15:02H HLA-B*15:03M HLA-B*39:01M HLA- B*07:05H HLA-B*15:10H
VRIQPGQTF

SEQ ID NO: 2550 - protein, 9 aa, Severe acute respiratory syndrome coronavirus 2
  REGION 1..9: note = Table A: HLA-A*02:11H HLA-A*02:06H HLA-A*02:07H HLA-B*13:02M
IQPGQTFSV

SEQ ID NO: 2551 - protein, 9 aa, Severe acute respiratory syndrome coronavirus 2
  REGION 1..9: note = Table A: HLA-B*42:01H HLA-B*35:03M HLA-C*15:05M HLA-B*35:01H HLA-B*38:02H HLA-B*07:02M HLA-B*07:04H HLA-B*07:05M
QPGQTFSVL

SEQ ID NO: 2552 - protein, 9 aa, Severe acute respiratory syndrome coronavirus 2
  REGION 1..9: note = Table A: HLA-B*13:02M
GQTFSVLAC

SEQ ID NO: 2553 - protein, 9 aa, Severe acute respiratory syndrome coronavirus 2
  REGION 1..9: note = Table A: HLA-A*29:02H HLA-A*30:02M HLA-B*38:02H
QTFSVLACY

SEQ ID NO: 2554 - protein, 9 aa, Severe acute respiratory syndrome coronavirus 2
  REGION 1..9: note = Table A: HLA-A*29:02H HLA-B*39:01H HLA-B*15:11H
YNGSPSGVY

SEQ ID NO: 2555 - protein, 9 aa, Severe acute respiratory syndrome coronavirus 2
  REGION 1..9: note = Table A: HLA-B*39:01H
NGSPSGVYQ

SEQ ID NO: 2556 - protein, 9 aa, Severe acute respiratory syndrome coronavirus 2
  REGION 1..9: note = Table A: HLA-B*56:01M HLA-B*55:02H HLA-C*15:05M HLA-B*55:01M HLA-B*54:01H HLA-B*07:05H
SPSGVYQCA

SEQ ID NO: 2557 - protein, 9 aa, Severe acute respiratory syndrome coronavirus 2
  REGION 1..9: note = Table A: HLA-B*58:02H HLA-C*15:05H HLA-B*51:01H HLA-B*57:03H
CAMRPNFTI

SEQ ID NO: 2558 - protein, 9 aa, Severe acute respiratory syndrome coronavirus 2
  REGION 1..9: note = Table A: HLA-A*74:01H HLA-A*03:01M HLA-A*11:01H HLA-A*11:02H HLA-A*30:01M HLA-A*34:02H
AMRPNFTIK

SEQ ID NO: 2559 - protein, 9 aa, Severe acute respiratory syndrome coronavirus 2
  REGION 1..9: note = Table A: HLA-B*56:01H HLA-B*55:02H HLA-B*55:01H
RPNFTIKGS

SEQ ID NO: 2560 - protein, 9 aa, Severe acute respiratory syndrome coronavirus 2
  REGION 1..9: note = Table A: HLA-A*24:07H
NFTIKGSFL

SEQ ID NO: 2561 - protein, 9 aa, Severe acute respiratory syndrome coronavirus 2
  REGION 1..9: note = Table A: HLA-C*15:05H
GSFLNGSCG

SEQ ID NO: 2562 - protein, 9 aa, Severe acute respiratory syndrome coronavirus 2
  REGION 1..9: note = Table A: HLA-A*02:03H HLA-B*38:02H
FLNGSCGSV

SEQ ID NO: 2563 - protein, 9 aa, Severe acute respiratory syndrome coronavirus 2
  REGION 1..9: note = Table A: HLA-A*30:02H
GSVGFNIDY

SEQ ID NO: 2564 - protein, 9 aa, Severe acute respiratory syndrome coronavirus 2
  REGION 1..9: note = Table A: HLA-C*04:03M HLA-B*35:02H HLA-B*35:08H HLA-C*08:02H HLA-B*35:12H HLA-C*05:01H
NIDYDCVSF

SEQ ID NO: 2565 - protein, 9 aa, Severe acute respiratory syndrome coronavirus 2
  REGION 1..9: note = Table A: HLA-C*03:04H
FCYMHHMEL

SEQ ID NO: 2566 - protein, 9 aa, Severe acute respiratory syndrome coronavirus 2
  REGION 1..9: note = Table A: HLA-B*38:02H
MHHMELPTG

SEQ ID NO: 2567 - protein, 9 aa, Severe acute respiratory syndrome coronavirus 2
  REGION 1..9: note = Table A: HLA-A*02:11H HLA-B*38:01M HLA-B*38:02H HLA-B*39:06H HLA-B*39:01M HLA-B*13:02H HLA-B*15:10H
HHMELPTGV

SEQ ID NO: 2568 - protein, 9 aa, Severe acute respiratory syndrome coronavirus 2
  REGION 1..9: note = Table A: HLA-B*15:02H
HMELPTGVH

SEQ ID NO: 2569 - protein, 9 aa, Severe acute respiratory syndrome coronavirus 2
  REGION 1..9: note = Table A: HLA-B*44:05H HLA-B*45:01H HLA-B*18:01H HLA-B*55:02H HLA-B*38:02H HLA-B*39:06M HLA-B*40:02H HLA-B*40:06M HLA-B*54:01H HLA-B*39:01H HLA-B*07:05H HLA-B*41:02M HLA-B*49:01M HLA-B*50:01H
MELPTGVHA

SEQ ID NO: 2570 - protein, 9 aa, Severe acute respiratory syndrome coronavirus 2
  REGION 1..9: note = Table A: HLA-A*26:03H HLA-A*34:01H
ELPTGVHAG

SEQ ID NO: 2571 - protein, 9 aa, Severe acute respiratory syndrome coronavirus 2
  REGION 1..9: note = Table A: HLA-B*56:01H HLA-B*55:02H HLA-B*54:01H
LPTGVHAGT

SEQ ID NO: 2572 - protein, 9 aa, Severe acute respiratory syndrome coronavirus 2
  REGION 1..9: note = Table A: HLA-B*58:01H HLA-A*36:01H HLA-A*01:01H HLA-A*30:02H
GTDLEGNFY

SEQ ID NO: 2573 - protein, 9 aa, Severe acute respiratory syndrome coronavirus 2
  REGION 1..9: note = Table A: HLA-A*33:01M HLA-A*33:03H HLA-A*68:01H HLA-A*34:01H HLA-A*34:02H HLA-A*31:01H HLA-A*66:01H
NFYGPFVDR

SEQ ID NO: 2574 - protein, 9 aa, Severe acute respiratory syndrome coronavirus 2
  REGION 1..9: note = Table A: HLA-B*56:01M HLA-B*55:02M HLA-C*15:05M HLA-B*55:01M HLA-B*39:06H HLA-B*54:01M HLA-B*07:02H HLA-B*07:05H HLA-B*50:01H
GPFVDRQTA

SEQ ID NO: 2575 - protein, 9 aa, Severe acute respiratory syndrome coronavirus 2
  REGION 1..9: note = Table A: HLA-A*02:11H HLA-C*15:05H HLA-A*02:05H HLA-A*02:06H HLA-A*02:07H HLA-A*02:08H HLA-A*02:01H HLA-C*08:02H HLA-B*38:02H HLA-B*54:01H
FVDRQTAQA

SEQ ID NO: 2576 - protein, 9 aa, Severe acute respiratory syndrome coronavirus 2
  REGION 1..9: note = Table A: HLA-B*53:01H HLA-B*35:03H HLA-C*15:05H HLA-B*35:02H HLA-B*51:01H HLA-B*38:01H HLA-B*38:02M HLA-B*13:02H
QAAGTDTTI

SEQ ID NO: 2577 - protein, 9 aa, Severe acute respiratory syndrome coronavirus 2
  REGION 1..9: note = Table A: HLA-A*11:303H HLA-C*16:04H HLA-C*12:05H HLA-C*15:05H HLA-C*15:02H HLA-A*02:06H HLA-A*02:01H HLA-B*38:02H HLA-B*39:01H HLA-B*13:02M HLA-B*49:01H HLA-C*07:04H
AGTDTTITV

SEQ ID NO: 2578 - protein, 9 aa, Severe acute respiratory syndrome coronavirus 2
  REGION 1..9: note = Table A: HLA-A*68:02M HLA-B*37:01H HLA-B*38:02H
TDTTITVNV

SEQ ID NO: 2579 - protein, 9 aa, Severe acute respiratory syndrome coronavirus 2
  REGION 1..9: note = Table A: HLA-A*25:01H HLA-A*68:02M
DTTITVNVL

SEQ ID NO: 2580 - protein, 9 aa, Severe acute respiratory syndrome coronavirus 2
  REGION 1..9: note = Table A: HLA-A*68:02H
TTITVNVLA

SEQ ID NO: 2581 - protein, 9 aa, Severe acute respiratory syndrome coronavirus 2
  REGION 1..9: note = Table A: HLA-B*58:01H HLA-A*25:01H HLA-B*15:13H
TITVNVLAW

SEQ ID NO: 2582 - protein, 9 aa, Severe acute respiratory syndrome coronavirus 2
  REGION 1..9: note = Table A: HLA-A*68:02H
ITVNVLAWL

SEQ ID NO: 2583 - protein, 9 aa, Severe acute respiratory syndrome coronavirus 2
  REGION 1..9: note = Table A: HLA-A*36:01H HLA-A*29:01M HLA-A*29:02M HLA-A*30:02H HLA-B*35:01H HLA-B*38:02H
TVNVLAWLY

SEQ ID NO: 2584 - protein, 9 aa, Severe acute respiratory syndrome coronavirus 2
  REGION 1..9: note = Table A: HLA-A*02:04H
NVLAWLYAA

SEQ ID NO: 2585 - protein, 9 aa, Severe acute respiratory syndrome coronavirus 2
  REGION 1..9: note = Table A: HLA-A*02:11H HLA-A*02:04H HLA-A*02:02H
VLAWLYAAV

SEQ ID NO: 2586 - protein, 9 aa, Severe acute respiratory syndrome coronavirus 2
  REGION 1..9: note = Table A: HLA-B*51:01H
LAWLYAAVI

SEQ ID NO: 2587 - protein, 9 aa, Severe acute respiratory syndrome coronavirus 2
  REGION 1..9: note = Table A: HLA-A*34:01H HLA-A*66:01H
YAAVINGDR

SEQ ID NO: 2588 - protein, 9 aa, Severe acute respiratory syndrome coronavirus 2
  REGION 1..9: note = Table A: HLA-B*58:01H HLA-B*44:05H HLA-B*57:01H HLA-B*44:03H HLA-B*53:01M HLA-B*15:13H HLA-B*38:02H HLA-B*57:03M HLA-B*13:01M
AAVINGDRW

SEQ ID NO: 2589 - protein, 9 aa, Severe acute respiratory syndrome coronavirus 2
  REGION 1..9: note = Table A: HLA-A*74:01H HLA-C*07:01H HLA-A*02:11H HLA-A*30:02H HLA-C*15:02H HLA-A*02:04M HLA-A*02:02M HLA-A*24:07H HLA-C*08:01M HLA-A*32:01H HLA-C*02:02H
VINGDRWFL

SEQ ID NO: 2590 - protein, 9 aa, Severe acute respiratory syndrome coronavirus 2
  REGION 1..9: note = Table A: HLA-C*14:03H HLA-A*11:303H HLA-B*46:01H HLA-B*08:01M HLA-C*03:03H HLA-A*02:11H HLA-C*03:02H HLA-C*03:04H HLA-A*68:02H HLA-B*35:03H HLA-C*15:05H HLA-C*01:02H HLA-C*12:02H HLA-C*15:02H HLA-A*02:04H
  REGION 1..9: note = CONT. FROM ABOVE: HLA-A*02:05H HLA-A*02:06H HLA-A*02:07H HLA- B*14:01H HLA-A*02:01M HLA-A*02:02H HLA-A*02:03H HLA-C*17:01H HLA-C*08:01H HLA-B*38:02M HLA-A*32:01H HLA-B*07:04H HLA-B*15 :01H HLA-B*15:02M HLA-B*15:03H HLA-B*13:01H HLA-B*13:02H
FLNRFTTTL

SEQ ID NO: 2591 - protein, 9 aa, Severe acute respiratory syndrome coronavirus 2
  REGION 1..9: note = Table A: HLA-C*14:03H HLA-A*24:02H HLA-A*24:07H HLA-A*23:01H
RFTTTLNDF

SEQ ID NO: 2592 - protein, 9 aa, Severe acute respiratory syndrome coronavirus 2
  REGION 1..9: note = Table A: HLA-A*68:02H
TTTLNDFNL

SEQ ID NO: 2593 - protein, 9 aa, Severe acute respiratory syndrome coronavirus 2
  REGION 1..9: note = Table A: HLA-A*68:02H HLA-A*02:06H
TTLNDFNLV

SEQ ID NO: 2594 - protein, 9 aa, Severe acute respiratory syndrome coronavirus 2
  REGION 1..9: note = Table A: HLA-A*02:03H HLA-B*38:02M HLA-B*39:06H
TLNDFNLVA

SEQ ID NO: 2595 - protein, 9 aa, Severe acute respiratory syndrome coronavirus 2
  REGION 1..9: note = Table A: HLA-B*27:02H HLA-A*34:02H
NDFNLVAMK

SEQ ID NO: 2596 - protein, 9 aa, Severe acute respiratory syndrome coronavirus 2
  REGION 1..9: note = Table A: HLA-A*29:01H HLA-A*29:02M HLA-B*18:01M HLA-A*30:02H HLA-B*35:01H HLA-B*38:02H HLA-B*15:02M HLA-B*07:05M
DFNLVAMKY

SEQ ID NO: 2597 - protein, 9 aa, Severe acute respiratory syndrome coronavirus 2
  REGION 1..9: note = Table A: HLA-B*49:01H
YEPLTQDHV

SEQ ID NO: 2598 - protein, 9 aa, Severe acute respiratory syndrome coronavirus 2
  REGION 1..9: note = Table A: HLA-B*38:01H HLA-B*38:02M HLA-B*39:01M HLA-B*15:10H
DHVDILGPL

SEQ ID NO: 2599 - protein, 9 aa, Severe acute respiratory syndrome coronavirus 2
  REGION 1..9: note = Table A: HLA-B*39:06H HLA-B*40:02H HLA-B*40:06H HLA-B*54:01H HLA-B*50:01M
VDILGPLSA

SEQ ID NO: 2600 - protein, 9 aa, Severe acute respiratory syndrome coronavirus 2
  REGION 1..9: note = Table A: HLA-A*02:11H HLA-A*02:04H HLA-A*02:05H HLA-A*02:01H HLA-A*02:02M HLA-A*02:03H
ILGPLSAQT

SEQ ID NO: 2601 - protein, 9 aa, Severe acute respiratory syndrome coronavirus 2
  REGION 1..9: note = Table A: HLA-C*15:05M HLA-B*07:05M
GPLSAQTGI

SEQ ID NO: 2602 - protein, 9 aa, Severe acute respiratory syndrome coronavirus 2
  REGION 1..9: note = Table A: HLA-A*11:303M HLA-C*03:03H HLA-C*12:05H HLA-C*03:04M HLA-B*35:03M HLA-C*15:05H HLA-C*12:03H HLA-C*07:27H HLA-B*35:02H HLA-C*17:01H HLA-C*08:01H HLA-B*35:12H HLA-B*38:02H HLA-B*39:01H HLA-C*07:04H
SAQTGIAVL

SEQ ID NO: 2603 - protein, 9 aa, Severe acute respiratory syndrome coronavirus 2
  REGION 1..9: note = Table A: HLA-A*11:303H HLA-A*02:11H HLA-C*15:05H HLA-A*02:06H HLA-A*02:01H HLA-B*38:02H HLA-B*07:05H
AVLDMCASL

SEQ ID NO: 2604 - protein, 9 aa, Severe acute respiratory syndrome coronavirus 2
  REGION 1..9: note = Table A: HLA-A*02:05H HLA-A*02:02H HLA-A*02:03H
SLKELLQNG

SEQ ID NO: 2605 - protein, 9 aa, Severe acute respiratory syndrome coronavirus 2
  REGION 1..9: note = Table A: HLA-A*74:01H
LLQNGMNGR

SEQ ID NO: 2606 - protein, 9 aa, Severe acute respiratory syndrome coronavirus 2
  REGION 1..9: note = Table A: HLA-B*07:02H HLA-B*07:04H
NGMNGRTIL

SEQ ID NO: 2607 - protein, 9 aa, Severe acute respiratory syndrome coronavirus 2
  REGION 1..9: note = Table A: HLA-B*27:05H HLA-B*27:02H HLA-B*14:01H
GRTILGSAL

SEQ ID NO: 2608 - protein, 9 aa, Severe acute respiratory syndrome coronavirus 2
  REGION 1..9: note = Table A: HLA-B*58:02H HLA-C*15:02H HLA-B*57:03M
RTILGSALL

SEQ ID NO: 2609 - protein, 9 aa, Severe acute respiratory syndrome coronavirus 2
  REGION 1..9: note = Table A: HLA-B*45:01H HLA-B*18:01M HLA-A*68:02H HLA-B*40:02H HLA-B*40:06H HLA-B*07:05M HLA-B*49:01M HLA-B*50:01H
DEFTPFDVV

SEQ ID NO: 2610 - protein, 9 aa, Severe acute respiratory syndrome coronavirus 2
  REGION 1..9: note = Table A: HLA-A*33:01H HLA-A*33:03M HLA-A*68:01H HLA-A*34:01H HLA-A*34:02H HLA-A*66:01H
EFTPFDVVR

SEQ ID NO: 2611 - protein, 9 aa, Severe acute respiratory syndrome coronavirus 2
  REGION 1..9: note = Table A: HLA-B*56:01M HLA-B*55:02M HLA-A*68:02H HLA-C*15:05M HLA-B*55:01M HLA-B*38:02H HLA-B*54:01M HLA-B*07:02H HLA-B*07:04H HLA-B*07:05H
TPFDVVRQC

SEQ ID NO: 2612 - protein, 9 aa, Severe acute respiratory syndrome coronavirus 2
  REGION 1..9: note = Table A: HLA-A*68:02H HLA-C*15:05H HLA-B*14:01H HLA-B*52:01H HLA-C*08:03H HLA-B*38:02H HLA-B*39:06H HLA-B*39:01H HLA-B*07:05H HLA-B*13:02H HLA-B*49:01H
SGVTFQSAV

SEQ ID NO: 2613 - protein, 9 aa, Severe acute respiratory syndrome coronavirus 2
  REGION 1..9: note = Table A: HLA-A*11:303H HLA-A*03:01H HLA-A*03:02M HLA-A*11:01M HLA-A*11:02M HLA-A*36:01M HLA-B*27:02H HLA-A*30:02H HLA-A*68:01H HLA-A*34:01H HLA-A*34:02M HLA-C*07:27M HLA-A*66:01H
GVTFQSAVK

SEQ ID NO: 2614 - protein, 9 aa, Severe acute respiratory syndrome coronavirus 2
  REGION 1..9: note = Table A: HLA-A*11:303H HLA-A*74:01H HLA-A*03:01H HLA-A*03:02H HLA-A*11:01M HLA-A*11:02H HLA-B*57:01H HLA-A*33:01H HLA-A*33:03M HLA-A*26:03H HLA-A*30:02H HLA-A*68:01H HLA-A*34:01M HLA-A*34:02H HLA-C*07:27M
  REGION 1..9: note = CONT. FROM ABOVE: HLA-A*31:01M HLA-B*57:03H HLA-A*66:01H
VTFQSAVKR

SEQ ID NO: 2615 - protein, 9 aa, Severe acute respiratory syndrome coronavirus 2
  REGION 1..9: note = Table A: HLA-B*58:02M HLA-A*02:05H HLA-B*52:01M HLA-B*38:02M HLA-B*13:01H HLA-B*13:02H
FQSAVKRTI

SEQ ID NO: 2616 - protein, 9 aa, Severe acute respiratory syndrome coronavirus 2
  REGION 1..9: note = Table A: HLA-B*58:01H HLA-B*58:02H HLA-B*57:01M HLA-A*32:01H HLA-B*57:03H HLA-B*13:01H
RTIKGTHHW

SEQ ID NO: 2617 - protein, 9 aa, Severe acute respiratory syndrome coronavirus 2
  REGION 1..9: note = Table A: HLA-C*15:02M
KGTHHWLLL

SEQ ID NO: 2618 - protein, 9 aa, Severe acute respiratory syndrome coronavirus 2
  REGION 1..9: note = Table A: HLA-B*38:01H HLA-B*38:02H HLA-B*15:10H
THHWLLLTI

SEQ ID NO: 2619 - protein, 9 aa, Severe acute respiratory syndrome coronavirus 2
  REGION 1..9: note = Table A: HLA-B*38:02H HLA-B*15:10H
HHWLLLTIL

SEQ ID NO: 2620 - protein, 9 aa, Severe acute respiratory syndrome coronavirus 2
  REGION 1..9: note = Table A: HLA-A*11:303H HLA-A*02:11M HLA-A*02:04H HLA-A*02:07H HLA-B*14:01H HLA-A*02:01M HLA-A*02:02H HLA-A*02:03H HLA-B*38:02H
LLLTILTSL

SEQ ID NO: 2621 - protein, 9 aa, Severe acute respiratory syndrome coronavirus 2
  REGION 1..9: note = Table A: HLA-A*02:02H
LLTILTSLL

SEQ ID NO: 2622 - protein, 9 aa, Severe acute respiratory syndrome coronavirus 2
  REGION 1..9: note = Table A: HLA-C*15:05H HLA-A*02:04H HLA-C*08:01H HLA-B*38:02H
TILTSLLVL

SEQ ID NO: 2623 - protein, 9 aa, Severe acute respiratory syndrome coronavirus 2
  REGION 1..9: note = Table A: HLA-A*02:11H HLA-A*68:02H HLA-A*02:04M HLA-A*02:06H HLA-A*02:07H HLA-A*02:01M HLA-A*02:02H HLA-A*02:03H HLA-B*38:02H HLA-B*13:02H
ILTSLLVLV

SEQ ID NO: 2624 - protein, 9 aa, Severe acute respiratory syndrome coronavirus 2
  REGION 1..9: note = Table A: HLA-B*58:01M HLA-B*57:01M HLA-A*25:01H HLA-B*53:01M HLA-A*24:02H HLA-B*15:13H HLA-B*38:02H HLA-B*57:03M
LVLVQSTQW

SEQ ID NO: 2625 - protein, 9 aa, Severe acute respiratory syndrome coronavirus 2
  REGION 1..9: note = Table A: HLA-C*15:02H
QSTQWSLFF

SEQ ID NO: 2626 - protein, 9 aa, Severe acute respiratory syndrome coronavirus 2
  REGION 1..9: note = Table A: HLA-A*02:11H HLA-A*02:04M HLA-C*08:01H HLA-B*40:06M HLA-B*13:02H
TQWSLFFFL

SEQ ID NO: 2627 - protein, 9 aa, Severe acute respiratory syndrome coronavirus 2
  REGION 1..9: note = Table A: HLA-A*29:02H
QWSLFFFLY

SEQ ID NO: 2628 - protein, 9 aa, Severe acute respiratory syndrome coronavirus 2
  REGION 1..9: note = Table A: HLA-C*14:02M HLA-C*14:03H HLA-B*46:01H HLA-A*29:02H HLA-C*04:01H HLA-C*04:03H HLA-A*24:07H
FFFLYENAF

SEQ ID NO: 2629 - protein, 9 aa, Severe acute respiratory syndrome coronavirus 2
  REGION 1..9: note = Table A: HLA-C*14:03H
FFLYENAFL

SEQ ID NO: 2630 - protein, 9 aa, Severe acute respiratory syndrome coronavirus 2
  REGION 1..9: note = Table A: HLA-B*45:01H HLA-B*40:06H HLA-B*49:01H HLA-B*50:01M
YENAFLPFA

SEQ ID NO: 2631 - protein, 9 aa, Severe acute respiratory syndrome coronavirus 2
  REGION 1..9: note = Table A: HLA-A*68:02H
ENAFLPFAM

SEQ ID NO: 2632 - protein, 9 aa, Severe acute respiratory syndrome coronavirus 2
  REGION 1..9: note = Table A: HLA-C*14:03H
AFLPFAMGI

SEQ ID NO: 2633 - protein, 9 aa, Severe acute respiratory syndrome coronavirus 2
  REGION 1..9: note = Table A: HLA-B*56:01H HLA-B*55:02H HLA-B*35:03H HLA-C*15:05H HLA-B*55:01M HLA-B*35:07H HLA-B*54:01H HLA-B*07:05H
LPFAMGIIA

SEQ ID NO: 2634 - protein, 9 aa, Severe acute respiratory syndrome coronavirus 2
  REGION 1..9: note = Table A: HLA-B*46:01H HLA-B*38:02H HLA-B*07:05H HLA-B*15:11H
MGIIAMSAF

SEQ ID NO: 2635 - protein, 9 aa, Severe acute respiratory syndrome coronavirus 2
  REGION 1..9: note = Table A: HLA-C*03:02H HLA-C*03:04H HLA-C*15:05H HLA-B*07:05H
IAMSAFAMM

SEQ ID NO: 2636 - protein, 9 aa, Severe acute respiratory syndrome coronavirus 2
  REGION 1..9: note = Table A: HLA-B*38:02H HLA-B*07:05H
AMSAFAMMF

SEQ ID NO: 2637 - protein, 9 aa, Severe acute respiratory syndrome coronavirus 2
  REGION 1..9: note = Table A: HLA-A*68:02H HLA-C*15:02H
MSAFAMMFV

SEQ ID NO: 2638 - protein, 9 aa, Severe acute respiratory syndrome coronavirus 2
  REGION 1..9: note = Table A: HLA-A*11:01M HLA-A*11:02M HLA-A*34:02M
SAFAMMFVK

SEQ ID NO: 2639 - protein, 9 aa, Severe acute respiratory syndrome coronavirus 2
  REGION 1..9: note = Table A: HLA-A*33:03H HLA-A*34:02M HLA-A*66:01H
FAMMFVKHK

SEQ ID NO: 2640 - protein, 9 aa, Severe acute respiratory syndrome coronavirus 2
  REGION 1..9: note = Table A: HLA-A*30:02H
AMMFVKHKH

SEQ ID NO: 2641 - protein, 9 aa, Severe acute respiratory syndrome coronavirus 2
  REGION 1..9: note = Table A: HLA-A*02:11H
MMFVKHKHA

SEQ ID NO: 2642 - protein, 9 aa, Severe acute respiratory syndrome coronavirus 2
  REGION 1..9: note = Table A: HLA-A*24:07M HLA-A*23:01H
MFVKHKHAF

SEQ ID NO: 2643 - protein, 9 aa, Severe acute respiratory syndrome coronavirus 2
  REGION 1..9: note = Table A: HLA-B*08:01M HLA-A*02:02H HLA-B*07:04H HLA-C*02:02H HLA-A*66:01H
FVKHKHAFL

SEQ ID NO: 2644 - protein, 9 aa, Severe acute respiratory syndrome coronavirus 2
  REGION 1..9: note = Table A: HLA-A*11:303M HLA-B*46:01H HLA-A*02:11H HLA-C*03:02H HLA-A*68:02H HLA-C*15:05H HLA-A*02:04H HLA-A*02:05M HLA-A*02:06H HLA-A*02:07H HLA-B*14:01M HLA-A*02:01H HLA-A*02:02H HLA-A*02:03H HLA-C*08:01H
  REGION 1..9: note = CONT. FROM ABOVE: HLA-B*38:02H HLA-B*40:06H HLA-B*54:01H HLA- B*13:02M HLA-B*49:01H
FLLPSLATV

SEQ ID NO: 2645 - protein, 9 aa, Severe acute respiratory syndrome coronavirus 2
  REGION 1..9: note = Table A: HLA-B*53:01H HLA-B*55:02H HLA-B*35:03H HLA-C*15:05H HLA-B*35:01H HLA-B*35:08H HLA-B*35:07H HLA-B*38:02H HLA-B*54:01H HLA-B*15:01H HLA-B*15:02H HLA-B*07:05M HLA-B*15:11H
LPSLATVAY

SEQ ID NO: 2646 - protein, 9 aa, Severe acute respiratory syndrome coronavirus 2
  REGION 1..9: note = Table A: HLA-A*68:02H HLA-C*15:02H HLA-A*02:05H HLA-A*02:06H HLA-B*40:06H
ATVAYFNMV

SEQ ID NO: 2647 - protein, 9 aa, Severe acute respiratory syndrome coronavirus 2
  REGION 1..9: note = Table A: HLA-A*36:01H HLA-A*26:01H HLA-A*29:01H HLA-A*29:02M HLA-A*30:02H HLA-A*34:02H HLA-B*35:01H HLA-B*35:07H HLA-B*38:02M HLA-B*15:01H HLA-B*15:02H HLA-B*07:05H
TVAYFNMVY

SEQ ID NO: 2648 - protein, 9 aa, Severe acute respiratory syndrome coronavirus 2
  REGION 1..9: note = Table A: HLA-C*03:04H HLA-C*12:03H HLA-C*17:01M HLA-C*08:01H
VAYFNMVYM

SEQ ID NO: 2649 - protein, 9 aa, Severe acute respiratory syndrome coronavirus 2
  REGION 1..9: note = Table A: HLA-B*15:13H HLA-B*38:02H
NMVYMPASW

SEQ ID NO: 2650 - protein, 9 aa, Severe acute respiratory syndrome coronavirus 2
  REGION 1..9: note = Table A: HLA-C*14:02H HLA-C*14:03H HLA-A*29:02H HLA-C*04:01H HLA-C*07:01H HLA-C*07:02M HLA-A*30:02H HLA-A*24:02H HLA-A*24:07H HLA-C*08:01H HLA-A*23:01H HLA-C*07:04H
VYMPASWVM

SEQ ID NO: 2651 - protein, 9 aa, Severe acute respiratory syndrome coronavirus 2
  REGION 1..9: note = Table A: HLA-B*53:01H HLA-A*68:02H HLA-B*35:03H HLA-C*15:05H HLA-A*34:01H HLA-A*34:02H HLA-B*51:01H HLA-B*35:07H HLA-B*38:02H HLA-B*54:01H HLA-B*07:04H
MPASWVMRI

SEQ ID NO: 2652 - protein, 9 aa, Severe acute respiratory syndrome coronavirus 2
  REGION 1..9: note = Table A: HLA-B*07:04H
PASWVMRIM

SEQ ID NO: 2653 - protein, 9 aa, Severe acute respiratory syndrome coronavirus 2
  REGION 1..9: note = Table A: HLA-A*24:02H HLA-A*24:07H
SWVMRIMTW

SEQ ID NO: 2654 - protein, 9 aa, Severe acute respiratory syndrome coronavirus 2
  REGION 1..9: note = Table A: HLA-A*02:11M HLA-C*15:02H HLA-A*02:04M HLA-A*02:06H
RIMTWLDMV

SEQ ID NO: 2655 - protein, 9 aa, Severe acute respiratory syndrome coronavirus 2
  REGION 1..9: note = Table A: HLA-A*02:07M HLA-A*02:01H HLA-C*08:02H HLA-B*38:02H HLA-B*13:01H
WLDMVDTSL

SEQ ID NO: 2656 - protein, 9 aa, Severe acute respiratory syndrome coronavirus 2
  REGION 1..9: note = Table A: HLA-A*11:303H HLA-A*26:02H HLA-C*04:03M HLA-C*15:05H HLA-A*02:07M HLA-A*34:02H HLA-B*35:08H HLA-C*08:02H HLA-B*38:02M HLA-B*15:02H HLA-B*39:01H HLA-C*05:01H
MVDTSLSGF

SEQ ID NO: 2657 - protein, 9 aa, Severe acute respiratory syndrome coronavirus 2
  REGION 1..9: note = Table A: HLA-A*36:01H
VDTSLSGFK

SEQ ID NO: 2658 - protein, 9 aa, Severe acute respiratory syndrome coronavirus 2
  REGION 1..9: note = Table A: HLA-A*68:01H HLA-A*68:02H HLA-A*34:01H HLA-A*34:02H HLA-A*66:01M
DTSLSGFKL

SEQ ID NO: 2659 - protein, 9 aa, Severe acute respiratory syndrome coronavirus 2
  REGION 1..9: note = Table A: HLA-A*11:01H HLA-A*11:02H HLA-A*34:02M
TSLSGFKLK

SEQ ID NO: 2660 - protein, 9 aa, Severe acute respiratory syndrome coronavirus 2
  REGION 1..9: note = Table A: HLA-B*08:01H
GFKLKDCVM

SEQ ID NO: 2661 - protein, 9 aa, Severe acute respiratory syndrome coronavirus 2
  REGION 1..9: note = Table A: HLA-B*15:03M
FKLKDCVMY

SEQ ID NO: 2662 - protein, 9 aa, Severe acute respiratory syndrome coronavirus 2
  REGION 1..9: note = Table A: HLA-A*02:03M HLA-B*38:02H
KLKDCVMYA

SEQ ID NO: 2663 - protein, 9 aa, Severe acute respiratory syndrome coronavirus 2
  REGION 1..9: note = Table A: HLA-C*15:05H HLA-B*38:02H
VMYASAVVL

SEQ ID NO: 2664 - protein, 9 aa, Severe acute respiratory syndrome coronavirus 2
  REGION 1..9: note = Table A: HLA-A*24:02H HLA-A*24:07H HLA-A*23:01H
MYASAVVLL

SEQ ID NO: 2665 - protein, 9 aa, Severe acute respiratory syndrome coronavirus 2
  REGION 1..9: note = Table A: HLA-C*16:04H HLA-C*12:05M HLA-B*53:01M HLA-A*68:02M HLA-B*35:03H HLA-C*15:05H HLA-C*12:03H HLA-C*15:02M HLA-B*51:01M HLA-C*17:01H HLA-C*08:01H HLA-B*38:02M HLA-B*13:02M
YASAVVLLI

SEQ ID NO: 2666 - protein, 9 aa, Severe acute respiratory syndrome coronavirus 2
  REGION 1..9: note = Table A: HLA-C*15:05H HLA-C*15:02M HLA-B*57:03H
ASAVVLLIL

SEQ ID NO: 2667 - protein, 9 aa, Severe acute respiratory syndrome coronavirus 2
  REGION 1..9: note = Table A: HLA-C*12:05H HLA-C*12:03H HLA-B*35:01H HLA-C*17:01H HLA-C*08:01H HLA-B*57:03H HLA-C*07:04H
SAVVLLILM

SEQ ID NO: 2668 - protein, 9 aa, Severe acute respiratory syndrome coronavirus 2
  REGION 1..9: note = Table A: HLA-B*40:06H HLA-B*13:02H
AVVLLILMT

SEQ ID NO: 2669 - protein, 9 aa, Severe acute respiratory syndrome coronavirus 2
  REGION 1..9: note = Table A: HLA-B*56:01H HLA-A*02:11H HLA-B*55:02H HLA-C*08:01H HLA-B*54:01H
VVLLILMTA

SEQ ID NO: 2670 - protein, 9 aa, Severe acute respiratory syndrome coronavirus 2
  REGION 1..9: note = Table A: HLA-A*74:01H
VLLILMTAR

SEQ ID NO: 2671 - protein, 9 aa, Severe acute respiratory syndrome coronavirus 2
  REGION 1..9: note = Table A: HLA-B*46:01M HLA-A*30:02H HLA-C*12:02H HLA-B*38:02M HLA-B*15:01M HLA-B*15:02H HLA-B*15:03H HLA-B*07:05H
ILMTARTVY

SEQ ID NO: 2672 - protein, 9 aa, Severe acute respiratory syndrome coronavirus 2
  REGION 1..9: note = Table A: HLA-A*36:01H
RTVYDDGAR

SEQ ID NO: 2673 - protein, 9 aa, Severe acute respiratory syndrome coronavirus 2
  REGION 1..9: note = Table A: HLA-A*74:01M HLA-A*11:01H HLA-A*11:02H HLA-A*33:01H HLA-A*33:03M HLA-A*26:03M HLA-A*68:01M HLA-A*34:01H HLA-A*34:02M HLA-A*66:01H
TVYDDGARR

SEQ ID NO: 2674 - protein, 9 aa, Severe acute respiratory syndrome coronavirus 2
  REGION 1..9: note = Table A: HLA-C*04:01H HLA-C*04:03H
VYDDGARRV

SEQ ID NO: 2675 - protein, 9 aa, Severe acute respiratory syndrome coronavirus 2
  REGION 1..9: note = Table A: HLA-B*08:01M HLA-B*14:02M
DGARRVWTL

SEQ ID NO: 2676 - protein, 9 aa, Severe acute respiratory syndrome coronavirus 2
  REGION 1..9: note = Table A: HLA-B*27:05H
RRVWTLMNV

SEQ ID NO: 2677 - protein, 9 aa, Severe acute respiratory syndrome coronavirus 2
  REGION 1..9: note = Table A: HLA-A*02:11H HLA-B*57:03H
RVWTLMNVL

SEQ ID NO: 2678 - protein, 9 aa, Severe acute respiratory syndrome coronavirus 2
  REGION 1..9: note = Table A: HLA-A*02:11H HLA-A*68:02H HLA-A*02:04M HLA-A*02:07H HLA-A*02:01M HLA-A*02:02H HLA-A*02:03M HLA-B*38:02M HLA-B*13:02H
TLMNVLTLV

SEQ ID NO: 2679 - protein, 9 aa, Severe acute respiratory syndrome coronavirus 2
  REGION 1..9: note = Table A: HLA-A*29:01M HLA-A*29:02M HLA-A*30:02H HLA-B*38:02H HLA-B*15:01H HLA-B*15:02H HLA-B*07:05H
LMNVLTLVY

SEQ ID NO: 2680 - protein, 9 aa, Severe acute respiratory syndrome coronavirus 2
  REGION 1..9: note = Table A: HLA-A*34:02H
MNVLTLVYK

SEQ ID NO: 2681 - protein, 9 aa, Severe acute respiratory syndrome coronavirus 2
  REGION 1..9: note = Table A: HLA-A*02:11H HLA-A*68:02M HLA-A*02:04M HLA-A*02:06M HLA-A*02:07H HLA-A*02:01H HLA-A*02:02H
NVLTLVYKV

SEQ ID NO: 2682 - protein, 9 aa, Severe acute respiratory syndrome coronavirus 2
  REGION 1..9: note = Table A: HLA-B*58:01H HLA-A*36:01H HLA-B*57:01H HLA-A*29:02H HLA-A*30:02H HLA-B*57:03H
LTLVYKVYY

SEQ ID NO: 2683 - protein, 9 aa, Severe acute respiratory syndrome coronavirus 2
  REGION 1..9: note = Table A: HLA-B*15:03H HLA-B*15:10H
YKVYYGNAL

SEQ ID NO: 2684 - protein, 9 aa, Severe acute respiratory syndrome coronavirus 2
  REGION 1..9: note = Table A: HLA-B*38:02H HLA-B*39:01H HLA-B*13:02M
YGNALDQAI

SEQ ID NO: 2685 - protein, 9 aa, Severe acute respiratory syndrome coronavirus 2
  REGION 1..9: note = Table A: HLA-A*11:303M HLA-C*16:01H HLA-C*16:04H HLA-C*03:03H HLA-B*53:01H HLA-C*03:02H HLA-C*03:04H HLA-B*35:03H HLA-C*15:05H HLA-C*12:03H HLA-B*35:01H HLA-B*35:02M HLA-B*35:08M HLA-B*51:01H HLA-B*35:07H
  REGION 1..9: note = CONT. FROM ABOVE: HLA-C*08:01M HLA-B*35:12M HLA-B*38:02M HLA- B*15:02M HLA-B*39:01H HLA-B*07:05M HLA-C*07:04H
NALDQAISM

SEQ ID NO: 2686 - protein, 9 aa, Severe acute respiratory syndrome coronavirus 2
  REGION 1..9: note = Table A: HLA-B*58:01H HLA-B*44:05H HLA-A*02:07H HLA-B*38:02H HLA-B*13:01M
ALDQAISMW

SEQ ID NO: 2687 - protein, 9 aa, Severe acute respiratory syndrome coronavirus 2
  REGION 1..9: note = Table A: HLA-B*38:02H HLA-B*39:01H
DQAISMWAL

SEQ ID NO: 2688 - protein, 9 aa, Severe acute respiratory syndrome coronavirus 2
  REGION 1..9: note = Table A: HLA-A*02:11H HLA-A*02:04M HLA-A*02:06H HLA-A*02:07M HLA-A*02:01M HLA-A*02:03H HLA-B*52:01H HLA-B*38:02H HLA-B*40:06H HLA-B*13:02H
SMWALIISV

SEQ ID NO: 2689 - protein, 9 aa, Severe acute respiratory syndrome coronavirus 2
  REGION 1..9: note = Table A: HLA-B*58:01H HLA-A*11:303M HLA-B*46:01H HLA-A*26:01M HLA-A*26:02H HLA-A*26:03M HLA-A*29:01M HLA-A*29:02M HLA-C*03:02M HLA-A*30:02H HLA-C*15:05H HLA-C*12:02M HLA-A*02:03H HLA-A*34:01H HLA-A*34:02H
  REGION 1..9: note = CONT. FROM ABOVE: HLA-C*07:27H HLA-B*35:01H HLA-B*38:02H HLA- B*15:01H HLA-B*15:02M HLA-B*15:03H HLA-B*07:05H HLA-C*02:02M HLA-B*15:11H
LIISVTSNY

SEQ ID NO: 2690 - protein, 9 aa, Severe acute respiratory syndrome coronavirus 2
  REGION 1..9: note = Table A: HLA-B*39:01H
SNYSGVVTT

SEQ ID NO: 2691 - protein, 9 aa, Severe acute respiratory syndrome coronavirus 2
  REGION 1..9: note = Table A: HLA-C*14:02H HLA-C*14:03M HLA-A*33:03H HLA-C*06:02H HLA-C*04:01H HLA-C*07:02H HLA-A*02:11H HLA-A*68:02M HLA-C*15:05H HLA-A*02:04H HLA-A*02:05H HLA-A*02:06H HLA-B*14:01H HLA-A*02:01M HLA-A*02:02M HLA-A*02:03M
  REGION 1..9: note = CONT. FROM ABOVE: HLA-A*24:02M HLA-B*51:01H HLA-A*24:07H HLA- C*08:01M HLA-A*23:01M HLA-B*38:02M HLA-B*39:01M HLA-B*07:05H HLA-B*13:02H
NYSGVVTTV

SEQ ID NO: 2692 - protein, 9 aa, Severe acute respiratory syndrome coronavirus 2
  REGION 1..9: note = Table A: HLA-A*11:303H HLA-B*46:01H HLA-C*03:04H HLA-B*35:03H HLA-C*15:05M HLA-C*12:02H HLA-B*35:01H HLA-B*38:02H HLA-B*15:02H HLA-B*07:05H HLA-C*07:04H
YSGVVTTVM

SEQ ID NO: 2693 - protein, 9 aa, Severe acute respiratory syndrome coronavirus 2
  REGION 1..9: note = Table A: HLA-A*68:02H HLA-C*15:05H HLA-C*15:02H HLA-A*02:04H HLA-A*02:05H HLA-A*02:06M HLA-A*02:08H HLA-A*02:01H HLA-A*02:03H HLA-C*17:01H HLA-C*08:01H HLA-B*38:02H HLA-B*40:06H HLA-B*13:02H HLA-C*07:04H
GVVTTVMFL

SEQ ID NO: 2694 - protein, 9 aa, Severe acute respiratory syndrome coronavirus 2
  REGION 1..9: note = Table A: HLA-A*68:02H HLA-A*02:06H
VVTTVMFLA

SEQ ID NO: 2695 - protein, 9 aa, Severe acute respiratory syndrome coronavirus 2
  REGION 1..9: note = Table A: HLA-A*36:01H HLA-A*34:02H HLA-A*66:01H
VTTVMFLAR

SEQ ID NO: 2696 - protein, 9 aa, Severe acute respiratory syndrome coronavirus 2
  REGION 1..9: note = Table A: HLA-C*14:02M HLA-C*14:03M HLA-A*24:07M HLA-A*23:01H HLA-B*15:02H
MFLARGIVF

SEQ ID NO: 2697 - protein, 9 aa, Severe acute respiratory syndrome coronavirus 2
  REGION 1..9: note = Table A: HLA-A*02:11M HLA-A*02:04M HLA-A*02:05H HLA-A*02:01H HLA-A*02:02H HLA-A*02:03H HLA-C*17:01M HLA-B*38:02H
FLARGIVFM

SEQ ID NO: 2698 - protein, 9 aa, Severe acute respiratory syndrome coronavirus 2
  REGION 1..9: note = Table A: HLA-A*29:02H
GIVFMCVEY

SEQ ID NO: 2699 - protein, 9 aa, Severe acute respiratory syndrome coronavirus 2
  REGION 1..9: note = Table A: HLA-C*04:03H
CVEYCPIFF

SEQ ID NO: 2700 - protein, 9 aa, Severe acute respiratory syndrome coronavirus 2
  REGION 1..9: note = Table A: HLA-B*49:01H
VEYCPIFFI

SEQ ID NO: 2701 - protein, 9 aa, Severe acute respiratory syndrome coronavirus 2
  REGION 1..9: note = Table A: HLA-C*14:02M HLA-C*14:03H HLA-A*24:02H HLA-A*24:07M HLA-A*23:01H HLA-B*07:05H
IFFITGNTL

SEQ ID NO: 2702 - protein, 9 aa, Severe acute respiratory syndrome coronavirus 2
  REGION 1..9: note = Table A: HLA-B*38:02H HLA-B*15:02M
TLQCIMLVY

SEQ ID NO: 2703 - protein, 9 aa, Severe acute respiratory syndrome coronavirus 2
  REGION 1..9: note = Table A: HLA-A*02:04H
CLLNRYFRL

SEQ ID NO: 2704 - protein, 9 aa, Severe acute respiratory syndrome coronavirus 2
  REGION 1..9: note = Table A: HLA-A*02:11H HLA-A*68:02H HLA-A*02:04H HLA-C*08:01H
LTLGVYDYL

SEQ ID NO: 2705 - protein, 9 aa, Severe acute respiratory syndrome coronavirus 2
  REGION 1..9: note = Table A: HLA-A*02:04H
TLGVYDYLV

SEQ ID NO: 2706 - protein, 9 aa, Severe acute respiratory syndrome coronavirus 2
  REGION 1..9: note = Table A: HLA-A*68:02H HLA-A*02:04H HLA-A*02:05H HLA-A*02:06H HLA-A*02:01H HLA-B*40:06H
GVYDYLVST

SEQ ID NO: 2707 - protein, 9 aa, Severe acute respiratory syndrome coronavirus 2
  REGION 1..9: note = Table A: HLA-C*14:02H HLA-C*14:03M HLA-A*33:03H HLA-B*18:01H HLA-A*24:02H HLA-A*24:07M HLA-A*23:01H HLA-B*38:02H HLA-B*15:02H HLA-B*39:01H HLA-B*07:05H
DYLVSTQEF

SEQ ID NO: 2708 - protein, 9 aa, Severe acute respiratory syndrome coronavirus 2
  REGION 1..9: note = Table A: HLA-A*34:01H HLA-A*66:01H
YLVSTQEFR

SEQ ID NO: 2709 - protein, 9 aa, Severe acute respiratory syndrome coronavirus 2
  REGION 1..9: note = Table A: HLA-B*58:01H HLA-A*36:01M HLA-A*29:01M HLA-A*29:02M HLA-A*30:02M HLA-C*15:05H HLA-B*38:02H
LVSTQEFRY

SEQ ID NO: 2710 - protein, 9 aa, Severe acute respiratory syndrome coronavirus 2
  REGION 1..9: note = Table A: HLA-B*58:02M HLA-C*16:01H HLA-C*15:02H
VSTQEFRYM

SEQ ID NO: 2711 - protein, 9 aa, Severe acute respiratory syndrome coronavirus 2
  REGION 1..9: note = Table A: HLA-C*06:02H HLA-B*27:02H HLA-B*14:02M HLA-B*14:01M HLA-B*38:02H HLA-B*39:01H
FRYMNSQGL

SEQ ID NO: 2712 - protein, 9 aa, Severe acute respiratory syndrome coronavirus 2
  REGION 1..9: note = Table A: HLA-A*24:02H HLA-A*24:07H
RYMNSQGLL

SEQ ID NO: 2713 - protein, 9 aa, Severe acute respiratory syndrome coronavirus 2
  REGION 1..9: note = Table A: HLA-A*11:303H HLA-A*03:02M HLA-A*11:01M HLA-A*11:02M HLA-A*33:03H HLA-A*68:01H HLA-A*34:02M HLA-C*07:27H
NSQGLLPPK

SEQ ID NO: 2714 - protein, 9 aa, Severe acute respiratory syndrome coronavirus 2
  REGION 1..9: note = Table A: HLA-A*02:11H HLA-B*38:02H HLA-B*13:02H
GLLPPKNSI

SEQ ID NO: 2715 - protein, 9 aa, Severe acute respiratory syndrome coronavirus 2
  REGION 1..9: note = Table A: HLA-B*54:01H
LPPKNSIDA

SEQ ID NO: 2716 - protein, 9 aa, Severe acute respiratory syndrome coronavirus 2
  REGION 1..9: note = Table A: HLA-B*07:04H
PPKNSIDAF

SEQ ID NO: 2717 - protein, 9 aa, Severe acute respiratory syndrome coronavirus 2
  REGION 1..9: note = Table A: HLA-A*02:07H HLA-B*13:02H
SIDAFKLNI

SEQ ID NO: 2718 - protein, 9 aa, Severe acute respiratory syndrome coronavirus 2
  REGION 1..9: note = Table A: HLA-A*33:01H HLA-B*53:01H HLA-A*68:01H HLA-A*68:02M HLA-B*35:03H HLA-C*15:05H HLA-A*34:02H HLA-B*51:01H HLA-B*35:07H HLA-B*38:02H HLA-B*57:03H
DAFKLNIKL

SEQ ID NO: 2719 - protein, 9 aa, Severe acute respiratory syndrome coronavirus 2
  REGION 1..9: note = Table A: HLA-B*07:04H
AFKLNIKLL

SEQ ID NO: 2720 - protein, 9 aa, Severe acute respiratory syndrome coronavirus 2
  REGION 1..9: note = Table A: HLA-A*74:01H HLA-B*08:01H HLA-A*02:11H HLA-C*15:02M HLA-A*02:04M HLA-A*02:06H HLA-A*02:07H HLA-A*02:08H HLA-A*02:01H HLA-A*02:02H HLA-A*02:03H HLA-B*38:02H HLA-B*40:06H HLA-B*13:02M
KLNIKLLGV

SEQ ID NO: 2721 - protein, 9 aa, Severe acute respiratory syndrome coronavirus 2
  REGION 1..9: note = Table A: HLA-B*56:01H HLA-B*55:02H HLA-C*15:05H HLA-B*55:01H HLA-B*07:04H
KPCIKVATV

SEQ ID NO: 2722 - protein, 9 aa, Severe acute respiratory syndrome coronavirus 2
  REGION 1..9: note = Table A: HLA-B*58:01H HLA-A*02:11H HLA-A*30:02H HLA-C*15:05H HLA-A*02:05H HLA-A*02:08M HLA-A*02:02M HLA-B*07:05H HLA-B*57:03M HLA-B*13:02H
KVATVQSKM

SEQ ID NO: 2723 - protein, 9 aa, Severe acute respiratory syndrome coronavirus 2
  REGION 1..9: note = Table A: HLA-A*02:03H
TVQSKMSDV

SEQ ID NO: 2724 - protein, 9 aa, Severe acute respiratory syndrome coronavirus 2
  REGION 1..9: note = Table A: HLA-C*08:02H HLA-C*05:01H
MSDVKCTSV

SEQ ID NO: 2725 - protein, 9 aa, Severe acute respiratory syndrome coronavirus 2
  REGION 1..9: note = Table A: HLA-B*15:02H
DVKCTSVVL

SEQ ID NO: 2726 - protein, 9 aa, Severe acute respiratory syndrome coronavirus 2
  REGION 1..9: note = Table A: HLA-A*68:02H HLA-C*15:05H HLA-C*15:02H HLA-B*13:02H
CTSVVLLSV

SEQ ID NO: 2727 - protein, 9 aa, Severe acute respiratory syndrome coronavirus 2
  REGION 1..9: note = Table A: HLA-C*15:05H HLA-B*38:02H
TSVVLLSVL

SEQ ID NO: 2728 - protein, 9 aa, Severe acute respiratory syndrome coronavirus 2
  REGION 1..9: note = Table A: HLA-A*11:303H HLA-A*02:11H HLA-A*02:04H HLA-A*02:06H HLA-A*02:07M HLA-B*14:01M HLA-A*02:01H HLA-A*02:02M HLA-A*02:03H HLA-C*08:01H HLA-B*38:02H HLA-B*13:02H
VLLSVLQQL

SEQ ID NO: 2729 - protein, 9 aa, Severe acute respiratory syndrome coronavirus 2
  REGION 1..9: note = Table A: HLA-B*14:02H HLA-B*14:01H HLA-B*38:02H HLA-B*39:01H
LRVESSSKL

SEQ ID NO: 2730 - protein, 9 aa, Severe acute respiratory syndrome coronavirus 2
  REGION 1..9: note = Table A: HLA-B*58:01H HLA-B*58:02H HLA-B*57:01H HLA-B*53:01H HLA-A*32:01H HLA-B*57:03M HLA-B*13:01M
RVESSSKLW

SEQ ID NO: 2731 - protein, 9 aa, Severe acute respiratory syndrome coronavirus 2
  REGION 1..9: note = Table A: HLA-B*45:01H HLA-B*49:01H HLA-B*50:01H
VESSSKLWA

SEQ ID NO: 2732 - protein, 9 aa, Severe acute respiratory syndrome coronavirus 2
  REGION 1..9: note = Table A: HLA-A*02:11H HLA-A*02:04H HLA-A*02:07H HLA-A*02:01M HLA-A*02:02H HLA-B*13:02H
KLWAQCVQL

SEQ ID NO: 2733 - protein, 9 aa, Severe acute respiratory syndrome coronavirus 2
  REGION 1..9: note = Table A: HLA-A*02:04H HLA-A*02:06M HLA-A*02:01H HLA-C*08:01H HLA-B*38:02H HLA-B*13:01M HLA-B*13:02H
VQLHNDILL

SEQ ID NO: 2734 - protein, 9 aa, Severe acute respiratory syndrome coronavirus 2
  REGION 1..9: note = Table A: HLA-A*02:05H HLA-A*02:01H HLA-A*02:02H HLA-A*02:03H HLA-B*38:02M
QLHNDILLA

SEQ ID NO: 2735 - protein, 9 aa, Severe acute respiratory syndrome coronavirus 2
  REGION 1..9: note = Table A: HLA-A*11:01H HLA-A*11:02H HLA-A*34:02H
LHNDILLAK

SEQ ID NO: 2736 - protein, 9 aa, Severe acute respiratory syndrome coronavirus 2
  REGION 1..9: note = Table A: HLA-A*02:05H HLA-A*02:01H HLA-A*02:02M HLA-A*02:03H HLA-B*38:02H
LLAKDTTEA

SEQ ID NO: 2737 - protein, 9 aa, Severe acute respiratory syndrome coronavirus 2
  REGION 1..9: note = Table A: HLA-A*11:303M HLA-C*16:04H HLA-B*57:01H HLA-A*25:01H HLA-B*46:01H HLA-B*08:01H HLA-B*53:01H HLA-C*03:02M HLA-C*12:02H HLA-C*07:27H HLA-B*35:01M HLA-B*35:07M HLA-C*08:01H HLA-B*38:02M HLA-B*07:04H
  REGION 1..9: note = CONT. FROM ABOVE: HLA-B*15:01M HLA-B*15:02M HLA-B*15:03H HLA- B*57:03M HLA-C*02:02M HLA-B*15:11M
LAKDTTEAF

SEQ ID NO: 2738 - protein, 9 aa, Severe acute respiratory syndrome coronavirus 2
  REGION 1..9: note = Table A: HLA-A*25:01H HLA-A*26:01H HLA-A*26:02M HLA-A*26:03H HLA-A*68:01H HLA-A*68:02M HLA-C*15:05H HLA-A*34:01H HLA-A*34:02H HLA-B*35:02H HLA-A*66:01M
DTTEAFEKM

SEQ ID NO: 2739 - protein, 9 aa, Severe acute respiratory syndrome coronavirus 2
  REGION 1..9: note = Table A: HLA-A*68:02H
TTEAFEKMV

SEQ ID NO: 2740 - protein, 9 aa, Severe acute respiratory syndrome coronavirus 2
  REGION 1..9: note = Table A: HLA-B*45:01H HLA-B*50:01H
TEAFEKMVS

SEQ ID NO: 2741 - protein, 9 aa, Severe acute respiratory syndrome coronavirus 2
  REGION 1..9: note = Table A: HLA-A*11:303H HLA-A*25:01M HLA-B*46:01H HLA-A*26:01H HLA-A*26:02H HLA-A*26:03H HLA-B*08:01H HLA-C*03:03H HLA-C*12:05H HLA-B*53:01M HLA-C*03:02H HLA-C*03:04H HLA-A*68:02H HLA-B*35:03M HLA-C*15:05H
  REGION 1..9: note = CONT. FROM ABOVE: HLA-B*14:02M HLA-C*12:02H HLA-C*12:03M HLA- A*02:05H HLA-A*34:01M HLA-A*34:02H HLA-B*35:01M HLA-B*35:02H HLA-B*51:01H HLA-C*17:01H HLA-B*35:07M HLA-C*08:01H HLA-B*35 :12H HLA-B*38:02M HLA-B*54:01H HLA-B*15:02M HLA-B*39:01H
  REGION 1..9: note = CONT. FROM ABOVE: HLA-B*07:05H HLA-A*66:01H
EAFEKMVSL

SEQ ID NO: 2742 - protein, 9 aa, Severe acute respiratory syndrome coronavirus 2
  REGION 1..9: note = Table A: HLA-C*04:01H HLA-C*04:03M
AFEKMVSLL

SEQ ID NO: 2743 - protein, 9 aa, Severe acute respiratory syndrome coronavirus 2
  REGION 1..9: note = Table A: HLA-A*02:11H HLA-A*02:02H
KMVSLLSVL

SEQ ID NO: 2744 - protein, 9 aa, Severe acute respiratory syndrome coronavirus 2
  REGION 1..9: note = Table A: HLA-A*68:02H
MVSLLSVLL

SEQ ID NO: 2745 - protein, 9 aa, Severe acute respiratory syndrome coronavirus 2
  REGION 1..9: note = Table A: HLA-A*29:02H HLA-A*02:11H HLA-C*15:05H HLA-A*02:04M HLA-A*02:01H HLA-B*38:02H HLA-B*15:02H HLA-B*13:02H
SLLSVLLSM

SEQ ID NO: 2746 - protein, 9 aa, Severe acute respiratory syndrome coronavirus 2
  REGION 1..9: note = Table A: HLA-A*02:06H
SVLLSMQGA

SEQ ID NO: 2747 - protein, 9 aa, Severe acute respiratory syndrome coronavirus 2
  REGION 1..9: note = Table A: HLA-A*03:02H HLA-A*11:01H HLA-A*11:02H HLA-B*27:02H HLA-A*34:02H
MQGAVDINK

SEQ ID NO: 2748 - protein, 9 aa, Severe acute respiratory syndrome coronavirus 2
  REGION 1..9: note = Table A: HLA-A*02:05M HLA-A*02:02H HLA-B*35:02H HLA-B*38:02H HLA-B*39:01H
QGAVDINKL

SEQ ID NO: 2749 - protein, 9 aa, Severe acute respiratory syndrome coronavirus 2
  REGION 1..9: note = Table A: HLA-B*45:01H
CEEMLDNRA

SEQ ID NO: 2750 - protein, 9 aa, Severe acute respiratory syndrome coronavirus 2
  REGION 1..9: note = Table A: HLA-B*45:01H
EEMLDNRAT

SEQ ID NO: 2751 - protein, 9 aa, Severe acute respiratory syndrome coronavirus 2
  REGION 1..9: note = Table A: HLA-B*44:05H HLA-A*33:03H HLA-A*26:03H HLA-B*08:01M HLA-A*02:11H HLA-A*68:02H HLA-C*15:05H HLA-B*14:02H HLA-B*14:01H HLA-A*02:02H HLA-A*34:01H HLA-B*38:02M HLA-B*15:02H HLA-B*39:01H HLA-B*07:05H
EMLDNRATL

SEQ ID NO: 2752 - protein, 9 aa, Severe acute respiratory syndrome coronavirus 2
  REGION 1..9: note = Table A: HLA-B*14:01H HLA-B*39:06M HLA-B*39:01H
NRATLQAIA

SEQ ID NO: 2753 - protein, 9 aa, Severe acute respiratory syndrome coronavirus 2
  REGION 1..9: note = Table A: HLA-C*14:03H HLA-A*11:303H HLA-B*44:05H HLA-B*46:01M HLA-B*27:02H HLA-B*35:01H HLA-B*15:13H HLA-B*38:02M HLA-B*15:01H HLA-B*15:02H HLA-B*39:01H HLA-B*07:05M
TLQAIASEF

SEQ ID NO: 2754 - protein, 9 aa, Severe acute respiratory syndrome coronavirus 2
  REGION 1..9: note = Table A: HLA-A*11:303M HLA-A*25:01H HLA-B*46:01H HLA-C*03:03H HLA-C*03:04H HLA-C*15:05M HLA-C*01:02M HLA-A*02:05H HLA-A*02:06H HLA-A*02:08H HLA-A*02:03H HLA-C*08:01M HLA-B*38:02M HLA-B*15:01H HLA-B*39:01H
  REGION 1..9: note = CONT. FROM ABOVE: HLA-B*13:01H
AIASEFSSL

SEQ ID NO: 2755 - protein, 9 aa, Severe acute respiratory syndrome coronavirus 2
  REGION 1..9: note = Table A: HLA-B*44:02M HLA-B*44:05M HLA-C*16:04H HLA-B*46:01M HLA-B*45:01H HLA-B*44:03H HLA-B*18:01H HLA-C*07:01H HLA-B*27:02H HLA-A*30:02H HLA-B*35:01H HLA-B*38:02H HLA-B*40:01H HLA-B*40:02M HLA-B*40:06H HLA-B*15:01H
  REGION 1..9: note = CONT. FROM ABOVE: HLA-B*15:02H HLA-B*15:03H HLA-B*39:01H HLA- B*07:05H HLA-B*41:02H HLA-B*49:01M HLA-B*50:01M
SEFSSLPSY

SEQ ID NO: 2756 - protein, 9 aa, Severe acute respiratory syndrome coronavirus 2
  REGION 1..9: note = Table A: HLA-B*54:01M
FSSLPSYAA

SEQ ID NO: 2757 - protein, 9 aa, Severe acute respiratory syndrome coronavirus 2
  REGION 1..9: note = Table A: HLA-B*58:01M HLA-B*58:02H HLA-C*14:03H HLA-A*11:303M HLA-B*44:05H HLA-B*57:01H HLA-A*25:01M HLA-B*46:01M HLA-A*26:01H HLA-A*26:02H HLA-A*26:03M HLA-C*03:03H HLA-C*03:02M HLA-C*03:04H HLA-A*30:02H
  REGION 1..9: note = CONT. FROM ABOVE: HLA-C*15:05M HLA-C*12:02H HLA-A*34:02H HLA- C*07:27H HLA-A*24:02H HLA-B*35:01H HLA-B*35:07H HLA-C*08:01H HLA-A*23:01H HLA-B*37:01H HLA-B*38:02M HLA-B*15:01M HLA-B*15 :02H HLA-B*15:03H HLA-B*39:01H HLA-B*07:05M HLA-B*57:03H
  REGION 1..9: note = CONT. FROM ABOVE: HLA-C*07:04H HLA-A*66:01H
SSLPSYAAF

SEQ ID NO: 2758 - protein, 9 aa, Severe acute respiratory syndrome coronavirus 2
  REGION 1..9: note = Table A: HLA-A*02:07H
SLPSYAAFA

SEQ ID NO: 2759 - protein, 9 aa, Severe acute respiratory syndrome coronavirus 2
  REGION 1..9: note = Table A: HLA-B*54:01H
LPSYAAFAT

SEQ ID NO: 2760 - protein, 9 aa, Severe acute respiratory syndrome coronavirus 2
  REGION 1..9: note = Table A: HLA-B*55:02H
PSYAAFATA

SEQ ID NO: 2761 - protein, 9 aa, Severe acute respiratory syndrome coronavirus 2
  REGION 1..9: note = Table A: HLA-A*11:303H HLA-C*16:04M HLA-B*46:01H HLA-B*55:02H HLA-C*12:03H HLA-A*02:05H HLA-B*38:02H HLA-B*54:01H
AAFATAQEA

SEQ ID NO: 2762 - protein, 9 aa, Severe acute respiratory syndrome coronavirus 2
  REGION 1..9: note = Table A: HLA-C*14:02M HLA-C*14:03H HLA-B*46:01H HLA-A*29:01H HLA-A*29:02H HLA-B*38:02H HLA-B*15:01M HLA-B*15:02H HLA-B*15:03H HLA-B*39:01H HLA-B*07:05H
AFATAQEAY

SEQ ID NO: 2763 - protein, 9 aa, Severe acute respiratory syndrome coronavirus 2
  REGION 1..9: note = Table A: HLA-B*54:01H HLA-B*39:01H
TAQEAYEQA

SEQ ID NO: 2764 - protein, 9 aa, Severe acute respiratory syndrome coronavirus 2
  REGION 1..9: note = Table A: HLA-B*38:02H HLA-B*39:01M HLA-B*13:01H HLA-B*13:02M
AQEAYEQAV

SEQ ID NO: 2765 - protein, 9 aa, Severe acute respiratory syndrome coronavirus 2
  REGION 1..9: note = Table A: HLA-B*45:01H HLA-B*40:06H HLA-B*50:01M
QEAYEQAVA

SEQ ID NO: 2766 - protein, 9 aa, Severe acute respiratory syndrome coronavirus 2
  REGION 1..9: note = Table A: HLA-A*02:05H HLA-B*38:02H
AVANGDSEV

SEQ ID NO: 2767 - protein, 9 aa, Severe acute respiratory syndrome coronavirus 2
  REGION 1..9: note = Table A: HLA-C*08:01H
VANGDSEVV

SEQ ID NO: 2768 - protein, 9 aa, Severe acute respiratory syndrome coronavirus 2
  REGION 1..9: note = Table A: HLA-A*36:01H HLA-A*34:02H
NGDSEVVLK

SEQ ID NO: 2769 - protein, 9 aa, Severe acute respiratory syndrome coronavirus 2
  REGION 1..9: note = Table A: HLA-A*11:303H HLA-A*03:01H HLA-A*03:02H HLA-A*11:01M HLA-A*11:02H HLA-A*36:01H HLA-B*27:02H HLA-A*68:01H HLA-A*34:02H HLA-C*07:27H HLA-B*37:01H HLA-B*13:02H
GDSEVVLKK

SEQ ID NO: 2770 - protein, 9 aa, Severe acute respiratory syndrome coronavirus 2
  REGION 1..9: note = Table A: HLA-A*68:01H HLA-A*34:01H HLA-A*34:02M HLA-A*66:01H
EVVLKKLKK

SEQ ID NO: 2771 - protein, 9 aa, Severe acute respiratory syndrome coronavirus 2
  REGION 1..9: note = Table A: HLA-B*08:01H HLA-B*07:04H
VLKKLKKSL

SEQ ID NO: 2772 - protein, 9 aa, Severe acute respiratory syndrome coronavirus 2
  REGION 1..9: note = Table A: HLA-A*02:05H HLA-A*02:08H HLA-A*02:02M HLA-A*02:03H HLA-B*38:02H
KLKKSLNVA

SEQ ID NO: 2773 - protein, 9 aa, Severe acute respiratory syndrome coronavirus 2
  REGION 1..9: note = Table A: HLA-C*14:03H HLA-A*11:303H HLA-B*44:05H HLA-B*46:01M HLA-C*15:05H HLA-C*01:02H HLA-C*12:02H HLA-B*37:01H HLA-B*38:02M HLA-B*07:02H HLA-B*15:01H HLA-B*15:02H HLA-B*15:03H HLA-B*07:05H
SLNVAKSEF

SEQ ID NO: 2774 - protein, 9 aa, Severe acute respiratory syndrome coronavirus 2
  REGION 1..9: note = Table A: HLA-A*68:01H
NVAKSEFDR

SEQ ID NO: 2775 - protein, 9 aa, Severe acute respiratory syndrome coronavirus 2
  REGION 1..9: note = Table A: HLA-A*11:303H HLA-B*44:02M HLA-B*44:05H HLA-C*16:04H HLA-B*46:01H HLA-B*45:01M HLA-B*08:01H HLA-B*44:03M HLA-B*18:01H HLA-C*07:01H HLA-A*68:02H HLA-B*35:03H HLA-C*15:05H HLA-B*14:02H HLA-A*02:05H
  REGION 1..9: note = CONT. FROM ABOVE: HLA-B*14:01M HLA-A*02:02H HLA-B*35:01H HLA- B*35:02H HLA-C*08:01H HLA-B*35:12H HLA-B*37:01H HLA-B*38:02H HLA-B*40:01H HLA-B*40:02H HLA-B*40:06M HLA-B*07:02M HLA-B*07 :04H HLA-B*15:01H HLA-B*15:02H HLA-B*39:01H HLA-B*07:05H
  REGION 1..9: note = CONT. FROM ABOVE: HLA-B*41:02H HLA-B*15:10H HLA-B*49:01H HLA- C*07:04H HLA-B*50:01H
SEFDRDAAM

SEQ ID NO: 2776 - protein, 9 aa, Severe acute respiratory syndrome coronavirus 2
  REGION 1..9: note = Table A: HLA-A*33:03H HLA-A*34:01H HLA-A*34:02H HLA-A*66:01H
FDRDAAMQR

SEQ ID NO: 2777 - protein, 9 aa, Severe acute respiratory syndrome coronavirus 2
  REGION 1..9: note = Table A: HLA-B*40:02H
RDAAMQRKL

SEQ ID NO: 2778 - protein, 9 aa, Severe acute respiratory syndrome coronavirus 2
  REGION 1..9: note = Table A: HLA-A*02:11H HLA-A*02:02H
AMQRKLEKM

SEQ ID NO: 2779 - protein, 9 aa, Severe acute respiratory syndrome coronavirus 2
  REGION 1..9: note = Table A: HLA-B*44:05H HLA-B*18:01M HLA-B*40:01H HLA-B*40:02M HLA-B*15:01H HLA-B*15:02H HLA-B*07:05H HLA-B*41:02H HLA-B*49:01H
LEKMADQAM

SEQ ID NO: 2780 - protein, 9 aa, Severe acute respiratory syndrome coronavirus 2
  REGION 1..9: note = Table A: HLA-A*11:303H HLA-C*04:03M HLA-B*53:01H HLA-C*03:04H HLA-B*35:03M HLA-C*15:05M HLA-A*02:07H HLA-B*35:01M HLA-B*35:02H HLA-B*35:08H HLA-B*35:07H HLA-C*08:01H HLA-C*08:02M HLA-B*35:12H HLA-B*38:02M
  REGION 1..9: note = CONT. FROM ABOVE: HLA-B*15:02H HLA-B*39:01H HLA-B*07:05H HLA- C*05:01M
MADQAMTQM

SEQ ID NO: 2781 - protein, 9 aa, Severe acute respiratory syndrome coronavirus 2
  REGION 1..9: note = Table A: HLA-B*44:02H HLA-B*44:03H HLA-B*07:05H
ADQAMTQMY

SEQ ID NO: 2782 - protein, 9 aa, Severe acute respiratory syndrome coronavirus 2
  REGION 1..9: note = Table A: HLA-A*34:01H HLA-A*34:02M
DQAMTQMYK

SEQ ID NO: 2783 - protein, 9 aa, Severe acute respiratory syndrome coronavirus 2
  REGION 1..9: note = Table A: HLA-A*02:02H
AMTQMYKQA

SEQ ID NO: 2784 - protein, 9 aa, Severe acute respiratory syndrome coronavirus 2
  REGION 1..9: note = Table A: HLA-A*74:01M HLA-A*11:01H HLA-A*33:01M HLA-A*33:03H HLA-A*68:01H HLA-A*34:01H HLA-A*34:02H HLA-A*31:01M HLA-A*66:01M
MTQMYKQAR

SEQ ID NO: 2785 - protein, 9 aa, Severe acute respiratory syndrome coronavirus 2
  REGION 1..9: note = Table A: HLA-B*45:01H HLA-B*41:02H
SEDKRAKVT

SEQ ID NO: 2786 - protein, 9 aa, Severe acute respiratory syndrome coronavirus 2
  REGION 1..9: note = Table A: HLA-B*27:05H
KRAKVTSAM

SEQ ID NO: 2787 - protein, 9 aa, Severe acute respiratory syndrome coronavirus 2
  REGION 1..9: note = Table A: HLA-C*15:05M HLA-A*02:08M HLA-B*07:05H HLA-B*57:03H
KVTSAMQTM

SEQ ID NO: 2788 - protein, 9 aa, Severe acute respiratory syndrome coronavirus 2
  REGION 1..9: note = Table A: HLA-C*15:05H
VTSAMQTML

SEQ ID NO: 2789 - protein, 9 aa, Severe acute respiratory syndrome coronavirus 2
  REGION 1..9: note = Table A: HLA-B*58:01H HLA-C*15:05H HLA-B*57:03H
TSAMQTMLF

SEQ ID NO: 2790 - protein, 9 aa, Severe acute respiratory syndrome coronavirus 2
  REGION 1..9: note = Table A: HLA-A*02:04H
AMQTMLFTM

SEQ ID NO: 2791 - protein, 9 aa, Severe acute respiratory syndrome coronavirus 2
  REGION 1..9: note = Table A: HLA-A*02:05H HLA-A*02:06H HLA-C*08:01H HLA-B*38:02M HLA-B*40:06H HLA-B*13:02H
MQTMLFTML

SEQ ID NO: 2792 - protein, 9 aa, Severe acute respiratory syndrome coronavirus 2
  REGION 1..9: note = Table A: HLA-A*74:01H HLA-A*11:01H HLA-A*11:02M HLA-A*36:01H HLA-A*33:03H HLA-A*34:01H HLA-A*34:02M HLA-A*31:01H HLA-A*66:01H
QTMLFTMLR

SEQ ID NO: 2793 - protein, 9 aa, Severe acute respiratory syndrome coronavirus 2
  REGION 1..9: note = Table A: HLA-A*02:11H HLA-A*02:04H HLA-A*02:02H
MLFTMLRKL

SEQ ID NO: 2794 - protein, 9 aa, Severe acute respiratory syndrome coronavirus 2
  REGION 1..9: note = Table A: HLA-B*14:02H HLA-B*14:01H HLA-B*38:02H HLA-B*39:01H
LRKLDNDAL

SEQ ID NO: 2795 - protein, 9 aa, Severe acute respiratory syndrome coronavirus 2
  REGION 1..9: note = Table A: HLA-A*33:01H
DALNNIINN

SEQ ID NO: 2796 - protein, 9 aa, Severe acute respiratory syndrome coronavirus 2
  REGION 1..9: note = Table A: HLA-A*02:11M HLA-A*02:04M HLA-A*02:05M HLA-A*02:07H HLA-A*02:08H HLA-B*14:01H HLA-A*02:01M HLA-A*02:02H HLA-A*02:03H HLA-B*38:02M
ALNNIINNA

SEQ ID NO: 2797 - protein, 9 aa, Severe acute respiratory syndrome coronavirus 2
  REGION 1..9: note = Table A: HLA-A*33:01H HLA-A*33:03M
LNNIINNAR

SEQ ID NO: 2798 - protein, 9 aa, Severe acute respiratory syndrome coronavirus 2
  REGION 1..9: note = Table A: HLA-B*51:01H
DGCVPLNII

SEQ ID NO: 2799 - protein, 9 aa, Severe acute respiratory syndrome coronavirus 2
  REGION 1..9: note = Table A: HLA-B*56:01H HLA-B*55:02M HLA-B*55:01H HLA-B*51:01H HLA-B*54:01H
VPLNIIPLT

SEQ ID NO: 2800 - protein, 9 aa, Severe acute respiratory syndrome coronavirus 2
  REGION 1..9: note = Table A: HLA-B*56:01H HLA-B*55:02H HLA-A*02:05H HLA-B*38:02H HLA-B*39:06H HLA-B*54:01H
NIIPLTTAA

SEQ ID NO: 2801 - protein, 9 aa, Severe acute respiratory syndrome coronavirus 2
  REGION 1..9: note = Table A: HLA-A*03:02H HLA-A*34:02H
IIPLTTAAK

SEQ ID NO: 2802 - protein, 9 aa, Severe acute respiratory syndrome coronavirus 2
  REGION 1..9: note = Table A: HLA-B*53:01H HLA-B*35:03M HLA-C*15:05M HLA-B*35:01H HLA-B*07:02H HLA-B*07:05M
IPLTTAAKL

SEQ ID NO: 2803 - protein, 9 aa, Severe acute respiratory syndrome coronavirus 2
  REGION 1..9: note = Table A: HLA-A*68:02H HLA-C*15:05H HLA-C*15:02H HLA-A*02:03H
TTAAKLMVV

SEQ ID NO: 2804 - protein, 9 aa, Severe acute respiratory syndrome coronavirus 2
  REGION 1..9: note = Table A: HLA-B*53:01H HLA-C*15:05H HLA-B*51:01M HLA-B*38:02H HLA-B*57:03H
TAAKLMVVI

SEQ ID NO: 2805 - protein, 9 aa, Severe acute respiratory syndrome coronavirus 2
  REGION 1..9: note = Table A: HLA-B*58:01H HLA-A*36:01H HLA-A*29:02H HLA-A*02:11H HLA-A*30:02M HLA-B*38:02H HLA-B*15:01H HLA-B*15:03H
KLMVVIPDY

SEQ ID NO: 2806 - protein, 9 aa, Severe acute respiratory syndrome coronavirus 2
  REGION 1..9: note = Table A: HLA-B*35:02H
MVVIPDYNT

SEQ ID NO: 2807 - protein, 9 aa, Severe acute respiratory syndrome coronavirus 2
  REGION 1..9: note = Table A: HLA-B*58:01M HLA-B*58:02H HLA-A*11:303M HLA-A*36:01H HLA-B*57:01H HLA-A*25:01M HLA-B*46:01H HLA-A*26:01M HLA-A*26:02M HLA-A*26:03M HLA-A*29:01M HLA-A*29:02M HLA-C*03:02M HLA-A*30:02H HLA-C*15:05H
  REGION 1..9: note = CONT. FROM ABOVE: HLA-C*12:02M HLA-A*02:05H HLA-A*34:01H HLA- C*07:27H HLA-B*35:01H HLA-B*35:08M HLA-B*35:07M HLA-C*08:01H HLA-B*15:13M HLA-B*38:02H HLA-B*15:01H HLA-B*15:02M HLA-B*15 :03H HLA-B*39:01H HLA-B*07:05M HLA-B*57:03M HLA-C*02:02H
  REGION 1..9: note = CONT. FROM ABOVE: HLA-B*15:11M
VVIPDYNTY

SEQ ID NO: 2808 - protein, 9 aa, Severe acute respiratory syndrome coronavirus 2
  REGION 1..9: note = Table A: HLA-A*03:01H HLA-A*03:02H HLA-A*11:01H HLA-A*11:02M HLA-A*36:01H HLA-A*34:02H
VIPDYNTYK

SEQ ID NO: 2809 - protein, 9 aa, Severe acute respiratory syndrome coronavirus 2
  REGION 1..9: note = Table A: HLA-B*58:01H HLA-A*36:01H HLA-A*01:01M HLA-B*35:01M HLA-B*35:08H HLA-B*38:02M HLA-B*15:02H HLA-B*39:01H HLA-B*07:05H
TCDGTTFTY

SEQ ID NO: 2810 - protein, 9 aa, Severe acute respiratory syndrome coronavirus 2
  REGION 1..9: note = Table A: HLA-A*68:02H
TTFTYASAL

SEQ ID NO: 2811 - protein, 9 aa, Severe acute respiratory syndrome coronavirus 2
  REGION 1..9: note = Table A: HLA-A*24:02H HLA-A*24:07M
TFTYASALW

SEQ ID NO: 2812 - protein, 9 aa, Severe acute respiratory syndrome coronavirus 2
  REGION 1..9: note = Table A: HLA-C*06:02H HLA-A*24:02M HLA-A*24:07H HLA-C*08:01H HLA-A*23:01M HLA-B*38:02H
TYASALWEI

SEQ ID NO: 2813 - protein, 9 aa, Severe acute respiratory syndrome coronavirus 2
  REGION 1..9: note = Table A: HLA-A*11:303H HLA-C*06:02H HLA-C*12:05M HLA-A*02:11H HLA-A*68:02M HLA-C*15:05H HLA-C*15:02H HLA-A*02:04M HLA-A*02:05H HLA-A*02:06M HLA-A*02:07H HLA-A*02:01H HLA-A*02:03H HLA-C*08:01H HLA-B*38:02M
  REGION 1..9: note = CONT. FROM ABOVE: HLA-B*40:06H HLA-B*13:02H
SALWEIQQV

SEQ ID NO: 2814 - protein, 9 aa, Severe acute respiratory syndrome coronavirus 2
  REGION 1..9: note = Table A: HLA-A*02:11H HLA-A*02:04M HLA-A*02:07M HLA-B*14:01H HLA-A*02:01M HLA-A*02:02M HLA-A*02:03H HLA-B*52:01H HLA-B*38:02M HLA-B*40:06H HLA-B*13:02H
ALWEIQQVV

SEQ ID NO: 2815 - protein, 9 aa, Severe acute respiratory syndrome coronavirus 2
  REGION 1..9: note = Table A: HLA-B*45:01M HLA-B*39:06H HLA-B*40:02H HLA-B*40:06M HLA-B*50:01M
WEIQQVVDA

SEQ ID NO: 2816 - protein, 9 aa, Severe acute respiratory syndrome coronavirus 2
  REGION 1..9: note = Table A: HLA-A*02:05H HLA-A*02:08H HLA-B*35:02H HLA-B*15:13H HLA-B*38:02M HLA-B*13:01H HLA-B*13:02H
QVVDADSKI

SEQ ID NO: 2817 - protein, 9 aa, Severe acute respiratory syndrome coronavirus 2
  REGION 1..9: note = Table A: HLA-A*02:07H HLA-C*08:02H
VVDADSKIV

SEQ ID NO: 2818 - protein, 9 aa, Severe acute respiratory syndrome coronavirus 2
  REGION 1..9: note = Table A: HLA-A*11:303H HLA-B*08:01H HLA-C*04:03H HLA-B*53:01M HLA-A*68:02H HLA-B*35:03M HLA-C*15:05M HLA-A*02:07H HLA-B*35:01M HLA-B*35:02H HLA-B*35:08M HLA-B*51:01H HLA-C*17:01H HLA-B*35:07H HLA-C*08:01M
  REGION 1..9: note = CONT. FROM ABOVE: HLA-C*08:02M HLA-B*35:12H HLA-B*38:01H HLA- B*38:02M HLA-B*39:01H HLA-B*07:05H HLA-C*05:01M
DADSKIVQL

SEQ ID NO: 2819 - protein, 9 aa, Severe acute respiratory syndrome coronavirus 2
  REGION 1..9: note = Table A: HLA-B*38:02M HLA-B*15:03M
SKIVQLSEI

SEQ ID NO: 2820 - protein, 9 aa, Severe acute respiratory syndrome coronavirus 2
  REGION 1..9: note = Table A: HLA-C*15:05H HLA-B*35:02H HLA-B*15:02H HLA-C*07:04H
IVQLSEISM

SEQ ID NO: 2821 - protein, 9 aa, Severe acute respiratory syndrome coronavirus 2
  REGION 1..9: note = Table A: HLA-B*45:01M HLA-B*40:06H HLA-B*50:01M
SEISMDNSP

SEQ ID NO: 2822 - protein, 9 aa, Severe acute respiratory syndrome coronavirus 2
  REGION 1..9: note = Table A: HLA-B*58:01M HLA-B*58:02H HLA-A*11:303H HLA-B*57:01H HLA-B*46:01H HLA-C*03:03M HLA-A*02:11H HLA-C*03:02H HLA-C*03:04H HLA-A*68:02H HLA-B*35:03H HLA-C*15:05M HLA-C*15:02M HLA-A*02:04H HLA-A*02:05H
  REGION 1..9: note = CONT. FROM ABOVE: HLA-A*02:06H HLA-A*02:01M HLA-A*02:02H HLA- C*07:27M HLA-A*24:02H HLA-C*17:01H HLA-C*08:01M HLA-A*23:01H HLA-B*38:02H HLA-B*39:01H HLA-B*07:05H HLA-B*57:03M HLA-C*07 :04H
ISMDNSPNL

SEQ ID NO: 2823 - protein, 9 aa, Severe acute respiratory syndrome coronavirus 2
  REGION 1..9: note = Table A: HLA-B*44:03H HLA-B*38:02H
MDNSPNLAW

SEQ ID NO: 2824 - protein, 9 aa, Severe acute respiratory syndrome coronavirus 2
  REGION 1..9: note = Table A: HLA-C*15:05H
SPNLAWPLI

SEQ ID NO: 2825 - protein, 9 aa, Severe acute respiratory syndrome coronavirus 2
  REGION 1..9: note = Table A: HLA-B*56:01H HLA-A*02:11H HLA-B*55:02H HLA-B*54:01M
LAWPLIVTA

SEQ ID NO: 2826 - protein, 9 aa, Severe acute respiratory syndrome coronavirus 2
  REGION 1..9: note = Table A: HLA-C*14:02M HLA-C*14:03H HLA-C*04:01H HLA-C*04:03M HLA-C*15:05H HLA-C*01:02M HLA-A*02:07H HLA-A*24:02H HLA-A*24:07M HLA-A*23:01H HLA-B*07:05H
AWPLIVTAL

SEQ ID NO: 2827 - protein, 9 aa, Severe acute respiratory syndrome coronavirus 2
  REGION 1..9: note = Table A: HLA-A*34:01H
WPLIVTALR

SEQ ID NO: 2828 - protein, 9 aa, Severe acute respiratory syndrome coronavirus 2
  REGION 1..9: note = Table A: HLA-C*15:05H HLA-B*51:01M HLA-B*38:02H HLA-B*07:05H
TALRANSAV

SEQ ID NO: 2829 - protein, 9 aa, Severe acute respiratory syndrome coronavirus 2
  REGION 1..9: note = Table A: HLA-A*03:01H
ALRANSAVK

SEQ ID NO: 2830 - protein, 9 aa, Severe acute respiratory syndrome coronavirus 2
  REGION 1..9: note = Table A: HLA-C*06:02H HLA-B*27:05H HLA-B*14:02H HLA-B*14:01H HLA-B*38:02H HLA-B*39:01H
LRANSAVKL

SEQ ID NO: 2831 - protein, 9 aa, Severe acute respiratory syndrome coronavirus 2
  REGION 1..9: note = Table A: HLA-B*42:01M HLA-A*11:303H HLA-B*46:01H HLA-B*08:01M HLA-A*30:01H HLA-C*15:05M HLA-C*01:02H HLA-A*02:05M HLA-A*02:08M HLA-B*14:01H HLA-A*02:02H HLA-A*02:03H HLA-C*08:01H HLA-B*38:02M HLA-B*07:02M
  REGION 1..9: note = CONT. FROM ABOVE: HLA-B*07:04H HLA-B*15:01M HLA-B*15:02H HLA- B*07:05H HLA-B*41:02H
AVKLQNNEL

SEQ ID NO: 2832 - protein, 9 aa, Severe acute respiratory syndrome coronavirus 2
  REGION 1..9: note = Table A: HLA-B*39:06H
QNNELSPVA

SEQ ID NO: 2833 - protein, 9 aa, Severe acute respiratory syndrome coronavirus 2
  REGION 1..9: note = Table A: HLA-C*04:03H HLA-B*35:03H HLA-B*35:02H HLA-C*08:02H HLA-B*35:12M HLA-B*39:01M
NNELSPVAL

SEQ ID NO: 2834 - protein, 9 aa, Severe acute respiratory syndrome coronavirus 2
  REGION 1..9: note = Table A: HLA-A*33:01H HLA-A*33:03H HLA-A*68:01H HLA-A*34:01H HLA-A*34:02H
NELSPVALR

SEQ ID NO: 2835 - protein, 9 aa, Severe acute respiratory syndrome coronavirus 2
  REGION 1..9: note = Table A: HLA-A*34:01H
ELSPVALRQ

SEQ ID NO: 2836 - protein, 9 aa, Severe acute respiratory syndrome coronavirus 2
  REGION 1..9: note = Table A: HLA-C*14:03H HLA-C*01:02M
LSPVALRQM

SEQ ID NO: 2837 - protein, 9 aa, Severe acute respiratory syndrome coronavirus 2
  REGION 1..9: note = Table A: HLA-B*38:02H
CAAGTTQTA

SEQ ID NO: 2838 - protein, 9 aa, Severe acute respiratory syndrome coronavirus 2
  REGION 1..9: note = Table A: HLA-C*15:05H
AAGTTQTAC

SEQ ID NO: 2839 - protein, 9 aa, Severe acute respiratory syndrome coronavirus 2
  REGION 1..9: note = Table A: HLA-A*11:303H HLA-B*35:03H HLA-B*35:01H HLA-B*35:02H HLA-B*35:08H HLA-C*08:01H HLA-B*35:12H HLA-B*38:02H
TACTDDNAL

SEQ ID NO: 2840 - protein, 9 aa, Severe acute respiratory syndrome coronavirus 2
  REGION 1..9: note = Table A: HLA-B*58:01M HLA-A*11:303H HLA-A*03:01M HLA-A*11:01M HLA-A*11:02H HLA-A*36:01H HLA-A*29:01H HLA-A*29:02M HLA-A*01:01H HLA-A*30:02H HLA-C*15:05H HLA-A*34:02M HLA-C*07:27H HLA-B*35:01H HLA-B*35:08H
  REGION 1..9: note = CONT. FROM ABOVE: HLA-B*38:02H HLA-B*15:01H HLA-B*39:01H HLA- B*07:05H
CTDDNALAY

SEQ ID NO: 2841 - protein, 9 aa, Severe acute respiratory syndrome coronavirus 2
  REGION 1..9: note = Table A: HLA-A*36:01H
TDDNALAYY

SEQ ID NO: 2842 - protein, 9 aa, Severe acute respiratory syndrome coronavirus 2
  REGION 1..9: note = Table A: HLA-A*11:303H HLA-A*74:01H HLA-A*03:01M HLA-A*03:02M HLA-A*11:01H HLA-A*11:02H HLA-A*36:01H HLA-B*27:02H HLA-A*34:02H
ALAYYNTTK

SEQ ID NO: 2843 - protein, 9 aa, Severe acute respiratory syndrome coronavirus 2
  REGION 1..9: note = Table A: HLA-A*33:03M
YYNTTKGGR

SEQ ID NO: 2844 - protein, 9 aa, Severe acute respiratory syndrome coronavirus 2
  REGION 1..9: note = Table A: HLA-B*42:01H HLA-B*08:01H HLA-C*07:01H HLA-A*30:01H HLA-A*68:02H HLA-B*07:04H HLA-B*57:03H
TTKGGRFVL

SEQ ID NO: 2845 - protein, 9 aa, Severe acute respiratory syndrome coronavirus 2
  REGION 1..9: note = Table A: HLA-A*02:04H
FVLALLSDL

SEQ ID NO: 2846 - protein, 9 aa, Severe acute respiratory syndrome coronavirus 2
  REGION 1..9: note = Table A: HLA-A*02:04M HLA-A*02:01H
ALLSDLQDL

SEQ ID NO: 2847 - protein, 9 aa, Severe acute respiratory syndrome coronavirus 2
  REGION 1..9: note = Table A: HLA-B*58:01H HLA-A*36:01M HLA-B*57:01M HLA-A*01:01H HLA-C*04:03H HLA-B*53:01M HLA-C*08:02H HLA-B*38:02H HLA-B*57:03H HLA-B*13:01M
LSDLQDLKW

SEQ ID NO: 2848 - protein, 9 aa, Severe acute respiratory syndrome coronavirus 2
  REGION 1..9: note = Table A: HLA-A*33:01H HLA-A*33:03H
DLQDLKWAR

SEQ ID NO: 2849 - protein, 9 aa, Severe acute respiratory syndrome coronavirus 2
  REGION 1..9: note = Table A: HLA-A*33:01H
DLKWARFPK

SEQ ID NO: 2850 - protein, 9 aa, Severe acute respiratory syndrome coronavirus 2
  REGION 1..9: note = Table A: HLA-B*58:01H HLA-A*36:01H HLA-A*01:01H
KSDGTGTIY

SEQ ID NO: 2851 - protein, 9 aa, Severe acute respiratory syndrome coronavirus 2
  REGION 1..9: note = Table A: HLA-A*11:01H HLA-A*68:02H HLA-C*15:05H HLA-A*02:05H HLA-A*02:08H HLA-A*02:02H HLA-B*57:03H
GTGTIYTEL

SEQ ID NO: 2852 - protein, 9 aa, Severe acute respiratory syndrome coronavirus 2
  REGION 1..9: note = Table A: HLA-B*44:05M HLA-B*44:03H HLA-B*18:01H HLA-B*37:01H HLA-B*40:02H HLA-B*07:05H HLA-B*41:02H HLA-B*49:01H
TELEPPCRF

SEQ ID NO: 2853 - protein, 9 aa, Severe acute respiratory syndrome coronavirus 2
  REGION 1..9: note = Table A: HLA-A*11:303H HLA-A*03:01M HLA-A*03:02M HLA-A*11:01M HLA-A*11:02M HLA-A*36:01M HLA-A*30:02H HLA-A*34:02H HLA-C*07:27H HLA-A*66:01H
VTDTPKGPK

SEQ ID NO: 2854 - protein, 9 aa, Severe acute respiratory syndrome coronavirus 2
  REGION 1..9: note = Table A: HLA-A*34:02H
DTPKGPKVK

SEQ ID NO: 2855 - protein, 9 aa, Severe acute respiratory syndrome coronavirus 2
  REGION 1..9: note = Table A: HLA-A*30:02H HLA-B*35:01H HLA-B*35:07M HLA-B*38:02H HLA-B*07:04M HLA-B*15:02H HLA-B*15:11M
TPKGPKVKY

SEQ ID NO: 2856 - protein, 9 aa, Severe acute respiratory syndrome coronavirus 2
  REGION 1..9: note = Table A: HLA-B*08:01H HLA-B*07:04M
GPKVKYLYF

SEQ ID NO: 2857 - protein, 9 aa, Severe acute respiratory syndrome coronavirus 2
  REGION 1..9: note = Table A: HLA-A*23:01H
KYLYFIKGL

SEQ ID NO: 2858 - protein, 9 aa, Severe acute respiratory syndrome coronavirus 2
  REGION 1..9: note = Table A: HLA-C*14:02H HLA-C*14:03H HLA-C*04:03H HLA-A*02:11H HLA-C*01:02H HLA-A*02:04H HLA-A*02:05H HLA-A*02:02H HLA-A*24:02M HLA-C*17:01H HLA-A*24:07M HLA-A*23:01M HLA-B*38:02H
YFIKGLNNL

SEQ ID NO: 2859 - protein, 9 aa, Severe acute respiratory syndrome coronavirus 2
  REGION 1..9: note = Table A: HLA-A*02:02H
GLNNLNRGM

SEQ ID NO: 2860 - protein, 9 aa, Severe acute respiratory syndrome coronavirus 2
  REGION 1..9: note = Table A: HLA-B*08:01H HLA-B*14:02H HLA-B*14:01H
NNLNRGMVL

SEQ ID NO: 2861 - protein, 9 aa, Severe acute respiratory syndrome coronavirus 2
  REGION 1..9: note = Table A: HLA-C*07:01H HLA-B*14:02H HLA-B*14:01H HLA-B*39:01H
NRGMVLGSL

SEQ ID NO: 2862 - protein, 9 aa, Severe acute respiratory syndrome coronavirus 2
  REGION 1..9: note = Table A: HLA-B*50:01H
GMVLGSLAA

SEQ ID NO: 2863 - protein, 9 aa, Severe acute respiratory syndrome coronavirus 2
  REGION 1..9: note = Table A: HLA-A*02:01H HLA-B*38:02H HLA-B*54:01H
MVLGSLAAT

SEQ ID NO: 2864 - protein, 9 aa, Severe acute respiratory syndrome coronavirus 2
  REGION 1..9: note = Table A: HLA-A*02:11H HLA-A*02:01M HLA-A*02:02H HLA-A*02:03M HLA-B*38:02H HLA-B*13:02H
VLGSLAATV

SEQ ID NO: 2865 - protein, 9 aa, Severe acute respiratory syndrome coronavirus 2
  REGION 1..9: note = Table A: HLA-B*48:01H HLA-A*11:303H HLA-A*11:01H HLA-A*11:02H HLA-C*15:05M HLA-C*15:02H HLA-C*17:01H HLA-B*40:02H HLA-B*57:03M HLA-B*13:02H
GSLAATVRL

SEQ ID NO: 2866 - protein, 9 aa, Severe acute respiratory syndrome coronavirus 2
  REGION 1..9: note = Table A: HLA-B*56:01H HLA-C*12:05H HLA-A*02:11H HLA-B*55:02H HLA-A*68:02H HLA-B*38:02H HLA-B*54:01M HLA-B*13:02H
LAATVRLQA

SEQ ID NO: 2867 - protein, 9 aa, Severe acute respiratory syndrome coronavirus 2
  REGION 1..9: note = Table A: HLA-B*55:01H
TVRLQAGNA

SEQ ID NO: 2868 - protein, 9 aa, Severe acute respiratory syndrome coronavirus 2
  REGION 1..9: note = Table A: HLA-B*14:01M HLA-B*39:01H
VRLQAGNAT

SEQ ID NO: 2869 - protein, 9 aa, Severe acute respiratory syndrome coronavirus 2
  REGION 1..9: note = Table A: HLA-A*02:05M HLA-A*02:08H HLA-A*02:03H HLA-B*38:02H HLA-B*39:01H HLA-B*13:02H
LQAGNATEV

SEQ ID NO: 2870 - protein, 9 aa, Severe acute respiratory syndrome coronavirus 2
  REGION 1..9: note = Table A: HLA-B*44:05H HLA-B*45:01H HLA-B*40:02M HLA-B*07:05H HLA-B*41:02M HLA-B*49:01H HLA-B*50:01M
TEVPANSTV

SEQ ID NO: 2871 - protein, 9 aa, Severe acute respiratory syndrome coronavirus 2
  REGION 1..9: note = Table A: HLA-A*25:01H HLA-A*26:01H HLA-A*26:02H HLA-A*26:03M HLA-A*68:01H HLA-A*68:02H HLA-C*15:05H HLA-A*34:01H HLA-A*34:02H HLA-B*39:01H HLA-A*66:01H
EVPANSTVL

SEQ ID NO: 2872 - protein, 9 aa, Severe acute respiratory syndrome coronavirus 2
  REGION 1..9: note = Table A: HLA-C*15:05H HLA-B*35:01H
PANSTVLSF

SEQ ID NO: 2873 - protein, 9 aa, Severe acute respiratory syndrome coronavirus 2
  REGION 1..9: note = Table A: HLA-A*25:01H
STVLSFCAF

SEQ ID NO: 2874 - protein, 9 aa, Severe acute respiratory syndrome coronavirus 2
  REGION 1..9: note = Table A: HLA-A*03:02H HLA-A*34:02H
CAFAVDAAK

SEQ ID NO: 2875 - protein, 9 aa, Severe acute respiratory syndrome coronavirus 2
  REGION 1..9: note = Table A: HLA-A*11:303H HLA-C*16:01H HLA-C*16:04H HLA-B*46:01H HLA-A*26:01H HLA-A*26:03H HLA-C*03:03M HLA-C*12:05H HLA-B*53:01H HLA-C*03:02H HLA-C*03:04M HLA-B*35:03H HLA-C*12:02H HLA-C*12:03H HLA-A*34:01M
  REGION 1..9: note = CONT. FROM ABOVE: HLA-A*34:02H HLA-C*07:27M HLA-B*35:01H HLA- B*35:08M HLA-B*35:07H HLA-B*38:02H HLA-B*15:01M HLA-B*15:02H HLA-B*15:03H HLA-B*07:05H HLA-C*02:02M HLA-B*15:11M HLA-A*66 :01H
FAVDAAKAY

SEQ ID NO: 2876 - protein, 9 aa, Severe acute respiratory syndrome coronavirus 2
  REGION 1..9: note = Table A: HLA-A*11:303M HLA-A*74:01H HLA-A*03:01M HLA-A*03:02H HLA-A*11:01H HLA-A*11:02H HLA-A*36:01H HLA-A*30:02H HLA-A*34:02M HLA-C*07:27M HLA-A*31:01H
AVDAAKAYK

SEQ ID NO: 2877 - protein, 9 aa, Severe acute respiratory syndrome coronavirus 2
  REGION 1..9: note = Table A: HLA-A*26:01H HLA-B*35:01H
DAAKAYKDY

SEQ ID NO: 2878 - protein, 9 aa, Severe acute respiratory syndrome coronavirus 2
  REGION 1..9: note = Table A: HLA-B*42:01H HLA-B*58:02H HLA-C*16:01H HLA-B*08:01H HLA-A*02:11H HLA-A*30:02H HLA-A*68:02H HLA-A*02:05H HLA-A*02:02H HLA-C*08:01H HLA-B*38:02H HLA-B*07:04H HLA-B*41:02H HLA-B*57:03H HLA-C*02:02H
AAKAYKDYL

SEQ ID NO: 2879 - protein, 9 aa, Severe acute respiratory syndrome coronavirus 2
  REGION 1..9: note = Table A: HLA-A*02:03H HLA-B*38:02M
YLASGGQPI

SEQ ID NO: 2880 - protein, 9 aa, Severe acute respiratory syndrome coronavirus 2
  REGION 1..9: note = Table A: HLA-B*13:02H
GGQPITNCV

SEQ ID NO: 2881 - protein, 9 aa, Severe acute respiratory syndrome coronavirus 2
  REGION 1..9: note = Table A: HLA-B*35:03H HLA-C*15:05M HLA-B*35:01H HLA-B*35:07H HLA-B*07:05H
QPITNCVKM

SEQ ID NO: 2882 - protein, 9 aa, Severe acute respiratory syndrome coronavirus 2
  REGION 1..9: note = Table A: HLA-B*38:01H HLA-B*38:02H HLA-B*39:01H HLA-B*13:02H HLA-B*15:10H
THTGTGQAI

SEQ ID NO: 2883 - protein, 9 aa, Severe acute respiratory syndrome coronavirus 2
  REGION 1..9: note = Table A: HLA-C*15:05H HLA-B*51:01H
TGTGQAITV

SEQ ID NO: 2884 - protein, 9 aa, Severe acute respiratory syndrome coronavirus 2
  REGION 1..9: note = Table A: HLA-A*11:303H HLA-C*16:04H HLA-B*56:01H HLA-C*12:05H HLA-B*55:02M HLA-A*68:02H HLA-B*35:03H HLA-B*55:01H HLA-A*02:05M HLA-A*02:06H HLA-B*35:01H HLA-C*08:01H HLA-B*38:02H HLA-B*39:06H HLA-B*54:01M
QAITVTPEA

SEQ ID NO: 2885 - protein, 9 aa, Severe acute respiratory syndrome coronavirus 2
  REGION 1..9: note = Table A: HLA-B*53:01H HLA-B*35:03H HLA-B*35:01M HLA-B*35:02M HLA-B*35:08M HLA-B*35:07H HLA-B*35:12M HLA-B*38:02H HLA-B*39:01H
EANMDQESF

SEQ ID NO: 2886 - protein, 9 aa, Severe acute respiratory syndrome coronavirus 2
  REGION 1..9: note = Table A: HLA-B*45:01M HLA-B*49:01H HLA-B*50:01M
QESFGGASC

SEQ ID NO: 2887 - protein, 9 aa, Severe acute respiratory syndrome coronavirus 2
  REGION 1..9: note = Table A: HLA-A*11:01H HLA-A*11:02H HLA-A*34:02H
CHIDHPNPK

SEQ ID NO: 2888 - protein, 9 aa, Severe acute respiratory syndrome coronavirus 2
  REGION 1..9: note = Table A: HLA-B*44:05H HLA-B*18:01H HLA-B*37:01M HLA-B*40:02H HLA-B*07:05H HLA-B*41:02H HLA-C*07:04H
IDHPNPKGF

SEQ ID NO: 2889 - protein, 9 aa, Severe acute respiratory syndrome coronavirus 2
  REGION 1..9: note = Table A: HLA-A*29:02H HLA-A*30:02H
GFCDLKGKY

SEQ ID NO: 2890 - protein, 9 aa, Severe acute respiratory syndrome coronavirus 2
  REGION 1..9: note = Table A: HLA-B*08:01M HLA-B*38:02H
DLKGKYVQI

SEQ ID NO: 2891 - protein, 9 aa, Severe acute respiratory syndrome coronavirus 2
  REGION 1..9: note = Table A: HLA-B*48:01H HLA-B*39:06H HLA-B*15:03H
GKYVQIPTT

SEQ ID NO: 2892 - protein, 9 aa, Severe acute respiratory syndrome coronavirus 2
  REGION 1..9: note = Table A: HLA-A*24:02H HLA-A*23:01H HLA-B*40:06H
KYVQIPTTC

SEQ ID NO: 2893 - protein, 9 aa, Severe acute respiratory syndrome coronavirus 2
  REGION 1..9: note = Table A: HLA-B*38:02H HLA-B*54:01H
YVQIPTTCA

SEQ ID NO: 2894 - protein, 9 aa, Severe acute respiratory syndrome coronavirus 2
  REGION 1..9: note = Table A: HLA-B*58:01H HLA-A*11:303M HLA-B*44:05H HLA-C*04:03M HLA-C*03:03H HLA-A*02:11H HLA-C*03:04H HLA-A*68:02H HLA-B*35:03H HLA-C*15:05M HLA-C*15:02M HLA-A*02:04H HLA-A*02:06H HLA-A*02:07H HLA-A*02:01H
  REGION 1..9: note = CONT. FROM ABOVE: HLA-B*35:02M HLA-C*08:01M HLA-C*08:02H HLA- B*35:12H HLA-B*38:01H HLA-B*38:02M HLA-B*40:01M HLA-B*40:02H HLA-B*39:01H HLA-B*07:05H HLA-B*41:02H HLA-B*57:03H HLA-C*05 :01M HLA-B*13:01H HLA-C*07:04H
ANDPVGFTL

SEQ ID NO: 2895 - protein, 9 aa, Severe acute respiratory syndrome coronavirus 2
  REGION 1..9: note = Table A: HLA-A*34:02H
NDPVGFTLK

SEQ ID NO: 2896 - protein, 9 aa, Severe acute respiratory syndrome coronavirus 2
  REGION 1..9: note = Table A: HLA-B*51:01H HLA-B*52:01M
VGFTLKNTV

SEQ ID NO: 2897 - protein, 9 aa, Severe acute respiratory syndrome coronavirus 2
  REGION 1..9: note = Table A: HLA-B*08:01M HLA-A*02:11H HLA-A*02:04H HLA-A*02:05H HLA-B*14:01H HLA-A*02:01M HLA-A*02:02M HLA-A*02:03H HLA-B*38:02H HLA-B*13:02H
TLKNTVCTV

SEQ ID NO: 2898 - protein, 9 aa, Severe acute respiratory syndrome coronavirus 2
  REGION 1..9: note = Table A: HLA-B*37:01H HLA-B*41:02H
CDQLREPML

SEQ ID NO: 2899 - protein, 9 aa, Severe acute respiratory syndrome coronavirus 2
  REGION 1..9: note = Table A: HLA-B*38:02H
QLREPMLQS

SEQ ID NO: 2900 - protein, 9 aa, Severe acute respiratory syndrome coronavirus 2
  REGION 1..9: note = Table A: HLA-B*39:06H
LREPMLQSA

SEQ ID NO: 2901 - protein, 9 aa, Severe acute respiratory syndrome coronavirus 2
  REGION 1..9: note = Table A: HLA-B*55:02H HLA-B*54:01H
EPMLQSADA

SEQ ID NO: 2902 - protein, 9 aa, Severe acute respiratory syndrome coronavirus 2
  REGION 1..9: note = Table A: HLA-B*15:01H HLA-B*13:01H
LQSADAQSF

SEQ ID NO: 2903 - protein, 9 aa, Severe acute respiratory syndrome coronavirus 2
  REGION 1..9: note = Table A: HLA-C*15:05H HLA-B*38:02H
QSADAQSFL

SEQ ID NO: 2904 - protein, 9 aa, Severe acute respiratory syndrome coronavirus 2
  REGION 1..9: note = Table A: HLA-A*03:01H HLA-A*11:01H HLA-A*33:03H HLA-B*27:02H HLA-A*68:01H HLA-A*34:01H HLA-A*34:02H HLA-A*31:01H HLA-A*66:01H
ADAQSFLNR

SEQ ID NO: 2905 - protein, 9 aa, Severe acute respiratory syndrome coronavirus 2
  REGION 1..9: note = Table A: HLA-A*33:01M HLA-A*33:03H HLA-A*68:02M HLA-C*15:05M HLA-B*51:01H HLA-B*38:02H HLA-B*54:01H HLA-B*07:05H
DAQSFLNRV

SEQ ID NO: 2906 - protein, 9 aa, Severe acute respiratory syndrome coronavirus 2
  REGION 1..9: note = Table A: HLA-B*54:01H
QSFLNRVCG

SEQ ID NO: 2907 - protein, 9 aa, Severe acute respiratory syndrome coronavirus 2
  REGION 1..9: note = Table A: HLA-C*14:03H
SFLNRVCGV

SEQ ID NO: 2908 - protein, 9 aa, Severe acute respiratory syndrome coronavirus 2
  REGION 1..9: note = Table A: HLA-B*14:01M HLA-B*39:06H
NRVCGVSAA

SEQ ID NO: 2909 - protein, 9 aa, Severe acute respiratory syndrome coronavirus 2
  REGION 1..9: note = Table A: HLA-A*74:01M
RVCGVSAAR

SEQ ID NO: 2910 - protein, 9 aa, Severe acute respiratory syndrome coronavirus 2
  REGION 1..9: note = Table A: HLA-A*03:01H
GVSAARLTP

SEQ ID NO: 2911 - protein, 9 aa, Severe acute respiratory syndrome coronavirus 2
  REGION 1..9: note = Table A: HLA-B*35:03H HLA-B*35:01M HLA-B*35:08M HLA-B*39:01H
TGTSTDVVY

SEQ ID NO: 2912 - protein, 9 aa, Severe acute respiratory syndrome coronavirus 2
  REGION 1..9: note = Table A: HLA-A*11:303M HLA-A*74:01H HLA-A*03:01M HLA-A*03:02M HLA-A*11:01H HLA-A*11:02H HLA-A*36:01H HLA-B*57:01H HLA-A*33:01H HLA-A*33:03M HLA-A*26:03H HLA-A*30:02H HLA-A*68:01H HLA-A*68:02H HLA-A*34:01H
  REGION 1..9: note = CONT. FROM ABOVE: HLA-A*34:02M HLA-C*07:27M HLA-A*31:01H HLA- A*66:01M
GTSTDVVYR

SEQ ID NO: 2913 - protein, 9 aa, Severe acute respiratory syndrome coronavirus 2
  REGION 1..9: note = Table A: HLA-A*68:02M HLA-A*02:05H HLA-A*02:06H HLA-B*13:02H
TSTDVVYRA

SEQ ID NO: 2914 - protein, 9 aa, Severe acute respiratory syndrome coronavirus 2
  REGION 1..9: note = Table A: HLA-B*58:01H HLA-B*58:02H HLA-A*11:303H HLA-C*16:01H HLA-A*36:01H HLA-B*57:01H HLA-B*46:01H HLA-C*04:01M HLA-C*04:03H HLA-C*15:05H HLA-A*02:07H HLA-C*08:02M HLA-B*07:05H HLA-B*57:03M HLA-C*05:01H
STDVVYRAF

SEQ ID NO: 2915 - protein, 9 aa, Severe acute respiratory syndrome coronavirus 2
  REGION 1..9: note = Table A: HLA-A*36:01H HLA-A*29:02H HLA-A*30:02H HLA-B*35:07H HLA-B*38:02H
VVYRAFDIY

SEQ ID NO: 2916 - protein, 9 aa, Severe acute respiratory syndrome coronavirus 2
  REGION 1..9: note = Table A: HLA-C*04:01H HLA-C*04:03M HLA-A*02:07H HLA-C*08:02H
AFDIYNDKV

SEQ ID NO: 2917 - protein, 9 aa, Severe acute respiratory syndrome coronavirus 2
  REGION 1..9: note = Table A: HLA-B*50:01H
FDIYNDKVA

SEQ ID NO: 2918 - protein, 9 aa, Severe acute respiratory syndrome coronavirus 2
  REGION 1..9: note = Table A: HLA-C*14:02H HLA-C*14:03H HLA-B*44:05H HLA-A*33:03H HLA-B*46:01H HLA-A*26:03H HLA-A*29:01H HLA-A*29:02H HLA-C*04:01H HLA-C*04:03H HLA-C*07:01H HLA-C*07:02H HLA-B*27:02H HLA-A*30:02H HLA-C*15:05H HLA-A*02:02H
  REGION 1..9: note = CONT. FROM ABOVE: HLA-A*02:03H HLA-A*24:02H HLA-A*24:07H HLA- C*08:01H HLA-A*23:01H HLA-B*37:01H HLA-B*38:02H HLA-A*32:01H HLA-B*15:01H HLA-B*39:01H HLA-A*31:01H HLA-B*07:05H HLA-C*07 :04H
IYNDKVAGF

SEQ ID NO: 2919 - protein, 9 aa, Severe acute respiratory syndrome coronavirus 2
  REGION 1..9: note = Table A: HLA-B*58:02M HLA-A*74:01H HLA-A*02:11H HLA-A*68:02H HLA-C*15:02H HLA-A*02:05M HLA-A*02:08M HLA-A*02:02H HLA-B*07:04M HLA-B*57:03M
KVAGFAKFL

SEQ ID NO: 2920 - protein, 9 aa, Severe acute respiratory syndrome coronavirus 2
  REGION 1..9: note = Table A: HLA-A*11:01M HLA-A*11:02H HLA-A*36:01H HLA-A*34:02H
VAGFAKFLK

SEQ ID NO: 2921 - protein, 9 aa, Severe acute respiratory syndrome coronavirus 2
  REGION 1..9: note = Table A: HLA-B*40:06H HLA-B*13:02H
AGFAKFLKT

SEQ ID NO: 2922 - protein, 9 aa, Severe acute respiratory syndrome coronavirus 2
  REGION 1..9: note = Table A: HLA-B*18:01H
DDNLIDSYF

SEQ ID NO: 2923 - protein, 9 aa, Severe acute respiratory syndrome coronavirus 2
  REGION 1..9: note = Table A: HLA-A*02:11H HLA-A*68:02H HLA-A*02:04M HLA-A*02:05H HLA-A*02:06H HLA-A*02:07M HLA-A*02:01H HLA-A*02:02M HLA-A*02:03H HLA-C*08:01H HLA-B*38:02M HLA-B*40:06H HLA-B*13:02H
NLIDSYFVV

SEQ ID NO: 2924 - protein, 9 aa, Severe acute respiratory syndrome coronavirus 2
  REGION 1..9: note = Table A: HLA-A*03:02H HLA-A*11:01H HLA-A*11:02M HLA-A*36:01M HLA-A*34:02H
LIDSYFVVK

SEQ ID NO: 2925 - protein, 9 aa, Severe acute respiratory syndrome coronavirus 2
  REGION 1..9: note = Table A: HLA-A*33:01H HLA-A*68:01H
IDSYFVVKR

SEQ ID NO: 2926 - protein, 9 aa, Severe acute respiratory syndrome coronavirus 2
  REGION 1..9: note = Table A: HLA-A*34:02M
DSYFVVKRH

SEQ ID NO: 2927 - protein, 9 aa, Severe acute respiratory syndrome coronavirus 2
  REGION 1..9: note = Table A: HLA-C*14:02M HLA-C*14:03M HLA-C*16:01H HLA-A*29:02H HLA-B*08:01H HLA-C*04:03H HLA-A*24:02M HLA-A*24:07H HLA-A*23:01M
YFVVKRHTF

SEQ ID NO: 2928 - protein, 9 aa, Severe acute respiratory syndrome coronavirus 2
  REGION 1..9: note = Table A: HLA-B*15:03M
VKRHTFSNY

SEQ ID NO: 2929 - protein, 9 aa, Severe acute respiratory syndrome coronavirus 2
  REGION 1..9: note = Table A: HLA-A*68:02H HLA-C*15:05H HLA-B*52:01H HLA-B*38:02H
SNYQHEETI

SEQ ID NO: 2930 - protein, 9 aa, Severe acute respiratory syndrome coronavirus 2
  REGION 1..9: note = Table A: HLA-B*38:01H HLA-B*38:02H HLA-B*39:01H HLA-B*15:10M
QHEETIYNL

SEQ ID NO: 2931 - protein, 9 aa, Severe acute respiratory syndrome coronavirus 2
  REGION 1..9: note = Table A: HLA-B*44:05H HLA-A*68:02H HLA-B*38:02H HLA-B*40:01H HLA-B*40:02M HLA-B*41:02H HLA-B*49:01H
HEETIYNLL

SEQ ID NO: 2932 - protein, 9 aa, Severe acute respiratory syndrome coronavirus 2
  REGION 1..9: note = Table A: HLA-A*02:11H HLA-A*02:01H
NLLKDCPAV

SEQ ID NO: 2933 - protein, 9 aa, Severe acute respiratory syndrome coronavirus 2
  REGION 1..9: note = Table A: HLA-A*02:01H HLA-A*02:02H HLA-A*02:03H HLA-B*38:02H
LLKDCPAVA

SEQ ID NO: 2934 - protein, 9 aa, Severe acute respiratory syndrome coronavirus 2
  REGION 1..9: note = Table A: HLA-B*07:02H HLA-B*07:05H
CPAVAKHDF

SEQ ID NO: 2935 - protein, 9 aa, Severe acute respiratory syndrome coronavirus 2
  REGION 1..9: note = Table A: HLA-A*03:02H HLA-A*11:01H HLA-A*11:02M HLA-C*07:27H
AVAKHDFFK

SEQ ID NO: 2936 - protein, 9 aa, Severe acute respiratory syndrome coronavirus 2
  REGION 1..9: note = Table A: HLA-B*57:03H
VAKHDFFKF

SEQ ID NO: 2937 - protein, 9 aa, Severe acute respiratory syndrome coronavirus 2
  REGION 1..9: note = Table A: HLA-B*38:02M
KHDFFKFRI

SEQ ID NO: 2938 - protein, 9 aa, Severe acute respiratory syndrome coronavirus 2
  REGION 1..9: note = Table A: HLA-A*11:02H HLA-A*33:01H HLA-A*33:03H HLA-A*68:01H HLA-B*37:01H HLA-A*31:01H
GDMVPHISR

SEQ ID NO: 2939 - protein, 9 aa, Severe acute respiratory syndrome coronavirus 2
  REGION 1..9: note = Table A: HLA-A*33:03H HLA-A*26:03H HLA-A*68:01H HLA-A*34:01M HLA-A*34:02M HLA-A*66:01M
MVPHISRQR

SEQ ID NO: 2940 - protein, 9 aa, Severe acute respiratory syndrome coronavirus 2
  REGION 1..9: note = Table A: HLA-C*15:05H HLA-B*07:02H HLA-B*07:04M
VPHISRQRL

SEQ ID NO: 2941 - protein, 9 aa, Severe acute respiratory syndrome coronavirus 2
  REGION 1..9: note = Table A: HLA-B*07:04H HLA-B*15:01H HLA-B*15:03H HLA-B*13:02H
RQRLTKYTM

SEQ ID NO: 2942 - protein, 9 aa, Severe acute respiratory syndrome coronavirus 2
  REGION 1..9: note = Table A: HLA-A*36:01H HLA-A*30:02H
KYTMADLVY

SEQ ID NO: 2943 - protein, 9 aa, Severe acute respiratory syndrome coronavirus 2
  REGION 1..9: note = Table A: HLA-A*68:02H HLA-A*02:01H
YTMADLVYA

SEQ ID NO: 2944 - protein, 9 aa, Severe acute respiratory syndrome coronavirus 2
  REGION 1..9: note = Table A: HLA-B*48:01H HLA-A*11:303H HLA-C*16:04H HLA-A*29:01H HLA-A*29:02H HLA-C*07:01H HLA-A*02:11H HLA-A*68:02M HLA-B*35:03M HLA-C*15:05H HLA-A*02:04H HLA-A*02:05H HLA-A*02:06H HLA-A*02:07M HLA-A*02:08H
  REGION 1..9: note = CONT. FROM ABOVE: HLA-B*14:01M HLA-A*02:01H HLA-A*02:02H HLA- A*02:03M HLA-B*35:01M HLA-C*08:01H HLA-B*38:01H HLA-B*38:02H HLA-A*32:01H HLA-B*15:01H HLA-B*15:02H HLA-B*39:01M HLA-B*07 :05M HLA-B*13:02H
TMADLVYAL

SEQ ID NO: 2945 - protein, 9 aa, Severe acute respiratory syndrome coronavirus 2
  REGION 1..9: note = Table A: HLA-A*33:03H HLA-A*68:01H HLA-A*34:01H HLA-A*34:02H HLA-A*66:01H
MADLVYALR

SEQ ID NO: 2946 - protein, 9 aa, Severe acute respiratory syndrome coronavirus 2
  REGION 1..9: note = Table A: HLA-A*11:303M HLA-B*57:01H HLA-A*25:01H HLA-B*46:01H HLA-A*26:01M HLA-A*26:02H HLA-A*29:01H HLA-A*29:02H HLA-B*08:01H HLA-B*18:01H HLA-C*03:02H HLA-A*30:02M HLA-C*12:02H HLA-C*12:03H HLA-A*02:04H
  REGION 1..9: note = CONT. FROM ABOVE: HLA-A*02:02H HLA-A*02:03M HLA-B*35:01M HLA- B*35:07H HLA-B*38:02H HLA-A*32:01H HLA-B*15:01H HLA-B*15:02H HLA-B*15:03M HLA-B*07:05H HLA-C*02:02H HLA-B*15:11H
TLKEILVTY

SEQ ID NO: 2947 - protein, 9 aa, Severe acute respiratory syndrome coronavirus 2
  REGION 1..9: note = Table A: HLA-B*45:01H HLA-B*40:06H HLA-B*50:01H
KEILVTYNC

SEQ ID NO: 2948 - protein, 9 aa, Severe acute respiratory syndrome coronavirus 2
  REGION 1..9: note = Table A: HLA-B*40:02H
YDFVENPDI

SEQ ID NO: 2949 - protein, 9 aa, Severe acute respiratory syndrome coronavirus 2
  REGION 1..9: note = Table A: HLA-B*39:01H
DFVENPDIL

SEQ ID NO: 2950 - protein, 9 aa, Severe acute respiratory syndrome coronavirus 2
  REGION 1..9: note = Table A: HLA-A*68:01H HLA-A*34:01M HLA-A*34:02H HLA-A*66:01M
FVENPDILR

SEQ ID NO: 2951 - protein, 9 aa, Severe acute respiratory syndrome coronavirus 2
  REGION 1..9: note = Table A: HLA-B*44:02H HLA-B*44:05M HLA-C*16:04H HLA-C*06:02H HLA-B*45:01M HLA-B*44:03M HLA-B*18:01H HLA-A*68:02H HLA-C*15:05H HLA-C*15:02M HLA-A*02:04H HLA-A*02:05H HLA-A*02:06H HLA-A*02:07H HLA-A*02:02H HLA-A*02:03H
  REGION 1..9: note = CONT. FROM ABOVE: HLA-B*51:01H HLA-B*52:01H HLA-C*08:01H HLA- B*37:01H HLA-B*38:02M HLA-B*40:01H HLA-B*40:02H HLA-B*40:06M HLA-B*07:05H HLA-B*41:02M HLA-B*13:02H HLA-B*49:01H HLA-C*07 :04M HLA-B*50:01M
VENPDILRV

SEQ ID NO: 2952 - protein, 9 aa, Severe acute respiratory syndrome coronavirus 2
  REGION 1..9: note = Table A: HLA-A*26:01H
ENPDILRVY

SEQ ID NO: 2953 - protein, 9 aa, Severe acute respiratory syndrome coronavirus 2
  REGION 1..9: note = Table A: HLA-B*54:01H
NPDILRVYA

SEQ ID NO: 2954 - protein, 9 aa, Severe acute respiratory syndrome coronavirus 2
  REGION 1..9: note = Table A: HLA-A*33:01H HLA-A*68:02H
DILRVYANL

SEQ ID NO: 2955 - protein, 9 aa, Severe acute respiratory syndrome coronavirus 2
  REGION 1..9: note = Table A: HLA-A*74:01M HLA-A*03:01H HLA-A*11:01H HLA-A*11:02H HLA-A*34:01H HLA-A*34:02H HLA-A*31:01H HLA-A*66:01H
RVYANLGER

SEQ ID NO: 2956 - protein, 9 aa, Severe acute respiratory syndrome coronavirus 2
  REGION 1..9: note = Table A: HLA-A*24:02H
VYANLGERV

SEQ ID NO: 2957 - protein, 9 aa, Severe acute respiratory syndrome coronavirus 2
  REGION 1..9: note = Table A: HLA-A*34:01H HLA-A*66:01H
YANLGERVR

SEQ ID NO: 2958 - protein, 9 aa, Severe acute respiratory syndrome coronavirus 2
  REGION 1..9: note = Table A: HLA-A*02:02H HLA-A*02:03M
NLGERVRQA

SEQ ID NO: 2959 - protein, 9 aa, Severe acute respiratory syndrome coronavirus 2
  REGION 1..9: note = Table A: HLA-B*40:02H HLA-B*41:02M
GERVRQALL

SEQ ID NO: 2960 - protein, 9 aa, Severe acute respiratory syndrome coronavirus 2
  REGION 1..9: note = Table A: HLA-B*58:01H HLA-B*58:02H HLA-C*16:01H HLA-B*57:01H HLA-B*46:01H HLA-B*08:01M HLA-B*53:01H HLA-C*15:05H HLA-C*12:02H HLA-B*35:01M HLA-B*35:07M HLA-B*38:02H HLA-B*15:01H HLA-B*15:02M HLA-B*07:05H HLA-B*57:03M
  REGION 1..9: note = CONT. FROM ABOVE: HLA-C*02:02H
QALLKTVQF

SEQ ID NO: 2961 - protein, 9 aa, Severe acute respiratory syndrome coronavirus 2
  REGION 1..9: note = Table A: HLA-A*02:11H HLA-A*02:04H HLA-A*02:01M HLA-A*02:02H HLA-B*38:02H HLA-B*13:02H
ALLKTVQFC

SEQ ID NO: 2962 - protein, 9 aa, Severe acute respiratory syndrome coronavirus 2
  REGION 1..9: note = Table A: HLA-B*37:01H
CDAMRNAGI

SEQ ID NO: 2963 - protein, 9 aa, Severe acute respiratory syndrome coronavirus 2
  REGION 1..9: note = Table A: HLA-C*15:05H HLA-B*51:01M
DAMRNAGIV

SEQ ID NO: 2964 - protein, 9 aa, Severe acute respiratory syndrome coronavirus 2
  REGION 1..9: note = Table A: HLA-C*06:02H HLA-B*27:05M HLA-A*68:02H HLA-B*14:01M HLA-B*38:02M HLA-B*39:06H HLA-B*39:01H
MRNAGIVGV

SEQ ID NO: 2965 - protein, 9 aa, Severe acute respiratory syndrome coronavirus 2
  REGION 1..9: note = Table A: HLA-B*48:01H HLA-C*07:01H HLA-C*15:05M HLA-C*15:02H HLA-B*07:04H
RNAGIVGVL

SEQ ID NO: 2966 - protein, 9 aa, Severe acute respiratory syndrome coronavirus 2
  REGION 1..9: note = Table A: HLA-A*11:303H HLA-B*44:05H HLA-C*03:03H HLA-C*12:05H HLA-C*03:04H HLA-C*15:05H HLA-C*15:02H HLA-C*17:01H HLA-C*08:01H HLA-B*38:02H HLA-B*40:02H HLA-B*41:02H HLA-C*07:04H
AGIVGVLTL

SEQ ID NO: 2967 - protein, 9 aa, Severe acute respiratory syndrome coronavirus 2
  REGION 1..9: note = Table A: HLA-B*38:02H HLA-B*39:01H
NQDLNGNWY

SEQ ID NO: 2968 - protein, 9 aa, Severe acute respiratory syndrome coronavirus 2
  REGION 1..9: note = Table A: HLA-B*50:01H
YDFGDFIQT

SEQ ID NO: 2969 - protein, 9 aa, Severe acute respiratory syndrome coronavirus 2
  REGION 1..9: note = Table A: HLA-C*08:02H
FGDFIQTTP

SEQ ID NO: 2970 - protein, 9 aa, Severe acute respiratory syndrome coronavirus 2
  REGION 1..9: note = Table A: HLA-B*38:02H HLA-B*13:02M
IQTTPGSGV

SEQ ID NO: 2971 - protein, 9 aa, Severe acute respiratory syndrome coronavirus 2
  REGION 1..9: note = Table A: HLA-B*56:01H HLA-B*55:02H HLA-B*35:03H HLA-C*15:05H HLA-B*55:01H HLA-B*54:01H
TPGSGVPVV

SEQ ID NO: 2972 - protein, 9 aa, Severe acute respiratory syndrome coronavirus 2
  REGION 1..9: note = Table A: HLA-B*58:01H HLA-A*30:02H HLA-B*35:01H HLA-B*35:08H HLA-B*35:07M HLA-B*38:02H HLA-B*39:01H HLA-B*07:05H HLA-B*15:11H
SGVPVVDSY

SEQ ID NO: 2973 - protein, 9 aa, Severe acute respiratory syndrome coronavirus 2
  REGION 1..9: note = Table A: HLA-A*30:02H
GVPVVDSYY

SEQ ID NO: 2974 - protein, 9 aa, Severe acute respiratory syndrome coronavirus 2
  REGION 1..9: note = Table A: HLA-C*04:03M HLA-A*02:07M HLA-C*05:01H
VVDSYYSLL

SEQ ID NO: 2975 - protein, 9 aa, Severe acute respiratory syndrome coronavirus 2
  REGION 1..9: note = Table A: HLA-A*24:02H HLA-A*24:07H HLA-C*08:01H
YYSLLMPIL

SEQ ID NO: 2976 - protein, 9 aa, Severe acute respiratory syndrome coronavirus 2
  REGION 1..9: note = Table A: HLA-A*11:303H HLA-A*02:11H HLA-C*15:05H HLA-A*02:04H HLA-A*02:07H HLA-B*14:01H HLA-A*02:01M HLA-A*02:03H HLA-C*08:01H HLA-B*38:02H HLA-B*40:06H HLA-B*13:02H
SLLMPILTL

SEQ ID NO: 2977 - protein, 9 aa, Severe acute respiratory syndrome coronavirus 2
  REGION 1..9: note = Table A: HLA-A*02:11H HLA-A*02:04H HLA-A*02:01H HLA-A*02:02H HLA-A*02:03H HLA-B*38:02H
LLMPILTLT

SEQ ID NO: 2978 - protein, 9 aa, Severe acute respiratory syndrome coronavirus 2
  REGION 1..9: note = Table A: HLA-B*56:01H HLA-B*55:02H HLA-C*15:05H HLA-B*55:01H HLA-B*39:06H HLA-B*54:01H HLA-B*50:01H
MPILTLTRA

SEQ ID NO: 2979 - protein, 9 aa, Severe acute respiratory syndrome coronavirus 2
  REGION 1..9: note = Table A: HLA-B*39:01H
TRALTAESH

SEQ ID NO: 2980 - protein, 9 aa, Severe acute respiratory syndrome coronavirus 2
  REGION 1..9: note = Table A: HLA-B*44:05M HLA-B*44:03H HLA-B*40:01H HLA-B*40:02H HLA-B*41:02M
AESHVDTDL

SEQ ID NO: 2981 - protein, 9 aa, Severe acute respiratory syndrome coronavirus 2
  REGION 1..9: note = Table A: HLA-B*38:02H HLA-B*39:01H HLA-B*15:10H
SHVDTDLTK

SEQ ID NO: 2982 - protein, 9 aa, Severe acute respiratory syndrome coronavirus 2
  REGION 1..9: note = Table A: HLA-A*68:02H HLA-B*38:02H
DTDLTKPYI

SEQ ID NO: 2983 - protein, 9 aa, Severe acute respiratory syndrome coronavirus 2
  REGION 1..9: note = Table A: HLA-C*15:05H HLA-B*07:04H
KPYIKWDLL

SEQ ID NO: 2984 - protein, 9 aa, Severe acute respiratory syndrome coronavirus 2
  REGION 1..9: note = Table A: HLA-C*04:03H
KWDLLKYDF

SEQ ID NO: 2985 - protein, 9 aa, Severe acute respiratory syndrome coronavirus 2
  REGION 1..9: note = Table A: HLA-A*36:01H HLA-C*04:01H HLA-C*04:03H HLA-C*07:02H HLA-A*02:07H HLA-A*24:07H HLA-C*08:01M HLA-C*08:02H HLA-B*38:02H HLA-B*40:01H HLA-C*05:01H HLA-B*13:01M
KYDFTEERL

SEQ ID NO: 2986 - protein, 9 aa, Severe acute respiratory syndrome coronavirus 2
  REGION 1..9: note = Table A: HLA-C*04:03H
FTEERLKLF

SEQ ID NO: 2987 - protein, 9 aa, Severe acute respiratory syndrome coronavirus 2
  REGION 1..9: note = Table A: HLA-B*38:02H
ERLKLFDRY

SEQ ID NO: 2988 - protein, 9 aa, Severe acute respiratory syndrome coronavirus 2
  REGION 1..9: note = Table A: HLA-B*58:02H HLA-B*07:04H
RLKLFDRYF

SEQ ID NO: 2989 - protein, 9 aa, Severe acute respiratory syndrome coronavirus 2
  REGION 1..9: note = Table A: HLA-A*74:01M HLA-A*03:01H HLA-A*36:01H HLA-A*29:02M HLA-A*30:02M HLA-A*02:02H HLA-A*32:01M HLA-B*15:03H
KLFDRYFKY

SEQ ID NO: 2990 - protein, 9 aa, Severe acute respiratory syndrome coronavirus 2
  REGION 1..9: note = Table A: HLA-C*14:02H HLA-C*14:03M HLA-B*46:01H HLA-A*29:02M HLA-A*30:02H HLA-A*24:07H
YFKYWDQTY

SEQ ID NO: 2991 - protein, 9 aa, Severe acute respiratory syndrome coronavirus 2
  REGION 1..9: note = Table A: HLA-B*15:03H
FKYWDQTYH

SEQ ID NO: 2992 - protein, 9 aa, Severe acute respiratory syndrome coronavirus 2
  REGION 1..9: note = Table A: HLA-B*14:01H HLA-B*38:02H HLA-B*13:02H
DQTYHPNCV

SEQ ID NO: 2993 - protein, 9 aa, Severe acute respiratory syndrome coronavirus 2
  REGION 1..9: note = Table A: HLA-B*38:02H
YHPNCVNCL

SEQ ID NO: 2994 - protein, 9 aa, Severe acute respiratory syndrome coronavirus 2
  REGION 1..9: note = Table A: HLA-A*02:11H
ILHCANFNV

SEQ ID NO: 2995 - protein, 9 aa, Severe acute respiratory syndrome coronavirus 2
  REGION 1..9: note = Table A: HLA-B*38:02H HLA-B*15:10H
LHCANFNVL

SEQ ID NO: 2996 - protein, 9 aa, Severe acute respiratory syndrome coronavirus 2
  REGION 1..9: note = Table A: HLA-B*38:02H HLA-B*15:02H
HCANFNVLF

SEQ ID NO: 2997 - protein, 9 aa, Severe acute respiratory syndrome coronavirus 2
  REGION 1..9: note = Table A: HLA-B*58:01H HLA-A*11:303H HLA-C*16:01H HLA-B*57:01H HLA-A*25:01M HLA-B*46:01M HLA-A*26:02H HLA-C*03:03M HLA-C*03:02H HLA-C*03:04M HLA-C*15:05M HLA-C*12:02M HLA-C*12:03H HLA-A*34:01H HLA-A*34:02H
  REGION 1..9: note = CONT. FROM ABOVE: HLA-C*07:27H HLA-B*38:02H HLA-B*15:01H HLA- B*07:05M HLA-B*57:03M HLA-C*02:02H HLA-A*66:01M
STVFPPTSF

SEQ ID NO: 2998 - protein, 9 aa, Severe acute respiratory syndrome coronavirus 2
  REGION 1..9: note = Table A: HLA-A*34:01M HLA-A*34:02H HLA-B*38:02H HLA-A*66:01M
TVFPPTSFG

SEQ ID NO: 2999 - protein, 9 aa, Severe acute respiratory syndrome coronavirus 2
  REGION 1..9: note = Table A: HLA-C*15:05H
FPPTSFGPL

SEQ ID NO: 3000 - protein, 9 aa, Severe acute respiratory syndrome coronavirus 2
  REGION 1..9: note = Table A: HLA-A*34:02H HLA-A*66:01H
PTSFGPLVR

SEQ ID NO: 3001 - protein, 9 aa, Severe acute respiratory syndrome coronavirus 2
  REGION 1..9: note = Table A: HLA-A*11:303H HLA-A*03:01H HLA-A*11:01M HLA-A*11:02M HLA-A*34:02M HLA-C*07:27H
TSFGPLVRK

SEQ ID NO: 3002 - protein, 9 aa, Severe acute respiratory syndrome coronavirus 2
  REGION 1..9: note = Table A: HLA-C*06:02H
SFGPLVRKI

SEQ ID NO: 3003 - protein, 9 aa, Severe acute respiratory syndrome coronavirus 2
  REGION 1..9: note = Table A: HLA-B*07:04H
GPLVRKIFV

SEQ ID NO: 3004 - protein, 9 aa, Severe acute respiratory syndrome coronavirus 2
  REGION 1..9: note = Table A: HLA-B*58:01H HLA-B*46:01H HLA-C*12:02H HLA-B*15:01H HLA-B*15:03H HLA-B*57:03M
KIFVDGVPF

SEQ ID NO: 3005 - protein, 9 aa, Severe acute respiratory syndrome coronavirus 2
  REGION 1..9: note = Table A: HLA-C*14:03H HLA-A*02:04H HLA-A*23:01H
IFVDGVPFV

SEQ ID NO: 3006 - protein, 9 aa, Severe acute respiratory syndrome coronavirus 2
  REGION 1..9: note = Table A: HLA-C*04:03H HLA-A*02:11M HLA-A*68:02M HLA-B*35:03M HLA-C*15:05H HLA-C*15:02H HLA-A*02:04H HLA-A*02:06H HLA-A*02:07H HLA-A*02:01H HLA-B*35:02H HLA-C*08:01M HLA-C*08:02M HLA-B*35:12H HLA-B*38:02M HLA-B*39:01H
  REGION 1..9: note = CONT. FROM ABOVE: HLA-C*05:01M HLA-B*13:02M
FVDGVPFVV

SEQ ID NO: 3007 - protein, 9 aa, Severe acute respiratory syndrome coronavirus 2
  REGION 1..9: note = Table A: HLA-B*46:01H HLA-A*29:01H HLA-A*29:02H HLA-B*18:01H HLA-B*27:02H HLA-B*53:01M HLA-A*30:02H HLA-C*15:05H HLA-B*35:01H HLA-B*35:08H HLA-B*35:07H HLA-B*38:02M HLA-B*15:01H HLA-B*15:02H HLA-B*15:03H HLA-B*07:05H
  REGION 1..9: note = CONT. FROM ABOVE: HLA-B*15:11H
VPFVVSTGY

SEQ ID NO: 3008 - protein, 9 aa, Severe acute respiratory syndrome coronavirus 2
  REGION 1..9: note = Table A: HLA-A*34:01H HLA-B*38:02H HLA-B*15:02H HLA-A*66:01H
FVVSTGYHF

SEQ ID NO: 3009 - protein, 9 aa, Severe acute respiratory syndrome coronavirus 2
  REGION 1..9: note = Table A: HLA-A*74:01M HLA-A*11:01H HLA-A*11:02H HLA-A*33:01H HLA-A*33:03H HLA-A*30:02H HLA-A*68:01H HLA-A*34:01H HLA-A*34:02H HLA-A*31:01H HLA-A*66:01M
VVSTGYHFR

SEQ ID NO: 3010 - protein, 9 aa, Severe acute respiratory syndrome coronavirus 2
  REGION 1..9: note = Table A: HLA-C*15:02H
STGYHFREL

SEQ ID NO: 3011 - protein, 9 aa, Severe acute respiratory syndrome coronavirus 2
  REGION 1..9: note = Table A: HLA-B*13:02H
GYHFRELGV

SEQ ID NO: 3012 - protein, 9 aa, Severe acute respiratory syndrome coronavirus 2
  REGION 1..9: note = Table A: HLA-B*38:02H HLA-B*15:10H
YHFRELGVV

SEQ ID NO: 3013 - protein, 9 aa, Severe acute respiratory syndrome coronavirus 2
  REGION 1..9: note = Table A: HLA-A*11:303H HLA-A*02:11H HLA-A*68:02H HLA-C*15:05H HLA-A*02:05M HLA-A*02:06M HLA-A*02:07H HLA-A*02:08M HLA-A*02:01H HLA-A*02:02M HLA-B*35:02M HLA-C*08:01M HLA-B*35:12H HLA-B*38:01H HLA-B*38:02H
  REGION 1..9: note = CONT. FROM ABOVE: HLA-B*57:03H HLA-B*13:01H HLA-C*07:04H
VVHNQDVNL

SEQ ID NO: 3014 - protein, 9 aa, Severe acute respiratory syndrome coronavirus 2
  REGION 1..9: note = Table A: HLA-B*38:02H
VHNQDVNLH

SEQ ID NO: 3015 - protein, 9 aa, Severe acute respiratory syndrome coronavirus 2
  REGION 1..9: note = Table A: HLA-B*39:01H
NQDVNLHSS

SEQ ID NO: 3016 - protein, 9 aa, Severe acute respiratory syndrome coronavirus 2
  REGION 1..9: note = Table A: HLA-A*68:01H
QDVNLHSSR

SEQ ID NO: 3017 - protein, 9 aa, Severe acute respiratory syndrome coronavirus 2
  REGION 1..9: note = Table A: HLA-A*33:01M HLA-A*33:03M HLA-A*26:03H HLA-A*68:01H HLA-A*68:02H HLA-C*15:05H HLA-A*34:01H HLA-A*34:02H HLA-B*38:02H HLA-B*15:02H HLA-A*66:01M
DVNLHSSRL

SEQ ID NO: 3018 - protein, 9 aa, Severe acute respiratory syndrome coronavirus 2
  REGION 1..9: note = Table A: HLA-B*38:02H HLA-B*15:02M
NLHSSRLSF

SEQ ID NO: 3019 - protein, 9 aa, Severe acute respiratory syndrome coronavirus 2
  REGION 1..9: note = Table A: HLA-B*07:04H
SSRLSFKEL

SEQ ID NO: 3020 - protein, 9 aa, Severe acute respiratory syndrome coronavirus 2
  REGION 1..9: note = Table A: HLA-B*27:05H HLA-B*14:02H HLA-B*38:02H
SRLSFKELL

SEQ ID NO: 3021 - protein, 9 aa, Severe acute respiratory syndrome coronavirus 2
  REGION 1..9: note = Table A: HLA-C*15:02M HLA-A*02:02H HLA-B*38:02H HLA-B*13:01H HLA-B*13:02M
RLSFKELLV

SEQ ID NO: 3022 - protein, 9 aa, Severe acute respiratory syndrome coronavirus 2
  REGION 1..9: note = Table A: HLA-B*58:01M HLA-B*58:02H HLA-A*36:01M HLA-B*57:01H HLA-B*46:01H HLA-A*29:02H HLA-C*03:02M HLA-C*15:05H HLA-C*12:03H HLA-C*15:02H HLA-B*35:07H HLA-B*38:02H HLA-B*15:01H HLA-B*15:02H HLA-B*15:03H HLA-B*57:03M
  REGION 1..9: note = CONT. FROM ABOVE: HLA-C*02:02H
LSFKELLVY

SEQ ID NO: 3023 - protein, 9 aa, Severe acute respiratory syndrome coronavirus 2
  REGION 1..9: note = Table A: HLA-A*11:303H HLA-A*02:11H HLA-B*35:03H HLA-C*15:05H HLA-A*02:06H HLA-B*35:01M HLA-B*35:02H HLA-B*35:08H HLA-B*35:07H HLA-C*08:01H HLA-B*35:12M HLA-B*38:02M HLA-B*15:01H HLA-B*15:02H HLA-B*39:01H
  REGION 1..9: note = CONT. FROM ABOVE: HLA-B*07:05H
LVYAADPAM

SEQ ID NO: 3024 - protein, 9 aa, Severe acute respiratory syndrome coronavirus 2
  REGION 1..9: note = Table A: HLA-C*14:03H HLA-A*24:02H
VYAADPAMH

SEQ ID NO: 3025 - protein, 9 aa, Severe acute respiratory syndrome coronavirus 2
  REGION 1..9: note = Table A: HLA-A*11:303M HLA-C*16:01H HLA-C*16:04M HLA-B*46:01M HLA-B*56:01M HLA-A*26:03H HLA-C*03:03M HLA-C*12:05M HLA-A*02:11M HLA-B*55:02M HLA-C*03:02M HLA-C*03:04M HLA-A*68:01H HLA-A*68:02M HLA-B*35:03H
  REGION 1..9: note = CONT. FROM ABOVE: HLA-C*15:05H HLA-B*55:01H HLA-C*12:02M HLA- C*12:03M HLA-A*02:05M HLA-A*02:06H HLA-A*02:02H HLA-A*02:03H HLA-A*34:01M HLA-A*34:02H HLA-C*07:27H HLA-B*35:01H HLA-B*35 :02H HLA-B*51:01H HLA-B*35:07H HLA-C*08:01M HLA-B*35:12H
  REGION 1..9: note = CONT. FROM ABOVE: HLA-B*38:02M HLA-B*54:01H HLA-B*39:01H HLA- B*07:05H HLA-C*02:02H HLA-B*13:02H HLA-A*66:01M HLA-B*50:01H
YAADPAMHA

SEQ ID NO: 3026 - protein, 9 aa, Severe acute respiratory syndrome coronavirus 2
  REGION 1..9: note = Table A: HLA-A*11:303M HLA-C*16:04H HLA-B*56:01M HLA-B*45:01M HLA-C*03:03H HLA-A*02:11H HLA-B*55:02M HLA-C*03:02H HLA-C*03:04H HLA-A*68:02H HLA-B*35:03H HLA-C*15:05H HLA-B*55:01H HLA-A*02:05M HLA-A*02:06M
  REGION 1..9: note = CONT. FROM ABOVE: HLA-A*02:07M HLA-A*02:08H HLA-B*14:01H HLA- A*02:01H HLA-C*07:27H HLA-B*35:02M HLA-C*08:01M HLA-C*08:02M HLA-B*35:12M HLA-B*38:02M HLA-B*39:06H HLA-B*54:01M HLA-B*39 :01H HLA-B*07:05H HLA-B*50:01H
AADPAMHAA

SEQ ID NO: 3027 - protein, 9 aa, Severe acute respiratory syndrome coronavirus 2
  REGION 1..9: note = Table A: HLA-B*38:01H HLA-B*38:02H HLA-B*39:01H HLA-B*15:10H
MHAASGNLL

SEQ ID NO: 3028 - protein, 9 aa, Severe acute respiratory syndrome coronavirus 2
  REGION 1..9: note = Table A: HLA-C*12:05H HLA-B*53:01M HLA-C*03:04H HLA-B*35:03M HLA-C*15:05H HLA-C*15:02H HLA-A*34:01H HLA-B*35:02H HLA-C*17:01M HLA-B*35:07H HLA-B*35:12H HLA-B*38:02M HLA-B*57:03H
HAASGNLLL

SEQ ID NO: 3029 - protein, 9 aa, Severe acute respiratory syndrome coronavirus 2
  REGION 1..9: note = Table A: HLA-A*11:01M HLA-A*11:02H HLA-A*36:01H HLA-A*34:02H HLA-C*07:27H
ASGNLLLDK

SEQ ID NO: 3030 - protein, 9 aa, Severe acute respiratory syndrome coronavirus 2
  REGION 1..9: note = Table A: HLA-A*33:03H HLA-A*31:01H
SGNLLLDKR

SEQ ID NO: 3031 - protein, 9 aa, Severe acute respiratory syndrome coronavirus 2
  REGION 1..9: note = Table A: HLA-B*38:02H
LLDKRTTCF

SEQ ID NO: 3032 - protein, 9 aa, Severe acute respiratory syndrome coronavirus 2
  REGION 1..9: note = Table A: HLA-A*68:02M HLA-C*15:05H
TTCFSVAAL

SEQ ID NO: 3033 - protein, 9 aa, Severe acute respiratory syndrome coronavirus 2
  REGION 1..9: note = Table A: HLA-A*11:303H HLA-A*11:01H HLA-A*11:02H HLA-C*12:05H HLA-A*02:11M HLA-A*68:01H HLA-A*68:02H HLA-C*15:05H HLA-A*02:04H HLA-A*02:05H HLA-A*02:06M HLA-A*02:07H HLA-A*02:08H HLA-B*14:01H HLA-A*02:01M
  REGION 1..9: note = CONT. FROM ABOVE: HLA-A*02:02H HLA-A*02:03H HLA-A*34:01H HLA- B*38:02M HLA-B*07:05H HLA-B*13:02M
SVAALTNNV

SEQ ID NO: 3034 - protein, 9 aa, Severe acute respiratory syndrome coronavirus 2
  REGION 1..9: note = Table A: HLA-B*58:01H HLA-A*11:303M HLA-B*44:05H HLA-C*16:01H HLA-C*16:04H HLA-B*46:01M HLA-C*03:02H HLA-C*03:04H HLA-C*15:05M HLA-C*12:02H HLA-C*07:27H HLA-B*35:01M HLA-B*35:07H HLA-C*08:01H HLA-B*38:02H
  REGION 1..9: note = CONT. FROM ABOVE: HLA-B*15:01H HLA-B*15:02H HLA-B*15:03H HLA- B*39:01H HLA-B*07:05H HLA-B*57:03M
AALTNNVAF

SEQ ID NO: 3035 - protein, 9 aa, Severe acute respiratory syndrome coronavirus 2
  REGION 1..9: note = Table A: HLA-A*68:02H
LTNNVAFQT

SEQ ID NO: 3036 - protein, 9 aa, Severe acute respiratory syndrome coronavirus 2
  REGION 1..9: note = Table A: HLA-A*68:02H HLA-C*15:05H HLA-C*15:02H HLA-B*38:02H HLA-B*49:01H
TNNVAFQTV

SEQ ID NO: 3037 - protein, 9 aa, Severe acute respiratory syndrome coronavirus 2
  REGION 1..9: note = Table A: HLA-A*34:02H
NNVAFQTVK

SEQ ID NO: 3038 - protein, 9 aa, Severe acute respiratory syndrome coronavirus 2
  REGION 1..9: note = Table A: HLA-B*38:02H
FQTVKPGNF

SEQ ID NO: 3039 - protein, 9 aa, Severe acute respiratory syndrome coronavirus 2
  REGION 1..9: note = Table A: HLA-A*11:303H HLA-A*74:01M HLA-A*03:01M HLA-A*03:02M HLA-A*11:01M HLA-A*11:02M HLA-A*33:01H HLA-A*33:03M HLA-A*26:03H HLA-A*30:01M HLA-A*30:02H HLA-A*68:01H HLA-A*34:01H HLA-A*34:02M HLA-C*07:27H
  REGION 1..9: note = CONT. FROM ABOVE: HLA-A*31:01H HLA-A*66:01H
TVKPGNFNK

SEQ ID NO: 3040 - protein, 9 aa, Severe acute respiratory syndrome coronavirus 2
  REGION 1..9: note = Table A: HLA-B*07:04H
KPGNFNKDF

SEQ ID NO: 3041 - protein, 9 aa, Severe acute respiratory syndrome coronavirus 2
  REGION 1..9: note = Table A: HLA-A*24:07H
NFNKDFYDF

SEQ ID NO: 3042 - protein, 9 aa, Severe acute respiratory syndrome coronavirus 2
  REGION 1..9: note = Table A: HLA-A*33:01M HLA-A*33:03M HLA-A*68:01H HLA-A*34:01H HLA-A*34:02M HLA-A*66:01H
DFYDFAVSK

SEQ ID NO: 3043 - protein, 9 aa, Severe acute respiratory syndrome coronavirus 2
  REGION 1..9: note = Table A: HLA-C*04:03H
FYDFAVSKG

SEQ ID NO: 3044 - protein, 9 aa, Severe acute respiratory syndrome coronavirus 2
  REGION 1..9: note = Table A: HLA-B*37:01H
YDFAVSKGF

SEQ ID NO: 3045 - protein, 9 aa, Severe acute respiratory syndrome coronavirus 2
  REGION 1..9: note = Table A: HLA-A*34:01H HLA-A*34:02M HLA-A*66:01M
FAVSKGFFK

SEQ ID NO: 3046 - protein, 9 aa, Severe acute respiratory syndrome coronavirus 2
  REGION 1..9: note = Table A: HLA-C*14:02H HLA-C*14:03H HLA-B*52:01H
GFFKEGSSV

SEQ ID NO: 3047 - protein, 9 aa, Severe acute respiratory syndrome coronavirus 2
  REGION 1..9: note = Table A: HLA-B*48:01H HLA-C*08:02H HLA-B*38:02M HLA-B*15:03H HLA-B*39:01M HLA-B*15:10H
FKEGSSVEL

SEQ ID NO: 3048 - protein, 9 aa, Severe acute respiratory syndrome coronavirus 2
  REGION 1..9: note = Table A: HLA-B*58:01H HLA-B*58:02M HLA-B*57:01H HLA-B*57:03H
SSVELKHFF

SEQ ID NO: 3049 - protein, 9 aa, Severe acute respiratory syndrome coronavirus 2
  REGION 1..9: note = Table A: HLA-B*45:01H HLA-B*40:06M HLA-B*50:01H
VELKHFFFA

SEQ ID NO: 3050 - protein, 9 aa, Severe acute respiratory syndrome coronavirus 2
  REGION 1..9: note = Table A: HLA-C*14:03H
FFFAQDGNA

SEQ ID NO: 3051 - protein, 9 aa, Severe acute respiratory syndrome coronavirus 2
  REGION 1..9: note = Table A: HLA-A*11:303M HLA-C*16:04H HLA-B*46:01M HLA-C*03:03M HLA-C*12:05H HLA-B*53:01H HLA-C*03:02M HLA-C*03:04M HLA-A*68:02H HLA-B*35:03M HLA-C*15:05H HLA-A*02:05H HLA-C*07:27H HLA-B*35:01H HLA-B*35:02M
  REGION 1..9: note = CONT. FROM ABOVE: HLA-B*35:08H HLA-B*51:01H HLA-C*08:01M HLA- C*08:02H HLA-B*35:12H HLA-B*38:02H HLA-B*39:01H
FAQDGNAAI

SEQ ID NO: 3052 - protein, 9 aa, Severe acute respiratory syndrome coronavirus 2
  REGION 1..9: note = Table A: HLA-B*35:01H HLA-B*35:08M HLA-B*35:07H
NAAISDYDY

SEQ ID NO: 3053 - protein, 9 aa, Severe acute respiratory syndrome coronavirus 2
  REGION 1..9: note = Table A: HLA-B*58:01H HLA-A*11:303H HLA-C*16:04H HLA-A*36:01H HLA-B*46:01H HLA-A*26:01H HLA-A*29:02H HLA-A*30:02H HLA-C*12:02H HLA-B*35:01M HLA-B*35:08M HLA-B*35:07H HLA-C*08:01H HLA-B*38:02H HLA-B*15:01H
  REGION 1..9: note = CONT. FROM ABOVE: HLA-B*39:01H HLA-C*02:02H
AAISDYDYY

SEQ ID NO: 3054 - protein, 9 aa, Severe acute respiratory syndrome coronavirus 2
  REGION 1..9: note = Table A: HLA-A*74:01M HLA-A*11:01H HLA-A*11:02H HLA-A*36:01H
AISDYDYYR

SEQ ID NO: 3055 - protein, 9 aa, Severe acute respiratory syndrome coronavirus 2
  REGION 1..9: note = Table A: HLA-B*58:01H HLA-A*36:01H HLA-A*01:01M
ISDYDYYRY

SEQ ID NO: 3056 - protein, 9 aa, Severe acute respiratory syndrome coronavirus 2
  REGION 1..9: note = Table A: HLA-C*14:02H HLA-C*14:03H HLA-A*24:02H HLA-A*24:07H
YYRYNLPTM

SEQ ID NO: 3057 - protein, 9 aa, Severe acute respiratory syndrome coronavirus 2
  REGION 1..9: note = Table A: HLA-B*39:06H
YRYNLPTMC

SEQ ID NO: 3058 - protein, 9 aa, Severe acute respiratory syndrome coronavirus 2
  REGION 1..9: note = Table A: HLA-A*02:11H HLA-A*02:02M HLA-B*38:02H
TMCDIRQLL

SEQ ID NO: 3059 - protein, 9 aa, Severe acute respiratory syndrome coronavirus 2
  REGION 1..9: note = Table A: HLA-B*48:01H HLA-A*02:11M HLA-C*15:02M HLA-A*02:04H HLA-A*02:06M HLA-B*52:01M HLA-B*38:02H HLA-B*40:06H HLA-B*15:03H HLA-B*13:02H
RQLLFVVEV

SEQ ID NO: 3060 - protein, 9 aa, Severe acute respiratory syndrome coronavirus 2
  REGION 1..9: note = Table A: HLA-A*02:11H HLA-A*02:04H HLA-B*38:02H
QLLFVVEVV

SEQ ID NO: 3061 - protein, 9 aa, Severe acute respiratory syndrome coronavirus 2
  REGION 1..9: note = Table A: HLA-B*58:01H HLA-A*11:303H HLA-C*16:04H HLA-A*36:01H HLA-A*25:01M HLA-B*46:01H HLA-A*26:01H HLA-A*26:02H HLA-A*26:03M HLA-A*29:01M HLA-A*29:02M HLA-A*01:01H HLA-B*53:01M HLA-A*30:02M HLA-A*68:01H
  REGION 1..9: note = CONT. FROM ABOVE: HLA-A*68:02H HLA-C*15:05H HLA-C*12:02H HLA- A*02:05H HLA-A*02:02H HLA-A*34:01H HLA-A*34:02H HLA-B*35:01H HLA-B*35:08M HLA-B*35:07H HLA-B*38:02H HLA-B*15:01M HLA-B*15 :02H HLA-B*39:01M HLA-B*07:05H HLA-C*02:02H HLA-A*66:01H
FVVEVVDKY

SEQ ID NO: 3062 - protein, 9 aa, Severe acute respiratory syndrome coronavirus 2
  REGION 1..9: note = Table A: HLA-A*26:01H HLA-A*26:03H HLA-A*68:02M
EVVDKYFDC

SEQ ID NO: 3063 - protein, 9 aa, Severe acute respiratory syndrome coronavirus 2
  REGION 1..9: note = Table A: HLA-A*36:01H HLA-A*01:01H
VVDKYFDCY

SEQ ID NO: 3064 - protein, 9 aa, Severe acute respiratory syndrome coronavirus 2
  REGION 1..9: note = Table A: HLA-A*11:303H HLA-A*03:01H HLA-A*03:02H HLA-A*11:01M HLA-A*11:02M HLA-A*36:01M HLA-B*27:02H HLA-A*30:02H HLA-A*68:01H HLA-A*34:01H HLA-A*34:02M HLA-C*07:27H HLA-A*66:01H
QVIVNNLDK

SEQ ID NO: 3065 - protein, 9 aa, Severe acute respiratory syndrome coronavirus 2
  REGION 1..9: note = Table A: HLA-A*11:303H HLA-A*74:01M HLA-A*03:01H HLA-A*03:02M HLA-A*11:01M HLA-A*11:02M HLA-A*36:01H HLA-A*34:02H HLA-C*07:27H
KSAGFPFNK

SEQ ID NO: 3066 - protein, 9 aa, Severe acute respiratory syndrome coronavirus 2
  REGION 1..9: note = Table A: HLA-B*58:01H HLA-B*57:01H HLA-B*53:01M HLA-A*34:01H HLA-A*34:02H HLA-B*57:03M
SAGFPFNKW

SEQ ID NO: 3067 - protein, 9 aa, Severe acute respiratory syndrome coronavirus 2
  REGION 1..9: note = Table A: HLA-B*56:01M HLA-B*55:02H HLA-B*55:01M HLA-B*54:01M
FPFNKWGKA

SEQ ID NO: 3068 - protein, 9 aa, Severe acute respiratory syndrome coronavirus 2
  REGION 1..9: note = Table A: HLA-A*29:02H
KWGKARLYY

SEQ ID NO: 3069 - protein, 9 aa, Severe acute respiratory syndrome coronavirus 2
  REGION 1..9: note = Table A: HLA-C*16:01H HLA-B*57:03H
KARLYYDSM

SEQ ID NO: 3070 - protein, 9 aa, Severe acute respiratory syndrome coronavirus 2
  REGION 1..9: note = Table A: HLA-A*03:01H HLA-A*36:01M HLA-A*29:02H HLA-A*30:02M HLA-B*38:02H HLA-B*15:01M HLA-B*15:03M
RLYYDSMSY

SEQ ID NO: 3071 - protein, 9 aa, Severe acute respiratory syndrome coronavirus 2
  REGION 1..9: note = Table A: HLA-A*11:303H HLA-A*68:02H HLA-B*35:03M HLA-C*15:05H HLA-B*14:01H HLA-B*35:01H HLA-B*35:02M HLA-C*08:01M HLA-B*35:12H HLA-B*38:02M HLA-B*39:01H
MSYEDQDAL

SEQ ID NO: 3072 - protein, 9 aa, Severe acute respiratory syndrome coronavirus 2
  REGION 1..9: note = Table A: HLA-C*04:01H HLA-C*04:03H HLA-A*24:02M HLA-A*24:07H HLA-A*23:01M HLA-B*39:01H
SYEDQDALF

SEQ ID NO: 3073 - protein, 9 aa, Severe acute respiratory syndrome coronavirus 2
  REGION 1..9: note = Table A: HLA-B*49:01H
YEDQDALFA

SEQ ID NO: 3074 - protein, 9 aa, Severe acute respiratory syndrome coronavirus 2
  REGION 1..9: note = Table A: HLA-B*27:02H HLA-B*37:01H
QDALFAYTK

SEQ ID NO: 3075 - protein, 9 aa, Severe acute respiratory syndrome coronavirus 2
  REGION 1..9: note = Table A: HLA-A*33:01H HLA-A*33:03M HLA-A*26:03H HLA-A*68:01H HLA-A*34:01H HLA-A*34:02M HLA-A*66:01H
DALFAYTKR

SEQ ID NO: 3076 - protein, 9 aa, Severe acute respiratory syndrome coronavirus 2
  REGION 1..9: note = Table A: HLA-C*16:01H HLA-B*08:01H HLA-C*03:02H HLA-C*12:03H HLA-B*51:01M HLA-B*38:02H
FAYTKRNVI

SEQ ID NO: 3077 - protein, 9 aa, Severe acute respiratory syndrome coronavirus 2
  REGION 1..9: note = Table A: HLA-B*38:02H
TKRNVIPTI

SEQ ID NO: 3078 - protein, 9 aa, Severe acute respiratory syndrome coronavirus 2
  REGION 1..9: note = Table A: HLA-A*11:303M HLA-A*25:01M HLA-B*46:01M HLA-A*26:01H HLA-A*26:02H HLA-A*26:03H HLA-C*03:03H HLA-A*02:11H HLA-B*53:01H HLA-C*03:02H HLA-C*03:04H HLA-A*68:01H HLA-A*68:02M HLA-B*35:03H HLA-C*15:05M
  REGION 1..9: note = CONT. FROM ABOVE: HLA-C*12:02M HLA-C*12:03H HLA-A*02:04M HLA- A*02:05H HLA-A*02:06M HLA-A*02:07H HLA-A*02:08H HLA-A*02:01H HLA-A*02:02M HLA-A*02:03M HLA-A*34:01M HLA-A*34:02H HLA-C*07 :27H HLA-B*35:01H HLA-B*35:02H HLA-B*35:08H HLA-C*17:01H
  REGION 1..9: note = CONT. FROM ABOVE: HLA-B*35:07M HLA-C*08:01M HLA-B*35:12H HLA- B*38:02H HLA-B*15:01M HLA-B*15:02H HLA-B*39:01H HLA-B*07:05M HLA-C*02:02H HLA-C*07:04M HLA-A*66:01M
NVIPTITQM

SEQ ID NO: 3079 - protein, 9 aa, Severe acute respiratory syndrome coronavirus 2
  REGION 1..9: note = Table A: HLA-B*53:01H HLA-B*35:03H HLA-C*15:05M HLA-B*07:02H HLA-B*07:05H
IPTITQMNL

SEQ ID NO: 3080 - protein, 9 aa, Severe acute respiratory syndrome coronavirus 2
  REGION 1..9: note = Table A: HLA-A*34:02H
PTITQMNLK

SEQ ID NO: 3081 - protein, 9 aa, Severe acute respiratory syndrome coronavirus 2
  REGION 1..9: note = Table A: HLA-B*58:01M HLA-A*36:01M HLA-A*29:01M HLA-A*29:02H HLA-A*01:01H HLA-A*30:02H HLA-C*15:05H HLA-A*34:02H HLA-B*35:01H HLA-B*38:02H HLA-B*15:02H HLA-B*07:05H
TITQMNLKY

SEQ ID NO: 3082 - protein, 9 aa, Severe acute respiratory syndrome coronavirus 2
  REGION 1..9: note = Table A: HLA-A*02:11M HLA-A*02:04H HLA-A*02:06H HLA-B*52:01H HLA-B*38:01H HLA-B*38:02H HLA-B*13:01H HLA-B*13:02H
TQMNLKYAI

SEQ ID NO: 3083 - protein, 9 aa, Severe acute respiratory syndrome coronavirus 2
  REGION 1..9: note = Table A: HLA-B*39:06H HLA-B*54:01M
MNLKYAISA

SEQ ID NO: 3084 - protein, 9 aa, Severe acute respiratory syndrome coronavirus 2
  REGION 1..9: note = Table A: HLA-A*33:03H HLA-A*26:03H HLA-A*34:01H HLA-A*34:02H
NLKYAISAK

SEQ ID NO: 3085 - protein, 9 aa, Severe acute respiratory syndrome coronavirus 2
  REGION 1..9: note = Table A: HLA-A*74:01H HLA-A*33:01H HLA-A*33:03H HLA-A*31:01H
KYAISAKNR

SEQ ID NO: 3086 - protein, 9 aa, Severe acute respiratory syndrome coronavirus 2
  REGION 1..9: note = Table A: HLA-B*54:01H
YAISAKNRA

SEQ ID NO: 3087 - protein, 9 aa, Severe acute respiratory syndrome coronavirus 2
  REGION 1..9: note = Table A: HLA-A*74:01H
AISAKNRAR

SEQ ID NO: 3088 - protein, 9 aa, Severe acute respiratory syndrome coronavirus 2
  REGION 1..9: note = Table A: HLA-B*08:01H HLA-B*07:04H
SAKNRARTV

SEQ ID NO: 3089 - protein, 9 aa, Severe acute respiratory syndrome coronavirus 2
  REGION 1..9: note = Table A: HLA-A*68:02H HLA-B*14:01M HLA-B*38:02H HLA-B*39:01H
NRARTVAGV

SEQ ID NO: 3090 - protein, 9 aa, Severe acute respiratory syndrome coronavirus 2
  REGION 1..9: note = Table A: HLA-B*27:05H HLA-B*27:02M HLA-B*14:01H HLA-B*38:02H HLA-B*39:01H
ARTVAGVSI

SEQ ID NO: 3091 - protein, 9 aa, Severe acute respiratory syndrome coronavirus 2
  REGION 1..9: note = Table A: HLA-A*02:08H
RTVAGVSIC

SEQ ID NO: 3092 - protein, 9 aa, Severe acute respiratory syndrome coronavirus 2
  REGION 1..9: note = Table A: HLA-A*11:303H HLA-A*74:01H HLA-A*03:01H HLA-A*03:02H HLA-A*11:01H HLA-A*11:02H HLA-A*33:03H HLA-A*26:03H HLA-A*68:01H HLA-A*34:01M HLA-A*34:02H HLA-A*31:01H HLA-A*66:01H
SICSTMTNR

SEQ ID NO: 3093 - protein, 9 aa, Severe acute respiratory syndrome coronavirus 2
  REGION 1..9: note = Table A: HLA-B*58:02H HLA-C*16:01H
CSTMTNRQF

SEQ ID NO: 3094 - protein, 9 aa, Severe acute respiratory syndrome coronavirus 2
  REGION 1..9: note = Table A: HLA-A*11:01H HLA-A*11:02H HLA-A*34:02H
STMTNRQFH

SEQ ID NO: 3095 - protein, 9 aa, Severe acute respiratory syndrome coronavirus 2
  REGION 1..9: note = Table A: HLA-A*74:01H HLA-A*03:02H HLA-A*11:01H HLA-A*11:02H HLA-A*33:01H HLA-A*33:03M HLA-A*30:02H HLA-A*68:01H HLA-A*34:02H HLA-A*31:01H HLA-A*66:01H
MTNRQFHQK

SEQ ID NO: 3096 - protein, 9 aa, Severe acute respiratory syndrome coronavirus 2
  REGION 1..9: note = Table A: HLA-C*06:02H
NRQFHQKLL

SEQ ID NO: 3097 - protein, 9 aa, Severe acute respiratory syndrome coronavirus 2
  REGION 1..9: note = Table A: HLA-A*74:01M HLA-A*03:01M HLA-A*11:01M HLA-A*11:02H HLA-A*36:01H HLA-B*27:05H HLA-A*30:01M HLA-A*30:02H HLA-A*31:01H HLA-B*13:02M
RQFHQKLLK

SEQ ID NO: 3098 - protein, 9 aa, Severe acute respiratory syndrome coronavirus 2
  REGION 1..9: note = Table A: HLA-B*38:02M HLA-B*15:10H
FHQKLLKSI

SEQ ID NO: 3099 - protein, 9 aa, Severe acute respiratory syndrome coronavirus 2
  REGION 1..9: note = Table A: HLA-B*39:06H
HQKLLKSIA

SEQ ID NO: 3100 - protein, 9 aa, Severe acute respiratory syndrome coronavirus 2
  REGION 1..9: note = Table A: HLA-B*55:02H HLA-B*39:06H
QKLLKSIAA

SEQ ID NO: 3101 - protein, 9 aa, Severe acute respiratory syndrome coronavirus 2
  REGION 1..9: note = Table A: HLA-A*02:11M HLA-A*02:01H
KLLKSIAAT

SEQ ID NO: 3102 - protein, 9 aa, Severe acute respiratory syndrome coronavirus 2
  REGION 1..9: note = Table A: HLA-A*74:01H HLA-A*33:01H HLA-A*33:03M HLA-A*26:03M HLA-A*68:01H HLA-A*34:01M HLA-A*31:01H HLA-A*66:01H
LLKSIAATR

SEQ ID NO: 3103 - protein, 9 aa, Severe acute respiratory syndrome coronavirus 2
  REGION 1..9: note = Table A: HLA-A*11:303H HLA-C*16:01H HLA-B*08:01M HLA-C*03:04H HLA-C*15:05M HLA-C*12:03H HLA-C*15:02H HLA-A*02:03H HLA-B*51:01H HLA-B*38:02M HLA-B*07:02H HLA-B*07:04H HLA-B*07:05H
IAATRGATV

SEQ ID NO: 3104 - protein, 9 aa, Severe acute respiratory syndrome coronavirus 2
  REGION 1..9: note = Table A: HLA-B*58:02H HLA-A*30:01H HLA-C*15:05H HLA-B*07:04H HLA-B*57:03H
ATRGATVVI

SEQ ID NO: 3105 - protein, 9 aa, Severe acute respiratory syndrome coronavirus 2
  REGION 1..9: note = Table A: HLA-A*11:303H HLA-A*74:01H HLA-A*03:01H HLA-A*03:02H HLA-A*11:01H HLA-A*11:02H HLA-A*36:01H HLA-B*57:01H HLA-C*03:03H HLA-A*30:01H HLA-A*30:02H HLA-A*68:01M HLA-A*34:01H HLA-A*34:02H HLA-C*07:27H
  REGION 1..9: note = CONT. FROM ABOVE: HLA-A*31:01H HLA-A*66:01M
ATVVIGTSK

SEQ ID NO: 3106 - protein, 9 aa, Severe acute respiratory syndrome coronavirus 2
  REGION 1..9: note = Table A: HLA-B*58:01H HLA-B*44:05H HLA-A*25:01M HLA-B*46:01H HLA-A*26:01M HLA-A*26:02H HLA-A*26:03M HLA-B*53:01H HLA-A*68:01H HLA-C*15:05H HLA-C*12:02H HLA-A*34:01M HLA-A*34:02H HLA-B*35:01M HLA-B*35:07H HLA-B*15:13M
  REGION 1..9: note = CONT. FROM ABOVE: HLA-B*38:01H HLA-B*38:02M HLA-B*15:01M HLA- B*15:02H HLA-B*15:03H HLA-B*07:05M HLA-B*57:03H HLA-C*02:02H HLA-A*66:01M
TVVIGTSKF

SEQ ID NO: 3107 - protein, 9 aa, Severe acute respiratory syndrome coronavirus 2
  REGION 1..9: note = Table A: HLA-B*46:01H HLA-A*26:01H HLA-A*26:03H HLA-A*29:01H HLA-A*29:02H HLA-A*30:02M HLA-A*34:01H HLA-B*38:02H HLA-B*15:01M HLA-B*15:02H
VVIGTSKFY

SEQ ID NO: 3108 - protein, 9 aa, Severe acute respiratory syndrome coronavirus 2
  REGION 1..9: note = Table A: HLA-B*58:01M HLA-B*57:01H HLA-A*25:01H HLA-A*32:01H HLA-B*57:03M
GTSKFYGGW

SEQ ID NO: 3109 - protein, 9 aa, Severe acute respiratory syndrome coronavirus 2
  REGION 1..9: note = Table A: HLA-C*14:02H HLA-C*14:03M HLA-A*02:11H HLA-A*30:02H HLA-A*24:07H
KFYGGWHNM

SEQ ID NO: 3110 - protein, 9 aa, Severe acute respiratory syndrome coronavirus 2
  REGION 1..9: note = Table A: HLA-C*14:02H HLA-C*14:03H HLA-C*06:02H HLA-C*07:02H HLA-A*24:02H HLA-A*24:07M HLA-A*23:01H
FYGGWHNML

SEQ ID NO: 3111 - protein, 9 aa, Severe acute respiratory syndrome coronavirus 2
  REGION 1..9: note = Table A: HLA-A*34:02H
YGGWHNMLK

SEQ ID NO: 3112 - protein, 9 aa, Severe acute respiratory syndrome coronavirus 2
  REGION 1..9: note = Table A: HLA-B*38:02H HLA-B*15:03H
WHNMLKTVY

SEQ ID NO: 3113 - protein, 9 aa, Severe acute respiratory syndrome coronavirus 2
  REGION 1..9: note = Table A: HLA-A*02:03H HLA-B*38:02H
MLKTVYSDV

SEQ ID NO: 3114 - protein, 9 aa, Severe acute respiratory syndrome coronavirus 2
  REGION 1..9: note = Table A: HLA-B*58:01H HLA-A*11:303M HLA-A*01:01H HLA-C*04:01H HLA-C*04:03H HLA-C*03:03H HLA-A*02:11H HLA-C*03:04M HLA-B*35:03H HLA-C*15:05H HLA-C*15:02H HLA-A*02:05H HLA-A*02:06M HLA-A*02:07M HLA-A*02:01H
  REGION 1..9: note = CONT. FROM ABOVE: HLA-B*35:02M HLA-B*35:08H HLA-C*17:01H HLA- C*08:01M HLA-C*08:02H HLA-B*35:12M HLA-B*38:01H HLA-B*38:02M HLA-B*40:01H HLA-B*39:01H HLA-B*57:03H HLA-C*05:01H HLA-B*13 :01M
YSDVENPHL

SEQ ID NO: 3115 - protein, 9 aa, Severe acute respiratory syndrome coronavirus 2
  REGION 1..9: note = Table A: HLA-B*44:05H HLA-B*37:01H HLA-B*40:02M HLA-B*41:02M HLA-C*07:04H
SDVENPHLM

SEQ ID NO: 3116 - protein, 9 aa, Severe acute respiratory syndrome coronavirus 2
  REGION 1..9: note = Table A: HLA-B*58:01M HLA-B*44:02M HLA-B*44:05M HLA-B*57:01H HLA-B*44:03H HLA-B*53:01H HLA-B*37:01M HLA-A*32:01H HLA-B*57:03H HLA-B*49:01H HLA-C*07:04H
VENPHLMGW

SEQ ID NO: 3117 - protein, 9 aa, Severe acute respiratory syndrome coronavirus 2
  REGION 1..9: note = Table A: HLA-B*35:01H HLA-B*35:07H
NPHLMGWDY

SEQ ID NO: 3118 - protein, 9 aa, Severe acute respiratory syndrome coronavirus 2
  REGION 1..9: note = Table A: HLA-A*74:01H HLA-A*11:02H HLA-A*34:02H
HLMGWDYPK

SEQ ID NO: 3119 - protein, 9 aa, Severe acute respiratory syndrome coronavirus 2
  REGION 1..9: note = Table A: HLA-A*34:01H
DRAMPNMLR

SEQ ID NO: 3120 - protein, 9 aa, Severe acute respiratory syndrome coronavirus 2
  REGION 1..9: note = Table A: HLA-B*58:01H HLA-B*58:02M HLA-C*12:05H HLA-C*15:05M HLA-C*15:02M HLA-B*51:01H HLA-C*08:01H HLA-B*38:02H HLA-B*07:05H HLA-B*57:03M HLA-B*13:02M
RAMPNMLRI

SEQ ID NO: 3121 - protein, 9 aa, Severe acute respiratory syndrome coronavirus 2
  REGION 1..9: note = Table A: HLA-C*14:03H
AMPNMLRIM

SEQ ID NO: 3122 - protein, 9 aa, Severe acute respiratory syndrome coronavirus 2
  REGION 1..9: note = Table A: HLA-B*56:01H HLA-B*55:02H HLA-C*15:05H HLA-B*55:01H HLA-B*39:06H HLA-B*54:01H HLA-B*07:02H HLA-B*07:04H
MPNMLRIMA

SEQ ID NO: 3123 - protein, 9 aa, Severe acute respiratory syndrome coronavirus 2
  REGION 1..9: note = Table A: HLA-A*02:11M
NMLRIMASL

SEQ ID NO: 3124 - protein, 9 aa, Severe acute respiratory syndrome coronavirus 2
  REGION 1..9: note = Table A: HLA-B*55:02H HLA-A*02:01H
RIMASLVLA

SEQ ID NO: 3125 - protein, 9 aa, Severe acute respiratory syndrome coronavirus 2
  REGION 1..9: note = Table A: HLA-A*74:01M HLA-A*36:01H HLA-A*33:03H HLA-A*34:01H HLA-A*31:01H HLA-A*66:01H
IMASLVLAR

SEQ ID NO: 3126 - protein, 9 aa, Severe acute respiratory syndrome coronavirus 2
  REGION 1..9: note = Table A: HLA-A*36:01H HLA-A*68:01H HLA-A*34:01H HLA-A*34:02H HLA-A*66:01H
MASLVLARK

SEQ ID NO: 3127 - protein, 9 aa, Severe acute respiratory syndrome coronavirus 2
  REGION 1..9: note = Table A: HLA-A*74:01H
CSLSHRFYR

SEQ ID NO: 3128 - protein, 9 aa, Severe acute respiratory syndrome coronavirus 2
  REGION 1..9: note = Table A: HLA-A*02:11H HLA-A*02:04M HLA-A*02:02H HLA-A*24:07H
SLSHRFYRL

SEQ ID NO: 3129 - protein, 9 aa, Severe acute respiratory syndrome coronavirus 2
  REGION 1..9: note = Table A: HLA-A*02:11H HLA-A*02:01H HLA-A*02:02M HLA-A*02:03M HLA-B*38:02H HLA-B*13:02H
RLANECAQV

SEQ ID NO: 3130 - protein, 9 aa, Severe acute respiratory syndrome coronavirus 2
  REGION 1..9: note = Table A: HLA-A*11:303H HLA-C*16:04H HLA-C*03:03M HLA-C*12:05H HLA-B*53:01H HLA-C*03:02H HLA-C*03:04M HLA-B*35:03H HLA-C*15:05H HLA-C*12:03H HLA-C*07:27H HLA-B*35:01H HLA-B*35:02H HLA-C*08:01H HLA-B*35:12H
  REGION 1..9: note = CONT. FROM ABOVE: HLA-B*38:02M HLA-C*07:04H
LANECAQVL

SEQ ID NO: 3131 - protein, 9 aa, Severe acute respiratory syndrome coronavirus 2
  REGION 1..9: note = Table A: HLA-A*26:01H HLA-A*26:02M HLA-A*26:03H HLA-A*34:01H HLA-B*35:01H HLA-B*38:02H HLA-B*15:02H
ECAQVLSEM

SEQ ID NO: 3132 - protein, 9 aa, Severe acute respiratory syndrome coronavirus 2
  REGION 1..9: note = Table A: HLA-B*48:01H HLA-A*11:303H HLA-B*38:02H HLA-B*15:01M HLA-B*15:02H HLA-B*15:03H HLA-B*39:01H HLA-B*13:01H HLA-B*13:02H HLA-B*15:10H
AQVLSEMVM

SEQ ID NO: 3133 - protein, 9 aa, Severe acute respiratory syndrome coronavirus 2
  REGION 1..9: note = Table A: HLA-A*02:06H HLA-A*02:01H
QVLSEMVMC

SEQ ID NO: 3134 - protein, 9 aa, Severe acute respiratory syndrome coronavirus 2
  REGION 1..9: note = Table A: HLA-A*02:01M HLA-A*02:02H HLA-A*02:03H HLA-B*38:02H
VLSEMVMCG

SEQ ID NO: 3135 - protein, 9 aa, Severe acute respiratory syndrome coronavirus 2
  REGION 1..9: note = Table A: HLA-A*34:02H HLA-B*38:02M HLA-B*15:01H HLA-B*15:02H HLA-B*15:11H
MVMCGGSLY

SEQ ID NO: 3136 - protein, 9 aa, Severe acute respiratory syndrome coronavirus 2
  REGION 1..9: note = Table A: HLA-B*13:02H
VMCGGSLYV

SEQ ID NO: 3137 - protein, 9 aa, Severe acute respiratory syndrome coronavirus 2
  REGION 1..9: note = Table A: HLA-A*34:02H
MCGGSLYVK

SEQ ID NO: 3138 - protein, 9 aa, Severe acute respiratory syndrome coronavirus 2
  REGION 1..9: note = Table A: HLA-A*02:11H HLA-A*02:03M HLA-C*08:03H
SLYVKPGGT

SEQ ID NO: 3139 - protein, 9 aa, Severe acute respiratory syndrome coronavirus 2
  REGION 1..9: note = Table A: HLA-B*46:01H HLA-A*26:03H HLA-B*55:01H HLA-B*38:02H HLA-B*15:01H HLA-B*15:02H
YVKPGGTSS

SEQ ID NO: 3140 - protein, 9 aa, Severe acute respiratory syndrome coronavirus 2
  REGION 1..9: note = Table A: HLA-A*11:303H HLA-B*46:01M HLA-A*30:02H HLA-B*35:01H HLA-B*38:02H HLA-B*15:01M HLA-B*15:02H HLA-B*39:01H HLA-B*07:05H HLA-B*15:11H
SSGDATTAY

SEQ ID NO: 3141 - protein, 9 aa, Severe acute respiratory syndrome coronavirus 2
  REGION 1..9: note = Table A: HLA-C*15:05H HLA-A*34:01H HLA-B*38:02H HLA-B*15:01H HLA-B*15:02M HLA-A*66:01H
TTAYANSVF

SEQ ID NO: 3142 - protein, 9 aa, Severe acute respiratory syndrome coronavirus 2
  REGION 1..9: note = Table A: HLA-C*14:03H HLA-A*24:02M HLA-A*24:07H HLA-C*08:01H HLA-A*23:01M
AYANSVFNI

SEQ ID NO: 3143 - protein, 9 aa, Severe acute respiratory syndrome coronavirus 2
  REGION 1..9: note = Table A: HLA-C*16:04M HLA-C*03:02H HLA-C*03:04H HLA-B*35:03H HLA-C*12:03H HLA-C*08:01H HLA-B*38:02H HLA-B*54:01H
YANSVFNIC

SEQ ID NO: 3144 - protein, 9 aa, Severe acute respiratory syndrome coronavirus 2
  REGION 1..9: note = Table A: HLA-A*68:02H HLA-B*54:01H
NSVFNICQA

SEQ ID NO: 3145 - protein, 9 aa, Severe acute respiratory syndrome coronavirus 2
  REGION 1..9: note = Table A: HLA-A*02:11M HLA-A*68:02M HLA-A*02:05H HLA-A*02:08H HLA-B*38:02H HLA-B*07:05H HLA-B*13:02M
SVFNICQAV

SEQ ID NO: 3146 - protein, 9 aa, Severe acute respiratory syndrome coronavirus 2
  REGION 1..9: note = Table A: HLA-B*54:01H
FNICQAVTA

SEQ ID NO: 3147 - protein, 9 aa, Severe acute respiratory syndrome coronavirus 2
  REGION 1..9: note = Table A: HLA-A*11:303H HLA-C*03:04H HLA-A*68:02H HLA-C*15:05M HLA-C*01:02H HLA-A*02:05M HLA-A*02:08M HLA-C*07:27H HLA-B*38:02H HLA-B*07:02H HLA-B*15:01H HLA-B*39:01H HLA-B*07:05H
AVTANVNAL

SEQ ID NO: 3148 - protein, 9 aa, Severe acute respiratory syndrome coronavirus 2
  REGION 1..9: note = Table A: HLA-B*58:01H HLA-B*57:01H HLA-A*02:11H HLA-A*68:02M HLA-C*15:05H HLA-C*15:02H HLA-A*02:05M HLA-A*02:06H HLA-A*02:08M HLA-A*02:01H HLA-A*02:02M HLA-C*08:01H HLA-B*38:02H HLA-B*57:03M
VTANVNALL

SEQ ID NO: 3149 - protein, 9 aa, Severe acute respiratory syndrome coronavirus 2
  REGION 1..9: note = Table A: HLA-A*02:02M HLA-B*38:02H HLA-B*13:01H
LLSTDGNKI

SEQ ID NO: 3150 - protein, 9 aa, Severe acute respiratory syndrome coronavirus 2
  REGION 1..9: note = Table A: HLA-B*18:01H HLA-A*30:02H HLA-B*35:01H HLA-B*39:01H HLA-B*07:05H
DGNKIADKY

SEQ ID NO: 3151 - protein, 9 aa, Severe acute respiratory syndrome coronavirus 2
  REGION 1..9: note = Table A: HLA-B*58:02M HLA-A*11:303H HLA-C*04:03H HLA-C*03:03H HLA-B*53:01H HLA-C*03:04M HLA-C*15:05H HLA-C*15:02H HLA-A*02:07H HLA-C*17:01H HLA-C*08:01H HLA-C*08:02M HLA-B*38:02H HLA-B*57:03H HLA-C*05:01M
IADKYVRNL

SEQ ID NO: 3152 - protein, 9 aa, Severe acute respiratory syndrome coronavirus 2
  REGION 1..9: note = Table A: HLA-A*33:03H
KYVRNLQHR

SEQ ID NO: 3153 - protein, 9 aa, Severe acute respiratory syndrome coronavirus 2
  REGION 1..9: note = Table A: HLA-A*02:02H HLA-B*07:04H
YVRNLQHRL

SEQ ID NO: 3154 - protein, 9 aa, Severe acute respiratory syndrome coronavirus 2
  REGION 1..9: note = Table A: HLA-B*13:01H
LQHRLYECL

SEQ ID NO: 3155 - protein, 9 aa, Severe acute respiratory syndrome coronavirus 2
  REGION 1..9: note = Table A: HLA-B*38:02M
QHRLYECLY

SEQ ID NO: 3156 - protein, 9 aa, Severe acute respiratory syndrome coronavirus 2
  REGION 1..9: note = Table A: HLA-B*39:01H
NRDVDTDFV

SEQ ID NO: 3157 - protein, 9 aa, Severe acute respiratory syndrome coronavirus 2
  REGION 1..9: note = Table A: HLA-B*44:05H HLA-B*18:01H HLA-A*24:02H HLA-A*23:01H HLA-B*37:01H HLA-B*38:02H HLA-B*40:02H HLA-B*07:05H HLA-C*07:04H
VDTDFVNEF

SEQ ID NO: 3158 - protein, 9 aa, Severe acute respiratory syndrome coronavirus 2
  REGION 1..9: note = Table A: HLA-B*58:01H HLA-A*36:01H HLA-A*01:01H
DTDFVNEFY

SEQ ID NO: 3159 - protein, 9 aa, Severe acute respiratory syndrome coronavirus 2
  REGION 1..9: note = Table A: HLA-A*29:02H
DFVNEFYAY

SEQ ID NO: 3160 - protein, 9 aa, Severe acute respiratory syndrome coronavirus 2
  REGION 1..9: note = Table A: HLA-A*33:03H HLA-A*26:01H HLA-A*26:03H HLA-A*29:02H HLA-C*03:03H HLA-A*02:11M HLA-B*53:01H HLA-C*03:02H HLA-C*03:04H HLA-A*68:02M HLA-B*35:03H HLA-C*15:02H HLA-A*02:04H HLA-A*02:05H HLA-A*02:06H HLA-A*02:07M
  REGION 1..9: note = CONT. FROM ABOVE: HLA-A*02:02M HLA-A*02:03H HLA-A*34:01H HLA- A*34:02H HLA-C*17:01H HLA-B*35:07H HLA-C*08:01H HLA-B*38:02M HLA-C*02:02H HLA-C*07:04H HLA-A*66:01H
FVNEFYAYL

SEQ ID NO: 3161 - protein, 9 aa, Severe acute respiratory syndrome coronavirus 2
  REGION 1..9: note = Table A: HLA-C*14:02H HLA-C*14:03H HLA-A*24:07M HLA-A*23:01H
FYAYLRKHF

SEQ ID NO: 3162 - protein, 9 aa, Severe acute respiratory syndrome coronavirus 2
  REGION 1..9: note = Table A: HLA-A*24:02H HLA-A*24:07M HLA-A*23:01H
AYLRKHFSM

SEQ ID NO: 3163 - protein, 9 aa, Severe acute respiratory syndrome coronavirus 2
  REGION 1..9: note = Table A: HLA-B*08:01H
YLRKHFSMM

SEQ ID NO: 3164 - protein, 9 aa, Severe acute respiratory syndrome coronavirus 2
  REGION 1..9: note = Table A: HLA-B*15:03M
RKHFSMMIL

SEQ ID NO: 3165 - protein, 9 aa, Severe acute respiratory syndrome coronavirus 2
  REGION 1..9: note = Table A: HLA-B*38:02H
MMILSDDAV

SEQ ID NO: 3166 - protein, 9 aa, Severe acute respiratory syndrome coronavirus 2
  REGION 1..9: note = Table A: HLA-A*02:01H HLA-B*38:02H
ILSDDAVVC

SEQ ID NO: 3167 - protein, 9 aa, Severe acute respiratory syndrome coronavirus 2
  REGION 1..9: note = Table A: HLA-B*58:01M HLA-A*11:303H HLA-A*01:01H HLA-C*04:01H HLA-C*04:03H HLA-C*15:05H HLA-A*02:07H HLA-B*35:01H HLA-B*35:02H HLA-B*35:08H HLA-C*08:01H HLA-C*08:02M HLA-B*35:12H HLA-B*38:02H HLA-B*39:01H
  REGION 1..9: note = CONT. FROM ABOVE: HLA-B*57:03H HLA-C*05:01H
LSDDAVVCF

SEQ ID NO: 3168 - protein, 9 aa, Severe acute respiratory syndrome coronavirus 2
  REGION 1..9: note = Table A: HLA-B*46:01H HLA-A*26:01H HLA-A*29:01H HLA-A*30:02H HLA-B*35:01H HLA-B*38:02M HLA-B*15:01M HLA-B*15:02H HLA-B*15:03H HLA-B*07:05H
AVVCFNSTY

SEQ ID NO: 3169 - protein, 9 aa, Severe acute respiratory syndrome coronavirus 2
  REGION 1..9: note = Table A: HLA-A*68:02H HLA-C*15:05H HLA-A*34:02H
STYASQGLV

SEQ ID NO: 3170 - protein, 9 aa, Severe acute respiratory syndrome coronavirus 2
  REGION 1..9: note = Table A: HLA-C*14:03H HLA-B*39:06H HLA-B*39:01H
TYASQGLVA

SEQ ID NO: 3171 - protein, 9 aa, Severe acute respiratory syndrome coronavirus 2
  REGION 1..9: note = Table A: HLA-B*54:01H
YASQGLVAS

SEQ ID NO: 3172 - protein, 9 aa, Severe acute respiratory syndrome coronavirus 2
  REGION 1..9: note = Table A: HLA-B*58:01H HLA-B*58:02H HLA-B*44:05H HLA-A*30:02H HLA-C*15:05M HLA-B*52:01H HLA-B*38:02H HLA-B*07:05H HLA-B*57:03H HLA-B*13:02H
ASQGLVASI

SEQ ID NO: 3173 - protein, 9 aa, Severe acute respiratory syndrome coronavirus 2
  REGION 1..9: note = Table A: HLA-A*03:02H HLA-A*11:01H HLA-A*11:02H
SQGLVASIK

SEQ ID NO: 3174 - protein, 9 aa, Severe acute respiratory syndrome coronavirus 2
  REGION 1..9: note = Table A: HLA-A*02:03H HLA-B*15:01H
GLVASIKNF

SEQ ID NO: 3175 - protein, 9 aa, Severe acute respiratory syndrome coronavirus 2
  REGION 1..9: note = Table A: HLA-A*11:02H HLA-A*68:01H HLA-A*34:02H HLA-A*66:01H
LVASIKNFK

SEQ ID NO: 3176 - protein, 9 aa, Severe acute respiratory syndrome coronavirus 2
  REGION 1..9: note = Table A: HLA-A*11:303H HLA-C*15:05H HLA-C*15:02M HLA-A*02:06H HLA-B*40:06H
ASIKNFKSV

SEQ ID NO: 3177 - protein, 9 aa, Severe acute respiratory syndrome coronavirus 2
  REGION 1..9: note = Table A: HLA-B*08:01H HLA-B*07:04M
SIKNFKSVL

SEQ ID NO: 3178 - protein, 9 aa, Severe acute respiratory syndrome coronavirus 2
  REGION 1..9: note = Table A: HLA-B*15:03H
IKNFKSVLY

SEQ ID NO: 3179 - protein, 9 aa, Severe acute respiratory syndrome coronavirus 2
  REGION 1..9: note = Table A: HLA-B*58:01H HLA-B*58:02M HLA-A*36:01M HLA-A*29:02M HLA-C*07:01H HLA-A*30:02H HLA-C*15:02H HLA-B*38:02H HLA-B*15:03H HLA-B*57:03H
KNFKSVLYY

SEQ ID NO: 3180 - protein, 9 aa, Severe acute respiratory syndrome coronavirus 2
  REGION 1..9: note = Table A: HLA-A*02:11H HLA-A*68:02H HLA-A*02:04H HLA-A*02:06H HLA-A*02:01H HLA-B*13:02H
SVLYYQNNV

SEQ ID NO: 3181 - protein, 9 aa, Severe acute respiratory syndrome coronavirus 2
  REGION 1..9: note = Table A: HLA-B*38:02H HLA-B*15:01H HLA-B*15:02H HLA-B*15:03H
VLYYQNNVF

SEQ ID NO: 3182 - protein, 9 aa, Severe acute respiratory syndrome coronavirus 2
  REGION 1..9: note = Table A: HLA-C*14:02H HLA-C*14:03M HLA-A*29:02H HLA-A*24:02H
LYYQNNVFM

SEQ ID NO: 3183 - protein, 9 aa, Severe acute respiratory syndrome coronavirus 2
  REGION 1..9: note = Table A: HLA-B*39:06H
QNNVFMSEA

SEQ ID NO: 3184 - protein, 9 aa, Severe acute respiratory syndrome coronavirus 2
  REGION 1..9: note = Table A: HLA-A*24:07H
VFMSEAKCW

SEQ ID NO: 3185 - protein, 9 aa, Severe acute respiratory syndrome coronavirus 2
  REGION 1..9: note = Table A: HLA-B*45:01M HLA-B*40:06H HLA-B*50:01H
TETDLTKGP

SEQ ID NO: 3186 - protein, 9 aa, Severe acute respiratory syndrome coronavirus 2
  REGION 1..9: note = Table A: HLA-B*18:01H HLA-B*40:02H HLA-B*07:05H HLA-B*41:02H
HEFCSQHTM

SEQ ID NO: 3187 - protein, 9 aa, Severe acute respiratory syndrome coronavirus 2
  REGION 1..9: note = Table A: HLA-A*11:303H HLA-A*03:01M HLA-A*03:02H HLA-A*11:01M HLA-A*11:02M HLA-A*34:02M HLA-C*07:27H
CSQHTMLVK

SEQ ID NO: 3188 - protein, 9 aa, Severe acute respiratory syndrome coronavirus 2
  REGION 1..9: note = Table A: HLA-B*39:06H
QHTMLVKQG

SEQ ID NO: 3189 - protein, 9 aa, Severe acute respiratory syndrome coronavirus 2
  REGION 1..9: note = Table A: HLA-B*38:02M HLA-B*15:01H HLA-B*15:02M HLA-B*39:01H
MLVKQGDDY

SEQ ID NO: 3190 - protein, 9 aa, Severe acute respiratory syndrome coronavirus 2
  REGION 1..9: note = Table A: HLA-A*02:05H HLA-B*38:02H
LVKQGDDYV

SEQ ID NO: 3191 - protein, 9 aa, Severe acute respiratory syndrome coronavirus 2
  REGION 1..9: note = Table A: HLA-B*15:03H
VKQGDDYVY

SEQ ID NO: 3192 - protein, 9 aa, Severe acute respiratory syndrome coronavirus 2
  REGION 1..9: note = Table A: HLA-A*02:05H HLA-A*02:02H HLA-B*13:01M
KQGDDYVYL

SEQ ID NO: 3193 - protein, 9 aa, Severe acute respiratory syndrome coronavirus 2
  REGION 1..9: note = Table A: HLA-B*42:01H HLA-B*56:01M HLA-B*53:01H HLA-B*55:02H HLA-A*68:02H HLA-B*35:03M HLA-C*15:05H HLA-B*55:01M HLA-A*34:01H HLA-B*35:01H HLA-B*35:02M HLA-B*51:01H HLA-B*35:07M HLA-B*52:01H HLA-C*08:01H HLA-B*35:12M
  REGION 1..9: note = CONT. FROM ABOVE: HLA-B*38:02M HLA-B*54:01M HLA-B*07:02H HLA- B*07:04H HLA-B*07:05M HLA-B*57:03H HLA-B*49:01H
LPYPDPSRI

SEQ ID NO: 3194 - protein, 9 aa, Severe acute respiratory syndrome coronavirus 2
  REGION 1..9: note = Table A: HLA-C*14:02H HLA-C*14:03H HLA-C*07:02H HLA-A*24:07H
PYPDPSRIL

SEQ ID NO: 3195 - protein, 9 aa, Severe acute respiratory syndrome coronavirus 2
  REGION 1..9: note = Table A: HLA-B*35:07H
YPDPSRILG

SEQ ID NO: 3196 - protein, 9 aa, Severe acute respiratory syndrome coronavirus 2
  REGION 1..9: note = Table A: HLA-B*35:02M HLA-B*35:12H
DIVKTDGTL

SEQ ID NO: 3197 - protein, 9 aa, Severe acute respiratory syndrome coronavirus 2
  REGION 1..9: note = Table A: HLA-C*15:05H HLA-B*38:02H HLA-B*15:01H HLA-B*15:02M
IVKTDGTLM

SEQ ID NO: 3198 - protein, 9 aa, Severe acute respiratory syndrome coronavirus 2
  REGION 1..9: note = Table A: HLA-B*18:01H HLA-B*07:05H
DGTLMIERF

SEQ ID NO: 3199 - protein, 9 aa, Severe acute respiratory syndrome coronavirus 2
  REGION 1..9: note = Table A: HLA-A*02:11H HLA-C*15:02H
GTLMIERFV

SEQ ID NO: 3200 - protein, 9 aa, Severe acute respiratory syndrome coronavirus 2
  REGION 1..9: note = Table A: HLA-B*58:02H HLA-C*14:02H HLA-C*14:03H HLA-A*11:303H HLA-C*16:01M HLA-B*46:01M HLA-B*08:01H HLA-C*03:03M HLA-A*02:11H HLA-C*03:02M HLA-C*03:04M HLA-B*14:02M HLA-C*12:03H HLA-C*15:02H HLA-A*02:04H
  REGION 1..9: note = CONT. FROM ABOVE: HLA-A*02:05H HLA-A*02:06M HLA-A*02:07M HLA- B*14:01H HLA-A*02:01H HLA-A*02:02H HLA-A*02:03M HLA-A*24:02H HLA-C*17:01H HLA-C*08:01M HLA-B*38:02M HLA-B*40:06M HLA-B*15 :01H HLA-B*15:02H HLA-B*57:03H HLA-C*07:04H
LMIERFVSL

SEQ ID NO: 3201 - protein, 9 aa, Severe acute respiratory syndrome coronavirus 2
  REGION 1..9: note = Table A: HLA-B*49:01H
IERFVSLAI

SEQ ID NO: 3202 - protein, 9 aa, Severe acute respiratory syndrome coronavirus 2
  REGION 1..9: note = Table A: HLA-A*36:01H HLA-A*29:02H HLA-B*35:01M HLA-B*35:08M HLA-B*35:07M HLA-B*38:02M HLA-B*15:01H HLA-B*15:02M HLA-B*39:01H
FVSLAIDAY

SEQ ID NO: 3203 - protein, 9 aa, Severe acute respiratory syndrome coronavirus 2
  REGION 1..9: note = Table A: HLA-A*02:04H HLA-A*02:02H
SLAIDAYPL

SEQ ID NO: 3204 - protein, 9 aa, Severe acute respiratory syndrome coronavirus 2
  REGION 1..9: note = Table A: HLA-A*11:303M HLA-A*03:01H HLA-A*03:02H HLA-A*11:01H HLA-A*11:02H HLA-A*36:01H HLA-A*01:01H HLA-C*04:03H HLA-C*03:03H HLA-B*27:02H HLA-A*30:02H HLA-C*15:05H HLA-A*02:07H HLA-A*34:02M HLA-C*07:27M
  REGION 1..9: note = CONT. FROM ABOVE: HLA-B*13:02M
AIDAYPLTK

SEQ ID NO: 3205 - protein, 9 aa, Severe acute respiratory syndrome coronavirus 2
  REGION 1..9: note = Table A: HLA-A*11:303H HLA-C*16:01H HLA-B*57:01H HLA-B*46:01H HLA-C*03:02H HLA-A*30:02H HLA-C*12:02M HLA-C*12:03H HLA-C*07:27H HLA-B*38:02H HLA-B*15:01M HLA-B*15:02H HLA-B*57:03H HLA-C*02:02H HLA-B*15:11H
LTKHPNQEY

SEQ ID NO: 3206 - protein, 9 aa, Severe acute respiratory syndrome coronavirus 2
  REGION 1..9: note = Table A: HLA-B*44:05H HLA-B*45:01H HLA-B*44:03H HLA-B*40:01M HLA-B*40:02H HLA-B*40:06H HLA-B*41:02H HLA-B*49:01M
QEYADVFHL

SEQ ID NO: 3207 - protein, 9 aa, Severe acute respiratory syndrome coronavirus 2
  REGION 1..9: note = Table A: HLA-A*33:03H HLA-A*26:01H HLA-A*29:02H HLA-A*30:02H HLA-A*24:02M HLA-A*24:07H HLA-A*23:01H
EYADVFHLY

SEQ ID NO: 3208 - protein, 9 aa, Severe acute respiratory syndrome coronavirus 2
  REGION 1..9: note = Table A: HLA-A*36:01H HLA-C*04:03H HLA-C*03:03H HLA-A*02:11H HLA-B*53:01H HLA-C*03:02H HLA-C*03:04M HLA-C*12:03H HLA-C*15:02M HLA-A*02:07M HLA-C*17:01M HLA-C*08:01M HLA-C*08:02M HLA-B*38:02M HLA-C*05:01H
YADVFHLYL

SEQ ID NO: 3209 - protein, 9 aa, Severe acute respiratory syndrome coronavirus 2
  REGION 1..9: note = Table A: HLA-A*25:01H HLA-A*26:01H HLA-A*26:02H HLA-A*26:03M HLA-A*29:01H HLA-A*29:02M HLA-A*34:01H HLA-A*34:02M HLA-B*35:01M HLA-B*35:07M HLA-B*38:02M HLA-B*15:02M HLA-B*07:05H HLA-A*66:01H
DVFHLYLQY

SEQ ID NO: 3210 - protein, 9 aa, Severe acute respiratory syndrome coronavirus 2
  REGION 1..9: note = Table A: HLA-C*14:03H HLA-A*24:02H HLA-A*24:07M HLA-A*23:01H
VFHLYLQYI

SEQ ID NO: 3211 - protein, 9 aa, Severe acute respiratory syndrome coronavirus 2
  REGION 1..9: note = Table A: HLA-C*14:03H HLA-A*02:04H HLA-A*24:02H HLA-A*24:07H HLA-A*23:01M
LYLQYIRKL

SEQ ID NO: 3212 - protein, 9 aa, Severe acute respiratory syndrome coronavirus 2
  REGION 1..9: note = Table A: HLA-B*08:01M HLA-A*02:02H HLA-B*38:02H HLA-B*07:04H
YIRKLHDEL

SEQ ID NO: 3213 - protein, 9 aa, Severe acute respiratory syndrome coronavirus 2
  REGION 1..9: note = Table A: HLA-A*02:02H
KLHDELTGH

SEQ ID NO: 3214 - protein, 9 aa, Severe acute respiratory syndrome coronavirus 2
  REGION 1..9: note = Table A: HLA-B*38:01H HLA-B*38:02M HLA-B*39:01H
LHDELTGHM

SEQ ID NO: 3215 - protein, 9 aa, Severe acute respiratory syndrome coronavirus 2
  REGION 1..9: note = Table A: HLA-B*37:01H HLA-B*38:01H HLA-B*38:02H
HDELTGHML

SEQ ID NO: 3216 - protein, 9 aa, Severe acute respiratory syndrome coronavirus 2
  REGION 1..9: note = Table A: HLA-A*26:01H HLA-A*26:03H HLA-A*34:01H HLA-B*15:02H
ELTGHMLDM

SEQ ID NO: 3217 - protein, 9 aa, Severe acute respiratory syndrome coronavirus 2
  REGION 1..9: note = Table A: HLA-A*36:01H
LTGHMLDMY

SEQ ID NO: 3218 - protein, 9 aa, Severe acute respiratory syndrome coronavirus 2
  REGION 1..9: note = Table A: HLA-B*38:02H HLA-B*39:06H HLA-B*15:10H
GHMLDMYSV

SEQ ID NO: 3219 - protein, 9 aa, Severe acute respiratory syndrome coronavirus 2
  REGION 1..9: note = Table A: HLA-B*38:02H HLA-B*15:02M
HMLDMYSVM

SEQ ID NO: 3220 - protein, 9 aa, Severe acute respiratory syndrome coronavirus 2
  REGION 1..9: note = Table A: HLA-A*02:07M HLA-A*02:01H HLA-B*38:02H
MLDMYSVML

SEQ ID NO: 3221 - protein, 9 aa, Severe acute respiratory syndrome coronavirus 2
  REGION 1..9: note = Table A: HLA-A*34:01H
MLTNDNTSR

SEQ ID NO: 3222 - protein, 9 aa, Severe acute respiratory syndrome coronavirus 2
  REGION 1..9: note = Table A: HLA-B*58:01H HLA-A*36:01H HLA-B*46:01H HLA-A*26:01H HLA-A*29:02H HLA-A*01:01M HLA-A*30:02M HLA-C*12:02H HLA-A*34:02H HLA-B*38:02H HLA-B*15:01M
LTNDNTSRY

SEQ ID NO: 3223 - protein, 9 aa, Severe acute respiratory syndrome coronavirus 2
  REGION 1..9: note = Table A: HLA-B*53:01H
TNDNTSRYW

SEQ ID NO: 3224 - protein, 9 aa, Severe acute respiratory syndrome coronavirus 2
  REGION 1..9: note = Table A: HLA-B*57:03H
TSRYWEPEF

SEQ ID NO: 3225 - protein, 9 aa, Severe acute respiratory syndrome coronavirus 2
  REGION 1..9: note = Table A: HLA-C*06:02H HLA-B*27:05H HLA-C*07:02H HLA-B*27:02H HLA-B*38:02H
SRYWEPEFY

SEQ ID NO: 3226 - protein, 9 aa, Severe acute respiratory syndrome coronavirus 2
  REGION 1..9: note = Table A: HLA-B*07:05H
WEPEFYEAM

SEQ ID NO: 3227 - protein, 9 aa, Severe acute respiratory syndrome coronavirus 2
  REGION 1..9: note = Table A: HLA-B*35:08H
EPEFYEAMY

SEQ ID NO: 3228 - protein, 9 aa, Severe acute respiratory syndrome coronavirus 2
  REGION 1..9: note = Table A: HLA-B*45:01H HLA-B*40:02H HLA-B*40:06H HLA-B*49:01M HLA-B*50:01H
YEAMYTPHT

SEQ ID NO: 3229 - protein, 9 aa, Severe acute respiratory syndrome coronavirus 2
  REGION 1..9: note = Table A: HLA-A*33:03H HLA-B*56:01H HLA-B*08:01H HLA-C*12:05H HLA-A*02:11H HLA-B*53:01H HLA-A*68:01H HLA-A*68:02H HLA-B*35:03H HLA-C*15:05H HLA-A*34:01M HLA-A*34:02H HLA-B*51:01H HLA-B*38:02M HLA-B*39:06H HLA-B*54:01M
  REGION 1..9: note = CONT. FROM ABOVE: HLA-B*07:05H HLA-B*13:02H HLA-A*66:01H
EAMYTPHTV

SEQ ID NO: 3230 - protein, 9 aa, Severe acute respiratory syndrome coronavirus 2
  REGION 1..9: note = Table A: HLA-A*11:303H HLA-A*02:11H HLA-A*02:02H HLA-B*52:01H HLA-B*38:02H HLA-B*15:01H HLA-B*15:02H HLA-B*15:03H
AMYTPHTVL

SEQ ID NO: 3231 - protein, 9 aa, Severe acute respiratory syndrome coronavirus 2
  REGION 1..9: note = Table A: HLA-A*24:07H
MYTPHTVLQ

SEQ ID NO: 3232 - protein, 9 aa, Severe acute respiratory syndrome coronavirus 2
  REGION 1..9: note = Table A: HLA-A*02:11H HLA-A*68:02H HLA-A*02:05H HLA-A*02:06H HLA-A*02:07H HLA-A*02:08H HLA-A*02:01H HLA-A*02:03H HLA-A*34:02H HLA-B*54:01H
YTPHTVLQA

SEQ ID NO: 3233 - protein, 9 aa, Severe acute respiratory syndrome coronavirus 2
  REGION 1..9: note = Table A: HLA-B*42:01H HLA-B*56:01H HLA-B*55:02H HLA-A*68:02H HLA-B*35:03H HLA-C*15:05M HLA-B*55:01M HLA-B*51:01M HLA-C*08:01H HLA-B*38:02M HLA-B*39:06H HLA-B*54:01M HLA-B*07:02H HLA-B*07:04H HLA-B*07:05M HLA-B*13:02H
TPHTVLQAV

SEQ ID NO: 3234 - protein, 9 aa, Severe acute respiratory syndrome coronavirus 2
  REGION 1..9: note = Table A: HLA-B*54:01H
HTVLQAVGA

SEQ ID NO: 3235 - protein, 9 aa, Severe acute respiratory syndrome coronavirus 2
  REGION 1..9: note = Table A: HLA-B*38:02H HLA-B*13:02H
VLQAVGACV

SEQ ID NO: 3236 - protein, 9 aa, Severe acute respiratory syndrome coronavirus 2
  REGION 1..9: note = Table A: HLA-B*48:01H HLA-B*38:02H HLA-B*15:01H HLA-B*39:01H HLA-B*15:10H
LQAVGACVL

SEQ ID NO: 3237 - protein, 9 aa, Severe acute respiratory syndrome coronavirus 2
  REGION 1..9: note = Table A: HLA-A*11:303H HLA-C*15:05H HLA-B*14:01H HLA-A*02:01H HLA-A*02:02H HLA-A*02:03H HLA-B*38:02H
VLCNSQTSL

SEQ ID NO: 3238 - protein, 9 aa, Severe acute respiratory syndrome coronavirus 2
  REGION 1..9: note = Table A: HLA-B*39:06H
SQTSLRCGA

SEQ ID NO: 3239 - protein, 9 aa, Severe acute respiratory syndrome coronavirus 2
  REGION 1..9: note = Table A: HLA-B*18:01H
YDHVISTSH

SEQ ID NO: 3240 - protein, 9 aa, Severe acute respiratory syndrome coronavirus 2
  REGION 1..9: note = Table A: HLA-B*58:01H HLA-B*58:02H HLA-A*11:303H HLA-A*25:01H HLA-A*26:01M HLA-A*26:02H HLA-A*26:03M HLA-A*02:11H HLA-B*53:01M HLA-C*03:04H HLA-A*30:02M HLA-A*68:01H HLA-A*68:02M HLA-B*35:03M HLA-C*15:05H
  REGION 1..9: note = CONT. FROM ABOVE: HLA-A*02:04H HLA-A*02:05H HLA-A*02:06M HLA- A*02:07H HLA-A*02:08H HLA-A*02:01H HLA-A*02:02H HLA-A*02:03H HLA-A*34:01H HLA-A*34:02H HLA-B*35:01H HLA-B*35:07H HLA-C*08 :01H HLA-B*38:01H HLA-B*38:02H HLA-B*40:06H HLA-B*07:04H
  REGION 1..9: note = CONT. FROM ABOVE: HLA-B*15:01H HLA-B*15:02M HLA-B*39:01H HLA- B*57:03M HLA-B*13:01M HLA-B*13:02H HLA-B*15:10H HLA-C*07:04H HLA-A*66:01M
HVISTSHKL

SEQ ID NO: 3241 - protein, 9 aa, Severe acute respiratory syndrome coronavirus 2
  REGION 1..9: note = Table A: HLA-B*58:01H HLA-B*58:02H HLA-C*16:01M HLA-C*03:03H HLA-C*07:01H HLA-C*03:04M HLA-C*15:05M HLA-C*15:02H HLA-C*17:01H HLA-B*07:04H HLA-B*57:03H HLA-C*07:04M
ISTSHKLVL

SEQ ID NO: 3242 - protein, 9 aa, Severe acute respiratory syndrome coronavirus 2
  REGION 1..9: note = Table A: HLA-A*02:11H HLA-A*68:02H HLA-C*15:05H HLA-C*15:02M HLA-A*02:03H HLA-B*52:01H HLA-C*08:01H HLA-B*38:02H HLA-B*13:02M
TSHKLVLSV

SEQ ID NO: 3243 - protein, 9 aa, Severe acute respiratory syndrome coronavirus 2
  REGION 1..9: note = Table A: HLA-B*38:02H HLA-B*15:01H
KLVLSVNPY

SEQ ID NO: 3244 - protein, 9 aa, Severe acute respiratory syndrome coronavirus 2
  REGION 1..9: note = Table A: HLA-A*02:11M HLA-A*68:02H HLA-A*02:04H HLA-A*02:06H HLA-A*02:07H HLA-A*02:01H
LVLSVNPYV

SEQ ID NO: 3245 - protein, 9 aa, Severe acute respiratory syndrome coronavirus 2
  REGION 1..9: note = Table A: HLA-A*02:11H HLA-A*68:02H HLA-A*02:05M HLA-A*02:06H HLA-A*02:08M HLA-A*02:01H HLA-A*02:02H HLA-A*02:03H HLA-B*38:02H HLA-A*31:01H
SVNPYVCNA

SEQ ID NO: 3246 - protein, 9 aa, Severe acute respiratory syndrome coronavirus 2
  REGION 1..9: note = Table A: HLA-B*58:01H HLA-C*16:04H HLA-A*25:01H HLA-A*26:01H HLA-A*26:02H HLA-A*26:03H HLA-A*29:01M HLA-A*29:02M HLA-B*44:03H HLA-B*18:01H HLA-B*53:01H HLA-A*30:02H HLA-A*68:01M HLA-A*68:02M HLA-C*15:05H HLA-A*34:01M
  REGION 1..9: note = CONT. FROM ABOVE: HLA-A*34:02H HLA-B*35:01H HLA-B*35:08H HLA- B*35:07M HLA-B*38:02H HLA-B*15:01H HLA-B*15:02M HLA-B*39:01H HLA-B*07:05M HLA-A*66:01M
DVTDVTQLY

SEQ ID NO: 3247 - protein, 9 aa, Severe acute respiratory syndrome coronavirus 2
  REGION 1..9: note = Table A: HLA-B*58:01M HLA-A*11:303H HLA-A*36:01M HLA-A*01:01M HLA-C*04:01H HLA-C*04:03H HLA-C*03:04H HLA-C*15:05H HLA-C*15:02M HLA-A*02:07M HLA-A*02:01H HLA-C*17:01H HLA-C*08:01M HLA-C*08:02M HLA-B*38:02M
  REGION 1..9: note = CONT. FROM ABOVE: HLA-B*07:05H HLA-B*57:03H HLA-C*05:01M HLA- B*13:01H
VTDVTQLYL

SEQ ID NO: 3248 - protein, 9 aa, Severe acute respiratory syndrome coronavirus 2
  REGION 1..9: note = Table A: HLA-A*11:303H HLA-A*03:01H HLA-B*46:01H HLA-A*29:02H HLA-B*38:02H HLA-B*15:01M HLA-B*15:02H HLA-B*15:03H HLA-B*07:05H HLA-B*15:11H
QLYLGGMSY

SEQ ID NO: 3249 - protein, 9 aa, Severe acute respiratory syndrome coronavirus 2
  REGION 1..9: note = Table A: HLA-C*14:02M HLA-C*14:03M HLA-A*29:02M HLA-A*30:02H
LYLGGMSYY

SEQ ID NO: 3250 - protein, 9 aa, Severe acute respiratory syndrome coronavirus 2
  REGION 1..9: note = Table A: HLA-A*02:02M
YLGGMSYYC

SEQ ID NO: 3251 - protein, 9 aa, Severe acute respiratory syndrome coronavirus 2
  REGION 1..9: note = Table A: HLA-A*34:02H
MSYYCKSHK

SEQ ID NO: 3252 - protein, 9 aa, Severe acute respiratory syndrome coronavirus 2
  REGION 1..9: note = Table A: HLA-B*58:01M HLA-B*58:02H HLA-B*57:01M HLA-B*46:01H HLA-C*15:05H HLA-C*12:02H HLA-A*32:01H HLA-B*07:04H HLA-B*15:01H HLA-B*15:03H HLA-B*57:03H
KSHKPPISF

SEQ ID NO: 3253 - protein, 9 aa, Severe acute respiratory syndrome coronavirus 2
  REGION 1..9: note = Table A: HLA-B*38:02H
SHKPPISFP

SEQ ID NO: 3254 - protein, 9 aa, Severe acute respiratory syndrome coronavirus 2
  REGION 1..9: note = Table A: HLA-C*06:02H HLA-C*07:02H HLA-A*68:02H
HKPPISFPL

SEQ ID NO: 3255 - protein, 9 aa, Severe acute respiratory syndrome coronavirus 2
  REGION 1..9: note = Table A: HLA-B*56:01H HLA-B*55:02H HLA-C*15:05H HLA-B*55:01H
KPPISFPLC

SEQ ID NO: 3256 - protein, 9 aa, Severe acute respiratory syndrome coronavirus 2
  REGION 1..9: note = Table A: HLA-B*56:01H HLA-B*55:02H HLA-C*15:05H HLA-B*54:01H
PPISFPLCA

SEQ ID NO: 3257 - protein, 9 aa, Severe acute respiratory syndrome coronavirus 2
  REGION 1..9: note = Table A: HLA-C*16:04H
CANGQVFGL

SEQ ID NO: 3258 - protein, 9 aa, Severe acute respiratory syndrome coronavirus 2
  REGION 1..9: note = Table A: HLA-A*29:02H HLA-A*30:02H
ANGQVFGLY

SEQ ID NO: 3259 - protein, 9 aa, Severe acute respiratory syndrome coronavirus 2
  REGION 1..9: note = Table A: HLA-A*36:01H HLA-A*34:02H
NGQVFGLYK

SEQ ID NO: 3260 - protein, 9 aa, Severe acute respiratory syndrome coronavirus 2
  REGION 1..9: note = Table A: HLA-A*68:02H
NVTDFNAIA

SEQ ID NO: 3261 - protein, 9 aa, Severe acute respiratory syndrome coronavirus 2
  REGION 1..9: note = Table A: HLA-A*68:02H HLA-B*50:01H
TDFNAIATC

SEQ ID NO: 3262 - protein, 9 aa, Severe acute respiratory syndrome coronavirus 2
  REGION 1..9: note = Table A: HLA-B*35:03M HLA-B*35:02H
WTNAGDYIL

SEQ ID NO: 3263 - protein, 9 aa, Severe acute respiratory syndrome coronavirus 2
  REGION 1..9: note = Table A: HLA-B*50:01H
GDYILANTC

SEQ ID NO: 3264 - protein, 9 aa, Severe acute respiratory syndrome coronavirus 2
  REGION 1..9: note = Table A: HLA-A*74:01H HLA-A*34:01H
ILANTCTER

SEQ ID NO: 3265 - protein, 9 aa, Severe acute respiratory syndrome coronavirus 2
  REGION 1..9: note = Table A: HLA-C*15:05H
LANTCTERL

SEQ ID NO: 3266 - protein, 9 aa, Severe acute respiratory syndrome coronavirus 2
  REGION 1..9: note = Table A: HLA-C*16:01H
TCTERLKLF

SEQ ID NO: 3267 - protein, 9 aa, Severe acute respiratory syndrome coronavirus 2
  REGION 1..9: note = Table A: HLA-B*45:01M HLA-B*40:06M HLA-B*41:02H HLA-B*50:01M
TERLKLFAA

SEQ ID NO: 3268 - protein, 9 aa, Severe acute respiratory syndrome coronavirus 2
  REGION 1..9: note = Table A: HLA-A*74:01H HLA-A*03:01M HLA-A*03:02M HLA-A*11:01H HLA-A*11:02H HLA-A*36:01H
KLFAAETLK

SEQ ID NO: 3269 - protein, 9 aa, Severe acute respiratory syndrome coronavirus 2
  REGION 1..9: note = Table A: HLA-C*16:04H
FAAETLKAT

SEQ ID NO: 3270 - protein, 9 aa, Severe acute respiratory syndrome coronavirus 2
  REGION 1..9: note = Table A: HLA-B*57:01H HLA-B*46:01M HLA-C*12:02H HLA-A*02:02H HLA-B*15:13M HLA-B*38:01H HLA-B*38:02H HLA-B*15:01H HLA-B*15:02H HLA-B*15:03M HLA-B*57:03H HLA-B*13:01M HLA-B*15:11H
TLKATEETF

SEQ ID NO: 3271 - protein, 9 aa, Severe acute respiratory syndrome coronavirus 2
  REGION 1..9: note = Table A: HLA-B*58:01M HLA-B*58:02H HLA-A*11:303H HLA-C*16:01H HLA-B*57:01H HLA-C*12:05H HLA-A*02:11H HLA-B*53:01H HLA-C*03:04H HLA-A*68:02H HLA-B*35:03H HLA-C*15:05H HLA-C*12:03H HLA-C*15:02M HLA-A*02:05M
  REGION 1..9: note = CONT. FROM ABOVE: HLA-A*02:06M HLA-A*02:08H HLA-A*02:02M HLA- B*35:02H HLA-C*17:01H HLA-C*08:01M HLA-B*35:12H HLA-B*38:02H HLA-B*40:06H HLA-B*57:03H HLA-B*13:01H HLA-B*13:02H HLA-C*07 :04H
KATEETFKL

SEQ ID NO: 3272 - protein, 9 aa, Severe acute respiratory syndrome coronavirus 2
  REGION 1..9: note = Table A: HLA-B*58:01H HLA-B*44:02M HLA-B*44:05H HLA-C*16:04H HLA-A*36:01H HLA-A*29:02H HLA-B*45:01H HLA-B*44:03H HLA-B*18:01H HLA-C*07:01H HLA-B*35:01H HLA-B*38:02H HLA-B*07:05M
TEETFKLSY

SEQ ID NO: 3273 - protein, 9 aa, Severe acute respiratory syndrome coronavirus 2
  REGION 1..9: note = Table A: HLA-A*68:02H HLA-B*57:03H
ETFKLSYGI

SEQ ID NO: 3274 - protein, 9 aa, Severe acute respiratory syndrome coronavirus 2
  REGION 1..9: note = Table A: HLA-A*02:11H HLA-A*02:04M HLA-A*02:05H HLA-A*02:06H HLA-A*02:07H HLA-A*02:08M HLA-B*14:01H HLA-A*02:01M HLA-A*02:02H HLA-A*02:03H HLA-B*38:02M HLA-B*40:06H HLA-B*13:02H
KLSYGIATV

SEQ ID NO: 3275 - protein, 9 aa, Severe acute respiratory syndrome coronavirus 2
  REGION 1..9: note = Table A: HLA-A*74:01M HLA-A*33:03H HLA-A*68:01M HLA-A*34:01M HLA-A*34:02M HLA-A*31:01H HLA-A*66:01M
LSYGIATVR

SEQ ID NO: 3276 - protein, 9 aa, Severe acute respiratory syndrome coronavirus 2
  REGION 1..9: note = Table A: HLA-A*11:303H HLA-C*16:01H HLA-B*46:01H HLA-C*06:02H HLA-C*03:03H HLA-C*12:05M HLA-A*02:11H HLA-C*03:02H HLA-C*03:04H HLA-A*68:02H HLA-C*15:05H HLA-C*12:03H HLA-C*15:02M HLA-A*02:04H HLA-A*02:05H
  REGION 1..9: note = CONT. FROM ABOVE: HLA-A*02:06H HLA-A*02:01H HLA-A*02:02H HLA- A*02:03M HLA-B*51:01H HLA-C*08:01H HLA-B*38:02M HLA-B*13:02H HLA-B*49:01H
YGIATVREV

SEQ ID NO: 3277 - protein, 9 aa, Severe acute respiratory syndrome coronavirus 2
  REGION 1..9: note = Table A: HLA-B*48:01H HLA-A*02:11H HLA-C*15:05H HLA-A*02:05H HLA-A*02:02M HLA-C*08:01H HLA-B*38:02H HLA-B*07:02M HLA-B*07:04H HLA-B*07:05H HLA-B*41:02H HLA-B*13:01H
GIATVREVL

SEQ ID NO: 3278 - protein, 9 aa, Severe acute respiratory syndrome coronavirus 2
  REGION 1..9: note = Table A: HLA-A*74:01M HLA-A*33:01H HLA-A*33:03M HLA-A*26:03H HLA-A*68:01H HLA-A*34:01M HLA-A*34:02H HLA-A*31:01H HLA-A*66:01M
TVREVLSDR

SEQ ID NO: 3279 - protein, 9 aa, Severe acute respiratory syndrome coronavirus 2
  REGION 1..9: note = Table A: HLA-B*40:01H HLA-B*40:02H HLA-B*41:02H
REVLSDREL

SEQ ID NO: 3280 - protein, 9 aa, Severe acute respiratory syndrome coronavirus 2
  REGION 1..9: note = Table A: HLA-A*02:11M HLA-C*15:02M HLA-A*02:04M HLA-A*02:05H HLA-A*02:06H HLA-A*02:07H HLA-B*14:01H HLA-A*02:01M HLA-A*02:02H HLA-A*02:03M HLA-C*17:01H HLA-C*08:01H HLA-B*38:02M HLA-B*13:01M HLA-B*13:02H HLA-C*07:04H
VLSDRELHL

SEQ ID NO: 3281 - protein, 9 aa, Severe acute respiratory syndrome coronavirus 2
  REGION 1..9: note = Table A: HLA-B*44:03H
SDRELHLSW

SEQ ID NO: 3282 - protein, 9 aa, Severe acute respiratory syndrome coronavirus 2
  REGION 1..9: note = Table A: HLA-B*45:01H HLA-B*40:02H HLA-B*40:06H HLA-B*13:02H HLA-B*49:01H
RELHLSWEV

SEQ ID NO: 3283 - protein, 9 aa, Severe acute respiratory syndrome coronavirus 2
  REGION 1..9: note = Table A: HLA-A*74:01H HLA-A*34:01H HLA-A*66:01H
LSWEVGKPR

SEQ ID NO: 3284 - protein, 9 aa, Severe acute respiratory syndrome coronavirus 2
  REGION 1..9: note = Table A: HLA-B*40:06H HLA-B*50:01M
WEVGKPRPP

SEQ ID NO: 3285 - protein, 9 aa, Severe acute respiratory syndrome coronavirus 2
  REGION 1..9: note = Table A: HLA-A*33:03H HLA-A*26:03H HLA-A*68:02H HLA-A*34:01M HLA-A*34:02H HLA-B*07:04H HLA-A*66:01H
EVGKPRPPL

SEQ ID NO: 3286 - protein, 9 aa, Severe acute respiratory syndrome coronavirus 2
  REGION 1..9: note = Table A: HLA-B*55:01H
KPRPPLNRN

SEQ ID NO: 3287 - protein, 9 aa, Severe acute respiratory syndrome coronavirus 2
  REGION 1..9: note = Table A: HLA-C*15:05H HLA-B*07:04H
RPPLNRNYV

SEQ ID NO: 3288 - protein, 9 aa, Severe acute respiratory syndrome coronavirus 2
  REGION 1..9: note = Table A: HLA-A*24:07H
PPLNRNYVF

SEQ ID NO: 3289 - protein, 9 aa, Severe acute respiratory syndrome coronavirus 2
  REGION 1..9: note = Table A: HLA-B*27:05H HLA-B*27:02H
NRNYVFTGY

SEQ ID NO: 3290 - protein, 9 aa, Severe acute respiratory syndrome coronavirus 2
  REGION 1..9: note = Table A: HLA-A*74:01H
RNYVFTGYR

SEQ ID NO: 3291 - protein, 9 aa, Severe acute respiratory syndrome coronavirus 2
  REGION 1..9: note = Table A: HLA-A*24:07H HLA-C*08:01H
NYVFTGYRV

SEQ ID NO: 3292 - protein, 9 aa, Severe acute respiratory syndrome coronavirus 2
  REGION 1..9: note = Table A: HLA-B*54:01H
YVFTGYRVT

SEQ ID NO: 3293 - protein, 9 aa, Severe acute respiratory syndrome coronavirus 2
  REGION 1..9: note = Table A: HLA-C*14:03H HLA-A*30:01H HLA-A*24:07H HLA-A*23:01H
VFTGYRVTK

SEQ ID NO: 3294 - protein, 9 aa, Severe acute respiratory syndrome coronavirus 2
  REGION 1..9: note = Table A: HLA-B*58:02H HLA-B*57:03M
VTKNSKVQI

SEQ ID NO: 3295 - protein, 9 aa, Severe acute respiratory syndrome coronavirus 2
  REGION 1..9: note = Table A: HLA-A*25:01H HLA-B*46:01M HLA-A*26:01M HLA-A*26:02H HLA-A*01:01H HLA-A*30:02H HLA-C*12:02M HLA-B*35:01H HLA-B*38:02H HLA-B*15:01H HLA-B*15:02M HLA-B*15:11H
NSKVQIGEY

SEQ ID NO: 3296 - protein, 9 aa, Severe acute respiratory syndrome coronavirus 2
  REGION 1..9: note = Table A: HLA-B*58:01M HLA-B*58:02H HLA-B*57:01H HLA-A*30:02H HLA-A*24:02H HLA-A*24:07H HLA-A*23:01H HLA-A*32:01H HLA-B*15:01M HLA-B*57:03H HLA-B*13:01M
KVQIGEYTF

SEQ ID NO: 3297 - protein, 9 aa, Severe acute respiratory syndrome coronavirus 2
  REGION 1..9: note = Table A: HLA-A*03:02M HLA-A*11:01M HLA-A*11:02H HLA-A*36:01H HLA-A*34:02M HLA-C*07:27H
QIGEYTFEK

SEQ ID NO: 3298 - protein, 9 aa, Severe acute respiratory syndrome coronavirus 2
  REGION 1..9: note = Table A: HLA-B*18:01H HLA-B*27:02H HLA-B*35:01H HLA-C*08:03H HLA-B*38:02H HLA-B*15:01H HLA-B*15:03H HLA-B*39:01H HLA-B*07:05H
GDYGDAVVY

SEQ ID NO: 3299 - protein, 9 aa, Severe acute respiratory syndrome coronavirus 2
  REGION 1..9: note = Table A: HLA-A*33:01H HLA-A*33:03H HLA-A*68:01M HLA-A*34:01M HLA-A*34:02H HLA-A*31:01H HLA-A*66:01H
DYGDAVVYR

SEQ ID NO: 3300 - protein, 9 aa, Severe acute respiratory syndrome coronavirus 2
  REGION 1..9: note = Table A: HLA-B*58:01M HLA-B*58:02H HLA-C*14:02H HLA-C*14:03M HLA-A*11:303H HLA-C*16:04H HLA-A*03:01M HLA-A*03:02H HLA-A*11:01H HLA-A*11:02H HLA-B*57:01H HLA-A*25:01H HLA-B*46:01H HLA-A*26:01M HLA-A*26:02H HLA-A*26:03H
  REGION 1..9: note = CONT. FROM ABOVE: HLA-A*29:01M HLA-A*29:02M HLA-B*53:01H HLA- C*03:02M HLA-A*30:02H HLA-C*15:05M HLA-C*12:02H HLA-C*12:03M HLA-A*02:03H HLA-A*34:01M HLA-A*34:02M HLA-C*07:27H HLA-B*35 :01M HLA-B*35:07M HLA-B*52:01H HLA-B*38:02H HLA-A*32:01H
  REGION 1..9: note = CONT. FROM ABOVE: HLA-B*15:01H HLA-B*15:02H HLA-B*15:03H HLA- B*07:05H HLA-B*57:03M HLA-C*02:02M HLA-B*15:11H HLA-A*66:01H
VVYRGTTTY

SEQ ID NO: 3301 - protein, 9 aa, Severe acute respiratory syndrome coronavirus 2
  REGION 1..9: note = Table A: HLA-A*33:03H
VYRGTTTYK

SEQ ID NO: 3302 - protein, 9 aa, Severe acute respiratory syndrome coronavirus 2
  REGION 1..9: note = Table A: HLA-C*07:01H HLA-C*07:02H
YRGTTTYKL

SEQ ID NO: 3303 - protein, 9 aa, Severe acute respiratory syndrome coronavirus 2
  REGION 1..9: note = Table A: HLA-C*15:05H HLA-C*15:02H HLA-B*13:02M
GTTTYKLNV

SEQ ID NO: 3304 - protein, 9 aa, Severe acute respiratory syndrome coronavirus 2
  REGION 1..9: note = Table A: HLA-A*30:02H
TYKLNVGDY

SEQ ID NO: 3305 - protein, 9 aa, Severe acute respiratory syndrome coronavirus 2
  REGION 1..9: note = Table A: HLA-B*38:02H HLA-B*15:03H
YKLNVGDYF

SEQ ID NO: 3306 - protein, 9 aa, Severe acute respiratory syndrome coronavirus 2
  REGION 1..9: note = Table A: HLA-A*02:11M HLA-A*02:02M HLA-B*13:02H
KLNVGDYFV

SEQ ID NO: 3307 - protein, 9 aa, Severe acute respiratory syndrome coronavirus 2
  REGION 1..9: note = Table A: HLA-C*14:02H HLA-C*14:03M HLA-A*24:07H HLA-B*38:02H HLA-B*49:01H
YFVLTSHTV

SEQ ID NO: 3308 - protein, 9 aa, Severe acute respiratory syndrome coronavirus 2
  REGION 1..9: note = Table A: HLA-A*11:303H HLA-C*03:04H HLA-B*38:02H HLA-B*15:02H HLA-C*07:04H
FVLTSHTVM

SEQ ID NO: 3309 - protein, 9 aa, Severe acute respiratory syndrome coronavirus 2
  REGION 1..9: note = Table A: HLA-A*68:02H
LTSHTVMPL

SEQ ID NO: 3310 - protein, 9 aa, Severe acute respiratory syndrome coronavirus 2
  REGION 1..9: note = Table A: HLA-B*38:02H HLA-B*39:06H HLA-B*39:01H HLA-B*15:10H
SHTVMPLSA

SEQ ID NO: 3311 - protein, 9 aa, Severe acute respiratory syndrome coronavirus 2
  REGION 1..9: note = Table A: HLA-A*68:02H HLA-A*34:02H
HTVMPLSAP

SEQ ID NO: 3312 - protein, 9 aa, Severe acute respiratory syndrome coronavirus 2
  REGION 1..9: note = Table A: HLA-C*14:03H HLA-C*04:03H HLA-A*02:11H HLA-C*15:05H HLA-C*01:02M HLA-A*02:07M HLA-A*02:01H HLA-A*24:02H HLA-A*24:07H HLA-B*52:01H HLA-A*23:01H HLA-B*38:02H
VMPLSAPTL

SEQ ID NO: 3313 - protein, 9 aa, Severe acute respiratory syndrome coronavirus 2
  REGION 1..9: note = Table A: HLA-B*56:01H HLA-B*55:02H HLA-B*35:03H HLA-C*15:05H HLA-B*51:01H HLA-B*54:01M
MPLSAPTLV

SEQ ID NO: 3314 - protein, 9 aa, Severe acute respiratory syndrome coronavirus 2
  REGION 1..9: note = Table A: HLA-C*15:05H HLA-B*07:05H
APTLVPQEH

SEQ ID NO: 3315 - protein, 9 aa, Severe acute respiratory syndrome coronavirus 2
  REGION 1..9: note = Table A: HLA-A*02:11M HLA-A*68:02H HLA-A*02:04H HLA-A*02:05H HLA-A*02:06H HLA-A*02:07H HLA-A*02:01H HLA-A*02:02H HLA-A*02:03H HLA-B*38:02M HLA-B*13:02H
TLVPQEHYV

SEQ ID NO: 3316 - protein, 9 aa, Severe acute respiratory syndrome coronavirus 2
  REGION 1..9: note = Table A: HLA-B*42:01H HLA-B*56:01H HLA-B*53:01H HLA-B*55:02H HLA-B*35:03H HLA-C*15:05M HLA-B*55:01H HLA-B*51:01H HLA-C*08:01M HLA-B*35:12H HLA-B*38:02H HLA-B*54:01H HLA-B*07:02H HLA-B*07:04M HLA-B*07:05H
VPQEHYVRI

SEQ ID NO: 3317 - protein, 9 aa, Severe acute respiratory syndrome coronavirus 2
  REGION 1..9: note = Table A: HLA-B*14:02H HLA-B*14:01H HLA-B*38:01H HLA-B*38:02M HLA-B*39:06H HLA-B*39:01H HLA-B*15:10M
EHYVRITGL

SEQ ID NO: 3318 - protein, 9 aa, Severe acute respiratory syndrome coronavirus 2
  REGION 1..9: note = Table A: HLA-A*29:02H HLA-A*30:02M
HYVRITGLY

SEQ ID NO: 3319 - protein, 9 aa, Severe acute respiratory syndrome coronavirus 2
  REGION 1..9: note = Table A: HLA-B*58:01H HLA-B*58:02H HLA-C*03:03H HLA-A*02:11H HLA-C*03:04H HLA-C*15:05H HLA-C*15:02M HLA-A*02:04H HLA-A*02:06H HLA-A*02:07H HLA-A*02:02H HLA-C*17:01H HLA-A*24:07H HLA-C*08:01H HLA-A*23:01H HLA-A*32:01H
  REGION 1..9: note = CONT. FROM ABOVE: HLA-B*40:06H HLA-B*57:03M HLA-B*13:01H HLA- B*13:02H
RITGLYPTL

SEQ ID NO: 3320 - protein, 9 aa, Severe acute respiratory syndrome coronavirus 2
  REGION 1..9: note = Table A: HLA-B*51:01H HLA-B*13:02H
TGLYPTLNI

SEQ ID NO: 3321 - protein, 9 aa, Severe acute respiratory syndrome coronavirus 2
  REGION 1..9: note = Table A: HLA-C*04:03H HLA-A*02:11H HLA-C*15:05H HLA-A*02:07H HLA-C*08:02M HLA-B*38:02H HLA-C*05:01M
ISDEFSSNV

SEQ ID NO: 3322 - protein, 9 aa, Severe acute respiratory syndrome coronavirus 2
  REGION 1..9: note = Table A: HLA-B*45:01H
SDEFSSNVA

SEQ ID NO: 3323 - protein, 9 aa, Severe acute respiratory syndrome coronavirus 2
  REGION 1..9: note = Table A: HLA-B*18:01H HLA-B*07:05H
DEFSSNVAN

SEQ ID NO: 3324 - protein, 9 aa, Severe acute respiratory syndrome coronavirus 2
  REGION 1..9: note = Table A: HLA-A*33:03H HLA-A*26:01H HLA-A*26:02H HLA-A*26:03M HLA-A*29:01H HLA-A*29:02H HLA-A*34:02H HLA-B*38:02H HLA-B*07:05H
EFSSNVANY

SEQ ID NO: 3325 - protein, 9 aa, Severe acute respiratory syndrome coronavirus 2
  REGION 1..9: note = Table A: HLA-A*11:303M HLA-A*74:01H HLA-A*03:01H HLA-A*03:02H HLA-A*11:01H HLA-A*11:02H HLA-A*36:01H HLA-A*33:03H HLA-A*30:02M HLA-A*68:01H HLA-A*34:02M HLA-C*07:27H HLA-A*31:01H
SSNVANYQK

SEQ ID NO: 3326 - protein, 9 aa, Severe acute respiratory syndrome coronavirus 2
  REGION 1..9: note = Table A: HLA-A*68:02H
SNVANYQKV

SEQ ID NO: 3327 - protein, 9 aa, Severe acute respiratory syndrome coronavirus 2
  REGION 1..9: note = Table A: HLA-A*11:303H HLA-C*16:01H HLA-B*08:01H HLA-C*03:04H HLA-C*15:05M
VANYQKVGM

SEQ ID NO: 3328 - protein, 9 aa, Severe acute respiratory syndrome coronavirus 2
  REGION 1..9: note = Table A: HLA-A*33:03M
NYQKVGMQK

SEQ ID NO: 3329 - protein, 9 aa, Severe acute respiratory syndrome coronavirus 2
  REGION 1..9: note = Table A: HLA-B*46:01M HLA-A*26:01H HLA-A*30:02M HLA-C*12:02H HLA-C*12:03H HLA-B*38:02H HLA-B*15:01H HLA-B*15:02H HLA-B*15:03H HLA-C*02:02M HLA-B*15:11H
YQKVGMQKY

SEQ ID NO: 3330 - protein, 9 aa, Severe acute respiratory syndrome coronavirus 2
  REGION 1..9: note = Table A: HLA-A*11:303H HLA-B*08:01H HLA-C*03:04H HLA-C*15:05H HLA-B*14:02H HLA-B*14:01H HLA-B*07:05H HLA-C*07:04H
VGMQKYSTL

SEQ ID NO: 3331 - protein, 9 aa, Severe acute respiratory syndrome coronavirus 2
  REGION 1..9: note = Table A: HLA-A*11:303H HLA-A*03:01M HLA-A*03:02M HLA-A*11:01M HLA-A*11:02M HLA-A*30:02H HLA-A*34:01H HLA-A*34:02M HLA-C*07:27H HLA-B*15:01H HLA-B*13:02H
LQGPPGTGK

SEQ ID NO: 3332 - protein, 9 aa, Severe acute respiratory syndrome coronavirus 2
  REGION 1..9: note = Table A: HLA-B*48:01H
GKSHFAIGL

SEQ ID NO: 3333 - protein, 9 aa, Severe acute respiratory syndrome coronavirus 2
  REGION 1..9: note = Table A: HLA-B*38:01H HLA-B*38:02H HLA-B*39:06H HLA-B*39:01H HLA-B*15:10H
SHFAIGLAL

SEQ ID NO: 3334 - protein, 9 aa, Severe acute respiratory syndrome coronavirus 2
  REGION 1..9: note = Table A: HLA-A*29:02H
HFAIGLALY

SEQ ID NO: 3335 - protein, 9 aa, Severe acute respiratory syndrome coronavirus 2
  REGION 1..9: note = Table A: HLA-C*16:01H HLA-C*16:04H HLA-C*06:02H HLA-A*29:01H HLA-A*29:02M HLA-B*53:01H HLA-C*03:02H HLA-C*12:02H HLA-C*12:03H HLA-A*34:02H HLA-B*35:01H HLA-B*35:07H HLA-B*38:02M HLA-C*02:02H
FAIGLALYY

SEQ ID NO: 3336 - protein, 9 aa, Severe acute respiratory syndrome coronavirus 2
  REGION 1..9: note = Table A: HLA-A*02:04H
GLALYYPSA

SEQ ID NO: 3337 - protein, 9 aa, Severe acute respiratory syndrome coronavirus 2
  REGION 1..9: note = Table A: HLA-A*66:01H
LALYYPSAR

SEQ ID NO: 3338 - protein, 9 aa, Severe acute respiratory syndrome coronavirus 2
  REGION 1..9: note = Table A: HLA-A*02:11H HLA-B*52:01H HLA-B*38:02H HLA-B*13:02H
ALYYPSARI

SEQ ID NO: 3339 - protein, 9 aa, Severe acute respiratory syndrome coronavirus 2
  REGION 1..9: note = Table A: HLA-C*14:02H HLA-C*14:03M HLA-C*06:02H
LYYPSARIV

SEQ ID NO: 3340 - protein, 9 aa, Severe acute respiratory syndrome coronavirus 2
  REGION 1..9: note = Table A: HLA-C*14:02H HLA-C*14:03H HLA-C*06:02H HLA-A*29:02H HLA-C*07:02M HLA-A*24:07H
YYPSARIVY

SEQ ID NO: 3341 - protein, 9 aa, Severe acute respiratory syndrome coronavirus 2
  REGION 1..9: note = Table A: HLA-B*42:01H HLA-B*56:01H HLA-B*08:01H HLA-B*53:01M HLA-B*55:02M HLA-A*68:02H HLA-B*35:03H HLA-C*15:05H HLA-B*55:01H HLA-A*34:01H HLA-B*51:01H HLA-B*35:07H HLA-B*54:01M HLA-B*07:02H HLA-B*07:04H
YPSARIVYT

SEQ ID NO: 3342 - protein, 9 aa, Severe acute respiratory syndrome coronavirus 2
  REGION 1..9: note = Table A: HLA-B*56:01H HLA-A*68:02H
PSARIVYTA

SEQ ID NO: 3343 - protein, 9 aa, Severe acute respiratory syndrome coronavirus 2
  REGION 1..9: note = Table A: HLA-B*54:01H
SARIVYTAC

SEQ ID NO: 3344 - protein, 9 aa, Severe acute respiratory syndrome coronavirus 2
  REGION 1..9: note = Table A: HLA-A*68:02H
YTACSHAAV

SEQ ID NO: 3345 - protein, 9 aa, Severe acute respiratory syndrome coronavirus 2
  REGION 1..9: note = Table A: HLA-A*11:303H HLA-C*15:05H HLA-C*08:01H HLA-B*38:02H HLA-B*39:01H
CSHAAVDAL

SEQ ID NO: 3346 - protein, 9 aa, Severe acute respiratory syndrome coronavirus 2
  REGION 1..9: note = Table A: HLA-B*38:01H HLA-B*38:02M HLA-B*39:06H HLA-B*39:01H HLA-B*15:10H
SHAAVDALC

SEQ ID NO: 3347 - protein, 9 aa, Severe acute respiratory syndrome coronavirus 2
  REGION 1..9: note = Table A: HLA-A*11:303M HLA-A*03:01H HLA-A*03:02H HLA-A*11:01M HLA-A*11:02M HLA-B*46:01M HLA-C*03:03H HLA-C*03:02H HLA-A*68:01H HLA-A*34:01H HLA-A*34:02M HLA-C*07:27M HLA-C*08:01H HLA-A*66:01H
AAVDALCEK

SEQ ID NO: 3348 - protein, 9 aa, Severe acute respiratory syndrome coronavirus 2
  REGION 1..9: note = Table A: HLA-A*34:02H
DALCEKALK

SEQ ID NO: 3349 - protein, 9 aa, Severe acute respiratory syndrome coronavirus 2
  REGION 1..9: note = Table A: HLA-A*03:01H HLA-A*29:01M HLA-A*29:02H HLA-C*15:05H HLA-B*38:02H HLA-B*15:01H HLA-B*15:02H
ALCEKALKY

SEQ ID NO: 3350 - protein, 9 aa, Severe acute respiratory syndrome coronavirus 2
  REGION 1..9: note = Table A: HLA-A*74:01H HLA-A*30:01M HLA-A*30:02H
ALKYLPIDK

SEQ ID NO: 3351 - protein, 9 aa, Severe acute respiratory syndrome coronavirus 2
  REGION 1..9: note = Table A: HLA-B*53:01H HLA-B*51:01M
LPIDKCSRI

SEQ ID NO: 3352 - protein, 9 aa, Severe acute respiratory syndrome coronavirus 2
  REGION 1..9: note = Table A: HLA-A*74:01M
KCSRIIPAR

SEQ ID NO: 3353 - protein, 9 aa, Severe acute respiratory syndrome coronavirus 2
  REGION 1..9: note = Table A: HLA-B*27:05H
SRIIPARAR

SEQ ID NO: 3354 - protein, 9 aa, Severe acute respiratory syndrome coronavirus 2
  REGION 1..9: note = Table A: HLA-B*38:02H
ARVECFDKF

SEQ ID NO: 3355 - protein, 9 aa, Severe acute respiratory syndrome coronavirus 2
  REGION 1..9: note = Table A: HLA-B*58:01M HLA-A*03:01H HLA-A*03:02H HLA-A*36:01M HLA-B*46:01H HLA-A*29:01H HLA-A*29:02H HLA-A*30:02H HLA-A*02:08H HLA-B*35:01H HLA-B*38:02M HLA-A*32:01H HLA-B*15:01H HLA-B*15:02H HLA-B*07:05H HLA-B*57:03H
KVNSTLEQY

SEQ ID NO: 3356 - protein, 9 aa, Severe acute respiratory syndrome coronavirus 2
  REGION 1..9: note = Table A: HLA-A*68:02H HLA-A*02:06H HLA-A*02:01H
STLEQYVFC

SEQ ID NO: 3357 - protein, 9 aa, Severe acute respiratory syndrome coronavirus 2
  REGION 1..9: note = Table A: HLA-B*45:01H HLA-B*40:02H HLA-B*40:06H HLA-B*49:01M HLA-B*50:01H
LEQYVFCTV

SEQ ID NO: 3358 - protein, 9 aa, Severe acute respiratory syndrome coronavirus 2
  REGION 1..9: note = Table A: HLA-A*68:02H HLA-B*38:02H HLA-B*15:02M
YVFCTVNAL

SEQ ID NO: 3359 - protein, 9 aa, Severe acute respiratory syndrome coronavirus 2
  REGION 1..9: note = Table A: HLA-C*01:02H HLA-A*02:07H HLA-A*02:02H HLA-B*38:02H HLA-B*13:02H
ALPETTADI

SEQ ID NO: 3360 - protein, 9 aa, Severe acute respiratory syndrome coronavirus 2
  REGION 1..9: note = Table A: HLA-B*35:03H HLA-B*35:02H HLA-B*35:12H
LPETTADIV

SEQ ID NO: 3361 - protein, 9 aa, Severe acute respiratory syndrome coronavirus 2
  REGION 1..9: note = Table A: HLA-A*25:01H HLA-A*26:02H
ETTADIVVF

SEQ ID NO: 3362 - protein, 9 aa, Severe acute respiratory syndrome coronavirus 2
  REGION 1..9: note = Table A: HLA-B*44:05H HLA-C*08:01H HLA-B*38:02H HLA-B*40:02H HLA-B*41:02H HLA-B*49:01H
ADIVVFDEI

SEQ ID NO: 3363 - protein, 9 aa, Severe acute respiratory syndrome coronavirus 2
  REGION 1..9: note = Table A: HLA-B*35:03H HLA-B*35:01H HLA-B*35:02M HLA-B*35:08M HLA-C*08:01H HLA-B*35:12M HLA-B*38:02H HLA-C*07:04H
IVVFDEISM

SEQ ID NO: 3364 - protein, 9 aa, Severe acute respiratory syndrome coronavirus 2
  REGION 1..9: note = Table A: HLA-A*02:05M HLA-A*02:08H HLA-A*02:02H HLA-A*02:03H HLA-B*38:02H
VVFDEISMA

SEQ ID NO: 3365 - protein, 9 aa, Severe acute respiratory syndrome coronavirus 2
  REGION 1..9: note = Table A: HLA-B*44:02H HLA-B*44:05H HLA-A*26:01H HLA-B*44:03M HLA-B*18:01H HLA-B*27:02H HLA-B*35:01H HLA-B*38:02H HLA-B*15:02H HLA-B*07:05H
DEISMATNY

SEQ ID NO: 3366 - protein, 9 aa, Severe acute respiratory syndrome coronavirus 2
  REGION 1..9: note = Table A: HLA-B*58:01H HLA-C*15:05H HLA-B*57:03H
ISMATNYDL

SEQ ID NO: 3367 - protein, 9 aa, Severe acute respiratory syndrome coronavirus 2
  REGION 1..9: note = Table A: HLA-C*12:05H HLA-B*35:03H HLA-B*13:02H
MATNYDLSV

SEQ ID NO: 3368 - protein, 9 aa, Severe acute respiratory syndrome coronavirus 2
  REGION 1..9: note = Table A: HLA-C*15:02H
ATNYDLSVV

SEQ ID NO: 3369 - protein, 9 aa, Severe acute respiratory syndrome coronavirus 2
  REGION 1..9: note = Table A: HLA-C*04:01M HLA-C*04:03H HLA-B*39:01H
NYDLSVVNA

SEQ ID NO: 3370 - protein, 9 aa, Severe acute respiratory syndrome coronavirus 2
  REGION 1..9: note = Table A: HLA-A*33:01H HLA-A*33:03H HLA-B*27:02H HLA-A*68:01H HLA-A*34:02H HLA-A*66:01H
YDLSVVNAR

SEQ ID NO: 3371 - protein, 9 aa, Severe acute respiratory syndrome coronavirus 2
  REGION 1..9: note = Table A: HLA-B*44:05H HLA-A*02:11H HLA-A*68:01H HLA-A*68:02M HLA-A*02:04H HLA-A*02:05H HLA-B*14:01H HLA-A*02:01H HLA-A*02:02H HLA-A*02:03H HLA-A*34:01M HLA-B*38:02M HLA-B*07:05H HLA-A*66:01H
DLSVVNARL

SEQ ID NO: 3372 - protein, 9 aa, Severe acute respiratory syndrome coronavirus 2
  REGION 1..9: note = Table A: HLA-A*03:01H HLA-A*11:01H HLA-A*11:02H HLA-A*34:02H
VVNARLRAK

SEQ ID NO: 3373 - protein, 9 aa, Severe acute respiratory syndrome coronavirus 2
  REGION 1..9: note = Table A: HLA-A*74:01H HLA-A*30:02H HLA-A*32:01H HLA-B*15:03H
RLRAKHYVY

SEQ ID NO: 3374 - protein, 9 aa, Severe acute respiratory syndrome coronavirus 2
  REGION 1..9: note = Table A: HLA-C*06:02H HLA-A*02:02H
LRAKHYVYI

SEQ ID NO: 3375 - protein, 9 aa, Severe acute respiratory syndrome coronavirus 2
  REGION 1..9: note = Table A: HLA-C*08:01H HLA-B*54:01H
HYVYIGDPA

SEQ ID NO: 3376 - protein, 9 aa, Severe acute respiratory syndrome coronavirus 2
  REGION 1..9: note = Table A: HLA-B*35:03H
YVYIGDPAQ

SEQ ID NO: 3377 - protein, 9 aa, Severe acute respiratory syndrome coronavirus 2
  REGION 1..9: note = Table A: HLA-C*14:02H HLA-C*14:03H HLA-B*44:05H HLA-A*29:01M HLA-A*29:02H HLA-C*04:01M HLA-C*04:03M HLA-C*07:02H HLA-A*30:02H HLA-C*15:05H HLA-A*02:02H HLA-A*24:02H HLA-A*24:07H HLA-C*08:01M HLA-A*23:01H HLA-B*38:01H
  REGION 1..9: note = CONT. FROM ABOVE: HLA-B*38:02H HLA-B*40:01H HLA-B*39:01M HLA- B*07:05H
VYIGDPAQL

SEQ ID NO: 3378 - protein, 9 aa, Severe acute respiratory syndrome coronavirus 2
  REGION 1..9: note = Table A: HLA-A*33:01M HLA-A*33:03M HLA-A*26:03M HLA-A*68:01H HLA-A*34:01H HLA-A*34:02H HLA-A*66:01H
DPAQLPAPR

SEQ ID NO: 3379 - protein, 9 aa, Severe acute respiratory syndrome coronavirus 2
  REGION 1..9: note = Table A: HLA-B*48:01H HLA-B*38:02H HLA-B*15:01H HLA-B*15:03H HLA-B*13:02H HLA-B*15:10H
AQLPAPRTL

SEQ ID NO: 3380 - protein, 9 aa, Severe acute respiratory syndrome coronavirus 2
  REGION 1..9: note = Table A: HLA-A*34:01H
QLPAPRTLL

SEQ ID NO: 3381 - protein, 9 aa, Severe acute respiratory syndrome coronavirus 2
  REGION 1..9: note = Table A: HLA-B*53:01H HLA-C*15:05H HLA-B*51:01H HLA-B*07:02H HLA-B*07:04H
LPAPRTLLT

SEQ ID NO: 3382 - protein, 9 aa, Severe acute respiratory syndrome coronavirus 2
  REGION 1..9: note = Table A: HLA-A*34:02H
PAPRTLLTK

SEQ ID NO: 3383 - protein, 9 aa, Severe acute respiratory syndrome coronavirus 2
  REGION 1..9: note = Table A: HLA-B*15:03H
TKGTLEPEY

SEQ ID NO: 3384 - protein, 9 aa, Severe acute respiratory syndrome coronavirus 2
  REGION 1..9: note = Table A: HLA-B*45:01H HLA-A*68:02H HLA-A*02:07H HLA-B*40:02H HLA-B*40:06H HLA-B*49:01H HLA-B*50:01M
LEPEYFNSV

SEQ ID NO: 3385 - protein, 9 aa, Severe acute respiratory syndrome coronavirus 2
  REGION 1..9: note = Table A: HLA-A*33:03M HLA-A*24:02H HLA-A*24:07H HLA-A*23:01H
EYFNSVCRL

SEQ ID NO: 3386 - protein, 9 aa, Severe acute respiratory syndrome coronavirus 2
  REGION 1..9: note = Table A: HLA-B*46:01H HLA-A*02:02H HLA-A*02:03H HLA-B*38:02H HLA-B*15:02H
LMKTIGPDM

SEQ ID NO: 3387 - protein, 9 aa, Severe acute respiratory syndrome coronavirus 2
  REGION 1..9: note = Table A: HLA-B*58:01H HLA-B*58:02M HLA-A*11:303H HLA-C*03:03H HLA-A*02:11H HLA-C*03:04H HLA-A*68:02H HLA-C*15:05H HLA-C*15:02M HLA-A*02:05H HLA-A*02:06H HLA-A*02:08M HLA-C*08:01H HLA-B*57:03H HLA-B*13:01H
KTIGPDMFL

SEQ ID NO: 3388 - protein, 9 aa, Severe acute respiratory syndrome coronavirus 2
  REGION 1..9: note = Table A: HLA-A*02:07H
IGPDMFLGT

SEQ ID NO: 3389 - protein, 9 aa, Severe acute respiratory syndrome coronavirus 2
  REGION 1..9: note = Table A: HLA-C*15:05H
GPDMFLGTC

SEQ ID NO: 3390 - protein, 9 aa, Severe acute respiratory syndrome coronavirus 2
  REGION 1..9: note = Table A: HLA-A*33:01H HLA-A*33:03H HLA-A*34:01H
DMFLGTCRR

SEQ ID NO: 3391 - protein, 9 aa, Severe acute respiratory syndrome coronavirus 2
  REGION 1..9: note = Table A: HLA-B*56:01M HLA-B*53:01H HLA-B*55:02M HLA-A*68:02M HLA-B*35:03H HLA-C*15:05M HLA-A*02:05H HLA-B*35:01H HLA-B*35:02M HLA-B*51:01M HLA-C*08:01H HLA-B*35:12M HLA-B*38:02H HLA-B*54:01H HLA-B*39:01H HLA-B*07:05M
CPAEIVDTV

SEQ ID NO: 3392 - protein, 9 aa, Severe acute respiratory syndrome coronavirus 2
  REGION 1..9: note = Table A: HLA-B*44:05H HLA-B*45:01H HLA-B*44:03H HLA-B*39:06H HLA-B*40:01H HLA-B*40:02M HLA-B*40:06H HLA-B*41:02M HLA-B*49:01M HLA-B*50:01H
AEIVDTVSA

SEQ ID NO: 3393 - protein, 9 aa, Severe acute respiratory syndrome coronavirus 2
  REGION 1..9: note = Table A: HLA-A*11:303H HLA-A*25:01H HLA-A*26:01H HLA-A*26:02H HLA-A*26:03H HLA-A*68:02M HLA-B*35:03H HLA-C*01:02H HLA-A*02:05H HLA-A*02:08H HLA-A*34:01M HLA-B*35:01H HLA-C*08:01H HLA-B*38:02M HLA-B*15:02H
  REGION 1..9: note = CONT. FROM ABOVE: HLA-B*39:01M HLA-A*66:01H
EIVDTVSAL

SEQ ID NO: 3394 - protein, 9 aa, Severe acute respiratory syndrome coronavirus 2
  REGION 1..9: note = Table A: HLA-C*04:03M HLA-A*02:11H HLA-A*02:07M HLA-B*38:02H HLA-C*05:01H
IVDTVSALV

SEQ ID NO: 3395 - protein, 9 aa, Severe acute respiratory syndrome coronavirus 2
  REGION 1..9: note = Table A: HLA-A*03:02H HLA-A*11:01H HLA-A*11:02H HLA-A*36:01H
VSALVYDNK

SEQ ID NO: 3396 - protein, 9 aa, Severe acute respiratory syndrome coronavirus 2
  REGION 1..9: note = Table A: HLA-B*58:01H HLA-A*11:303H HLA-B*53:01H HLA-B*35:03M HLA-C*15:05H HLA-A*02:04H HLA-A*02:05H HLA-A*02:06H HLA-B*35:02M HLA-C*08:01M HLA-B*35:12M HLA-B*38:02H HLA-B*57:03H
SALVYDNKL

SEQ ID NO: 3397 - protein, 9 aa, Severe acute respiratory syndrome coronavirus 2
  REGION 1..9: note = Table A: HLA-B*56:01H HLA-A*02:11M HLA-B*55:02H HLA-A*68:02H HLA-B*55:01H HLA-A*02:05H HLA-A*02:03H HLA-A*34:02H HLA-C*08:01H HLA-B*38:02H HLA-B*40:06H HLA-B*54:01M HLA-B*13:02H HLA-A*66:01H HLA-B*50:01H
LVYDNKLKA

SEQ ID NO: 3398 - protein, 9 aa, Severe acute respiratory syndrome coronavirus 2
  REGION 1..9: note = Table A: HLA-C*14:03H
VYDNKLKAH

SEQ ID NO: 3399 - protein, 9 aa, Severe acute respiratory syndrome coronavirus 2
  REGION 1..9: note = Table A: HLA-B*38:02M HLA-B*15:03H
HKDKSAQCF

SEQ ID NO: 3400 - protein, 9 aa, Severe acute respiratory syndrome coronavirus 2
  REGION 1..9: note = Table A: HLA-B*58:02H HLA-B*57:03H
KSAQCFKMF

SEQ ID NO: 3401 - protein, 9 aa, Severe acute respiratory syndrome coronavirus 2
  REGION 1..9: note = Table A: HLA-A*30:02H
SAQCFKMFY

SEQ ID NO: 3402 - protein, 9 aa, Severe acute respiratory syndrome coronavirus 2
  REGION 1..9: note = Table A: HLA-A*11:01H HLA-A*11:02H
AQCFKMFYK

SEQ ID NO: 3403 - protein, 9 aa, Severe acute respiratory syndrome coronavirus 2
  REGION 1..9: note = Table A: HLA-C*14:02H HLA-C*14:03M HLA-A*34:02H HLA-B*15:02H
MFYKGVITH

SEQ ID NO: 3404 - protein, 9 aa, Severe acute respiratory syndrome coronavirus 2
  REGION 1..9: note = Table A: HLA-A*02:05H
GVITHDVSS

SEQ ID NO: 3405 - protein, 9 aa, Severe acute respiratory syndrome coronavirus 2
  REGION 1..9: note = Table A: HLA-B*58:01H HLA-B*58:02H HLA-A*11:303H HLA-B*57:01H HLA-B*46:01H HLA-C*03:03H HLA-A*02:11M HLA-C*03:04H HLA-A*68:02M HLA-C*15:05M HLA-A*02:05H HLA-A*02:02H HLA-A*02:03H HLA-C*08:01H HLA-B*38:02M
  REGION 1..9: note = CONT. FROM ABOVE: HLA-B*57:03M HLA-B*13:02H
ITHDVSSAI

SEQ ID NO: 3406 - protein, 9 aa, Severe acute respiratory syndrome coronavirus 2
  REGION 1..9: note = Table A: HLA-B*39:01H
THDVSSAIN

SEQ ID NO: 3407 - protein, 9 aa, Severe acute respiratory syndrome coronavirus 2
  REGION 1..9: note = Table A: HLA-A*68:01H
HDVSSAINR

SEQ ID NO: 3408 - protein, 9 aa, Severe acute respiratory syndrome coronavirus 2
  REGION 1..9: note = Table A: HLA-A*68:01H HLA-A*68:02H HLA-A*34:01H HLA-A*34:02H HLA-A*66:01H
DVSSAINRP

SEQ ID NO: 3409 - protein, 9 aa, Severe acute respiratory syndrome coronavirus 2
  REGION 1..9: note = Table A: HLA-B*58:02H HLA-C*15:05H HLA-B*57:03H
SSAINRPQI

SEQ ID NO: 3410 - protein, 9 aa, Severe acute respiratory syndrome coronavirus 2
  REGION 1..9: note = Table A: HLA-A*02:11H HLA-B*13:02H
AINRPQIGV

SEQ ID NO: 3411 - protein, 9 aa, Severe acute respiratory syndrome coronavirus 2
  REGION 1..9: note = Table A: HLA-C*15:05H
INRPQIGVV

SEQ ID NO: 3412 - protein, 9 aa, Severe acute respiratory syndrome coronavirus 2
  REGION 1..9: note = Table A: HLA-B*15:01H HLA-B*15:02H
PQIGVVREF

SEQ ID NO: 3413 - protein, 9 aa, Severe acute respiratory syndrome coronavirus 2
  REGION 1..9: note = Table A: HLA-A*02:11H HLA-A*02:02H
QIGVVREFL

SEQ ID NO: 3414 - protein, 9 aa, Severe acute respiratory syndrome coronavirus 2
  REGION 1..9: note = Table A: HLA-A*26:03H HLA-A*68:01H HLA-A*34:01H HLA-A*66:01H
GVVREFLTR

SEQ ID NO: 3415 - protein, 9 aa, Severe acute respiratory syndrome coronavirus 2
  REGION 1..9: note = Table A: HLA-B*45:01H HLA-B*40:06H HLA-B*50:01M
REFLTRNPA

SEQ ID NO: 3416 - protein, 9 aa, Severe acute respiratory syndrome coronavirus 2
  REGION 1..9: note = Table A: HLA-A*25:01H HLA-B*44:03H HLA-A*24:02H HLA-A*24:07M HLA-A*23:01H
EFLTRNPAW

SEQ ID NO: 3417 - protein, 9 aa, Severe acute respiratory syndrome coronavirus 2
  REGION 1..9: note = Table A: HLA-A*11:02H HLA-A*30:01H HLA-A*34:02H
LTRNPAWRK

SEQ ID NO: 3418 - protein, 9 aa, Severe acute respiratory syndrome coronavirus 2
  REGION 1..9: note = Table A: HLA-B*39:06H
TRNPAWRKA

SEQ ID NO: 3419 - protein, 9 aa, Severe acute respiratory syndrome coronavirus 2
  REGION 1..9: note = Table A: HLA-B*42:01H HLA-B*08:01H HLA-B*35:07H HLA-B*07:02H HLA-B*07:04M
NPAWRKAVF

SEQ ID NO: 3420 - protein, 9 aa, Severe acute respiratory syndrome coronavirus 2
  REGION 1..9: note = Table A: HLA-B*57:03H
PAWRKAVFI

SEQ ID NO: 3421 - protein, 9 aa, Severe acute respiratory syndrome coronavirus 2
  REGION 1..9: note = Table A: HLA-B*15:03H
RKAVFISPY

SEQ ID NO: 3422 - protein, 9 aa, Severe acute respiratory syndrome coronavirus 2
  REGION 1..9: note = Table A: HLA-C*14:03H
VFISPYNSQ

SEQ ID NO: 3423 - protein, 9 aa, Severe acute respiratory syndrome coronavirus 2
  REGION 1..9: note = Table A: HLA-B*42:01H HLA-B*56:01H HLA-B*55:02H HLA-B*35:03H HLA-C*15:05H HLA-B*55:01H HLA-B*14:01H HLA-B*35:01H HLA-B*51:01H HLA-C*08:01H HLA-B*38:02M HLA-B*39:06H HLA-B*54:01M HLA-B*07:02M HLA-B*07:04M HLA-B*39:01H
  REGION 1..9: note = CONT. FROM ABOVE: HLA-B*07:05H HLA-B*15:10H
SPYNSQNAV

SEQ ID NO: 3424 - protein, 9 aa, Severe acute respiratory syndrome coronavirus 2
  REGION 1..9: note = Table A: HLA-B*44:05H HLA-A*02:05M HLA-A*02:06H HLA-A*02:08H HLA-A*02:02H HLA-A*02:03H HLA-B*52:01H HLA-B*38:01H HLA-B*38:02M HLA-B*15:01H HLA-B*13:01M HLA-B*13:02H
SQNAVASKI

SEQ ID NO: 3425 - protein, 9 aa, Severe acute respiratory syndrome coronavirus 2
  REGION 1..9: note = Table A: HLA-A*03:01M HLA-A*11:01H HLA-A*11:02H HLA-A*25:01H HLA-A*26:01H HLA-A*26:03H HLA-B*08:01H HLA-A*02:11H HLA-A*68:02H HLA-C*15:05M HLA-C*15:02H HLA-A*02:04M HLA-A*02:05M HLA-A*02:06M HLA-A*02:07H HLA-A*02:08H
  REGION 1..9: note = CONT. FROM ABOVE: HLA-B*14:01H HLA-A*02:01H HLA-A*02:02M HLA- A*02:03H HLA-B*38:02H HLA-B*07:04H HLA-B*13:02H HLA-C*07:04H
AVASKILGL

SEQ ID NO: 3426 - protein, 9 aa, Severe acute respiratory syndrome coronavirus 2
  REGION 1..9: note = Table A: HLA-A*02:11M HLA-A*02:08H HLA-A*02:01H HLA-B*13:02H
KILGLPTQT

SEQ ID NO: 3427 - protein, 9 aa, Severe acute respiratory syndrome coronavirus 2
  REGION 1..9: note = Table A: HLA-A*02:11H HLA-C*15:05H HLA-A*02:07H HLA-B*14:01H HLA-A*02:01H HLA-A*02:02H HLA-A*02:03M HLA-B*38:02M HLA-B*13:02M
ILGLPTQTV

SEQ ID NO: 3428 - protein, 9 aa, Severe acute respiratory syndrome coronavirus 2
  REGION 1..9: note = Table A: HLA-A*30:02H
SSQGSEYDY

SEQ ID NO: 3429 - protein, 9 aa, Severe acute respiratory syndrome coronavirus 2
  REGION 1..9: note = Table A: HLA-B*45:01H HLA-B*40:02H HLA-B*40:06H HLA-B*49:01M HLA-B*50:01H
SEYDYVIFT

SEQ ID NO: 3430 - protein, 9 aa, Severe acute respiratory syndrome coronavirus 2
  REGION 1..9: note = Table A: HLA-B*50:01H
YDYVIFTQT

SEQ ID NO: 3431 - protein, 9 aa, Severe acute respiratory syndrome coronavirus 2
  REGION 1..9: note = Table A: HLA-A*11:303H HLA-B*46:01H HLA-C*15:05H HLA-A*02:03H HLA-B*38:02H
VIFTQTTET

SEQ ID NO: 3432 - protein, 9 aa, Severe acute respiratory syndrome coronavirus 2
  REGION 1..9: note = Table A: HLA-B*46:01H
FTQTTETAH

SEQ ID NO: 3433 - protein, 9 aa, Severe acute respiratory syndrome coronavirus 2
  REGION 1..9: note = Table A: HLA-B*49:01M
TETAHSCNV

SEQ ID NO: 3434 - protein, 9 aa, Severe acute respiratory syndrome coronavirus 2
  REGION 1..9: note = Table A: HLA-A*33:03M HLA-A*68:01H HLA-A*34:01H HLA-A*66:01H
TAHSCNVNR

SEQ ID NO: 3435 - protein, 9 aa, Severe acute respiratory syndrome coronavirus 2
  REGION 1..9: note = Table A: HLA-B*38:01H HLA-B*38:02M
AHSCNVNRF

SEQ ID NO: 3436 - protein, 9 aa, Severe acute respiratory syndrome coronavirus 2
  REGION 1..9: note = Table A: HLA-A*02:11H HLA-A*68:02H HLA-C*15:05H HLA-B*38:02H HLA-B*07:05H HLA-B*57:03H
NVNRFNVAI

SEQ ID NO: 3437 - protein, 9 aa, Severe acute respiratory syndrome coronavirus 2
  REGION 1..9: note = Table A: HLA-B*27:05H HLA-B*27:02H HLA-A*68:01H
NRFNVAITR

SEQ ID NO: 3438 - protein, 9 aa, Severe acute respiratory syndrome coronavirus 2
  REGION 1..9: note = Table A: HLA-A*34:02H HLA-A*66:01H
FNVAITRAK

SEQ ID NO: 3439 - protein, 9 aa, Severe acute respiratory syndrome coronavirus 2
  REGION 1..9: note = Table A: HLA-A*68:02H
NVAITRAKV

SEQ ID NO: 3440 - protein, 9 aa, Severe acute respiratory syndrome coronavirus 2
  REGION 1..9: note = Table A: HLA-B*07:04M
ITRAKVGIL

SEQ ID NO: 3441 - protein, 9 aa, Severe acute respiratory syndrome coronavirus 2
  REGION 1..9: note = Table A: HLA-B*58:02H HLA-B*07:04H HLA-B*13:02H
RAKVGILCI

SEQ ID NO: 3442 - protein, 9 aa, Severe acute respiratory syndrome coronavirus 2
  REGION 1..9: note = Table A: HLA-B*15:03H
AKVGILCIM

SEQ ID NO: 3443 - protein, 9 aa, Severe acute respiratory syndrome coronavirus 2
  REGION 1..9: note = Table A: HLA-A*30:02H
CIMSDRDLY

SEQ ID NO: 3444 - protein, 9 aa, Severe acute respiratory syndrome coronavirus 2
  REGION 1..9: note = Table A: HLA-B*40:02H
SDRDLYDKL

SEQ ID NO: 3445 - protein, 9 aa, Severe acute respiratory syndrome coronavirus 2
  REGION 1..9: note = Table A: HLA-B*37:01M HLA-C*07:04H
RDLYDKLQF

SEQ ID NO: 3446 - protein, 9 aa, Severe acute respiratory syndrome coronavirus 2
  REGION 1..9: note = Table A: HLA-A*68:02H HLA-B*38:02H
DLYDKLQFT

SEQ ID NO: 3447 - protein, 9 aa, Severe acute respiratory syndrome coronavirus 2
  REGION 1..9: note = Table A: HLA-B*37:01H HLA-B*40:02H HLA-B*41:02H
YDKLQFTSL

SEQ ID NO: 3448 - protein, 9 aa, Severe acute respiratory syndrome coronavirus 2
  REGION 1..9: note = Table A: HLA-B*13:02H
KLQFTSLEI

SEQ ID NO: 3449 - protein, 9 aa, Severe acute respiratory syndrome coronavirus 2
  REGION 1..9: note = Table A: HLA-A*33:01H HLA-A*33:03H HLA-A*31:01H
QFTSLEIPR

SEQ ID NO: 3450 - protein, 9 aa, Severe acute respiratory syndrome coronavirus 2
  REGION 1..9: note = Table A: HLA-A*68:01H HLA-A*34:02H HLA-A*66:01H
FTSLEIPRR

SEQ ID NO: 3451 - protein, 9 aa, Severe acute respiratory syndrome coronavirus 2
  REGION 1..9: note = Table A: HLA-B*45:01H HLA-B*40:06H HLA-B*50:01H
LEIPRRNVA

SEQ ID NO: 3452 - protein, 9 aa, Severe acute respiratory syndrome coronavirus 2
  REGION 1..9: note = Table A: HLA-B*42:01M HLA-B*08:01H HLA-C*15:05M HLA-B*55:01H HLA-B*51:01H HLA-B*07:02H HLA-B*07:04H HLA-B*07:05H
IPRRNVATL

SEQ ID NO: 3453 - protein, 9 aa, Severe acute respiratory syndrome coronavirus 2
  REGION 1..9: note = Table A: HLA-B*48:01H HLA-A*11:303H HLA-A*02:11H HLA-A*02:04H HLA-A*02:05H HLA-A*02:06H HLA-A*02:08M HLA-B*14:01H HLA-A*02:01H HLA-A*02:02M HLA-A*02:03M HLA-B*38:02M HLA-B*15:01H HLA-B*39:01H HLA-B*13:02H
LQAENVTGL

SEQ ID NO: 3454 - protein, 9 aa, Severe acute respiratory syndrome coronavirus 2
  REGION 1..9: note = Table A: HLA-C*04:03H HLA-B*53:01H HLA-B*35:01H HLA-B*38:02H HLA-C*05:01H
QAENVTGLF

SEQ ID NO: 3455 - protein, 9 aa, Severe acute respiratory syndrome coronavirus 2
  REGION 1..9: note = Table A: HLA-A*03:01H HLA-A*11:01H HLA-A*11:02H HLA-A*34:02H HLA-B*49:01H
AENVTGLFK

SEQ ID NO: 3456 - protein, 9 aa, Severe acute respiratory syndrome coronavirus 2
  REGION 1..9: note = Table A: HLA-A*68:02M HLA-C*15:05H HLA-B*38:02H HLA-B*07:05H
DCSKVITGL

SEQ ID NO: 3457 - protein, 9 aa, Severe acute respiratory syndrome coronavirus 2
  REGION 1..9: note = Table A: HLA-A*02:11H HLA-B*55:02H HLA-A*02:05M HLA-A*02:06H HLA-A*02:08H HLA-A*02:01H HLA-B*40:06H
KVITGLHPT

SEQ ID NO: 3458 - protein, 9 aa, Severe acute respiratory syndrome coronavirus 2
  REGION 1..9: note = Table A: HLA-A*02:03H
ITGLHPTQA

SEQ ID NO: 3459 - protein, 9 aa, Severe acute respiratory syndrome coronavirus 2
  REGION 1..9: note = Table A: HLA-B*42:01H HLA-B*53:01H HLA-B*35:03H HLA-C*15:05M HLA-A*34:01H HLA-B*35:01M HLA-B*35:02M HLA-B*35:07H HLA-B*35:12M HLA-B*38:02H HLA-B*07:02M HLA-B*07:04M HLA-B*39:01H HLA-B*07:05M
HPTQAPTHL

SEQ ID NO: 3460 - protein, 9 aa, Severe acute respiratory syndrome coronavirus 2
  REGION 1..9: note = Table A: HLA-C*16:04H HLA-A*02:11H HLA-C*15:05H HLA-B*14:02H HLA-C*15:02H HLA-A*02:05M HLA-A*02:06M HLA-A*02:08H HLA-B*14:01H HLA-A*02:01H HLA-A*02:02H HLA-A*02:03M HLA-B*52:01M HLA-C*08:01H HLA-B*38:01H HLA-B*38:02H
  REGION 1..9: note = CONT. FROM ABOVE: HLA-B*39:06H HLA-B*15:01M HLA-B*15:02M HLA- B*39:01M HLA-B*13:01H HLA-B*13:02H HLA-B*15:10M
TQAPTHLSV

SEQ ID NO: 3461 - protein, 9 aa, Severe acute respiratory syndrome coronavirus 2
  REGION 1..9: note = Table A: HLA-B*55:02H
APTHLSVDT

SEQ ID NO: 3462 - protein, 9 aa, Severe acute respiratory syndrome coronavirus 2
  REGION 1..9: note = Table A: HLA-B*38:01H HLA-B*38:02H HLA-B*39:01H
THLSVDTKF

SEQ ID NO: 3463 - protein, 9 aa, Severe acute respiratory syndrome coronavirus 2
  REGION 1..9: note = Table A: HLA-A*25:01H HLA-A*33:03H HLA-A*26:01M HLA-A*26:02H HLA-A*26:03M HLA-B*08:01M HLA-A*68:02M HLA-A*34:01H HLA-A*66:01M
DTKFKTEGL

SEQ ID NO: 3464 - protein, 9 aa, Severe acute respiratory syndrome coronavirus 2
  REGION 1..9: note = Table A: HLA-A*02:04H HLA-A*02:01H
GLCVDIPGI

SEQ ID NO: 3465 - protein, 9 aa, Severe acute respiratory syndrome coronavirus 2
  REGION 1..9: note = Table A: HLA-A*11:303M HLA-A*03:01M HLA-A*03:02H HLA-A*11:01H HLA-A*11:02H HLA-A*36:01H HLA-A*34:02H HLA-C*07:27H HLA-A*66:01H
CVDIPGIPK

SEQ ID NO: 3466 - protein, 9 aa, Severe acute respiratory syndrome coronavirus 2
  REGION 1..9: note = Table A: HLA-A*26:03H HLA-A*34:01H
DIPGIPKDM

SEQ ID NO: 3467 - protein, 9 aa, Severe acute respiratory syndrome coronavirus 2
  REGION 1..9: note = Table A: HLA-C*16:01H HLA-B*08:01H HLA-C*03:04H HLA-B*14:02H HLA-C*15:02H HLA-A*34:02H HLA-B*57:03H
MTYRRLISM

SEQ ID NO: 3468 - protein, 9 aa, Severe acute respiratory syndrome coronavirus 2
  REGION 1..9: note = Table A: HLA-B*27:05M
RRLISMMGF

SEQ ID NO: 3469 - protein, 9 aa, Severe acute respiratory syndrome coronavirus 2
  REGION 1..9: note = Table A: HLA-A*03:01H HLA-A*11:02H HLA-A*29:01H HLA-A*29:02M HLA-A*30:02M HLA-B*38:02M HLA-A*32:01H HLA-B*15:01H HLA-B*15:02H HLA-B*15:03H HLA-B*07:05H
SMMGFKMNY

SEQ ID NO: 3470 - protein, 9 aa, Severe acute respiratory syndrome coronavirus 2
  REGION 1..9: note = Table A: HLA-A*02:11H HLA-A*68:02H HLA-A*02:02H
MGFKMNYQV

SEQ ID NO: 3471 - protein, 9 aa, Severe acute respiratory syndrome coronavirus 2
  REGION 1..9: note = Table A: HLA-A*36:01H HLA-A*30:02M HLA-B*38:02H HLA-A*32:01H HLA-B*15:01M HLA-B*15:03H
KMNYQVNGY

SEQ ID NO: 3472 - protein, 9 aa, Severe acute respiratory syndrome coronavirus 2
  REGION 1..9: note = Table A: HLA-A*11:303H HLA-A*02:05H HLA-A*02:06H HLA-C*17:01H HLA-C*08:01H HLA-B*38:01H HLA-B*38:02M HLA-B*15:01H HLA-B*15:02H HLA-B*39:01H HLA-B*13:01H HLA-B*13:02H
YQVNGYPNM

SEQ ID NO: 3473 - protein, 9 aa, Severe acute respiratory syndrome coronavirus 2
  REGION 1..9: note = Table A: HLA-A*33:03H HLA-A*31:01H
GYPNMFITR

SEQ ID NO: 3474 - protein, 9 aa, Severe acute respiratory syndrome coronavirus 2
  REGION 1..9: note = Table A: HLA-C*14:03H HLA-B*08:01H HLA-B*38:02H
MFITREEAI

SEQ ID NO: 3475 - protein, 9 aa, Severe acute respiratory syndrome coronavirus 2
  REGION 1..9: note = Table A: HLA-A*34:02H
ITREEAIRH

SEQ ID NO: 3476 - protein, 9 aa, Severe acute respiratory syndrome coronavirus 2
  REGION 1..9: note = Table A: HLA-C*06:02H HLA-B*14:01H HLA-B*38:02H
TREEAIRHV

SEQ ID NO: 3477 - protein, 9 aa, Severe acute respiratory syndrome coronavirus 2
  REGION 1..9: note = Table A: HLA-B*45:01H
EEAIRHVRA

SEQ ID NO: 3478 - protein, 9 aa, Severe acute respiratory syndrome coronavirus 2
  REGION 1..9: note = Table A: HLA-B*58:01H HLA-B*57:01H HLA-A*25:01H HLA-A*26:01H HLA-A*26:03H HLA-B*53:01M HLA-A*34:01H HLA-B*57:03H HLA-A*66:01H
EAIRHVRAW

SEQ ID NO: 3479 - protein, 9 aa, Severe acute respiratory syndrome coronavirus 2
  REGION 1..9: note = Table A: HLA-C*06:02H
VRAWIGFDV

SEQ ID NO: 3480 - protein, 9 aa, Severe acute respiratory syndrome coronavirus 2
  REGION 1..9: note = Table A: HLA-A*33:01M HLA-A*33:03H HLA-A*26:03M HLA-A*68:01M HLA-A*34:01M HLA-A*66:01H
DVEGCHATR

SEQ ID NO: 3481 - protein, 9 aa, Severe acute respiratory syndrome coronavirus 2
  REGION 1..9: note = Table A: HLA-B*38:01H HLA-B*38:02H HLA-B*39:01M
TREAVGTNL

SEQ ID NO: 3482 - protein, 9 aa, Severe acute respiratory syndrome coronavirus 2
  REGION 1..9: note = Table A: HLA-B*45:01M HLA-B*40:06H HLA-B*50:01M
REAVGTNLP

SEQ ID NO: 3483 - protein, 9 aa, Severe acute respiratory syndrome coronavirus 2
  REGION 1..9: note = Table A: HLA-A*26:03H HLA-A*68:02H HLA-B*35:03M HLA-A*34:01M HLA-A*34:02H HLA-B*35:01H HLA-B*35:02H HLA-C*08:01H HLA-C*08:03H HLA-B*38:02H HLA-B*39:01H HLA-A*66:01H
EAVGTNLPL

SEQ ID NO: 3484 - protein, 9 aa, Severe acute respiratory syndrome coronavirus 2
  REGION 1..9: note = Table A: HLA-C*12:05M HLA-C*15:05M HLA-C*15:02M HLA-B*13:02H HLA-C*07:04H
VGTNLPLQL

SEQ ID NO: 3485 - protein, 9 aa, Severe acute respiratory syndrome coronavirus 2
  REGION 1..9: note = Table A: HLA-B*58:01H HLA-A*29:02H HLA-C*15:05H HLA-B*57:03H
TNLPLQLGF

SEQ ID NO: 3486 - protein, 9 aa, Severe acute respiratory syndrome coronavirus 2
  REGION 1..9: note = Table A: HLA-B*55:02H HLA-B*54:01H
LPLQLGFST

SEQ ID NO: 3487 - protein, 9 aa, Severe acute respiratory syndrome coronavirus 2
  REGION 1..9: note = Table A: HLA-A*02:11H HLA-A*02:06H HLA-B*52:01H HLA-B*38:02H HLA-B*13:02M
LQLGFSTGV

SEQ ID NO: 3488 - protein, 9 aa, Severe acute respiratory syndrome coronavirus 2
  REGION 1..9: note = Table A: HLA-B*54:01H
FSTGVNLVA

SEQ ID NO: 3489 - protein, 9 aa, Severe acute respiratory syndrome coronavirus 2
  REGION 1..9: note = Table A: HLA-A*68:02H HLA-C*15:05H
STGVNLVAV

SEQ ID NO: 3490 - protein, 9 aa, Severe acute respiratory syndrome coronavirus 2
  REGION 1..9: note = Table A: HLA-A*29:01H HLA-A*29:02H HLA-B*27:02H HLA-B*35:01M HLA-B*38:02M HLA-B*15:01H HLA-B*15:02M HLA-B*07:05H
NLVAVPTGY

SEQ ID NO: 3491 - protein, 9 aa, Severe acute respiratory syndrome coronavirus 2
  REGION 1..9: note = Table A: HLA-A*68:02H HLA-A*34:01H HLA-A*66:01H
LVAVPTGYV

SEQ ID NO: 3492 - protein, 9 aa, Severe acute respiratory syndrome coronavirus 2
  REGION 1..9: note = Table A: HLA-B*37:01H
VDTPNNTDF

SEQ ID NO: 3493 - protein, 9 aa, Severe acute respiratory syndrome coronavirus 2
  REGION 1..9: note = Table A: HLA-A*68:01H HLA-A*34:01H HLA-A*66:01H
TPNNTDFSR

SEQ ID NO: 3494 - protein, 9 aa, Severe acute respiratory syndrome coronavirus 2
  REGION 1..9: note = Table A: HLA-B*37:01H
TDFSRVSAK

SEQ ID NO: 3495 - protein, 9 aa, Severe acute respiratory syndrome coronavirus 2
  REGION 1..9: note = Table A: HLA-B*37:01H HLA-B*38:02H HLA-B*15:03H
AKPPPGDQF

SEQ ID NO: 3496 - protein, 9 aa, Severe acute respiratory syndrome coronavirus 2
  REGION 1..9: note = Table A: HLA-B*14:02H HLA-B*15:02H
DQFKHLIPL

SEQ ID NO: 3497 - protein, 9 aa, Severe acute respiratory syndrome coronavirus 2
  REGION 1..9: note = Table A: HLA-A*30:01H
QFKHLIPLM

SEQ ID NO: 3498 - protein, 9 aa, Severe acute respiratory syndrome coronavirus 2
  REGION 1..9: note = Table A: HLA-C*06:02H HLA-B*38:02H HLA-B*15:03M
FKHLIPLMY

SEQ ID NO: 3499 - protein, 9 aa, Severe acute respiratory syndrome coronavirus 2
  REGION 1..9: note = Table A: HLA-A*74:01H HLA-A*31:01H
KGLPWNVVR

SEQ ID NO: 3500 - protein, 9 aa, Severe acute respiratory syndrome coronavirus 2
  REGION 1..9: note = Table A: HLA-A*02:11H HLA-A*02:04H HLA-A*02:06H HLA-A*02:07M HLA-A*02:02H HLA-A*02:03H HLA-B*38:02H HLA-B*40:06H HLA-B*13:01H HLA-B*13:02H
GLPWNVVRI

SEQ ID NO: 3501 - protein, 9 aa, Severe acute respiratory syndrome coronavirus 2
  REGION 1..9: note = Table A: HLA-A*24:07H
PWNVVRIKI

SEQ ID NO: 3502 - protein, 9 aa, Severe acute respiratory syndrome coronavirus 2
  REGION 1..9: note = Table A: HLA-B*08:01M HLA-B*07:04H
VVRIKIVQM

SEQ ID NO: 3503 - protein, 9 aa, Severe acute respiratory syndrome coronavirus 2
  REGION 1..9: note = Table A: HLA-C*06:02H HLA-B*27:05M HLA-C*07:01H HLA-B*14:02H HLA-B*14:01H HLA-B*38:02M
VRIKIVQML

SEQ ID NO: 3504 - protein, 9 aa, Severe acute respiratory syndrome coronavirus 2
  REGION 1..9: note = Table A: HLA-C*08:01H HLA-B*39:01H
IVQMLSDTL

SEQ ID NO: 3505 - protein, 9 aa, Severe acute respiratory syndrome coronavirus 2
  REGION 1..9: note = Table A: HLA-A*11:303H HLA-A*02:11M HLA-A*68:02H HLA-A*02:04H HLA-A*02:05H HLA-A*02:07H HLA-A*02:01H HLA-A*02:02H HLA-A*02:03M HLA-B*38:02M
MLSDTLKNL

SEQ ID NO: 3506 - protein, 9 aa, Severe acute respiratory syndrome coronavirus 2
  REGION 1..9: note = Table A: HLA-A*33:01H HLA-A*33:03M HLA-A*26:03M HLA-A*68:01H HLA-A*34:01M HLA-A*34:02M HLA-A*66:01M
DTLKNLSDR

SEQ ID NO: 3507 - protein, 9 aa, Severe acute respiratory syndrome coronavirus 2
  REGION 1..9: note = Table A: HLA-A*02:05H HLA-A*02:02M HLA-A*02:03H HLA-B*38:02H HLA-B*13:02H
TLKNLSDRV

SEQ ID NO: 3508 - protein, 9 aa, Severe acute respiratory syndrome coronavirus 2
  REGION 1..9: note = Table A: HLA-B*57:03M
KNLSDRVVF

SEQ ID NO: 3509 - protein, 9 aa, Severe acute respiratory syndrome coronavirus 2
  REGION 1..9: note = Table A: HLA-C*04:03H HLA-A*02:11M HLA-A*68:02M HLA-C*15:02H HLA-A*02:04H HLA-A*02:05H HLA-A*02:06H HLA-A*02:07H HLA-B*14:01H HLA-A*02:01M HLA-A*02:02H HLA-A*02:03H HLA-B*38:02M
NLSDRVVFV

SEQ ID NO: 3510 - protein, 9 aa, Severe acute respiratory syndrome coronavirus 2
  REGION 1..9: note = Table A: HLA-B*58:01H HLA-C*04:03M HLA-C*08:01H HLA-C*08:02H HLA-B*57:03H
LSDRVVFVL

SEQ ID NO: 3511 - protein, 9 aa, Severe acute respiratory syndrome coronavirus 2
  REGION 1..9: note = Table A: HLA-B*57:01H HLA-B*44:03H
SDRVVFVLW

SEQ ID NO: 3512 - protein, 9 aa, Severe acute respiratory syndrome coronavirus 2
  REGION 1..9: note = Table A: HLA-C*14:03H HLA-A*24:02H HLA-A*24:07H HLA-A*23:01M
VFVLWAHGF

SEQ ID NO: 3513 - protein, 9 aa, Severe acute respiratory syndrome coronavirus 2
  REGION 1..9: note = Table A: HLA-A*74:01H HLA-A*02:11H HLA-A*02:04H HLA-A*02:06H HLA-A*02:07M HLA-A*02:01M HLA-A*02:02M HLA-C*08:01H HLA-B*38:02H HLA-A*32:01H HLA-B*40:06H HLA-B*13:02H
VLWAHGFEL

SEQ ID NO: 3514 - protein, 9 aa, Severe acute respiratory syndrome coronavirus 2
  REGION 1..9: note = Table A: HLA-B*38:01H HLA-B*38:02M HLA-B*39:01M HLA-B*15:10H
AHGFELTSM

SEQ ID NO: 3515 - protein, 9 aa, Severe acute respiratory syndrome coronavirus 2
  REGION 1..9: note = Table A: HLA-A*34:02H
HGFELTSMK

SEQ ID NO: 3516 - protein, 9 aa, Severe acute respiratory syndrome coronavirus 2
  REGION 1..9: note = Table A: HLA-A*36:01M HLA-A*29:02M HLA-A*30:02H
GFELTSMKY

SEQ ID NO: 3517 - protein, 9 aa, Severe acute respiratory syndrome coronavirus 2
  REGION 1..9: note = Table A: HLA-A*68:02M
ELTSMKYFV

SEQ ID NO: 3518 - protein, 9 aa, Severe acute respiratory syndrome coronavirus 2
  REGION 1..9: note = Table A: HLA-B*58:01M HLA-B*58:02M HLA-A*02:11H HLA-A*68:02H HLA-C*15:05H HLA-C*15:02M HLA-A*02:06H HLA-B*52:01H HLA-C*08:01H HLA-B*57:03H HLA-B*13:02H
TSMKYFVKI

SEQ ID NO: 3519 - protein, 9 aa, Severe acute respiratory syndrome coronavirus 2
  REGION 1..9: note = Table A: HLA-A*33:01H HLA-A*33:03H HLA-A*34:01H HLA-A*66:01H
YFVKIGPER

SEQ ID NO: 3520 - protein, 9 aa, Severe acute respiratory syndrome coronavirus 2
  REGION 1..9: note = Table A: HLA-C*14:03H
CFSTASDTY

SEQ ID NO: 3521 - protein, 9 aa, Severe acute respiratory syndrome coronavirus 2
  REGION 1..9: note = Table A: HLA-A*68:02H
STASDTYAC

SEQ ID NO: 3522 - protein, 9 aa, Severe acute respiratory syndrome coronavirus 2
  REGION 1..9: note = Table A: HLA-B*58:01M HLA-B*57:01H HLA-A*25:01M HLA-B*53:01H HLA-B*35:03H HLA-B*35:01M HLA-B*35:02H HLA-B*35:08H HLA-B*35:07H HLA-B*15:13H HLA-B*38:02M HLA-B*57:03H
TASDTYACW

SEQ ID NO: 3523 - protein, 9 aa, Severe acute respiratory syndrome coronavirus 2
  REGION 1..9: note = Table A: HLA-A*24:02H HLA-A*24:07H
TYACWHHSI

SEQ ID NO: 3524 - protein, 9 aa, Severe acute respiratory syndrome coronavirus 2
  REGION 1..9: note = Table A: HLA-B*38:02M
WHHSIGFDY

SEQ ID NO: 3525 - protein, 9 aa, Severe acute respiratory syndrome coronavirus 2
  REGION 1..9: note = Table A: HLA-B*38:01M HLA-B*38:02H HLA-B*15:10H
HHSIGFDYV

SEQ ID NO: 3526 - protein, 9 aa, Severe acute respiratory syndrome coronavirus 2
  REGION 1..9: note = Table A: HLA-B*58:01H HLA-C*16:01H HLA-C*16:04H HLA-A*36:01H HLA-A*29:02H HLA-C*07:01H HLA-C*03:02H HLA-A*30:02H HLA-C*12:03H HLA-B*35:01M HLA-B*35:08H HLA-B*35:07H HLA-B*38:02M HLA-B*15:02H HLA-B*57:03H
HSIGFDYVY

SEQ ID NO: 3527 - protein, 9 aa, Severe acute respiratory syndrome coronavirus 2
  REGION 1..9: note = Table A: HLA-C*04:01H HLA-C*04:03M
GFDYVYNPF

SEQ ID NO: 3528 - protein, 9 aa, Severe acute respiratory syndrome coronavirus 2
  REGION 1..9: note = Table A: HLA-C*14:02H HLA-C*14:03M HLA-C*06:02M HLA-C*07:02H HLA-C*08:01H
VYNPFMIDV

SEQ ID NO: 3529 - protein, 9 aa, Severe acute respiratory syndrome coronavirus 2
  REGION 1..9: note = Table A: HLA-A*24:02H HLA-A*24:07M HLA-A*23:01H
PFMIDVQQW

SEQ ID NO: 3530 - protein, 9 aa, Severe acute respiratory syndrome coronavirus 2
  REGION 1..9: note = Table A: HLA-C*04:03H HLA-A*02:07H HLA-C*08:02H HLA-B*38:02H
MIDVQQWGF

SEQ ID NO: 3531 - protein, 9 aa, Severe acute respiratory syndrome coronavirus 2
  REGION 1..9: note = Table A: HLA-B*48:01H HLA-A*02:11H HLA-A*02:05H HLA-B*52:01H HLA-B*38:02H HLA-B*15:03H HLA-B*39:01H HLA-B*13:02H
QQWGFTGNL

SEQ ID NO: 3532 - protein, 9 aa, Severe acute respiratory syndrome coronavirus 2
  REGION 1..9: note = Table A: HLA-A*34:02H
FTGNLQSNH

SEQ ID NO: 3533 - protein, 9 aa, Severe acute respiratory syndrome coronavirus 2
  REGION 1..9: note = Table A: HLA-A*30:02H HLA-B*38:02H HLA-B*15:02H
NLQSNHDLY

SEQ ID NO: 3534 - protein, 9 aa, Severe acute respiratory syndrome coronavirus 2
  REGION 1..9: note = Table A: HLA-A*02:05H HLA-B*38:02H HLA-B*13:02H
LQSNHDLYC

SEQ ID NO: 3535 - protein, 9 aa, Severe acute respiratory syndrome coronavirus 2
  REGION 1..9: note = Table A: HLA-A*68:02H
SNHDLYCQV

SEQ ID NO: 3536 - protein, 9 aa, Severe acute respiratory syndrome coronavirus 2
  REGION 1..9: note = Table A: HLA-B*46:01H HLA-C*07:27H
YCQVHGNAH

SEQ ID NO: 3537 - protein, 9 aa, Severe acute respiratory syndrome coronavirus 2
  REGION 1..9: note = Table A: HLA-A*02:05H HLA-A*02:06H HLA-B*52:01H HLA-B*38:02H HLA-B*13:02H
CQVHGNAHV

SEQ ID NO: 3538 - protein, 9 aa, Severe acute respiratory syndrome coronavirus 2
  REGION 1..9: note = Table A: HLA-B*56:01H HLA-B*55:02H HLA-B*55:01H HLA-A*02:05H HLA-A*02:08H HLA-B*38:02H HLA-B*54:01H
QVHGNAHVA

SEQ ID NO: 3539 - protein, 9 aa, Severe acute respiratory syndrome coronavirus 2
  REGION 1..9: note = Table A: HLA-C*15:05H
HGNAHVASC

SEQ ID NO: 3540 - protein, 9 aa, Severe acute respiratory syndrome coronavirus 2
  REGION 1..9: note = Table A: HLA-B*38:01H HLA-B*38:02H HLA-B*39:01M HLA-B*15:10H
AHVASCDAI

SEQ ID NO: 3541 - protein, 9 aa, Severe acute respiratory syndrome coronavirus 2
  REGION 1..9: note = Table A: HLA-B*35:03M HLA-B*35:01H HLA-B*35:02H HLA-B*35:08H HLA-B*35:12M HLA-B*38:02H HLA-B*15:02M
HVASCDAIM

SEQ ID NO: 3542 - protein, 9 aa, Severe acute respiratory syndrome coronavirus 2
  REGION 1..9: note = Table A: HLA-A*11:303H HLA-A*74:01H HLA-A*11:01M HLA-A*11:02H HLA-A*33:03H HLA-A*68:01H HLA-A*34:01H HLA-A*34:02H HLA-C*07:27H HLA-A*31:01M HLA-A*66:01M
ASCDAIMTR

SEQ ID NO: 3543 - protein, 9 aa, Severe acute respiratory syndrome coronavirus 2
  REGION 1..9: note = Table A: HLA-B*08:01M HLA-C*15:05H HLA-C*15:02H HLA-B*13:02H
AIMTRCLAV

SEQ ID NO: 3544 - protein, 9 aa, Severe acute respiratory syndrome coronavirus 2
  REGION 1..9: note = Table A: HLA-A*02:02M HLA-B*38:02H
CLAVHECFV

SEQ ID NO: 3545 - protein, 9 aa, Severe acute respiratory syndrome coronavirus 2
  REGION 1..9: note = Table A: HLA-A*74:01M HLA-A*11:01H HLA-A*11:02M HLA-A*33:01H HLA-A*33:03M HLA-A*26:03H HLA-A*68:01H HLA-A*34:01M HLA-A*34:02H HLA-A*31:01M HLA-A*66:01M
AVHECFVKR

SEQ ID NO: 3546 - protein, 9 aa, Severe acute respiratory syndrome coronavirus 2
  REGION 1..9: note = Table A: HLA-B*58:02H HLA-A*02:11H HLA-B*57:03H HLA-B*13:02H
FVKRVDWTI

SEQ ID NO: 3547 - protein, 9 aa, Severe acute respiratory syndrome coronavirus 2
  REGION 1..9: note = Table A: HLA-C*06:02M HLA-B*27:05M HLA-C*07:01M HLA-C*07:02M HLA-B*27:02M HLA-B*15:03H HLA-C*07:04H
KRVDWTIEY

SEQ ID NO: 3548 - protein, 9 aa, Severe acute respiratory syndrome coronavirus 2
  REGION 1..9: note = Table A: HLA-A*24:02M HLA-A*24:07H HLA-A*23:01H HLA-B*39:01H
EYPIIGDEL

SEQ ID NO: 3549 - protein, 9 aa, Severe acute respiratory syndrome coronavirus 2
  REGION 1..9: note = Table A: HLA-B*13:02H
PIIGDELKI

SEQ ID NO: 3550 - protein, 9 aa, Severe acute respiratory syndrome coronavirus 2
  REGION 1..9: note = Table A: HLA-B*45:01H HLA-B*50:01H
GDELKINAA

SEQ ID NO: 3551 - protein, 9 aa, Severe acute respiratory syndrome coronavirus 2
  REGION 1..9: note = Table A: HLA-B*18:01M HLA-B*07:05M
DELKINAAC

SEQ ID NO: 3552 - protein, 9 aa, Severe acute respiratory syndrome coronavirus 2
  REGION 1..9: note = Table A: HLA-A*33:01H HLA-A*33:03H HLA-A*26:03M HLA-A*34:01H
ELKINAACR

SEQ ID NO: 3553 - protein, 9 aa, Severe acute respiratory syndrome coronavirus 2
  REGION 1..9: note = Table A: HLA-B*15:03H
RKVQHMVVK

SEQ ID NO: 3554 - protein, 9 aa, Severe acute respiratory syndrome coronavirus 2
  REGION 1..9: note = Table A: HLA-B*56:01H HLA-A*02:11M HLA-B*55:02H HLA-B*55:01H HLA-A*02:05M HLA-A*02:06H HLA-A*02:08H HLA-A*02:02H HLA-B*40:06H
KVQHMVVKA

SEQ ID NO: 3555 - protein, 9 aa, Severe acute respiratory syndrome coronavirus 2
  REGION 1..9: note = Table A: HLA-A*02:08H HLA-A*02:03H HLA-B*52:01H HLA-B*38:02H HLA-B*39:06H HLA-B*40:06H HLA-B*15:01H HLA-B*50:01H
VQHMVVKAA

SEQ ID NO: 3556 - protein, 9 aa, Severe acute respiratory syndrome coronavirus 2
  REGION 1..9: note = Table A: HLA-B*38:01M HLA-B*38:02H HLA-B*39:06H HLA-B*39:01M HLA-B*15:10H
QHMVVKAAL

SEQ ID NO: 3557 - protein, 9 aa, Severe acute respiratory syndrome coronavirus 2
  REGION 1..9: note = Table A: HLA-B*08:01H HLA-A*02:11H HLA-A*02:02H HLA-B*38:02H
HMVVKAALL

SEQ ID NO: 3558 - protein, 9 aa, Severe acute respiratory syndrome coronavirus 2
  REGION 1..9: note = Table A: HLA-B*58:01M HLA-B*57:03M
KAALLADKF

SEQ ID NO: 3559 - protein, 9 aa, Severe acute respiratory syndrome coronavirus 2
  REGION 1..9: note = Table A: HLA-A*02:04H
ALLADKFPV

SEQ ID NO: 3560 - protein, 9 aa, Severe acute respiratory syndrome coronavirus 2
  REGION 1..9: note = Table A: HLA-A*11:303H HLA-B*08:01H HLA-C*03:03H HLA-A*02:11H HLA-C*03:02H HLA-C*03:04H HLA-A*68:02H HLA-A*02:04H HLA-A*02:05H HLA-A*02:06M HLA-A*02:07M HLA-B*14:01H HLA-A*02:01M HLA-A*02:02H HLA-A*02:03M
  REGION 1..9: note = CONT. FROM ABOVE: HLA-C*17:01H HLA-C*08:01M HLA-B*38:02M HLA- B*40:06M HLA-B*15:10H
LLADKFPVL

SEQ ID NO: 3561 - protein, 9 aa, Severe acute respiratory syndrome coronavirus 2
  REGION 1..9: note = Table A: HLA-A*36:01H HLA-C*04:03H HLA-C*05:01H
LADKFPVLH

SEQ ID NO: 3562 - protein, 9 aa, Severe acute respiratory syndrome coronavirus 2
  REGION 1..9: note = Table A: HLA-A*68:02H HLA-B*38:02H
DKFPVLHDI

SEQ ID NO: 3563 - protein, 9 aa, Severe acute respiratory syndrome coronavirus 2
  REGION 1..9: note = Table A: HLA-A*11:303H HLA-A*74:01H HLA-A*03:01M HLA-A*03:02M HLA-A*11:01H HLA-A*11:02H HLA-A*36:01H HLA-A*30:02H HLA-A*34:01H HLA-A*34:02H HLA-A*66:01H
VLHDIGNPK

SEQ ID NO: 3564 - protein, 9 aa, Severe acute respiratory syndrome coronavirus 2
  REGION 1..9: note = Table A: HLA-B*38:02H
LHDIGNPKA

SEQ ID NO: 3565 - protein, 9 aa, Severe acute respiratory syndrome coronavirus 2
  REGION 1..9: note = Table A: HLA-B*44:05M HLA-B*44:03H HLA-B*18:01H HLA-A*68:02H HLA-B*35:03H HLA-C*15:05H HLA-C*08:03H HLA-B*37:01H HLA-B*38:01H HLA-B*38:02M HLA-B*40:02M HLA-B*39:01H HLA-B*07:05H HLA-B*41:02M HLA-B*49:01M
HDIGNPKAI

SEQ ID NO: 3566 - protein, 9 aa, Severe acute respiratory syndrome coronavirus 2
  REGION 1..9: note = Table A: HLA-A*33:01H HLA-A*68:01H HLA-A*34:01H HLA-A*34:02M HLA-A*66:01H
DIGNPKAIK

SEQ ID NO: 3567 - protein, 9 aa, Severe acute respiratory syndrome coronavirus 2
  REGION 1..9: note = Table A: HLA-B*57:03H
CVPQADVEW

SEQ ID NO: 3568 - protein, 9 aa, Severe acute respiratory syndrome coronavirus 2
  REGION 1..9: note = Table A: HLA-A*24:07H HLA-B*38:02H HLA-B*13:01M
PQADVEWKF

SEQ ID NO: 3569 - protein, 9 aa, Severe acute respiratory syndrome coronavirus 2
  REGION 1..9: note = Table A: HLA-B*15:01H
AQPCSDKAY

SEQ ID NO: 3570 - protein, 9 aa, Severe acute respiratory syndrome coronavirus 2
  REGION 1..9: note = Table A: HLA-B*58:01M HLA-B*58:02M HLA-B*57:01H HLA-A*02:11H HLA-B*57:03H HLA-B*13:01H
KAYKIEELF

SEQ ID NO: 3571 - protein, 9 aa, Severe acute respiratory syndrome coronavirus 2
  REGION 1..9: note = Table A: HLA-C*14:03H HLA-A*29:02H HLA-A*30:02H
AYKIEELFY

SEQ ID NO: 3572 - protein, 9 aa, Severe acute respiratory syndrome coronavirus 2
  REGION 1..9: note = Table A: HLA-B*58:01H HLA-A*36:01H HLA-A*29:01H HLA-A*29:02M HLA-A*01:01H HLA-C*07:01H HLA-A*30:02M HLA-B*07:05H HLA-B*57:03H
KIEELFYSY

SEQ ID NO: 3573 - protein, 9 aa, Severe acute respiratory syndrome coronavirus 2
  REGION 1..9: note = Table A: HLA-A*26:03H HLA-A*34:01M HLA-A*34:02H
ELFYSYATH

SEQ ID NO: 3574 - protein, 9 aa, Severe acute respiratory syndrome coronavirus 2
  REGION 1..9: note = Table A: HLA-A*34:02M
YSYATHSDK

SEQ ID NO: 3575 - protein, 9 aa, Severe acute respiratory syndrome coronavirus 2
  REGION 1..9: note = Table A: HLA-C*14:02H HLA-C*14:03H HLA-B*44:05H HLA-C*07:02H HLA-A*24:02H HLA-A*24:07H HLA-C*08:01H HLA-A*23:01M HLA-B*38:02H HLA-B*39:01H
SYATHSDKF

SEQ ID NO: 3576 - protein, 9 aa, Severe acute respiratory syndrome coronavirus 2
  REGION 1..9: note = Table A: HLA-C*14:03H HLA-A*24:02H HLA-A*24:07H HLA-A*23:01H
KFTDGVCLF

SEQ ID NO: 3577 - protein, 9 aa, Severe acute respiratory syndrome coronavirus 2
  REGION 1..9: note = Table A: HLA-B*58:01M HLA-C*04:03H HLA-B*53:01H HLA-B*57:03H
FTDGVCLFW

SEQ ID NO: 3578 - protein, 9 aa, Severe acute respiratory syndrome coronavirus 2
  REGION 1..9: note = Table A: HLA-B*41:02H
VDRYPANSI

SEQ ID NO: 3579 - protein, 9 aa, Severe acute respiratory syndrome coronavirus 2
  REGION 1..9: note = Table A: HLA-B*14:02M HLA-B*14:01M HLA-B*38:02H HLA-B*39:06H HLA-B*39:01H
DRYPANSIV

SEQ ID NO: 3580 - protein, 9 aa, Severe acute respiratory syndrome coronavirus 2
  REGION 1..9: note = Table A: HLA-A*33:01H HLA-A*33:03M HLA-B*56:01H HLA-A*26:03H HLA-B*55:02H HLA-A*68:01M HLA-A*68:02H HLA-A*34:01H HLA-A*34:02M HLA-B*35:07H HLA-B*54:01H HLA-A*66:01M
YPANSIVCR

SEQ ID NO: 3581 - protein, 9 aa, Severe acute respiratory syndrome coronavirus 2
  REGION 1..9: note = Table A: HLA-A*02:11H HLA-A*68:02H HLA-A*02:02H HLA-B*40:02H
FDTRVLSNL

SEQ ID NO: 3582 - protein, 9 aa, Severe acute respiratory syndrome coronavirus 2
  REGION 1..9: note = Table A: HLA-B*14:02H HLA-B*14:01H HLA-B*38:02H
TRVLSNLNL

SEQ ID NO: 3583 - protein, 9 aa, Severe acute respiratory syndrome coronavirus 2
  REGION 1..9: note = Table A: HLA-C*15:05M HLA-B*07:05H
LPGCDGGSL

SEQ ID NO: 3584 - protein, 9 aa, Severe acute respiratory syndrome coronavirus 2
  REGION 1..9: note = Table A: HLA-A*33:01H HLA-A*33:03H HLA-A*68:01H HLA-A*34:02H
DGGSLYVNK

SEQ ID NO: 3585 - protein, 9 aa, Severe acute respiratory syndrome coronavirus 2
  REGION 1..9: note = Table A: HLA-A*11:303H HLA-B*46:01H HLA-B*08:01H HLA-A*02:11H HLA-A*30:02H HLA-B*38:02M HLA-A*32:01H HLA-B*15:01H HLA-B*15:02H HLA-B*15:03H
SLYVNKHAF

SEQ ID NO: 3586 - protein, 9 aa, Severe acute respiratory syndrome coronavirus 2
  REGION 1..9: note = Table A: HLA-A*02:11H
YVNKHAFHT

SEQ ID NO: 3587 - protein, 9 aa, Severe acute respiratory syndrome coronavirus 2
  REGION 1..9: note = Table A: HLA-B*38:01H HLA-B*38:02M HLA-B*15:03M HLA-B*15:10M
KHAFHTPAF

SEQ ID NO: 3588 - protein, 9 aa, Severe acute respiratory syndrome coronavirus 2
  REGION 1..9: note = Table A: HLA-A*11:01H HLA-A*34:02H
AFHTPAFDK

SEQ ID NO: 3589 - protein, 9 aa, Severe acute respiratory syndrome coronavirus 2
  REGION 1..9: note = Table A: HLA-B*38:02H
FHTPAFDKS

SEQ ID NO: 3590 - protein, 9 aa, Severe acute respiratory syndrome coronavirus 2
  REGION 1..9: note = Table A: HLA-B*53:01M HLA-B*35:03H HLA-C*15:05M HLA-B*35:01H HLA-B*35:02H HLA-B*35:08H HLA-B*35:07H HLA-B*35:12M HLA-B*38:02H HLA-B*07:02M HLA-B*07:04H HLA-B*15:02H HLA-B*07:05M HLA-B*15:11H
TPAFDKSAF

SEQ ID NO: 3591 - protein, 9 aa, Severe acute respiratory syndrome coronavirus 2
  REGION 1..9: note = Table A: HLA-A*68:02H HLA-B*51:01H
PAFDKSAFV

SEQ ID NO: 3592 - protein, 9 aa, Severe acute respiratory syndrome coronavirus 2
  REGION 1..9: note = Table A: HLA-A*11:303H HLA-C*12:05H HLA-C*03:02H HLA-C*12:03H HLA-B*07:04H
SAFVNLKQL

SEQ ID NO: 3593 - protein, 9 aa, Severe acute respiratory syndrome coronavirus 2
  REGION 1..9: note = Table A: HLA-B*08:01H HLA-C*03:02H HLA-B*35:07H HLA-B*15:02H
FVNLKQLPF

SEQ ID NO: 3594 - protein, 9 aa, Severe acute respiratory syndrome coronavirus 2
  REGION 1..9: note = Table A: HLA-B*57:03H
VNLKQLPFF

SEQ ID NO: 3595 - protein, 9 aa, Severe acute respiratory syndrome coronavirus 2
  REGION 1..9: note = Table A: HLA-A*29:02H HLA-A*30:02H
NLKQLPFFY

SEQ ID NO: 3596 - protein, 9 aa, Severe acute respiratory syndrome coronavirus 2
  REGION 1..9: note = Table A: HLA-B*39:01H
YYSDSPCES

SEQ ID NO: 3597 - protein, 9 aa, Severe acute respiratory syndrome coronavirus 2
  REGION 1..9: note = Table A: HLA-B*49:01M
CESHGKQVV

SEQ ID NO: 3598 - protein, 9 aa, Severe acute respiratory syndrome coronavirus 2
  REGION 1..9: note = Table A: HLA-B*15:01M HLA-B*15:03H
KQVVSDIDY

SEQ ID NO: 3599 - protein, 9 aa, Severe acute respiratory syndrome coronavirus 2
  REGION 1..9: note = Table A: HLA-A*02:11H HLA-A*68:02M HLA-A*02:05M HLA-A*02:06H HLA-A*02:08M HLA-A*02:01H HLA-B*38:02H
QVVSDIDYV

SEQ ID NO: 3600 - protein, 9 aa, Severe acute respiratory syndrome coronavirus 2
  REGION 1..9: note = Table A: HLA-C*04:03M HLA-C*08:01H HLA-C*08:02M
VSDIDYVPL

SEQ ID NO: 3601 - protein, 9 aa, Severe acute respiratory syndrome coronavirus 2
  REGION 1..9: note = Table A: HLA-A*11:01H HLA-A*11:02H HLA-A*34:02H
SDIDYVPLK

SEQ ID NO: 3602 - protein, 9 aa, Severe acute respiratory syndrome coronavirus 2
  REGION 1..9: note = Table A: HLA-B*56:01H HLA-B*55:02H HLA-B*40:06H HLA-B*54:01H HLA-B*50:01M
IDYVPLKSA

SEQ ID NO: 3603 - protein, 9 aa, Severe acute respiratory syndrome coronavirus 2
  REGION 1..9: note = Table A: HLA-C*15:05H HLA-B*51:01H HLA-B*07:05M
VPLKSATCI

SEQ ID NO: 3604 - protein, 9 aa, Severe acute respiratory syndrome coronavirus 2
  REGION 1..9: note = Table A: HLA-A*33:03H
CNLGGAVCR

SEQ ID NO: 3605 - protein, 9 aa, Severe acute respiratory syndrome coronavirus 2
  REGION 1..9: note = Table A: HLA-B*46:01H
VCRHHANEY

SEQ ID NO: 3606 - protein, 9 aa, Severe acute respiratory syndrome coronavirus 2
  REGION 1..9: note = Table A: HLA-B*38:01M HLA-B*38:02H HLA-B*13:01H HLA-B*15:10H
RHHANEYRL

SEQ ID NO: 3607 - protein, 9 aa, Severe acute respiratory syndrome coronavirus 2
  REGION 1..9: note = Table A: HLA-B*38:02M
HHANEYRLY

SEQ ID NO: 3608 - protein, 9 aa, Severe acute respiratory syndrome coronavirus 2
  REGION 1..9: note = Table A: HLA-B*42:01H HLA-B*58:01M HLA-B*58:02M HLA-C*14:03H HLA-A*11:303H HLA-C*16:01H HLA-A*36:01H HLA-B*57:01H HLA-C*06:02H HLA-B*08:01H HLA-C*04:03H HLA-C*03:03M HLA-C*07:01H HLA-C*12:05H HLA-A*02:11M HLA-B*53:01H
  REGION 1..9: note = CONT. FROM ABOVE: HLA-C*03:02M HLA-C*03:04M HLA-A*68:02H HLA- B*35:03H HLA-C*15:05M HLA-C*12:02H HLA-C*12:03M HLA-C*15:02H HLA-A*02:04M HLA-A*02:06H HLA-A*02:07H HLA-A*02:02M HLA-A*34 :01H HLA-A*34:02M HLA-B*35:01H HLA-B*35:02H HLA-B*51:01H
  REGION 1..9: note = CONT. FROM ABOVE: HLA-C*17:01M HLA-A*24:07H HLA-B*35:07H HLA- C*08:01M HLA-B*35:12H HLA-B*38:01H HLA-B*38:02M HLA-A*32:01H HLA-B*07:02H HLA-B*07:04M HLA-B*07:05H HLA-B*57:03M HLA-C*02 :02H HLA-B*13:01H HLA-B*13:02H HLA-B*15:10H HLA-C*07:04H
  REGION 1..9: note = CONT. FROM ABOVE: HLA-A*66:01H
HANEYRLYL

SEQ ID NO: 3609 - protein, 9 aa, Severe acute respiratory syndrome coronavirus 2
  REGION 1..9: note = Table A: HLA-B*45:01H HLA-B*40:06H HLA-B*50:01H
NEYRLYLDA

SEQ ID NO: 3610 - protein, 9 aa, Severe acute respiratory syndrome coronavirus 2
  REGION 1..9: note = Table A: HLA-A*02:11H HLA-B*13:01H
RLYLDAYNM

SEQ ID NO: 3611 - protein, 9 aa, Severe acute respiratory syndrome coronavirus 2
  REGION 1..9: note = Table A: HLA-C*14:02H HLA-C*14:03H HLA-A*24:02H
LYLDAYNMM

SEQ ID NO: 3612 - protein, 9 aa, Severe acute respiratory syndrome coronavirus 2
  REGION 1..9: note = Table A: HLA-A*02:11H HLA-A*02:06H HLA-A*02:07M HLA-A*02:01M HLA-C*08:01H HLA-C*08:02H HLA-B*38:02M HLA-B*13:01H HLA-B*13:02H
YLDAYNMMI

SEQ ID NO: 3613 - protein, 9 aa, Severe acute respiratory syndrome coronavirus 2
  REGION 1..9: note = Table A: HLA-B*56:01H HLA-B*55:02H HLA-A*68:02H HLA-C*15:05H HLA-B*51:01M HLA-B*38:02H HLA-B*39:06M HLA-B*54:01H HLA-B*07:05H
DAYNMMISA

SEQ ID NO: 3614 - protein, 9 aa, Severe acute respiratory syndrome coronavirus 2
  REGION 1..9: note = Table A: HLA-B*38:02H
YNMMISAGF

SEQ ID NO: 3615 - protein, 9 aa, Severe acute respiratory syndrome coronavirus 2
  REGION 1..9: note = Table A: HLA-C*08:01H HLA-B*38:02M HLA-B*15:02H
MMISAGFSL

SEQ ID NO: 3616 - protein, 9 aa, Severe acute respiratory syndrome coronavirus 2
  REGION 1..9: note = Table A: HLA-B*53:01H HLA-B*38:02H
MISAGFSLW

SEQ ID NO: 3617 - protein, 9 aa, Severe acute respiratory syndrome coronavirus 2
  REGION 1..9: note = Table A: HLA-C*15:02M
ISAGFSLWV

SEQ ID NO: 3618 - protein, 9 aa, Severe acute respiratory syndrome coronavirus 2
  REGION 1..9: note = Table A: HLA-B*35:07H
SAGFSLWVY

SEQ ID NO: 3619 - protein, 9 aa, Severe acute respiratory syndrome coronavirus 2
  REGION 1..9: note = Table A: HLA-A*11:02H
AGFSLWVYK

SEQ ID NO: 3620 - protein, 9 aa, Severe acute respiratory syndrome coronavirus 2
  REGION 1..9: note = Table A: HLA-B*58:02H HLA-B*57:03H
FSLWVYKQF

SEQ ID NO: 3621 - protein, 9 aa, Severe acute respiratory syndrome coronavirus 2
  REGION 1..9: note = Table A: HLA-A*36:01H HLA-A*25:01H HLA-A*26:01H HLA-A*29:01H HLA-A*29:02M HLA-A*30:02H HLA-A*34:02H HLA-B*35:01H HLA-B*35:07M HLA-B*38:02M HLA-B*15:01H HLA-B*15:02M HLA-B*15:03H HLA-B*07:05H
WVYKQFDTY

SEQ ID NO: 3622 - protein, 9 aa, Severe acute respiratory syndrome coronavirus 2
  REGION 1..9: note = Table A: HLA-B*58:01H HLA-B*58:02M HLA-B*57:01M HLA-B*44:03H HLA-B*53:01H HLA-A*24:02H HLA-A*24:07M HLA-A*23:01H HLA-B*38:02H HLA-A*32:01H HLA-B*15:03M HLA-B*57:03H HLA-B*13:01H HLA-B*13:02H
KQFDTYNLW

SEQ ID NO: 3623 - protein, 9 aa, Severe acute respiratory syndrome coronavirus 2
  REGION 1..9: note = Table A: HLA-A*25:01H HLA-A*26:01H HLA-A*26:02H HLA-A*68:02H HLA-C*15:05H HLA-A*34:02H HLA-A*66:01H
DTYNLWNTF

SEQ ID NO: 3624 - protein, 9 aa, Severe acute respiratory syndrome coronavirus 2
  REGION 1..9: note = Table A: HLA-A*02:11H HLA-A*02:04H HLA-A*02:06H HLA-A*02:07H HLA-A*02:01H HLA-A*02:02M HLA-C*08:01H HLA-B*38:02H HLA-B*40:06H
NLWNTFTRL

SEQ ID NO: 3625 - protein, 9 aa, Severe acute respiratory syndrome coronavirus 2
  REGION 1..9: note = Table A: HLA-C*16:01H HLA-B*08:01M HLA-A*68:02H HLA-C*15:05H HLA-B*14:02M HLA-A*02:04H HLA-A*02:05H HLA-B*14:01H
NTFTRLQSL

SEQ ID NO: 3626 - protein, 9 aa, Severe acute respiratory syndrome coronavirus 2
  REGION 1..9: note = Table A: HLA-B*14:01H HLA-B*38:02H HLA-B*39:01H
TRLQSLENV

SEQ ID NO: 3627 - protein, 9 aa, Severe acute respiratory syndrome coronavirus 2
  REGION 1..9: note = Table A: HLA-B*38:02H HLA-B*15:01M HLA-B*15:02H HLA-B*39:01H HLA-B*13:01H
LQSLENVAF

SEQ ID NO: 3628 - protein, 9 aa, Severe acute respiratory syndrome coronavirus 2
  REGION 1..9: note = Table A: HLA-A*02:11H HLA-A*68:02H HLA-A*02:04H HLA-A*02:07H HLA-A*02:01H HLA-B*13:02H
SLENVAFNV

SEQ ID NO: 3629 - protein, 9 aa, Severe acute respiratory syndrome coronavirus 2
  REGION 1..9: note = Table A: HLA-B*45:01H HLA-B*18:01H HLA-B*40:02M HLA-B*40:06H HLA-B*41:02H HLA-B*49:01H HLA-B*50:01M
LENVAFNVV

SEQ ID NO: 3630 - protein, 9 aa, Severe acute respiratory syndrome coronavirus 2
  REGION 1..9: note = Table A: HLA-A*11:303H HLA-A*03:01H HLA-A*03:02M HLA-A*11:01M HLA-A*11:02M HLA-A*33:01H HLA-A*33:03H HLA-A*26:03H HLA-A*68:01H HLA-A*68:02H HLA-A*34:01M HLA-A*34:02H HLA-C*07:27H HLA-A*66:01M
NVAFNVVNK

SEQ ID NO: 3631 - protein, 9 aa, Severe acute respiratory syndrome coronavirus 2
  REGION 1..9: note = Table A: HLA-B*39:01H
GHFDGQQGE

SEQ ID NO: 3632 - protein, 9 aa, Severe acute respiratory syndrome coronavirus 2
  REGION 1..9: note = Table A: HLA-C*04:01H
HFDGQQGEV

SEQ ID NO: 3633 - protein, 9 aa, Severe acute respiratory syndrome coronavirus 2
  REGION 1..9: note = Table A: HLA-B*35:02H
DGQQGEVPV

SEQ ID NO: 3634 - protein, 9 aa, Severe acute respiratory syndrome coronavirus 2
  REGION 1..9: note = Table A: HLA-A*02:11H HLA-A*02:05H HLA-B*52:01H HLA-B*38:01H HLA-B*38:02M HLA-B*39:01H HLA-B*13:01H HLA-B*13:02H
QQGEVPVSI

SEQ ID NO: 3635 - protein, 9 aa, Severe acute respiratory syndrome coronavirus 2
  REGION 1..9: note = Table A: HLA-B*56:01H HLA-B*55:02H HLA-B*54:01H
VPVSIINNT

SEQ ID NO: 3636 - protein, 9 aa, Severe acute respiratory syndrome coronavirus 2
  REGION 1..9: note = Table A: HLA-B*58:01H HLA-B*46:01M HLA-B*15:01M HLA-B*15:03H
VSIINNTVY

SEQ ID NO: 3637 - protein, 9 aa, Severe acute respiratory syndrome coronavirus 2
  REGION 1..9: note = Table A: HLA-A*11:303H HLA-A*74:01H HLA-A*03:01M HLA-A*03:02H HLA-A*11:01M HLA-A*11:02M HLA-A*36:01H HLA-A*30:02H HLA-A*68:01H HLA-A*34:02H HLA-C*07:27H
IINNTVYTK

SEQ ID NO: 3638 - protein, 9 aa, Severe acute respiratory syndrome coronavirus 2
  REGION 1..9: note = Table A: HLA-C*15:02H
INNTVYTKV

SEQ ID NO: 3639 - protein, 9 aa, Severe acute respiratory syndrome coronavirus 2
  REGION 1..9: note = Table A: HLA-A*02:11H HLA-A*68:02M HLA-A*02:05H HLA-A*02:06M HLA-A*02:07H HLA-A*02:08H HLA-B*14:01H HLA-A*02:01M HLA-A*02:02M HLA-A*02:03M HLA-B*38:02H HLA-B*13:02H
TVYTKVDGV

SEQ ID NO: 3640 - protein, 9 aa, Severe acute respiratory syndrome coronavirus 2
  REGION 1..9: note = Table A: HLA-A*68:02H HLA-C*12:03H HLA-B*38:02H
YTKVDGVDV

SEQ ID NO: 3641 - protein, 9 aa, Severe acute respiratory syndrome coronavirus 2
  REGION 1..9: note = Table A: HLA-A*11:303H HLA-C*04:01H HLA-C*04:03H HLA-A*02:11M HLA-C*15:05H HLA-A*02:05M HLA-A*02:06M HLA-A*02:07H HLA-A*02:08M HLA-A*02:01H HLA-A*02:02H HLA-B*35:02M HLA-C*08:01M HLA-C*08:02M HLA-B*35:12M
  REGION 1..9: note = CONT. FROM ABOVE: HLA-B*38:01H HLA-B*38:02H HLA-B*40:01H HLA- B*57:03H HLA-C*05:01M HLA-B*13:01M
KVDGVDVEL

SEQ ID NO: 3642 - protein, 9 aa, Severe acute respiratory syndrome coronavirus 2
  REGION 1..9: note = Table A: HLA-B*27:02H
VDVELFENK

SEQ ID NO: 3643 - protein, 9 aa, Severe acute respiratory syndrome coronavirus 2
  REGION 1..9: note = Table A: HLA-A*25:01H HLA-A*26:03H HLA-B*08:01M HLA-A*02:11H HLA-A*68:02M HLA-B*14:02H HLA-A*02:04H HLA-B*14:01M HLA-A*02:02M HLA-A*02:03H HLA-A*34:01H HLA-B*38:02M HLA-B*15:02M HLA-B*39:01H
ELFENKTTL

SEQ ID NO: 3644 - protein, 9 aa, Severe acute respiratory syndrome coronavirus 2
  REGION 1..9: note = Table A: HLA-B*49:01H
FENKTTLPV

SEQ ID NO: 3645 - protein, 9 aa, Severe acute respiratory syndrome coronavirus 2
  REGION 1..9: note = Table A: HLA-B*58:01H HLA-B*58:02H HLA-A*11:303H HLA-B*44:05H HLA-B*57:01H HLA-B*46:01H HLA-A*29:01H HLA-A*29:02H HLA-B*53:01H HLA-C*03:02H HLA-A*30:02H HLA-C*15:05M HLA-A*24:02H HLA-B*35:01M HLA-B*35:07H
  REGION 1..9: note = CONT. FROM ABOVE: HLA-C*08:01H HLA-A*23:01H HLA-B*15:13H HLA- B*38:02M HLA-A*32:01H HLA-B*15:01M HLA-B*15:02M HLA-B*07:05M HLA-B*57:03H
TTLPVNVAF

SEQ ID NO: 3646 - protein, 9 aa, Severe acute respiratory syndrome coronavirus 2
  REGION 1..9: note = Table A: HLA-B*53:01M HLA-B*35:03H HLA-C*15:05H HLA-B*35:01M HLA-B*35:02M HLA-B*35:07M HLA-B*35:12M HLA-B*54:01H HLA-B*07:05H
LPVNVAFEL

SEQ ID NO: 3647 - protein, 9 aa, Severe acute respiratory syndrome coronavirus 2
  REGION 1..9: note = Table A: HLA-A*24:07H
PVNVAFELW

SEQ ID NO: 3648 - protein, 9 aa, Severe acute respiratory syndrome coronavirus 2
  REGION 1..9: note = Table A: HLA-A*34:02H
NVAFELWAK

SEQ ID NO: 3649 - protein, 9 aa, Severe acute respiratory syndrome coronavirus 2
  REGION 1..9: note = Table A: HLA-A*74:01H HLA-A*33:01H HLA-A*33:03H HLA-A*34:01H HLA-A*66:01H
VAFELWAKR

SEQ ID NO: 3650 - protein, 9 aa, Severe acute respiratory syndrome coronavirus 2
  REGION 1..9: note = Table A: HLA-B*49:01H
FELWAKRNI

SEQ ID NO: 3651 - protein, 9 aa, Severe acute respiratory syndrome coronavirus 2
  REGION 1..9: note = Table A: HLA-A*34:02H
ELWAKRNIK

SEQ ID NO: 3652 - protein, 9 aa, Severe acute respiratory syndrome coronavirus 2
  REGION 1..9: note = Table A: HLA-A*02:11H HLA-C*15:05H HLA-C*15:02M HLA-A*02:06H HLA-A*02:01H HLA-B*40:02H HLA-B*40:06H HLA-B*13:02H
RNIKPVPEV

SEQ ID NO: 3653 - protein, 9 aa, Severe acute respiratory syndrome coronavirus 2
  REGION 1..9: note = Table A: HLA-A*34:02H
NIKPVPEVK

SEQ ID NO: 3654 - protein, 9 aa, Severe acute respiratory syndrome coronavirus 2
  REGION 1..9: note = Table A: HLA-B*42:01H HLA-B*53:01H HLA-B*35:03M HLA-C*15:05M HLA-B*35:02H HLA-B*35:07H HLA-B*35:12H HLA-B*07:02M HLA-B*07:04H HLA-B*07:05H
KPVPEVKIL

SEQ ID NO: 3655 - protein, 9 aa, Severe acute respiratory syndrome coronavirus 2
  REGION 1..9: note = Table A: HLA-B*38:02H HLA-B*13:02H
ILNNLGVDI

SEQ ID NO: 3656 - protein, 9 aa, Severe acute respiratory syndrome coronavirus 2
  REGION 1..9: note = Table A: HLA-B*39:06H
NNLGVDIAA

SEQ ID NO: 3657 - protein, 9 aa, Severe acute respiratory syndrome coronavirus 2
  REGION 1..9: note = Table A: HLA-A*02:06H HLA-A*02:07H HLA-B*14:01H HLA-C*08:02H
GVDIAANTV

SEQ ID NO: 3658 - protein, 9 aa, Severe acute respiratory syndrome coronavirus 2
  REGION 1..9: note = Table A: HLA-B*58:01H HLA-C*16:01H HLA-C*16:04H HLA-A*29:01H HLA-A*29:02H HLA-A*30:02M HLA-C*12:02H HLA-B*35:01M HLA-C*02:02H
AANTVIWDY

SEQ ID NO: 3659 - protein, 9 aa, Severe acute respiratory syndrome coronavirus 2
  REGION 1..9: note = Table A: HLA-A*66:01H
NTVIWDYKR

SEQ ID NO: 3660 - protein, 9 aa, Severe acute respiratory syndrome coronavirus 2
  REGION 1..9: note = Table A: HLA-A*25:01M HLA-A*33:01H HLA-A*33:03H HLA-A*26:01H HLA-A*26:02H HLA-A*26:03H HLA-B*53:01M HLA-A*68:01H HLA-A*68:02M HLA-C*15:05M HLA-A*34:01H HLA-A*34:02H HLA-B*51:01H HLA-B*52:01H HLA-B*38:02H HLA-B*07:05H
DAPAHISTI

SEQ ID NO: 3661 - protein, 9 aa, Severe acute respiratory syndrome coronavirus 2
  REGION 1..9: note = Table A: HLA-B*56:01H HLA-C*15:05H
APAHISTIG

SEQ ID NO: 3662 - protein, 9 aa, Severe acute respiratory syndrome coronavirus 2
  REGION 1..9: note = Table A: HLA-C*15:05H
PAHISTIGV

SEQ ID NO: 3663 - protein, 9 aa, Severe acute respiratory syndrome coronavirus 2
  REGION 1..9: note = Table A: HLA-B*38:02H HLA-B*39:06H HLA-B*39:01H HLA-B*15:10H
AHISTIGVC

SEQ ID NO: 3664 - protein, 9 aa, Severe acute respiratory syndrome coronavirus 2
  REGION 1..9: note = Table A: HLA-A*11:01H HLA-A*11:02H HLA-A*34:02H
CSMTDIAKK

SEQ ID NO: 3665 - protein, 9 aa, Severe acute respiratory syndrome coronavirus 2
  REGION 1..9: note = Table A: HLA-A*02:02H
SMTDIAKKP

SEQ ID NO: 3666 - protein, 9 aa, Severe acute respiratory syndrome coronavirus 2
  REGION 1..9: note = Table A: HLA-B*42:01H HLA-B*58:01H HLA-B*58:02H HLA-B*57:01M HLA-B*08:01H HLA-A*02:11H HLA-B*53:01H HLA-C*15:05M HLA-B*55:01H HLA-C*12:02H HLA-B*51:01H HLA-B*52:01M HLA-C*08:01H HLA-B*38:02M HLA-B*07:02H HLA-B*07:04M
  REGION 1..9: note = CONT. FROM ABOVE: HLA-B*15:01H HLA-B*57:03H HLA-C*02:02H HLA- B*13:02H
IAKKPTETI

SEQ ID NO: 3667 - protein, 9 aa, Severe acute respiratory syndrome coronavirus 2
  REGION 1..9: note = Table A: HLA-B*15:03H
AKKPTETIC

SEQ ID NO: 3668 - protein, 9 aa, Severe acute respiratory syndrome coronavirus 2
  REGION 1..9: note = Table A: HLA-B*56:01H HLA-B*55:02H HLA-C*15:05H HLA-B*55:01H
KPTETICAP

SEQ ID NO: 3669 - protein, 9 aa, Severe acute respiratory syndrome coronavirus 2
  REGION 1..9: note = Table A: HLA-A*68:02M
ETICAPLTV

SEQ ID NO: 3670 - protein, 9 aa, Severe acute respiratory syndrome coronavirus 2
  REGION 1..9: note = Table A: HLA-B*15:02H
TICAPLTVF

SEQ ID NO: 3671 - protein, 9 aa, Severe acute respiratory syndrome coronavirus 2
  REGION 1..9: note = Table A: HLA-B*27:05H HLA-B*27:02H HLA-B*14:01H HLA-B*39:01M
GRVDGQVDL

SEQ ID NO: 3672 - protein, 9 aa, Severe acute respiratory syndrome coronavirus 2
  REGION 1..9: note = Table A: HLA-B*58:01H HLA-A*36:01M HLA-C*04:03M HLA-C*15:05H HLA-A*02:07M HLA-C*08:02H HLA-B*38:02H HLA-B*57:03H HLA-C*05:01H HLA-B*13:01H
RVDGQVDLF

SEQ ID NO: 3673 - protein, 9 aa, Severe acute respiratory syndrome coronavirus 2
  REGION 1..9: note = Table A: HLA-A*02:11H HLA-A*02:05M HLA-A*02:06H HLA-A*02:08H HLA-A*02:01H HLA-A*02:03H HLA-C*08:01H HLA-B*38:02H HLA-B*39:06H HLA-B*40:06M HLA-B*13:02H HLA-B*50:01M
GQVDLFRNA

SEQ ID NO: 3674 - protein, 9 aa, Severe acute respiratory syndrome coronavirus 2
  REGION 1..9: note = Table A: HLA-A*74:01H HLA-A*33:03H
QVDLFRNAR

SEQ ID NO: 3675 - protein, 9 aa, Severe acute respiratory syndrome coronavirus 2
  REGION 1..9: note = Table A: HLA-B*14:02H
FRNARNGVL

SEQ ID NO: 3676 - protein, 9 aa, Severe acute respiratory syndrome coronavirus 2
  REGION 1..9: note = Table A: HLA-B*27:05H
ARNGVLITE

SEQ ID NO: 3677 - protein, 9 aa, Severe acute respiratory syndrome coronavirus 2
  REGION 1..9: note = Table A: HLA-B*13:02H
GVLITEGSV

SEQ ID NO: 3678 - protein, 9 aa, Severe acute respiratory syndrome coronavirus 2
  REGION 1..9: note = Table A: HLA-A*11:303H HLA-A*03:01H HLA-A*03:02H HLA-A*11:01H HLA-A*36:01H HLA-B*27:02H HLA-A*30:02H HLA-A*34:02H
VLITEGSVK

SEQ ID NO: 3679 - protein, 9 aa, Severe acute respiratory syndrome coronavirus 2
  REGION 1..9: note = Table A: HLA-A*02:05H HLA-A*02:08H
ITEGSVKGL

SEQ ID NO: 3680 - protein, 9 aa, Severe acute respiratory syndrome coronavirus 2
  REGION 1..9: note = Table A: HLA-B*42:01H HLA-B*08:01H HLA-A*02:11H HLA-B*55:02H HLA-A*30:01M HLA-A*30:02H HLA-A*68:02H HLA-C*15:05H HLA-B*55:01M HLA-A*02:05H HLA-A*02:06H HLA-A*02:08M HLA-A*02:01H HLA-A*02:02M HLA-A*02:03M HLA-B*38:02M
  REGION 1..9: note = CONT. FROM ABOVE: HLA-B*07:02H HLA-B*07:04M HLA-B*07:05H HLA- B*13:02M
SVKGLQPSV

SEQ ID NO: 3681 - protein, 9 aa, Severe acute respiratory syndrome coronavirus 2
  REGION 1..9: note = Table A: HLA-A*11:303H HLA-A*03:01M HLA-A*03:02M HLA-A*11:01H HLA-A*11:02H HLA-A*34:02H
GLQPSVGPK

SEQ ID NO: 3682 - protein, 9 aa, Severe acute respiratory syndrome coronavirus 2
  REGION 1..9: note = Table A: HLA-B*56:01M HLA-B*55:02M HLA-B*55:01M HLA-B*07:04H
QPSVGPKQA

SEQ ID NO: 3683 - protein, 9 aa, Severe acute respiratory syndrome coronavirus 2
  REGION 1..9: note = Table A: HLA-A*26:03H HLA-B*08:01H HLA-C*15:05M HLA-C*01:02H HLA-A*02:05M HLA-A*02:08M HLA-A*02:02H HLA-A*02:03H HLA-A*34:01H HLA-B*38:02H HLA-B*07:02M HLA-B*07:04M HLA-B*07:05H
SVGPKQASL

SEQ ID NO: 3684 - protein, 9 aa, Severe acute respiratory syndrome coronavirus 2
  REGION 1..9: note = Table A: HLA-B*35:03H HLA-C*15:05H HLA-B*38:02H
QASLNGVTL

SEQ ID NO: 3685 - protein, 9 aa, Severe acute respiratory syndrome coronavirus 2
  REGION 1..9: note = Table A: HLA-C*15:02H HLA-B*57:03H HLA-B*13:02H
ASLNGVTLI

SEQ ID NO: 3686 - protein, 9 aa, Severe acute respiratory syndrome coronavirus 2
  REGION 1..9: note = Table A: HLA-B*39:06H HLA-B*39:01H
NGVTLIGEA

SEQ ID NO: 3687 - protein, 9 aa, Severe acute respiratory syndrome coronavirus 2
  REGION 1..9: note = Table A: HLA-A*68:02H HLA-C*15:05H HLA-A*02:05H HLA-A*02:06H HLA-A*02:08H HLA-C*08:03H HLA-B*38:02H HLA-B*07:05H HLA-B*13:02M
GVTLIGEAV

SEQ ID NO: 3688 - protein, 9 aa, Severe acute respiratory syndrome coronavirus 2
  REGION 1..9: note = Table A: HLA-A*11:01H HLA-A*34:02H
VTLIGEAVK

SEQ ID NO: 3689 - protein, 9 aa, Severe acute respiratory syndrome coronavirus 2
  REGION 1..9: note = Table A: HLA-C*15:05H
IGEAVKTQF

SEQ ID NO: 3690 - protein, 9 aa, Severe acute respiratory syndrome coronavirus 2
  REGION 1..9: note = Table A: HLA-B*58:01M HLA-B*57:01H HLA-A*26:01H HLA-A*26:02H HLA-B*53:01M HLA-A*68:01H HLA-A*34:01H HLA-A*34:02M HLA-B*35:01H HLA-B*35:07M HLA-B*38:02H HLA-B*15:02H HLA-B*57:03H
EAVKTQFNY

SEQ ID NO: 3691 - protein, 9 aa, Severe acute respiratory syndrome coronavirus 2
  REGION 1..9: note = Table A: HLA-A*03:01H HLA-B*46:01M HLA-A*26:01H HLA-A*29:02H HLA-A*30:01M HLA-A*30:02H HLA-C*12:02M HLA-B*38:02M HLA-B*15:01M HLA-B*15:02H HLA-A*31:01H HLA-C*02:02H
AVKTQFNYY

SEQ ID NO: 3692 - protein, 9 aa, Severe acute respiratory syndrome coronavirus 2
  REGION 1..9: note = Table A: HLA-A*11:303H HLA-A*74:01H HLA-A*03:02H HLA-A*11:01M HLA-A*11:02M HLA-A*36:01H HLA-A*30:02H HLA-C*07:27H
KTQFNYYKK

SEQ ID NO: 3693 - protein, 9 aa, Severe acute respiratory syndrome coronavirus 2
  REGION 1..9: note = Table A: HLA-C*06:02H HLA-A*02:11H HLA-A*68:02H HLA-A*02:05M HLA-A*02:06H HLA-A*02:02H HLA-A*02:03H HLA-B*52:01M HLA-B*38:02H HLA-B*13:02M
TQFNYYKKV

SEQ ID NO: 3694 - protein, 9 aa, Severe acute respiratory syndrome coronavirus 2
  REGION 1..9: note = Table A: HLA-A*02:11H
NYYKKVDGV

SEQ ID NO: 3695 - protein, 9 aa, Severe acute respiratory syndrome coronavirus 2
  REGION 1..9: note = Table A: HLA-B*58:01M HLA-A*11:303H HLA-A*36:01H HLA-C*04:03H HLA-A*02:11M HLA-A*68:02H HLA-C*15:05M HLA-C*15:02H HLA-A*02:04H HLA-A*02:05M HLA-A*02:06M HLA-A*02:07H HLA-A*02:08M HLA-B*14:01H HLA-A*02:01H
  REGION 1..9: note = CONT. FROM ABOVE: HLA-A*02:02M HLA-C*08:01M HLA-C*08:02M HLA- B*38:01H HLA-B*38:02M HLA-B*40:01H HLA-B*07:05H HLA-B*57:03M HLA-C*05:01M HLA-B*13:01M HLA-B*13:02H
KVDGVVQQL

SEQ ID NO: 3696 - protein, 9 aa, Severe acute respiratory syndrome coronavirus 2
  REGION 1..9: note = Table A: HLA-A*02:06H
GVVQQLPET

SEQ ID NO: 3697 - protein, 9 aa, Severe acute respiratory syndrome coronavirus 2
  REGION 1..9: note = Table A: HLA-B*58:01H HLA-A*03:02H HLA-A*29:01M HLA-A*29:02H HLA-A*30:02H HLA-B*35:01M HLA-B*38:02H HLA-B*15:01H HLA-B*15:02H HLA-B*39:01H HLA-B*07:05M
VVQQLPETY

SEQ ID NO: 3698 - protein, 9 aa, Severe acute respiratory syndrome coronavirus 2
  REGION 1..9: note = Table A: HLA-B*38:02H HLA-B*15:01M
VQQLPETYF

SEQ ID NO: 3699 - protein, 9 aa, Severe acute respiratory syndrome coronavirus 2
  REGION 1..9: note = Table A: HLA-C*14:02M HLA-C*14:03M HLA-C*06:02H HLA-A*24:02M HLA-A*24:07M HLA-A*23:01H
TYFTQSRNL

SEQ ID NO: 3700 - protein, 9 aa, Severe acute respiratory syndrome coronavirus 2
  REGION 1..9: note = Table A: HLA-B*44:05H HLA-A*24:02H HLA-B*38:01H HLA-B*38:02M HLA-B*15:01H HLA-B*15:02M HLA-B*15:03M HLA-B*39:01H HLA-B*57:03H HLA-B*13:01M
TQSRNLQEF

SEQ ID NO: 3701 - protein, 9 aa, Severe acute respiratory syndrome coronavirus 2
  REGION 1..9: note = Table A: HLA-A*74:01H HLA-A*31:01H
RNLQEFKPR

SEQ ID NO: 3702 - protein, 9 aa, Severe acute respiratory syndrome coronavirus 2
  REGION 1..9: note = Table A: HLA-B*44:05H HLA-B*40:02H HLA-B*41:02H HLA-B*49:01H
QEFKPRSQM

SEQ ID NO: 3703 - protein, 9 aa, Severe acute respiratory syndrome coronavirus 2
  REGION 1..9: note = Table A: HLA-B*45:01M HLA-A*68:02H HLA-B*40:06M HLA-B*49:01H HLA-B*50:01H
MEIDFLELA

SEQ ID NO: 3704 - protein, 9 aa, Severe acute respiratory syndrome coronavirus 2
  REGION 1..9: note = Table A: HLA-B*49:01H
LELAMDEFI

SEQ ID NO: 3705 - protein, 9 aa, Severe acute respiratory syndrome coronavirus 2
  REGION 1..9: note = Table A: HLA-A*33:01H HLA-A*33:03H HLA-A*68:01H HLA-A*34:01H HLA-A*34:02M HLA-A*66:01M
LAMDEFIER

SEQ ID NO: 3706 - protein, 9 aa, Severe acute respiratory syndrome coronavirus 2
  REGION 1..9: note = Table A: HLA-B*58:01H HLA-A*11:303H HLA-A*36:01H HLA-A*29:01H HLA-A*29:02H HLA-A*01:01H HLA-B*44:03H HLA-C*04:01H HLA-C*04:03M HLA-A*02:11H HLA-A*30:02M HLA-C*15:05H HLA-A*02:07H HLA-A*02:01H HLA-A*02:02H
  REGION 1..9: note = CONT. FROM ABOVE: HLA-B*35:01H HLA-B*35:08H HLA-B*38:02M HLA- B*15:01M HLA-B*15:02H HLA-B*15:03M HLA-B*39:01H HLA-B*07:05M HLA-B*13:01H
AMDEFIERY

SEQ ID NO: 3707 - protein, 9 aa, Severe acute respiratory syndrome coronavirus 2
  REGION 1..9: note = Table A: HLA-B*18:01H HLA-B*14:02H HLA-B*07:05H
DEFIERYKL

SEQ ID NO: 3708 - protein, 9 aa, Severe acute respiratory syndrome coronavirus 2
  REGION 1..9: note = Table A: HLA-B*18:01H
IERYKLEGY

SEQ ID NO: 3709 - protein, 9 aa, Severe acute respiratory syndrome coronavirus 2
  REGION 1..9: note = Table A: HLA-A*24:02H HLA-A*24:07M HLA-A*23:01H
RYKLEGYAF

SEQ ID NO: 3710 - protein, 9 aa, Severe acute respiratory syndrome coronavirus 2
  REGION 1..9: note = Table A: HLA-B*49:01M
LEGYAFEHI

SEQ ID NO: 3711 - protein, 9 aa, Severe acute respiratory syndrome coronavirus 2
  REGION 1..9: note = Table A: HLA-A*68:02M HLA-B*51:01H HLA-B*52:01H
EGYAFEHIV

SEQ ID NO: 3712 - protein, 9 aa, Severe acute respiratory syndrome coronavirus 2
  REGION 1..9: note = Table A: HLA-C*14:02H HLA-C*14:03H HLA-A*29:02H HLA-B*15:03H
GYAFEHIVY

SEQ ID NO: 3713 - protein, 9 aa, Severe acute respiratory syndrome coronavirus 2
  REGION 1..9: note = Table A: HLA-A*68:02H HLA-C*12:03H
YAFEHIVYG

SEQ ID NO: 3714 - protein, 9 aa, Severe acute respiratory syndrome coronavirus 2
  REGION 1..9: note = Table A: HLA-B*38:02H HLA-B*39:01H
EHIVYGDFS

SEQ ID NO: 3715 - protein, 9 aa, Severe acute respiratory syndrome coronavirus 2
  REGION 1..9: note = Table A: HLA-A*11:303H HLA-C*04:03H HLA-C*03:03H HLA-C*03:04M HLA-C*15:05H HLA-A*02:07H HLA-C*17:01H HLA-C*08:01M HLA-C*08:02H HLA-B*38:02M HLA-B*39:01H HLA-C*05:01M
YGDFSHSQL

SEQ ID NO: 3716 - protein, 9 aa, Severe acute respiratory syndrome coronavirus 2
  REGION 1..9: note = Table A: HLA-C*15:05H HLA-C*15:02H
HSQLGGLHL

SEQ ID NO: 3717 - protein, 9 aa, Severe acute respiratory syndrome coronavirus 2
  REGION 1..9: note = Table A: HLA-A*02:04M HLA-A*02:05H HLA-A*02:06H HLA-A*02:02H HLA-C*08:01H HLA-B*38:02H HLA-B*13:01H HLA-B*13:02H
SQLGGLHLL

SEQ ID NO: 3718 - protein, 9 aa, Severe acute respiratory syndrome coronavirus 2
  REGION 1..9: note = Table A: HLA-B*38:02H HLA-B*13:02H
QLGGLHLLI

SEQ ID NO: 3719 - protein, 9 aa, Severe acute respiratory syndrome coronavirus 2
  REGION 1..9: note = Table A: HLA-A*02:04H
GGLHLLIGL

SEQ ID NO: 3720 - protein, 9 aa, Severe acute respiratory syndrome coronavirus 2
  REGION 1..9: note = Table A: HLA-A*74:01M HLA-A*34:01H
HLLIGLAKR

SEQ ID NO: 3721 - protein, 9 aa, Severe acute respiratory syndrome coronavirus 2
  REGION 1..9: note = Table A: HLA-B*15:03M
AKRFKESPF

SEQ ID NO: 3722 - protein, 9 aa, Severe acute respiratory syndrome coronavirus 2
  REGION 1..9: note = Table A: HLA-C*14:02H HLA-C*14:03H HLA-C*07:01H HLA-A*30:01H HLA-A*24:02H HLA-A*24:07M HLA-A*23:01H HLA-B*07:04H
RFKESPFEL

SEQ ID NO: 3723 - protein, 9 aa, Severe acute respiratory syndrome coronavirus 2
  REGION 1..9: note = Table A: HLA-B*37:01M
MDSTVKNYF

SEQ ID NO: 3724 - protein, 9 aa, Severe acute respiratory syndrome coronavirus 2
  REGION 1..9: note = Table A: HLA-C*14:03H
YFITDAQTG

SEQ ID NO: 3725 - protein, 9 aa, Severe acute respiratory syndrome coronavirus 2
  REGION 1..9: note = Table A: HLA-B*13:02M
AQTGSSKCV

SEQ ID NO: 3726 - protein, 9 aa, Severe acute respiratory syndrome coronavirus 2
  REGION 1..9: note = Table A: HLA-C*04:03M HLA-A*02:07H
VIDLLLDDF

SEQ ID NO: 3727 - protein, 9 aa, Severe acute respiratory syndrome coronavirus 2
  REGION 1..9: note = Table A: HLA-A*11:303H HLA-A*02:11H HLA-A*02:04M HLA-A*02:06H HLA-A*02:07H HLA-A*02:01M HLA-C*08:01H HLA-B*38:02H HLA-B*13:01H
LLLDDFVEI

SEQ ID NO: 3728 - protein, 9 aa, Severe acute respiratory syndrome coronavirus 2
  REGION 1..9: note = Table A: HLA-A*02:11H HLA-A*02:04H HLA-A*02:07M HLA-B*38:02H
LLDDFVEII

SEQ ID NO: 3729 - protein, 9 aa, Severe acute respiratory syndrome coronavirus 2
  REGION 1..9: note = Table A: HLA-B*44:02H HLA-B*44:05M HLA-B*44:03H HLA-B*40:01M HLA-B*40:02M HLA-B*41:02H HLA-B*49:01M
VEIIKSQDL

SEQ ID NO: 3730 - protein, 9 aa, Severe acute respiratory syndrome coronavirus 2
  REGION 1..9: note = Table A: HLA-C*15:05H HLA-A*02:03H HLA-B*38:02H HLA-B*13:02M
IIKSQDLSV

SEQ ID NO: 3731 - protein, 9 aa, Severe acute respiratory syndrome coronavirus 2
  REGION 1..9: note = Table A: HLA-A*11:303H HLA-A*03:02M HLA-A*11:01M HLA-A*11:02M HLA-B*27:02H HLA-A*34:02H HLA-C*07:27H HLA-B*38:02H HLA-B*39:01H HLA-B*13:02H
SQDLSVVSK

SEQ ID NO: 3732 - protein, 9 aa, Severe acute respiratory syndrome coronavirus 2
  REGION 1..9: note = Table A: HLA-B*37:01H HLA-B*40:02H HLA-B*49:01H
QDLSVVSKV

SEQ ID NO: 3733 - protein, 9 aa, Severe acute respiratory syndrome coronavirus 2
  REGION 1..9: note = Table A: HLA-A*68:02H HLA-B*38:02H
DLSVVSKVV

SEQ ID NO: 3734 - protein, 9 aa, Severe acute respiratory syndrome coronavirus 2
  REGION 1..9: note = Table A: HLA-A*11:303H HLA-A*03:01H HLA-A*11:01H HLA-A*11:02H HLA-A*26:01H HLA-A*26:02H HLA-A*02:11M HLA-A*68:01H HLA-A*68:02H HLA-C*15:05H HLA-C*12:03H HLA-C*15:02M HLA-A*02:04M HLA-A*02:05H HLA-A*02:06H
  REGION 1..9: note = CONT. FROM ABOVE: HLA-A*02:07M HLA-A*02:08H HLA-A*02:01M HLA- A*02:02M HLA-A*02:03H HLA-C*17:01H HLA-C*08:01H HLA-B*38:02M HLA-B*40:06M HLA-B*13:02M HLA-C*07:04H
SVVSKVVKV

SEQ ID NO: 3735 - protein, 9 aa, Severe acute respiratory syndrome coronavirus 2
  REGION 1..9: note = Table A: HLA-A*02:08M HLA-B*07:04H
VVSKVVKVT

SEQ ID NO: 3736 - protein, 9 aa, Severe acute respiratory syndrome coronavirus 2
  REGION 1..9: note = Table A: HLA-B*58:02H HLA-B*57:01M HLA-B*52:01M HLA-B*57:03M
VSKVVKVTI

SEQ ID NO: 3737 - protein, 9 aa, Severe acute respiratory syndrome coronavirus 2
  REGION 1..9: note = Table A: HLA-B*58:01M HLA-A*36:01H HLA-A*29:02H HLA-A*30:02H HLA-B*38:02H HLA-B*15:01M HLA-B*15:03H HLA-B*57:03H
KVVKVTIDY

SEQ ID NO: 3738 - protein, 9 aa, Severe acute respiratory syndrome coronavirus 2
  REGION 1..9: note = Table A: HLA-A*02:05H
VVKVTIDYT

SEQ ID NO: 3739 - protein, 9 aa, Severe acute respiratory syndrome coronavirus 2
  REGION 1..9: note = Table A: HLA-A*02:08H HLA-B*57:03H
KVTIDYTEI

SEQ ID NO: 3740 - protein, 9 aa, Severe acute respiratory syndrome coronavirus 2
  REGION 1..9: note = Table A: HLA-C*04:01H HLA-C*04:03M HLA-A*02:07M HLA-B*35:02H HLA-B*35:08M HLA-C*08:01H HLA-C*08:02M HLA-B*35:12H HLA-B*38:01H HLA-B*38:02M HLA-B*15:02H HLA-B*39:01H HLA-C*05:01M HLA-B*13:01H
TIDYTEISF

SEQ ID NO: 3741 - protein, 9 aa, Severe acute respiratory syndrome coronavirus 2
  REGION 1..9: note = Table A: HLA-B*58:01M HLA-A*36:01H HLA-B*57:03H
YTEISFMLW

SEQ ID NO: 3742 - protein, 9 aa, Severe acute respiratory syndrome coronavirus 2
  REGION 1..9: note = Table A: HLA-B*50:01H
TEISFMLWC

SEQ ID NO: 3743 - protein, 9 aa, Severe acute respiratory syndrome coronavirus 2
  REGION 1..9: note = Table A: HLA-A*34:02H
EISFMLWCK

SEQ ID NO: 3744 - protein, 9 aa, Severe acute respiratory syndrome coronavirus 2
  REGION 1..9: note = Table A: HLA-B*38:02H HLA-B*15:03M
CKDGHVETF

SEQ ID NO: 3745 - protein, 9 aa, Severe acute respiratory syndrome coronavirus 2
  REGION 1..9: note = Table A: HLA-A*36:01H
KDGHVETFY

SEQ ID NO: 3746 - protein, 9 aa, Severe acute respiratory syndrome coronavirus 2
  REGION 1..9: note = Table A: HLA-A*11:01H HLA-A*11:02H
GHVETFYPK

SEQ ID NO: 3747 - protein, 9 aa, Severe acute respiratory syndrome coronavirus 2
  REGION 1..9: note = Table A: HLA-C*04:03H HLA-A*02:11H HLA-B*53:01H HLA-A*68:02H HLA-B*35:03H HLA-A*02:04H HLA-A*02:05H HLA-A*02:06H HLA-A*02:07M HLA-A*02:02H HLA-B*35:02H HLA-C*08:01H HLA-B*35:12H HLA-B*38:02H HLA-B*40:06H HLA-B*13:01H
HVETFYPKL

SEQ ID NO: 3748 - protein, 9 aa, Severe acute respiratory syndrome coronavirus 2
  REGION 1..9: note = Table A: HLA-A*34:02H
ETFYPKLQS

SEQ ID NO: 3749 - protein, 9 aa, Severe acute respiratory syndrome coronavirus 2
  REGION 1..9: note = Table A: HLA-B*56:01M HLA-B*55:02M HLA-B*55:01H HLA-B*54:01H
YPKLQSSQA

SEQ ID NO: 3750 - protein, 9 aa, Severe acute respiratory syndrome coronavirus 2
  REGION 1..9: note = Table A: HLA-A*02:04H
SSQAWQPGV

SEQ ID NO: 3751 - protein, 9 aa, Severe acute respiratory syndrome coronavirus 2
  REGION 1..9: note = Table A: HLA-B*39:06H HLA-B*39:01H
SQAWQPGVA

SEQ ID NO: 3752 - protein, 9 aa, Severe acute respiratory syndrome coronavirus 2
  REGION 1..9: note = Table A: HLA-A*11:303M HLA-B*46:01H HLA-C*03:03H HLA-C*03:02M HLA-C*03:04M HLA-B*35:03M HLA-C*15:05M HLA-C*12:02H HLA-A*34:01H HLA-C*07:27H HLA-B*35:01H HLA-B*35:02M HLA-B*35:08M HLA-B*51:01H HLA-B*35:07H
  REGION 1..9: note = CONT. FROM ABOVE: HLA-C*08:01M HLA-B*35:12H HLA-B*38:02M HLA- B*54:01H HLA-B*07:02H HLA-B*07:04H HLA-B*15:01H HLA-B*15:02H HLA-B*15:03H HLA-B*07:05M HLA-B*15:11H
QAWQPGVAM

SEQ ID NO: 3753 - protein, 9 aa, Severe acute respiratory syndrome coronavirus 2
  REGION 1..9: note = Table A: HLA-C*15:05H
QPGVAMPNL

SEQ ID NO: 3754 - protein, 9 aa, Severe acute respiratory syndrome coronavirus 2
  REGION 1..9: note = Table A: HLA-A*03:01M HLA-A*03:02H HLA-A*11:01M HLA-A*11:02M HLA-A*36:01H HLA-A*34:02M HLA-C*07:27H
GVAMPNLYK

SEQ ID NO: 3755 - protein, 9 aa, Severe acute respiratory syndrome coronavirus 2
  REGION 1..9: note = Table A: HLA-B*58:01H HLA-B*58:02H HLA-A*11:303M HLA-C*16:01H HLA-B*46:01H HLA-C*03:03H HLA-C*12:05H HLA-A*02:11H HLA-C*03:02M HLA-C*03:04M HLA-B*35:03H HLA-C*15:05H HLA-C*12:02H HLA-C*12:03H HLA-A*02:04H
  REGION 1..9: note = CONT. FROM ABOVE: HLA-A*02:02H HLA-B*35:01H HLA-C*17:01H HLA- B*35:07H HLA-C*08:01H HLA-B*38:02H HLA-B*07:05H HLA-B*57:03M HLA-C*02:02M HLA-C*07:04H
VAMPNLYKM

SEQ ID NO: 3756 - protein, 9 aa, Severe acute respiratory syndrome coronavirus 2
  REGION 1..9: note = Table A: HLA-A*33:03H HLA-A*34:01H HLA-A*66:01H
MPNLYKMQR

SEQ ID NO: 3757 - protein, 9 aa, Severe acute respiratory syndrome coronavirus 2
  REGION 1..9: note = Table A: HLA-A*24:07H
LYKMQRMLL

SEQ ID NO: 3758 - protein, 9 aa, Severe acute respiratory syndrome coronavirus 2
  REGION 1..9: note = Table A: HLA-B*38:02H
MQRMLLEKC

SEQ ID NO: 3759 - protein, 9 aa, Severe acute respiratory syndrome coronavirus 2
  REGION 1..9: note = Table A: HLA-B*18:01H
LEKCDLQNY

SEQ ID NO: 3760 - protein, 9 aa, Severe acute respiratory syndrome coronavirus 2
  REGION 1..9: note = Table A: HLA-B*39:01H
DLQNYGDSA

SEQ ID NO: 3761 - protein, 9 aa, Severe acute respiratory syndrome coronavirus 2
  REGION 1..9: note = Table A: HLA-B*35:03H HLA-C*15:05H HLA-B*38:02H HLA-B*39:01H
QNYGDSATL

SEQ ID NO: 3762 - protein, 9 aa, Severe acute respiratory syndrome coronavirus 2
  REGION 1..9: note = Table A: HLA-A*03:02H HLA-A*11:01H HLA-A*11:02H HLA-A*36:01H HLA-A*34:02M
YGDSATLPK

SEQ ID NO: 3763 - protein, 9 aa, Severe acute respiratory syndrome coronavirus 2
  REGION 1..9: note = Table A: HLA-A*68:02H
DSATLPKGI

SEQ ID NO: 3764 - protein, 9 aa, Severe acute respiratory syndrome coronavirus 2
  REGION 1..9: note = Table A: HLA-B*35:02H HLA-B*35:12H
SATLPKGIM

SEQ ID NO: 3765 - protein, 9 aa, Severe acute respiratory syndrome coronavirus 2
  REGION 1..9: note = Table A: HLA-A*11:303H HLA-C*15:05H HLA-C*15:02H HLA-B*57:03M HLA-C*07:04H
ATLPKGIMM

SEQ ID NO: 3766 - protein, 9 aa, Severe acute respiratory syndrome coronavirus 2
  REGION 1..9: note = Table A: HLA-B*42:01H HLA-B*56:01M HLA-B*08:01H HLA-B*55:02M HLA-A*68:02H HLA-C*15:05H HLA-B*55:01M HLA-B*51:01M HLA-B*38:02H HLA-B*54:01M HLA-B*07:02H HLA-B*07:04M
LPKGIMMNV

SEQ ID NO: 3767 - protein, 9 aa, Severe acute respiratory syndrome coronavirus 2
  REGION 1..9: note = Table A: HLA-A*29:02H HLA-A*30:02H HLA-B*38:02H HLA-B*15:01M HLA-B*15:02H HLA-B*07:05H
GIMMNVAKY

SEQ ID NO: 3768 - protein, 9 aa, Severe acute respiratory syndrome coronavirus 2
  REGION 1..9: note = Table A: HLA-A*02:11H
IMMNVAKYT

SEQ ID NO: 3769 - protein, 9 aa, Severe acute respiratory syndrome coronavirus 2
  REGION 1..9: note = Table A: HLA-B*15:03H
AKYTQLCQY

SEQ ID NO: 3770 - protein, 9 aa, Severe acute respiratory syndrome coronavirus 2
  REGION 1..9: note = Table A: HLA-A*24:02H HLA-A*24:07H HLA-A*23:01H
KYTQLCQYL

SEQ ID NO: 3771 - protein, 9 aa, Severe acute respiratory syndrome coronavirus 2
  REGION 1..9: note = Table A: HLA-A*02:04H HLA-A*02:02H HLA-B*38:02H
QLCQYLNTL

SEQ ID NO: 3772 - protein, 9 aa, Severe acute respiratory syndrome coronavirus 2
  REGION 1..9: note = Table A: HLA-B*48:01H HLA-C*15:05H HLA-B*52:01M HLA-B*38:02H HLA-B*15:01H HLA-B*15:03H HLA-B*13:02M HLA-B*15:10H
CQYLNTLTL

SEQ ID NO: 3773 - protein, 9 aa, Severe acute respiratory syndrome coronavirus 2
  REGION 1..9: note = Table A: HLA-A*02:11H HLA-A*02:04H HLA-A*02:03H HLA-B*38:02H HLA-B*13:02H
YLNTLTLAV

SEQ ID NO: 3774 - protein, 9 aa, Severe acute respiratory syndrome coronavirus 2
  REGION 1..9: note = Table A: HLA-A*29:01H HLA-A*29:02H HLA-B*35:01H HLA-B*07:05H
NTLTLAVPY

SEQ ID NO: 3775 - protein, 9 aa, Severe acute respiratory syndrome coronavirus 2
  REGION 1..9: note = Table A: HLA-A*02:11H HLA-B*57:03H
LTLAVPYNM

SEQ ID NO: 3776 - protein, 9 aa, Severe acute respiratory syndrome coronavirus 2
  REGION 1..9: note = Table A: HLA-A*74:01H HLA-A*33:03H HLA-A*68:01H HLA-A*34:01M HLA-A*66:01H
TLAVPYNMR

SEQ ID NO: 3777 - protein, 9 aa, Severe acute respiratory syndrome coronavirus 2
  REGION 1..9: note = Table A: HLA-C*14:03H HLA-A*24:02M HLA-A*24:07H HLA-A*23:01M
PYNMRVIHF

SEQ ID NO: 3778 - protein, 9 aa, Severe acute respiratory syndrome coronavirus 2
  REGION 1..9: note = Table A: HLA-B*41:02H
SDKGVAPGT

SEQ ID NO: 3779 - protein, 9 aa, Severe acute respiratory syndrome coronavirus 2
  REGION 1..9: note = Table A: HLA-A*11:303H HLA-C*15:05H HLA-B*49:01H
KGVAPGTAV

SEQ ID NO: 3780 - protein, 9 aa, Severe acute respiratory syndrome coronavirus 2
  REGION 1..9: note = Table A: HLA-B*48:01M HLA-A*11:303H HLA-A*26:03H HLA-C*03:04H HLA-A*68:02H HLA-B*35:03H HLA-C*15:05M HLA-C*01:02H HLA-A*02:05H HLA-A*02:06H HLA-A*02:08H HLA-B*14:01H HLA-A*02:02M HLA-A*02:03M HLA-A*34:01H
  REGION 1..9: note = CONT. FROM ABOVE: HLA-B*35:02H HLA-C*17:01H HLA-C*08:03H HLA- B*35:12H HLA-B*38:02M HLA-B*40:01H HLA-B*40:02H HLA-B*07:02M HLA-B*15:01M HLA-B*15:02M HLA-B*39:01M HLA-B*07:05M HLA-B*15 :10H HLA-C*07:04H
GVAPGTAVL

SEQ ID NO: 3781 - protein, 9 aa, Severe acute respiratory syndrome coronavirus 2
  REGION 1..9: note = Table A: HLA-A*74:01H HLA-A*68:01M HLA-A*34:01H
VAPGTAVLR

SEQ ID NO: 3782 - protein, 9 aa, Severe acute respiratory syndrome coronavirus 2
  REGION 1..9: note = Table A: HLA-B*48:01M HLA-B*52:01H HLA-B*15:01H HLA-B*15:03M HLA-B*13:01M HLA-B*13:02H
RQWLPTGTL

SEQ ID NO: 3783 - protein, 9 aa, Severe acute respiratory syndrome coronavirus 2
  REGION 1..9: note = Table A: HLA-A*24:02H HLA-A*24:07H HLA-A*23:01H
QWLPTGTLL

SEQ ID NO: 3784 - protein, 9 aa, Severe acute respiratory syndrome coronavirus 2
  REGION 1..9: note = Table A: HLA-B*13:02H
WLPTGTLLV

SEQ ID NO: 3785 - protein, 9 aa, Severe acute respiratory syndrome coronavirus 2
  REGION 1..9: note = Table A: HLA-C*04:03H
LVDSDLNDF

SEQ ID NO: 3786 - protein, 9 aa, Severe acute respiratory syndrome coronavirus 2
  REGION 1..9: note = Table A: HLA-B*38:02H
DLNDFVSDA

SEQ ID NO: 3787 - protein, 9 aa, Severe acute respiratory syndrome coronavirus 2
  REGION 1..9: note = Table A: HLA-A*11:303H HLA-A*26:03H HLA-C*03:03H HLA-C*03:04M HLA-A*68:02H HLA-B*35:03H HLA-C*15:05H HLA-C*01:02H HLA-A*02:05H HLA-A*02:06H HLA-A*02:08H HLA-A*02:02M HLA-A*02:03H HLA-A*34:01H HLA-B*35:01H
  REGION 1..9: note = CONT. FROM ABOVE: HLA-B*35:02H HLA-B*35:08H HLA-C*08:01M HLA- C*08:02H HLA-B*35:12H HLA-B*38:01H HLA-B*38:02H HLA-B*15:02H HLA-B*39:01H HLA-C*07:04H
FVSDADSTL

SEQ ID NO: 3788 - protein, 9 aa, Severe acute respiratory syndrome coronavirus 2
  REGION 1..9: note = Table A: HLA-C*05:01H
VSDADSTLI

SEQ ID NO: 3789 - protein, 9 aa, Severe acute respiratory syndrome coronavirus 2
  REGION 1..9: note = Table A: HLA-A*02:11H HLA-A*02:05H HLA-A*02:06H HLA-A*02:01M HLA-A*02:02H HLA-A*02:03M HLA-B*38:02M HLA-B*13:02H
TLIGDCATV

SEQ ID NO: 3790 - protein, 9 aa, Severe acute respiratory syndrome coronavirus 2
  REGION 1..9: note = Table A: HLA-B*58:01H HLA-B*58:02H HLA-B*57:01M HLA-A*25:01H HLA-B*53:01H HLA-B*15:13H HLA-B*57:03H
ATVHTANKW

SEQ ID NO: 3791 - protein, 9 aa, Severe acute respiratory syndrome coronavirus 2
  REGION 1..9: note = Table A: HLA-B*38:02H
VHTANKWDL

SEQ ID NO: 3792 - protein, 9 aa, Severe acute respiratory syndrome coronavirus 2
  REGION 1..9: note = Table A: HLA-A*68:02H
HTANKWDLI

SEQ ID NO: 3793 - protein, 9 aa, Severe acute respiratory syndrome coronavirus 2
  REGION 1..9: note = Table A: HLA-B*53:01H HLA-B*35:03H HLA-C*15:05H HLA-C*15:02M
TANKWDLII

SEQ ID NO: 3794 - protein, 9 aa, Severe acute respiratory syndrome coronavirus 2
  REGION 1..9: note = Table A: HLA-C*04:01M HLA-C*04:03H
KWDLIISDM

SEQ ID NO: 3795 - protein, 9 aa, Severe acute respiratory syndrome coronavirus 2
  REGION 1..9: note = Table A: HLA-A*03:02H HLA-A*11:01H HLA-A*11:02H HLA-A*36:01H HLA-A*34:02H
IISDMYDPK

SEQ ID NO: 3796 - protein, 9 aa, Severe acute respiratory syndrome coronavirus 2
  REGION 1..9: note = Table A: HLA-A*33:03H HLA-C*06:02H HLA-C*04:01M HLA-C*04:03M HLA-A*02:11M HLA-A*02:07H HLA-A*02:02H HLA-A*24:02H HLA-B*51:01H HLA-B*52:01H HLA-C*08:01H HLA-A*23:01H HLA-B*38:02H HLA-B*49:01H
MYDPKTKNV

SEQ ID NO: 3797 - protein, 9 aa, Severe acute respiratory syndrome coronavirus 2
  REGION 1..9: note = Table A: HLA-A*33:03H HLA-B*08:01H HLA-A*34:02H
DPKTKNVTK

SEQ ID NO: 3798 - protein, 9 aa, Severe acute respiratory syndrome coronavirus 2
  REGION 1..9: note = Table A: HLA-B*44:02H HLA-B*44:05M HLA-B*44:03M HLA-B*37:01M
KENDSKEGF

SEQ ID NO: 3799 - protein, 9 aa, Severe acute respiratory syndrome coronavirus 2
  REGION 1..9: note = Table A: HLA-A*25:01H HLA-A*33:01H HLA-A*26:01M HLA-B*38:02H HLA-B*15:02H
DSKEGFFTY

SEQ ID NO: 3800 - protein, 9 aa, Severe acute respiratory syndrome coronavirus 2
  REGION 1..9: note = Table A: HLA-B*38:02H
SKEGFFTYI

SEQ ID NO: 3801 - protein, 9 aa, Severe acute respiratory syndrome coronavirus 2
  REGION 1..9: note = Table A: HLA-A*34:02H
YICGFIQQK

SEQ ID NO: 3802 - protein, 9 aa, Severe acute respiratory syndrome coronavirus 2
  REGION 1..9: note = Table A: HLA-C*14:02H HLA-C*14:03M HLA-C*15:05H
GFIQQKLAL

SEQ ID NO: 3803 - protein, 9 aa, Severe acute respiratory syndrome coronavirus 2
  REGION 1..9: note = Table A: HLA-A*11:303H HLA-C*03:03H HLA-C*12:05H HLA-C*03:02H HLA-C*03:04H HLA-B*35:03H HLA-C*15:05M HLA-B*35:01H HLA-B*51:01H HLA-C*08:01H HLA-B*38:02M HLA-B*54:01H HLA-B*39:01H HLA-B*57:03H
LALGGSVAI

SEQ ID NO: 3804 - protein, 9 aa, Severe acute respiratory syndrome coronavirus 2
  REGION 1..9: note = Table A: HLA-A*03:01H HLA-A*03:02M HLA-A*11:01H HLA-A*11:02H
ALGGSVAIK

SEQ ID NO: 3805 - protein, 9 aa, Severe acute respiratory syndrome coronavirus 2
  REGION 1..9: note = Table A: HLA-A*11:303H HLA-A*03:01M HLA-A*03:02H HLA-A*11:01M HLA-A*11:02H HLA-B*46:01H HLA-A*68:01H HLA-C*12:02H HLA-A*02:05H HLA-A*34:02M HLA-B*38:02H HLA-B*15:01H
SVAIKITEH

SEQ ID NO: 3806 - protein, 9 aa, Severe acute respiratory syndrome coronavirus 2
  REGION 1..9: note = Table A: HLA-B*58:01H HLA-B*58:02H HLA-B*57:01H HLA-A*30:02H HLA-B*15:13H HLA-A*32:01H HLA-B*57:03M HLA-B*13:01H
AIKITEHSW

SEQ ID NO: 3807 - protein, 9 aa, Severe acute respiratory syndrome coronavirus 2
  REGION 1..9: note = Table A: HLA-A*02:11H HLA-A*02:08H HLA-A*02:02H
KITEHSWNA

SEQ ID NO: 3808 - protein, 9 aa, Severe acute respiratory syndrome coronavirus 2
  REGION 1..9: note = Table A: HLA-B*44:05H HLA-B*40:01H HLA-B*40:02H HLA-B*41:02H HLA-B*49:01H
TEHSWNADL

SEQ ID NO: 3809 - protein, 9 aa, Severe acute respiratory syndrome coronavirus 2
  REGION 1..9: note = Table A: HLA-B*38:01H HLA-B*38:02M HLA-B*39:01M
EHSWNADLY

SEQ ID NO: 3810 - protein, 9 aa, Severe acute respiratory syndrome coronavirus 2
  REGION 1..9: note = Table A: HLA-A*34:02M
HSWNADLYK

SEQ ID NO: 3811 - protein, 9 aa, Severe acute respiratory syndrome coronavirus 2
  REGION 1..9: note = Table A: HLA-A*24:02H HLA-A*24:07H
SWNADLYKL

SEQ ID NO: 3812 - protein, 9 aa, Severe acute respiratory syndrome coronavirus 2
  REGION 1..9: note = Table A: HLA-A*26:01H
DLYKLMGHF

SEQ ID NO: 3813 - protein, 9 aa, Severe acute respiratory syndrome coronavirus 2
  REGION 1..9: note = Table A: HLA-B*58:01H HLA-A*32:01M HLA-B*57:03M HLA-B*13:01H
KLMGHFAWW

SEQ ID NO: 3814 - protein, 9 aa, Severe acute respiratory syndrome coronavirus 2
  REGION 1..9: note = Table A: HLA-B*38:02H HLA-B*15:03H
GHFAWWTAF

SEQ ID NO: 3815 - protein, 9 aa, Severe acute respiratory syndrome coronavirus 2
  REGION 1..9: note = Table A: HLA-B*56:01H HLA-B*55:02M HLA-C*15:05H HLA-B*55:01H HLA-A*02:05H HLA-B*35:01H HLA-C*08:01H HLA-B*38:02H HLA-B*39:06H HLA-B*54:01M
TAFVTNVNA

SEQ ID NO: 3816 - protein, 9 aa, Severe acute respiratory syndrome coronavirus 2
  REGION 1..9: note = Table A: HLA-A*26:03H HLA-A*68:02H HLA-B*38:02H
FVTNVNASS

SEQ ID NO: 3817 - protein, 9 aa, Severe acute respiratory syndrome coronavirus 2
  REGION 1..9: note = Table A: HLA-B*15:01H HLA-B*07:05H
VNASSSEAF

SEQ ID NO: 3818 - protein, 9 aa, Severe acute respiratory syndrome coronavirus 2
  REGION 1..9: note = Table A: HLA-B*35:03H HLA-B*35:02M HLA-B*35:12H HLA-B*38:02H
NASSSEAFL

SEQ ID NO: 3819 - protein, 9 aa, Severe acute respiratory syndrome coronavirus 2
  REGION 1..9: note = Table A: HLA-A*33:03H HLA-A*26:01H HLA-B*18:01H HLA-A*68:02H HLA-A*34:01H HLA-A*34:02H HLA-B*35:01M HLA-B*35:07M HLA-B*38:02M HLA-B*15:02M HLA-B*07:05H HLA-A*66:01H
EAFLIGCNY

SEQ ID NO: 3820 - protein, 9 aa, Severe acute respiratory syndrome coronavirus 2
  REGION 1..9: note = Table A: HLA-C*14:03H
AFLIGCNYL

SEQ ID NO: 3821 - protein, 9 aa, Severe acute respiratory syndrome coronavirus 2
  REGION 1..9: note = Table A: HLA-A*02:11H HLA-A*02:02H HLA-B*38:02H HLA-B*13:01H HLA-B*13:02H
YLGKPREQI

SEQ ID NO: 3822 - protein, 9 aa, Severe acute respiratory syndrome coronavirus 2
  REGION 1..9: note = Table A: HLA-A*30:02H HLA-C*15:05H HLA-B*35:01H HLA-B*35:07M HLA-B*38:02H HLA-B*07:02H HLA-B*07:04H HLA-B*15:02H HLA-B*15:03H HLA-B*07:05H
KPREQIDGY

SEQ ID NO: 3823 - protein, 9 aa, Severe acute respiratory syndrome coronavirus 2
  REGION 1..9: note = Table A: HLA-B*44:05H HLA-B*37:01H HLA-B*40:01M HLA-B*40:02H HLA-B*41:02H
REQIDGYVM

SEQ ID NO: 3824 - protein, 9 aa, Severe acute respiratory syndrome coronavirus 2
  REGION 1..9: note = Table A: HLA-A*26:03H HLA-A*34:01H HLA-B*38:02H
EQIDGYVMH

SEQ ID NO: 3825 - protein, 9 aa, Severe acute respiratory syndrome coronavirus 2
  REGION 1..9: note = Table A: HLA-A*02:07H
QIDGYVMHA

SEQ ID NO: 3826 - protein, 9 aa, Severe acute respiratory syndrome coronavirus 2
  REGION 1..9: note = Table A: HLA-B*18:01H HLA-B*35:01H HLA-B*51:01H HLA-B*38:02H HLA-B*15:02H HLA-B*07:05H
DGYVMHANY

SEQ ID NO: 3827 - protein, 9 aa, Severe acute respiratory syndrome coronavirus 2
  REGION 1..9: note = Table A: HLA-A*24:02H HLA-A*24:07H HLA-A*23:01H
GYVMHANYI

SEQ ID NO: 3828 - protein, 9 aa, Severe acute respiratory syndrome coronavirus 2
  REGION 1..9: note = Table A: HLA-B*58:01H HLA-A*24:02H HLA-A*24:07M HLA-A*23:01H HLA-B*38:02H HLA-A*32:01H HLA-B*57:03H HLA-B*13:01H
VMHANYIFW

SEQ ID NO: 3829 - protein, 9 aa, Severe acute respiratory syndrome coronavirus 2
  REGION 1..9: note = Table A: HLA-C*14:03H HLA-A*24:07H
IFWRNTNPI

SEQ ID NO: 3830 - protein, 9 aa, Severe acute respiratory syndrome coronavirus 2
  REGION 1..9: note = Table A: HLA-C*06:02M HLA-B*27:05H HLA-C*07:02H HLA-B*38:02H HLA-B*39:01H HLA-C*07:04H
WRNTNPIQL

SEQ ID NO: 3831 - protein, 9 aa, Severe acute respiratory syndrome coronavirus 2
  REGION 1..9: note = Table A: HLA-B*07:05H
TNPIQLSSY

SEQ ID NO: 3832 - protein, 9 aa, Severe acute respiratory syndrome coronavirus 2
  REGION 1..9: note = Table A: HLA-B*58:01H HLA-B*57:03M
YSLFDMSKF

SEQ ID NO: 3833 - protein, 9 aa, Severe acute respiratory syndrome coronavirus 2
  REGION 1..9: note = Table A: HLA-C*04:03H
LFDMSKFPL

SEQ ID NO: 3834 - protein, 9 aa, Severe acute respiratory syndrome coronavirus 2
  REGION 1..9: note = Table A: HLA-A*11:02H HLA-A*34:02M
FDMSKFPLK

SEQ ID NO: 3835 - protein, 9 aa, Severe acute respiratory syndrome coronavirus 2
  REGION 1..9: note = Table A: HLA-C*07:01H HLA-A*68:02H HLA-C*15:05M HLA-A*02:02H HLA-A*34:02H HLA-B*51:01H HLA-B*38:02M HLA-B*07:05M HLA-B*13:02H
DMSKFPLKL

SEQ ID NO: 3836 - protein, 9 aa, Severe acute respiratory syndrome coronavirus 2
  REGION 1..9: note = Table A: HLA-A*74:01M HLA-A*33:01M HLA-A*33:03H HLA-A*34:01M HLA-A*34:02M HLA-A*31:01H HLA-A*66:01H
MSKFPLKLR

SEQ ID NO: 3837 - protein, 9 aa, Severe acute respiratory syndrome coronavirus 2
  REGION 1..9: note = Table A: HLA-B*56:01H HLA-B*55:02H HLA-B*55:01H HLA-B*54:01M
FPLKLRGTA

SEQ ID NO: 3838 - protein, 9 aa, Severe acute respiratory syndrome coronavirus 2
  REGION 1..9: note = Table A: HLA-B*08:01H HLA-B*07:04H
PLKLRGTAV

SEQ ID NO: 3839 - protein, 9 aa, Severe acute respiratory syndrome coronavirus 2
  REGION 1..9: note = Table A: HLA-B*14:01H
LRGTAVMSL

SEQ ID NO: 3840 - protein, 9 aa, Severe acute respiratory syndrome coronavirus 2
  REGION 1..9: note = Table A: HLA-A*03:01H
RGTAVMSLK

SEQ ID NO: 3841 - protein, 9 aa, Severe acute respiratory syndrome coronavirus 2
  REGION 1..9: note = Table A: HLA-B*44:05H HLA-B*40:01H HLA-B*40:02H HLA-B*13:01H HLA-B*49:01M
KEGQINDMI

SEQ ID NO: 3842 - protein, 9 aa, Severe acute respiratory syndrome coronavirus 2
  REGION 1..9: note = Table A: HLA-A*11:303H HLA-A*68:02H HLA-B*35:03H HLA-C*15:05M HLA-C*15:02M HLA-A*02:04M HLA-A*02:05H HLA-A*02:07H HLA-A*02:02H HLA-A*02:03H HLA-C*08:01H HLA-B*38:02M HLA-B*07:05H HLA-B*13:02H HLA-C*07:04H
QINDMILSL

SEQ ID NO: 3843 - protein, 9 aa, Severe acute respiratory syndrome coronavirus 2
  REGION 1..9: note = Table A: HLA-C*04:03M
INDMILSLL

SEQ ID NO: 3844 - protein, 9 aa, Severe acute respiratory syndrome coronavirus 2
  REGION 1..9: note = Table A: HLA-A*34:02H
DMILSLLSK

SEQ ID NO: 3845 - protein, 9 aa, Severe acute respiratory syndrome coronavirus 2
  REGION 1..9: note = Table A: HLA-A*74:01H
ILSLLSKGR

SEQ ID NO: 3846 - protein, 9 aa, Severe acute respiratory syndrome coronavirus 2
  REGION 1..9: note = Table A: HLA-A*74:01M
RLIIRENNR

SEQ ID NO: 3847 - protein, 9 aa, Severe acute respiratory syndrome coronavirus 2
  REGION 1..9: note = Table A: HLA-B*07:04H
IIRENNRVV

SEQ ID NO: 3848 - protein, 9 aa, Severe acute respiratory syndrome coronavirus 2
  REGION 1..9: note = Table A: HLA-B*38:02H
IRENNRVVI

SEQ ID NO: 3849 - protein, 9 aa, Severe acute respiratory syndrome coronavirus 2
  REGION 1..9: note = Table A: HLA-B*14:01H HLA-B*39:01H
NRVVISSDV

SEQ ID NO: 3850 - protein, 9 aa, Severe acute respiratory syndrome coronavirus 2
  REGION 1..9: note = Table A: HLA-A*02:05H HLA-A*02:08H HLA-C*08:01H HLA-B*38:02H HLA-B*13:01M
RVVISSDVL

SEQ ID NO: 3851 - protein, 9 aa, Severe acute respiratory syndrome coronavirus 2
  REGION 1..9: note = Table A: HLA-A*68:02H HLA-C*15:05H HLA-A*02:05H HLA-A*02:06M HLA-A*02:08H HLA-A*02:01H HLA-C*08:01H HLA-B*38:02H HLA-B*13:02H
VVISSDVLV

SEQ ID NO: 3852 - protein, 9 aa, Severe acute respiratory syndrome coronavirus 2
  REGION 1..9: note = Table A: HLA-A*68:02H
ISSDVLVNN

SEQ ID NO: 3853 - protein, 10 aa, Severe acute respiratory syndrome coronavirus 2
  REGION 1..10: note = Table A: HLA-A*68:01H HLA-A*34:02H
ESLVPGFNEK

SEQ ID NO: 3854 - protein, 10 aa, Severe acute respiratory syndrome coronavirus 2
  REGION 1..10: note = Table A: HLA-A*02:02H
SLVPGFNEKT

SEQ ID NO: 3855 - protein, 10 aa, Severe acute respiratory syndrome coronavirus 2
  REGION 1..10: note = Table A: HLA-B*38:01H HLA-B*38:02M HLA-B*39:01H HLA-B*15:10M
THVQLSLPVL

SEQ ID NO: 3856 - protein, 10 aa, Severe acute respiratory syndrome coronavirus 2
  REGION 1..10: note = Table A: HLA-B*13:02H
VQLSLPVLQV

SEQ ID NO: 3857 - protein, 10 aa, Severe acute respiratory syndrome coronavirus 2
  REGION 1..10: note = Table A: HLA-B*35:03H HLA-C*15:05H HLA-B*07:02H
LPVLQVRDVL

SEQ ID NO: 3858 - protein, 10 aa, Severe acute respiratory syndrome coronavirus 2
  REGION 1..10: note = Table A: HLA-B*07:04H
QVRDVLVRGF

SEQ ID NO: 3859 - protein, 10 aa, Severe acute respiratory syndrome coronavirus 2
  REGION 1..10: note = Table A: HLA-A*02:02H HLA-B*38:02H
VLVRGFGDSV

SEQ ID NO: 3860 - protein, 10 aa, Severe acute respiratory syndrome coronavirus 2
  REGION 1..10: note = Table A: HLA-A*68:01H
SVEEVLSEAR

SEQ ID NO: 3861 - protein, 10 aa, Severe acute respiratory syndrome coronavirus 2
  REGION 1..10: note = Table A: HLA-A*33:03H HLA-A*68:02H HLA-A*34:01H HLA-A*34:02H
EVLSEARQHL

SEQ ID NO: 3862 - protein, 10 aa, Severe acute respiratory syndrome coronavirus 2
  REGION 1..10: note = Table A: HLA-A*03:02H
VLSEARQHLK

SEQ ID NO: 3863 - protein, 10 aa, Severe acute respiratory syndrome coronavirus 2
  REGION 1..10: note = Table A: HLA-B*38:02M HLA-B*39:01H
QHLKDGTCGL

SEQ ID NO: 3864 - protein, 10 aa, Severe acute respiratory syndrome coronavirus 2
  REGION 1..10: note = Table A: HLA-A*03:02M HLA-A*11:01M HLA-A*11:02H HLA-B*27:02H HLA-C*07:27H
GTCGLVEVEK

SEQ ID NO: 3865 - protein, 10 aa, Severe acute respiratory syndrome coronavirus 2
  REGION 1..10: note = Table A: HLA-B*40:01H
GLVEVEKGVL

SEQ ID NO: 3866 - protein, 10 aa, Severe acute respiratory syndrome coronavirus 2
  REGION 1..10: note = Table A: HLA-A*68:02H
EVEKGVLPQL

SEQ ID NO: 3867 - protein, 10 aa, Severe acute respiratory syndrome coronavirus 2
  REGION 1..10: note = Table A: HLA-A*29:01H HLA-A*29:02H
GVLPQLEQPY

SEQ ID NO: 3868 - protein, 10 aa, Severe acute respiratory syndrome coronavirus 2
  REGION 1..10: note = Table A: HLA-A*02:11H HLA-A*02:04H HLA-A*02:07M HLA-A*02:01H HLA-A*02:02H
VLPQLEQPYV

SEQ ID NO: 3869 - protein, 10 aa, Severe acute respiratory syndrome coronavirus 2
  REGION 1..10: note = Table A: HLA-B*53:01H HLA-B*55:02H HLA-B*35:03H HLA-B*35:01H HLA-B*35:08H HLA-B*35:07H
LPQLEQPYVF

SEQ ID NO: 3870 - protein, 10 aa, Severe acute respiratory syndrome coronavirus 2
  REGION 1..10: note = Table A: HLA-B*27:05H
ARTAPHGHVM

SEQ ID NO: 3871 - protein, 10 aa, Severe acute respiratory syndrome coronavirus 2
  REGION 1..10: note = Table A: HLA-C*15:02H HLA-A*02:08H HLA-B*57:03H
RTAPHGHVMV

SEQ ID NO: 3872 - protein, 10 aa, Severe acute respiratory syndrome coronavirus 2
  REGION 1..10: note = Table A: HLA-B*42:01H HLA-B*56:01H HLA-B*55:02M HLA-C*15:05M HLA-B*55:01H HLA-B*07:02M HLA-B*07:04M HLA-B*07:05H
APHGHVMVEL

SEQ ID NO: 3873 - protein, 10 aa, Severe acute respiratory syndrome coronavirus 2
  REGION 1..10: note = Table A: HLA-A*36:01H HLA-A*26:01M HLA-A*26:02H HLA-A*29:01M HLA-A*29:02H HLA-A*30:02H HLA-A*68:01H HLA-A*34:02H HLA-B*35:01M HLA-B*35:08H HLA-B*35:07H HLA-B*38:02H HLA-B*15:01H HLA-B*15:02H HLA-B*07:05H
LVAELEGIQY

SEQ ID NO: 3874 - protein, 10 aa, Severe acute respiratory syndrome coronavirus 2
  REGION 1..10: note = Table A: HLA-B*27:02H
AELEGIQYGR

SEQ ID NO: 3875 - protein, 10 aa, Severe acute respiratory syndrome coronavirus 2
  REGION 1..10: note = Table A: HLA-B*48:01H HLA-A*02:11H HLA-B*14:02M HLA-A*02:05M HLA-A*02:06H HLA-A*02:08M HLA-B*14:01H HLA-A*02:02M HLA-A*02:03H HLA-B*52:01H HLA-C*08:01H HLA-C*08:03H HLA-B*38:01H HLA-B*38:02M HLA-B*40:02H HLA-B*15:01M
  REGION 1..10: note = CONT. FROM ABOVE: HLA-B*15:02H HLA-B*15:03H HLA-B*39:01H HLA- B*13:01M HLA-B*13:02H HLA-B*15:10H
IQYGRSGETL

SEQ ID NO: 3876 - protein, 10 aa, Severe acute respiratory syndrome coronavirus 2
  REGION 1..10: note = Table A: HLA-B*57:03H
RSGETLGVLV

SEQ ID NO: 3877 - protein, 10 aa, Severe acute respiratory syndrome coronavirus 2
  REGION 1..10: note = Table A: HLA-A*68:02M HLA-A*34:02H
ETLGVLVPHV

SEQ ID NO: 3878 - protein, 10 aa, Severe acute respiratory syndrome coronavirus 2
  REGION 1..10: note = Table A: HLA-A*68:02H
LVPHVGEIPV

SEQ ID NO: 3879 - protein, 10 aa, Severe acute respiratory syndrome coronavirus 2
  REGION 1..10: note = Table A: HLA-B*56:01M HLA-B*55:02M HLA-B*55:01M HLA-B*54:01H
VPHVGEIPVA

SEQ ID NO: 3880 - protein, 10 aa, Severe acute respiratory syndrome coronavirus 2
  REGION 1..10: note = Table A: HLA-B*27:02H HLA-B*35:01H HLA-B*38:02H HLA-B*39:01H
PHVGEIPVAY

SEQ ID NO: 3881 - protein, 10 aa, Severe acute respiratory syndrome coronavirus 2
  REGION 1..10: note = Table A: HLA-A*74:01M HLA-A*03:02H HLA-A*33:01M HLA-A*33:03M HLA-A*26:03M HLA-A*68:01M HLA-A*68:02H HLA-A*34:01H HLA-A*34:02M HLA-A*66:01M
HVGEIPVAYR

SEQ ID NO: 3882 - protein, 10 aa, Severe acute respiratory syndrome coronavirus 2
  REGION 1..10: note = Table A: HLA-B*40:02H HLA-B*40:06H HLA-B*49:01M
GEIPVAYRKV

SEQ ID NO: 3883 - protein, 10 aa, Severe acute respiratory syndrome coronavirus 2
  REGION 1..10: note = Table A: HLA-B*07:04H
IPVAYRKVLL

SEQ ID NO: 3884 - protein, 10 aa, Severe acute respiratory syndrome coronavirus 2
  REGION 1..10: note = Table A: HLA-B*46:01H HLA-A*26:03H HLA-A*29:02H HLA-A*30:02H HLA-C*07:27H HLA-B*38:02H HLA-B*15:01M HLA-B*15:02H HLA-B*15:03H
GNKGAGGHSY

SEQ ID NO: 3885 - protein, 10 aa, Severe acute respiratory syndrome coronavirus 2
  REGION 1..10: note = Table A: HLA-B*58:02H HLA-B*57:01H HLA-A*25:01M HLA-B*46:01H HLA-A*26:01H HLA-A*26:03H HLA-C*12:02H HLA-A*34:02H HLA-B*57:03H HLA-A*66:01H
HSYGADLKSF

SEQ ID NO: 3886 - protein, 10 aa, Severe acute respiratory syndrome coronavirus 2
  REGION 1..10: note = Table A: HLA-A*02:02H
YGADLKSFDL

SEQ ID NO: 3887 - protein, 10 aa, Severe acute respiratory syndrome coronavirus 2
  REGION 1..10: note = Table A: HLA-A*25:01H HLA-B*53:01H HLA-B*38:02H
DPYEDFQENW

SEQ ID NO: 3888 - protein, 10 aa, Severe acute respiratory syndrome coronavirus 2
  REGION 1..10: note = Table A: HLA-B*45:01H
QENWNTKHSS

SEQ ID NO: 3889 - protein, 10 aa, Severe acute respiratory syndrome coronavirus 2
  REGION 1..10: note = Table A: HLA-A*33:01H HLA-A*33:03H HLA-A*26:03M HLA-A*68:01M HLA-A*34:01M HLA-A*34:02H HLA-A*66:01M
NTKHSSGVTR

SEQ ID NO: 3890 - protein, 10 aa, Severe acute respiratory syndrome coronavirus 2
  REGION 1..10: note = Table A: HLA-B*38:02M HLA-B*07:04H HLA-B*15:10H
KHSSGVTREL

SEQ ID NO: 3891 - protein, 10 aa, Severe acute respiratory syndrome coronavirus 2
  REGION 1..10: note = Table A: HLA-A*68:01H HLA-A*68:02M HLA-A*34:02H HLA-C*08:03H HLA-B*57:03H
HSSGVTRELM

SEQ ID NO: 3892 - protein, 10 aa, Severe acute respiratory syndrome coronavirus 2
  REGION 1..10: note = Table A: HLA-A*02:08H
GVTRELMREL

SEQ ID NO: 3893 - protein, 10 aa, Severe acute respiratory syndrome coronavirus 2
  REGION 1..10: note = Table A: HLA-A*11:303H HLA-B*46:01M HLA-A*29:02H HLA-C*03:02H HLA-A*30:02M HLA-B*38:02M HLA-B*15:01M HLA-B*15:02M HLA-B*15:03H
LMRELNGGAY

SEQ ID NO: 3894 - protein, 10 aa, Severe acute respiratory syndrome coronavirus 2
  REGION 1..10: note = Table A: HLA-B*39:01H
MRELNGGAYT

SEQ ID NO: 3895 - protein, 10 aa, Severe acute respiratory syndrome coronavirus 2
  REGION 1..10: note = Table A: HLA-A*74:01H
RELNGGAYTR

SEQ ID NO: 3896 - protein, 10 aa, Severe acute respiratory syndrome coronavirus 2
  REGION 1..10: note = Table A: HLA-A*25:01M HLA-A*26:01M HLA-A*26:02M HLA-A*26:03H HLA-A*30:02H HLA-A*68:01H HLA-A*34:01M HLA-A*34:02H HLA-B*38:02M HLA-B*15:01H HLA-B*15:02M
ELNGGAYTRY

SEQ ID NO: 3897 - protein, 10 aa, Severe acute respiratory syndrome coronavirus 2
  REGION 1..10: note = Table A: HLA-A*24:02M HLA-A*24:07M HLA-A*23:01M
AYTRYVDNNF

SEQ ID NO: 3898 - protein, 10 aa, Severe acute respiratory syndrome coronavirus 2
  REGION 1..10: note = Table A: HLA-C*15:05H
GPDGYPLECI

SEQ ID NO: 3899 - protein, 10 aa, Severe acute respiratory syndrome coronavirus 2
  REGION 1..10: note = Table A: HLA-B*53:01H
YPLECIKDLL

SEQ ID NO: 3900 - protein, 10 aa, Severe acute respiratory syndrome coronavirus 2
  REGION 1..10: note = Table A: HLA-A*33:03H HLA-A*26:03H HLA-A*68:01H HLA-A*34:01M HLA-A*34:02H HLA-A*66:01H
EQLDFIDTKR

SEQ ID NO: 3901 - protein, 10 aa, Severe acute respiratory syndrome coronavirus 2
  REGION 1..10: note = Table A: HLA-C*14:03H HLA-A*25:01H HLA-A*26:01H HLA-A*29:02H HLA-A*30:02H HLA-B*15:02H
DFIDTKRGVY

SEQ ID NO: 3902 - protein, 10 aa, Severe acute respiratory syndrome coronavirus 2
  REGION 1..10: note = Table A: HLA-A*33:01H HLA-A*33:03H
DTKRGVYCCR

SEQ ID NO: 3903 - protein, 10 aa, Severe acute respiratory syndrome coronavirus 2
  REGION 1..10: note = Table A: HLA-B*44:03H
REHEHEIAWY

SEQ ID NO: 3904 - protein, 10 aa, Severe acute respiratory syndrome coronavirus 2
  REGION 1..10: note = Table A: HLA-B*40:01H HLA-B*40:02H HLA-B*41:02M
TERSEKSYEL

SEQ ID NO: 3905 - protein, 10 aa, Severe acute respiratory syndrome coronavirus 2
  REGION 1..10: note = Table A: HLA-B*45:01M HLA-B*50:01M
SEKSYELQTP

SEQ ID NO: 3906 - protein, 10 aa, Severe acute respiratory syndrome coronavirus 2
  REGION 1..10: note = Table A: HLA-A*68:02H HLA-A*02:04H
ELQTPFEIKL

SEQ ID NO: 3907 - protein, 10 aa, Severe acute respiratory syndrome coronavirus 2
  REGION 1..10: note = Table A: HLA-A*02:05H
LQTPFEIKLA

SEQ ID NO: 3908 - protein, 10 aa, Severe acute respiratory syndrome coronavirus 2
  REGION 1..10: note = Table A: HLA-A*11:01H HLA-A*11:02H HLA-A*36:01H HLA-A*34:02H
QTPFEIKLAK

SEQ ID NO: 3909 - protein, 10 aa, Severe acute respiratory syndrome coronavirus 2
  REGION 1..10: note = Table A: HLA-A*68:01H HLA-A*34:01H HLA-A*34:02H
TPFEIKLAKK

SEQ ID NO: 3910 - protein, 10 aa, Severe acute respiratory syndrome coronavirus 2
  REGION 1..10: note = Table A: HLA-A*25:01M HLA-A*26:01H HLA-A*26:02M HLA-A*26:03M HLA-A*68:01H HLA-A*68:02H HLA-A*34:02H HLA-A*66:01H
DTFNGECPNF

SEQ ID NO: 3911 - protein, 10 aa, Severe acute respiratory syndrome coronavirus 2
  REGION 1..10: note = Table A: HLA-A*34:02H
FVFPLNSIIK

SEQ ID NO: 3912 - protein, 10 aa, Severe acute respiratory syndrome coronavirus 2
  REGION 1..10: note = Table A: HLA-B*53:01H HLA-B*55:02H HLA-C*15:05H HLA-B*51:01M HLA-B*54:01H HLA-B*07:04H
FPLNSIIKTI

SEQ ID NO: 3913 - protein, 10 aa, Severe acute respiratory syndrome coronavirus 2
  REGION 1..10: note = Table A: HLA-A*68:01H HLA-A*66:01H
NSIIKTIQPR

SEQ ID NO: 3914 - protein, 10 aa, Severe acute respiratory syndrome coronavirus 2
  REGION 1..10: note = Table A: HLA-A*03:01H HLA-A*03:02H HLA-A*11:01H HLA-A*11:02H HLA-A*30:01H HLA-A*34:02H HLA-C*07:27H
KTIQPRVEKK

SEQ ID NO: 3915 - protein, 10 aa, Severe acute respiratory syndrome coronavirus 2
  REGION 1..10: note = Table A: HLA-A*74:01M
KLDGFMGRIR

SEQ ID NO: 3916 - protein, 10 aa, Severe acute respiratory syndrome coronavirus 2
  REGION 1..10: note = Table A: HLA-B*51:01H
DGFMGRIRSV

SEQ ID NO: 3917 - protein, 10 aa, Severe acute respiratory syndrome coronavirus 2
  REGION 1..10: note = Table A: HLA-A*30:02H
GFMGRIRSVY

SEQ ID NO: 3918 - protein, 10 aa, Severe acute respiratory syndrome coronavirus 2
  REGION 1..10: note = Table A: HLA-C*15:05M HLA-B*07:05H
SPNECNQMCL

SEQ ID NO: 3919 - protein, 10 aa, Severe acute respiratory syndrome coronavirus 2
  REGION 1..10: note = Table A: HLA-B*44:05H
GETSWQTGDF

SEQ ID NO: 3920 - protein, 10 aa, Severe acute respiratory syndrome coronavirus 2
  REGION 1..10: note = Table A: HLA-A*68:02M
ETSWQTGDFV

SEQ ID NO: 3921 - protein, 10 aa, Severe acute respiratory syndrome coronavirus 2
  REGION 1..10: note = Table A: HLA-A*11:01H HLA-A*36:01H HLA-A*34:02H
TSWQTGDFVK

SEQ ID NO: 3922 - protein, 10 aa, Severe acute respiratory syndrome coronavirus 2
  REGION 1..10: note = Table A: HLA-A*68:02H
QTGDFVKATC

SEQ ID NO: 3923 - protein, 10 aa, Severe acute respiratory syndrome coronavirus 2
  REGION 1..10: note = Table A: HLA-B*27:02H
GYLPQNAVVK

SEQ ID NO: 3924 - protein, 10 aa, Severe acute respiratory syndrome coronavirus 2
  REGION 1..10: note = Table A: HLA-A*02:11H HLA-A*02:05H HLA-A*02:07H HLA-A*02:02H HLA-A*02:03H HLA-A*24:07H HLA-B*38:02H HLA-B*13:02H
YLPQNAVVKI

SEQ ID NO: 3925 - protein, 10 aa, Severe acute respiratory syndrome coronavirus 2
  REGION 1..10: note = Table A: HLA-B*35:01M HLA-B*35:07M HLA-B*07:04H HLA-B*15:11H
LPQNAVVKIY

SEQ ID NO: 3926 - protein, 10 aa, Severe acute respiratory syndrome coronavirus 2
  REGION 1..10: note = Table A: HLA-B*35:02H HLA-C*08:01H HLA-C*08:02H HLA-B*35:12H HLA-B*39:01H
NSEVGPEHSL

SEQ ID NO: 3927 - protein, 10 aa, Severe acute respiratory syndrome coronavirus 2
  REGION 1..10: note = Table A: HLA-B*45:01H HLA-B*49:01H HLA-B*50:01M
SEVGPEHSLA

SEQ ID NO: 3928 - protein, 10 aa, Severe acute respiratory syndrome coronavirus 2
  REGION 1..10: note = Table A: HLA-C*14:03H HLA-B*46:01H HLA-C*03:02H HLA-A*30:02H HLA-C*12:02H HLA-B*15:01H
VGPEHSLAEY

SEQ ID NO: 3929 - protein, 10 aa, Severe acute respiratory syndrome coronavirus 2
  REGION 1..10: note = Table A: HLA-A*02:02H
SLAEYHNESG

SEQ ID NO: 3930 - protein, 10 aa, Severe acute respiratory syndrome coronavirus 2
  REGION 1..10: note = Table A: HLA-B*49:01H
AEYHNESGLK

SEQ ID NO: 3931 - protein, 10 aa, Severe acute respiratory syndrome coronavirus 2
  REGION 1..10: note = Table A: HLA-B*38:01H HLA-B*38:02H HLA-B*15:10H
YHNESGLKTI

SEQ ID NO: 3932 - protein, 10 aa, Severe acute respiratory syndrome coronavirus 2
  REGION 1..10: note = Table A: HLA-B*35:03H HLA-C*08:03H HLA-B*40:01H
HNESGLKTIL

SEQ ID NO: 3933 - protein, 10 aa, Severe acute respiratory syndrome coronavirus 2
  REGION 1..10: note = Table A: HLA-A*68:01H
NESGLKTILR

SEQ ID NO: 3934 - protein, 10 aa, Severe acute respiratory syndrome coronavirus 2
  REGION 1..10: note = Table A: HLA-A*34:02H
ESGLKTILRK

SEQ ID NO: 3935 - protein, 10 aa, Severe acute respiratory syndrome coronavirus 2
  REGION 1..10: note = Table A: HLA-B*58:01H HLA-B*58:02H HLA-B*57:01H HLA-C*15:05H HLA-C*15:02H HLA-B*15:01H HLA-B*57:03H
RTIAFGGCVF

SEQ ID NO: 3936 - protein, 10 aa, Severe acute respiratory syndrome coronavirus 2
  REGION 1..10: note = Table A: HLA-B*35:01H HLA-B*35:07H
IAFGGCVFSY

SEQ ID NO: 3937 - protein, 10 aa, Severe acute respiratory syndrome coronavirus 2
  REGION 1..10: note = Table A: HLA-A*33:03H
HNKCAYWVPR

SEQ ID NO: 3938 - protein, 10 aa, Severe acute respiratory syndrome coronavirus 2
  REGION 1..10: note = Table A: HLA-B*56:01H HLA-B*55:02H HLA-B*54:01M
CAYWVPRASA

SEQ ID NO: 3939 - protein, 10 aa, Severe acute respiratory syndrome coronavirus 2
  REGION 1..10: note = Table A: HLA-B*56:01H HLA-B*55:02H HLA-C*15:05H HLA-B*55:01H HLA-B*07:02H HLA-B*07:04H
VPRASANIGC

SEQ ID NO: 3940 - protein, 10 aa, Severe acute respiratory syndrome coronavirus 2
  REGION 1..10: note = Table A: HLA-B*39:01H
NHTGVVGEGS

SEQ ID NO: 3941 - protein, 10 aa, Severe acute respiratory syndrome coronavirus 2
  REGION 1..10: note = Table A: HLA-A*02:05H HLA-A*02:08M
GVVGEGSEGL

SEQ ID NO: 3942 - protein, 10 aa, Severe acute respiratory syndrome coronavirus 2
  REGION 1..10: note = Table A: HLA-A*02:04H HLA-A*02:02H
GLNDNLLEIL

SEQ ID NO: 3943 - protein, 10 aa, Severe acute respiratory syndrome coronavirus 2
  REGION 1..10: note = Table A: HLA-B*40:02H
KEKVNINIVG

SEQ ID NO: 3944 - protein, 10 aa, Severe acute respiratory syndrome coronavirus 2
  REGION 1..10: note = Table A: HLA-A*30:02H HLA-B*57:03H
KVNINIVGDF

SEQ ID NO: 3945 - protein, 10 aa, Severe acute respiratory syndrome coronavirus 2
  REGION 1..10: note = Table A: HLA-A*36:01H HLA-B*27:02H
VNINIVGDFK

SEQ ID NO: 3946 - protein, 10 aa, Severe acute respiratory syndrome coronavirus 2
  REGION 1..10: note = Table A: HLA-A*02:11H HLA-A*02:04H HLA-A*02:02M
KLNEEIAIIL

SEQ ID NO: 3947 - protein, 10 aa, Severe acute respiratory syndrome coronavirus 2
  REGION 1..10: note = Table A: HLA-B*44:02M HLA-B*44:05H HLA-A*25:01H HLA-A*26:03H HLA-B*44:03H HLA-B*18:01M HLA-A*68:02H HLA-B*40:02H HLA-B*07:05M
EEIAIILASF

SEQ ID NO: 3948 - protein, 10 aa, Severe acute respiratory syndrome coronavirus 2
  REGION 1..10: note = Table A: HLA-B*54:01H
IAIILASFSA

SEQ ID NO: 3949 - protein, 10 aa, Severe acute respiratory syndrome coronavirus 2
  REGION 1..10: note = Table A: HLA-B*46:01H HLA-C*15:05H HLA-B*38:02H HLA-B*15:01M HLA-B*15:03H HLA-B*07:05H HLA-B*57:03H
ASFSASTSAF

SEQ ID NO: 3950 - protein, 10 aa, Severe acute respiratory syndrome coronavirus 2
  REGION 1..10: note = Table A: HLA-A*11:303H HLA-A*03:01H HLA-A*03:02M HLA-A*11:01M HLA-A*11:02M HLA-A*36:01H HLA-B*27:02H HLA-A*30:02H HLA-A*68:01M HLA-A*68:02H HLA-A*34:02M HLA-C*07:27H
STSAFVETVK

SEQ ID NO: 3951 - protein, 10 aa, Severe acute respiratory syndrome coronavirus 2
  REGION 1..10: note = Table A: HLA-A*02:05H
SAFVETVKGL

SEQ ID NO: 3952 - protein, 10 aa, Severe acute respiratory syndrome coronavirus 2
  REGION 1..10: note = Table A: HLA-B*58:01H HLA-A*36:01H HLA-A*26:01H HLA-A*29:01M HLA-A*29:02M HLA-A*01:01H HLA-A*34:02H HLA-B*35:01M HLA-B*38:02H HLA-B*15:02H HLA-B*39:01H
FVETVKGLDY

SEQ ID NO: 3953 - protein, 10 aa, Severe acute respiratory syndrome coronavirus 2
  REGION 1..10: note = Table A: HLA-A*68:02H
ETVKGLDYKA

SEQ ID NO: 3954 - protein, 10 aa, Severe acute respiratory syndrome coronavirus 2
  REGION 1..10: note = Table A: HLA-A*25:01H HLA-A*26:03H HLA-B*07:04H
TVKGLDYKAF

SEQ ID NO: 3955 - protein, 10 aa, Severe acute respiratory syndrome coronavirus 2
  REGION 1..10: note = Table A: HLA-A*02:08H
KAFKQIVESC

SEQ ID NO: 3956 - protein, 10 aa, Severe acute respiratory syndrome coronavirus 2
  REGION 1..10: note = Table A: HLA-B*15:01H HLA-B*13:01H
KQIVESCGNF

SEQ ID NO: 3957 - protein, 10 aa, Severe acute respiratory syndrome coronavirus 2
  REGION 1..10: note = Table A: HLA-A*34:02H
QIVESCGNFK

SEQ ID NO: 3958 - protein, 10 aa, Severe acute respiratory syndrome coronavirus 2
  REGION 1..10: note = Table A: HLA-A*68:01H HLA-A*34:02H
ESCGNFKVTK

SEQ ID NO: 3959 - protein, 10 aa, Severe acute respiratory syndrome coronavirus 2
  REGION 1..10: note = Table A: HLA-A*03:01H HLA-A*03:02M HLA-A*11:01H HLA-A*36:01H HLA-C*06:02H HLA-A*30:02H
KGAWNIGEQK

SEQ ID NO: 3960 - protein, 10 aa, Severe acute respiratory syndrome coronavirus 2
  REGION 1..10: note = Table A: HLA-B*40:01H HLA-B*40:02H
GEQKSILSPL

SEQ ID NO: 3961 - protein, 10 aa, Severe acute respiratory syndrome coronavirus 2
  REGION 1..10: note = Table A: HLA-A*30:02H HLA-B*38:02H
EQKSILSPLY

SEQ ID NO: 3962 - protein, 10 aa, Severe acute respiratory syndrome coronavirus 2
  REGION 1..10: note = Table A: HLA-B*58:01H HLA-B*58:02H HLA-B*57:01H HLA-B*57:03H
KSILSPLYAF

SEQ ID NO: 3963 - protein, 10 aa, Severe acute respiratory syndrome coronavirus 2
  REGION 1..10: note = Table A: HLA-B*56:01H HLA-B*55:02H HLA-C*15:05H HLA-B*55:01H HLA-B*54:01H
SPLYAFASEA

SEQ ID NO: 3964 - protein, 10 aa, Severe acute respiratory syndrome coronavirus 2
  REGION 1..10: note = Table A: HLA-A*68:02H HLA-A*02:05H
YAFASEAARV

SEQ ID NO: 3965 - protein, 10 aa, Severe acute respiratory syndrome coronavirus 2
  REGION 1..10: note = Table A: HLA-A*33:03H HLA-A*68:01M HLA-A*34:01M HLA-A*34:02H HLA-A*66:01M
FASEAARVVR

SEQ ID NO: 3966 - protein, 10 aa, Severe acute respiratory syndrome coronavirus 2
  REGION 1..10: note = Table A: HLA-B*49:01H
SEAARVVRSI

SEQ ID NO: 3967 - protein, 10 aa, Severe acute respiratory syndrome coronavirus 2
  REGION 1..10: note = Table A: HLA-B*53:01H HLA-A*34:01M HLA-A*34:02H HLA-B*35:01H HLA-B*35:07M HLA-B*57:03H
EAARVVRSIF

SEQ ID NO: 3968 - protein, 10 aa, Severe acute respiratory syndrome coronavirus 2
  REGION 1..10: note = Table A: HLA-B*07:04H
VVRSIFSRTL

SEQ ID NO: 3969 - protein, 10 aa, Severe acute respiratory syndrome coronavirus 2
  REGION 1..10: note = Table A: HLA-B*56:01H HLA-A*02:11M HLA-B*55:02H HLA-A*68:02H HLA-B*55:01H HLA-A*02:04H HLA-A*02:05H HLA-A*02:06H HLA-A*02:08H HLA-A*02:01H HLA-A*02:02H HLA-A*02:03H HLA-B*38:02H HLA-B*40:06H HLA-B*54:01H
SIFSRTLETA

SEQ ID NO: 3970 - protein, 10 aa, Severe acute respiratory syndrome coronavirus 2
  REGION 1..10: note = Table A: HLA-A*02:11H HLA-C*15:05H HLA-A*02:06H HLA-A*02:08H HLA-B*57:03H HLA-B*13:02H
RTLETAQNSV

SEQ ID NO: 3971 - protein, 10 aa, Severe acute respiratory syndrome coronavirus 2
  REGION 1..10: note = Table A: HLA-B*49:01H
LETAQNSVRV

SEQ ID NO: 3972 - protein, 10 aa, Severe acute respiratory syndrome coronavirus 2
  REGION 1..10: note = Table A: HLA-A*25:01M HLA-A*26:01H HLA-A*26:02H HLA-A*26:03M HLA-A*68:01H HLA-A*68:02M HLA-A*34:01M HLA-A*34:02H HLA-A*66:01H
ETAQNSVRVL

SEQ ID NO: 3973 - protein, 10 aa, Severe acute respiratory syndrome coronavirus 2
  REGION 1..10: note = Table A: HLA-A*11:303H HLA-A*74:01H HLA-A*03:01M HLA-A*03:02M HLA-A*11:01M HLA-A*11:02M HLA-A*30:01M HLA-A*30:02H HLA-C*07:27H HLA-B*15:01H HLA-B*13:02H
AQNSVRVLQK

SEQ ID NO: 3974 - protein, 10 aa, Severe acute respiratory syndrome coronavirus 2
  REGION 1..10: note = Table A: HLA-B*07:04H
SVRVLQKAAI

SEQ ID NO: 3975 - protein, 10 aa, Severe acute respiratory syndrome coronavirus 2
  REGION 1..10: note = Table A: HLA-B*58:02H HLA-B*57:03H HLA-B*13:02H
RVLQKAAITI

SEQ ID NO: 3976 - protein, 10 aa, Severe acute respiratory syndrome coronavirus 2
  REGION 1..10: note = Table A: HLA-B*58:01H HLA-A*36:01M HLA-B*57:01H HLA-A*25:01H HLA-B*46:01H HLA-A*26:01M HLA-A*26:02H HLA-A*26:03H HLA-A*01:01H HLA-A*30:02M HLA-B*35:01H HLA-B*38:02H HLA-B*15:01M HLA-B*57:03H
ITILDGISQY

SEQ ID NO: 3977 - protein, 10 aa, Severe acute respiratory syndrome coronavirus 2
  REGION 1..10: note = Table A: HLA-A*02:11H HLA-A*02:04H HLA-A*02:07M HLA-A*02:01H HLA-A*02:02H HLA-C*08:02H HLA-B*38:02H
ILDGISQYSL

SEQ ID NO: 3978 - protein, 10 aa, Severe acute respiratory syndrome coronavirus 2
  REGION 1..10: note = Table A: HLA-A*02:05H HLA-A*02:08H HLA-A*02:03H HLA-B*39:06H
SQYSLRLIDA

SEQ ID NO: 3979 - protein, 10 aa, Severe acute respiratory syndrome coronavirus 2
  REGION 1..10: note = Table A: HLA-A*68:01H HLA-A*68:02M HLA-A*02:05H HLA-A*02:02M HLA-A*34:01H HLA-B*38:02H HLA-A*66:01H
FTSDLATNNL

SEQ ID NO: 3980 - protein, 10 aa, Severe acute respiratory syndrome coronavirus 2
  REGION 1..10: note = Table A: HLA-A*01:01H
TSDLATNNLV

SEQ ID NO: 3981 - protein, 10 aa, Severe acute respiratory syndrome coronavirus 2
  REGION 1..10: note = Table A: HLA-A*26:02H HLA-B*38:02H HLA-B*15:02H
DLATNNLVVM

SEQ ID NO: 3982 - protein, 10 aa, Severe acute respiratory syndrome coronavirus 2
  REGION 1..10: note = Table A: HLA-A*03:01H HLA-A*03:02H HLA-A*11:01M HLA-A*11:02H HLA-A*36:01H HLA-A*26:01H HLA-A*29:01H HLA-A*30:02M HLA-B*15:01H
ATNNLVVMAY

SEQ ID NO: 3983 - protein, 10 aa, Severe acute respiratory syndrome coronavirus 2
  REGION 1..10: note = Table A: HLA-C*14:02M HLA-C*14:03H HLA-A*02:08H HLA-A*24:02H HLA-A*24:07M HLA-C*08:01H HLA-A*23:01H HLA-B*39:01H
AYITGGVVQL

SEQ ID NO: 3984 - protein, 10 aa, Severe acute respiratory syndrome coronavirus 2
  REGION 1..10: note = Table A: HLA-A*68:02H HLA-C*08:03H
YITGGVVQLT

SEQ ID NO: 3985 - protein, 10 aa, Severe acute respiratory syndrome coronavirus 2
  REGION 1..10: note = Table A: HLA-B*38:02H
WLTNIFGTVY

SEQ ID NO: 3986 - protein, 10 aa, Severe acute respiratory syndrome coronavirus 2
  REGION 1..10: note = Table A: HLA-A*68:02H HLA-A*02:05H HLA-A*02:02H
NIFGTVYEKL

SEQ ID NO: 3987 - protein, 10 aa, Severe acute respiratory syndrome coronavirus 2
  REGION 1..10: note = Table A: HLA-A*02:11H
TVYEKLKPVL

SEQ ID NO: 3988 - protein, 10 aa, Severe acute respiratory syndrome coronavirus 2
  REGION 1..10: note = Table A: HLA-B*44:05H
EEKFKEGVEF

SEQ ID NO: 3989 - protein, 10 aa, Severe acute respiratory syndrome coronavirus 2
  REGION 1..10: note = Table A: HLA-A*74:01M HLA-A*31:01H
KFKEGVEFLR

SEQ ID NO: 3990 - protein, 10 aa, Severe acute respiratory syndrome coronavirus 2
  REGION 1..10: note = Table A: HLA-B*50:01H
WEIVKFISTC

SEQ ID NO: 3991 - protein, 10 aa, Severe acute respiratory syndrome coronavirus 2
  REGION 1..10: note = Table A: HLA-B*40:02H HLA-B*41:02H
CEIVGGQIVT

SEQ ID NO: 3992 - protein, 10 aa, Severe acute respiratory syndrome coronavirus 2
  REGION 1..10: note = Table A: HLA-A*25:01H HLA-A*26:01H HLA-A*26:02M HLA-A*26:03M HLA-A*68:02H HLA-A*02:08H HLA-A*34:01H HLA-B*38:02H
EIVGGQIVTC

SEQ ID NO: 3993 - protein, 10 aa, Severe acute respiratory syndrome coronavirus 2
  REGION 1..10: note = Table A: HLA-A*02:08M
IVGGQIVTCA

SEQ ID NO: 3994 - protein, 10 aa, Severe acute respiratory syndrome coronavirus 2
  REGION 1..10: note = Table A: HLA-B*58:01H HLA-B*44:02M HLA-B*44:05H HLA-C*16:04H HLA-B*45:01H HLA-B*44:03H HLA-B*27:02M HLA-A*23:01H HLA-B*40:01H HLA-B*40:02H HLA-B*40:06H HLA-B*15:01H HLA-B*15:03H HLA-B*07:05H HLA-B*41:02M HLA-B*57:03M
  REGION 1..10: note = CONT. FROM ABOVE: HLA-B*13:01H HLA-B*49:01M HLA-B*50:01H
KEIKESVQTF

SEQ ID NO: 3995 - protein, 10 aa, Severe acute respiratory syndrome coronavirus 2
  REGION 1..10: note = Table A: HLA-A*25:01H HLA-A*26:01H HLA-A*26:02H HLA-A*26:03H HLA-A*34:01H HLA-A*34:02H HLA-A*66:01H
EIKESVQTFF

SEQ ID NO: 3996 - protein, 10 aa, Severe acute respiratory syndrome coronavirus 2
  REGION 1..10: note = Table A: HLA-A*68:02H
ESVQTFFKLV

SEQ ID NO: 3997 - protein, 10 aa, Severe acute respiratory syndrome coronavirus 2
  REGION 1..10: note = Table A: HLA-B*57:03H
QTFFKLVNKF

SEQ ID NO: 3998 - protein, 10 aa, Severe acute respiratory syndrome coronavirus 2
  REGION 1..10: note = Table A: HLA-A*36:01H HLA-B*27:02H
ADSIIIGGAK

SEQ ID NO: 3999 - protein, 10 aa, Severe acute respiratory syndrome coronavirus 2
  REGION 1..10: note = Table A: HLA-B*44:05H HLA-A*25:01H HLA-A*33:03H HLA-A*26:01H HLA-A*26:03M HLA-A*68:01M HLA-A*68:02M HLA-C*15:05H HLA-A*34:01H HLA-A*34:02H HLA-C*08:03H HLA-B*07:05H HLA-A*66:01M
DSIIIGGAKL

SEQ ID NO: 4000 - protein, 10 aa, Severe acute respiratory syndrome coronavirus 2
  REGION 1..10: note = Table A: HLA-A*03:02H HLA-A*11:01H HLA-A*11:02H HLA-A*30:01H HLA-A*34:02H
SIIIGGAKLK

SEQ ID NO: 4001 - protein, 10 aa, Severe acute respiratory syndrome coronavirus 2
  REGION 1..10: note = Table A: HLA-B*07:04H
IIGGAKLKAL

SEQ ID NO: 4002 - protein, 10 aa, Severe acute respiratory syndrome coronavirus 2
  REGION 1..10: note = Table A: HLA-B*15:03H
LKALNLGETF

SEQ ID NO: 4003 - protein, 10 aa, Severe acute respiratory syndrome coronavirus 2
  REGION 1..10: note = Table A: HLA-A*02:11H HLA-A*02:06H HLA-B*57:03H
KALNLGETFV

SEQ ID NO: 4004 - protein, 10 aa, Severe acute respiratory syndrome coronavirus 2
  REGION 1..10: note = Table A: HLA-A*26:03H HLA-A*68:01H HLA-A*68:02M HLA-A*34:01M HLA-A*34:02M HLA-A*66:01M
ETFVTHSKGL

SEQ ID NO: 4005 - protein, 10 aa, Severe acute respiratory syndrome coronavirus 2
  REGION 1..10: note = Table A: HLA-A*29:02M HLA-A*30:02M
TFVTHSKGLY

SEQ ID NO: 4006 - protein, 10 aa, Severe acute respiratory syndrome coronavirus 2
  REGION 1..10: note = Table A: HLA-A*33:03H HLA-A*26:03H HLA-A*34:01M HLA-A*34:02H HLA-A*66:01M
FVTHSKGLYR

SEQ ID NO: 4007 - protein, 10 aa, Severe acute respiratory syndrome coronavirus 2
  REGION 1..10: note = Table A: HLA-A*11:01H HLA-A*11:02H HLA-A*34:02H
VTHSKGLYRK

SEQ ID NO: 4008 - protein, 10 aa, Severe acute respiratory syndrome coronavirus 2
  REGION 1..10: note = Table A: HLA-B*58:01H HLA-B*58:02M HLA-A*36:01H HLA-B*57:01H HLA-A*30:01H HLA-C*15:05H HLA-C*15:02H HLA-B*57:03H
KSREETGLLM

SEQ ID NO: 4009 - protein, 10 aa, Severe acute respiratory syndrome coronavirus 2
  REGION 1..10: note = Table A: HLA-B*40:01M
REETGLLMPL

SEQ ID NO: 4010 - protein, 10 aa, Severe acute respiratory syndrome coronavirus 2
  REGION 1..10: note = Table A: HLA-B*53:01H HLA-B*51:01H
MPLKAPKEII

SEQ ID NO: 4011 - protein, 10 aa, Severe acute respiratory syndrome coronavirus 2
  REGION 1..10: note = Table A: HLA-B*56:01H HLA-B*55:02H HLA-B*55:01H HLA-B*54:01H
APKEIIFLEG

SEQ ID NO: 4012 - protein, 10 aa, Severe acute respiratory syndrome coronavirus 2
  REGION 1..10: note = Table A: HLA-A*68:02M HLA-B*38:01H HLA-B*39:01H
EIIFLEGETL

SEQ ID NO: 4013 - protein, 10 aa, Severe acute respiratory syndrome coronavirus 2
  REGION 1..10: note = Table A: HLA-B*55:02H HLA-B*54:01H
LPTEVLTEEV

SEQ ID NO: 4014 - protein, 10 aa, Severe acute respiratory syndrome coronavirus 2
  REGION 1..10: note = Table A: HLA-B*44:05H HLA-B*40:01M HLA-B*40:02H
TEVLTEEVVL

SEQ ID NO: 4015 - protein, 10 aa, Severe acute respiratory syndrome coronavirus 2
  REGION 1..10: note = Table A: HLA-A*68:01H HLA-A*34:02M
EVLTEEVVLK

SEQ ID NO: 4016 - protein, 10 aa, Severe acute respiratory syndrome coronavirus 2
  REGION 1..10: note = Table A: HLA-B*44:05H
EEVVLKTGDL

SEQ ID NO: 4017 - protein, 10 aa, Severe acute respiratory syndrome coronavirus 2
  REGION 1..10: note = Table A: HLA-A*02:02H HLA-A*02:03H HLA-B*38:02H
VLKTGDLQPL

SEQ ID NO: 4018 - protein, 10 aa, Severe acute respiratory syndrome coronavirus 2
  REGION 1..10: note = Table A: HLA-C*08:03H
GDLQPLEQPT

SEQ ID NO: 4019 - protein, 10 aa, Severe acute respiratory syndrome coronavirus 2
  REGION 1..10: note = Table A: HLA-B*56:01H HLA-B*55:02M HLA-C*15:05H HLA-B*55:01H HLA-B*54:01H
QPLEQPTSEA

SEQ ID NO: 4020 - protein, 10 aa, Severe acute respiratory syndrome coronavirus 2
  REGION 1..10: note = Table A: HLA-A*68:02H
PTSEAVEAPL

SEQ ID NO: 4021 - protein, 10 aa, Severe acute respiratory syndrome coronavirus 2
  REGION 1..10: note = Table A: HLA-B*44:05H HLA-B*45:01H HLA-A*68:02H HLA-C*08:03H HLA-B*40:01H HLA-B*40:02M HLA-B*40:06H HLA-B*07:05H HLA-B*41:02H HLA-B*49:01M HLA-B*50:01M
VEAPLVGTPV

SEQ ID NO: 4022 - protein, 10 aa, Severe acute respiratory syndrome coronavirus 2
  REGION 1..10: note = Table A: HLA-B*55:02H HLA-C*15:05M HLA-B*07:05H
APLVGTPVCI

SEQ ID NO: 4023 - protein, 10 aa, Severe acute respiratory syndrome coronavirus 2
  REGION 1..10: note = Table A: HLA-B*27:02H HLA-A*34:02H
MLLEIKDTEK

SEQ ID NO: 4024 - protein, 10 aa, Severe acute respiratory syndrome coronavirus 2
  REGION 1..10: note = Table A: HLA-A*36:01H HLA-A*01:01M
LLEIKDTEKY

SEQ ID NO: 4025 - protein, 10 aa, Severe acute respiratory syndrome coronavirus 2
  REGION 1..10: note = Table A: HLA-B*38:02H
MMVTNNTFTL

SEQ ID NO: 4026 - protein, 10 aa, Severe acute respiratory syndrome coronavirus 2
  REGION 1..10: note = Table A: HLA-A*11:303H HLA-A*03:01H HLA-A*03:02H HLA-A*11:01M HLA-A*11:02H HLA-A*36:01H HLA-A*68:01M HLA-A*68:02H HLA-A*34:01H HLA-A*34:02H HLA-A*66:01H
MVTNNTFTLK

SEQ ID NO: 4027 - protein, 10 aa, Severe acute respiratory syndrome coronavirus 2
  REGION 1..10: note = Table A: HLA-A*11:01H HLA-A*36:01H HLA-A*34:02H
VTNNTFTLKG

SEQ ID NO: 4028 - protein, 10 aa, Severe acute respiratory syndrome coronavirus 2
  REGION 1..10: note = Table A: HLA-A*11:01H HLA-A*11:02H HLA-A*34:02M
FTLKGGAPTK

SEQ ID NO: 4029 - protein, 10 aa, Severe acute respiratory syndrome coronavirus 2
  REGION 1..10: note = Table A: HLA-A*02:02H HLA-A*02:03M HLA-B*38:02H
TLKGGAPTKV

SEQ ID NO: 4030 - protein, 10 aa, Severe acute respiratory syndrome coronavirus 2
  REGION 1..10: note = Table A: HLA-B*57:03M
KGGAPTKVTF

SEQ ID NO: 4031 - protein, 10 aa, Severe acute respiratory syndrome coronavirus 2
  REGION 1..10: note = Table A: HLA-A*34:02M
DTVIEVQGYK

SEQ ID NO: 4032 - protein, 10 aa, Severe acute respiratory syndrome coronavirus 2
  REGION 1..10: note = Table A: HLA-B*57:03M
QGYKSVNITF

SEQ ID NO: 4033 - protein, 10 aa, Severe acute respiratory syndrome coronavirus 2
  REGION 1..10: note = Table A: HLA-B*49:01H
FELDERIDKV

SEQ ID NO: 4034 - protein, 10 aa, Severe acute respiratory syndrome coronavirus 2
  REGION 1..10: note = Table A: HLA-A*34:02H
ERIDKVLNEK

SEQ ID NO: 4035 - protein, 10 aa, Severe acute respiratory syndrome coronavirus 2
  REGION 1..10: note = Table A: HLA-A*30:02H HLA-B*15:01H
KVLNEKCSAY

SEQ ID NO: 4036 - protein, 10 aa, Severe acute respiratory syndrome coronavirus 2
  REGION 1..10: note = Table A: HLA-B*44:02M HLA-B*44:05H HLA-C*16:04H HLA-B*44:03M HLA-B*18:01H HLA-B*27:02H HLA-A*24:02H HLA-A*23:01M HLA-B*40:01H HLA-B*40:02H HLA-B*39:01H HLA-B*07:05H HLA-B*41:02H
VELGTEVNEF

SEQ ID NO: 4037 - protein, 10 aa, Severe acute respiratory syndrome coronavirus 2
  REGION 1..10: note = Table A: HLA-B*49:01H
TEVNEFACVV

SEQ ID NO: 4038 - protein, 10 aa, Severe acute respiratory syndrome coronavirus 2
  REGION 1..10: note = Table A: HLA-A*11:303H HLA-A*25:01M HLA-A*26:02H HLA-A*26:03H HLA-A*02:11H HLA-A*68:01H HLA-A*68:02M HLA-C*15:05H HLA-A*02:04H HLA-A*02:05H HLA-A*02:06M HLA-A*02:08H HLA-A*02:01H HLA-A*02:02M HLA-A*02:03M
  REGION 1..10: note = CONT. FROM ABOVE: HLA-C*08:01H HLA-B*38:02H HLA-B*07:04H HLA- B*57:03H
VVADAVIKTL

SEQ ID NO: 4039 - protein, 10 aa, Severe acute respiratory syndrome coronavirus 2
  REGION 1..10: note = Table A: HLA-B*58:02H HLA-A*02:08H HLA-B*57:03H
KTLQPVSELL

SEQ ID NO: 4040 - protein, 10 aa, Severe acute respiratory syndrome coronavirus 2
  REGION 1..10: note = Table A: HLA-B*35:03H HLA-C*15:05H HLA-B*35:01H HLA-B*35:07H
QPVSELLTPL

SEQ ID NO: 4041 - protein, 10 aa, Severe acute respiratory syndrome coronavirus 2
  REGION 1..10: note = Table A: HLA-B*27:02H HLA-B*53:01H HLA-B*35:03H HLA-B*35:01H HLA-B*35:02H HLA-B*35:08M HLA-B*35:07H HLA-C*08:01H HLA-B*35:12H HLA-B*38:02H
TPLGIDLDEW

SEQ ID NO: 4042 - protein, 10 aa, Severe acute respiratory syndrome coronavirus 2
  REGION 1..10: note = Table A: HLA-B*38:02H
DLDEWSMATY

SEQ ID NO: 4043 - protein, 10 aa, Severe acute respiratory syndrome coronavirus 2
  REGION 1..10: note = Table A: HLA-C*14:02H HLA-C*14:03H HLA-A*29:02H HLA-B*27:02H HLA-A*24:02H HLA-C*08:01H HLA-A*23:01H
YYLFDESGEF

SEQ ID NO: 4044 - protein, 10 aa, Severe acute respiratory syndrome coronavirus 2
  REGION 1..10: note = Table A: HLA-A*36:01H HLA-B*27:02M HLA-A*02:05H HLA-A*02:02H HLA-A*34:01H HLA-A*34:02H HLA-B*38:02H
YLFDESGEFK

SEQ ID NO: 4045 - protein, 10 aa, Severe acute respiratory syndrome coronavirus 2
  REGION 1..10: note = Table A: HLA-C*04:01H HLA-C*04:03M HLA-A*02:07H HLA-C*08:01H HLA-B*38:02H
LFDESGEFKL

SEQ ID NO: 4046 - protein, 10 aa, Severe acute respiratory syndrome coronavirus 2
  REGION 1..10: note = Table A: HLA-B*44:02H HLA-B*44:05H HLA-B*44:03H HLA-B*18:01H HLA-A*30:02H HLA-B*40:02H
GEFKLASHMY

SEQ ID NO: 4047 - protein, 10 aa, Severe acute respiratory syndrome coronavirus 2
  REGION 1..10: note = Table A: HLA-B*44:03H
EEEFEPSTQY

SEQ ID NO: 4048 - protein, 10 aa, Severe acute respiratory syndrome coronavirus 2
  REGION 1..10: note = Table A: HLA-A*29:01H HLA-A*29:02H HLA-B*39:01H
EFEPSTQYEY

SEQ ID NO: 4049 - protein, 10 aa, Severe acute respiratory syndrome coronavirus 2
  REGION 1..10: note = Table A: HLA-B*39:01H
QYEYGTEDDY

SEQ ID NO: 4050 - protein, 10 aa, Severe acute respiratory syndrome coronavirus 2
  REGION 1..10: note = Table A: HLA-B*44:05H HLA-B*40:01H HLA-B*40:02H HLA-B*41:02H
TEDDYQGKPL

SEQ ID NO: 4051 - protein, 10 aa, Severe acute respiratory syndrome coronavirus 2
  REGION 1..10: note = Table A: HLA-A*25:01H HLA-A*33:01H HLA-A*26:01H HLA-A*26:02H HLA-A*26:03H HLA-B*18:01M HLA-B*27:02H HLA-A*68:02H HLA-B*14:02H HLA-C*08:03H HLA-B*38:02H HLA-B*39:01H HLA-B*07:05H
DDYQGKPLEF

SEQ ID NO: 4052 - protein, 10 aa, Severe acute respiratory syndrome coronavirus 2
  REGION 1..10: note = Table A: HLA-B*56:01H HLA-B*55:02H HLA-C*15:05M HLA-B*55:01H HLA-A*02:08H HLA-B*39:06M HLA-B*40:06H HLA-B*54:01H HLA-B*07:02H HLA-B*07:05M HLA-B*50:01M
KPLEFGATSA

SEQ ID NO: 4053 - protein, 10 aa, Severe acute respiratory syndrome coronavirus 2
  REGION 1..10: note = Table A: HLA-B*40:01H
LEFGATSAAL

SEQ ID NO: 4054 - protein, 10 aa, Severe acute respiratory syndrome coronavirus 2
  REGION 1..10: note = Table A: HLA-B*53:01H
QPEEEQEEDW

SEQ ID NO: 4055 - protein, 10 aa, Severe acute respiratory syndrome coronavirus 2
  REGION 1..10: note = Table A: HLA-A*02:07H HLA-A*02:01M HLA-C*08:02H HLA-B*38:02H
WLDDDSQQTV

SEQ ID NO: 4056 - protein, 10 aa, Severe acute respiratory syndrome coronavirus 2
  REGION 1..10: note = Table A: HLA-A*68:02H
TTTIQTIVEV

SEQ ID NO: 4057 - protein, 10 aa, Severe acute respiratory syndrome coronavirus 2
  REGION 1..10: note = Table A: HLA-A*02:05H HLA-A*02:06H HLA-A*02:08H HLA-B*57:03M
QTIVEVQPQL

SEQ ID NO: 4058 - protein, 10 aa, Severe acute respiratory syndrome coronavirus 2
  REGION 1..10: note = Table A: HLA-B*44:05H HLA-B*49:01M
MELTPVVQTI

SEQ ID NO: 4059 - protein, 10 aa, Severe acute respiratory syndrome coronavirus 2
  REGION 1..10: note = Table A: HLA-B*15:01H
VVQTIEVNSF

SEQ ID NO: 4060 - protein, 10 aa, Severe acute respiratory syndrome coronavirus 2
  REGION 1..10: note = Table A: HLA-A*36:01H HLA-A*01:01H
TIEVNSFSGY

SEQ ID NO: 4061 - protein, 10 aa, Severe acute respiratory syndrome coronavirus 2
  REGION 1..10: note = Table A: HLA-B*49:01H
IEVNSFSGYL

SEQ ID NO: 4062 - protein, 10 aa, Severe acute respiratory syndrome coronavirus 2
  REGION 1..10: note = Table A: HLA-A*03:02M HLA-A*11:01H HLA-A*11:02H HLA-A*36:01H HLA-A*33:01H HLA-A*33:03M HLA-A*26:03H HLA-B*27:02H HLA-A*68:01M HLA-A*68:02H HLA-A*34:01M HLA-A*34:02H HLA-A*66:01H
EVNSFSGYLK

SEQ ID NO: 4063 - protein, 10 aa, Severe acute respiratory syndrome coronavirus 2
  REGION 1..10: note = Table A: HLA-B*27:02H HLA-A*30:02H
GYLKLTDNVY

SEQ ID NO: 4064 - protein, 10 aa, Severe acute respiratory syndrome coronavirus 2
  REGION 1..10: note = Table A: HLA-A*03:02H HLA-B*27:02H
KNADIVEEAK

SEQ ID NO: 4065 - protein, 10 aa, Severe acute respiratory syndrome coronavirus 2
  REGION 1..10: note = Table A: HLA-B*56:01H HLA-B*55:02M HLA-A*30:01M HLA-B*55:01M HLA-A*02:05M HLA-A*02:08H HLA-A*02:02H HLA-A*02:03H HLA-B*07:04H HLA-A*31:01H
KVKPTVVVNA

SEQ ID NO: 4066 - protein, 10 aa, Severe acute respiratory syndrome coronavirus 2
  REGION 1..10: note = Table A: HLA-B*35:01H HLA-B*38:02H HLA-B*15:02M
TVVVNAANVY

SEQ ID NO: 4067 - protein, 10 aa, Severe acute respiratory syndrome coronavirus 2
  REGION 1..10: note = Table A: HLA-A*02:08H
VVVNAANVYL

SEQ ID NO: 4068 - protein, 10 aa, Severe acute respiratory syndrome coronavirus 2
  REGION 1..10: note = Table A: HLA-A*11:303H HLA-A*03:01H HLA-A*03:02H HLA-A*11:01M HLA-A*11:02M HLA-A*36:01H HLA-A*34:02H HLA-C*07:27H
VVNAANVYLK

SEQ ID NO: 4069 - protein, 10 aa, Severe acute respiratory syndrome coronavirus 2
  REGION 1..10: note = Table A: HLA-B*38:02H HLA-B*39:01H
KHGGGVAGAL

SEQ ID NO: 4070 - protein, 10 aa, Severe acute respiratory syndrome coronavirus 2
  REGION 1..10: note = Table A: HLA-A*03:02H HLA-A*36:01H HLA-B*27:02H
GGGVAGALNK

SEQ ID NO: 4071 - protein, 10 aa, Severe acute respiratory syndrome coronavirus 2
  REGION 1..10: note = Table A: HLA-A*02:05H
GGVAGALNKA

SEQ ID NO: 4072 - protein, 10 aa, Severe acute respiratory syndrome coronavirus 2
  REGION 1..10: note = Table A: HLA-C*08:03H
GVAGALNKAT

SEQ ID NO: 4073 - protein, 10 aa, Severe acute respiratory syndrome coronavirus 2
  REGION 1..10: note = Table A: HLA-A*11:303H HLA-C*15:05H HLA-A*02:02M HLA-B*38:02H HLA-B*15:01M HLA-B*15:02H
ALNKATNNAM

SEQ ID NO: 4074 - protein, 10 aa, Severe acute respiratory syndrome coronavirus 2
  REGION 1..10: note = Table A: HLA-A*11:01H
ATNNAMQVES

SEQ ID NO: 4075 - protein, 10 aa, Severe acute respiratory syndrome coronavirus 2
  REGION 1..10: note = Table A: HLA-B*35:01M HLA-B*35:08M HLA-B*35:07H HLA-B*39:01H
NAMQVESDDY

SEQ ID NO: 4076 - protein, 10 aa, Severe acute respiratory syndrome coronavirus 2
  REGION 1..10: note = Table A: HLA-B*35:02H
MQVESDDYIA

SEQ ID NO: 4077 - protein, 10 aa, Severe acute respiratory syndrome coronavirus 2
  REGION 1..10: note = Table A: HLA-A*11:01H HLA-A*36:01H HLA-A*33:01H HLA-A*33:03H HLA-A*34:02H
DYIATNGPLK

SEQ ID NO: 4078 - protein, 10 aa, Severe acute respiratory syndrome coronavirus 2
  REGION 1..10: note = Table A: HLA-A*02:11H HLA-A*68:02H HLA-A*02:05H HLA-A*02:02H HLA-A*02:03M HLA-B*38:02H HLA-B*13:02H
YIATNGPLKV

SEQ ID NO: 4079 - protein, 10 aa, Severe acute respiratory syndrome coronavirus 2
  REGION 1..10: note = Table A: HLA-A*74:01H HLA-A*11:01H HLA-A*68:01H HLA-A*31:01H
ATNGPLKVGG

SEQ ID NO: 4080 - protein, 10 aa, Severe acute respiratory syndrome coronavirus 2
  REGION 1..10: note = Table A: HLA-C*15:05M HLA-B*07:05H
GPLKVGGSCV

SEQ ID NO: 4081 - protein, 10 aa, Severe acute respiratory syndrome coronavirus 2
  REGION 1..10: note = Table A: HLA-C*08:03H
GSCVLSGHNL

SEQ ID NO: 4082 - protein, 10 aa, Severe acute respiratory syndrome coronavirus 2
  REGION 1..10: note = Table A: HLA-A*03:01H HLA-A*03:02H HLA-A*11:01H HLA-A*11:02M HLA-A*34:02H
CVLSGHNLAK

SEQ ID NO: 4083 - protein, 10 aa, Severe acute respiratory syndrome coronavirus 2
  REGION 1..10: note = Table A: HLA-A*26:03H HLA-A*68:01H HLA-A*02:08H HLA-A*34:01H
HVVGPNVNKG

SEQ ID NO: 4084 - protein, 10 aa, Severe acute respiratory syndrome coronavirus 2
  REGION 1..10: note = Table A: HLA-A*02:08H HLA-B*35:02H HLA-B*35:12H
NVNKGEDIQL

SEQ ID NO: 4085 - protein, 10 aa, Severe acute respiratory syndrome coronavirus 2
  REGION 1..10: note = Table A: HLA-B*45:01H HLA-B*50:01M
GEDIQLLKSA

SEQ ID NO: 4086 - protein, 10 aa, Severe acute respiratory syndrome coronavirus 2
  REGION 1..10: note = Table A: HLA-B*44:02H HLA-B*44:03H HLA-B*18:01H HLA-B*35:01H
EDIQLLKSAY

SEQ ID NO: 4087 - protein, 10 aa, Severe acute respiratory syndrome coronavirus 2
  REGION 1..10: note = Table A: HLA-B*45:01H HLA-C*08:03H HLA-B*39:01H
AYENFNQHEV

SEQ ID NO: 4088 - protein, 10 aa, Severe acute respiratory syndrome coronavirus 2
  REGION 1..10: note = Table A: HLA-B*44:05H HLA-B*40:01M HLA-B*40:02M HLA-B*41:02H HLA-B*49:01H
YENFNQHEVL

SEQ ID NO: 4089 - protein, 10 aa, Severe acute respiratory syndrome coronavirus 2
  REGION 1..10: note = Table A: HLA-A*68:02M
ENFNQHEVLL

SEQ ID NO: 4090 - protein, 10 aa, Severe acute respiratory syndrome coronavirus 2
  REGION 1..10: note = Table A: HLA-B*38:01M HLA-B*38:02H HLA-B*39:01H HLA-B*15:10H
QHEVLLAPLL

SEQ ID NO: 4091 - protein, 10 aa, Severe acute respiratory syndrome coronavirus 2
  REGION 1..10: note = Table A: HLA-B*54:01H
EVLLAPLLSA

SEQ ID NO: 4092 - protein, 10 aa, Severe acute respiratory syndrome coronavirus 2
  REGION 1..10: note = Table A: HLA-A*02:11H HLA-A*02:02H
LLAPLLSAGI

SEQ ID NO: 4093 - protein, 10 aa, Severe acute respiratory syndrome coronavirus 2
  REGION 1..10: note = Table A: HLA-C*14:02H HLA-C*14:03H
IFGADPIHSL

SEQ ID NO: 4094 - protein, 10 aa, Severe acute respiratory syndrome coronavirus 2
  REGION 1..10: note = Table A: HLA-A*33:03H HLA-A*68:01H HLA-A*68:02H HLA-A*34:01M HLA-A*34:02H HLA-A*66:01M
FGADPIHSLR

SEQ ID NO: 4095 - protein, 10 aa, Severe acute respiratory syndrome coronavirus 2
  REGION 1..10: note = Table A: HLA-A*36:01H HLA-A*01:01H
CVDTVRTNVY

SEQ ID NO: 4096 - protein, 10 aa, Severe acute respiratory syndrome coronavirus 2
  REGION 1..10: note = Table A: HLA-A*68:02H
DTVRTNVYLA

SEQ ID NO: 4097 - protein, 10 aa, Severe acute respiratory syndrome coronavirus 2
  REGION 1..10: note = Table A: HLA-A*36:01H HLA-A*29:02H HLA-B*38:02H HLA-B*15:01H HLA-B*15:02H
YLAVFDKNLY

SEQ ID NO: 4098 - protein, 10 aa, Severe acute respiratory syndrome coronavirus 2
  REGION 1..10: note = Table A: HLA-A*11:303H HLA-A*03:01H HLA-A*03:02H HLA-A*11:01M HLA-A*11:02H HLA-A*30:02H HLA-A*34:02H HLA-C*07:27H
AVFDKNLYDK

SEQ ID NO: 4099 - protein, 10 aa, Severe acute respiratory syndrome coronavirus 2
  REGION 1..10: note = Table A: HLA-C*04:01H HLA-C*04:03H
VFDKNLYDKL

SEQ ID NO: 4100 - protein, 10 aa, Severe acute respiratory syndrome coronavirus 2
  REGION 1..10: note = Table A: HLA-A*25:01M HLA-B*46:01H HLA-A*26:01H HLA-A*26:02H HLA-A*02:02H HLA-A*02:03H HLA-B*38:02M HLA-B*15:02M
NLYDKLVSSF

SEQ ID NO: 4101 - protein, 10 aa, Severe acute respiratory syndrome coronavirus 2
  REGION 1..10: note = Table A: HLA-C*04:03H
LYDKLVSSFL

SEQ ID NO: 4102 - protein, 10 aa, Severe acute respiratory syndrome coronavirus 2
  REGION 1..10: note = Table A: HLA-A*36:01H
KLVSSFLEMK

SEQ ID NO: 4103 - protein, 10 aa, Severe acute respiratory syndrome coronavirus 2
  REGION 1..10: note = Table A: HLA-A*11:01H HLA-A*11:02H
SSFLEMKSEK

SEQ ID NO: 4104 - protein, 10 aa, Severe acute respiratory syndrome coronavirus 2
  REGION 1..10: note = Table A: HLA-B*57:03H
KSEKQVEQKI

SEQ ID NO: 4105 - protein, 10 aa, Severe acute respiratory syndrome coronavirus 2
  REGION 1..10: note = Table A: HLA-B*45:01H HLA-B*40:06H HLA-B*41:02H
SEKQVEQKIA

SEQ ID NO: 4106 - protein, 10 aa, Severe acute respiratory syndrome coronavirus 2
  REGION 1..10: note = Table A: HLA-A*02:11H HLA-A*02:05H HLA-A*02:06H HLA-A*02:08M HLA-B*38:02H HLA-B*13:01H HLA-B*13:02M
KQVEQKIAEI

SEQ ID NO: 4107 - protein, 10 aa, Severe acute respiratory syndrome coronavirus 2
  REGION 1..10: note = Table A: HLA-A*02:11H HLA-A*68:02H HLA-A*02:05M HLA-A*02:06H HLA-A*02:07H HLA-A*02:08M HLA-A*02:01M HLA-A*02:02H HLA-A*02:03H HLA-C*08:01H HLA-C*08:03H HLA-B*38:02H HLA-B*13:02M
KIAEIPKEEV

SEQ ID NO: 4108 - protein, 10 aa, Severe acute respiratory syndrome coronavirus 2
  REGION 1..10: note = Table A: HLA-B*45:01M HLA-B*40:06H HLA-B*50:01H
AEIPKEEVKP

SEQ ID NO: 4109 - protein, 10 aa, Severe acute respiratory syndrome coronavirus 2
  REGION 1..10: note = Table A: HLA-A*25:01H HLA-A*26:03H
EIPKEEVKPF

SEQ ID NO: 4110 - protein, 10 aa, Severe acute respiratory syndrome coronavirus 2
  REGION 1..10: note = Table A: HLA-B*07:04H
IPKEEVKPFI

SEQ ID NO: 4111 - protein, 10 aa, Severe acute respiratory syndrome coronavirus 2
  REGION 1..10: note = Table A: HLA-A*33:03H HLA-A*26:03H HLA-A*68:01H HLA-A*34:01H HLA-A*34:02H HLA-A*66:01M
EVKPFITESK

SEQ ID NO: 4112 - protein, 10 aa, Severe acute respiratory syndrome coronavirus 2
  REGION 1..10: note = Table A: HLA-A*11:303H HLA-C*08:01H HLA-B*38:02H
ACVEEVTTTL

SEQ ID NO: 4113 - protein, 10 aa, Severe acute respiratory syndrome coronavirus 2
  REGION 1..10: note = Table A: HLA-B*27:02H HLA-A*68:01H HLA-A*68:02H HLA-A*34:02H
EVTTTLEETK

SEQ ID NO: 4114 - protein, 10 aa, Severe acute respiratory syndrome coronavirus 2
  REGION 1..10: note = Table A: HLA-B*58:01H HLA-B*57:01H HLA-B*57:03M
VTTTLEETKF

SEQ ID NO: 4115 - protein, 10 aa, Severe acute respiratory syndrome coronavirus 2
  REGION 1..10: note = Table A: HLA-B*44:05H
EETKFLTENL

SEQ ID NO: 4116 - protein, 10 aa, Severe acute respiratory syndrome coronavirus 2
  REGION 1..10: note = Table A: HLA-A*68:02H
ETKFLTENLL

SEQ ID NO: 4117 - protein, 10 aa, Severe acute respiratory syndrome coronavirus 2
  REGION 1..10: note = Table A: HLA-A*36:01H HLA-A*29:02M
KFLTENLLLY

SEQ ID NO: 4118 - protein, 10 aa, Severe acute respiratory syndrome coronavirus 2
  REGION 1..10: note = Table A: HLA-A*02:04M HLA-A*02:01H
FLTENLLLYI

SEQ ID NO: 4119 - protein, 10 aa, Severe acute respiratory syndrome coronavirus 2
  REGION 1..10: note = Table A: HLA-A*02:02H
LLYIDINGNL

SEQ ID NO: 4120 - protein, 10 aa, Severe acute respiratory syndrome coronavirus 2
  REGION 1..10: note = Table A: HLA-C*14:03H HLA-A*23:01H
LYIDINGNLH

SEQ ID NO: 4121 - protein, 10 aa, Severe acute respiratory syndrome coronavirus 2
  REGION 1..10: note = Table A: HLA-A*02:02H HLA-B*38:02H
NLHPDSATLV

SEQ ID NO: 4122 - protein, 10 aa, Severe acute respiratory syndrome coronavirus 2
  REGION 1..10: note = Table A: HLA-B*35:01H HLA-B*38:02H HLA-B*13:01H
TLVSDIDITF

SEQ ID NO: 4123 - protein, 10 aa, Severe acute respiratory syndrome coronavirus 2
  REGION 1..10: note = Table A: HLA-A*02:11H HLA-A*68:02M HLA-A*02:04M HLA-A*02:05M HLA-A*02:07H HLA-A*02:08H HLA-A*02:02M
LVSDIDITFL

SEQ ID NO: 4124 - protein, 10 aa, Severe acute respiratory syndrome coronavirus 2
  REGION 1..10: note = Table A: HLA-A*36:01H
VSDIDITFLK

SEQ ID NO: 4125 - protein, 10 aa, Severe acute respiratory syndrome coronavirus 2
  REGION 1..10: note = Table A: HLA-A*24:07H
TFLKKDAPYI

SEQ ID NO: 4126 - protein, 10 aa, Severe acute respiratory syndrome coronavirus 2
  REGION 1..10: note = Table A: HLA-A*02:02H
FLKKDAPYIV

SEQ ID NO: 4127 - protein, 10 aa, Severe acute respiratory syndrome coronavirus 2
  REGION 1..10: note = Table A: HLA-A*68:02M HLA-B*51:01H
DAPYIVGDVV

SEQ ID NO: 4128 - protein, 10 aa, Severe acute respiratory syndrome coronavirus 2
  REGION 1..10: note = Table A: HLA-A*68:02H
IVGDVVQEGV

SEQ ID NO: 4129 - protein, 10 aa, Severe acute respiratory syndrome coronavirus 2
  REGION 1..10: note = Table A: HLA-A*26:03H
DVVQEGVLTA

SEQ ID NO: 4130 - protein, 10 aa, Severe acute respiratory syndrome coronavirus 2
  REGION 1..10: note = Table A: HLA-A*11:303H HLA-A*03:02H HLA-A*02:11M HLA-A*68:02H HLA-C*15:05H HLA-A*02:04M HLA-A*02:05M HLA-A*02:06M HLA-A*02:07H HLA-A*02:08M HLA-B*14:01H HLA-A*02:01H HLA-A*02:02H HLA-A*02:03M HLA-B*38:02M
  REGION 1..10: note = CONT. FROM ABOVE: HLA-B*13:02H
VVQEGVLTAV

SEQ ID NO: 4131 - protein, 10 aa, Severe acute respiratory syndrome coronavirus 2
  REGION 1..10: note = Table A: HLA-C*08:03H
GVLTAVVIPT

SEQ ID NO: 4132 - protein, 10 aa, Severe acute respiratory syndrome coronavirus 2
  REGION 1..10: note = Table A: HLA-A*03:01H HLA-A*03:02H HLA-A*11:01H HLA-A*11:02H HLA-B*27:02H HLA-A*23:01H
VLTAVVIPTK

SEQ ID NO: 4133 - protein, 10 aa, Severe acute respiratory syndrome coronavirus 2
  REGION 1..10: note = Table A: HLA-A*03:01H HLA-A*03:02H HLA-A*11:01H HLA-A*11:02H HLA-A*36:01H HLA-A*68:01M HLA-A*34:02M
LTAVVIPTKK

SEQ ID NO: 4134 - protein, 10 aa, Severe acute respiratory syndrome coronavirus 2
  REGION 1..10: note = Table A: HLA-B*54:01H
TAVVIPTKKA

SEQ ID NO: 4135 - protein, 10 aa, Severe acute respiratory syndrome coronavirus 2
  REGION 1..10: note = Table A: HLA-A*11:01H HLA-A*36:01H
AGGTTEMLAK

SEQ ID NO: 4136 - protein, 10 aa, Severe acute respiratory syndrome coronavirus 2
  REGION 1..10: note = Table A: HLA-A*68:01H
TTEMLAKALR

SEQ ID NO: 4137 - protein, 10 aa, Severe acute respiratory syndrome coronavirus 2
  REGION 1..10: note = Table A: HLA-A*30:02M HLA-B*38:02H HLA-B*15:01M HLA-B*15:02H HLA-B*15:03H
ALRKVPTDNY

SEQ ID NO: 4138 - protein, 10 aa, Severe acute respiratory syndrome coronavirus 2
  REGION 1..10: note = Table A: HLA-B*38:02H
LRKVPTDNYI

SEQ ID NO: 4139 - protein, 10 aa, Severe acute respiratory syndrome coronavirus 2
  REGION 1..10: note = Table A: HLA-A*02:08H
KVPTDNYITT

SEQ ID NO: 4140 - protein, 10 aa, Severe acute respiratory syndrome coronavirus 2
  REGION 1..10: note = Table A: HLA-B*56:01H HLA-B*27:02H HLA-B*53:01H HLA-B*55:02H HLA-C*15:05H HLA-B*35:01H HLA-B*35:08M HLA-B*35:07H HLA-B*38:02H HLA-B*15:02H HLA-B*07:05H HLA-B*15:11M
VPTDNYITTY

SEQ ID NO: 4141 - protein, 10 aa, Severe acute respiratory syndrome coronavirus 2
  REGION 1..10: note = Table A: HLA-C*03:04H HLA-C*08:03H
YITTYPGQGL

SEQ ID NO: 4142 - protein, 10 aa, Severe acute respiratory syndrome coronavirus 2
  REGION 1..10: note = Table A: HLA-A*34:02H HLA-A*66:01H
TTYPGQGLNG

SEQ ID NO: 4143 - protein, 10 aa, Severe acute respiratory syndrome coronavirus 2
  REGION 1..10: note = Table A: HLA-C*14:02H HLA-C*14:03H
TYPGQGLNGY

SEQ ID NO: 4144 - protein, 10 aa, Severe acute respiratory syndrome coronavirus 2
  REGION 1..10: note = Table A: HLA-A*11:303H HLA-C*03:03H HLA-C*03:02H HLA-C*03:04M HLA-A*68:02M HLA-B*35:03M HLA-C*15:05H HLA-C*12:03H HLA-A*02:05H HLA-A*02:06H HLA-A*02:08H HLA-A*02:02H HLA-B*35:01H HLA-B*35:02H HLA-C*17:01H
  REGION 1..10: note = CONT. FROM ABOVE: HLA-C*08:01M HLA-C*08:03H HLA-B*35:12H HLA- B*38:02M HLA-B*40:01H HLA-B*39:01H HLA-B*57:03H HLA-A*66:01H
YTVEEAKTVL

SEQ ID NO: 4145 - protein, 10 aa, Severe acute respiratory syndrome coronavirus 2
  REGION 1..10: note = Table A: HLA-A*11:303M HLA-A*03:01M HLA-A*03:02H HLA-A*11:01H HLA-A*11:02H HLA-A*36:01M HLA-A*26:03H HLA-B*27:02H HLA-A*30:02H HLA-A*68:01H HLA-A*68:02H HLA-A*34:01H HLA-A*34:02H HLA-C*07:27H HLA-A*66:01H
TVEEAKTVLK

SEQ ID NO: 4146 - protein, 10 aa, Severe acute respiratory syndrome coronavirus 2
  REGION 1..10: note = Table A: HLA-B*58:02H HLA-B*57:03M
KSAFYILPSI

SEQ ID NO: 4147 - protein, 10 aa, Severe acute respiratory syndrome coronavirus 2
  REGION 1..10: note = Table A: HLA-A*68:02H HLA-C*12:03H
SAFYILPSII

SEQ ID NO: 4148 - protein, 10 aa, Severe acute respiratory syndrome coronavirus 2
  REGION 1..10: note = Table A: HLA-A*03:02H
ILPSIISNEK

SEQ ID NO: 4149 - protein, 10 aa, Severe acute respiratory syndrome coronavirus 2
  REGION 1..10: note = Table A: HLA-B*38:02H
SIISNEKQEI

SEQ ID NO: 4150 - protein, 10 aa, Severe acute respiratory syndrome coronavirus 2
  REGION 1..10: note = Table A: HLA-B*58:01M HLA-B*44:02H HLA-B*44:05H HLA-B*57:01H HLA-B*44:03H HLA-B*27:02H HLA-B*38:02H HLA-A*32:01H HLA-B*57:03M HLA-B*13:01H
KQEILGTVSW

SEQ ID NO: 4151 - protein, 10 aa, Severe acute respiratory syndrome coronavirus 2
  REGION 1..10: note = Table A: HLA-A*68:02H
EILGTVSWNL

SEQ ID NO: 4152 - protein, 10 aa, Severe acute respiratory syndrome coronavirus 2
  REGION 1..10: note = Table A: HLA-B*38:02H
AHAEETRKLM

SEQ ID NO: 4153 - protein, 10 aa, Severe acute respiratory syndrome coronavirus 2
  REGION 1..10: note = Table A: HLA-B*45:01H
AEETRKLMPV

SEQ ID NO: 4154 - protein, 10 aa, Severe acute respiratory syndrome coronavirus 2
  REGION 1..10: note = Table A: HLA-A*03:01H HLA-A*03:02M
KLMPVCVETK

SEQ ID NO: 4155 - protein, 10 aa, Severe acute respiratory syndrome coronavirus 2
  REGION 1..10: note = Table A: HLA-B*54:01H
MPVCVETKAI

SEQ ID NO: 4156 - protein, 10 aa, Severe acute respiratory syndrome coronavirus 2
  REGION 1..10: note = Table A: HLA-B*44:05H HLA-B*40:02H HLA-B*49:01M
VETKAIVSTI

SEQ ID NO: 4157 - protein, 10 aa, Severe acute respiratory syndrome coronavirus 2
  REGION 1..10: note = Table A: HLA-A*30:02M
AIVSTIQRKY

SEQ ID NO: 4158 - protein, 10 aa, Severe acute respiratory syndrome coronavirus 2
  REGION 1..10: note = Table A: HLA-A*30:01H
IVSTIQRKYK

SEQ ID NO: 4159 - protein, 10 aa, Severe acute respiratory syndrome coronavirus 2
  REGION 1..10: note = Table A: HLA-B*15:03M
IKIQEGVVDY

SEQ ID NO: 4160 - protein, 10 aa, Severe acute respiratory syndrome coronavirus 2
  REGION 1..10: note = Table A: HLA-A*02:11H HLA-A*30:02H HLA-A*02:08H
KIQEGVVDYG

SEQ ID NO: 4161 - protein, 10 aa, Severe acute respiratory syndrome coronavirus 2
  REGION 1..10: note = Table A: HLA-A*30:02H
GVVDYGARFY

SEQ ID NO: 4162 - protein, 10 aa, Severe acute respiratory syndrome coronavirus 2
  REGION 1..10: note = Table A: HLA-A*36:01H HLA-C*04:03H
VVDYGARFYF

SEQ ID NO: 4163 - protein, 10 aa, Severe acute respiratory syndrome coronavirus 2
  REGION 1..10: note = Table A: HLA-C*14:02H HLA-C*14:03M
FYFYTSKTTV

SEQ ID NO: 4164 - protein, 10 aa, Severe acute respiratory syndrome coronavirus 2
  REGION 1..10: note = Table A: HLA-C*14:02H HLA-C*14:03M
YFYTSKTTVA

SEQ ID NO: 4165 - protein, 10 aa, Severe acute respiratory syndrome coronavirus 2
  REGION 1..10: note = Table A: HLA-A*68:02H HLA-A*02:08H
YTSKTTVASL

SEQ ID NO: 4166 - protein, 10 aa, Severe acute respiratory syndrome coronavirus 2
  REGION 1..10: note = Table A: HLA-A*68:01H HLA-A*68:02M HLA-A*02:08H HLA-B*57:03H
TTVASLINTL

SEQ ID NO: 4167 - protein, 10 aa, Severe acute respiratory syndrome coronavirus 2
  REGION 1..10: note = Table A: HLA-A*02:02H HLA-A*02:03H HLA-B*38:02H
TLNDLNETLV

SEQ ID NO: 4168 - protein, 10 aa, Severe acute respiratory syndrome coronavirus 2
  REGION 1..10: note = Table A: HLA-A*36:01H HLA-A*25:01H HLA-A*26:01M HLA-A*26:02H HLA-A*26:03H HLA-A*29:02H HLA-A*01:01H HLA-A*34:02M
ETLVTMPLGY

SEQ ID NO: 4169 - protein, 10 aa, Severe acute respiratory syndrome coronavirus 2
  REGION 1..10: note = Table A: HLA-A*11:01H HLA-A*11:02H HLA-B*57:01H HLA-A*34:02H HLA-B*57:03H
VTMPLGYVTH

SEQ ID NO: 4170 - protein, 10 aa, Severe acute respiratory syndrome coronavirus 2
  REGION 1..10: note = Table A: HLA-B*42:01H HLA-B*53:01H HLA-B*35:03M HLA-C*15:05M HLA-A*34:01H HLA-B*35:01H HLA-B*35:07H HLA-B*54:01H HLA-B*07:02H HLA-B*07:04H HLA-B*07:05H
MPLGYVTHGL

SEQ ID NO: 4171 - protein, 10 aa, Severe acute respiratory syndrome coronavirus 2
  REGION 1..10: note = Table A: HLA-A*02:08H
VTHGLNLEEA

SEQ ID NO: 4172 - protein, 10 aa, Severe acute respiratory syndrome coronavirus 2
  REGION 1..10: note = Table A: HLA-A*30:02H HLA-B*15:01M
GLNLEEAARY

SEQ ID NO: 4173 - protein, 10 aa, Severe acute respiratory syndrome coronavirus 2
  REGION 1..10: note = Table A: HLA-A*34:02H
EAARYMRSLK

SEQ ID NO: 4174 - protein, 10 aa, Severe acute respiratory syndrome coronavirus 2
  REGION 1..10: note = Table A: HLA-B*55:02H
RYMRSLKVPA

SEQ ID NO: 4175 - protein, 10 aa, Severe acute respiratory syndrome coronavirus 2
  REGION 1..10: note = Table A: HLA-B*08:01H HLA-A*02:02H HLA-A*02:03M HLA-B*38:02M HLA-B*07:02H HLA-B*07:04H
SLKVPATVSV

SEQ ID NO: 4176 - protein, 10 aa, Severe acute respiratory syndrome coronavirus 2
  REGION 1..10: note = Table A: HLA-B*58:01H HLA-A*36:01M HLA-B*57:01H HLA-B*46:01H HLA-A*01:01M HLA-A*30:02H HLA-B*35:01H HLA-B*38:02H HLA-B*15:01M HLA-B*39:01H HLA-B*57:03H HLA-B*15:11H
VSSPDAVTAY

SEQ ID NO: 4177 - protein, 10 aa, Severe acute respiratory syndrome coronavirus 2
  REGION 1..10: note = Table A: HLA-A*03:01H HLA-A*68:01H HLA-A*68:02H HLA-A*02:05H HLA-A*34:02H HLA-B*38:02H HLA-B*54:01H
TAYNGYLTSS

SEQ ID NO: 4178 - protein, 10 aa, Severe acute respiratory syndrome coronavirus 2
  REGION 1..10: note = Table A: HLA-A*02:05H HLA-A*02:06H HLA-A*02:08M HLA-B*57:03H
KTPEEHFIET

SEQ ID NO: 4179 - protein, 10 aa, Severe acute respiratory syndrome coronavirus 2
  REGION 1..10: note = Table A: HLA-C*15:05H HLA-B*38:02H
TPEEHFIETI

SEQ ID NO: 4180 - protein, 10 aa, Severe acute respiratory syndrome coronavirus 2
  REGION 1..10: note = Table A: HLA-B*44:05H HLA-B*40:01H HLA-B*40:02H
EEHFIETISL

SEQ ID NO: 4181 - protein, 10 aa, Severe acute respiratory syndrome coronavirus 2
  REGION 1..10: note = Table A: HLA-C*14:03H
HFIETISLAG

SEQ ID NO: 4182 - protein, 10 aa, Severe acute respiratory syndrome coronavirus 2
  REGION 1..10: note = Table A: HLA-A*33:03H HLA-A*26:03M HLA-A*68:01M HLA-A*68:02H HLA-A*34:01M HLA-A*34:02H HLA-A*66:01H
ETISLAGSYK

SEQ ID NO: 4183 - protein, 10 aa, Severe acute respiratory syndrome coronavirus 2
  REGION 1..10: note = Table A: HLA-B*57:01H
ISLAGSYKDW

SEQ ID NO: 4184 - protein, 10 aa, Severe acute respiratory syndrome coronavirus 2
  REGION 1..10: note = Table A: HLA-A*68:02H HLA-C*15:05H HLA-C*17:01H HLA-B*38:02H
WSYSGQSTQL

SEQ ID NO: 4185 - protein, 10 aa, Severe acute respiratory syndrome coronavirus 2
  REGION 1..10: note = Table A: HLA-B*27:02H HLA-B*15:01M HLA-B*15:03H
GQSTQLGIEF

SEQ ID NO: 4186 - protein, 10 aa, Severe acute respiratory syndrome coronavirus 2
  REGION 1..10: note = Table A: HLA-A*68:02H
QSTQLGIEFL

SEQ ID NO: 4187 - protein, 10 aa, Severe acute respiratory syndrome coronavirus 2
  REGION 1..10: note = Table A: HLA-A*11:303M HLA-A*03:02M HLA-A*11:01H HLA-A*11:02H HLA-A*36:01H HLA-A*30:02H HLA-A*68:02H HLA-A*34:02H HLA-C*07:27H
STQLGIEFLK

SEQ ID NO: 4188 - protein, 10 aa, Severe acute respiratory syndrome coronavirus 2
  REGION 1..10: note = Table A: HLA-B*38:02H HLA-B*15:01H HLA-B*15:02H
FLKRGDKSVY

SEQ ID NO: 4189 - protein, 10 aa, Severe acute respiratory syndrome coronavirus 2
  REGION 1..10: note = Table A: HLA-B*15:03H
LKRGDKSVYY

SEQ ID NO: 4190 - protein, 10 aa, Severe acute respiratory syndrome coronavirus 2
  REGION 1..10: note = Table A: HLA-C*14:02H HLA-C*14:03H HLA-B*46:01H HLA-A*29:01H HLA-A*29:02H HLA-C*07:02H HLA-B*27:02H HLA-C*15:05H HLA-A*24:02H HLA-A*24:07H HLA-C*08:01H HLA-A*23:01H HLA-B*39:01H HLA-B*07:05H
VYYTSNPTTF

SEQ ID NO: 4191 - protein, 10 aa, Severe acute respiratory syndrome coronavirus 2
  REGION 1..10: note = Table A: HLA-A*68:02H HLA-A*02:05H HLA-A*02:08H HLA-A*02:02H HLA-A*34:02H HLA-A*66:01H
YTSNPTTFHL

SEQ ID NO: 4192 - protein, 10 aa, Severe acute respiratory syndrome coronavirus 2
  REGION 1..10: note = Table A: HLA-A*68:02H
TTFHLDGEVI

SEQ ID NO: 4193 - protein, 10 aa, Severe acute respiratory syndrome coronavirus 2
  REGION 1..10: note = Table A: HLA-B*38:01M HLA-B*38:02H HLA-B*39:01H HLA-B*15:10M
FHLDGEVITF

SEQ ID NO: 4194 - protein, 10 aa, Severe acute respiratory syndrome coronavirus 2
  REGION 1..10: note = Table A: HLA-A*26:03H HLA-A*68:02H
EVITFDNLKT

SEQ ID NO: 4195 - protein, 10 aa, Severe acute respiratory syndrome coronavirus 2
  REGION 1..10: note = Table A: HLA-A*02:11H HLA-A*68:02H HLA-A*02:05H HLA-A*02:08H HLA-A*02:02H HLA-B*57:03M
ITFDNLKTLL

SEQ ID NO: 4196 - protein, 10 aa, Severe acute respiratory syndrome coronavirus 2
  REGION 1..10: note = Table A: HLA-A*33:01H
DNLKTLLSLR

SEQ ID NO: 4197 - protein, 10 aa, Severe acute respiratory syndrome coronavirus 2
  REGION 1..10: note = Table A: HLA-A*74:01H
KTLLSLREVR

SEQ ID NO: 4198 - protein, 10 aa, Severe acute respiratory syndrome coronavirus 2
  REGION 1..10: note = Table A: HLA-A*24:07H HLA-A*23:01H
VFTTVDNINL

SEQ ID NO: 4199 - protein, 10 aa, Severe acute respiratory syndrome coronavirus 2
  REGION 1..10: note = Table A: HLA-A*68:02H
TTVDNINLHT

SEQ ID NO: 4200 - protein, 10 aa, Severe acute respiratory syndrome coronavirus 2
  REGION 1..10: note = Table A: HLA-A*68:02H
DNINLHTQVV

SEQ ID NO: 4201 - protein, 10 aa, Severe acute respiratory syndrome coronavirus 2
  REGION 1..10: note = Table A: HLA-B*38:02H
LHTQVVDMSM

SEQ ID NO: 4202 - protein, 10 aa, Severe acute respiratory syndrome coronavirus 2
  REGION 1..10: note = Table A: HLA-B*27:02M HLA-A*30:02H HLA-B*35:01H HLA-B*38:02M HLA-B*15:01M HLA-B*15:02M HLA-B*15:03M HLA-B*39:01H
TQVVDMSMTY

SEQ ID NO: 4203 - protein, 10 aa, Severe acute respiratory syndrome coronavirus 2
  REGION 1..10: note = Table A: HLA-A*68:02H HLA-A*34:02H HLA-C*08:03H
MTYGQQFGPT

SEQ ID NO: 4204 - protein, 10 aa, Severe acute respiratory syndrome coronavirus 2
  REGION 1..10: note = Table A: HLA-A*29:02H HLA-A*30:02H
TYGQQFGPTY

SEQ ID NO: 4205 - protein, 10 aa, Severe acute respiratory syndrome coronavirus 2
  REGION 1..10: note = Table A: HLA-B*39:01H
YGQQFGPTYL

SEQ ID NO: 4206 - protein, 10 aa, Severe acute respiratory syndrome coronavirus 2
  REGION 1..10: note = Table A: HLA-B*39:01H
QQFGPTYLDG

SEQ ID NO: 4207 - protein, 10 aa, Severe acute respiratory syndrome coronavirus 2
  REGION 1..10: note = Table A: HLA-B*27:02H HLA-A*23:01H
TYLDGADVTK

SEQ ID NO: 4208 - protein, 10 aa, Severe acute respiratory syndrome coronavirus 2
  REGION 1..10: note = Table A: HLA-A*02:07H HLA-B*38:02H HLA-B*13:01H
YLDGADVTKI

SEQ ID NO: 4209 - protein, 10 aa, Severe acute respiratory syndrome coronavirus 2
  REGION 1..10: note = Table A: HLA-A*68:01H HLA-A*68:02H
DGADVTKIKP

SEQ ID NO: 4210 - protein, 10 aa, Severe acute respiratory syndrome coronavirus 2
  REGION 1..10: note = Table A: HLA-B*38:01H HLA-B*38:02H HLA-B*15:10H
SHEGKTFYVL

SEQ ID NO: 4211 - protein, 10 aa, Severe acute respiratory syndrome coronavirus 2
  REGION 1..10: note = Table A: HLA-C*08:01H HLA-B*39:01H
FYVLPNDDTL

SEQ ID NO: 4212 - protein, 10 aa, Severe acute respiratory syndrome coronavirus 2
  REGION 1..10: note = Table A: HLA-A*34:01H HLA-A*66:01H
YVLPNDDTLR

SEQ ID NO: 4213 - protein, 10 aa, Severe acute respiratory syndrome coronavirus 2
  REGION 1..10: note = Table A: HLA-A*02:07H
VLPNDDTLRV

SEQ ID NO: 4214 - protein, 10 aa, Severe acute respiratory syndrome coronavirus 2
  REGION 1..10: note = Table A: HLA-B*38:02M HLA-B*15:02H
TLRVEAFEYY

SEQ ID NO: 4215 - protein, 10 aa, Severe acute respiratory syndrome coronavirus 2
  REGION 1..10: note = Table A: HLA-A*24:02H HLA-A*24:07H HLA-A*23:01H
EYYHTTDPSF

SEQ ID NO: 4216 - protein, 10 aa, Severe acute respiratory syndrome coronavirus 2
  REGION 1..10: note = Table A: HLA-C*14:02M HLA-C*14:03H HLA-A*29:02H HLA-C*04:03H HLA-A*24:02H HLA-A*24:07M HLA-A*23:01H
YYHTTDPSFL

SEQ ID NO: 4217 - protein, 10 aa, Severe acute respiratory syndrome coronavirus 2
  REGION 1..10: note = Table A: HLA-A*11:303H HLA-A*74:01H HLA-A*03:01H HLA-A*11:01M HLA-A*11:02H HLA-A*36:01H HLA-A*33:01M HLA-A*33:03H HLA-A*26:01H HLA-A*26:03H HLA-A*68:01H HLA-A*68:02H HLA-A*34:01H HLA-A*34:02H HLA-C*07:27H
  REGION 1..10: note = CONT. FROM ABOVE: HLA-A*31:01H HLA-A*66:01H
HTTDPSFLGR

SEQ ID NO: 4218 - protein, 10 aa, Severe acute respiratory syndrome coronavirus 2
  REGION 1..10: note = Table A: HLA-B*58:01H HLA-A*36:01H HLA-A*26:01H HLA-A*29:02H HLA-A*01:01H HLA-C*04:03H HLA-A*30:02M HLA-A*34:02M
TTDPSFLGRY

SEQ ID NO: 4219 - protein, 10 aa, Severe acute respiratory syndrome coronavirus 2
  REGION 1..10: note = Table A: HLA-C*14:02H HLA-C*14:03H
SFLGRYMSAL

SEQ ID NO: 4220 - protein, 10 aa, Severe acute respiratory syndrome coronavirus 2
  REGION 1..10: note = Table A: HLA-A*30:02H
RYMSALNHTK

SEQ ID NO: 4221 - protein, 10 aa, Severe acute respiratory syndrome coronavirus 2
  REGION 1..10: note = Table A: HLA-A*30:02H
ALNHTKKWKY

SEQ ID NO: 4222 - protein, 10 aa, Severe acute respiratory syndrome coronavirus 2
  REGION 1..10: note = Table A: HLA-B*56:01H HLA-B*55:02H HLA-B*35:03H HLA-C*15:05M HLA-B*55:01H HLA-B*51:01M HLA-B*38:02H HLA-B*54:01H HLA-B*07:02H HLA-B*07:05H
YPQVNGLTSI

SEQ ID NO: 4223 - protein, 10 aa, Severe acute respiratory syndrome coronavirus 2
  REGION 1..10: note = Table A: HLA-B*58:01H HLA-B*57:01H HLA-A*25:01H HLA-B*53:01M HLA-B*15:13H HLA-A*32:01H HLA-B*57:03M
QVNGLTSIKW

SEQ ID NO: 4224 - protein, 10 aa, Severe acute respiratory syndrome coronavirus 2
  REGION 1..10: note = Table A: HLA-A*24:02H HLA-A*23:01H
CYLATALLTL

SEQ ID NO: 4225 - protein, 10 aa, Severe acute respiratory syndrome coronavirus 2
  REGION 1..10: note = Table A: HLA-A*68:02H
ATALLTLQQI

SEQ ID NO: 4226 - protein, 10 aa, Severe acute respiratory syndrome coronavirus 2
  REGION 1..10: note = Table A: HLA-A*02:11H HLA-A*02:04M HLA-A*02:01M HLA-A*02:02H
ALLTLQQIEL

SEQ ID NO: 4227 - protein, 10 aa, Severe acute respiratory syndrome coronavirus 2
  REGION 1..10: note = Table A: HLA-B*57:01H HLA-A*29:02H HLA-B*57:03M
LTLQQIELKF

SEQ ID NO: 4228 - protein, 10 aa, Severe acute respiratory syndrome coronavirus 2
  REGION 1..10: note = Table A: HLA-B*45:01H HLA-B*40:06H HLA-B*50:01M
QQIELKFNPP

SEQ ID NO: 4229 - protein, 10 aa, Severe acute respiratory syndrome coronavirus 2
  REGION 1..10: note = Table A: HLA-B*40:01M HLA-B*40:02M HLA-B*40:06H HLA-B*41:02H HLA-B*49:01H
IELKFNPPAL

SEQ ID NO: 4230 - protein, 10 aa, Severe acute respiratory syndrome coronavirus 2
  REGION 1..10: note = Table A: HLA-A*29:02H HLA-B*39:01H
FNPPALQDAY

SEQ ID NO: 4231 - protein, 10 aa, Severe acute respiratory syndrome coronavirus 2
  REGION 1..10: note = Table A: HLA-B*35:01M HLA-B*35:08H
NPPALQDAYY

SEQ ID NO: 4232 - protein, 10 aa, Severe acute respiratory syndrome coronavirus 2
  REGION 1..10: note = Table A: HLA-A*74:01M
ALQDAYYRAR

SEQ ID NO: 4233 - protein, 10 aa, Severe acute respiratory syndrome coronavirus 2
  REGION 1..10: note = Table A: HLA-B*57:03M
RARAGEAANF

SEQ ID NO: 4234 - protein, 10 aa, Severe acute respiratory syndrome coronavirus 2
  REGION 1..10: note = Table A: HLA-B*49:01H
GEAANFCALI

SEQ ID NO: 4235 - protein, 10 aa, Severe acute respiratory syndrome coronavirus 2
  REGION 1..10: note = Table A: HLA-A*74:01H HLA-A*36:01H HLA-A*30:02H
KTVGELGDVR

SEQ ID NO: 4236 - protein, 10 aa, Severe acute respiratory syndrome coronavirus 2
  REGION 1..10: note = Table A: HLA-B*44:05M HLA-B*44:03H HLA-B*40:01M HLA-B*40:02M HLA-B*41:02M HLA-B*49:01H
GELGDVRETM

SEQ ID NO: 4237 - protein, 10 aa, Severe acute respiratory syndrome coronavirus 2
  REGION 1..10: note = Table A: HLA-A*36:01H
LGDVRETMSY

SEQ ID NO: 4238 - protein, 10 aa, Severe acute respiratory syndrome coronavirus 2
  REGION 1..10: note = Table A: HLA-A*68:02M HLA-A*34:02H
ETMSYLFQHA

SEQ ID NO: 4239 - protein, 10 aa, Severe acute respiratory syndrome coronavirus 2
  REGION 1..10: note = Table A: HLA-C*15:05M HLA-A*02:08M HLA-C*08:03H HLA-B*57:03M
KTCGQQQTTL

SEQ ID NO: 4240 - protein, 10 aa, Severe acute respiratory syndrome coronavirus 2
  REGION 1..10: note = Table A: HLA-B*13:02H
GQQQTTLKGV

SEQ ID NO: 4241 - protein, 10 aa, Severe acute respiratory syndrome coronavirus 2
  REGION 1..10: note = Table A: HLA-B*39:06H
QQTTLKGVEA

SEQ ID NO: 4242 - protein, 10 aa, Severe acute respiratory syndrome coronavirus 2
  REGION 1..10: note = Table A: HLA-B*35:03H HLA-B*57:03H
TTLKGVEAVM

SEQ ID NO: 4243 - protein, 10 aa, Severe acute respiratory syndrome coronavirus 2
  REGION 1..10: note = Table A: HLA-B*46:01H HLA-A*30:02H HLA-B*38:02M HLA-B*15:01H HLA-B*15:02H HLA-B*15:11H
TLKGVEAVMY

SEQ ID NO: 4244 - protein, 10 aa, Severe acute respiratory syndrome coronavirus 2
  REGION 1..10: note = Table A: HLA-B*40:01H
VEAVMYMGTL

SEQ ID NO: 4245 - protein, 10 aa, Severe acute respiratory syndrome coronavirus 2
  REGION 1..10: note = Table A: HLA-A*11:01H HLA-A*11:02H HLA-A*29:01H HLA-A*29:02H HLA-A*30:02H HLA-B*15:01H
AVMYMGTLSY

SEQ ID NO: 4246 - protein, 10 aa, Severe acute respiratory syndrome coronavirus 2
  REGION 1..10: note = Table A: HLA-B*38:02H
YMGTLSYEQF

SEQ ID NO: 4247 - protein, 10 aa, Severe acute respiratory syndrome coronavirus 2
  REGION 1..10: note = Table A: HLA-A*36:01H
MGTLSYEQFK

SEQ ID NO: 4248 - protein, 10 aa, Severe acute respiratory syndrome coronavirus 2
  REGION 1..10: note = Table A: HLA-A*11:303M HLA-A*03:01H HLA-A*03:02M HLA-A*11:01H HLA-A*11:02H HLA-A*36:01H HLA-A*30:02H HLA-A*34:02H HLA-C*07:27M
GTLSYEQFKK

SEQ ID NO: 4249 - protein, 10 aa, Severe acute respiratory syndrome coronavirus 2
  REGION 1..10: note = Table A: HLA-B*49:01H
YEQFKKGVQI

SEQ ID NO: 4250 - protein, 10 aa, Severe acute respiratory syndrome coronavirus 2
  REGION 1..10: note = Table A: HLA-A*03:02H
GVQIPCTCGK

SEQ ID NO: 4251 - protein, 10 aa, Severe acute respiratory syndrome coronavirus 2
  REGION 1..10: note = Table A: HLA-C*14:03H HLA-A*23:01H
KYLVQQESPF

SEQ ID NO: 4252 - protein, 10 aa, Severe acute respiratory syndrome coronavirus 2
  REGION 1..10: note = Table A: HLA-A*02:04H HLA-A*02:01H HLA-A*02:02H HLA-A*02:03H HLA-B*38:02H
YLVQQESPFV

SEQ ID NO: 4253 - protein, 10 aa, Severe acute respiratory syndrome coronavirus 2
  REGION 1..10: note = Table A: HLA-B*45:01H HLA-B*40:06H HLA-B*50:01H
QESPFVMMSA

SEQ ID NO: 4254 - protein, 10 aa, Severe acute respiratory syndrome coronavirus 2
  REGION 1..10: note = Table A: HLA-A*03:02H HLA-A*29:01M HLA-A*29:02M HLA-A*30:02M HLA-B*38:02H HLA-B*15:01H HLA-B*07:05H
VMMSAPPAQY

SEQ ID NO: 4255 - protein, 10 aa, Severe acute respiratory syndrome coronavirus 2
  REGION 1..10: note = Table A: HLA-C*03:04H HLA-A*68:02M HLA-B*35:03H HLA-A*02:08H HLA-C*08:01H HLA-C*08:03H HLA-B*38:02H HLA-B*39:01H HLA-B*57:03H
MSAPPAQYEL

SEQ ID NO: 4256 - protein, 10 aa, Severe acute respiratory syndrome coronavirus 2
  REGION 1..10: note = Table A: HLA-A*36:01H
SAPPAQYELK

SEQ ID NO: 4257 - protein, 10 aa, Severe acute respiratory syndrome coronavirus 2
  REGION 1..10: note = Table A: HLA-B*38:02H HLA-B*15:01M HLA-B*15:03M
AQYELKHGTF

SEQ ID NO: 4258 - protein, 10 aa, Severe acute respiratory syndrome coronavirus 2
  REGION 1..10: note = Table A: HLA-B*44:05H HLA-B*45:01M HLA-A*68:02H HLA-A*02:05H HLA-C*08:03H HLA-B*38:02H HLA-B*40:01H HLA-B*40:02M HLA-B*40:06M HLA-B*39:01H HLA-B*41:02H HLA-B*49:01M HLA-B*50:01H
SEYTGNYQCG

SEQ ID NO: 4259 - protein, 10 aa, Severe acute respiratory syndrome coronavirus 2
  REGION 1..10: note = Table A: HLA-B*38:02H HLA-B*15:03H
KHITSKETLY

SEQ ID NO: 4260 - protein, 10 aa, Severe acute respiratory syndrome coronavirus 2
  REGION 1..10: note = Table A: HLA-A*02:02H
TLYCIDGALL

SEQ ID NO: 4261 - protein, 10 aa, Severe acute respiratory syndrome coronavirus 2
  REGION 1..10: note = Table A: HLA-A*11:01H HLA-A*11:02H HLA-A*26:03H HLA-A*34:01H HLA-A*34:02M HLA-A*66:01H
YCIDGALLTK

SEQ ID NO: 4262 - protein, 10 aa, Severe acute respiratory syndrome coronavirus 2
  REGION 1..10: note = Table A: HLA-B*27:02H HLA-B*35:01H HLA-B*15:01H HLA-B*15:03H
GALLTKSSEY

SEQ ID NO: 4263 - protein, 10 aa, Severe acute respiratory syndrome coronavirus 2
  REGION 1..10: note = Table A: HLA-B*45:01H HLA-B*40:02H HLA-B*40:06H HLA-B*41:02H HLA-B*49:01M HLA-B*50:01H
SEYKGPITDV

SEQ ID NO: 4264 - protein, 10 aa, Severe acute respiratory syndrome coronavirus 2
  REGION 1..10: note = Table A: HLA-A*33:03H HLA-A*24:02H HLA-A*24:07M HLA-A*23:01H
EYKGPITDVF

SEQ ID NO: 4265 - protein, 10 aa, Severe acute respiratory syndrome coronavirus 2
  REGION 1..10: note = Table A: HLA-B*15:03H
YKGPITDVFY

SEQ ID NO: 4266 - protein, 10 aa, Severe acute respiratory syndrome coronavirus 2
  REGION 1..10: note = Table A: HLA-A*36:01H
KGPITDVFYK

SEQ ID NO: 4267 - protein, 10 aa, Severe acute respiratory syndrome coronavirus 2
  REGION 1..10: note = Table A: HLA-B*58:01H HLA-C*16:01H HLA-A*36:01H HLA-B*57:01H HLA-A*25:01H HLA-A*29:02H HLA-A*01:01H HLA-A*68:02H HLA-B*57:03H
YTTTIKPVTY

SEQ ID NO: 4268 - protein, 10 aa, Severe acute respiratory syndrome coronavirus 2
  REGION 1..10: note = Table A: HLA-A*11:303H HLA-A*03:01H HLA-A*03:02H HLA-A*11:01M HLA-A*11:02M HLA-A*36:01H HLA-A*68:01H HLA-A*34:02H HLA-C*07:27H
TTTIKPVTYK

SEQ ID NO: 4269 - protein, 10 aa, Severe acute respiratory syndrome coronavirus 2
  REGION 1..10: note = Table A: HLA-A*68:02H HLA-A*02:08H HLA-A*34:02H HLA-B*57:03H HLA-A*66:01H
TTIKPVTYKL

SEQ ID NO: 4270 - protein, 10 aa, Severe acute respiratory syndrome coronavirus 2
  REGION 1..10: note = Table A: HLA-A*02:06H
VVCTEIDPKL

SEQ ID NO: 4271 - protein, 10 aa, Severe acute respiratory syndrome coronavirus 2
  REGION 1..10: note = Table A: HLA-B*44:02M HLA-B*44:05M HLA-C*16:04H HLA-B*46:01M HLA-B*45:01H HLA-B*44:03H HLA-B*18:01M HLA-B*27:02H HLA-A*30:02H HLA-B*35:01H HLA-B*38:02H HLA-B*40:01H HLA-B*40:02H HLA-B*15:01H HLA-B*39:01H HLA-B*07:05H
  REGION 1..10: note = CONT. FROM ABOVE: HLA-B*49:01H HLA-B*50:01H
TEIDPKLDNY

SEQ ID NO: 4272 - protein, 10 aa, Severe acute respiratory syndrome coronavirus 2
  REGION 1..10: note = Table A: HLA-A*36:01H HLA-A*26:01H HLA-A*01:01H HLA-A*34:02H HLA-B*38:02H
EIDPKLDNYY

SEQ ID NO: 4273 - protein, 10 aa, Severe acute respiratory syndrome coronavirus 2
  REGION 1..10: note = Table A: HLA-C*14:02H HLA-C*14:03H HLA-A*24:02H HLA-A*24:07M HLA-A*23:01H
NYYKKDNSYF

SEQ ID NO: 4274 - protein, 10 aa, Severe acute respiratory syndrome coronavirus 2
  REGION 1..10: note = Table A: HLA-C*14:02H HLA-C*14:03M HLA-A*23:01H HLA-B*39:01H
SYFTEQPIDL

SEQ ID NO: 4275 - protein, 10 aa, Severe acute respiratory syndrome coronavirus 2
  REGION 1..10: note = Table A: HLA-A*36:01H HLA-A*01:01H
PIDLVPNQPY

SEQ ID NO: 4276 - protein, 10 aa, Severe acute respiratory syndrome coronavirus 2
  REGION 1..10: note = Table A: HLA-A*02:07H
LVPNQPYPNA

SEQ ID NO: 4277 - protein, 10 aa, Severe acute respiratory syndrome coronavirus 2
  REGION 1..10: note = Table A: HLA-B*55:02H
VPNQPYPNAS

SEQ ID NO: 4278 - protein, 10 aa, Severe acute respiratory syndrome coronavirus 2
  REGION 1..10: note = Table A: HLA-A*24:02H HLA-A*24:07M HLA-A*23:01H
PYPNASFDNF

SEQ ID NO: 4279 - protein, 10 aa, Severe acute respiratory syndrome coronavirus 2
  REGION 1..10: note = Table A: HLA-B*38:02H
IKFADDLNQL

SEQ ID NO: 4280 - protein, 10 aa, Severe acute respiratory syndrome coronavirus 2
  REGION 1..10: note = Table A: HLA-A*36:01H
ADDLNQLTGY

SEQ ID NO: 4281 - protein, 10 aa, Severe acute respiratory syndrome coronavirus 2
  REGION 1..10: note = Table A: HLA-A*34:02H
DDLNQLTGYK

SEQ ID NO: 4282 - protein, 10 aa, Severe acute respiratory syndrome coronavirus 2
  REGION 1..10: note = Table A: HLA-B*57:03H
PASRELKVTF

SEQ ID NO: 4283 - protein, 10 aa, Severe acute respiratory syndrome coronavirus 2
  REGION 1..10: note = Table A: HLA-B*57:03H
ASRELKVTFF

SEQ ID NO: 4284 - protein, 10 aa, Severe acute respiratory syndrome coronavirus 2
  REGION 1..10: note = Table A: HLA-C*14:02H HLA-C*14:03H
FFPDLNGDVV

SEQ ID NO: 4285 - protein, 10 aa, Severe acute respiratory syndrome coronavirus 2
  REGION 1..10: note = Table A: HLA-B*55:02H HLA-B*35:03H HLA-B*35:02H HLA-B*35:08H HLA-B*35:12H HLA-B*54:01H
FPDLNGDVVA

SEQ ID NO: 4286 - protein, 10 aa, Severe acute respiratory syndrome coronavirus 2
  REGION 1..10: note = Table A: HLA-A*25:01M HLA-A*26:01M HLA-A*26:02H HLA-A*26:03M
DVVAIDYKHY

SEQ ID NO: 4287 - protein, 10 aa, Severe acute respiratory syndrome coronavirus 2
  REGION 1..10: note = Table A: HLA-A*33:01H HLA-A*33:03M
DYKHYTPSFK

SEQ ID NO: 4288 - protein, 10 aa, Severe acute respiratory syndrome coronavirus 2
  REGION 1..10: note = Table A: HLA-A*26:03H HLA-A*34:02H HLA-A*66:01H
YTPSFKKGAK

SEQ ID NO: 4289 - protein, 10 aa, Severe acute respiratory syndrome coronavirus 2
  REGION 1..10: note = Table A: HLA-B*07:04M
TPSFKKGAKL

SEQ ID NO: 4290 - protein, 10 aa, Severe acute respiratory syndrome coronavirus 2
  REGION 1..10: note = Table A: HLA-A*02:11M HLA-A*02:02H
LLHKPIVWHV

SEQ ID NO: 4291 - protein, 10 aa, Severe acute respiratory syndrome coronavirus 2
  REGION 1..10: note = Table A: HLA-B*56:01H HLA-B*55:02M HLA-B*55:01H
KPIVWHVNNA

SEQ ID NO: 4292 - protein, 10 aa, Severe acute respiratory syndrome coronavirus 2
  REGION 1..10: note = Table A: HLA-A*30:02M HLA-B*15:01H
VNNATNKATY

SEQ ID NO: 4293 - protein, 10 aa, Severe acute respiratory syndrome coronavirus 2
  REGION 1..10: note = Table A: HLA-A*34:02H
NNATNKATYK

SEQ ID NO: 4294 - protein, 10 aa, Severe acute respiratory syndrome coronavirus 2
  REGION 1..10: note = Table A: HLA-A*33:03M HLA-A*31:01H
TYKPNTWCIR

SEQ ID NO: 4295 - protein, 10 aa, Severe acute respiratory syndrome coronavirus 2
  REGION 1..10: note = Table A: HLA-B*07:04H
KPNTWCIRCL

SEQ ID NO: 4296 - protein, 10 aa, Severe acute respiratory syndrome coronavirus 2
  REGION 1..10: note = Table A: HLA-A*02:11M HLA-A*02:01H HLA-A*02:03H
CLWSTKPVET

SEQ ID NO: 4297 - protein, 10 aa, Severe acute respiratory syndrome coronavirus 2
  REGION 1..10: note = Table A: HLA-B*15:03M
TKPVETSNSF

SEQ ID NO: 4298 - protein, 10 aa, Severe acute respiratory syndrome coronavirus 2
  REGION 1..10: note = Table A: HLA-B*40:01H
VETSNSFDVL

SEQ ID NO: 4299 - protein, 10 aa, Severe acute respiratory syndrome coronavirus 2
  REGION 1..10: note = Table A: HLA-A*68:01M HLA-A*68:02M HLA-A*34:02H HLA-A*66:01H
ETSNSFDVLK

SEQ ID NO: 4300 - protein, 10 aa, Severe acute respiratory syndrome coronavirus 2
  REGION 1..10: note = Table A: HLA-A*02:02H HLA-A*02:03H HLA-B*38:02H HLA-B*15:01H
VLKSEDAQGM

SEQ ID NO: 4301 - protein, 10 aa, Severe acute respiratory syndrome coronavirus 2
  REGION 1..10: note = Table A: HLA-B*44:05H HLA-B*40:01M
SEDAQGMDNL

SEQ ID NO: 4302 - protein, 10 aa, Severe acute respiratory syndrome coronavirus 2
  REGION 1..10: note = Table A: HLA-B*38:02H
DLKPVSEEVV

SEQ ID NO: 4303 - protein, 10 aa, Severe acute respiratory syndrome coronavirus 2
  REGION 1..10: note = Table A: HLA-B*44:05M HLA-B*40:01H HLA-B*40:02H HLA-B*49:01M
SEEVVENPTI

SEQ ID NO: 4304 - protein, 10 aa, Severe acute respiratory syndrome coronavirus 2
  REGION 1..10: note = Table A: HLA-A*11:303H HLA-A*03:02H HLA-A*11:01M HLA-A*11:02H HLA-A*33:03H HLA-A*26:03H HLA-B*27:02H HLA-A*68:01H HLA-A*68:02M HLA-A*34:01H HLA-A*34:02H HLA-C*07:27H HLA-A*66:01H
EVVENPTIQK

SEQ ID NO: 4305 - protein, 10 aa, Severe acute respiratory syndrome coronavirus 2
  REGION 1..10: note = Table A: HLA-B*49:01H
LECNVKTTEV

SEQ ID NO: 4306 - protein, 10 aa, Severe acute respiratory syndrome coronavirus 2
  REGION 1..10: note = Table A: HLA-B*58:01H HLA-A*68:02H HLA-A*02:08H HLA-B*57:03H
KTTEVVGDII

SEQ ID NO: 4307 - protein, 10 aa, Severe acute respiratory syndrome coronavirus 2
  REGION 1..10: note = Table A: HLA-A*26:01H HLA-A*26:02H HLA-A*26:03H HLA-A*68:01H HLA-A*68:02H HLA-A*34:02H
EVVGDIILKP

SEQ ID NO: 4308 - protein, 10 aa, Severe acute respiratory syndrome coronavirus 2
  REGION 1..10: note = Table A: HLA-A*11:303H HLA-C*03:03H HLA-A*02:11H HLA-C*03:04H HLA-C*15:05H HLA-C*01:02H HLA-A*02:08H HLA-B*14:01H HLA-C*08:01H HLA-C*08:03H HLA-B*38:02H
IILKPANNSL

SEQ ID NO: 4309 - protein, 10 aa, Severe acute respiratory syndrome coronavirus 2
  REGION 1..10: note = Table A: HLA-A*03:01H
ILKPANNSLK

SEQ ID NO: 4310 - protein, 10 aa, Severe acute respiratory syndrome coronavirus 2
  REGION 1..10: note = Table A: HLA-C*04:03M HLA-C*08:02H HLA-C*05:01H
ITEEVGHTDL

SEQ ID NO: 4311 - protein, 10 aa, Severe acute respiratory syndrome coronavirus 2
  REGION 1..10: note = Table A: HLA-B*44:05H HLA-B*40:01M
TEEVGHTDLM

SEQ ID NO: 4312 - protein, 10 aa, Severe acute respiratory syndrome coronavirus 2
  REGION 1..10: note = Table A: HLA-B*45:01H HLA-B*50:01H
EEVGHTDLMA

SEQ ID NO: 4313 - protein, 10 aa, Severe acute respiratory syndrome coronavirus 2
  REGION 1..10: note = Table A: HLA-A*30:02H
VGHTDLMAAY

SEQ ID NO: 4314 - protein, 10 aa, Severe acute respiratory syndrome coronavirus 2
  REGION 1..10: note = Table A: HLA-B*38:02H
GHTDLMAAYV

SEQ ID NO: 4315 - protein, 10 aa, Severe acute respiratory syndrome coronavirus 2
  REGION 1..10: note = Table A: HLA-A*11:303H HLA-C*03:03H HLA-C*03:04M HLA-A*68:02H HLA-B*35:03M HLA-C*15:05H HLA-A*34:01H HLA-C*07:27H HLA-B*35:01H HLA-B*35:02H HLA-B*35:07H HLA-C*08:01M HLA-C*08:03H HLA-B*35:12H HLA-B*38:02M
  REGION 1..10: note = CONT. FROM ABOVE: HLA-B*39:01H HLA-B*07:05H
MAAYVDNSSL

SEQ ID NO: 4316 - protein, 10 aa, Severe acute respiratory syndrome coronavirus 2
  REGION 1..10: note = Table A: HLA-C*14:03H HLA-B*27:02H HLA-A*24:02H HLA-A*24:07H HLA-A*23:01M HLA-B*49:01H
AYVDNSSLTI

SEQ ID NO: 4317 - protein, 10 aa, Severe acute respiratory syndrome coronavirus 2
  REGION 1..10: note = Table A: HLA-A*03:02H HLA-A*36:01H HLA-B*27:02H HLA-A*68:01H HLA-A*34:02H
YVDNSSLTIK

SEQ ID NO: 4318 - protein, 10 aa, Severe acute respiratory syndrome coronavirus 2
  REGION 1..10: note = Table A: HLA-A*03:02H HLA-A*11:01H
VDNSSLTIKK

SEQ ID NO: 4319 - protein, 10 aa, Severe acute respiratory syndrome coronavirus 2
  REGION 1..10: note = Table A: HLA-A*74:01H HLA-A*33:03H
TIKKPNELSR

SEQ ID NO: 4320 - protein, 10 aa, Severe acute respiratory syndrome coronavirus 2
  REGION 1..10: note = Table A: HLA-B*56:01H HLA-B*55:02H HLA-C*15:05H
KPNELSRVLG

SEQ ID NO: 4321 - protein, 10 aa, Severe acute respiratory syndrome coronavirus 2
  REGION 1..10: note = Table A: HLA-B*13:02H
RVLGLKTLAT

SEQ ID NO: 4322 - protein, 10 aa, Severe acute respiratory syndrome coronavirus 2
  REGION 1..10: note = Table A: HLA-A*02:02M HLA-A*02:03H
GLKTLATHGL

SEQ ID NO: 4323 - protein, 10 aa, Severe acute respiratory syndrome coronavirus 2
  REGION 1..10: note = Table A: HLA-B*55:02H HLA-C*15:05H HLA-A*02:08H
KTLATHGLAA

SEQ ID NO: 4324 - protein, 10 aa, Severe acute respiratory syndrome coronavirus 2
  REGION 1..10: note = Table A: HLA-A*02:11H HLA-A*68:02H HLA-A*02:04H HLA-A*02:05H HLA-A*02:06H HLA-A*02:08H HLA-A*02:01M HLA-A*02:02H HLA-A*02:03H HLA-B*38:02M
TLATHGLAAV

SEQ ID NO: 4325 - protein, 10 aa, Severe acute respiratory syndrome coronavirus 2
  REGION 1..10: note = Table A: HLA-B*38:02H HLA-B*39:01H
THGLAAVNSV

SEQ ID NO: 4326 - protein, 10 aa, Severe acute respiratory syndrome coronavirus 2
  REGION 1..10: note = Table A: HLA-A*11:01H HLA-A*11:02H HLA-A*25:01M HLA-A*26:01M HLA-A*26:02M HLA-A*26:03M HLA-A*29:01H HLA-A*29:02H HLA-A*30:02M HLA-A*34:02H
SVPWDTIANY

SEQ ID NO: 4327 - protein, 10 aa, Severe acute respiratory syndrome coronavirus 2
  REGION 1..10: note = Table A: HLA-B*56:01H HLA-B*55:02M HLA-B*55:01H HLA-B*54:01H
VPWDTIANYA

SEQ ID NO: 4328 - protein, 10 aa, Severe acute respiratory syndrome coronavirus 2
  REGION 1..10: note = Table A: HLA-A*02:02H
TIANYAKPFL

SEQ ID NO: 4329 - protein, 10 aa, Severe acute respiratory syndrome coronavirus 2
  REGION 1..10: note = Table A: HLA-A*03:01H HLA-A*11:02H HLA-A*34:02H
ANYAKPFLNK

SEQ ID NO: 4330 - protein, 10 aa, Severe acute respiratory syndrome coronavirus 2
  REGION 1..10: note = Table A: HLA-C*12:03H HLA-B*07:04H
YAKPFLNKVV

SEQ ID NO: 4331 - protein, 10 aa, Severe acute respiratory syndrome coronavirus 2
  REGION 1..10: note = Table A: HLA-B*42:01H HLA-B*56:01M HLA-B*55:02H HLA-C*15:05H HLA-B*55:01M HLA-B*54:01H HLA-B*07:02H HLA-B*07:04M
KPFLNKVVST

SEQ ID NO: 4332 - protein, 10 aa, Severe acute respiratory syndrome coronavirus 2
  REGION 1..10: note = Table A: HLA-A*02:08H
KVVSTTTNIV

SEQ ID NO: 4333 - protein, 10 aa, Severe acute respiratory syndrome coronavirus 2
  REGION 1..10: note = Table A: HLA-A*74:01H HLA-A*11:01H HLA-A*36:01H HLA-B*57:01H HLA-A*33:03H HLA-A*68:01M HLA-A*31:01H
VSTTTNIVTR

SEQ ID NO: 4334 - protein, 10 aa, Severe acute respiratory syndrome coronavirus 2
  REGION 1..10: note = Table A: HLA-A*02:08H
STTTNIVTRC

SEQ ID NO: 4335 - protein, 10 aa, Severe acute respiratory syndrome coronavirus 2
  REGION 1..10: note = Table A: HLA-A*68:02H
TTTNIVTRCL

SEQ ID NO: 4336 - protein, 10 aa, Severe acute respiratory syndrome coronavirus 2
  REGION 1..10: note = Table A: HLA-A*24:02H HLA-A*24:07M HLA-A*23:01H
NYMPYFFTLL

SEQ ID NO: 4337 - protein, 10 aa, Severe acute respiratory syndrome coronavirus 2
  REGION 1..10: note = Table A: HLA-A*34:02H
FTRSTNSRIK

SEQ ID NO: 4338 - protein, 10 aa, Severe acute respiratory syndrome coronavirus 2
  REGION 1..10: note = Table A: HLA-B*07:04H
STNSRIKASM

SEQ ID NO: 4339 - protein, 10 aa, Severe acute respiratory syndrome coronavirus 2
  REGION 1..10: note = Table A: HLA-B*58:02H HLA-B*07:04H HLA-B*13:02H
RIKASMPTTI

SEQ ID NO: 4340 - protein, 10 aa, Severe acute respiratory syndrome coronavirus 2
  REGION 1..10: note = Table A: HLA-A*03:01H HLA-A*03:02M HLA-A*11:01H HLA-A*36:01H
KASMPTTIAK

SEQ ID NO: 4341 - protein, 10 aa, Severe acute respiratory syndrome coronavirus 2
  REGION 1..10: note = Table A: HLA-B*56:01H HLA-B*53:01H HLA-B*55:02H HLA-A*68:02H HLA-B*35:03M HLA-C*15:05M HLA-B*55:01M HLA-B*35:01H HLA-B*35:02H HLA-B*51:01H HLA-B*35:12H HLA-B*38:02H HLA-B*54:01H HLA-B*07:02H HLA-B*07:04H HLA-B*07:05H
MPTTIAKNTV

SEQ ID NO: 4342 - protein, 10 aa, Severe acute respiratory syndrome coronavirus 2
  REGION 1..10: note = Table A: HLA-A*02:08H HLA-A*02:03H
TIAKNTVKSV

SEQ ID NO: 4343 - protein, 10 aa, Severe acute respiratory syndrome coronavirus 2
  REGION 1..10: note = Table A: HLA-B*07:04H
TVKSVGKFCL

SEQ ID NO: 4344 - protein, 10 aa, Severe acute respiratory syndrome coronavirus 2
  REGION 1..10: note = Table A: HLA-A*24:07H
SFNYLKSPNF

SEQ ID NO: 4345 - protein, 10 aa, Severe acute respiratory syndrome coronavirus 2
  REGION 1..10: note = Table A: HLA-A*02:02H HLA-A*02:03H HLA-B*38:02H HLA-B*07:04H
YLKSPNFSKL

SEQ ID NO: 4346 - protein, 10 aa, Severe acute respiratory syndrome coronavirus 2
  REGION 1..10: note = Table A: HLA-B*42:01H HLA-C*15:05H HLA-B*07:04M
SPNFSKLINI

SEQ ID NO: 4347 - protein, 10 aa, Severe acute respiratory syndrome coronavirus 2
  REGION 1..10: note = Table A: HLA-A*02:11M HLA-A*02:04M HLA-A*02:02M HLA-B*40:06H
KLINIIIWFL

SEQ ID NO: 4348 - protein, 10 aa, Severe acute respiratory syndrome coronavirus 2
  REGION 1..10: note = Table A: HLA-A*11:303H HLA-C*15:05H
AALGVLMSNL

SEQ ID NO: 4349 - protein, 10 aa, Severe acute respiratory syndrome coronavirus 2
  REGION 1..10: note = Table A: HLA-A*02:02H
ALGVLMSNLG

SEQ ID NO: 4350 - protein, 10 aa, Severe acute respiratory syndrome coronavirus 2
  REGION 1..10: note = Table A: HLA-A*36:01H HLA-A*29:01H HLA-A*29:02H HLA-A*30:02H
LMSNLGMPSY

SEQ ID NO: 4351 - protein, 10 aa, Severe acute respiratory syndrome coronavirus 2
  REGION 1..10: note = Table A: HLA-B*40:02H HLA-B*49:01H
REGYLNSTNV

SEQ ID NO: 4352 - protein, 10 aa, Severe acute respiratory syndrome coronavirus 2
  REGION 1..10: note = Table A: HLA-A*24:02H HLA-C*08:03H HLA-A*23:01H
GYLNSTNVTI

SEQ ID NO: 4353 - protein, 10 aa, Severe acute respiratory syndrome coronavirus 2
  REGION 1..10: note = Table A: HLA-A*25:01H HLA-A*30:02H HLA-B*35:01H HLA-B*07:05H
NSTNVTIATY

SEQ ID NO: 4354 - protein, 10 aa, Severe acute respiratory syndrome coronavirus 2
  REGION 1..10: note = Table A: HLA-A*24:02H HLA-A*24:07H HLA-A*23:01H
TYPSLETIQI

SEQ ID NO: 4355 - protein, 10 aa, Severe acute respiratory syndrome coronavirus 2
  REGION 1..10: note = Table A: HLA-C*15:05H HLA-B*57:03H
PSLETIQITI

SEQ ID NO: 4356 - protein, 10 aa, Severe acute respiratory syndrome coronavirus 2
  REGION 1..10: note = Table A: HLA-B*44:05H HLA-A*25:01H HLA-A*33:03H HLA-A*26:01H HLA-A*26:02H HLA-A*26:03H HLA-A*68:01H HLA-A*68:02M HLA-A*34:01M HLA-A*34:02M HLA-B*38:02H HLA-A*66:01M
ETIQITISSF

SEQ ID NO: 4357 - protein, 10 aa, Severe acute respiratory syndrome coronavirus 2
  REGION 1..10: note = Table A: HLA-A*03:02H
TIQITISSFK

SEQ ID NO: 4358 - protein, 10 aa, Severe acute respiratory syndrome coronavirus 2
  REGION 1..10: note = Table A: HLA-A*24:07H HLA-B*57:03H
IQITISSFKW

SEQ ID NO: 4359 - protein, 10 aa, Severe acute respiratory syndrome coronavirus 2
  REGION 1..10: note = Table A: HLA-B*46:01H HLA-C*15:05H HLA-A*32:01H HLA-B*57:03M
SSFKWDLTAF

SEQ ID NO: 4360 - protein, 10 aa, Severe acute respiratory syndrome coronavirus 2
  REGION 1..10: note = Table A: HLA-C*04:01H
KWDLTAFGLV

SEQ ID NO: 4361 - protein, 10 aa, Severe acute respiratory syndrome coronavirus 2
  REGION 1..10: note = Table A: HLA-B*57:03H
LTAFGLVAEW

SEQ ID NO: 4362 - protein, 10 aa, Severe acute respiratory syndrome coronavirus 2
  REGION 1..10: note = Table A: HLA-C*14:03H HLA-A*29:02H HLA-A*30:02H
AYILFTRFFY

SEQ ID NO: 4363 - protein, 10 aa, Severe acute respiratory syndrome coronavirus 2
  REGION 1..10: note = Table A: HLA-A*02:04H HLA-A*02:02H
ILFTRFFYVL

SEQ ID NO: 4364 - protein, 10 aa, Severe acute respiratory syndrome coronavirus 2
  REGION 1..10: note = Table A: HLA-C*14:03H
FFYVLGLAAI

SEQ ID NO: 4365 - protein, 10 aa, Severe acute respiratory syndrome coronavirus 2
  REGION 1..10: note = Table A: HLA-A*24:07H
LFFSYFAVHF

SEQ ID NO: 4366 - protein, 10 aa, Severe acute respiratory syndrome coronavirus 2
  REGION 1..10: note = Table A: HLA-B*58:01H HLA-B*57:01H HLA-A*25:01H HLA-B*53:01H HLA-B*57:03H
FAVHFISNSW

SEQ ID NO: 4367 - protein, 10 aa, Severe acute respiratory syndrome coronavirus 2
  REGION 1..10: note = Table A: HLA-A*24:07M HLA-A*23:01H
HFISNSWLMW

SEQ ID NO: 4368 - protein, 10 aa, Severe acute respiratory syndrome coronavirus 2
  REGION 1..10: note = Table A: HLA-B*13:02H
VQMAPISAMV

SEQ ID NO: 4369 - protein, 10 aa, Severe acute respiratory syndrome coronavirus 2
  REGION 1..10: note = Table A: HLA-A*74:01H HLA-A*34:01H
QMAPISAMVR

SEQ ID NO: 4370 - protein, 10 aa, Severe acute respiratory syndrome coronavirus 2
  REGION 1..10: note = Table A: HLA-B*35:01H HLA-B*35:07H
APISAMVRMY

SEQ ID NO: 4371 - protein, 10 aa, Severe acute respiratory syndrome coronavirus 2
  REGION 1..10: note = Table A: HLA-A*30:02H
RMYIFFASFY

SEQ ID NO: 4372 - protein, 10 aa, Severe acute respiratory syndrome coronavirus 2
  REGION 1..10: note = Table A: HLA-A*29:02H
MYIFFASFYY

SEQ ID NO: 4373 - protein, 10 aa, Severe acute respiratory syndrome coronavirus 2
  REGION 1..10: note = Table A: HLA-A*24:07H
IFFASFYYVW

SEQ ID NO: 4374 - protein, 10 aa, Severe acute respiratory syndrome coronavirus 2
  REGION 1..10: note = Table A: HLA-A*02:11M
YVWKSYVHVV

SEQ ID NO: 4375 - protein, 10 aa, Severe acute respiratory syndrome coronavirus 2
  REGION 1..10: note = Table A: HLA-A*02:08H HLA-B*38:02H
HVVDGCNSST

SEQ ID NO: 4376 - protein, 10 aa, Severe acute respiratory syndrome coronavirus 2
  REGION 1..10: note = Table A: HLA-B*49:01H
VECTTIVNGV

SEQ ID NO: 4377 - protein, 10 aa, Severe acute respiratory syndrome coronavirus 2
  REGION 1..10: note = Table A: HLA-A*33:03H HLA-A*26:03H HLA-A*68:01M HLA-A*34:01M HLA-A*34:02H HLA-A*66:01M
ECTTIVNGVR

SEQ ID NO: 4378 - protein, 10 aa, Severe acute respiratory syndrome coronavirus 2
  REGION 1..10: note = Table A: HLA-A*30:02H
IVNGVRRSFY

SEQ ID NO: 4379 - protein, 10 aa, Severe acute respiratory syndrome coronavirus 2
  REGION 1..10: note = Table A: HLA-A*11:303H HLA-A*25:01M HLA-B*46:01H HLA-A*26:01M HLA-A*26:02H HLA-A*26:03M HLA-C*03:02H HLA-C*03:04H HLA-A*68:02H HLA-A*34:01M HLA-A*34:02H HLA-B*38:02M HLA-B*07:04H HLA-B*15:01H HLA-B*15:02M
  REGION 1..10: note = CONT. FROM ABOVE: HLA-A*66:01M
YVYANGGKGF

SEQ ID NO: 4380 - protein, 10 aa, Severe acute respiratory syndrome coronavirus 2
  REGION 1..10: note = Table A: HLA-A*68:02M HLA-A*34:02H
DTFCAGSTFI

SEQ ID NO: 4381 - protein, 10 aa, Severe acute respiratory syndrome coronavirus 2
  REGION 1..10: note = Table A: HLA-A*74:01H HLA-A*11:01H HLA-A*11:02H HLA-A*26:03H HLA-B*27:02H HLA-A*68:01M HLA-A*68:02H HLA-A*34:01H HLA-A*34:02H HLA-A*66:01H
STFISDEVAR

SEQ ID NO: 4382 - protein, 10 aa, Severe acute respiratory syndrome coronavirus 2
  REGION 1..10: note = Table A: HLA-C*03:04H HLA-C*01:02H HLA-A*02:05H HLA-A*02:02M
FISDEVARDL

SEQ ID NO: 4383 - protein, 10 aa, Severe acute respiratory syndrome coronavirus 2
  REGION 1..10: note = Table A: HLA-A*25:01H HLA-A*26:01H HLA-A*26:02H HLA-A*26:03H HLA-A*34:01H HLA-A*34:02H
EVARDLSLQF

SEQ ID NO: 4384 - protein, 10 aa, Severe acute respiratory syndrome coronavirus 2
  REGION 1..10: note = Table A: HLA-A*34:02H
VARDLSLQFK

SEQ ID NO: 4385 - protein, 10 aa, Severe acute respiratory syndrome coronavirus 2
  REGION 1..10: note = Table A: HLA-B*56:01H HLA-B*55:02H
RPINPTDQSS

SEQ ID NO: 4386 - protein, 10 aa, Severe acute respiratory syndrome coronavirus 2
  REGION 1..10: note = Table A: HLA-B*15:01H
PINPTDQSSY

SEQ ID NO: 4387 - protein, 10 aa, Severe acute respiratory syndrome coronavirus 2
  REGION 1..10: note = Table A: HLA-A*68:02H HLA-C*15:05H
SSYIVDSVTV

SEQ ID NO: 4388 - protein, 10 aa, Severe acute respiratory syndrome coronavirus 2
  REGION 1..10: note = Table A: HLA-B*27:02H HLA-A*30:02H HLA-A*23:01H
SYIVDSVTVK

SEQ ID NO: 4389 - protein, 10 aa, Severe acute respiratory syndrome coronavirus 2
  REGION 1..10: note = Table A: HLA-A*02:07H
IVDSVTVKNG

SEQ ID NO: 4390 - protein, 10 aa, Severe acute respiratory syndrome coronavirus 2
  REGION 1..10: note = Table A: HLA-B*57:03H
VTVKNGSIHL

SEQ ID NO: 4391 - protein, 10 aa, Severe acute respiratory syndrome coronavirus 2
  REGION 1..10: note = Table A: HLA-A*25:01H HLA-B*46:01H HLA-A*26:01M HLA-A*26:02M HLA-A*26:03M HLA-A*29:02H HLA-A*30:02H HLA-C*12:02H HLA-A*34:01H HLA-A*34:02H HLA-B*38:02H HLA-B*15:01M HLA-B*15:02H HLA-A*31:01H
TVKNGSIHLY

SEQ ID NO: 4392 - protein, 10 aa, Severe acute respiratory syndrome coronavirus 2
  REGION 1..10: note = Table A: HLA-B*15:03H
VKNGSIHLYF

SEQ ID NO: 4393 - protein, 10 aa, Severe acute respiratory syndrome coronavirus 2
  REGION 1..10: note = Table A: HLA-A*03:01H HLA-A*34:02H
HLYFDKAGQK

SEQ ID NO: 4394 - protein, 10 aa, Severe acute respiratory syndrome coronavirus 2
  REGION 1..10: note = Table A: HLA-A*36:01M HLA-A*29:01H HLA-A*29:02M HLA-A*01:01H HLA-C*04:03H HLA-A*30:02H HLA-B*38:02H HLA-B*07:05H
YFDKAGQKTY

SEQ ID NO: 4395 - protein, 10 aa, Severe acute respiratory syndrome coronavirus 2
  REGION 1..10: note = Table A: HLA-B*15:01H
GQKTYERHSL

SEQ ID NO: 4396 - protein, 10 aa, Severe acute respiratory syndrome coronavirus 2
  REGION 1..10: note = Table A: HLA-A*03:01H
KTYERHSLSH

SEQ ID NO: 4397 - protein, 10 aa, Severe acute respiratory syndrome coronavirus 2
  REGION 1..10: note = Table A: HLA-A*24:07H HLA-A*23:01H
TYERHSLSHF

SEQ ID NO: 4398 - protein, 10 aa, Severe acute respiratory syndrome coronavirus 2
  REGION 1..10: note = Table A: HLA-B*38:02H
RHSLSHFVNL

SEQ ID NO: 4399 - protein, 10 aa, Severe acute respiratory syndrome coronavirus 2
  REGION 1..10: note = Table A: HLA-A*68:02H HLA-C*08:01H
LSHFVNLDNL

SEQ ID NO: 4400 - protein, 10 aa, Severe acute respiratory syndrome coronavirus 2
  REGION 1..10: note = Table A: HLA-B*38:02H
SHFVNLDNLR

SEQ ID NO: 4401 - protein, 10 aa, Severe acute respiratory syndrome coronavirus 2
  REGION 1..10: note = Table A: HLA-A*68:02H
NTKGSLPINV

SEQ ID NO: 4402 - protein, 10 aa, Severe acute respiratory syndrome coronavirus 2
  REGION 1..10: note = Table A: HLA-B*57:03M
GSLPINVIVF

SEQ ID NO: 4403 - protein, 10 aa, Severe acute respiratory syndrome coronavirus 2
  REGION 1..10: note = Table A: HLA-B*54:01H
LPINVIVFDG

SEQ ID NO: 4404 - protein, 10 aa, Severe acute respiratory syndrome coronavirus 2
  REGION 1..10: note = Table A: HLA-A*26:03H HLA-A*68:01H HLA-A*34:01H HLA-A*34:02H HLA-A*66:01H
NVIVFDGKSK

SEQ ID NO: 4405 - protein, 10 aa, Severe acute respiratory syndrome coronavirus 2
  REGION 1..10: note = Table A: HLA-B*58:01H HLA-A*36:01H HLA-A*30:02H HLA-B*57:03H
SSAKSASVYY

SEQ ID NO: 4406 - protein, 10 aa, Severe acute respiratory syndrome coronavirus 2
  REGION 1..10: note = Table A: HLA-B*58:02H HLA-C*15:05H HLA-C*15:02H HLA-A*02:08H HLA-B*57:03M
KSASVYYSQL

SEQ ID NO: 4407 - protein, 10 aa, Severe acute respiratory syndrome coronavirus 2
  REGION 1..10: note = Table A: HLA-B*35:03H HLA-C*15:05M HLA-B*35:01H HLA-B*35:02H HLA-B*35:12H HLA-B*07:05H
QPILLLDQAL

SEQ ID NO: 4408 - protein, 10 aa, Severe acute respiratory syndrome coronavirus 2
  REGION 1..10: note = Table A: HLA-B*38:02H HLA-B*39:01H
ALVSDVGDSA

SEQ ID NO: 4409 - protein, 10 aa, Severe acute respiratory syndrome coronavirus 2
  REGION 1..10: note = Table A: HLA-C*08:02H HLA-C*05:01H
VSDVGDSAEV

SEQ ID NO: 4410 - protein, 10 aa, Severe acute respiratory syndrome coronavirus 2
  REGION 1..10: note = Table A: HLA-A*68:02H
DVGDSAEVAV

SEQ ID NO: 4411 - protein, 10 aa, Severe acute respiratory syndrome coronavirus 2
  REGION 1..10: note = Table A: HLA-A*03:02H HLA-A*36:01H
VGDSAEVAVK

SEQ ID NO: 4412 - protein, 10 aa, Severe acute respiratory syndrome coronavirus 2
  REGION 1..10: note = Table A: HLA-A*25:01H HLA-A*26:02H
DSAEVAVKMF

SEQ ID NO: 4413 - protein, 10 aa, Severe acute respiratory syndrome coronavirus 2
  REGION 1..10: note = Table A: HLA-B*45:01M HLA-B*40:06M HLA-B*50:01M
AEVAVKMFDA

SEQ ID NO: 4414 - protein, 10 aa, Severe acute respiratory syndrome coronavirus 2
  REGION 1..10: note = Table A: HLA-A*25:01M HLA-A*26:01M HLA-A*26:02M HLA-A*26:03H HLA-B*38:02H
EVAVKMFDAY

SEQ ID NO: 4415 - protein, 10 aa, Severe acute respiratory syndrome coronavirus 2
  REGION 1..10: note = Table A: HLA-B*58:01M HLA-B*58:02H HLA-C*14:02H HLA-C*14:03H HLA-A*74:01H HLA-B*44:05H HLA-A*03:02H HLA-B*57:01H HLA-B*46:01H HLA-C*07:01H HLA-A*02:11M HLA-B*27:02H HLA-A*30:02H HLA-C*12:02H HLA-A*02:04H HLA-A*02:05H
  REGION 1..10: note = CONT. FROM ABOVE: HLA-A*02:07H HLA-A*02:08H HLA-A*02:01H HLA- A*02:02H HLA-A*02:03H HLA-A*24:02H HLA-A*24:07M HLA-C*08:01H HLA-A*23:01M HLA-B*38:02M HLA-A*32:01H HLA-B*40:06H HLA-B*15 :01M HLA-B*15:03M HLA-B*07:05H HLA-B*57:03H HLA-B*13:01M
KMFDAYVNTF

SEQ ID NO: 4416 - protein, 10 aa, Severe acute respiratory syndrome coronavirus 2
  REGION 1..10: note = Table A: HLA-C*14:02H HLA-C*14:03M HLA-B*27:02H HLA-A*24:02M HLA-A*24:07M HLA-A*23:01M
AYVNTFSSTF

SEQ ID NO: 4417 - protein, 10 aa, Severe acute respiratory syndrome coronavirus 2
  REGION 1..10: note = Table A: HLA-A*11:303H HLA-A*03:02H HLA-A*11:01M HLA-A*11:02H HLA-A*36:01H HLA-A*34:02H HLA-C*07:27H
SSTFNVPMEK

SEQ ID NO: 4418 - protein, 10 aa, Severe acute respiratory syndrome coronavirus 2
  REGION 1..10: note = Table A: HLA-A*11:01H HLA-A*11:02H HLA-A*02:11H HLA-A*68:01H HLA-A*68:02M HLA-A*02:05M HLA-A*02:08M HLA-A*02:02H HLA-A*34:02H HLA-B*57:03H
STFNVPMEKL

SEQ ID NO: 4419 - protein, 10 aa, Severe acute respiratory syndrome coronavirus 2
  REGION 1..10: note = Table A: HLA-B*56:01H HLA-B*55:02H HLA-C*15:05H HLA-B*51:01H HLA-B*07:04H
VPMEKLKTLV

SEQ ID NO: 4420 - protein, 10 aa, Severe acute respiratory syndrome coronavirus 2
  REGION 1..10: note = Table A: HLA-A*02:02H HLA-B*38:02H HLA-B*39:01H
TLVATAEAEL

SEQ ID NO: 4421 - protein, 10 aa, Severe acute respiratory syndrome coronavirus 2
  REGION 1..10: note = Table A: HLA-B*45:01M HLA-B*40:06H HLA-B*41:02H HLA-B*50:01M
AEAELAKNVS

SEQ ID NO: 4422 - protein, 10 aa, Severe acute respiratory syndrome coronavirus 2
  REGION 1..10: note = Table A: HLA-B*35:02H HLA-B*39:01H
EAELAKNVSL

SEQ ID NO: 4423 - protein, 10 aa, Severe acute respiratory syndrome coronavirus 2
  REGION 1..10: note = Table A: HLA-B*58:01H HLA-B*57:01H HLA-B*46:01H HLA-C*15:05H HLA-A*23:01H HLA-B*57:03M
VSLDNVLSTF

SEQ ID NO: 4424 - protein, 10 aa, Severe acute respiratory syndrome coronavirus 2
  REGION 1..10: note = Table A: HLA-A*02:07H HLA-B*38:02H
SLDNVLSTFI

SEQ ID NO: 4425 - protein, 10 aa, Severe acute respiratory syndrome coronavirus 2
  REGION 1..10: note = Table A: HLA-B*54:01H
DNVLSTFISA

SEQ ID NO: 4426 - protein, 10 aa, Severe acute respiratory syndrome coronavirus 2
  REGION 1..10: note = Table A: HLA-B*55:02H HLA-B*54:01H
NVLSTFISAA

SEQ ID NO: 4427 - protein, 10 aa, Severe acute respiratory syndrome coronavirus 2
  REGION 1..10: note = Table A: HLA-A*74:01M HLA-A*26:03H HLA-A*34:01H HLA-A*66:01H
VLSTFISAAR

SEQ ID NO: 4428 - protein, 10 aa, Severe acute respiratory syndrome coronavirus 2
  REGION 1..10: note = Table A: HLA-C*14:02H HLA-C*14:03H HLA-A*24:07M HLA-A*23:01H
TFISAARQGF

SEQ ID NO: 4429 - protein, 10 aa, Severe acute respiratory syndrome coronavirus 2
  REGION 1..10: note = Table A: HLA-B*27:02H
GFVDSDVETK

SEQ ID NO: 4430 - protein, 10 aa, Severe acute respiratory syndrome coronavirus 2
  REGION 1..10: note = Table A: HLA-B*40:01H HLA-B*40:02H
VETKDVVECL

SEQ ID NO: 4431 - protein, 10 aa, Severe acute respiratory syndrome coronavirus 2
  REGION 1..10: note = Table A: HLA-A*34:02H
ETKDVVECLK

SEQ ID NO: 4432 - protein, 10 aa, Severe acute respiratory syndrome coronavirus 2
  REGION 1..10: note = Table A: HLA-A*02:02M
KLSHQSDIEV

SEQ ID NO: 4433 - protein, 10 aa, Severe acute respiratory syndrome coronavirus 2
  REGION 1..10: note = Table A: HLA-B*39:01H
SHQSDIEVTG

SEQ ID NO: 4434 - protein, 10 aa, Severe acute respiratory syndrome coronavirus 2
  REGION 1..10: note = Table A: HLA-A*25:01H HLA-A*26:01H HLA-A*26:02H HLA-A*26:03M
EVTGDSCNNY

SEQ ID NO: 4435 - protein, 10 aa, Severe acute respiratory syndrome coronavirus 2
  REGION 1..10: note = Table A: HLA-C*08:03H
TYNKVENMTP

SEQ ID NO: 4436 - protein, 10 aa, Severe acute respiratory syndrome coronavirus 2
  REGION 1..10: note = Table A: HLA-A*33:01H HLA-A*33:03H
YNKVENMTPR

SEQ ID NO: 4437 - protein, 10 aa, Severe acute respiratory syndrome coronavirus 2
  REGION 1..10: note = Table A: HLA-B*57:03H
MTPRDLGACI

SEQ ID NO: 4438 - protein, 10 aa, Severe acute respiratory syndrome coronavirus 2
  REGION 1..10: note = Table A: HLA-B*55:02H
SARHINAQVA

SEQ ID NO: 4439 - protein, 10 aa, Severe acute respiratory syndrome coronavirus 2
  REGION 1..10: note = Table A: HLA-B*27:05M HLA-B*27:02H
ARHINAQVAK

SEQ ID NO: 4440 - protein, 10 aa, Severe acute respiratory syndrome coronavirus 2
  REGION 1..10: note = Table A: HLA-A*02:08M HLA-B*07:04H
QVAKSHNIAL

SEQ ID NO: 4441 - protein, 10 aa, Severe acute respiratory syndrome coronavirus 2
  REGION 1..10: note = Table A: HLA-B*38:02H
SHNIALIWNV

SEQ ID NO: 4442 - protein, 10 aa, Severe acute respiratory syndrome coronavirus 2
  REGION 1..10: note = Table A: HLA-A*02:02H HLA-B*13:01H
ALIWNVKDFM

SEQ ID NO: 4443 - protein, 10 aa, Severe acute respiratory syndrome coronavirus 2
  REGION 1..10: note = Table A: HLA-C*08:03H HLA-B*40:01H HLA-B*40:02H
KDFMSLSEQL

SEQ ID NO: 4444 - protein, 10 aa, Severe acute respiratory syndrome coronavirus 2
  REGION 1..10: note = Table A: HLA-A*33:01M HLA-A*33:03M
DFMSLSEQLR

SEQ ID NO: 4445 - protein, 10 aa, Severe acute respiratory syndrome coronavirus 2
  REGION 1..10: note = Table A: HLA-A*02:02H
SLSEQLRKQI

SEQ ID NO: 4446 - protein, 10 aa, Severe acute respiratory syndrome coronavirus 2
  REGION 1..10: note = Table A: HLA-A*30:01H
AAKKNNLPFK

SEQ ID NO: 4447 - protein, 10 aa, Severe acute respiratory syndrome coronavirus 2
  REGION 1..10: note = Table A: HLA-A*02:08H
ATTRQVVNVV

SEQ ID NO: 4448 - protein, 10 aa, Severe acute respiratory syndrome coronavirus 2
  REGION 1..10: note = Table A: HLA-A*68:01H HLA-A*68:02M HLA-A*02:05H HLA-A*02:08M HLA-B*38:02H HLA-B*57:03H HLA-B*13:02H
QVVNVVTTKI

SEQ ID NO: 4449 - protein, 10 aa, Severe acute respiratory syndrome coronavirus 2
  REGION 1..10: note = Table A: HLA-A*11:01H HLA-A*11:02H HLA-A*26:03H HLA-A*68:01M HLA-A*68:02H HLA-A*34:01H HLA-A*34:02H HLA-A*66:01H
NVVTTKIALK

SEQ ID NO: 4450 - protein, 10 aa, Severe acute respiratory syndrome coronavirus 2
  REGION 1..10: note = Table A: HLA-A*02:04H
KIVNNWLKQL

SEQ ID NO: 4451 - protein, 10 aa, Severe acute respiratory syndrome coronavirus 2
  REGION 1..10: note = Table A: HLA-B*08:01H
WLKQLIKVTL

SEQ ID NO: 4452 - protein, 10 aa, Severe acute respiratory syndrome coronavirus 2
  REGION 1..10: note = Table A: HLA-A*02:11H HLA-A*02:04M HLA-A*02:02H
QLIKVTLVFL

SEQ ID NO: 4453 - protein, 10 aa, Severe acute respiratory syndrome coronavirus 2
  REGION 1..10: note = Table A: HLA-C*14:03H HLA-A*29:02M
VFLFVAAIFY

SEQ ID NO: 4454 - protein, 10 aa, Severe acute respiratory syndrome coronavirus 2
  REGION 1..10: note = Table A: HLA-A*02:04M HLA-A*02:02H
FLFVAAIFYL

SEQ ID NO: 4455 - protein, 10 aa, Severe acute respiratory syndrome coronavirus 2
  REGION 1..10: note = Table A: HLA-C*14:03H HLA-C*04:01H HLA-C*04:03H HLA-A*02:11H
IFYLITPVHV

SEQ ID NO: 4456 - protein, 10 aa, Severe acute respiratory syndrome coronavirus 2
  REGION 1..10: note = Table A: HLA-C*14:02H HLA-C*14:03M
FYLITPVHVM

SEQ ID NO: 4457 - protein, 10 aa, Severe acute respiratory syndrome coronavirus 2
  REGION 1..10: note = Table A: HLA-A*36:01H
LITPVHVMSK

SEQ ID NO: 4458 - protein, 10 aa, Severe acute respiratory syndrome coronavirus 2
  REGION 1..10: note = Table A: HLA-B*38:02H
KHTDFSSEII

SEQ ID NO: 4459 - protein, 10 aa, Severe acute respiratory syndrome coronavirus 2
  REGION 1..10: note = Table A: HLA-B*27:02H HLA-B*35:01H HLA-B*39:01H
TDFSSEIIGY

SEQ ID NO: 4460 - protein, 10 aa, Severe acute respiratory syndrome coronavirus 2
  REGION 1..10: note = Table A: HLA-A*34:02H
DFSSEIIGYK

SEQ ID NO: 4461 - protein, 10 aa, Severe acute respiratory syndrome coronavirus 2
  REGION 1..10: note = Table A: HLA-A*02:11H HLA-A*68:02M HLA-A*02:05H HLA-A*02:02H HLA-B*54:01H
FSSEIIGYKA

SEQ ID NO: 4462 - protein, 10 aa, Severe acute respiratory syndrome coronavirus 2
  REGION 1..10: note = Table A: HLA-A*26:03H
EIIGYKAIDG

SEQ ID NO: 4463 - protein, 10 aa, Severe acute respiratory syndrome coronavirus 2
  REGION 1..10: note = Table A: HLA-C*08:02H
AIDGGVTRDI

SEQ ID NO: 4464 - protein, 10 aa, Severe acute respiratory syndrome coronavirus 2
  REGION 1..10: note = Table A: HLA-A*68:02H
DIASTDTCFA

SEQ ID NO: 4465 - protein, 10 aa, Severe acute respiratory syndrome coronavirus 2
  REGION 1..10: note = Table A: HLA-A*11:303H HLA-A*03:01H HLA-A*03:02H HLA-A*11:01M HLA-A*11:02H HLA-A*34:02H
ASTDTCFANK

SEQ ID NO: 4466 - protein, 10 aa, Severe acute respiratory syndrome coronavirus 2
  REGION 1..10: note = Table A: HLA-A*25:01H
ANKHADFDTW

SEQ ID NO: 4467 - protein, 10 aa, Severe acute respiratory syndrome coronavirus 2
  REGION 1..10: note = Table A: HLA-A*30:02H
TWFSQRGGSY

SEQ ID NO: 4468 - protein, 10 aa, Severe acute respiratory syndrome coronavirus 2
  REGION 1..10: note = Table A: HLA-B*57:03H
KACPLIAAVI

SEQ ID NO: 4469 - protein, 10 aa, Severe acute respiratory syndrome coronavirus 2
  REGION 1..10: note = Table A: HLA-A*02:05H HLA-A*02:06H HLA-A*02:03H
AVITREVGFV

SEQ ID NO: 4470 - protein, 10 aa, Severe acute respiratory syndrome coronavirus 2
  REGION 1..10: note = Table A: HLA-B*40:01H HLA-B*40:02M HLA-B*40:06H
REVGFVVPGL

SEQ ID NO: 4471 - protein, 10 aa, Severe acute respiratory syndrome coronavirus 2
  REGION 1..10: note = Table A: HLA-A*68:02H HLA-A*02:03H
FVVPGLPGTI

SEQ ID NO: 4472 - protein, 10 aa, Severe acute respiratory syndrome coronavirus 2
  REGION 1..10: note = Table A: HLA-C*15:05H
VVPGLPGTIL

SEQ ID NO: 4473 - protein, 10 aa, Severe acute respiratory syndrome coronavirus 2
  REGION 1..10: note = Table A: HLA-A*34:01H
VPGLPGTILR

SEQ ID NO: 4474 - protein, 10 aa, Severe acute respiratory syndrome coronavirus 2
  REGION 1..10: note = Table A: HLA-A*02:02H HLA-B*38:02H
ILRTTNGDFL

SEQ ID NO: 4475 - protein, 10 aa, Severe acute respiratory syndrome coronavirus 2
  REGION 1..10: note = Table A: HLA-B*58:01H HLA-A*36:01H HLA-B*57:03M
RTTNGDFLHF

SEQ ID NO: 4476 - protein, 10 aa, Severe acute respiratory syndrome coronavirus 2
  REGION 1..10: note = Table A: HLA-A*68:02H HLA-A*02:02H
TTNGDFLHFL

SEQ ID NO: 4477 - protein, 10 aa, Severe acute respiratory syndrome coronavirus 2
  REGION 1..10: note = Table A: HLA-A*02:11H
FLHFLPRVFS

SEQ ID NO: 4478 - protein, 10 aa, Severe acute respiratory syndrome coronavirus 2
  REGION 1..10: note = Table A: HLA-A*29:01H HLA-A*29:02H HLA-A*30:02H
VFSAVGNICY

SEQ ID NO: 4479 - protein, 10 aa, Severe acute respiratory syndrome coronavirus 2
  REGION 1..10: note = Table A: HLA-B*45:01H HLA-B*18:01H HLA-B*40:06M HLA-B*49:01H HLA-B*50:01H
IEYTDFATSA

SEQ ID NO: 4480 - protein, 10 aa, Severe acute respiratory syndrome coronavirus 2
  REGION 1..10: note = Table A: HLA-B*40:02H
TDFATSACVL

SEQ ID NO: 4481 - protein, 10 aa, Severe acute respiratory syndrome coronavirus 2
  REGION 1..10: note = Table A: HLA-A*03:01H HLA-A*03:02H
VLAAECTIFK

SEQ ID NO: 4482 - protein, 10 aa, Severe acute respiratory syndrome coronavirus 2
  REGION 1..10: note = Table A: HLA-A*30:02H
ASGKPVPYCY

SEQ ID NO: 4483 - protein, 10 aa, Severe acute respiratory syndrome coronavirus 2
  REGION 1..10: note = Table A: HLA-C*15:05H
VPYCYDTNVL

SEQ ID NO: 4484 - protein, 10 aa, Severe acute respiratory syndrome coronavirus 2
  REGION 1..10: note = Table A: HLA-B*35:01H
TNVLEGSVAY

SEQ ID NO: 4485 - protein, 10 aa, Severe acute respiratory syndrome coronavirus 2
  REGION 1..10: note = Table A: HLA-B*40:01H HLA-B*40:02H
LEGSVAYESL

SEQ ID NO: 4486 - protein, 10 aa, Severe acute respiratory syndrome coronavirus 2
  REGION 1..10: note = Table A: HLA-A*02:02H HLA-B*07:04H
SLRPDTRYVL

SEQ ID NO: 4487 - protein, 10 aa, Severe acute respiratory syndrome coronavirus 2
  REGION 1..10: note = Table A: HLA-C*14:03H HLA-A*11:303H HLA-A*25:01H HLA-B*46:01H HLA-A*26:02H HLA-A*02:11H HLA-C*15:05H HLA-A*02:04M HLA-A*02:07H HLA-B*14:01H HLA-A*02:01M HLA-A*02:02M HLA-A*02:03H HLA-A*24:02H HLA-A*23:01H
  REGION 1..10: note = CONT. FROM ABOVE: HLA-B*38:02M HLA-B*15:01M HLA-B*15:02H
VLMDGSIIQF

SEQ ID NO: 4488 - protein, 10 aa, Severe acute respiratory syndrome coronavirus 2
  REGION 1..10: note = Table A: HLA-A*30:02H
GSIIQFPNTY

SEQ ID NO: 4489 - protein, 10 aa, Severe acute respiratory syndrome coronavirus 2
  REGION 1..10: note = Table A: HLA-A*11:303H HLA-C*03:03H HLA-A*02:11H HLA-C*03:04H HLA-A*68:02H HLA-A*02:04H HLA-A*02:05H HLA-A*02:08H HLA-A*02:01H HLA-A*02:02H HLA-A*02:03H HLA-C*17:01H HLA-A*66:01H
SIIQFPNTYL

SEQ ID NO: 4490 - protein, 10 aa, Severe acute respiratory syndrome coronavirus 2
  REGION 1..10: note = Table A: HLA-A*68:02H
NTYLEGSVRV

SEQ ID NO: 4491 - protein, 10 aa, Severe acute respiratory syndrome coronavirus 2
  REGION 1..10: note = Table A: HLA-C*14:03H HLA-C*06:02H
TYLEGSVRVV

SEQ ID NO: 4492 - protein, 10 aa, Severe acute respiratory syndrome coronavirus 2
  REGION 1..10: note = Table A: HLA-A*36:01H HLA-A*30:02M HLA-B*15:01H
RVVTTFDSEY

SEQ ID NO: 4493 - protein, 10 aa, Severe acute respiratory syndrome coronavirus 2
  REGION 1..10: note = Table A: HLA-A*34:02H
TTFDSEYCRH

SEQ ID NO: 4494 - protein, 10 aa, Severe acute respiratory syndrome coronavirus 2
  REGION 1..10: note = Table A: HLA-A*33:03H
EYCRHGTCER

SEQ ID NO: 4495 - protein, 10 aa, Severe acute respiratory syndrome coronavirus 2
  REGION 1..10: note = Table A: HLA-A*30:02H
SGRWVLNNDY

SEQ ID NO: 4496 - protein, 10 aa, Severe acute respiratory syndrome coronavirus 2
  REGION 1..10: note = Table A: HLA-B*27:05M HLA-B*27:02M HLA-B*38:02H
GRWVLNNDYY

SEQ ID NO: 4497 - protein, 10 aa, Severe acute respiratory syndrome coronavirus 2
  REGION 1..10: note = Table A: HLA-C*01:02H HLA-A*02:04H HLA-A*02:02H
VLNNDYYRSL

SEQ ID NO: 4498 - protein, 10 aa, Severe acute respiratory syndrome coronavirus 2
  REGION 1..10: note = Table A: HLA-A*24:07H
DYYRSLPGVF

SEQ ID NO: 4499 - protein, 10 aa, Severe acute respiratory syndrome coronavirus 2
  REGION 1..10: note = Table A: HLA-A*02:11H HLA-A*02:06H
RSLPGVFCGV

SEQ ID NO: 4500 - protein, 10 aa, Severe acute respiratory syndrome coronavirus 2
  REGION 1..10: note = Table A: HLA-B*35:01H
DAVNLLTNMF

SEQ ID NO: 4501 - protein, 10 aa, Severe acute respiratory syndrome coronavirus 2
  REGION 1..10: note = Table A: HLA-A*02:11H HLA-A*68:02H HLA-B*54:01H
FTPLIQPIGA

SEQ ID NO: 4502 - protein, 10 aa, Severe acute respiratory syndrome coronavirus 2
  REGION 1..10: note = Table A: HLA-C*15:05M HLA-B*07:02H HLA-B*07:05M
TPLIQPIGAL

SEQ ID NO: 4503 - protein, 10 aa, Severe acute respiratory syndrome coronavirus 2
  REGION 1..10: note = Table A: HLA-B*56:01H HLA-B*55:02H HLA-B*35:03H HLA-C*15:05H HLA-B*55:01M HLA-B*39:06H HLA-B*54:01M
QPIGALDISA

SEQ ID NO: 4504 - protein, 10 aa, Severe acute respiratory syndrome coronavirus 2
  REGION 1..10: note = Table A: HLA-A*68:02H HLA-A*02:05H HLA-A*02:06H HLA-A*02:08M HLA-A*02:01H HLA-B*38:02H
SIVAGGIVAI

SEQ ID NO: 4505 - protein, 10 aa, Severe acute respiratory syndrome coronavirus 2
  REGION 1..10: note = Table A: HLA-A*68:02H HLA-A*02:08H
IVAGGIVAIV

SEQ ID NO: 4506 - protein, 10 aa, Severe acute respiratory syndrome coronavirus 2
  REGION 1..10: note = Table A: HLA-C*16:04H HLA-A*02:11H HLA-B*55:02H HLA-A*30:02H HLA-C*15:02H HLA-A*02:05H HLA-A*02:08H HLA-A*02:02H HLA-C*08:01H HLA-B*07:04H HLA-B*13:02H
RAFGEYSHVV

SEQ ID NO: 4507 - protein, 10 aa, Severe acute respiratory syndrome coronavirus 2
  REGION 1..10: note = Table A: HLA-C*08:01H
YSHVVAFNTL

SEQ ID NO: 4508 - protein, 10 aa, Severe acute respiratory syndrome coronavirus 2
  REGION 1..10: note = Table A: HLA-B*38:01H HLA-B*38:02M HLA-B*15:10H
SHVVAFNTLL

SEQ ID NO: 4509 - protein, 10 aa, Severe acute respiratory syndrome coronavirus 2
  REGION 1..10: note = Table A: HLA-A*26:01H
HVVAFNTLLF

SEQ ID NO: 4510 - protein, 10 aa, Severe acute respiratory syndrome coronavirus 2
  REGION 1..10: note = Table A: HLA-A*68:02H
YSFLPGVYSV

SEQ ID NO: 4511 - protein, 10 aa, Severe acute respiratory syndrome coronavirus 2
  REGION 1..10: note = Table A: HLA-A*24:07H HLA-A*23:01H
SFLPGVYSVI

SEQ ID NO: 4512 - protein, 10 aa, Severe acute respiratory syndrome coronavirus 2
  REGION 1..10: note = Table A: HLA-C*14:02H HLA-C*14:03M HLA-A*24:07H HLA-A*23:01H HLA-B*15:02H HLA-B*07:05H
TFYLTNDVSF

SEQ ID NO: 4513 - protein, 10 aa, Severe acute respiratory syndrome coronavirus 2
  REGION 1..10: note = Table A: HLA-C*14:02H HLA-C*14:03M HLA-A*24:02H HLA-A*24:07H HLA-A*23:01H
FYLTNDVSFL

SEQ ID NO: 4514 - protein, 10 aa, Severe acute respiratory syndrome coronavirus 2
  REGION 1..10: note = Table A: HLA-A*34:02H
LTNDVSFLAH

SEQ ID NO: 4515 - protein, 10 aa, Severe acute respiratory syndrome coronavirus 2
  REGION 1..10: note = Table A: HLA-A*25:01H HLA-B*53:01H HLA-A*68:02H
DVSFLAHIQW

SEQ ID NO: 4516 - protein, 10 aa, Severe acute respiratory syndrome coronavirus 2
  REGION 1..10: note = Table A: HLA-C*15:05H
TPLVPFWITI

SEQ ID NO: 4517 - protein, 10 aa, Severe acute respiratory syndrome coronavirus 2
  REGION 1..10: note = Table A: HLA-B*58:02H HLA-B*57:03H
ISTKHFYWFF

SEQ ID NO: 4518 - protein, 10 aa, Severe acute respiratory syndrome coronavirus 2
  REGION 1..10: note = Table A: HLA-C*14:03H
HFYWFFSNYL

SEQ ID NO: 4519 - protein, 10 aa, Severe acute respiratory syndrome coronavirus 2
  REGION 1..10: note = Table A: HLA-B*27:05H HLA-B*27:02H
RRVVFNGVSF

SEQ ID NO: 4520 - protein, 10 aa, Severe acute respiratory syndrome coronavirus 2
  REGION 1..10: note = Table A: HLA-A*68:02H
VVFNGVSFST

SEQ ID NO: 4521 - protein, 10 aa, Severe acute respiratory syndrome coronavirus 2
  REGION 1..10: note = Table A: HLA-C*14:02M HLA-C*14:03M HLA-A*29:02H HLA-A*24:02M HLA-A*24:07H HLA-A*23:01H HLA-B*07:05H
VFNGVSFSTF

SEQ ID NO: 4522 - protein, 10 aa, Severe acute respiratory syndrome coronavirus 2
  REGION 1..10: note = Table A: HLA-A*68:02H
GVSFSTFEEA

SEQ ID NO: 4523 - protein, 10 aa, Severe acute respiratory syndrome coronavirus 2
  REGION 1..10: note = Table A: HLA-C*04:01M HLA-C*04:03H HLA-B*38:02H
TFEEAALCTF

SEQ ID NO: 4524 - protein, 10 aa, Severe acute respiratory syndrome coronavirus 2
  REGION 1..10: note = Table A: HLA-B*40:01H
FEEAALCTFL

SEQ ID NO: 4525 - protein, 10 aa, Severe acute respiratory syndrome coronavirus 2
  REGION 1..10: note = Table A: HLA-A*02:02M
LLNKEMYLKL

SEQ ID NO: 4526 - protein, 10 aa, Severe acute respiratory syndrome coronavirus 2
  REGION 1..10: note = Table A: HLA-B*08:01H
YLKLRSDVLL

SEQ ID NO: 4527 - protein, 10 aa, Severe acute respiratory syndrome coronavirus 2
  REGION 1..10: note = Table A: HLA-B*44:03H HLA-B*18:01H HLA-B*35:01H
SDVLLPLTQY

SEQ ID NO: 4528 - protein, 10 aa, Severe acute respiratory syndrome coronavirus 2
  REGION 1..10: note = Table A: HLA-A*74:01M
VLLPLTQYNR

SEQ ID NO: 4529 - protein, 10 aa, Severe acute respiratory syndrome coronavirus 2
  REGION 1..10: note = Table A: HLA-A*30:02M HLA-B*38:02H HLA-B*15:01H HLA-B*15:02H HLA-B*15:03H
TQYNRYLALY

SEQ ID NO: 4530 - protein, 10 aa, Severe acute respiratory syndrome coronavirus 2
  REGION 1..10: note = Table A: HLA-A*30:01H
RYLALYNKYK

SEQ ID NO: 4531 - protein, 10 aa, Severe acute respiratory syndrome coronavirus 2
  REGION 1..10: note = Table A: HLA-A*01:01H
FSGAMDTTSY

SEQ ID NO: 4532 - protein, 10 aa, Severe acute respiratory syndrome coronavirus 2
  REGION 1..10: note = Table A: HLA-A*68:01H HLA-A*34:01H
SGAMDTTSYR

SEQ ID NO: 4533 - protein, 10 aa, Severe acute respiratory syndrome coronavirus 2
  REGION 1..10: note = Table A: HLA-A*02:07H HLA-A*02:01H HLA-A*02:02H
AMDTTSYREA

SEQ ID NO: 4534 - protein, 10 aa, Severe acute respiratory syndrome coronavirus 2
  REGION 1..10: note = Table A: HLA-B*38:02H
CHLAKALNDF

SEQ ID NO: 4535 - protein, 10 aa, Severe acute respiratory syndrome coronavirus 2
  REGION 1..10: note = Table A: HLA-A*36:01H HLA-A*30:02H HLA-B*35:01H
FSNSGSDVLY

SEQ ID NO: 4536 - protein, 10 aa, Severe acute respiratory syndrome coronavirus 2
  REGION 1..10: note = Table A: HLA-A*03:01H HLA-A*02:11H HLA-C*15:05H HLA-A*02:03H HLA-B*52:01M HLA-B*38:02H HLA-B*13:02H
VLYQPPQTSI

SEQ ID NO: 4537 - protein, 10 aa, Severe acute respiratory syndrome coronavirus 2
  REGION 1..10: note = Table A: HLA-B*56:01H HLA-B*55:02M HLA-C*15:05M HLA-B*55:01H HLA-B*54:01H HLA-B*07:05H
QPPQTSITSA

SEQ ID NO: 4538 - protein, 10 aa, Severe acute respiratory syndrome coronavirus 2
  REGION 1..10: note = Table A: HLA-B*58:01H HLA-B*57:01H HLA-A*68:01H HLA-B*57:03M
ITSAVLQSGF

SEQ ID NO: 4539 - protein, 10 aa, Severe acute respiratory syndrome coronavirus 2
  REGION 1..10: note = Table A: HLA-A*68:01H HLA-A*34:01H HLA-A*34:02H HLA-A*66:01M
TSAVLQSGFR

SEQ ID NO: 4540 - protein, 10 aa, Severe acute respiratory syndrome coronavirus 2
  REGION 1..10: note = Table A: HLA-B*35:01H HLA-B*35:07H HLA-B*54:01M
MAFPSGKVEG

SEQ ID NO: 4541 - protein, 10 aa, Severe acute respiratory syndrome coronavirus 2
  REGION 1..10: note = Table A: HLA-C*15:05H
FPSGKVEGCM

SEQ ID NO: 4542 - protein, 10 aa, Severe acute respiratory syndrome coronavirus 2
  REGION 1..10: note = Table A: HLA-B*15:01H
VQVTCGTTTL

SEQ ID NO: 4543 - protein, 10 aa, Severe acute respiratory syndrome coronavirus 2
  REGION 1..10: note = Table A: HLA-A*02:04H HLA-A*02:01H
GLWLDDVVYC

SEQ ID NO: 4544 - protein, 10 aa, Severe acute respiratory syndrome coronavirus 2
  REGION 1..10: note = Table A: HLA-A*36:01H HLA-A*01:01H
TSEDMLNPNY

SEQ ID NO: 4545 - protein, 10 aa, Severe acute respiratory syndrome coronavirus 2
  REGION 1..10: note = Table A: HLA-A*02:04H HLA-A*02:02M HLA-B*38:02H
MLNPNYEDLL

SEQ ID NO: 4546 - protein, 10 aa, Severe acute respiratory syndrome coronavirus 2
  REGION 1..10: note = Table A: HLA-B*55:02M HLA-A*02:08H
KSNHNFLVQA

SEQ ID NO: 4547 - protein, 10 aa, Severe acute respiratory syndrome coronavirus 2
  REGION 1..10: note = Table A: HLA-A*11:303H HLA-A*02:04M HLA-A*02:05H HLA-A*02:06H HLA-B*14:01H HLA-A*02:01M HLA-A*02:02M HLA-A*02:03H HLA-C*08:03H HLA-B*38:02M
FLVQAGNVQL

SEQ ID NO: 4548 - protein, 10 aa, Severe acute respiratory syndrome coronavirus 2
  REGION 1..10: note = Table A: HLA-A*74:01M HLA-A*03:02H HLA-A*11:01H HLA-A*33:01H HLA-A*33:03H HLA-A*26:03M HLA-A*68:01M HLA-A*34:01M HLA-A*34:02H HLA-A*31:01H HLA-A*66:01H
LVQAGNVQLR

SEQ ID NO: 4549 - protein, 10 aa, Severe acute respiratory syndrome coronavirus 2
  REGION 1..10: note = Table A: HLA-B*13:02H
VQAGNVQLRV

SEQ ID NO: 4550 - protein, 10 aa, Severe acute respiratory syndrome coronavirus 2
  REGION 1..10: note = Table A: HLA-A*30:02H
VQLRVIGHSM

SEQ ID NO: 4551 - protein, 10 aa, Severe acute respiratory syndrome coronavirus 2
  REGION 1..10: note = Table A: HLA-A*02:05H HLA-A*02:08H
RVIGHSMQNC

SEQ ID NO: 4552 - protein, 10 aa, Severe acute respiratory syndrome coronavirus 2
  REGION 1..10: note = Table A: HLA-A*74:01H HLA-A*03:01H HLA-A*03:02H
KLKVDTANPK

SEQ ID NO: 4553 - protein, 10 aa, Severe acute respiratory syndrome coronavirus 2
  REGION 1..10: note = Table A: HLA-A*25:01M HLA-A*26:01H HLA-A*26:02M HLA-A*26:03H HLA-A*68:01H HLA-A*34:02M
DTANPKTPKY

SEQ ID NO: 4554 - protein, 10 aa, Severe acute respiratory syndrome coronavirus 2
  REGION 1..10: note = Table A: HLA-A*34:02H
TANPKTPKYK

SEQ ID NO: 4555 - protein, 10 aa, Severe acute respiratory syndrome coronavirus 2
  REGION 1..10: note = Table A: HLA-B*07:04M
NPKTPKYKFV

SEQ ID NO: 4556 - protein, 10 aa, Severe acute respiratory syndrome coronavirus 2
  REGION 1..10: note = Table A: HLA-B*57:03H
KTPKYKFVRI

SEQ ID NO: 4557 - protein, 10 aa, Severe acute respiratory syndrome coronavirus 2
  REGION 1..10: note = Table A: HLA-B*42:01H HLA-B*57:01H HLA-A*25:01H HLA-B*46:01M HLA-C*03:02M HLA-C*15:05H HLA-C*12:02M HLA-A*34:01H HLA-B*38:02M HLA-B*07:02M HLA-B*07:04M HLA-B*15:01H HLA-B*15:02M HLA-B*57:03H HLA-C*02:02H HLA-B*15:11H
  REGION 1..10: note = CONT. FROM ABOVE: HLA-A*66:01H
FVRIQPGQTF

SEQ ID NO: 4558 - protein, 10 aa, Severe acute respiratory syndrome coronavirus 2
  REGION 1..10: note = Table A: HLA-A*02:11H HLA-A*02:08H HLA-B*13:02H
RIQPGQTFSV

SEQ ID NO: 4559 - protein, 10 aa, Severe acute respiratory syndrome coronavirus 2
  REGION 1..10: note = Table A: HLA-C*01:02H HLA-B*15:01H
IQPGQTFSVL

SEQ ID NO: 4560 - protein, 10 aa, Severe acute respiratory syndrome coronavirus 2
  REGION 1..10: note = Table A: HLA-B*55:02H
QPGQTFSVLA

SEQ ID NO: 4561 - protein, 10 aa, Severe acute respiratory syndrome coronavirus 2
  REGION 1..10: note = Table A: HLA-A*30:02H HLA-B*15:01M HLA-B*13:02H
GQTFSVLACY

SEQ ID NO: 4562 - protein, 10 aa, Severe acute respiratory syndrome coronavirus 2
  REGION 1..10: note = Table A: HLA-A*02:03H
ACYNGSPSGV

SEQ ID NO: 4563 - protein, 10 aa, Severe acute respiratory syndrome coronavirus 2
  REGION 1..10: note = Table A: HLA-A*30:02H
CYNGSPSGVY

SEQ ID NO: 4564 - protein, 10 aa, Severe acute respiratory syndrome coronavirus 2
  REGION 1..10: note = Table A: HLA-B*35:03H HLA-C*15:05M HLA-B*35:01H HLA-B*07:02M HLA-B*07:04H HLA-B*07:05M
SPSGVYQCAM

SEQ ID NO: 4565 - protein, 10 aa, Severe acute respiratory syndrome coronavirus 2
  REGION 1..10: note = Table A: HLA-A*74:01H HLA-A*02:02H
AMRPNFTIKG

SEQ ID NO: 4566 - protein, 10 aa, Severe acute respiratory syndrome coronavirus 2
  REGION 1..10: note = Table A: HLA-B*42:01H HLA-B*56:01H HLA-B*55:02H HLA-C*15:05M HLA-B*55:01H HLA-B*07:02M HLA-B*07:04H HLA-B*07:05H
RPNFTIKGSF

SEQ ID NO: 4567 - protein, 10 aa, Severe acute respiratory syndrome coronavirus 2
  REGION 1..10: note = Table A: HLA-A*34:02H HLA-A*66:01H
FTIKGSFLNG

SEQ ID NO: 4568 - protein, 10 aa, Severe acute respiratory syndrome coronavirus 2
  REGION 1..10: note = Table A: HLA-B*38:02M HLA-B*39:06H HLA-B*39:01H
MHHMELPTGV

SEQ ID NO: 4569 - protein, 10 aa, Severe acute respiratory syndrome coronavirus 2
  REGION 1..10: note = Table A: HLA-B*38:02H
HHMELPTGVH

SEQ ID NO: 4570 - protein, 10 aa, Severe acute respiratory syndrome coronavirus 2
  REGION 1..10: note = Table A: HLA-B*38:02H
HMELPTGVHA

SEQ ID NO: 4571 - protein, 10 aa, Severe acute respiratory syndrome coronavirus 2
  REGION 1..10: note = Table A: HLA-B*45:01H HLA-B*40:02H HLA-B*40:06H HLA-B*50:01H
MELPTGVHAG

SEQ ID NO: 4572 - protein, 10 aa, Severe acute respiratory syndrome coronavirus 2
  REGION 1..10: note = Table A: HLA-A*30:02H
AGTDLEGNFY

SEQ ID NO: 4573 - protein, 10 aa, Severe acute respiratory syndrome coronavirus 2
  REGION 1..10: note = Table A: HLA-A*36:01H
GTDLEGNFYG

SEQ ID NO: 4574 - protein, 10 aa, Severe acute respiratory syndrome coronavirus 2
  REGION 1..10: note = Table A: HLA-A*33:01H HLA-A*33:03M HLA-B*27:02H HLA-A*68:01H HLA-A*68:02H HLA-A*66:01H
GNFYGPFVDR

SEQ ID NO: 4575 - protein, 10 aa, Severe acute respiratory syndrome coronavirus 2
  REGION 1..10: note = Table A: HLA-C*06:02H
FYGPFVDRQT

SEQ ID NO: 4576 - protein, 10 aa, Severe acute respiratory syndrome coronavirus 2
  REGION 1..10: note = Table A: HLA-C*15:05H
GPFVDRQTAQ

SEQ ID NO: 4577 - protein, 10 aa, Severe acute respiratory syndrome coronavirus 2
  REGION 1..10: note = Table A: HLA-B*38:02H HLA-B*13:01H HLA-B*13:02M
AQAAGTDTTI

SEQ ID NO: 4578 - protein, 10 aa, Severe acute respiratory syndrome coronavirus 2
  REGION 1..10: note = Table A: HLA-A*68:02H
GTDTTITVNV

SEQ ID NO: 4579 - protein, 10 aa, Severe acute respiratory syndrome coronavirus 2
  REGION 1..10: note = Table A: HLA-C*08:03H
TDTTITVNVL

SEQ ID NO: 4580 - protein, 10 aa, Severe acute respiratory syndrome coronavirus 2
  REGION 1..10: note = Table A: HLA-B*58:01H HLA-B*57:01H HLA-A*25:01M HLA-B*57:03H
TTITVNVLAW

SEQ ID NO: 4581 - protein, 10 aa, Severe acute respiratory syndrome coronavirus 2
  REGION 1..10: note = Table A: HLA-A*36:01H HLA-A*29:02H
ITVNVLAWLY

SEQ ID NO: 4582 - protein, 10 aa, Severe acute respiratory syndrome coronavirus 2
  REGION 1..10: note = Table A: HLA-B*58:01H HLA-B*57:01H HLA-B*53:01H HLA-B*35:07H HLA-B*38:02H HLA-B*57:03M HLA-B*13:01H
YAAVINGDRW

SEQ ID NO: 4583 - protein, 10 aa, Severe acute respiratory syndrome coronavirus 2
  REGION 1..10: note = Table A: HLA-A*11:303H HLA-A*74:01H HLA-A*11:01H HLA-A*11:02M HLA-A*02:11M HLA-C*03:04H HLA-A*30:02H HLA-A*68:02M HLA-C*15:02H HLA-A*02:04M HLA-A*02:05M HLA-A*02:06M HLA-A*02:07H HLA-A*02:08M HLA-A*02:01H
  REGION 1..10: note = CONT. FROM ABOVE: HLA-A*02:02M HLA-C*17:01H HLA-C*08:01M HLA- B*38:02H HLA-B*40:06H HLA-B*57:03H HLA-B*13:01H HLA-A*66:01H
AVINGDRWFL

SEQ ID NO: 4584 - protein, 10 aa, Severe acute respiratory syndrome coronavirus 2
  REGION 1..10: note = Table A: HLA-A*24:07H
WFLNRFTTTL

SEQ ID NO: 4585 - protein, 10 aa, Severe acute respiratory syndrome coronavirus 2
  REGION 1..10: note = Table A: HLA-A*68:02H
FTTTLNDFNL

SEQ ID NO: 4586 - protein, 10 aa, Severe acute respiratory syndrome coronavirus 2
  REGION 1..10: note = Table A: HLA-A*11:303H HLA-B*46:01M HLA-A*02:04M HLA-A*02:01H HLA-A*02:02H HLA-A*02:03H HLA-B*38:02M HLA-B*15:01H HLA-B*15:02M
TLNDFNLVAM

SEQ ID NO: 4587 - protein, 10 aa, Severe acute respiratory syndrome coronavirus 2
  REGION 1..10: note = Table A: HLA-B*18:01H
NDFNLVAMKY

SEQ ID NO: 4588 - protein, 10 aa, Severe acute respiratory syndrome coronavirus 2
  REGION 1..10: note = Table A: HLA-B*39:01H
DHVDILGPLS

SEQ ID NO: 4589 - protein, 10 aa, Severe acute respiratory syndrome coronavirus 2
  REGION 1..10: note = Table A: HLA-A*36:01H HLA-B*38:02H HLA-B*54:01H
HVDILGPLSA

SEQ ID NO: 4590 - protein, 10 aa, Severe acute respiratory syndrome coronavirus 2
  REGION 1..10: note = Table A: HLA-B*55:02H
GPLSAQTGIA

SEQ ID NO: 4591 - protein, 10 aa, Severe acute respiratory syndrome coronavirus 2
  REGION 1..10: note = Table A: HLA-B*13:02H
AQTGIAVLDM

SEQ ID NO: 4592 - protein, 10 aa, Severe acute respiratory syndrome coronavirus 2
  REGION 1..10: note = Table A: HLA-A*03:01M HLA-A*03:02H HLA-A*11:01M HLA-A*11:02M HLA-A*34:02H
AVLDMCASLK

SEQ ID NO: 4593 - protein, 10 aa, Severe acute respiratory syndrome coronavirus 2
  REGION 1..10: note = Table A: HLA-A*02:02M HLA-A*02:03H HLA-B*38:02H
SLKELLQNGM

SEQ ID NO: 4594 - protein, 10 aa, Severe acute respiratory syndrome coronavirus 2
  REGION 1..10: note = Table A: HLA-A*33:03H HLA-A*26:03H HLA-B*27:02H HLA-A*68:01H HLA-A*34:01H HLA-A*34:02H HLA-A*66:01M
ELLQNGMNGR

SEQ ID NO: 4595 - protein, 10 aa, Severe acute respiratory syndrome coronavirus 2
  REGION 1..10: note = Table A: HLA-A*68:02H
DEFTPFDVVR

SEQ ID NO: 4596 - protein, 10 aa, Severe acute respiratory syndrome coronavirus 2
  REGION 1..10: note = Table A: HLA-B*15:01H
VVRQCSGVTF

SEQ ID NO: 4597 - protein, 10 aa, Severe acute respiratory syndrome coronavirus 2
  REGION 1..10: note = Table A: HLA-A*11:01H HLA-A*36:01H HLA-B*27:02H HLA-A*30:02H HLA-A*34:02H
SGVTFQSAVK

SEQ ID NO: 4598 - protein, 10 aa, Severe acute respiratory syndrome coronavirus 2
  REGION 1..10: note = Table A: HLA-A*74:01H HLA-A*68:01M HLA-A*34:01H
GVTFQSAVKR

SEQ ID NO: 4599 - protein, 10 aa, Severe acute respiratory syndrome coronavirus 2
  REGION 1..10: note = Table A: HLA-B*57:03H
RTIKGTHHWL

SEQ ID NO: 4600 - protein, 10 aa, Severe acute respiratory syndrome coronavirus 2
  REGION 1..10: note = Table A: HLA-B*07:04H
TIKGTHHWLL

SEQ ID NO: 4601 - protein, 10 aa, Severe acute respiratory syndrome coronavirus 2
  REGION 1..10: note = Table A: HLA-B*38:02H
THHWLLLTIL

SEQ ID NO: 4602 - protein, 10 aa, Severe acute respiratory syndrome coronavirus 2
  REGION 1..10: note = Table A: HLA-B*58:01H HLA-B*27:02H
LLVLVQSTQW

SEQ ID NO: 4603 - protein, 10 aa, Severe acute respiratory syndrome coronavirus 2
  REGION 1..10: note = Table A: HLA-C*03:02H HLA-B*38:02H
FLYENAFLPF

SEQ ID NO: 4604 - protein, 10 aa, Severe acute respiratory syndrome coronavirus 2
  REGION 1..10: note = Table A: HLA-B*18:01H
YENAFLPFAM

SEQ ID NO: 4605 - protein, 10 aa, Severe acute respiratory syndrome coronavirus 2
  REGION 1..10: note = Table A: HLA-B*42:01H HLA-B*56:01H HLA-B*53:01H HLA-B*55:02M HLA-B*35:03H HLA-C*15:05M HLA-B*35:01H HLA-B*35:02H HLA-B*35:08H HLA-B*51:01M HLA-B*35:07H HLA-B*35:12H HLA-B*38:02H HLA-B*54:01M HLA-B*07:02H HLA-B*07:04H
  REGION 1..10: note = CONT. FROM ABOVE: HLA-B*15:02M HLA-B*07:05M HLA-B*15:11H
LPFAMGIIAM

SEQ ID NO: 4606 - protein, 10 aa, Severe acute respiratory syndrome coronavirus 2
  REGION 1..10: note = Table A: HLA-B*54:01H
FAMGIIAMSA

SEQ ID NO: 4607 - protein, 10 aa, Severe acute respiratory syndrome coronavirus 2
  REGION 1..10: note = Table A: HLA-A*02:03H
AMSAFAMMFV

SEQ ID NO: 4608 - protein, 10 aa, Severe acute respiratory syndrome coronavirus 2
  REGION 1..10: note = Table A: HLA-A*34:02H
MSAFAMMFVK

SEQ ID NO: 4609 - protein, 10 aa, Severe acute respiratory syndrome coronavirus 2
  REGION 1..10: note = Table A: HLA-B*46:01H HLA-B*15:01H HLA-B*15:02H
LLPSLATVAY

SEQ ID NO: 4610 - protein, 10 aa, Severe acute respiratory syndrome coronavirus 2
  REGION 1..10: note = Table A: HLA-B*53:01H HLA-C*15:05H HLA-B*35:01H
LPSLATVAYF

SEQ ID NO: 4611 - protein, 10 aa, Severe acute respiratory syndrome coronavirus 2
  REGION 1..10: note = Table A: HLA-A*36:01H HLA-A*30:02H
ATVAYFNMVY

SEQ ID NO: 4612 - protein, 10 aa, Severe acute respiratory syndrome coronavirus 2
  REGION 1..10: note = Table A: HLA-A*25:01H
FNMVYMPASW

SEQ ID NO: 4613 - protein, 10 aa, Severe acute respiratory syndrome coronavirus 2
  REGION 1..10: note = Table A: HLA-A*33:03H HLA-A*31:01H
VYMPASWVMR

SEQ ID NO: 4614 - protein, 10 aa, Severe acute respiratory syndrome coronavirus 2
  REGION 1..10: note = Table A: HLA-C*15:05H HLA-B*35:07H HLA-B*07:04M
MPASWVMRIM

SEQ ID NO: 4615 - protein, 10 aa, Severe acute respiratory syndrome coronavirus 2
  REGION 1..10: note = Table A: HLA-B*57:03H
ASWVMRIMTW

SEQ ID NO: 4616 - protein, 10 aa, Severe acute respiratory syndrome coronavirus 2
  REGION 1..10: note = Table A: HLA-A*25:01M HLA-A*26:01M HLA-A*26:02H HLA-A*26:03H HLA-A*34:01H HLA-B*38:02M HLA-B*15:02H
DMVDTSLSGF

SEQ ID NO: 4617 - protein, 10 aa, Severe acute respiratory syndrome coronavirus 2
  REGION 1..10: note = Table A: HLA-A*36:01M HLA-A*34:02M
MVDTSLSGFK

SEQ ID NO: 4618 - protein, 10 aa, Severe acute respiratory syndrome coronavirus 2
  REGION 1..10: note = Table A: HLA-A*34:02M HLA-A*66:01H
DTSLSGFKLK

SEQ ID NO: 4619 - protein, 10 aa, Severe acute respiratory syndrome coronavirus 2
  REGION 1..10: note = Table A: HLA-B*56:01H HLA-B*55:02H HLA-B*40:06H
AVVLLILMTA

SEQ ID NO: 4620 - protein, 10 aa, Severe acute respiratory syndrome coronavirus 2
  REGION 1..10: note = Table A: HLA-A*74:01H
VVLLILMTAR

SEQ ID NO: 4621 - protein, 10 aa, Severe acute respiratory syndrome coronavirus 2
  REGION 1..10: note = Table A: HLA-A*02:11H HLA-A*68:02H HLA-A*02:05M HLA-A*02:06M HLA-A*02:08H HLA-A*02:02H HLA-A*02:03H HLA-A*34:01H HLA-B*38:02H
TVYDDGARRV

SEQ ID NO: 4622 - protein, 10 aa, Severe acute respiratory syndrome coronavirus 2
  REGION 1..10: note = Table A: HLA-A*24:07H HLA-C*08:01H HLA-A*23:01H
VYDDGARRVW

SEQ ID NO: 4623 - protein, 10 aa, Severe acute respiratory syndrome coronavirus 2
  REGION 1..10: note = Table A: HLA-B*27:05H
RRVWTLMNVL

SEQ ID NO: 4624 - protein, 10 aa, Severe acute respiratory syndrome coronavirus 2
  REGION 1..10: note = Table A: HLA-A*29:01M HLA-A*29:02H HLA-B*38:02M HLA-B*15:01H HLA-B*15:02H HLA-B*07:05H
TLMNVLTLVY

SEQ ID NO: 4625 - protein, 10 aa, Severe acute respiratory syndrome coronavirus 2
  REGION 1..10: note = Table A: HLA-C*14:02H HLA-C*14:03H HLA-A*24:02H HLA-A*24:07H
VYKVYYGNAL

SEQ ID NO: 4626 - protein, 10 aa, Severe acute respiratory syndrome coronavirus 2
  REGION 1..10: note = Table A: HLA-A*25:01M HLA-B*53:01H HLA-B*35:01H HLA-B*35:07H HLA-B*38:02H HLA-B*57:03H
NALDQAISMW

SEQ ID NO: 4627 - protein, 10 aa, Severe acute respiratory syndrome coronavirus 2
  REGION 1..10: note = Table A: HLA-A*11:303H HLA-B*46:01H HLA-A*29:01H HLA-B*27:02H HLA-A*30:02M HLA-B*38:02M HLA-B*15:01H HLA-B*15:03H
ALIISVTSNY

SEQ ID NO: 4628 - protein, 10 aa, Severe acute respiratory syndrome coronavirus 2
  REGION 1..10: note = Table A: HLA-A*68:02H HLA-A*02:01H HLA-A*02:02H HLA-A*02:03M HLA-B*38:02H
SNYSGVVTTV

SEQ ID NO: 4629 - protein, 10 aa, Severe acute respiratory syndrome coronavirus 2
  REGION 1..10: note = Table A: HLA-C*14:02H HLA-C*14:03H HLA-C*07:02H HLA-B*07:05H
NYSGVVTTVM

SEQ ID NO: 4630 - protein, 10 aa, Severe acute respiratory syndrome coronavirus 2
  REGION 1..10: note = Table A: HLA-C*14:03H
MFLARGIVFM

SEQ ID NO: 4631 - protein, 10 aa, Severe acute respiratory syndrome coronavirus 2
  REGION 1..10: note = Table A: HLA-A*30:02H
RYFRLTLGVY

SEQ ID NO: 4632 - protein, 10 aa, Severe acute respiratory syndrome coronavirus 2
  REGION 1..10: note = Table A: HLA-B*27:02H
FRLTLGVYDY

SEQ ID NO: 4633 - protein, 10 aa, Severe acute respiratory syndrome coronavirus 2
  REGION 1..10: note = Table A: HLA-A*02:02H HLA-B*13:01M
RLTLGVYDYL

SEQ ID NO: 4634 - protein, 10 aa, Severe acute respiratory syndrome coronavirus 2
  REGION 1..10: note = Table A: HLA-B*18:01H HLA-B*27:02H HLA-B*37:01H HLA-B*38:02H
YDYLVSTQEF

SEQ ID NO: 4635 - protein, 10 aa, Severe acute respiratory syndrome coronavirus 2
  REGION 1..10: note = Table A: HLA-A*33:01H HLA-A*33:03H
DYLVSTQEFR

SEQ ID NO: 4636 - protein, 10 aa, Severe acute respiratory syndrome coronavirus 2
  REGION 1..10: note = Table A: HLA-A*36:01H HLA-A*29:02M HLA-A*30:02H
YLVSTQEFRY

SEQ ID NO: 4637 - protein, 10 aa, Severe acute respiratory syndrome coronavirus 2
  REGION 1..10: note = Table A: HLA-A*33:03H
STQEFRYMNS

SEQ ID NO: 4638 - protein, 10 aa, Severe acute respiratory syndrome coronavirus 2
  REGION 1..10: note = Table A: HLA-A*11:01H HLA-A*11:02H HLA-A*68:01H HLA-A*34:02M
MNSQGLLPPK

SEQ ID NO: 4639 - protein, 10 aa, Severe acute respiratory syndrome coronavirus 2
  REGION 1..10: note = Table A: HLA-B*53:01H HLA-B*35:03H HLA-C*15:05M HLA-B*35:01H HLA-B*35:02H HLA-B*35:08M HLA-B*35:07M HLA-B*35:12H HLA-B*07:05M
LPPKNSIDAF

SEQ ID NO: 4640 - protein, 10 aa, Severe acute respiratory syndrome coronavirus 2
  REGION 1..10: note = Table A: HLA-A*03:02H
TVQSKMSDVK

SEQ ID NO: 4641 - protein, 10 aa, Severe acute respiratory syndrome coronavirus 2
  REGION 1..10: note = Table A: HLA-A*02:11M HLA-A*02:01H HLA-A*02:02M HLA-A*02:03M
KMSDVKCTSV

SEQ ID NO: 4642 - protein, 10 aa, Severe acute respiratory syndrome coronavirus 2
  REGION 1..10: note = Table A: HLA-A*03:01H HLA-A*03:02H
QLHNDILLAK

SEQ ID NO: 4643 - protein, 10 aa, Severe acute respiratory syndrome coronavirus 2
  REGION 1..10: note = Table A: HLA-B*15:01H HLA-B*13:01H
LLAKDTTEAF

SEQ ID NO: 4644 - protein, 10 aa, Severe acute respiratory syndrome coronavirus 2
  REGION 1..10: note = Table A: HLA-A*68:02M
DTTEAFEKMV

SEQ ID NO: 4645 - protein, 10 aa, Severe acute respiratory syndrome coronavirus 2
  REGION 1..10: note = Table A: HLA-B*44:05H HLA-B*40:01M HLA-B*40:02M HLA-B*41:02H
TEAFEKMVSL

SEQ ID NO: 4646 - protein, 10 aa, Severe acute respiratory syndrome coronavirus 2
  REGION 1..10: note = Table A: HLA-A*68:02H HLA-A*34:01H HLA-A*34:02H
EAFEKMVSLL

SEQ ID NO: 4647 - protein, 10 aa, Severe acute respiratory syndrome coronavirus 2
  REGION 1..10: note = Table A: HLA-A*02:11H HLA-B*57:03H
KMVSLLSVLL

SEQ ID NO: 4648 - protein, 10 aa, Severe acute respiratory syndrome coronavirus 2
  REGION 1..10: note = Table A: HLA-A*11:303H HLA-A*03:01H HLA-A*03:02H HLA-A*11:01M HLA-A*11:02M HLA-A*30:02H HLA-C*07:27H
SMQGAVDINK

SEQ ID NO: 4649 - protein, 10 aa, Severe acute respiratory syndrome coronavirus 2
  REGION 1..10: note = Table A: HLA-B*38:01H HLA-B*38:02H HLA-B*39:01H HLA-B*13:01H
MQGAVDINKL

SEQ ID NO: 4650 - protein, 10 aa, Severe acute respiratory syndrome coronavirus 2
  REGION 1..10: note = Table A: HLA-B*44:02M HLA-B*44:05H HLA-B*45:01H HLA-B*44:03M HLA-B*40:01H HLA-B*40:02M HLA-B*41:02M HLA-B*49:01H
EEMLDNRATL

SEQ ID NO: 4651 - protein, 10 aa, Severe acute respiratory syndrome coronavirus 2
  REGION 1..10: note = Table A: HLA-B*58:01H HLA-A*11:01H HLA-B*57:01H HLA-A*30:02H HLA-C*15:05H HLA-A*34:02H HLA-B*57:03M
ATLQAIASEF

SEQ ID NO: 4652 - protein, 10 aa, Severe acute respiratory syndrome coronavirus 2
  REGION 1..10: note = Table A: HLA-A*11:303H HLA-C*03:03H HLA-C*03:04H HLA-B*35:03H HLA-C*15:05H HLA-C*08:01H HLA-B*38:02M HLA-B*39:01H
QAIASEFSSL

SEQ ID NO: 4653 - protein, 10 aa, Severe acute respiratory syndrome coronavirus 2
  REGION 1..10: note = Table A: HLA-B*58:01H HLA-A*36:01H HLA-A*01:01H HLA-A*30:02H
ASEFSSLPSY

SEQ ID NO: 4654 - protein, 10 aa, Severe acute respiratory syndrome coronavirus 2
  REGION 1..10: note = Table A: HLA-B*45:01H HLA-B*40:06H HLA-B*49:01H HLA-B*50:01M
SEFSSLPSYA

SEQ ID NO: 4655 - protein, 10 aa, Severe acute respiratory syndrome coronavirus 2
  REGION 1..10: note = Table A: HLA-B*46:01H
FSSLPSYAAF

SEQ ID NO: 4656 - protein, 10 aa, Severe acute respiratory syndrome coronavirus 2
  REGION 1..10: note = Table A: HLA-B*56:01M HLA-B*55:02M HLA-B*54:01H
LPSYAAFATA

SEQ ID NO: 4657 - protein, 10 aa, Severe acute respiratory syndrome coronavirus 2
  REGION 1..10: note = Table A: HLA-C*16:04H HLA-B*46:01H HLA-B*27:02H HLA-B*35:01M HLA-B*35:07M HLA-B*38:02M HLA-B*15:01M HLA-B*15:02H HLA-B*15:03H HLA-B*07:05H HLA-B*15:11H
AAFATAQEAY

SEQ ID NO: 4658 - protein, 10 aa, Severe acute respiratory syndrome coronavirus 2
  REGION 1..10: note = Table A: HLA-A*02:05H HLA-A*02:08H
ATAQEAYEQA

SEQ ID NO: 4659 - protein, 10 aa, Severe acute respiratory syndrome coronavirus 2
  REGION 1..10: note = Table A: HLA-B*38:02H HLA-B*39:01H
TAQEAYEQAV

SEQ ID NO: 4660 - protein, 10 aa, Severe acute respiratory syndrome coronavirus 2
  REGION 1..10: note = Table A: HLA-B*39:01H
AQEAYEQAVA

SEQ ID NO: 4661 - protein, 10 aa, Severe acute respiratory syndrome coronavirus 2
  REGION 1..10: note = Table A: HLA-A*26:03H HLA-A*34:01H
EAYEQAVANG

SEQ ID NO: 4662 - protein, 10 aa, Severe acute respiratory syndrome coronavirus 2
  REGION 1..10: note = Table A: HLA-B*39:01H
EQAVANGDSE

SEQ ID NO: 4663 - protein, 10 aa, Severe acute respiratory syndrome coronavirus 2
  REGION 1..10: note = Table A: HLA-C*03:04H HLA-B*35:03M HLA-C*15:05H HLA-B*35:01H HLA-B*35:02M HLA-B*35:08H HLA-C*08:01M HLA-B*35:12M HLA-B*38:02H
VANGDSEVVL

SEQ ID NO: 4664 - protein, 10 aa, Severe acute respiratory syndrome coronavirus 2
  REGION 1..10: note = Table A: HLA-B*44:05H HLA-B*40:02H HLA-B*41:02H
GDSEVVLKKL

SEQ ID NO: 4665 - protein, 10 aa, Severe acute respiratory syndrome coronavirus 2
  REGION 1..10: note = Table A: HLA-A*74:01M HLA-A*03:01H HLA-A*30:01H
KLKKSLNVAK

SEQ ID NO: 4666 - protein, 10 aa, Severe acute respiratory syndrome coronavirus 2
  REGION 1..10: note = Table A: HLA-B*58:01M HLA-B*58:02M HLA-B*57:01M HLA-A*30:02H HLA-C*15:05H HLA-A*32:01H HLA-B*15:01H HLA-B*57:03H
KSLNVAKSEF

SEQ ID NO: 4667 - protein, 10 aa, Severe acute respiratory syndrome coronavirus 2
  REGION 1..10: note = Table A: HLA-A*33:03M
EFDRDAAMQR

SEQ ID NO: 4668 - protein, 10 aa, Severe acute respiratory syndrome coronavirus 2
  REGION 1..10: note = Table A: HLA-A*03:01H HLA-A*02:11H HLA-C*15:05M HLA-A*02:05H HLA-A*02:08M HLA-A*02:01H HLA-A*02:02H HLA-A*02:03M HLA-B*38:02H HLA-B*15:01M HLA-B*07:05H
KMADQAMTQM

SEQ ID NO: 4669 - protein, 10 aa, Severe acute respiratory syndrome coronavirus 2
  REGION 1..10: note = Table A: HLA-A*36:01H HLA-A*01:01H HLA-B*35:01M HLA-B*35:08M HLA-B*35:07H HLA-B*38:02M
MADQAMTQMY

SEQ ID NO: 4670 - protein, 10 aa, Severe acute respiratory syndrome coronavirus 2
  REGION 1..10: note = Table A: HLA-B*54:01H
QAMTQMYKQA

SEQ ID NO: 4671 - protein, 10 aa, Severe acute respiratory syndrome coronavirus 2
  REGION 1..10: note = Table A: HLA-A*74:01H
AMTQMYKQAR

SEQ ID NO: 4672 - protein, 10 aa, Severe acute respiratory syndrome coronavirus 2
  REGION 1..10: note = Table A: HLA-B*15:03H
AKVTSAMQTM

SEQ ID NO: 4673 - protein, 10 aa, Severe acute respiratory syndrome coronavirus 2
  REGION 1..10: note = Table A: HLA-A*02:08M
KVTSAMQTML

SEQ ID NO: 4674 - protein, 10 aa, Severe acute respiratory syndrome coronavirus 2
  REGION 1..10: note = Table A: HLA-B*57:03H
VTSAMQTMLF

SEQ ID NO: 4675 - protein, 10 aa, Severe acute respiratory syndrome coronavirus 2
  REGION 1..10: note = Table A: HLA-A*11:02H HLA-A*34:02H
QTMLFTMLRK

SEQ ID NO: 4676 - protein, 10 aa, Severe acute respiratory syndrome coronavirus 2
  REGION 1..10: note = Table A: HLA-A*02:02H HLA-B*38:02H
MLRKLDNDAL

SEQ ID NO: 4677 - protein, 10 aa, Severe acute respiratory syndrome coronavirus 2
  REGION 1..10: note = Table A: HLA-B*13:01H
KLDNDALNNI

SEQ ID NO: 4678 - protein, 10 aa, Severe acute respiratory syndrome coronavirus 2
  REGION 1..10: note = Table A: HLA-B*54:01H
DALNNIINNA

SEQ ID NO: 4679 - protein, 10 aa, Severe acute respiratory syndrome coronavirus 2
  REGION 1..10: note = Table A: HLA-A*74:01H HLA-A*03:01H HLA-A*03:02M HLA-A*11:01H HLA-A*11:02H HLA-A*26:03H HLA-A*30:02H HLA-A*68:01H HLA-A*02:02H HLA-A*34:01H HLA-A*31:01H
ALNNIINNAR

SEQ ID NO: 4680 - protein, 10 aa, Severe acute respiratory syndrome coronavirus 2
  REGION 1..10: note = Table A: HLA-B*56:01H HLA-B*55:02M HLA-C*15:05H HLA-B*54:01H
VPLNIIPLTT

SEQ ID NO: 4681 - protein, 10 aa, Severe acute respiratory syndrome coronavirus 2
  REGION 1..10: note = Table A: HLA-A*26:03H HLA-A*68:01H HLA-A*34:02H HLA-A*66:01H
NIIPLTTAAK

SEQ ID NO: 4682 - protein, 10 aa, Severe acute respiratory syndrome coronavirus 2
  REGION 1..10: note = Table A: HLA-B*15:03H
AKLMVVIPDY

SEQ ID NO: 4683 - protein, 10 aa, Severe acute respiratory syndrome coronavirus 2
  REGION 1..10: note = Table A: HLA-A*25:01M HLA-B*46:01H HLA-A*26:01H HLA-A*26:02H HLA-A*26:03H HLA-A*29:02H HLA-A*30:02H HLA-B*35:01H HLA-B*35:08M HLA-B*35:07M HLA-B*38:02M HLA-B*15:01H HLA-B*15:02H HLA-B*39:01H HLA-B*07:05H HLA-B*15:11H
MVVIPDYNTY

SEQ ID NO: 4684 - protein, 10 aa, Severe acute respiratory syndrome coronavirus 2
  REGION 1..10: note = Table A: HLA-A*11:303H HLA-A*74:01H HLA-A*03:01M HLA-A*03:02M HLA-A*11:01H HLA-A*11:02H HLA-A*36:01M HLA-B*57:01H HLA-C*03:03H HLA-B*27:02H HLA-A*30:02H HLA-A*68:01H HLA-A*02:05H HLA-A*34:02M HLA-C*07:27M
  REGION 1..10: note = CONT. FROM ABOVE: HLA-A*66:01H
VVIPDYNTYK

SEQ ID NO: 4685 - protein, 10 aa, Severe acute respiratory syndrome coronavirus 2
  REGION 1..10: note = Table A: HLA-B*15:03H
YKNTCDGTTF

SEQ ID NO: 4686 - protein, 10 aa, Severe acute respiratory syndrome coronavirus 2
  REGION 1..10: note = Table A: HLA-A*26:01H HLA-A*29:01H HLA-A*29:02H HLA-A*34:02H HLA-B*35:01M
NTCDGTTFTY

SEQ ID NO: 4687 - protein, 10 aa, Severe acute respiratory syndrome coronavirus 2
  REGION 1..10: note = Table A: HLA-B*58:01H HLA-B*57:01H HLA-B*57:03H
TTFTYASALW

SEQ ID NO: 4688 - protein, 10 aa, Severe acute respiratory syndrome coronavirus 2
  REGION 1..10: note = Table A: HLA-A*68:02H
FTYASALWEI

SEQ ID NO: 4689 - protein, 10 aa, Severe acute respiratory syndrome coronavirus 2
  REGION 1..10: note = Table A: HLA-B*13:01H
QQVVDADSKI

SEQ ID NO: 4690 - protein, 10 aa, Severe acute respiratory syndrome coronavirus 2
  REGION 1..10: note = Table A: HLA-B*37:01H HLA-B*40:02H HLA-B*41:02H
VDADSKIVQL

SEQ ID NO: 4691 - protein, 10 aa, Severe acute respiratory syndrome coronavirus 2
  REGION 1..10: note = Table A: HLA-B*58:01H HLA-A*36:01H HLA-B*38:02H HLA-B*13:01H
SMDNSPNLAW

SEQ ID NO: 4692 - protein, 10 aa, Severe acute respiratory syndrome coronavirus 2
  REGION 1..10: note = Table A: HLA-B*55:02H HLA-C*15:05H
SPNLAWPLIV

SEQ ID NO: 4693 - protein, 10 aa, Severe acute respiratory syndrome coronavirus 2
  REGION 1..10: note = Table A: HLA-A*02:02H
NLAWPLIVTA

SEQ ID NO: 4694 - protein, 10 aa, Severe acute respiratory syndrome coronavirus 2
  REGION 1..10: note = Table A: HLA-A*02:11H
LAWPLIVTAL

SEQ ID NO: 4695 - protein, 10 aa, Severe acute respiratory syndrome coronavirus 2
  REGION 1..10: note = Table A: HLA-A*11:303M HLA-B*44:05H HLA-C*03:03H HLA-C*12:05H HLA-C*03:04H HLA-A*68:02H HLA-B*35:03H HLA-C*15:05H HLA-A*02:05H HLA-A*02:08H HLA-A*02:02H HLA-B*35:01H HLA-B*35:02H HLA-C*17:01H HLA-C*08:01M
  REGION 1..10: note = CONT. FROM ABOVE: HLA-C*08:03H HLA-B*35:12H HLA-B*38:02M HLA- B*40:02H HLA-B*57:03M
SAVKLQNNEL

SEQ ID NO: 4696 - protein, 10 aa, Severe acute respiratory syndrome coronavirus 2
  REGION 1..10: note = Table A: HLA-C*08:03H
KLQNNELSPV

SEQ ID NO: 4697 - protein, 10 aa, Severe acute respiratory syndrome coronavirus 2
  REGION 1..10: note = Table A: HLA-C*15:05H HLA-B*39:01H
QNNELSPVAL

SEQ ID NO: 4698 - protein, 10 aa, Severe acute respiratory syndrome coronavirus 2
  REGION 1..10: note = Table A: HLA-A*68:01H
NNELSPVALR

SEQ ID NO: 4699 - protein, 10 aa, Severe acute respiratory syndrome coronavirus 2
  REGION 1..10: note = Table A: HLA-A*26:01H HLA-A*26:02M HLA-A*26:03M HLA-A*68:02H HLA-A*02:02H HLA-A*34:01M HLA-A*34:02H HLA-B*38:02H HLA-B*15:02H
ELSPVALRQM

SEQ ID NO: 4700 - protein, 10 aa, Severe acute respiratory syndrome coronavirus 2
  REGION 1..10: note = Table A: HLA-B*56:01M HLA-B*55:02M HLA-C*15:05M HLA-B*55:01H HLA-B*54:01H HLA-B*07:02H HLA-B*07:04H
SPVALRQMSC

SEQ ID NO: 4701 - protein, 10 aa, Severe acute respiratory syndrome coronavirus 2
  REGION 1..10: note = Table A: HLA-A*36:01H HLA-A*29:02H HLA-A*01:01H HLA-A*30:02H
CTDDNALAYY

SEQ ID NO: 4702 - protein, 10 aa, Severe acute respiratory syndrome coronavirus 2
  REGION 1..10: note = Table A: HLA-B*27:02H HLA-A*34:02M
NALAYYNTTK

SEQ ID NO: 4703 - protein, 10 aa, Severe acute respiratory syndrome coronavirus 2
  REGION 1..10: note = Table A: HLA-C*14:02H HLA-C*14:03H HLA-A*24:02H HLA-A*24:07M HLA-A*23:01H
YYNTTKGGRF

SEQ ID NO: 4704 - protein, 10 aa, Severe acute respiratory syndrome coronavirus 2
  REGION 1..10: note = Table A: HLA-A*30:01H HLA-B*55:01H
TTKGGRFVLA

SEQ ID NO: 4705 - protein, 10 aa, Severe acute respiratory syndrome coronavirus 2
  REGION 1..10: note = Table A: HLA-B*58:01H HLA-B*57:01H HLA-B*44:03H HLA-B*53:01M HLA-A*02:02H HLA-B*15:13H HLA-B*38:02H HLA-B*57:03M HLA-B*13:01M
LLSDLQDLKW

SEQ ID NO: 4706 - protein, 10 aa, Severe acute respiratory syndrome coronavirus 2
  REGION 1..10: note = Table A: HLA-A*33:01H
DLQDLKWARF

SEQ ID NO: 4707 - protein, 10 aa, Severe acute respiratory syndrome coronavirus 2
  REGION 1..10: note = Table A: HLA-B*53:01H HLA-C*15:05H HLA-B*51:01M HLA-B*07:04H
FPKSDGTGTI

SEQ ID NO: 4708 - protein, 10 aa, Severe acute respiratory syndrome coronavirus 2
  REGION 1..10: note = Table A: HLA-A*36:01H
KSDGTGTIYT

SEQ ID NO: 4709 - protein, 10 aa, Severe acute respiratory syndrome coronavirus 2
  REGION 1..10: note = Table A: HLA-C*04:03H
YTELEPPCRF

SEQ ID NO: 4710 - protein, 10 aa, Severe acute respiratory syndrome coronavirus 2
  REGION 1..10: note = Table A: HLA-B*49:01H
TELEPPCRFV

SEQ ID NO: 4711 - protein, 10 aa, Severe acute respiratory syndrome coronavirus 2
  REGION 1..10: note = Table A: HLA-A*26:03H HLA-A*34:01H HLA-A*34:02M HLA-A*66:01M
FVTDTPKGPK

SEQ ID NO: 4712 - protein, 10 aa, Severe acute respiratory syndrome coronavirus 2
  REGION 1..10: note = Table A: HLA-A*26:01H
DTPKGPKVKY

SEQ ID NO: 4713 - protein, 10 aa, Severe acute respiratory syndrome coronavirus 2
  REGION 1..10: note = Table A: HLA-B*42:01H HLA-B*07:04H
TPKGPKVKYL

SEQ ID NO: 4714 - protein, 10 aa, Severe acute respiratory syndrome coronavirus 2
  REGION 1..10: note = Table A: HLA-A*24:07H HLA-B*57:03H
KGPKVKYLYF

SEQ ID NO: 4715 - protein, 10 aa, Severe acute respiratory syndrome coronavirus 2
  REGION 1..10: note = Table A: HLA-C*14:03H HLA-A*02:02H HLA-A*24:02H HLA-A*23:01H
LYFIKGLNNL

SEQ ID NO: 4716 - protein, 10 aa, Severe acute respiratory syndrome coronavirus 2
  REGION 1..10: note = Table A: HLA-A*74:01H HLA-A*33:03H HLA-A*26:03H HLA-A*34:01H HLA-A*66:01H
FIKGLNNLNR

SEQ ID NO: 4717 - protein, 10 aa, Severe acute respiratory syndrome coronavirus 2
  REGION 1..10: note = Table A: HLA-B*55:02H
RGMVLGSLAA

SEQ ID NO: 4718 - protein, 10 aa, Severe acute respiratory syndrome coronavirus 2
  REGION 1..10: note = Table A: HLA-A*68:02H
MVLGSLAATV

SEQ ID NO: 4719 - protein, 10 aa, Severe acute respiratory syndrome coronavirus 2
  REGION 1..10: note = Table A: HLA-A*02:02H HLA-A*02:03H HLA-B*38:02H HLA-B*13:02H
SLAATVRLQA

SEQ ID NO: 4720 - protein, 10 aa, Severe acute respiratory syndrome coronavirus 2
  REGION 1..10: note = Table A: HLA-B*44:05M HLA-B*40:01H HLA-B*40:02M HLA-B*39:01H HLA-B*41:02M HLA-B*49:01M
TEVPANSTVL

SEQ ID NO: 4721 - protein, 10 aa, Severe acute respiratory syndrome coronavirus 2
  REGION 1..10: note = Table A: HLA-B*53:01H HLA-B*55:02H HLA-C*15:05M HLA-B*35:01M HLA-B*35:07H HLA-B*07:02H HLA-B*07:05M
VPANSTVLSF

SEQ ID NO: 4722 - protein, 10 aa, Severe acute respiratory syndrome coronavirus 2
  REGION 1..10: note = Table A: HLA-C*14:02H HLA-C*14:03M
AFAVDAAKAY

SEQ ID NO: 4723 - protein, 10 aa, Severe acute respiratory syndrome coronavirus 2
  REGION 1..10: note = Table A: HLA-A*26:03H HLA-A*68:01H HLA-A*34:01H HLA-A*34:02M HLA-A*66:01M
FAVDAAKAYK

SEQ ID NO: 4724 - protein, 10 aa, Severe acute respiratory syndrome coronavirus 2
  REGION 1..10: note = Table A: HLA-A*68:02H
DAAKAYKDYL

SEQ ID NO: 4725 - protein, 10 aa, Severe acute respiratory syndrome coronavirus 2
  REGION 1..10: note = Table A: HLA-B*07:04H
QPITNCVKML

SEQ ID NO: 4726 - protein, 10 aa, Severe acute respiratory syndrome coronavirus 2
  REGION 1..10: note = Table A: HLA-B*38:02H
CTHTGTGQAI

SEQ ID NO: 4727 - protein, 10 aa, Severe acute respiratory syndrome coronavirus 2
  REGION 1..10: note = Table A: HLA-A*68:02H
HTGTGQAITV

SEQ ID NO: 4728 - protein, 10 aa, Severe acute respiratory syndrome coronavirus 2
  REGION 1..10: note = Table A: HLA-B*13:02H
GQAITVTPEA

SEQ ID NO: 4729 - protein, 10 aa, Severe acute respiratory syndrome coronavirus 2
  REGION 1..10: note = Table A: HLA-B*39:01H
DQESFGGASC

SEQ ID NO: 4730 - protein, 10 aa, Severe acute respiratory syndrome coronavirus 2
  REGION 1..10: note = Table A: HLA-A*29:02H
SFGGASCCLY

SEQ ID NO: 4731 - protein, 10 aa, Severe acute respiratory syndrome coronavirus 2
  REGION 1..10: note = Table A: HLA-A*36:01H HLA-C*04:03H HLA-A*02:07H HLA-C*08:02H HLA-B*38:02H HLA-C*05:01H
HIDHPNPKGF

SEQ ID NO: 4732 - protein, 10 aa, Severe acute respiratory syndrome coronavirus 2
  REGION 1..10: note = Table A: HLA-B*42:01H HLA-B*08:01H HLA-B*35:03H HLA-C*15:05H HLA-B*07:02H HLA-B*07:04M
HPNPKGFCDL

SEQ ID NO: 4733 - protein, 10 aa, Severe acute respiratory syndrome coronavirus 2
  REGION 1..10: note = Table A: HLA-A*30:02H
KGFCDLKGKY

SEQ ID NO: 4734 - protein, 10 aa, Severe acute respiratory syndrome coronavirus 2
  REGION 1..10: note = Table A: HLA-A*11:303H HLA-C*16:04H HLA-C*03:03H HLA-C*03:02H HLA-C*03:04M HLA-B*35:03H HLA-C*15:05H HLA-C*12:02H HLA-C*07:27H HLA-C*08:01H
CANDPVGFTL

SEQ ID NO: 4735 - protein, 10 aa, Severe acute respiratory syndrome coronavirus 2
  REGION 1..10: note = Table A: HLA-A*11:01H HLA-A*36:01M HLA-C*03:03H HLA-A*34:02H
ANDPVGFTLK

SEQ ID NO: 4736 - protein, 10 aa, Severe acute respiratory syndrome coronavirus 2
  REGION 1..10: note = Table A: HLA-B*55:01H HLA-A*02:02H HLA-A*02:03H HLA-B*38:02M
QLREPMLQSA

SEQ ID NO: 4737 - protein, 10 aa, Severe acute respiratory syndrome coronavirus 2
  REGION 1..10: note = Table A: HLA-B*50:01H
REPMLQSADA

SEQ ID NO: 4738 - protein, 10 aa, Severe acute respiratory syndrome coronavirus 2
  REGION 1..10: note = Table A: HLA-B*38:02H HLA-B*15:02H
MLQSADAQSF

SEQ ID NO: 4739 - protein, 10 aa, Severe acute respiratory syndrome coronavirus 2
  REGION 1..10: note = Table A: HLA-A*02:08H
LQSADAQSFL

SEQ ID NO: 4740 - protein, 10 aa, Severe acute respiratory syndrome coronavirus 2
  REGION 1..10: note = Table A: HLA-A*33:03H HLA-A*68:01H HLA-A*34:02H
SADAQSFLNR

SEQ ID NO: 4741 - protein, 10 aa, Severe acute respiratory syndrome coronavirus 2
  REGION 1..10: note = Table A: HLA-B*54:01H
FLNRVCGVSA

SEQ ID NO: 4742 - protein, 10 aa, Severe acute respiratory syndrome coronavirus 2
  REGION 1..10: note = Table A: HLA-A*68:01M
TGTSTDVVYR

SEQ ID NO: 4743 - protein, 10 aa, Severe acute respiratory syndrome coronavirus 2
  REGION 1..10: note = Table A: HLA-A*02:05H HLA-A*02:08H
GTSTDVVYRA

SEQ ID NO: 4744 - protein, 10 aa, Severe acute respiratory syndrome coronavirus 2
  REGION 1..10: note = Table A: HLA-B*58:02H HLA-C*16:01H HLA-B*57:01H HLA-A*25:01H HLA-A*68:02H HLA-B*57:03H
TSTDVVYRAF

SEQ ID NO: 4745 - protein, 10 aa, Severe acute respiratory syndrome coronavirus 2
  REGION 1..10: note = Table A: HLA-C*16:04H HLA-A*36:01H HLA-A*02:11H HLA-A*30:02H HLA-A*68:02M HLA-C*15:02H HLA-A*02:04H HLA-A*02:05H HLA-A*02:06M HLA-A*02:07H HLA-A*02:08M HLA-A*02:02H HLA-A*02:03H HLA-C*08:01H HLA-C*08:03H HLA-B*38:02H
  REGION 1..10: note = CONT. FROM ABOVE: HLA-B*40:06H HLA-B*57:03H HLA-B*13:01H HLA- B*13:02M
RAFDIYNDKV

SEQ ID NO: 4746 - protein, 10 aa, Severe acute respiratory syndrome coronavirus 2
  REGION 1..10: note = Table A: HLA-A*25:01H HLA-A*26:01H HLA-A*26:02H HLA-A*26:03H HLA-A*68:01H HLA-A*68:02H HLA-A*34:01M HLA-A*34:02H HLA-B*38:02M HLA-B*15:02M HLA-B*39:01H HLA-A*66:01M
DIYNDKVAGF

SEQ ID NO: 4747 - protein, 10 aa, Severe acute respiratory syndrome coronavirus 2
  REGION 1..10: note = Table A: HLA-A*74:01H HLA-A*03:01H HLA-A*03:02H HLA-A*11:01M HLA-A*11:02M HLA-A*36:01H HLA-A*30:01H HLA-A*30:02H HLA-A*34:02H
KVAGFAKFLK

SEQ ID NO: 4748 - protein, 10 aa, Severe acute respiratory syndrome coronavirus 2
  REGION 1..10: note = Table A: HLA-B*49:01H
QEKDEDDNLI

SEQ ID NO: 4749 - protein, 10 aa, Severe acute respiratory syndrome coronavirus 2
  REGION 1..10: note = Table A: HLA-B*44:03H HLA-B*18:01H HLA-B*39:01H HLA-B*07:05H
DEDDNLIDSY

SEQ ID NO: 4750 - protein, 10 aa, Severe acute respiratory syndrome coronavirus 2
  REGION 1..10: note = Table A: HLA-A*34:02H
NLIDSYFVVK

SEQ ID NO: 4751 - protein, 10 aa, Severe acute respiratory syndrome coronavirus 2
  REGION 1..10: note = Table A: HLA-C*14:02H HLA-C*14:03H HLA-A*30:02H HLA-A*24:02H HLA-A*24:07H HLA-C*08:01H HLA-A*23:01M
SYFVVKRHTF

SEQ ID NO: 4752 - protein, 10 aa, Severe acute respiratory syndrome coronavirus 2
  REGION 1..10: note = Table A: HLA-A*30:02M
VVKRHTFSNY

SEQ ID NO: 4753 - protein, 10 aa, Severe acute respiratory syndrome coronavirus 2
  REGION 1..10: note = Table A: HLA-A*68:02H
HTFSNYQHEE

SEQ ID NO: 4754 - protein, 10 aa, Severe acute respiratory syndrome coronavirus 2
  REGION 1..10: note = Table A: HLA-A*02:11M HLA-A*02:04M HLA-A*02:05M HLA-A*02:06H HLA-A*02:08H HLA-A*02:02H HLA-C*08:01H HLA-B*38:01H HLA-B*38:02M HLA-B*13:01M
YQHEETIYNL

SEQ ID NO: 4755 - protein, 10 aa, Severe acute respiratory syndrome coronavirus 2
  REGION 1..10: note = Table A: HLA-B*38:01H HLA-B*38:02H HLA-B*39:01M HLA-B*15:10M
QHEETIYNLL

SEQ ID NO: 4756 - protein, 10 aa, Severe acute respiratory syndrome coronavirus 2
  REGION 1..10: note = Table A: HLA-A*36:01H
HEETIYNLLK

SEQ ID NO: 4757 - protein, 10 aa, Severe acute respiratory syndrome coronavirus 2
  REGION 1..10: note = Table A: HLA-B*57:03H
AVAKHDFFKF

SEQ ID NO: 4758 - protein, 10 aa, Severe acute respiratory syndrome coronavirus 2
  REGION 1..10: note = Table A: HLA-A*02:07H HLA-B*13:01H
RIDGDMVPHI

SEQ ID NO: 4759 - protein, 10 aa, Severe acute respiratory syndrome coronavirus 2
  REGION 1..10: note = Table A: HLA-A*33:01M HLA-A*33:03H HLA-A*68:01H
DGDMVPHISR

SEQ ID NO: 4760 - protein, 10 aa, Severe acute respiratory syndrome coronavirus 2
  REGION 1..10: note = Table A: HLA-A*33:01H HLA-A*33:03H HLA-A*26:03H HLA-A*34:01H HLA-A*66:01H
DMVPHISRQR

SEQ ID NO: 4761 - protein, 10 aa, Severe acute respiratory syndrome coronavirus 2
  REGION 1..10: note = Table A: HLA-A*34:01H HLA-A*34:02H
MVPHISRQRL

SEQ ID NO: 4762 - protein, 10 aa, Severe acute respiratory syndrome coronavirus 2
  REGION 1..10: note = Table A: HLA-B*15:03M
TKYTMADLVY

SEQ ID NO: 4763 - protein, 10 aa, Severe acute respiratory syndrome coronavirus 2
  REGION 1..10: note = Table A: HLA-A*68:02H
YTMADLVYAL

SEQ ID NO: 4764 - protein, 10 aa, Severe acute respiratory syndrome coronavirus 2
  REGION 1..10: note = Table A: HLA-A*74:01M HLA-A*26:03H HLA-A*68:01H HLA-A*34:01M
TMADLVYALR

SEQ ID NO: 4765 - protein, 10 aa, Severe acute respiratory syndrome coronavirus 2
  REGION 1..10: note = Table A: HLA-B*39:01H
RHFDEGNCDT

SEQ ID NO: 4766 - protein, 10 aa, Severe acute respiratory syndrome coronavirus 2
  REGION 1..10: note = Table A: HLA-C*04:01H HLA-C*08:02H HLA-B*38:02H HLA-B*39:01H
HFDEGNCDTL

SEQ ID NO: 4767 - protein, 10 aa, Severe acute respiratory syndrome coronavirus 2
  REGION 1..10: note = Table A: HLA-B*57:01H HLA-A*25:01M HLA-A*26:01M HLA-A*26:02H HLA-A*34:02H HLA-B*35:01M HLA-B*35:07H HLA-B*38:02H HLA-B*15:02H HLA-B*57:03H
DTLKEILVTY

SEQ ID NO: 4768 - protein, 10 aa, Severe acute respiratory syndrome coronavirus 2
  REGION 1..10: note = Table A: HLA-A*24:07H
YFNKKDWYDF

SEQ ID NO: 4769 - protein, 10 aa, Severe acute respiratory syndrome coronavirus 2
  REGION 1..10: note = Table A: HLA-A*33:01H HLA-A*33:03H HLA-B*27:02H HLA-A*68:01H HLA-A*34:01H HLA-A*66:01H
DFVENPDILR

SEQ ID NO: 4770 - protein, 10 aa, Severe acute respiratory syndrome coronavirus 2
  REGION 1..10: note = Table A: HLA-C*04:03H HLA-A*02:11H HLA-A*68:02H HLA-A*02:04H HLA-A*02:05H HLA-A*02:06H HLA-A*02:07H
FVENPDILRV

SEQ ID NO: 4771 - protein, 10 aa, Severe acute respiratory syndrome coronavirus 2
  REGION 1..10: note = Table A: HLA-B*44:02H HLA-B*44:05H HLA-B*57:01H HLA-B*46:01H HLA-B*44:03H HLA-B*18:01M HLA-C*07:01H HLA-C*03:02H HLA-A*30:02M HLA-B*15:01H HLA-B*07:05H
VENPDILRVY

SEQ ID NO: 4772 - protein, 10 aa, Severe acute respiratory syndrome coronavirus 2
  REGION 1..10: note = Table A: HLA-A*68:02H
ENPDILRVYA

SEQ ID NO: 4773 - protein, 10 aa, Severe acute respiratory syndrome coronavirus 2
  REGION 1..10: note = Table A: HLA-A*02:11H HLA-A*02:05H HLA-A*02:08M HLA-B*13:02H
RVYANLGERV

SEQ ID NO: 4774 - protein, 10 aa, Severe acute respiratory syndrome coronavirus 2
  REGION 1..10: note = Table A: HLA-A*02:02H
NLGERVRQAL

SEQ ID NO: 4775 - protein, 10 aa, Severe acute respiratory syndrome coronavirus 2
  REGION 1..10: note = Table A: HLA-B*07:04M
RVRQALLKTV

SEQ ID NO: 4776 - protein, 10 aa, Severe acute respiratory syndrome coronavirus 2
  REGION 1..10: note = Table A: HLA-B*15:01M HLA-B*15:03M HLA-B*57:03H HLA-B*13:01H
RQALLKTVQF

SEQ ID NO: 4777 - protein, 10 aa, Severe acute respiratory syndrome coronavirus 2
  REGION 1..10: note = Table A: HLA-A*02:03H
LLKTVQFCDA

SEQ ID NO: 4778 - protein, 10 aa, Severe acute respiratory syndrome coronavirus 2
  REGION 1..10: note = Table A: HLA-A*74:01H
KTVQFCDAMR

SEQ ID NO: 4779 - protein, 10 aa, Severe acute respiratory syndrome coronavirus 2
  REGION 1..10: note = Table A: HLA-A*02:11H HLA-A*30:01H HLA-A*02:01H HLA-A*02:02H HLA-A*02:03M HLA-B*38:02H
AMRNAGIVGV

SEQ ID NO: 4780 - protein, 10 aa, Severe acute respiratory syndrome coronavirus 2
  REGION 1..10: note = Table A: HLA-A*36:01H
GSGVPVVDSY

SEQ ID NO: 4781 - protein, 10 aa, Severe acute respiratory syndrome coronavirus 2
  REGION 1..10: note = Table A: HLA-A*30:02H
SGVPVVDSYY

SEQ ID NO: 4782 - protein, 10 aa, Severe acute respiratory syndrome coronavirus 2
  REGION 1..10: note = Table A: HLA-B*35:03H HLA-C*15:05H
VPVVDSYYSL

SEQ ID NO: 4783 - protein, 10 aa, Severe acute respiratory syndrome coronavirus 2
  REGION 1..10: note = Table A: HLA-A*74:01H
LLMPILTLTR

SEQ ID NO: 4784 - protein, 10 aa, Severe acute respiratory syndrome coronavirus 2
  REGION 1..10: note = Table A: HLA-B*42:01H HLA-B*56:01H HLA-B*55:02H HLA-B*35:03M HLA-C*15:05M HLA-B*55:01H HLA-B*35:07H HLA-B*54:01H HLA-B*07:02M HLA-B*07:04H HLA-B*07:05H
MPILTLTRAL

SEQ ID NO: 4785 - protein, 10 aa, Severe acute respiratory syndrome coronavirus 2
  REGION 1..10: note = Table A: HLA-A*34:02H
ESHVDTDLTK

SEQ ID NO: 4786 - protein, 10 aa, Severe acute respiratory syndrome coronavirus 2
  REGION 1..10: note = Table A: HLA-B*38:02H HLA-B*39:01H
SHVDTDLTKP

SEQ ID NO: 4787 - protein, 10 aa, Severe acute respiratory syndrome coronavirus 2
  REGION 1..10: note = Table A: HLA-A*36:01H HLA-B*35:08H
HVDTDLTKPY

SEQ ID NO: 4788 - protein, 10 aa, Severe acute respiratory syndrome coronavirus 2
  REGION 1..10: note = Table A: HLA-A*36:01H HLA-A*34:02H
DTDLTKPYIK

SEQ ID NO: 4789 - protein, 10 aa, Severe acute respiratory syndrome coronavirus 2
  REGION 1..10: note = Table A: HLA-A*02:02H HLA-B*38:02H HLA-B*15:03H
LKYDFTEERL

SEQ ID NO: 4790 - protein, 10 aa, Severe acute respiratory syndrome coronavirus 2
  REGION 1..10: note = Table A: HLA-A*36:01H
KYDFTEERLK

SEQ ID NO: 4791 - protein, 10 aa, Severe acute respiratory syndrome coronavirus 2
  REGION 1..10: note = Table A: HLA-A*74:01H
RLKLFDRYFK

SEQ ID NO: 4792 - protein, 10 aa, Severe acute respiratory syndrome coronavirus 2
  REGION 1..10: note = Table A: HLA-A*32:01H
KLFDRYFKYW

SEQ ID NO: 4793 - protein, 10 aa, Severe acute respiratory syndrome coronavirus 2
  REGION 1..10: note = Table A: HLA-C*14:02H HLA-C*14:03M HLA-A*30:02M HLA-A*24:07H HLA-A*23:01H
RYFKYWDQTY

SEQ ID NO: 4794 - protein, 10 aa, Severe acute respiratory syndrome coronavirus 2
  REGION 1..10: note = Table A: HLA-C*16:01H HLA-B*46:01H HLA-C*03:03H HLA-C*03:02H HLA-C*03:04H HLA-B*57:03H
FSTVFPPTSF

SEQ ID NO: 4795 - protein, 10 aa, Severe acute respiratory syndrome coronavirus 2
  REGION 1..10: note = Table A: HLA-A*34:01H HLA-A*34:02H HLA-A*66:01M
STVFPPTSFG

SEQ ID NO: 4796 - protein, 10 aa, Severe acute respiratory syndrome coronavirus 2
  REGION 1..10: note = Table A: HLA-C*14:02M HLA-C*14:03M HLA-C*01:02H
VFPPTSFGPL

SEQ ID NO: 4797 - protein, 10 aa, Severe acute respiratory syndrome coronavirus 2
  REGION 1..10: note = Table A: HLA-A*11:01H HLA-A*34:02H
PTSFGPLVRK

SEQ ID NO: 4798 - protein, 10 aa, Severe acute respiratory syndrome coronavirus 2
  REGION 1..10: note = Table A: HLA-B*15:03M
RKIFVDGVPF

SEQ ID NO: 4799 - protein, 10 aa, Severe acute respiratory syndrome coronavirus 2
  REGION 1..10: note = Table A: HLA-A*02:11M HLA-A*02:04H HLA-A*02:05M HLA-A*02:06M HLA-A*02:08H HLA-A*02:01M HLA-A*02:02M HLA-A*02:03H
KIFVDGVPFV

SEQ ID NO: 4800 - protein, 10 aa, Severe acute respiratory syndrome coronavirus 2
  REGION 1..10: note = Table A: HLA-A*02:07H
FVDGVPFVVS

SEQ ID NO: 4801 - protein, 10 aa, Severe acute respiratory syndrome coronavirus 2
  REGION 1..10: note = Table A: HLA-A*26:01H HLA-A*29:01H HLA-A*29:02H HLA-A*30:02H HLA-B*15:01H
GVPFVVSTGY

SEQ ID NO: 4802 - protein, 10 aa, Severe acute respiratory syndrome coronavirus 2
  REGION 1..10: note = Table A: HLA-A*24:07H HLA-A*23:01H
PFVVSTGYHF

SEQ ID NO: 4803 - protein, 10 aa, Severe acute respiratory syndrome coronavirus 2
  REGION 1..10: note = Table A: HLA-A*26:03H HLA-A*68:01H HLA-A*34:01M HLA-A*34:02H HLA-A*66:01M
FVVSTGYHFR

SEQ ID NO: 4804 - protein, 10 aa, Severe acute respiratory syndrome coronavirus 2
  REGION 1..10: note = Table A: HLA-A*02:03H
TGYHFRELGV

SEQ ID NO: 4805 - protein, 10 aa, Severe acute respiratory syndrome coronavirus 2
  REGION 1..10: note = Table A: HLA-A*02:08H
GVVHNQDVNL

SEQ ID NO: 4806 - protein, 10 aa, Severe acute respiratory syndrome coronavirus 2
  REGION 1..10: note = Table A: HLA-A*36:01M
RLSFKELLVY

SEQ ID NO: 4807 - protein, 10 aa, Severe acute respiratory syndrome coronavirus 2
  REGION 1..10: note = Table A: HLA-A*02:05H HLA-A*02:02H
LSFKELLVYA

SEQ ID NO: 4808 - protein, 10 aa, Severe acute respiratory syndrome coronavirus 2
  REGION 1..10: note = Table A: HLA-A*03:01H HLA-A*03:02H HLA-A*34:02H
LVYAADPAMH

SEQ ID NO: 4809 - protein, 10 aa, Severe acute respiratory syndrome coronavirus 2
  REGION 1..10: note = Table A: HLA-C*14:03H
VYAADPAMHA

SEQ ID NO: 4810 - protein, 10 aa, Severe acute respiratory syndrome coronavirus 2
  REGION 1..10: note = Table A: HLA-A*11:303M HLA-C*16:01H HLA-C*16:04M HLA-B*46:01M HLA-B*56:01M HLA-A*26:03H HLA-C*03:03H HLA-C*12:05H HLA-A*02:11M HLA-B*55:02M HLA-C*03:02M HLA-C*03:04M HLA-A*68:01H HLA-A*68:02M HLA-B*35:03H
  REGION 1..10: note = CONT. FROM ABOVE: HLA-B*55:01H HLA-C*12:02H HLA-C*12:03H HLA- A*02:05H HLA-A*02:06M HLA-A*02:08M HLA-A*02:01H HLA-A*02:02M HLA-A*02:03M HLA-A*34:01H HLA-B*35:01H HLA-B*35:02H HLA-B*35 :07H HLA-C*08:01M HLA-B*38:02M HLA-B*39:06H HLA-B*54:01H
  REGION 1..10: note = CONT. FROM ABOVE: HLA-B*39:01H HLA-A*66:01H HLA-B*50:01H
YAADPAMHAA

SEQ ID NO: 4811 - protein, 10 aa, Severe acute respiratory syndrome coronavirus 2
  REGION 1..10: note = Table A: HLA-A*02:02H HLA-B*38:02H
AMHAASGNLL

SEQ ID NO: 4812 - protein, 10 aa, Severe acute respiratory syndrome coronavirus 2
  REGION 1..10: note = Table A: HLA-B*38:01H HLA-B*38:02M HLA-B*15:10M
MHAASGNLLL

SEQ ID NO: 4813 - protein, 10 aa, Severe acute respiratory syndrome coronavirus 2
  REGION 1..10: note = Table A: HLA-A*11:01H HLA-A*36:01H HLA-B*27:02H HLA-A*34:02H
AASGNLLLDK

SEQ ID NO: 4814 - protein, 10 aa, Severe acute respiratory syndrome coronavirus 2
  REGION 1..10: note = Table A: HLA-A*02:08H
RTTCFSVAAL

SEQ ID NO: 4815 - protein, 10 aa, Severe acute respiratory syndrome coronavirus 2
  REGION 1..10: note = Table A: HLA-A*68:02H
FSVAALTNNV

SEQ ID NO: 4816 - protein, 10 aa, Severe acute respiratory syndrome coronavirus 2
  REGION 1..10: note = Table A: HLA-B*55:02H HLA-A*02:08H
SVAALTNNVA

SEQ ID NO: 4817 - protein, 10 aa, Severe acute respiratory syndrome coronavirus 2
  REGION 1..10: note = Table A: HLA-B*46:01H HLA-C*15:05H HLA-B*35:01H HLA-B*15:01H HLA-B*07:05H HLA-B*57:03H
VAALTNNVAF

SEQ ID NO: 4818 - protein, 10 aa, Severe acute respiratory syndrome coronavirus 2
  REGION 1..10: note = Table A: HLA-A*68:02M HLA-C*08:03H
LTNNVAFQTV

SEQ ID NO: 4819 - protein, 10 aa, Severe acute respiratory syndrome coronavirus 2
  REGION 1..10: note = Table A: HLA-C*14:02H HLA-C*14:03H HLA-A*24:07H HLA-A*23:01H
AFQTVKPGNF

SEQ ID NO: 4820 - protein, 10 aa, Severe acute respiratory syndrome coronavirus 2
  REGION 1..10: note = Table A: HLA-A*11:303H HLA-A*03:02M HLA-A*11:01M HLA-A*11:02M HLA-A*68:01H HLA-A*34:02M HLA-C*07:27M
QTVKPGNFNK

SEQ ID NO: 4821 - protein, 10 aa, Severe acute respiratory syndrome coronavirus 2
  REGION 1..10: note = Table A: HLA-A*36:01M HLA-A*30:02M HLA-B*35:01H
KPGNFNKDFY

SEQ ID NO: 4822 - protein, 10 aa, Severe acute respiratory syndrome coronavirus 2
  REGION 1..10: note = Table A: HLA-A*36:01H
KDFYDFAVSK

SEQ ID NO: 4823 - protein, 10 aa, Severe acute respiratory syndrome coronavirus 2
  REGION 1..10: note = Table A: HLA-C*04:01H HLA-C*04:03M
FYDFAVSKGF

SEQ ID NO: 4824 - protein, 10 aa, Severe acute respiratory syndrome coronavirus 2
  REGION 1..10: note = Table A: HLA-A*34:02H
DFAVSKGFFK

SEQ ID NO: 4825 - protein, 10 aa, Severe acute respiratory syndrome coronavirus 2
  REGION 1..10: note = Table A: HLA-C*08:03H
KGFFKEGSSV

SEQ ID NO: 4826 - protein, 10 aa, Severe acute respiratory syndrome coronavirus 2
  REGION 1..10: note = Table A: HLA-C*14:02M HLA-C*14:03H HLA-B*08:01H HLA-A*02:02H HLA-A*24:07H HLA-B*38:02H
FFKEGSSVEL

SEQ ID NO: 4827 - protein, 10 aa, Severe acute respiratory syndrome coronavirus 2
  REGION 1..10: note = Table A: HLA-B*57:03H
GSSVELKHFF

SEQ ID NO: 4828 - protein, 10 aa, Severe acute respiratory syndrome coronavirus 2
  REGION 1..10: note = Table A: HLA-B*57:03M
SSVELKHFFF

SEQ ID NO: 4829 - protein, 10 aa, Severe acute respiratory syndrome coronavirus 2
  REGION 1..10: note = Table A: HLA-C*14:02H HLA-C*14:03H
FFFAQDGNAA

SEQ ID NO: 4830 - protein, 10 aa, Severe acute respiratory syndrome coronavirus 2
  REGION 1..10: note = Table A: HLA-B*35:01H HLA-B*35:08M HLA-B*35:07H
NAAISDYDYY

SEQ ID NO: 4831 - protein, 10 aa, Severe acute respiratory syndrome coronavirus 2
  REGION 1..10: note = Table A: HLA-A*36:01H HLA-A*30:02H
AISDYDYYRY

SEQ ID NO: 4832 - protein, 10 aa, Severe acute respiratory syndrome coronavirus 2
  REGION 1..10: note = Table A: HLA-A*24:07H
TMCDIRQLLF

SEQ ID NO: 4833 - protein, 10 aa, Severe acute respiratory syndrome coronavirus 2
  REGION 1..10: note = Table A: HLA-A*29:02H
LFVVEVVDKY

SEQ ID NO: 4834 - protein, 10 aa, Severe acute respiratory syndrome coronavirus 2
  REGION 1..10: note = Table A: HLA-A*25:01H HLA-A*26:01H HLA-A*26:02M HLA-A*26:03H HLA-B*35:01H
EVVDKYFDCY

SEQ ID NO: 4835 - protein, 10 aa, Severe acute respiratory syndrome coronavirus 2
  REGION 1..10: note = Table A: HLA-B*27:02H
NQVIVNNLDK

SEQ ID NO: 4836 - protein, 10 aa, Severe acute respiratory syndrome coronavirus 2
  REGION 1..10: note = Table A: HLA-A*02:05M HLA-A*02:08M HLA-B*38:02H
QVIVNNLDKS

SEQ ID NO: 4837 - protein, 10 aa, Severe acute respiratory syndrome coronavirus 2
  REGION 1..10: note = Table A: HLA-B*38:02H
NLDKSAGFPF

SEQ ID NO: 4838 - protein, 10 aa, Severe acute respiratory syndrome coronavirus 2
  REGION 1..10: note = Table A: HLA-B*58:01H HLA-B*58:02H HLA-A*36:01H HLA-B*57:01H HLA-B*44:03H HLA-A*30:02H HLA-A*32:01M HLA-B*57:03H HLA-B*13:01H
KSAGFPFNKW

SEQ ID NO: 4839 - protein, 10 aa, Severe acute respiratory syndrome coronavirus 2
  REGION 1..10: note = Table A: HLA-A*74:01H HLA-A*11:01H HLA-A*11:02M HLA-A*36:01M HLA-B*27:05H HLA-A*30:01M HLA-A*30:02H HLA-A*31:01H
AGFPFNKWGK

SEQ ID NO: 4840 - protein, 10 aa, Severe acute respiratory syndrome coronavirus 2
  REGION 1..10: note = Table A: HLA-A*34:01H HLA-A*66:01H
FPFNKWGKAR

SEQ ID NO: 4841 - protein, 10 aa, Severe acute respiratory syndrome coronavirus 2
  REGION 1..10: note = Table A: HLA-B*27:05H HLA-B*27:02H
ARLYYDSMSY

SEQ ID NO: 4842 - protein, 10 aa, Severe acute respiratory syndrome coronavirus 2
  REGION 1..10: note = Table A: HLA-B*58:01H HLA-A*68:02H HLA-B*38:02H HLA-B*57:03H
MSYEDQDALF

SEQ ID NO: 4843 - protein, 10 aa, Severe acute respiratory syndrome coronavirus 2
  REGION 1..10: note = Table A: HLA-A*36:01H HLA-B*27:02H
YEDQDALFAY

SEQ ID NO: 4844 - protein, 10 aa, Severe acute respiratory syndrome coronavirus 2
  REGION 1..10: note = Table A: HLA-A*02:11H HLA-A*02:02H HLA-A*02:03H
ALFAYTKRNV

SEQ ID NO: 4845 - protein, 10 aa, Severe acute respiratory syndrome coronavirus 2
  REGION 1..10: note = Table A: HLA-B*58:02H HLA-B*57:03M
YTKRNVIPTI

SEQ ID NO: 4846 - protein, 10 aa, Severe acute respiratory syndrome coronavirus 2
  REGION 1..10: note = Table A: HLA-C*01:02H
VIPTITQMNL

SEQ ID NO: 4847 - protein, 10 aa, Severe acute respiratory syndrome coronavirus 2
  REGION 1..10: note = Table A: HLA-A*36:01H HLA-A*26:01H HLA-A*29:02H HLA-A*01:01M
PTITQMNLKY

SEQ ID NO: 4848 - protein, 10 aa, Severe acute respiratory syndrome coronavirus 2
  REGION 1..10: note = Table A: HLA-A*34:02H
MNLKYAISAK

SEQ ID NO: 4849 - protein, 10 aa, Severe acute respiratory syndrome coronavirus 2
  REGION 1..10: note = Table A: HLA-A*33:03H HLA-A*26:03M HLA-A*34:01M HLA-A*34:02H HLA-A*66:01M
YAISAKNRAR

SEQ ID NO: 4850 - protein, 10 aa, Severe acute respiratory syndrome coronavirus 2
  REGION 1..10: note = Table A: HLA-B*58:02H HLA-C*15:05H HLA-B*07:04H HLA-B*57:03M
RARTVAGVSI

SEQ ID NO: 4851 - protein, 10 aa, Severe acute respiratory syndrome coronavirus 2
  REGION 1..10: note = Table A: HLA-A*68:02H HLA-A*02:05H HLA-A*02:08H HLA-C*08:03H HLA-B*38:02H HLA-B*39:01H
TVAGVSICST

SEQ ID NO: 4852 - protein, 10 aa, Severe acute respiratory syndrome coronavirus 2
  REGION 1..10: note = Table A: HLA-B*08:01H HLA-B*39:06H
HQKLLKSIAA

SEQ ID NO: 4853 - protein, 10 aa, Severe acute respiratory syndrome coronavirus 2
  REGION 1..10: note = Table A: HLA-A*74:01H
KLLKSIAATR

SEQ ID NO: 4854 - protein, 10 aa, Severe acute respiratory syndrome coronavirus 2
  REGION 1..10: note = Table A: HLA-C*15:05H HLA-A*02:03H
SIAATRGATV

SEQ ID NO: 4855 - protein, 10 aa, Severe acute respiratory syndrome coronavirus 2
  REGION 1..10: note = Table A: HLA-A*03:01H HLA-A*03:02H HLA-A*11:01H HLA-A*36:01H HLA-B*27:02H
GATVVIGTSK

SEQ ID NO: 4856 - protein, 10 aa, Severe acute respiratory syndrome coronavirus 2
  REGION 1..10: note = Table A: HLA-B*58:01M HLA-B*44:05M HLA-B*57:01M HLA-A*25:01H HLA-A*26:01H HLA-A*26:02H HLA-A*26:03H HLA-B*27:02H HLA-A*30:02H HLA-A*68:01H HLA-C*15:05H HLA-A*34:01H HLA-A*34:02H HLA-B*15:01H HLA-B*57:03H HLA-A*66:01H
ATVVIGTSKF

SEQ ID NO: 4857 - protein, 10 aa, Severe acute respiratory syndrome coronavirus 2
  REGION 1..10: note = Table A: HLA-A*30:02H
TVVIGTSKFY

SEQ ID NO: 4858 - protein, 10 aa, Severe acute respiratory syndrome coronavirus 2
  REGION 1..10: note = Table A: HLA-C*14:02H HLA-C*14:03H HLA-A*02:02H HLA-A*24:07M HLA-A*23:01H
KFYGGWHNML

SEQ ID NO: 4859 - protein, 10 aa, Severe acute respiratory syndrome coronavirus 2
  REGION 1..10: note = Table A: HLA-A*30:02H
GWHNMLKTVY

SEQ ID NO: 4860 - protein, 10 aa, Severe acute respiratory syndrome coronavirus 2
  REGION 1..10: note = Table A: HLA-C*14:02H HLA-C*14:03H HLA-A*02:01H HLA-A*02:02M HLA-A*24:02H HLA-A*24:07H HLA-C*08:01H HLA-A*23:01H
VYSDVENPHL

SEQ ID NO: 4861 - protein, 10 aa, Severe acute respiratory syndrome coronavirus 2
  REGION 1..10: note = Table A: HLA-A*36:01H HLA-A*01:01M HLA-C*04:03M HLA-C*08:02H HLA-C*05:01H
YSDVENPHLM

SEQ ID NO: 4862 - protein, 10 aa, Severe acute respiratory syndrome coronavirus 2
  REGION 1..10: note = Table A: HLA-A*25:01M
DVENPHLMGW

SEQ ID NO: 4863 - protein, 10 aa, Severe acute respiratory syndrome coronavirus 2
  REGION 1..10: note = Table A: HLA-B*58:02H HLA-C*03:02H HLA-B*07:04M HLA-B*57:03H
RAMPNMLRIM

SEQ ID NO: 4864 - protein, 10 aa, Severe acute respiratory syndrome coronavirus 2
  REGION 1..10: note = Table A: HLA-B*54:01H
MPNMLRIMAS

SEQ ID NO: 4865 - protein, 10 aa, Severe acute respiratory syndrome coronavirus 2
  REGION 1..10: note = Table A: HLA-A*74:01M
RIMASLVLAR

SEQ ID NO: 4866 - protein, 10 aa, Severe acute respiratory syndrome coronavirus 2
  REGION 1..10: note = Table A: HLA-A*02:02H HLA-B*13:01H
RLANECAQVL

SEQ ID NO: 4867 - protein, 10 aa, Severe acute respiratory syndrome coronavirus 2
  REGION 1..10: note = Table A: HLA-A*68:02H
ECAQVLSEMV

SEQ ID NO: 4868 - protein, 10 aa, Severe acute respiratory syndrome coronavirus 2
  REGION 1..10: note = Table A: HLA-A*02:06H HLA-A*02:01H
QVLSEMVMCG

SEQ ID NO: 4869 - protein, 10 aa, Severe acute respiratory syndrome coronavirus 2
  REGION 1..10: note = Table A: HLA-B*44:05H
SEMVMCGGSL

SEQ ID NO: 4870 - protein, 10 aa, Severe acute respiratory syndrome coronavirus 2
  REGION 1..10: note = Table A: HLA-A*68:02H
MVMCGGSLYV

SEQ ID NO: 4871 - protein, 10 aa, Severe acute respiratory syndrome coronavirus 2
  REGION 1..10: note = Table A: HLA-C*08:03H
GSLYVKPGGT

SEQ ID NO: 4872 - protein, 10 aa, Severe acute respiratory syndrome coronavirus 2
  REGION 1..10: note = Table A: HLA-A*03:01H
SLYVKPGGTS

SEQ ID NO: 4873 - protein, 10 aa, Severe acute respiratory syndrome coronavirus 2
  REGION 1..10: note = Table A: HLA-A*33:03H HLA-B*46:01H HLA-A*26:03M HLA-B*55:01H HLA-A*34:01H HLA-B*38:02H HLA-A*66:01M
YVKPGGTSSG

SEQ ID NO: 4874 - protein, 10 aa, Severe acute respiratory syndrome coronavirus 2
  REGION 1..10: note = Table A: HLA-A*36:01H HLA-B*35:01H HLA-B*35:08H HLA-B*38:02H HLA-B*15:01H HLA-B*39:01H
TSSGDATTAY

SEQ ID NO: 4875 - protein, 10 aa, Severe acute respiratory syndrome coronavirus 2
  REGION 1..10: note = Table A: HLA-B*57:03H
ATTAYANSVF

SEQ ID NO: 4876 - protein, 10 aa, Severe acute respiratory syndrome coronavirus 2
  REGION 1..10: note = Table A: HLA-B*38:02H
QAVTANVNAL

SEQ ID NO: 4877 - protein, 10 aa, Severe acute respiratory syndrome coronavirus 2
  REGION 1..10: note = Table A: HLA-A*02:08H
AVTANVNALL

SEQ ID NO: 4878 - protein, 10 aa, Severe acute respiratory syndrome coronavirus 2
  REGION 1..10: note = Table A: HLA-B*38:02H HLA-B*13:01H HLA-B*13:02H
ALLSTDGNKI

SEQ ID NO: 4879 - protein, 10 aa, Severe acute respiratory syndrome coronavirus 2
  REGION 1..10: note = Table A: HLA-A*03:02H HLA-A*11:01H HLA-A*36:01H HLA-A*34:02H
STDGNKIADK

SEQ ID NO: 4880 - protein, 10 aa, Severe acute respiratory syndrome coronavirus 2
  REGION 1..10: note = Table A: HLA-A*02:08H HLA-A*02:02M HLA-B*07:04H
KIADKYVRNL

SEQ ID NO: 4881 - protein, 10 aa, Severe acute respiratory syndrome coronavirus 2
  REGION 1..10: note = Table A: HLA-A*74:01M
RLYECLYRNR

SEQ ID NO: 4882 - protein, 10 aa, Severe acute respiratory syndrome coronavirus 2
  REGION 1..10: note = Table A: HLA-A*36:01H HLA-A*29:02H HLA-B*27:02H
VDTDFVNEFY

SEQ ID NO: 4883 - protein, 10 aa, Severe acute respiratory syndrome coronavirus 2
  REGION 1..10: note = Table A: HLA-A*68:02H
DTDFVNEFYA

SEQ ID NO: 4884 - protein, 10 aa, Severe acute respiratory syndrome coronavirus 2
  REGION 1..10: note = Table A: HLA-A*74:01H HLA-A*34:01H HLA-A*66:01H
FVNEFYAYLR

SEQ ID NO: 4885 - protein, 10 aa, Severe acute respiratory syndrome coronavirus 2
  REGION 1..10: note = Table A: HLA-B*08:01H
YAYLRKHFSM

SEQ ID NO: 4886 - protein, 10 aa, Severe acute respiratory syndrome coronavirus 2
  REGION 1..10: note = Table A: HLA-A*02:04H HLA-A*02:01H HLA-A*02:02M HLA-B*38:02M HLA-B*15:01H HLA-B*15:02H HLA-B*13:01H
ILSDDAVVCF

SEQ ID NO: 4887 - protein, 10 aa, Severe acute respiratory syndrome coronavirus 2
  REGION 1..10: note = Table A: HLA-A*26:01H HLA-B*35:01M HLA-B*15:02H
DAVVCFNSTY

SEQ ID NO: 4888 - protein, 10 aa, Severe acute respiratory syndrome coronavirus 2
  REGION 1..10: note = Table A: HLA-A*03:01H HLA-A*11:01H HLA-B*55:02H HLA-C*15:05H HLA-A*34:02H HLA-B*54:01H
STYASQGLVA

SEQ ID NO: 4889 - protein, 10 aa, Severe acute respiratory syndrome coronavirus 2
  REGION 1..10: note = Table A: HLA-C*12:05H HLA-A*68:02M HLA-C*15:05H HLA-B*51:01H HLA-B*38:02H
YASQGLVASI

SEQ ID NO: 4890 - protein, 10 aa, Severe acute respiratory syndrome coronavirus 2
  REGION 1..10: note = Table A: HLA-A*11:303H HLA-A*03:02M HLA-A*11:01M HLA-A*11:02M HLA-C*07:27H
ASQGLVASIK

SEQ ID NO: 4891 - protein, 10 aa, Severe acute respiratory syndrome coronavirus 2
  REGION 1..10: note = Table A: HLA-B*46:01H HLA-A*30:02H HLA-B*15:01H HLA-C*02:02H
SIKNFKSVLY

SEQ ID NO: 4892 - protein, 10 aa, Severe acute respiratory syndrome coronavirus 2
  REGION 1..10: note = Table A: HLA-B*15:03H
IKNFKSVLYY

SEQ ID NO: 4893 - protein, 10 aa, Severe acute respiratory syndrome coronavirus 2
  REGION 1..10: note = Table A: HLA-B*38:02H HLA-B*39:06H
YQNNVFMSEA

SEQ ID NO: 4894 - protein, 10 aa, Severe acute respiratory syndrome coronavirus 2
  REGION 1..10: note = Table A: HLA-B*37:01H
TDLTKGPHEF

SEQ ID NO: 4895 - protein, 10 aa, Severe acute respiratory syndrome coronavirus 2
  REGION 1..10: note = Table A: HLA-A*30:02H HLA-B*38:02H HLA-B*15:01H HLA-B*15:02H
LVKQGDDYVY

SEQ ID NO: 4896 - protein, 10 aa, Severe acute respiratory syndrome coronavirus 2
  REGION 1..10: note = Table A: HLA-A*30:02H HLA-A*23:01H
VYLPYPDPSR

SEQ ID NO: 4897 - protein, 10 aa, Severe acute respiratory syndrome coronavirus 2
  REGION 1..10: note = Table A: HLA-C*04:03H HLA-A*02:11H HLA-A*02:07H
YLPYPDPSRI

SEQ ID NO: 4898 - protein, 10 aa, Severe acute respiratory syndrome coronavirus 2
  REGION 1..10: note = Table A: HLA-B*42:01M HLA-B*56:01H HLA-B*53:01H HLA-B*55:02H HLA-B*35:03M HLA-C*15:05M HLA-B*55:01H HLA-B*35:01H HLA-B*35:02H HLA-B*51:01M HLA-B*35:07M HLA-B*35:12H HLA-B*54:01H HLA-B*07:02M HLA-B*07:04H HLA-B*07:05H
  REGION 1..10: note = CONT. FROM ABOVE: HLA-B*15:10H HLA-B*15:11H
LPYPDPSRIL

SEQ ID NO: 4899 - protein, 10 aa, Severe acute respiratory syndrome coronavirus 2
  REGION 1..10: note = Table A: HLA-A*24:07H
PYPDPSRILG

SEQ ID NO: 4900 - protein, 10 aa, Severe acute respiratory syndrome coronavirus 2
  REGION 1..10: note = Table A: HLA-B*56:01M HLA-B*55:02M HLA-C*15:05H HLA-B*55:01H HLA-B*54:01M
YPDPSRILGA

SEQ ID NO: 4901 - protein, 10 aa, Severe acute respiratory syndrome coronavirus 2
  REGION 1..10: note = Table A: HLA-C*04:03H HLA-A*02:07M
FVDDIVKTDG

SEQ ID NO: 4902 - protein, 10 aa, Severe acute respiratory syndrome coronavirus 2
  REGION 1..10: note = Table A: HLA-A*74:01H HLA-A*11:01H HLA-A*36:01H
KTDGTLMIER

SEQ ID NO: 4903 - protein, 10 aa, Severe acute respiratory syndrome coronavirus 2
  REGION 1..10: note = Table A: HLA-B*08:01M HLA-A*02:11H HLA-A*02:04M HLA-A*02:06H HLA-A*02:02H
TLMIERFVSL

SEQ ID NO: 4904 - protein, 10 aa, Severe acute respiratory syndrome coronavirus 2
  REGION 1..10: note = Table A: HLA-A*30:02H
RFVSLAIDAY

SEQ ID NO: 4905 - protein, 10 aa, Severe acute respiratory syndrome coronavirus 2
  REGION 1..10: note = Table A: HLA-A*11:01H HLA-A*11:02H HLA-A*36:01H HLA-B*27:02H HLA-A*68:01H HLA-A*34:02M HLA-A*66:01H
LAIDAYPLTK

SEQ ID NO: 4906 - protein, 10 aa, Severe acute respiratory syndrome coronavirus 2
  REGION 1..10: note = Table A: HLA-A*33:01H HLA-A*34:01H HLA-A*66:01H
DAYPLTKHPN

SEQ ID NO: 4907 - protein, 10 aa, Severe acute respiratory syndrome coronavirus 2
  REGION 1..10: note = Table A: HLA-B*53:01M HLA-B*35:03M HLA-B*35:01H HLA-B*35:02M HLA-B*35:08H HLA-B*35:07H HLA-B*35:12M HLA-B*38:02H
HPNQEYADVF

SEQ ID NO: 4908 - protein, 10 aa, Severe acute respiratory syndrome coronavirus 2
  REGION 1..10: note = Table A: HLA-B*44:02H HLA-B*44:03M
QEYADVFHLY

SEQ ID NO: 4909 - protein, 10 aa, Severe acute respiratory syndrome coronavirus 2
  REGION 1..10: note = Table A: HLA-A*24:02H HLA-A*24:07M HLA-A*23:01H
EYADVFHLYL

SEQ ID NO: 4910 - protein, 10 aa, Severe acute respiratory syndrome coronavirus 2
  REGION 1..10: note = Table A: HLA-A*68:02M
DVFHLYLQYI

SEQ ID NO: 4911 - protein, 10 aa, Severe acute respiratory syndrome coronavirus 2
  REGION 1..10: note = Table A: HLA-A*02:04H HLA-A*02:02H
HLYLQYIRKL

SEQ ID NO: 4912 - protein, 10 aa, Severe acute respiratory syndrome coronavirus 2
  REGION 1..10: note = Table A: HLA-A*02:02M
KLHDELTGHM

SEQ ID NO: 4913 - protein, 10 aa, Severe acute respiratory syndrome coronavirus 2
  REGION 1..10: note = Table A: HLA-B*38:01H HLA-B*38:02H HLA-B*39:01M HLA-B*15:10M
LHDELTGHML

SEQ ID NO: 4914 - protein, 10 aa, Severe acute respiratory syndrome coronavirus 2
  REGION 1..10: note = Table A: HLA-A*02:11H HLA-A*02:04H
HMLDMYSVML

SEQ ID NO: 4915 - protein, 10 aa, Severe acute respiratory syndrome coronavirus 2
  REGION 1..10: note = Table A: HLA-B*58:01H HLA-B*58:02H HLA-B*57:01H HLA-A*25:01H HLA-B*57:03H
LTNDNTSRYW

SEQ ID NO: 4916 - protein, 10 aa, Severe acute respiratory syndrome coronavirus 2
  REGION 1..10: note = Table A: HLA-A*02:11H HLA-C*08:01H HLA-B*40:06H
RYWEPEFYEA

SEQ ID NO: 4917 - protein, 10 aa, Severe acute respiratory syndrome coronavirus 2
  REGION 1..10: note = Table A: HLA-B*45:01H HLA-B*40:02H HLA-B*41:02H HLA-B*49:01M HLA-B*50:01H
YEAMYTPHTV

SEQ ID NO: 4918 - protein, 10 aa, Severe acute respiratory syndrome coronavirus 2
  REGION 1..10: note = Table A: HLA-A*68:02M HLA-B*35:03H HLA-A*34:01M HLA-A*34:02H HLA-A*66:01H
EAMYTPHTVL

SEQ ID NO: 4919 - protein, 10 aa, Severe acute respiratory syndrome coronavirus 2
  REGION 1..10: note = Table A: HLA-A*02:11H HLA-A*68:02M HLA-A*02:05H HLA-A*02:06H HLA-A*02:07H HLA-A*02:02H
YTPHTVLQAV

SEQ ID NO: 4920 - protein, 10 aa, Severe acute respiratory syndrome coronavirus 2
  REGION 1..10: note = Table A: HLA-B*56:01H HLA-B*55:02M HLA-B*54:01H
TPHTVLQAVG

SEQ ID NO: 4921 - protein, 10 aa, Severe acute respiratory syndrome coronavirus 2
  REGION 1..10: note = Table A: HLA-B*38:01H HLA-B*38:02M HLA-B*39:01H HLA-B*15:10H
DHVISTSHKL

SEQ ID NO: 4922 - protein, 10 aa, Severe acute respiratory syndrome coronavirus 2
  REGION 1..10: note = Table A: HLA-A*68:02H
HVISTSHKLV

SEQ ID NO: 4923 - protein, 10 aa, Severe acute respiratory syndrome coronavirus 2
  REGION 1..10: note = Table A: HLA-B*07:04H
VISTSHKLVL

SEQ ID NO: 4924 - protein, 10 aa, Severe acute respiratory syndrome coronavirus 2
  REGION 1..10: note = Table A: HLA-A*68:02H
STSHKLVLSV

SEQ ID NO: 4925 - protein, 10 aa, Severe acute respiratory syndrome coronavirus 2
  REGION 1..10: note = Table A: HLA-B*15:03H
HKLVLSVNPY

SEQ ID NO: 4926 - protein, 10 aa, Severe acute respiratory syndrome coronavirus 2
  REGION 1..10: note = Table A: HLA-A*02:11H
KLVLSVNPYV

SEQ ID NO: 4927 - protein, 10 aa, Severe acute respiratory syndrome coronavirus 2
  REGION 1..10: note = Table A: HLA-C*04:03H HLA-C*08:02H
GCDVTDVTQL

SEQ ID NO: 4928 - protein, 10 aa, Severe acute respiratory syndrome coronavirus 2
  REGION 1..10: note = Table A: HLA-A*68:01H HLA-A*68:02M HLA-A*34:02H HLA-A*66:01H
DVTDVTQLYL

SEQ ID NO: 4929 - protein, 10 aa, Severe acute respiratory syndrome coronavirus 2
  REGION 1..10: note = Table A: HLA-A*36:01H HLA-C*04:03H
VTDVTQLYLG

SEQ ID NO: 4930 - protein, 10 aa, Severe acute respiratory syndrome coronavirus 2
  REGION 1..10: note = Table A: HLA-A*26:02H
DVTQLYLGGM

SEQ ID NO: 4931 - protein, 10 aa, Severe acute respiratory syndrome coronavirus 2
  REGION 1..10: note = Table A: HLA-B*27:02H HLA-A*30:02H HLA-B*38:02H HLA-B*15:01H HLA-B*15:02M HLA-B*15:03H
TQLYLGGMSY

SEQ ID NO: 4932 - protein, 10 aa, Severe acute respiratory syndrome coronavirus 2
  REGION 1..10: note = Table A: HLA-A*36:01H HLA-B*46:01H HLA-A*26:01H HLA-A*29:02H HLA-A*30:02H HLA-B*38:02M HLA-B*15:01H HLA-B*15:02M
QLYLGGMSYY

SEQ ID NO: 4933 - protein, 10 aa, Severe acute respiratory syndrome coronavirus 2
  REGION 1..10: note = Table A: HLA-B*38:02H HLA-B*15:10H
SHKPPISFPL

SEQ ID NO: 4934 - protein, 10 aa, Severe acute respiratory syndrome coronavirus 2
  REGION 1..10: note = Table A: HLA-B*56:01H HLA-B*55:02H
KPPISFPLCA

SEQ ID NO: 4935 - protein, 10 aa, Severe acute respiratory syndrome coronavirus 2
  REGION 1..10: note = Table A: HLA-C*15:05H HLA-B*35:01H HLA-B*35:07H HLA-B*15:02H HLA-B*07:05H
FPLCANGQVF

SEQ ID NO: 4936 - protein, 10 aa, Severe acute respiratory syndrome coronavirus 2
  REGION 1..10: note = Table A: HLA-A*30:02H
CANGQVFGLY

SEQ ID NO: 4937 - protein, 10 aa, Severe acute respiratory syndrome coronavirus 2
  REGION 1..10: note = Table A: HLA-A*11:01H
ANGQVFGLYK

SEQ ID NO: 4938 - protein, 10 aa, Severe acute respiratory syndrome coronavirus 2
  REGION 1..10: note = Table A: HLA-C*08:03H
NVTDFNAIAT

SEQ ID NO: 4939 - protein, 10 aa, Severe acute respiratory syndrome coronavirus 2
  REGION 1..10: note = Table A: HLA-A*02:02M
ILANTCTERL

SEQ ID NO: 4940 - protein, 10 aa, Severe acute respiratory syndrome coronavirus 2
  REGION 1..10: note = Table A: HLA-A*02:02H HLA-B*07:04H HLA-B*15:01H
RLKLFAAETL

SEQ ID NO: 4941 - protein, 10 aa, Severe acute respiratory syndrome coronavirus 2
  REGION 1..10: note = Table A: HLA-A*02:11H HLA-A*02:05H HLA-A*02:08H HLA-A*02:02M HLA-A*02:03H HLA-B*13:02H
KLFAAETLKA

SEQ ID NO: 4942 - protein, 10 aa, Severe acute respiratory syndrome coronavirus 2
  REGION 1..10: note = Table A: HLA-A*68:02H
FAAETLKATE

SEQ ID NO: 4943 - protein, 10 aa, Severe acute respiratory syndrome coronavirus 2
  REGION 1..10: note = Table A: HLA-B*57:01H HLA-A*25:01H HLA-A*26:03H HLA-B*38:02H HLA-B*57:03M
ETLKATEETF

SEQ ID NO: 4944 - protein, 10 aa, Severe acute respiratory syndrome coronavirus 2
  REGION 1..10: note = Table A: HLA-B*58:01H HLA-A*11:01M HLA-A*11:02H HLA-A*36:01H HLA-A*26:01H HLA-A*29:01H HLA-A*29:02M HLA-A*01:01H HLA-B*44:03H HLA-A*30:02M HLA-A*34:02H HLA-C*07:27H
ATEETFKLSY

SEQ ID NO: 4945 - protein, 10 aa, Severe acute respiratory syndrome coronavirus 2
  REGION 1..10: note = Table A: HLA-A*74:01H
KLSYGIATVR

SEQ ID NO: 4946 - protein, 10 aa, Severe acute respiratory syndrome coronavirus 2
  REGION 1..10: note = Table A: HLA-B*38:02H
YGIATVREVL

SEQ ID NO: 4947 - protein, 10 aa, Severe acute respiratory syndrome coronavirus 2
  REGION 1..10: note = Table A: HLA-A*68:02H HLA-A*34:02H
EVLSDRELHL

SEQ ID NO: 4948 - protein, 10 aa, Severe acute respiratory syndrome coronavirus 2
  REGION 1..10: note = Table A: HLA-A*02:02H
VLSDRELHLS

SEQ ID NO: 4949 - protein, 10 aa, Severe acute respiratory syndrome coronavirus 2
  REGION 1..10: note = Table A: HLA-B*58:01M HLA-A*36:01H HLA-B*57:01H HLA-B*57:03M
LSDRELHLSW

SEQ ID NO: 4950 - protein, 10 aa, Severe acute respiratory syndrome coronavirus 2
  REGION 1..10: note = Table A: HLA-A*74:01H HLA-A*34:01H HLA-A*66:01H
HLSWEVGKPR

SEQ ID NO: 4951 - protein, 10 aa, Severe acute respiratory syndrome coronavirus 2
  REGION 1..10: note = Table A: HLA-B*40:02H
WEVGKPRPPL

SEQ ID NO: 4952 - protein, 10 aa, Severe acute respiratory syndrome coronavirus 2
  REGION 1..10: note = Table A: HLA-A*74:01H HLA-A*33:03H HLA-A*31:01M
VGKPRPPLNR

SEQ ID NO: 4953 - protein, 10 aa, Severe acute respiratory syndrome coronavirus 2
  REGION 1..10: note = Table A: HLA-A*30:02H HLA-B*07:04H
KPRPPLNRNY

SEQ ID NO: 4954 - protein, 10 aa, Severe acute respiratory syndrome coronavirus 2
  REGION 1..10: note = Table A: HLA-B*42:01H HLA-C*15:05H HLA-B*07:02H HLA-B*07:04M
RPPLNRNYVF

SEQ ID NO: 4955 - protein, 10 aa, Severe acute respiratory syndrome coronavirus 2
  REGION 1..10: note = Table A: HLA-A*74:01H HLA-A*03:01H HLA-A*03:02H HLA-A*11:01M HLA-A*11:02M HLA-A*36:01H HLA-A*30:01M HLA-A*30:02H HLA-A*68:01H HLA-A*68:02H HLA-A*34:02H HLA-C*07:27H HLA-A*66:01H
YVFTGYRVTK

SEQ ID NO: 4956 - protein, 10 aa, Severe acute respiratory syndrome coronavirus 2
  REGION 1..10: note = Table A: HLA-B*57:03H
RVTKNSKVQI

SEQ ID NO: 4957 - protein, 10 aa, Severe acute respiratory syndrome coronavirus 2
  REGION 1..10: note = Table A: HLA-A*36:01H HLA-A*30:02H
KNSKVQIGEY

SEQ ID NO: 4958 - protein, 10 aa, Severe acute respiratory syndrome coronavirus 2
  REGION 1..10: note = Table A: HLA-B*38:01H HLA-B*38:02H HLA-B*15:03M
SKVQIGEYTF

SEQ ID NO: 4959 - protein, 10 aa, Severe acute respiratory syndrome coronavirus 2
  REGION 1..10: note = Table A: HLA-A*11:01H HLA-A*11:02H
VQIGEYTFEK

SEQ ID NO: 4960 - protein, 10 aa, Severe acute respiratory syndrome coronavirus 2
  REGION 1..10: note = Table A: HLA-B*44:03M HLA-B*18:01H HLA-B*27:02H HLA-A*30:02H HLA-B*15:01H
GEYTFEKGDY

SEQ ID NO: 4961 - protein, 10 aa, Severe acute respiratory syndrome coronavirus 2
  REGION 1..10: note = Table A: HLA-B*40:02H HLA-B*49:01H
FEKGDYGDAV

SEQ ID NO: 4962 - protein, 10 aa, Severe acute respiratory syndrome coronavirus 2
  REGION 1..10: note = Table A: HLA-A*36:01H
KGDYGDAVVY

SEQ ID NO: 4963 - protein, 10 aa, Severe acute respiratory syndrome coronavirus 2
  REGION 1..10: note = Table A: HLA-B*27:02H HLA-A*68:01H HLA-A*68:02H
GDYGDAVVYR

SEQ ID NO: 4964 - protein, 10 aa, Severe acute respiratory syndrome coronavirus 2
  REGION 1..10: note = Table A: HLA-A*25:01H HLA-B*46:01H HLA-A*26:01H HLA-A*30:02H HLA-B*38:02H HLA-B*15:01M HLA-B*15:02H HLA-B*15:03H
AVVYRGTTTY

SEQ ID NO: 4965 - protein, 10 aa, Severe acute respiratory syndrome coronavirus 2
  REGION 1..10: note = Table A: HLA-A*11:303H HLA-A*03:01M HLA-A*03:02M HLA-A*11:01M HLA-A*11:02M HLA-A*30:02H HLA-A*34:02M HLA-C*07:27H
VVYRGTTTYK

SEQ ID NO: 4966 - protein, 10 aa, Severe acute respiratory syndrome coronavirus 2
  REGION 1..10: note = Table A: HLA-A*24:07H
VYRGTTTYKL

SEQ ID NO: 4967 - protein, 10 aa, Severe acute respiratory syndrome coronavirus 2
  REGION 1..10: note = Table A: HLA-A*36:01H HLA-A*26:01M HLA-A*30:02H
TTYKLNVGDY

SEQ ID NO: 4968 - protein, 10 aa, Severe acute respiratory syndrome coronavirus 2
  REGION 1..10: note = Table A: HLA-A*29:02H HLA-A*30:02H HLA-A*24:02M HLA-A*24:07H HLA-C*08:01H HLA-A*23:01M
TYKLNVGDYF

SEQ ID NO: 4969 - protein, 10 aa, Severe acute respiratory syndrome coronavirus 2
  REGION 1..10: note = Table A: HLA-A*02:02H
KLNVGDYFVL

SEQ ID NO: 4970 - protein, 10 aa, Severe acute respiratory syndrome coronavirus 2
  REGION 1..10: note = Table A: HLA-C*14:02H HLA-C*14:03H
YFVLTSHTVM

SEQ ID NO: 4971 - protein, 10 aa, Severe acute respiratory syndrome coronavirus 2
  REGION 1..10: note = Table A: HLA-A*02:03H
VLTSHTVMPL

SEQ ID NO: 4972 - protein, 10 aa, Severe acute respiratory syndrome coronavirus 2
  REGION 1..10: note = Table A: HLA-B*39:06H
TSHTVMPLSA

SEQ ID NO: 4973 - protein, 10 aa, Severe acute respiratory syndrome coronavirus 2
  REGION 1..10: note = Table A: HLA-A*02:11H HLA-A*68:02H HLA-B*35:03M HLA-C*15:05H HLA-A*02:04H HLA-A*02:05H HLA-A*02:06H HLA-A*02:08H HLA-A*02:01H HLA-A*02:02H HLA-B*35:01H HLA-B*35:12H HLA-B*38:02H HLA-B*07:05H HLA-B*57:03H
TVMPLSAPTL

SEQ ID NO: 4974 - protein, 10 aa, Severe acute respiratory syndrome coronavirus 2
  REGION 1..10: note = Table A: HLA-B*35:01M HLA-B*07:05H
APTLVPQEHY

SEQ ID NO: 4975 - protein, 10 aa, Severe acute respiratory syndrome coronavirus 2
  REGION 1..10: note = Table A: HLA-B*27:05H
VRITGLYPTL

SEQ ID NO: 4976 - protein, 10 aa, Severe acute respiratory syndrome coronavirus 2
  REGION 1..10: note = Table A: HLA-B*27:02H HLA-B*53:01M HLA-B*35:03M HLA-C*15:05H HLA-B*35:01H HLA-B*35:02M HLA-B*35:08M HLA-B*35:07H HLA-B*35:12M HLA-B*38:02H HLA-B*39:01H HLA-B*07:05H
YPTLNISDEF

SEQ ID NO: 4977 - protein, 10 aa, Severe acute respiratory syndrome coronavirus 2
  REGION 1..10: note = Table A: HLA-B*44:05H HLA-A*25:01H HLA-A*26:01H HLA-B*44:03M HLA-B*18:01H HLA-B*27:02M HLA-B*35:01H HLA-B*07:05H
DEFSSNVANY

SEQ ID NO: 4978 - protein, 10 aa, Severe acute respiratory syndrome coronavirus 2
  REGION 1..10: note = Table A: HLA-A*03:02H HLA-A*11:01H HLA-A*11:02H HLA-A*36:01H HLA-B*27:02H HLA-A*68:01M HLA-A*68:02H HLA-A*34:02M
FSSNVANYQK

SEQ ID NO: 4979 - protein, 10 aa, Severe acute respiratory syndrome coronavirus 2
  REGION 1..10: note = Table A: HLA-A*34:01H
NVANYQKVGM

SEQ ID NO: 4980 - protein, 10 aa, Severe acute respiratory syndrome coronavirus 2
  REGION 1..10: note = Table A: HLA-A*11:303H HLA-A*03:01M HLA-A*03:02H HLA-A*11:01H HLA-A*11:02H HLA-A*34:02H
ANYQKVGMQK

SEQ ID NO: 4981 - protein, 10 aa, Severe acute respiratory syndrome coronavirus 2
  REGION 1..10: note = Table A: HLA-A*29:02H HLA-A*30:02M HLA-A*23:01H
NYQKVGMQKY

SEQ ID NO: 4982 - protein, 10 aa, Severe acute respiratory syndrome coronavirus 2
  REGION 1..10: note = Table A: HLA-A*11:303H HLA-A*03:01M HLA-A*03:02H HLA-A*11:01H HLA-A*11:02H HLA-A*30:02H HLA-A*34:02H
TLQGPPGTGK

SEQ ID NO: 4983 - protein, 10 aa, Severe acute respiratory syndrome coronavirus 2
  REGION 1..10: note = Table A: HLA-C*15:05H HLA-B*07:05H
GPPGTGKSHF

SEQ ID NO: 4984 - protein, 10 aa, Severe acute respiratory syndrome coronavirus 2
  REGION 1..10: note = Table A: HLA-B*58:02H HLA-B*57:03H
KSHFAIGLAL

SEQ ID NO: 4985 - protein, 10 aa, Severe acute respiratory syndrome coronavirus 2
  REGION 1..10: note = Table A: HLA-B*38:02M
SHFAIGLALY

SEQ ID NO: 4986 - protein, 10 aa, Severe acute respiratory syndrome coronavirus 2
  REGION 1..10: note = Table A: HLA-A*29:02M
HFAIGLALYY

SEQ ID NO: 4987 - protein, 10 aa, Severe acute respiratory syndrome coronavirus 2
  REGION 1..10: note = Table A: HLA-A*02:03H
ALYYPSARIV

SEQ ID NO: 4988 - protein, 10 aa, Severe acute respiratory syndrome coronavirus 2
  REGION 1..10: note = Table A: HLA-C*14:02M HLA-C*14:03H HLA-A*29:02H HLA-A*30:02H
LYYPSARIVY

SEQ ID NO: 4989 - protein, 10 aa, Severe acute respiratory syndrome coronavirus 2
  REGION 1..10: note = Table A: HLA-C*14:03H HLA-C*06:02H
YYPSARIVYT

SEQ ID NO: 4990 - protein, 10 aa, Severe acute respiratory syndrome coronavirus 2
  REGION 1..10: note = Table A: HLA-B*56:01M HLA-B*55:02H HLA-B*55:01M HLA-B*54:01H HLA-B*07:04H
YPSARIVYTA

SEQ ID NO: 4991 - protein, 10 aa, Severe acute respiratory syndrome coronavirus 2
  REGION 1..10: note = Table A: HLA-B*39:01H
ACSHAAVDAL

SEQ ID NO: 4992 - protein, 10 aa, Severe acute respiratory syndrome coronavirus 2
  REGION 1..10: note = Table A: HLA-A*36:01H HLA-A*34:02H
HAAVDALCEK

SEQ ID NO: 4993 - protein, 10 aa, Severe acute respiratory syndrome coronavirus 2
  REGION 1..10: note = Table A: HLA-A*02:02H HLA-A*02:03H
ALCEKALKYL

SEQ ID NO: 4994 - protein, 10 aa, Severe acute respiratory syndrome coronavirus 2
  REGION 1..10: note = Table A: HLA-A*31:01H
KYLPIDKCSR

SEQ ID NO: 4995 - protein, 10 aa, Severe acute respiratory syndrome coronavirus 2
  REGION 1..10: note = Table A: HLA-B*15:03M
FKVNSTLEQY

SEQ ID NO: 4996 - protein, 10 aa, Severe acute respiratory syndrome coronavirus 2
  REGION 1..10: note = Table A: HLA-A*02:11H HLA-A*02:08H
KVNSTLEQYV

SEQ ID NO: 4997 - protein, 10 aa, Severe acute respiratory syndrome coronavirus 2
  REGION 1..10: note = Table A: HLA-A*02:05H
IVVFDEISMA

SEQ ID NO: 4998 - protein, 10 aa, Severe acute respiratory syndrome coronavirus 2
  REGION 1..10: note = Table A: HLA-A*68:02H
TNYDLSVVNA

SEQ ID NO: 4999 - protein, 10 aa, Severe acute respiratory syndrome coronavirus 2
  REGION 1..10: note = Table A: HLA-A*33:01H HLA-A*26:03H HLA-A*68:01H HLA-A*34:01M HLA-A*66:01H
DLSVVNARLR

SEQ ID NO: 5000 - protein, 10 aa, Severe acute respiratory syndrome coronavirus 2
  REGION 1..10: note = Table A: HLA-A*11:01H HLA-A*11:02H HLA-A*34:02H
SVVNARLRAK

SEQ ID NO: 5001 - protein, 10 aa, Severe acute respiratory syndrome coronavirus 2
  REGION 1..10: note = Table A: HLA-C*14:03H HLA-A*11:303H HLA-A*25:01H HLA-B*46:01H HLA-A*26:01M HLA-A*26:02M HLA-A*26:03M HLA-C*04:03H HLA-C*03:03H HLA-A*02:11M HLA-C*03:04H HLA-A*68:01H HLA-A*68:02M HLA-B*35:03H HLA-C*15:05M
  REGION 1..10: note = CONT. FROM ABOVE: HLA-C*01:02H HLA-C*12:02H HLA-A*02:04M HLA- A*02:05H HLA-A*02:06M HLA-A*02:07H HLA-A*02:08H HLA-A*02:01H HLA-A*02:02M HLA-A*02:03M HLA-A*34:01H HLA-A*34:02H HLA-C*07 :27H HLA-C*17:01M HLA-C*08:01H HLA-C*08:03H HLA-B*38:02M
  REGION 1..10: note = CONT. FROM ABOVE: HLA-B*39:01H HLA-A*66:01H
YVYIGDPAQL

SEQ ID NO: 5002 - protein, 10 aa, Severe acute respiratory syndrome coronavirus 2
  REGION 1..10: note = Table A: HLA-A*34:02H
LPAPRTLLTK

SEQ ID NO: 5003 - protein, 10 aa, Severe acute respiratory syndrome coronavirus 2
  REGION 1..10: note = Table A: HLA-A*30:02M
LTKGTLEPEY

SEQ ID NO: 5004 - protein, 10 aa, Severe acute respiratory syndrome coronavirus 2
  REGION 1..10: note = Table A: HLA-B*50:01H
LEPEYFNSVC

SEQ ID NO: 5005 - protein, 10 aa, Severe acute respiratory syndrome coronavirus 2
  REGION 1..10: note = Table A: HLA-A*34:01H
EPEYFNSVCR

SEQ ID NO: 5006 - protein, 10 aa, Severe acute respiratory syndrome coronavirus 2
  REGION 1..10: note = Table A: HLA-B*13:01H
RLMKTIGPDM

SEQ ID NO: 5007 - protein, 10 aa, Severe acute respiratory syndrome coronavirus 2
  REGION 1..10: note = Table A: HLA-B*38:02H
LMKTIGPDMF

SEQ ID NO: 5008 - protein, 10 aa, Severe acute respiratory syndrome coronavirus 2
  REGION 1..10: note = Table A: HLA-A*36:01H
KTIGPDMFLG

SEQ ID NO: 5009 - protein, 10 aa, Severe acute respiratory syndrome coronavirus 2
  REGION 1..10: note = Table A: HLA-B*44:05H HLA-B*44:03H HLA-B*40:01H HLA-B*40:02M HLA-B*41:02M HLA-B*49:01H
AEIVDTVSAL

SEQ ID NO: 5010 - protein, 10 aa, Severe acute respiratory syndrome coronavirus 2
  REGION 1..10: note = Table A: HLA-A*68:02M
EIVDTVSALV

SEQ ID NO: 5011 - protein, 10 aa, Severe acute respiratory syndrome coronavirus 2
  REGION 1..10: note = Table A: HLA-B*58:01H HLA-A*36:01M HLA-A*29:01H HLA-A*29:02H HLA-A*01:01M HLA-B*38:02H HLA-B*07:05H
IVDTVSALVY

SEQ ID NO: 5012 - protein, 10 aa, Severe acute respiratory syndrome coronavirus 2
  REGION 1..10: note = Table A: HLA-A*03:02M HLA-A*11:01H HLA-A*68:01H HLA-A*68:02H
TVSALVYDNK

SEQ ID NO: 5013 - protein, 10 aa, Severe acute respiratory syndrome coronavirus 2
  REGION 1..10: note = Table A: HLA-B*57:03H
VSALVYDNKL

SEQ ID NO: 5014 - protein, 10 aa, Severe acute respiratory syndrome coronavirus 2
  REGION 1..10: note = Table A: HLA-A*11:01H HLA-A*34:02H
SALVYDNKLK

SEQ ID NO: 5015 - protein, 10 aa, Severe acute respiratory syndrome coronavirus 2
  REGION 1..10: note = Table A: HLA-B*46:01H HLA-A*34:01H HLA-A*34:02H
LVYDNKLKAH

SEQ ID NO: 5016 - protein, 10 aa, Severe acute respiratory syndrome coronavirus 2
  REGION 1..10: note = Table A: HLA-B*38:02H
AHKDKSAQCF

SEQ ID NO: 5017 - protein, 10 aa, Severe acute respiratory syndrome coronavirus 2
  REGION 1..10: note = Table A: HLA-A*36:01H HLA-A*30:02H
KSAQCFKMFY

SEQ ID NO: 5018 - protein, 10 aa, Severe acute respiratory syndrome coronavirus 2
  REGION 1..10: note = Table A: HLA-A*74:01H HLA-A*03:01H HLA-B*15:01H
KMFYKGVITH

SEQ ID NO: 5019 - protein, 10 aa, Severe acute respiratory syndrome coronavirus 2
  REGION 1..10: note = Table A: HLA-A*26:03H HLA-A*02:05M HLA-A*02:06H HLA-A*02:08H HLA-A*02:03H
GVITHDVSSA

SEQ ID NO: 5020 - protein, 10 aa, Severe acute respiratory syndrome coronavirus 2
  REGION 1..10: note = Table A: HLA-A*68:02H
DVSSAINRPQ

SEQ ID NO: 5021 - protein, 10 aa, Severe acute respiratory syndrome coronavirus 2
  REGION 1..10: note = Table A: HLA-B*58:02H HLA-B*57:03H
VSSAINRPQI

SEQ ID NO: 5022 - protein, 10 aa, Severe acute respiratory syndrome coronavirus 2
  REGION 1..10: note = Table A: HLA-C*12:05H HLA-A*68:02H HLA-A*02:06H
SAINRPQIGV

SEQ ID NO: 5023 - protein, 10 aa, Severe acute respiratory syndrome coronavirus 2
  REGION 1..10: note = Table A: HLA-A*74:01H HLA-A*33:01H HLA-A*33:03H HLA-A*31:01H
INRPQIGVVR

SEQ ID NO: 5024 - protein, 10 aa, Severe acute respiratory syndrome coronavirus 2
  REGION 1..10: note = Table A: HLA-B*42:01H HLA-C*15:05H HLA-B*07:02H HLA-B*07:04H HLA-B*07:05H
RPQIGVVREF

SEQ ID NO: 5025 - protein, 10 aa, Severe acute respiratory syndrome coronavirus 2
  REGION 1..10: note = Table A: HLA-B*44:02H HLA-B*44:03M
REFLTRNPAW

SEQ ID NO: 5026 - protein, 10 aa, Severe acute respiratory syndrome coronavirus 2
  REGION 1..10: note = Table A: HLA-A*33:01H HLA-A*33:03M
EFLTRNPAWR

SEQ ID NO: 5027 - protein, 10 aa, Severe acute respiratory syndrome coronavirus 2
  REGION 1..10: note = Table A: HLA-A*02:05H
FISPYNSQNA

SEQ ID NO: 5028 - protein, 10 aa, Severe acute respiratory syndrome coronavirus 2
  REGION 1..10: note = Table A: HLA-B*56:01H HLA-B*55:02H HLA-C*15:05M HLA-B*55:01M HLA-B*39:06H HLA-B*54:01M HLA-B*07:05H
SPYNSQNAVA

SEQ ID NO: 5029 - protein, 10 aa, Severe acute respiratory syndrome coronavirus 2
  REGION 1..10: note = Table A: HLA-B*27:02H HLA-A*68:01H HLA-A*34:02H
YNSQNAVASK

SEQ ID NO: 5030 - protein, 10 aa, Severe acute respiratory syndrome coronavirus 2
  REGION 1..10: note = Table A: HLA-A*02:11M HLA-A*02:06H HLA-A*02:08H HLA-A*02:01H HLA-A*02:03H HLA-B*38:02H HLA-B*13:02M
KILGLPTQTV

SEQ ID NO: 5031 - protein, 10 aa, Severe acute respiratory syndrome coronavirus 2
  REGION 1..10: note = Table A: HLA-A*36:01M HLA-A*01:01M HLA-B*35:08H HLA-B*38:02H
TVDSSQGSEY

SEQ ID NO: 5032 - protein, 10 aa, Severe acute respiratory syndrome coronavirus 2
  REGION 1..10: note = Table A: HLA-A*68:02H HLA-A*02:08H
YVIFTQTTET

SEQ ID NO: 5033 - protein, 10 aa, Severe acute respiratory syndrome coronavirus 2
  REGION 1..10: note = Table A: HLA-A*02:05H HLA-A*02:08H HLA-A*02:03H HLA-B*38:02H
VIFTQTTETA

SEQ ID NO: 5034 - protein, 10 aa, Severe acute respiratory syndrome coronavirus 2
  REGION 1..10: note = Table A: HLA-A*33:03M HLA-A*26:03H HLA-A*68:01H HLA-A*34:01M HLA-A*34:02M HLA-A*66:01M
ETAHSCNVNR

SEQ ID NO: 5035 - protein, 10 aa, Severe acute respiratory syndrome coronavirus 2
  REGION 1..10: note = Table A: HLA-A*68:02H
HSCNVNRFNV

SEQ ID NO: 5036 - protein, 10 aa, Severe acute respiratory syndrome coronavirus 2
  REGION 1..10: note = Table A: HLA-B*39:06H
NRFNVAITRA

SEQ ID NO: 5037 - protein, 10 aa, Severe acute respiratory syndrome coronavirus 2
  REGION 1..10: note = Table A: HLA-B*07:04H
RAKVGILCIM

SEQ ID NO: 5038 - protein, 10 aa, Severe acute respiratory syndrome coronavirus 2
  REGION 1..10: note = Table A: HLA-C*04:03H HLA-C*08:01H
LYDKLQFTSL

SEQ ID NO: 5039 - protein, 10 aa, Severe acute respiratory syndrome coronavirus 2
  REGION 1..10: note = Table A: HLA-A*74:01H
LQFTSLEIPR

SEQ ID NO: 5040 - protein, 10 aa, Severe acute respiratory syndrome coronavirus 2
  REGION 1..10: note = Table A: HLA-A*02:11H
TSLEIPRRNV

SEQ ID NO: 5041 - protein, 10 aa, Severe acute respiratory syndrome coronavirus 2
  REGION 1..10: note = Table A: HLA-A*25:01H HLA-A*26:03H HLA-A*34:01H
EIPRRNVATL

SEQ ID NO: 5042 - protein, 10 aa, Severe acute respiratory syndrome coronavirus 2
  REGION 1..10: note = Table A: HLA-A*68:02H
NVATLQAENV

SEQ ID NO: 5043 - protein, 10 aa, Severe acute respiratory syndrome coronavirus 2
  REGION 1..10: note = Table A: HLA-A*02:04H HLA-B*38:02H
TLQAENVTGL

SEQ ID NO: 5044 - protein, 10 aa, Severe acute respiratory syndrome coronavirus 2
  REGION 1..10: note = Table A: HLA-B*38:02H HLA-B*15:01H
LQAENVTGLF

SEQ ID NO: 5045 - protein, 10 aa, Severe acute respiratory syndrome coronavirus 2
  REGION 1..10: note = Table A: HLA-A*03:02H HLA-A*11:01H HLA-A*36:01M HLA-B*27:02H HLA-A*68:01H HLA-A*34:02M
QAENVTGLFK

SEQ ID NO: 5046 - protein, 10 aa, Severe acute respiratory syndrome coronavirus 2
  REGION 1..10: note = Table A: HLA-A*30:02H HLA-B*57:03H
KVITGLHPTQ

SEQ ID NO: 5047 - protein, 10 aa, Severe acute respiratory syndrome coronavirus 2
  REGION 1..10: note = Table A: HLA-A*02:03H
VITGLHPTQA

SEQ ID NO: 5048 - protein, 10 aa, Severe acute respiratory syndrome coronavirus 2
  REGION 1..10: note = Table A: HLA-C*08:03H
TGLHPTQAPT

SEQ ID NO: 5049 - protein, 10 aa, Severe acute respiratory syndrome coronavirus 2
  REGION 1..10: note = Table A: HLA-B*38:02H
LHPTQAPTHL

SEQ ID NO: 5050 - protein, 10 aa, Severe acute respiratory syndrome coronavirus 2
  REGION 1..10: note = Table A: HLA-B*57:03H
PTHLSVDTKF

SEQ ID NO: 5051 - protein, 10 aa, Severe acute respiratory syndrome coronavirus 2
  REGION 1..10: note = Table A: HLA-B*35:01H HLA-B*35:08H HLA-B*35:07H
IPGIPKDMTY

SEQ ID NO: 5052 - protein, 10 aa, Severe acute respiratory syndrome coronavirus 2
  REGION 1..10: note = Table A: HLA-B*07:04H
IPKDMTYRRL

SEQ ID NO: 5053 - protein, 10 aa, Severe acute respiratory syndrome coronavirus 2
  REGION 1..10: note = Table A: HLA-B*58:01H HLA-A*36:01H HLA-A*30:02H
ISMMGFKMNY

SEQ ID NO: 5054 - protein, 10 aa, Severe acute respiratory syndrome coronavirus 2
  REGION 1..10: note = Table A: HLA-B*15:03H
FKMNYQVNGY

SEQ ID NO: 5055 - protein, 10 aa, Severe acute respiratory syndrome coronavirus 2
  REGION 1..10: note = Table A: HLA-A*68:01H HLA-A*34:02H HLA-A*66:01H
NGYPNMFITR

SEQ ID NO: 5056 - protein, 10 aa, Severe acute respiratory syndrome coronavirus 2
  REGION 1..10: note = Table A: HLA-A*30:01H HLA-A*02:03H
ITREEAIRHV

SEQ ID NO: 5057 - protein, 10 aa, Severe acute respiratory syndrome coronavirus 2
  REGION 1..10: note = Table A: HLA-B*44:03H
EEAIRHVRAW

SEQ ID NO: 5058 - protein, 10 aa, Severe acute respiratory syndrome coronavirus 2
  REGION 1..10: note = Table A: HLA-B*57:03H
RAWIGFDVEG

SEQ ID NO: 5059 - protein, 10 aa, Severe acute respiratory syndrome coronavirus 2
  REGION 1..10: note = Table A: HLA-A*02:11H HLA-A*68:02H HLA-A*02:05H HLA-A*02:02H
IGFDVEGCHA

SEQ ID NO: 5060 - protein, 10 aa, Severe acute respiratory syndrome coronavirus 2
  REGION 1..10: note = Table A: HLA-A*03:01H HLA-A*30:01H HLA-C*15:05H HLA-B*57:03M
ATREAVGTNL

SEQ ID NO: 5061 - protein, 10 aa, Severe acute respiratory syndrome coronavirus 2
  REGION 1..10: note = Table A: HLA-B*40:01M HLA-B*40:02H
REAVGTNLPL

SEQ ID NO: 5062 - protein, 10 aa, Severe acute respiratory syndrome coronavirus 2
  REGION 1..10: note = Table A: HLA-B*58:01H HLA-A*03:01H HLA-A*11:01H HLA-B*57:01H HLA-B*27:02H HLA-B*57:03H
GTNLPLQLGF

SEQ ID NO: 5063 - protein, 10 aa, Severe acute respiratory syndrome coronavirus 2
  REGION 1..10: note = Table A: HLA-A*68:02H
FSTGVNLVAV

SEQ ID NO: 5064 - protein, 10 aa, Severe acute respiratory syndrome coronavirus 2
  REGION 1..10: note = Table A: HLA-A*36:01H HLA-A*01:01M HLA-C*04:03M HLA-A*02:07M HLA-B*35:08H HLA-C*08:02M HLA-B*38:02H HLA-B*39:01H HLA-C*05:01M
YVDTPNNTDF

SEQ ID NO: 5065 - protein, 10 aa, Severe acute respiratory syndrome coronavirus 2
  REGION 1..10: note = Table A: HLA-A*26:03H HLA-A*68:01M HLA-A*34:01H HLA-A*66:01H
DTPNNTDFSR

SEQ ID NO: 5066 - protein, 10 aa, Severe acute respiratory syndrome coronavirus 2
  REGION 1..10: note = Table A: HLA-B*56:01H HLA-B*55:02H HLA-C*15:05H HLA-B*55:01H
TPNNTDFSRV

SEQ ID NO: 5067 - protein, 10 aa, Severe acute respiratory syndrome coronavirus 2
  REGION 1..10: note = Table A: HLA-B*39:06H
NNTDFSRVSA

SEQ ID NO: 5068 - protein, 10 aa, Severe acute respiratory syndrome coronavirus 2
  REGION 1..10: note = Table A: HLA-A*34:02H
NTDFSRVSAK

SEQ ID NO: 5069 - protein, 10 aa, Severe acute respiratory syndrome coronavirus 2
  REGION 1..10: note = Table A: HLA-B*42:01H HLA-A*11:303M HLA-C*16:01H HLA-C*16:04H HLA-B*57:01H HLA-B*46:01M HLA-B*53:01H HLA-C*03:02M HLA-C*03:04H HLA-A*30:02H HLA-C*15:05H HLA-B*55:01H HLA-C*12:02H HLA-A*34:01H HLA-C*07:27H
  REGION 1..10: note = CONT. FROM ABOVE: HLA-B*35:01H HLA-B*35:08H HLA-B*35:07M HLA- C*08:01H HLA-B*38:02M HLA-B*07:02H HLA-B*07:04M HLA-B*15:01M HLA-B*15:02M HLA-B*15:03H HLA-B*07:05H HLA-B*57:03M HLA-C*02 :02M HLA-B*15:11M
SAKPPPGDQF

SEQ ID NO: 5070 - protein, 10 aa, Severe acute respiratory syndrome coronavirus 2
  REGION 1..10: note = Table A: HLA-A*29:02H
QFKHLIPLMY

SEQ ID NO: 5071 - protein, 10 aa, Severe acute respiratory syndrome coronavirus 2
  REGION 1..10: note = Table A: HLA-B*53:01H
IPLMYKGLPW

SEQ ID NO: 5072 - protein, 10 aa, Severe acute respiratory syndrome coronavirus 2
  REGION 1..10: note = Table A: HLA-A*02:11M HLA-A*02:02H HLA-A*02:03H
LMYKGLPWNV

SEQ ID NO: 5073 - protein, 10 aa, Severe acute respiratory syndrome coronavirus 2
  REGION 1..10: note = Table A: HLA-B*58:02M HLA-B*57:01H HLA-A*02:04H HLA-B*57:03M
KGLPWNVVRI

SEQ ID NO: 5074 - protein, 10 aa, Severe acute respiratory syndrome coronavirus 2
  REGION 1..10: note = Table A: HLA-A*02:08H HLA-C*08:03H
KIVQMLSDTL

SEQ ID NO: 5075 - protein, 10 aa, Severe acute respiratory syndrome coronavirus 2
  REGION 1..10: note = Table A: HLA-A*03:02H
IVQMLSDTLK

SEQ ID NO: 5076 - protein, 10 aa, Severe acute respiratory syndrome coronavirus 2
  REGION 1..10: note = Table A: HLA-A*02:04H HLA-A*02:02M
NLSDRVVFVL

SEQ ID NO: 5077 - protein, 10 aa, Severe acute respiratory syndrome coronavirus 2
  REGION 1..10: note = Table A: HLA-B*58:01M HLA-B*57:01H HLA-B*57:03H
LSDRVVFVLW

SEQ ID NO: 5078 - protein, 10 aa, Severe acute respiratory syndrome coronavirus 2
  REGION 1..10: note = Table A: HLA-A*02:04H
FVLWAHGFEL

SEQ ID NO: 5079 - protein, 10 aa, Severe acute respiratory syndrome coronavirus 2
  REGION 1..10: note = Table A: HLA-A*02:11H
VLWAHGFELT

SEQ ID NO: 5080 - protein, 10 aa, Severe acute respiratory syndrome coronavirus 2
  REGION 1..10: note = Table A: HLA-B*46:01H HLA-C*03:02H HLA-C*03:04H HLA-B*35:07H HLA-B*38:02H
WAHGFELTSM

SEQ ID NO: 5081 - protein, 10 aa, Severe acute respiratory syndrome coronavirus 2
  REGION 1..10: note = Table A: HLA-A*36:01H HLA-A*30:02H HLA-B*35:01H HLA-B*35:07H HLA-B*38:02H HLA-B*15:02H
HGFELTSMKY

SEQ ID NO: 5082 - protein, 10 aa, Severe acute respiratory syndrome coronavirus 2
  REGION 1..10: note = Table A: HLA-A*74:01M HLA-A*30:01H HLA-A*31:01H
KYFVKIGPER

SEQ ID NO: 5083 - protein, 10 aa, Severe acute respiratory syndrome coronavirus 2
  REGION 1..10: note = Table A: HLA-B*35:01M HLA-B*35:07H HLA-B*38:02M HLA-B*15:01H HLA-B*15:02H HLA-B*39:01H
TCFSTASDTY

SEQ ID NO: 5084 - protein, 10 aa, Severe acute respiratory syndrome coronavirus 2
  REGION 1..10: note = Table A: HLA-B*58:01M HLA-B*57:01H HLA-A*25:01M HLA-B*57:03M
STASDTYACW

SEQ ID NO: 5085 - protein, 10 aa, Severe acute respiratory syndrome coronavirus 2
  REGION 1..10: note = Table A: HLA-B*38:02H
WHHSIGFDYV

SEQ ID NO: 5086 - protein, 10 aa, Severe acute respiratory syndrome coronavirus 2
  REGION 1..10: note = Table A: HLA-B*38:02M
HHSIGFDYVY

SEQ ID NO: 5087 - protein, 10 aa, Severe acute respiratory syndrome coronavirus 2
  REGION 1..10: note = Table A: HLA-A*68:02H
YVYNPFMIDV

SEQ ID NO: 5088 - protein, 10 aa, Severe acute respiratory syndrome coronavirus 2
  REGION 1..10: note = Table A: HLA-B*53:01H HLA-B*35:01H HLA-B*35:07M
NPFMIDVQQW

SEQ ID NO: 5089 - protein, 10 aa, Severe acute respiratory syndrome coronavirus 2
  REGION 1..10: note = Table A: HLA-A*02:11H HLA-A*02:04H HLA-A*02:07H HLA-A*02:02H HLA-B*38:02H
FMIDVQQWGF

SEQ ID NO: 5090 - protein, 10 aa, Severe acute respiratory syndrome coronavirus 2
  REGION 1..10: note = Table A: HLA-A*36:01H HLA-A*29:02H
GNLQSNHDLY

SEQ ID NO: 5091 - protein, 10 aa, Severe acute respiratory syndrome coronavirus 2
  REGION 1..10: note = Table A: HLA-A*68:01H
VASCDAIMTR

SEQ ID NO: 5092 - protein, 10 aa, Severe acute respiratory syndrome coronavirus 2
  REGION 1..10: note = Table A: HLA-B*15:03H
VKRVDWTIEY

SEQ ID NO: 5093 - protein, 10 aa, Severe acute respiratory syndrome coronavirus 2
  REGION 1..10: note = Table A: HLA-B*44:05M HLA-B*18:01H HLA-A*68:02H HLA-A*02:02H HLA-C*08:01H HLA-B*38:01H HLA-B*38:02H HLA-B*40:01H HLA-B*40:02H HLA-B*40:06H HLA-B*07:05H HLA-B*41:02H HLA-B*49:01M HLA-B*50:01H
IEYPIIGDEL

SEQ ID NO: 5094 - protein, 10 aa, Severe acute respiratory syndrome coronavirus 2
  REGION 1..10: note = Table A: HLA-B*53:01M HLA-B*35:03H HLA-C*15:05H HLA-B*51:01H
YPIIGDELKI

SEQ ID NO: 5095 - protein, 10 aa, Severe acute respiratory syndrome coronavirus 2
  REGION 1..10: note = Table A: HLA-A*02:08H
KVQHMVVKAA

SEQ ID NO: 5096 - protein, 10 aa, Severe acute respiratory syndrome coronavirus 2
  REGION 1..10: note = Table A: HLA-B*15:01H
VQHMVVKAAL

SEQ ID NO: 5097 - protein, 10 aa, Severe acute respiratory syndrome coronavirus 2
  REGION 1..10: note = Table A: HLA-B*38:01H HLA-B*38:02M HLA-B*15:10M
QHMVVKAALL

SEQ ID NO: 5098 - protein, 10 aa, Severe acute respiratory syndrome coronavirus 2
  REGION 1..10: note = Table A: HLA-A*02:11H HLA-A*02:04M HLA-A*02:06H HLA-A*02:07H HLA-B*40:06H HLA-B*13:01H
ALLADKFPVL

SEQ ID NO: 5099 - protein, 10 aa, Severe acute respiratory syndrome coronavirus 2
  REGION 1..10: note = Table A: HLA-A*11:02H HLA-A*34:02H
PVLHDIGNPK

SEQ ID NO: 5100 - protein, 10 aa, Severe acute respiratory syndrome coronavirus 2
  REGION 1..10: note = Table A: HLA-A*02:11H HLA-A*02:01H HLA-A*02:02M HLA-A*02:03H
VLHDIGNPKA

SEQ ID NO: 5101 - protein, 10 aa, Severe acute respiratory syndrome coronavirus 2
  REGION 1..10: note = Table A: HLA-B*38:02M
LHDIGNPKAI

SEQ ID NO: 5102 - protein, 10 aa, Severe acute respiratory syndrome coronavirus 2
  REGION 1..10: note = Table A: HLA-A*34:02H
HDIGNPKAIK

SEQ ID NO: 5103 - protein, 10 aa, Severe acute respiratory syndrome coronavirus 2
  REGION 1..10: note = Table A: HLA-B*58:01M HLA-B*57:01H HLA-B*57:03M
KCVPQADVEW

SEQ ID NO: 5104 - protein, 10 aa, Severe acute respiratory syndrome coronavirus 2
  REGION 1..10: note = Table A: HLA-B*53:01M HLA-B*35:01M HLA-B*35:02H HLA-B*35:08H HLA-B*35:07H HLA-B*35:12H
VPQADVEWKF

SEQ ID NO: 5105 - protein, 10 aa, Severe acute respiratory syndrome coronavirus 2
  REGION 1..10: note = Table A: HLA-B*40:06H HLA-B*50:01H
VEWKFYDAQP

SEQ ID NO: 5106 - protein, 10 aa, Severe acute respiratory syndrome coronavirus 2
  REGION 1..10: note = Table A: HLA-B*58:01M HLA-B*58:02H HLA-A*36:01H HLA-B*57:01H HLA-A*29:02H HLA-A*30:02M HLA-C*15:02H HLA-B*15:03H HLA-B*57:03M
KAYKIEELFY

SEQ ID NO: 5107 - protein, 10 aa, Severe acute respiratory syndrome coronavirus 2
  REGION 1..10: note = Table A: HLA-B*15:03H
YKIEELFYSY

SEQ ID NO: 5108 - protein, 10 aa, Severe acute respiratory syndrome coronavirus 2
  REGION 1..10: note = Table A: HLA-B*58:01H HLA-A*36:01H HLA-A*34:02H HLA-B*38:02H HLA-B*57:03M HLA-A*66:01H
YSYATHSDKF

SEQ ID NO: 5109 - protein, 10 aa, Severe acute respiratory syndrome coronavirus 2
  REGION 1..10: note = Table A: HLA-B*38:02M HLA-B*39:01H
THSDKFTDGV

SEQ ID NO: 5110 - protein, 10 aa, Severe acute respiratory syndrome coronavirus 2
  REGION 1..10: note = Table A: HLA-A*24:02H HLA-A*24:07M HLA-A*23:01H HLA-B*57:03H
KFTDGVCLFW

SEQ ID NO: 5111 - protein, 10 aa, Severe acute respiratory syndrome coronavirus 2
  REGION 1..10: note = Table A: HLA-C*08:02H
NVDRYPANSI

SEQ ID NO: 5112 - protein, 10 aa, Severe acute respiratory syndrome coronavirus 2
  REGION 1..10: note = Table A: HLA-B*14:02H HLA-B*14:01H
DRYPANSIVC

SEQ ID NO: 5113 - protein, 10 aa, Severe acute respiratory syndrome coronavirus 2
  REGION 1..10: note = Table A: HLA-B*53:01M HLA-C*15:05H HLA-A*34:01H HLA-B*35:01H HLA-B*35:07M
YPANSIVCRF

SEQ ID NO: 5114 - protein, 10 aa, Severe acute respiratory syndrome coronavirus 2
  REGION 1..10: note = Table A: HLA-C*04:03H
RFDTRVLSNL

SEQ ID NO: 5115 - protein, 10 aa, Severe acute respiratory syndrome coronavirus 2
  REGION 1..10: note = Table A: HLA-A*02:01H
VLSNLNLPGC

SEQ ID NO: 5116 - protein, 10 aa, Severe acute respiratory syndrome coronavirus 2
  REGION 1..10: note = Table A: HLA-B*35:01H
LPGCDGGSLY

SEQ ID NO: 5117 - protein, 10 aa, Severe acute respiratory syndrome coronavirus 2
  REGION 1..10: note = Table A: HLA-A*30:02H HLA-B*57:03M
GSLYVNKHAF

SEQ ID NO: 5118 - protein, 10 aa, Severe acute respiratory syndrome coronavirus 2
  REGION 1..10: note = Table A: HLA-A*11:01H HLA-A*11:02H HLA-A*36:01H HLA-A*34:02M
HAFHTPAFDK

SEQ ID NO: 5119 - protein, 10 aa, Severe acute respiratory syndrome coronavirus 2
  REGION 1..10: note = Table A: HLA-B*39:06H
FHTPAFDKSA

SEQ ID NO: 5120 - protein, 10 aa, Severe acute respiratory syndrome coronavirus 2
  REGION 1..10: note = Table A: HLA-C*14:03H HLA-A*25:01M HLA-B*46:01M HLA-A*26:01M HLA-A*26:02M HLA-A*26:03M HLA-A*30:02H HLA-A*68:01H HLA-A*68:02H HLA-C*12:02H HLA-A*34:01H HLA-A*34:02M HLA-B*38:02H HLA-B*15:01H HLA-B*15:02H HLA-B*57:03M
  REGION 1..10: note = CONT. FROM ABOVE: HLA-A*66:01M
HTPAFDKSAF

SEQ ID NO: 5121 - protein, 10 aa, Severe acute respiratory syndrome coronavirus 2
  REGION 1..10: note = Table A: HLA-C*04:01H HLA-C*04:03H
AFDKSAFVNL

SEQ ID NO: 5122 - protein, 10 aa, Severe acute respiratory syndrome coronavirus 2
  REGION 1..10: note = Table A: HLA-B*57:03H
KSAFVNLKQL

SEQ ID NO: 5123 - protein, 10 aa, Severe acute respiratory syndrome coronavirus 2
  REGION 1..10: note = Table A: HLA-C*14:03H HLA-A*24:07H
AFVNLKQLPF

SEQ ID NO: 5124 - protein, 10 aa, Severe acute respiratory syndrome coronavirus 2
  REGION 1..10: note = Table A: HLA-A*29:02H
VNLKQLPFFY

SEQ ID NO: 5125 - protein, 10 aa, Severe acute respiratory syndrome coronavirus 2
  REGION 1..10: note = Table A: HLA-B*56:01H HLA-B*55:02H HLA-C*15:05H HLA-B*55:01H HLA-B*07:04M
SPCESHGKQV

SEQ ID NO: 5126 - protein, 10 aa, Severe acute respiratory syndrome coronavirus 2
  REGION 1..10: note = Table A: HLA-B*15:03H
GKQVVSDIDY

SEQ ID NO: 5127 - protein, 10 aa, Severe acute respiratory syndrome coronavirus 2
  REGION 1..10: note = Table A: HLA-A*02:05H HLA-A*02:08H HLA-B*13:01H
KQVVSDIDYV

SEQ ID NO: 5128 - protein, 10 aa, Severe acute respiratory syndrome coronavirus 2
  REGION 1..10: note = Table A: HLA-A*68:02H
VVSDIDYVPL

SEQ ID NO: 5129 - protein, 10 aa, Severe acute respiratory syndrome coronavirus 2
  REGION 1..10: note = Table A: HLA-A*36:01H
VSDIDYVPLK

SEQ ID NO: 5130 - protein, 10 aa, Severe acute respiratory syndrome coronavirus 2
  REGION 1..10: note = Table A: HLA-B*38:01M HLA-B*38:02H HLA-B*15:10M
HHANEYRLYL

SEQ ID NO: 5131 - protein, 10 aa, Severe acute respiratory syndrome coronavirus 2
  REGION 1..10: note = Table A: HLA-B*44:03H HLA-B*18:01M HLA-B*07:05H
NEYRLYLDAY

SEQ ID NO: 5132 - protein, 10 aa, Severe acute respiratory syndrome coronavirus 2
  REGION 1..10: note = Table A: HLA-A*02:02H HLA-B*13:01H
RLYLDAYNMM

SEQ ID NO: 5133 - protein, 10 aa, Severe acute respiratory syndrome coronavirus 2
  REGION 1..10: note = Table A: HLA-A*23:01H
LYLDAYNMMI

SEQ ID NO: 5134 - protein, 10 aa, Severe acute respiratory syndrome coronavirus 2
  REGION 1..10: note = Table A: HLA-B*38:02H
MMISAGFSLW

SEQ ID NO: 5135 - protein, 10 aa, Severe acute respiratory syndrome coronavirus 2
  REGION 1..10: note = Table A: HLA-A*36:01H HLA-B*46:01H HLA-A*30:02H
ISAGFSLWVY

SEQ ID NO: 5136 - protein, 10 aa, Severe acute respiratory syndrome coronavirus 2
  REGION 1..10: note = Table A: HLA-A*11:01H HLA-A*34:02H
SAGFSLWVYK

SEQ ID NO: 5137 - protein, 10 aa, Severe acute respiratory syndrome coronavirus 2
  REGION 1..10: note = Table A: HLA-A*24:02H HLA-A*24:07H HLA-A*23:01H
VYKQFDTYNL

SEQ ID NO: 5138 - protein, 10 aa, Severe acute respiratory syndrome coronavirus 2
  REGION 1..10: note = Table A: HLA-B*39:06H
TRLQSLENVA

SEQ ID NO: 5139 - protein, 10 aa, Severe acute respiratory syndrome coronavirus 2
  REGION 1..10: note = Table A: HLA-B*44:05H HLA-A*02:11H HLA-A*30:02H HLA-A*02:04H HLA-B*38:02H HLA-A*32:01M HLA-B*15:01M HLA-B*15:03H HLA-B*57:03M HLA-B*13:01M
RLQSLENVAF

SEQ ID NO: 5140 - protein, 10 aa, Severe acute respiratory syndrome coronavirus 2
  REGION 1..10: note = Table A: HLA-B*38:02H
SLENVAFNVV

SEQ ID NO: 5141 - protein, 10 aa, Severe acute respiratory syndrome coronavirus 2
  REGION 1..10: note = Table A: HLA-A*33:03H HLA-A*26:03H HLA-B*27:02H HLA-A*68:01M HLA-A*34:02M
ENVAFNVVNK

SEQ ID NO: 5142 - protein, 10 aa, Severe acute respiratory syndrome coronavirus 2
  REGION 1..10: note = Table A: HLA-A*68:01H
NVAFNVVNKG

SEQ ID NO: 5143 - protein, 10 aa, Severe acute respiratory syndrome coronavirus 2
  REGION 1..10: note = Table A: HLA-C*14:03H HLA-A*24:07H
AFNVVNKGHF

SEQ ID NO: 5144 - protein, 10 aa, Severe acute respiratory syndrome coronavirus 2
  REGION 1..10: note = Table A: HLA-C*08:03H HLA-B*38:02M HLA-B*39:06H HLA-B*39:01H HLA-B*15:10M
GHFDGQQGEV

SEQ ID NO: 5145 - protein, 10 aa, Severe acute respiratory syndrome coronavirus 2
  REGION 1..10: note = Table A: HLA-B*13:01H HLA-B*13:02M
GQQGEVPVSI

SEQ ID NO: 5146 - protein, 10 aa, Severe acute respiratory syndrome coronavirus 2
  REGION 1..10: note = Table A: HLA-B*56:01M HLA-B*55:02M HLA-C*15:05M HLA-B*55:01H HLA-B*51:01M HLA-B*54:01H HLA-B*07:05H
VPVSIINNTV

SEQ ID NO: 5147 - protein, 10 aa, Severe acute respiratory syndrome coronavirus 2
  REGION 1..10: note = Table A: HLA-A*11:303M HLA-A*03:01M HLA-A*03:02H HLA-A*11:01H HLA-A*11:02H HLA-A*68:01H HLA-A*34:02H HLA-C*07:27M
SIINNTVYTK

SEQ ID NO: 5148 - protein, 10 aa, Severe acute respiratory syndrome coronavirus 2
  REGION 1..10: note = Table A: HLA-A*68:02H
NTVYTKVDGV

SEQ ID NO: 5149 - protein, 10 aa, Severe acute respiratory syndrome coronavirus 2
  REGION 1..10: note = Table A: HLA-B*48:01H HLA-B*38:01H HLA-B*38:02H HLA-B*39:01H
TKVDGVDVEL

SEQ ID NO: 5150 - protein, 10 aa, Severe acute respiratory syndrome coronavirus 2
  REGION 1..10: note = Table A: HLA-A*36:01H HLA-C*04:03H HLA-A*02:07H HLA-B*57:03M HLA-B*13:01H
KVDGVDVELF

SEQ ID NO: 5151 - protein, 10 aa, Severe acute respiratory syndrome coronavirus 2
  REGION 1..10: note = Table A: HLA-A*36:01H
GVDVELFENK

SEQ ID NO: 5152 - protein, 10 aa, Severe acute respiratory syndrome coronavirus 2
  REGION 1..10: note = Table A: HLA-B*44:05H HLA-B*40:01M HLA-B*40:02H HLA-B*41:02H HLA-B*49:01H
VELFENKTTL

SEQ ID NO: 5153 - protein, 10 aa, Severe acute respiratory syndrome coronavirus 2
  REGION 1..10: note = Table A: HLA-B*58:01M HLA-B*58:02M HLA-C*16:01H HLA-A*36:01H HLA-B*57:01M HLA-C*15:05H HLA-A*32:01H HLA-B*57:03H
KTTLPVNVAF

SEQ ID NO: 5154 - protein, 10 aa, Severe acute respiratory syndrome coronavirus 2
  REGION 1..10: note = Table A: HLA-B*53:01H HLA-B*35:01H HLA-B*35:07H
LPVNVAFELW

SEQ ID NO: 5155 - protein, 10 aa, Severe acute respiratory syndrome coronavirus 2
  REGION 1..10: note = Table A: HLA-A*36:01H HLA-A*30:02H HLA-B*35:01H
IAANTVIWDY

SEQ ID NO: 5156 - protein, 10 aa, Severe acute respiratory syndrome coronavirus 2
  REGION 1..10: note = Table A: HLA-B*44:05H HLA-C*15:05H HLA-B*37:01H HLA-B*38:02H HLA-B*40:02H HLA-B*41:02H HLA-B*49:01H
RDAPAHISTI

SEQ ID NO: 5157 - protein, 10 aa, Severe acute respiratory syndrome coronavirus 2
  REGION 1..10: note = Table A: HLA-B*56:01M HLA-B*55:02H HLA-A*68:02H HLA-C*15:05M HLA-B*55:01H HLA-B*54:01H HLA-B*07:02H HLA-B*07:04H HLA-B*07:05H
APAHISTIGV

SEQ ID NO: 5158 - protein, 10 aa, Severe acute respiratory syndrome coronavirus 2
  REGION 1..10: note = Table A: HLA-A*03:01H HLA-A*03:02H HLA-A*11:01H HLA-A*11:02H
GVCSMTDIAK

SEQ ID NO: 5159 - protein, 10 aa, Severe acute respiratory syndrome coronavirus 2
  REGION 1..10: note = Table A: HLA-C*15:05H
KPTETICAPL

SEQ ID NO: 5160 - protein, 10 aa, Severe acute respiratory syndrome coronavirus 2
  REGION 1..10: note = Table A: HLA-A*25:01M HLA-A*26:01H HLA-A*26:02H HLA-A*26:03H
ETICAPLTVF

SEQ ID NO: 5161 - protein, 10 aa, Severe acute respiratory syndrome coronavirus 2
  REGION 1..10: note = Table A: HLA-C*04:03H
FFDGRVDGQV

SEQ ID NO: 5162 - protein, 10 aa, Severe acute respiratory syndrome coronavirus 2
  REGION 1..10: note = Table A: HLA-B*27:05M HLA-B*27:02H HLA-B*38:01H HLA-B*38:02M HLA-B*39:01M
GRVDGQVDLF

SEQ ID NO: 5163 - protein, 10 aa, Severe acute respiratory syndrome coronavirus 2
  REGION 1..10: note = Table A: HLA-A*74:01H HLA-A*36:01H
RVDGQVDLFR

SEQ ID NO: 5164 - protein, 10 aa, Severe acute respiratory syndrome coronavirus 2
  REGION 1..10: note = Table A: HLA-A*74:01H
GQVDLFRNAR

SEQ ID NO: 5165 - protein, 10 aa, Severe acute respiratory syndrome coronavirus 2
  REGION 1..10: note = Table A: HLA-B*27:05H HLA-B*27:02H HLA-B*39:01H
ARNGVLITEG

SEQ ID NO: 5166 - protein, 10 aa, Severe acute respiratory syndrome coronavirus 2
  REGION 1..10: note = Table A: HLA-A*03:01H HLA-A*03:02H HLA-A*11:01H
GVLITEGSVK

SEQ ID NO: 5167 - protein, 10 aa, Severe acute respiratory syndrome coronavirus 2
  REGION 1..10: note = Table A: HLA-C*08:03H
GSVKGLQPSV

SEQ ID NO: 5168 - protein, 10 aa, Severe acute respiratory syndrome coronavirus 2
  REGION 1..10: note = Table A: HLA-A*03:01H HLA-A*03:02H HLA-A*34:02H
KGLQPSVGPK

SEQ ID NO: 5169 - protein, 10 aa, Severe acute respiratory syndrome coronavirus 2
  REGION 1..10: note = Table A: HLA-A*02:03H
LQPSVGPKQA

SEQ ID NO: 5170 - protein, 10 aa, Severe acute respiratory syndrome coronavirus 2
  REGION 1..10: note = Table A: HLA-C*08:03H
PSVGPKQASL

SEQ ID NO: 5171 - protein, 10 aa, Severe acute respiratory syndrome coronavirus 2
  REGION 1..10: note = Table A: HLA-B*48:01M HLA-A*02:08M HLA-A*02:02H HLA-B*40:02H HLA-B*15:01H HLA-B*57:03H HLA-B*13:01H HLA-B*13:02H
KQASLNGVTL

SEQ ID NO: 5172 - protein, 10 aa, Severe acute respiratory syndrome coronavirus 2
  REGION 1..10: note = Table A: HLA-A*36:01H HLA-B*27:02H HLA-A*68:02H
GVTLIGEAVK

SEQ ID NO: 5173 - protein, 10 aa, Severe acute respiratory syndrome coronavirus 2
  REGION 1..10: note = Table A: HLA-B*44:03H
GEAVKTQFNY

SEQ ID NO: 5174 - protein, 10 aa, Severe acute respiratory syndrome coronavirus 2
  REGION 1..10: note = Table A: HLA-A*36:01H HLA-A*26:01H HLA-A*26:02H HLA-A*26:03H HLA-B*53:01H HLA-A*68:02H HLA-A*34:01H HLA-A*34:02M HLA-B*35:01M HLA-B*35:07H HLA-B*38:02H HLA-A*66:01H
EAVKTQFNYY

SEQ ID NO: 5175 - protein, 10 aa, Severe acute respiratory syndrome coronavirus 2
  REGION 1..10: note = Table A: HLA-A*74:01H HLA-A*03:01H HLA-A*11:01H HLA-A*11:02H HLA-A*30:01M HLA-A*30:02H HLA-A*34:02H
AVKTQFNYYK

SEQ ID NO: 5176 - protein, 10 aa, Severe acute respiratory syndrome coronavirus 2
  REGION 1..10: note = Table A: HLA-B*48:01M HLA-B*38:02H HLA-B*15:03H
KKVDGVVQQL

SEQ ID NO: 5177 - protein, 10 aa, Severe acute respiratory syndrome coronavirus 2
  REGION 1..10: note = Table A: HLA-A*29:01H HLA-B*27:02H HLA-A*30:02H HLA-B*35:01H HLA-B*15:01H HLA-B*07:05H
GVVQQLPETY

SEQ ID NO: 5178 - protein, 10 aa, Severe acute respiratory syndrome coronavirus 2
  REGION 1..10: note = Table A: HLA-A*26:03H HLA-A*68:02M HLA-A*34:01M HLA-A*34:02M HLA-A*66:01M
ETYFTQSRNL

SEQ ID NO: 5179 - protein, 10 aa, Severe acute respiratory syndrome coronavirus 2
  REGION 1..10: note = Table A: HLA-C*16:01H HLA-A*25:01H HLA-A*33:03H HLA-B*46:01H HLA-A*26:03H HLA-C*03:02H HLA-B*57:03H HLA-C*02:02H
FTQSRNLQEF

SEQ ID NO: 5180 - protein, 10 aa, Severe acute respiratory syndrome coronavirus 2
  REGION 1..10: note = Table A: HLA-B*07:04H
KPRSQMEIDF

SEQ ID NO: 5181 - protein, 10 aa, Severe acute respiratory syndrome coronavirus 2
  REGION 1..10: note = Table A: HLA-A*02:11H HLA-A*02:04H HLA-A*02:05H HLA-A*02:06M HLA-A*02:01H HLA-C*08:01H HLA-B*38:01H HLA-B*38:02H HLA-B*13:01H HLA-B*13:02H
SQMEIDFLEL

SEQ ID NO: 5182 - protein, 10 aa, Severe acute respiratory syndrome coronavirus 2
  REGION 1..10: note = Table A: HLA-B*18:01H
MEIDFLELAM

SEQ ID NO: 5183 - protein, 10 aa, Severe acute respiratory syndrome coronavirus 2
  REGION 1..10: note = Table A: HLA-A*26:03H HLA-A*34:01H
ELAMDEFIER

SEQ ID NO: 5184 - protein, 10 aa, Severe acute respiratory syndrome coronavirus 2
  REGION 1..10: note = Table A: HLA-A*36:01H HLA-B*53:01H HLA-C*03:02H HLA-B*35:01H HLA-B*35:08H HLA-B*35:07H
LAMDEFIERY

SEQ ID NO: 5185 - protein, 10 aa, Severe acute respiratory syndrome coronavirus 2
  REGION 1..10: note = Table A: HLA-B*27:05H HLA-B*38:02H
ERYKLEGYAF

SEQ ID NO: 5186 - protein, 10 aa, Severe acute respiratory syndrome coronavirus 2
  REGION 1..10: note = Table A: HLA-B*13:01H
KLEGYAFEHI

SEQ ID NO: 5187 - protein, 10 aa, Severe acute respiratory syndrome coronavirus 2
  REGION 1..10: note = Table A: HLA-B*15:02H
EGYAFEHIVY

SEQ ID NO: 5188 - protein, 10 aa, Severe acute respiratory syndrome coronavirus 2
  REGION 1..10: note = Table A: HLA-A*29:02H HLA-C*04:03H
AFEHIVYGDF

SEQ ID NO: 5189 - protein, 10 aa, Severe acute respiratory syndrome coronavirus 2
  REGION 1..10: note = Table A: HLA-B*39:01H
EHIVYGDFSH

SEQ ID NO: 5190 - protein, 10 aa, Severe acute respiratory syndrome coronavirus 2
  REGION 1..10: note = Table A: HLA-C*14:02M HLA-C*14:03M HLA-C*07:02H HLA-A*24:02M HLA-A*24:07H HLA-A*23:01H
VYGDFSHSQL

SEQ ID NO: 5191 - protein, 10 aa, Severe acute respiratory syndrome coronavirus 2
  REGION 1..10: note = Table A: HLA-B*38:01M HLA-B*38:02H HLA-B*39:01H HLA-B*15:10M
SHSQLGGLHL

SEQ ID NO: 5192 - protein, 10 aa, Severe acute respiratory syndrome coronavirus 2
  REGION 1..10: note = Table A: HLA-B*58:02H
HSQLGGLHLL

SEQ ID NO: 5193 - protein, 10 aa, Severe acute respiratory syndrome coronavirus 2
  REGION 1..10: note = Table A: HLA-B*38:02H HLA-B*13:02M
SQLGGLHLLI

SEQ ID NO: 5194 - protein, 10 aa, Severe acute respiratory syndrome coronavirus 2
  REGION 1..10: note = Table A: HLA-A*03:01H
GLHLLIGLAK

SEQ ID NO: 5195 - protein, 10 aa, Severe acute respiratory syndrome coronavirus 2
  REGION 1..10: note = Table A: HLA-B*27:05H HLA-C*07:01H
KRFKESPFEL

SEQ ID NO: 5196 - protein, 10 aa, Severe acute respiratory syndrome coronavirus 2
  REGION 1..10: note = Table A: HLA-B*44:05H HLA-B*44:03H
KESPFELEDF

SEQ ID NO: 5197 - protein, 10 aa, Severe acute respiratory syndrome coronavirus 2
  REGION 1..10: note = Table A: HLA-B*53:01M HLA-C*15:05H HLA-B*35:01M HLA-B*35:08H HLA-B*35:07M HLA-B*38:02H HLA-B*07:04H HLA-B*07:05H HLA-B*15:11M
IPMDSTVKNY

SEQ ID NO: 5198 - protein, 10 aa, Severe acute respiratory syndrome coronavirus 2
  REGION 1..10: note = Table A: HLA-B*55:01H HLA-A*02:03H
TVKNYFITDA

SEQ ID NO: 5199 - protein, 10 aa, Severe acute respiratory syndrome coronavirus 2
  REGION 1..10: note = Table A: HLA-B*27:02H
YFITDAQTGS

SEQ ID NO: 5200 - protein, 10 aa, Severe acute respiratory syndrome coronavirus 2
  REGION 1..10: note = Table A: HLA-A*03:01M HLA-A*03:02M HLA-A*11:01H HLA-A*36:01M HLA-A*34:02H
ITDAQTGSSK

SEQ ID NO: 5201 - protein, 10 aa, Severe acute respiratory syndrome coronavirus 2
  REGION 1..10: note = Table A: HLA-A*26:01H HLA-A*26:02M HLA-B*35:01H
SVIDLLLDDF

SEQ ID NO: 5202 - protein, 10 aa, Severe acute respiratory syndrome coronavirus 2
  REGION 1..10: note = Table A: HLA-A*36:01H
LLDDFVEIIK

SEQ ID NO: 5203 - protein, 10 aa, Severe acute respiratory syndrome coronavirus 2
  REGION 1..10: note = Table A: HLA-A*68:02H
FVEIIKSQDL

SEQ ID NO: 5204 - protein, 10 aa, Severe acute respiratory syndrome coronavirus 2
  REGION 1..10: note = Table A: HLA-A*68:02H
EIIKSQDLSV

SEQ ID NO: 5205 - protein, 10 aa, Severe acute respiratory syndrome coronavirus 2
  REGION 1..10: note = Table A: HLA-A*02:03H
IIKSQDLSVV

SEQ ID NO: 5206 - protein, 10 aa, Severe acute respiratory syndrome coronavirus 2
  REGION 1..10: note = Table A: HLA-A*11:303M HLA-A*74:01H HLA-A*03:01M HLA-A*03:02H HLA-A*11:01H HLA-A*11:02H HLA-A*36:01H HLA-A*30:01H HLA-A*30:02H HLA-A*68:01H HLA-C*07:27M HLA-A*31:01H HLA-B*57:03H
KSQDLSVVSK

SEQ ID NO: 5207 - protein, 10 aa, Severe acute respiratory syndrome coronavirus 2
  REGION 1..10: note = Table A: HLA-B*38:02H
SQDLSVVSKV

SEQ ID NO: 5208 - protein, 10 aa, Severe acute respiratory syndrome coronavirus 2
  REGION 1..10: note = Table A: HLA-A*68:01H HLA-A*34:02H
DLSVVSKVVK

SEQ ID NO: 5209 - protein, 10 aa, Severe acute respiratory syndrome coronavirus 2
  REGION 1..10: note = Table A: HLA-A*68:02H HLA-B*57:03M HLA-B*13:02H
VVSKVVKVTI

SEQ ID NO: 5210 - protein, 10 aa, Severe acute respiratory syndrome coronavirus 2
  REGION 1..10: note = Table A: HLA-B*15:03H
SKVVKVTIDY

SEQ ID NO: 5211 - protein, 10 aa, Severe acute respiratory syndrome coronavirus 2
  REGION 1..10: note = Table A: HLA-A*02:08M
KVVKVTIDYT

SEQ ID NO: 5212 - protein, 10 aa, Severe acute respiratory syndrome coronavirus 2
  REGION 1..10: note = Table A: HLA-B*57:01H HLA-B*46:01H HLA-B*57:03M
VTIDYTEISF

SEQ ID NO: 5213 - protein, 10 aa, Severe acute respiratory syndrome coronavirus 2
  REGION 1..10: note = Table A: HLA-C*04:03H
TIDYTEISFM

SEQ ID NO: 5214 - protein, 10 aa, Severe acute respiratory syndrome coronavirus 2
  REGION 1..10: note = Table A: HLA-A*24:02H HLA-A*24:07M HLA-A*23:01H
DYTEISFMLW

SEQ ID NO: 5215 - protein, 10 aa, Severe acute respiratory syndrome coronavirus 2
  REGION 1..10: note = Table A: HLA-A*25:01H HLA-B*46:01H HLA-C*12:02H
WCKDGHVETF

SEQ ID NO: 5216 - protein, 10 aa, Severe acute respiratory syndrome coronavirus 2
  REGION 1..10: note = Table A: HLA-B*38:01H HLA-B*38:02M HLA-B*15:10H
GHVETFYPKL

SEQ ID NO: 5217 - protein, 10 aa, Severe acute respiratory syndrome coronavirus 2
  REGION 1..10: note = Table A: HLA-A*26:03H HLA-A*68:02H HLA-A*34:02H
ETFYPKLQSS

SEQ ID NO: 5218 - protein, 10 aa, Severe acute respiratory syndrome coronavirus 2
  REGION 1..10: note = Table A: HLA-B*53:01M HLA-B*35:07H HLA-B*07:04H
YPKLQSSQAW

SEQ ID NO: 5219 - protein, 10 aa, Severe acute respiratory syndrome coronavirus 2
  REGION 1..10: note = Table A: HLA-B*38:02H HLA-B*15:01M HLA-B*15:02H HLA-B*39:01H
SQAWQPGVAM

SEQ ID NO: 5220 - protein, 10 aa, Severe acute respiratory syndrome coronavirus 2
  REGION 1..10: note = Table A: HLA-B*35:01H
QPGVAMPNLY

SEQ ID NO: 5221 - protein, 10 aa, Severe acute respiratory syndrome coronavirus 2
  REGION 1..10: note = Table A: HLA-A*74:01H
AMPNLYKMQR

SEQ ID NO: 5222 - protein, 10 aa, Severe acute respiratory syndrome coronavirus 2
  REGION 1..10: note = Table A: HLA-A*02:11M HLA-A*68:02H HLA-A*02:05H HLA-A*02:06H HLA-A*02:07M HLA-A*02:01H HLA-A*02:02M HLA-A*02:03H HLA-B*13:02H
TLPKGIMMNV

SEQ ID NO: 5223 - protein, 10 aa, Severe acute respiratory syndrome coronavirus 2
  REGION 1..10: note = Table A: HLA-B*56:01M HLA-B*55:02M HLA-B*55:01M HLA-B*54:01H
LPKGIMMNVA

SEQ ID NO: 5224 - protein, 10 aa, Severe acute respiratory syndrome coronavirus 2
  REGION 1..10: note = Table A: HLA-A*30:02H
KGIMMNVAKY

SEQ ID NO: 5225 - protein, 10 aa, Severe acute respiratory syndrome coronavirus 2
  REGION 1..10: note = Table A: HLA-B*08:01H HLA-A*02:02H
MMNVAKYTQL

SEQ ID NO: 5226 - protein, 10 aa, Severe acute respiratory syndrome coronavirus 2
  REGION 1..10: note = Table A: HLA-B*38:02H
TQLCQYLNTL

SEQ ID NO: 5227 - protein, 10 aa, Severe acute respiratory syndrome coronavirus 2
  REGION 1..10: note = Table A: HLA-B*42:01H HLA-B*08:01M HLA-B*53:01H HLA-C*15:05H HLA-B*14:02H HLA-B*51:01H HLA-B*35:07H HLA-B*07:02H HLA-B*07:04M
VPYNMRVIHF

SEQ ID NO: 5228 - protein, 10 aa, Severe acute respiratory syndrome coronavirus 2
  REGION 1..10: note = Table A: HLA-A*03:01H HLA-A*03:02H HLA-A*36:01H HLA-A*30:02H
VIHFGAGSDK

SEQ ID NO: 5229 - protein, 10 aa, Severe acute respiratory syndrome coronavirus 2
  REGION 1..10: note = Table A: HLA-B*38:02H
IHFGAGSDKG

SEQ ID NO: 5230 - protein, 10 aa, Severe acute respiratory syndrome coronavirus 2
  REGION 1..10: note = Table A: HLA-C*08:03H
KGVAPGTAVL

SEQ ID NO: 5231 - protein, 10 aa, Severe acute respiratory syndrome coronavirus 2
  REGION 1..10: note = Table A: HLA-A*11:303H HLA-A*74:01M HLA-A*03:01H HLA-A*03:02M HLA-A*11:01M HLA-A*11:02M HLA-A*26:03M HLA-B*27:02H HLA-A*68:01H HLA-A*68:02H HLA-A*02:05H HLA-A*02:08H HLA-A*34:01M HLA-A*34:02M HLA-C*07:27H
  REGION 1..10: note = CONT. FROM ABOVE: HLA-A*31:01H HLA-A*66:01M
GVAPGTAVLR

SEQ ID NO: 5232 - protein, 10 aa, Severe acute respiratory syndrome coronavirus 2
  REGION 1..10: note = Table A: HLA-B*07:04H
APGTAVLRQW

SEQ ID NO: 5233 - protein, 10 aa, Severe acute respiratory syndrome coronavirus 2
  REGION 1..10: note = Table A: HLA-B*48:01H HLA-A*74:01H HLA-A*02:11H HLA-B*15:03H HLA-B*13:01M HLA-B*13:02H
RQWLPTGTLL

SEQ ID NO: 5234 - protein, 10 aa, Severe acute respiratory syndrome coronavirus 2
  REGION 1..10: note = Table A: HLA-A*68:02H HLA-A*02:05H HLA-B*38:02H
FVSDADSTLI

SEQ ID NO: 5235 - protein, 10 aa, Severe acute respiratory syndrome coronavirus 2
  REGION 1..10: note = Table A: HLA-A*34:02H
DCATVHTANK

SEQ ID NO: 5236 - protein, 10 aa, Severe acute respiratory syndrome coronavirus 2
  REGION 1..10: note = Table A: HLA-B*38:02H
VHTANKWDLI

SEQ ID NO: 5237 - protein, 10 aa, Severe acute respiratory syndrome coronavirus 2
  REGION 1..10: note = Table A: HLA-A*36:01M
KWDLIISDMY

SEQ ID NO: 5238 - protein, 10 aa, Severe acute respiratory syndrome coronavirus 2
  REGION 1..10: note = Table A: HLA-A*36:01H HLA-B*27:02H
LIISDMYDPK

SEQ ID NO: 5239 - protein, 10 aa, Severe acute respiratory syndrome coronavirus 2
  REGION 1..10: note = Table A: HLA-A*36:01H
ISDMYDPKTK

SEQ ID NO: 5240 - protein, 10 aa, Severe acute respiratory syndrome coronavirus 2
  REGION 1..10: note = Table A: HLA-A*02:11M HLA-A*68:02H HLA-A*02:02H HLA-A*02:03H HLA-B*38:02H
DMYDPKTKNV

SEQ ID NO: 5241 - protein, 10 aa, Severe acute respiratory syndrome coronavirus 2
  REGION 1..10: note = Table A: HLA-A*68:02H
DSKEGFFTYI

SEQ ID NO: 5242 - protein, 10 aa, Severe acute respiratory syndrome coronavirus 2
  REGION 1..10: note = Table A: HLA-A*68:02H HLA-A*02:02H
YICGFIQQKL

SEQ ID NO: 5243 - protein, 10 aa, Severe acute respiratory syndrome coronavirus 2
  REGION 1..10: note = Table A: HLA-B*13:02H
KLALGGSVAI

SEQ ID NO: 5244 - protein, 10 aa, Severe acute respiratory syndrome coronavirus 2
  REGION 1..10: note = Table A: HLA-A*34:02H
LALGGSVAIK

SEQ ID NO: 5245 - protein, 10 aa, Severe acute respiratory syndrome coronavirus 2
  REGION 1..10: note = Table A: HLA-B*13:02H
ALGGSVAIKI

SEQ ID NO: 5246 - protein, 10 aa, Severe acute respiratory syndrome coronavirus 2
  REGION 1..10: note = Table A: HLA-B*58:01H HLA-B*58:02H HLA-B*57:01H HLA-A*25:01H HLA-B*44:03H HLA-B*53:01M HLA-A*23:01H HLA-B*57:03H HLA-B*13:01H
VAIKITEHSW

SEQ ID NO: 5247 - protein, 10 aa, Severe acute respiratory syndrome coronavirus 2
  REGION 1..10: note = Table A: HLA-B*44:03H HLA-B*18:01H
TEHSWNADLY

SEQ ID NO: 5248 - protein, 10 aa, Severe acute respiratory syndrome coronavirus 2
  REGION 1..10: note = Table A: HLA-B*58:02H HLA-A*68:02H HLA-B*57:03H
HSWNADLYKL

SEQ ID NO: 5249 - protein, 10 aa, Severe acute respiratory syndrome coronavirus 2
  REGION 1..10: note = Table A: HLA-A*68:02H HLA-A*02:08H
WTAFVTNVNA

SEQ ID NO: 5250 - protein, 10 aa, Severe acute respiratory syndrome coronavirus 2
  REGION 1..10: note = Table A: HLA-B*35:01H HLA-B*15:02H
NVNASSSEAF

SEQ ID NO: 5251 - protein, 10 aa, Severe acute respiratory syndrome coronavirus 2
  REGION 1..10: note = Table A: HLA-A*68:02H
SSSEAFLIGC

SEQ ID NO: 5252 - protein, 10 aa, Severe acute respiratory syndrome coronavirus 2
  REGION 1..10: note = Table A: HLA-B*44:02M HLA-B*44:05H HLA-C*16:04H HLA-B*44:03H HLA-B*18:01M HLA-B*07:05M
SEAFLIGCNY

SEQ ID NO: 5253 - protein, 10 aa, Severe acute respiratory syndrome coronavirus 2
  REGION 1..10: note = Table A: HLA-A*68:01H HLA-A*68:02M HLA-A*34:01H HLA-A*66:01H
EAFLIGCNYL

SEQ ID NO: 5254 - protein, 10 aa, Severe acute respiratory syndrome coronavirus 2
  REGION 1..10: note = Table A: HLA-B*15:03M
GKPREQIDGY

SEQ ID NO: 5255 - protein, 10 aa, Severe acute respiratory syndrome coronavirus 2
  REGION 1..10: note = Table A: HLA-A*26:03H HLA-A*68:02H HLA-A*02:05H HLA-A*02:06H HLA-A*02:08H HLA-B*38:02H
EQIDGYVMHA

SEQ ID NO: 5256 - protein, 10 aa, Severe acute respiratory syndrome coronavirus 2
  REGION 1..10: note = Table A: HLA-B*51:01M
DGYVMHANYI

SEQ ID NO: 5257 - protein, 10 aa, Severe acute respiratory syndrome coronavirus 2
  REGION 1..10: note = Table A: HLA-A*25:01H
YVMHANYIFW

SEQ ID NO: 5258 - protein, 10 aa, Severe acute respiratory syndrome coronavirus 2
  REGION 1..10: note = Table A: HLA-A*74:01H
VMHANYIFWR

SEQ ID NO: 5259 - protein, 10 aa, Severe acute respiratory syndrome coronavirus 2
  REGION 1..10: note = Table A: HLA-C*14:03H
FWRNTNPIQL

SEQ ID NO: 5260 - protein, 10 aa, Severe acute respiratory syndrome coronavirus 2
  REGION 1..10: note = Table A: HLA-A*25:01H HLA-B*46:01H HLA-A*26:01H HLA-A*29:02H HLA-A*30:02M HLA-A*34:02H HLA-B*35:01H HLA-B*38:02H HLA-B*15:01H HLA-B*07:05H
NTNPIQLSSY

SEQ ID NO: 5261 - protein, 10 aa, Severe acute respiratory syndrome coronavirus 2
  REGION 1..10: note = Table A: HLA-B*35:03M HLA-C*15:05M HLA-B*35:01H HLA-B*07:05M
NPIQLSSYSL

SEQ ID NO: 5262 - protein, 10 aa, Severe acute respiratory syndrome coronavirus 2
  REGION 1..10: note = Table A: HLA-A*03:02H HLA-A*11:01M HLA-A*11:02M HLA-A*34:02H HLA-C*07:27H
SSYSLFDMSK

SEQ ID NO: 5263 - protein, 10 aa, Severe acute respiratory syndrome coronavirus 2
  REGION 1..10: note = Table A: HLA-A*24:02H HLA-A*24:07H
SYSLFDMSKF

SEQ ID NO: 5264 - protein, 10 aa, Severe acute respiratory syndrome coronavirus 2
  REGION 1..10: note = Table A: HLA-A*74:01H HLA-A*02:11M HLA-A*68:02H HLA-A*02:04M HLA-A*02:07H HLA-A*02:01H HLA-A*02:02H HLA-A*02:03H HLA-C*08:03H
SLFDMSKFPL

SEQ ID NO: 5265 - protein, 10 aa, Severe acute respiratory syndrome coronavirus 2
  REGION 1..10: note = Table A: HLA-A*36:01H
LFDMSKFPLK

SEQ ID NO: 5266 - protein, 10 aa, Severe acute respiratory syndrome coronavirus 2
  REGION 1..10: note = Table A: HLA-A*33:01M HLA-A*33:03M HLA-A*26:03H HLA-A*34:01M HLA-A*34:02H HLA-A*66:01M
DMSKFPLKLR

SEQ ID NO: 5267 - protein, 10 aa, Severe acute respiratory syndrome coronavirus 2
  REGION 1..10: note = Table A: HLA-B*55:02H HLA-C*15:05H HLA-B*54:01H HLA-B*07:04H
FPLKLRGTAV

SEQ ID NO: 5268 - protein, 10 aa, Severe acute respiratory syndrome coronavirus 2
  REGION 1..10: note = Table A: HLA-B*07:04H
KLRGTAVMSL

SEQ ID NO: 5269 - protein, 10 aa, Severe acute respiratory syndrome coronavirus 2
  REGION 1..10: note = Table A: HLA-A*26:02H HLA-A*02:02M HLA-A*02:03M HLA-B*38:02M HLA-B*15:02H
SLKEGQINDM

SEQ ID NO: 5270 - protein, 10 aa, Severe acute respiratory syndrome coronavirus 2
  REGION 1..10: note = Table A: HLA-B*44:05H HLA-B*40:01M HLA-B*40:02M HLA-B*40:06H HLA-B*41:02H
KEGQINDMIL

SEQ ID NO: 5271 - protein, 10 aa, Severe acute respiratory syndrome coronavirus 2
  REGION 1..10: note = Table A: HLA-B*48:01H HLA-A*02:04H HLA-A*02:05H HLA-A*02:06H HLA-B*15:01H HLA-B*13:01H HLA-B*13:02M
GQINDMILSL

SEQ ID NO: 5272 - protein, 10 aa, Severe acute respiratory syndrome coronavirus 2
  REGION 1..10: note = Table A: HLA-A*02:04H
QINDMILSLL

SEQ ID NO: 5273 - protein, 10 aa, Severe acute respiratory syndrome coronavirus 2
  REGION 1..10: note = Table A: HLA-B*07:04H
IIRENNRVVI

SEQ ID NO: 5274 - protein, 10 aa, Severe acute respiratory syndrome coronavirus 2
  REGION 1..10: note = Table A: HLA-B*14:02H HLA-B*38:02H HLA-B*39:01M
NRVVISSDVL

SEQ ID NO: 5275 - protein, 11 aa, Severe acute respiratory syndrome coronavirus 2
  REGION 1..11: note = Table A: HLA-A*02:11H HLA-A*68:02H HLA-A*02:07H
LVPGFNEKTHV

SEQ ID NO: 5276 - protein, 11 aa, Severe acute respiratory syndrome coronavirus 2
  REGION 1..11: note = Table A: HLA-B*57:03M
KTHVQLSLPVL

SEQ ID NO: 5277 - protein, 11 aa, Severe acute respiratory syndrome coronavirus 2
  REGION 1..11: note = Table A: HLA-B*13:01H
RGFGDSVEEVL

SEQ ID NO: 5278 - protein, 11 aa, Severe acute respiratory syndrome coronavirus 2
  REGION 1..11: note = Table A: HLA-B*27:02H HLA-A*68:01H
DSVEEVLSEAR

SEQ ID NO: 5279 - protein, 11 aa, Severe acute respiratory syndrome coronavirus 2
  REGION 1..11: note = Table A: HLA-B*44:05H HLA-B*44:03H
EEVLSEARQHL

SEQ ID NO: 5280 - protein, 11 aa, Severe acute respiratory syndrome coronavirus 2
  REGION 1..11: note = Table A: HLA-A*33:03H HLA-A*34:02M
EVLSEARQHLK

SEQ ID NO: 5281 - protein, 11 aa, Severe acute respiratory syndrome coronavirus 2
  REGION 1..11: note = Table A: HLA-B*44:05H HLA-B*40:01H HLA-B*40:02M HLA-B*40:06H HLA-B*41:02H
VEVEKGVLPQL

SEQ ID NO: 5282 - protein, 11 aa, Severe acute respiratory syndrome coronavirus 2
  REGION 1..11: note = Table A: HLA-A*02:04H HLA-A*02:06H
GVLPQLEQPYV

SEQ ID NO: 5283 - protein, 11 aa, Severe acute respiratory syndrome coronavirus 2
  REGION 1..11: note = Table A: HLA-A*24:07M
VLPQLEQPYVF

SEQ ID NO: 5284 - protein, 11 aa, Severe acute respiratory syndrome coronavirus 2
  REGION 1..11: note = Table A: HLA-A*74:01H
QLEQPYVFIKR

SEQ ID NO: 5285 - protein, 11 aa, Severe acute respiratory syndrome coronavirus 2
  REGION 1..11: note = Table A: HLA-B*56:01H HLA-B*55:02H HLA-B*55:01H HLA-B*54:01H
QPYVFIKRSDA

SEQ ID NO: 5286 - protein, 11 aa, Severe acute respiratory syndrome coronavirus 2
  REGION 1..11: note = Table A: HLA-C*04:03H HLA-C*08:01H
TAPHGHVMVEL

SEQ ID NO: 5287 - protein, 11 aa, Severe acute respiratory syndrome coronavirus 2
  REGION 1..11: note = Table A: HLA-B*38:02H
GHVMVELVAEL

SEQ ID NO: 5288 - protein, 11 aa, Severe acute respiratory syndrome coronavirus 2
  REGION 1..11: note = Table A: HLA-A*26:01H HLA-B*35:01H HLA-B*38:02H
ELVAELEGIQY

SEQ ID NO: 5289 - protein, 11 aa, Severe acute respiratory syndrome coronavirus 2
  REGION 1..11: note = Table A: HLA-A*68:02H
LVAELEGIQYG

SEQ ID NO: 5290 - protein, 11 aa, Severe acute respiratory syndrome coronavirus 2
  REGION 1..11: note = Table A: HLA-A*02:01H HLA-A*02:02H
VLVPHVGEIPV

SEQ ID NO: 5291 - protein, 11 aa, Severe acute respiratory syndrome coronavirus 2
  REGION 1..11: note = Table A: HLA-A*02:11H HLA-A*02:05H HLA-A*02:07H HLA-A*02:08H
LVPHVGEIPVA

SEQ ID NO: 5292 - protein, 11 aa, Severe acute respiratory syndrome coronavirus 2
  REGION 1..11: note = Table A: HLA-B*56:01M HLA-B*53:01H HLA-B*55:02M HLA-C*15:05H HLA-B*35:01H HLA-B*35:08M HLA-B*35:07M HLA-B*38:02H HLA-B*54:01M HLA-B*15:02H HLA-B*07:05H HLA-B*15:11H
VPHVGEIPVAY

SEQ ID NO: 5293 - protein, 11 aa, Severe acute respiratory syndrome coronavirus 2
  REGION 1..11: note = Table A: HLA-B*40:02H
GEIPVAYRKVL

SEQ ID NO: 5294 - protein, 11 aa, Severe acute respiratory syndrome coronavirus 2
  REGION 1..11: note = Table A: HLA-A*30:02M
NGNKGAGGHSY

SEQ ID NO: 5295 - protein, 11 aa, Severe acute respiratory syndrome coronavirus 2
  REGION 1..11: note = Table A: HLA-B*38:02H
GHSYGADLKSF

SEQ ID NO: 5296 - protein, 11 aa, Severe acute respiratory syndrome coronavirus 2
  REGION 1..11: note = Table A: HLA-B*38:02H
KHSSGVTRELM

SEQ ID NO: 5297 - protein, 11 aa, Severe acute respiratory syndrome coronavirus 2
  REGION 1..11: note = Table A: HLA-A*36:01H HLA-A*25:01H HLA-A*26:01M HLA-A*26:02H HLA-A*26:03H HLA-A*30:02H HLA-B*35:01H HLA-B*38:02H HLA-B*15:02H HLA-B*39:01H
ELMRELNGGAY

SEQ ID NO: 5298 - protein, 11 aa, Severe acute respiratory syndrome coronavirus 2
  REGION 1..11: note = Table A: HLA-A*02:11H
LMRELNGGAYT

SEQ ID NO: 5299 - protein, 11 aa, Severe acute respiratory syndrome coronavirus 2
  REGION 1..11: note = Table A: HLA-B*44:02H HLA-A*36:01H HLA-B*44:03H HLA-A*30:02M
RELNGGAYTRY

SEQ ID NO: 5300 - protein, 11 aa, Severe acute respiratory syndrome coronavirus 2
  REGION 1..11: note = Table A: HLA-B*54:01H
YPLECIKDLLA

SEQ ID NO: 5301 - protein, 11 aa, Severe acute respiratory syndrome coronavirus 2
  REGION 1..11: note = Table A: HLA-A*02:11M HLA-A*02:07H
QLDFIDTKRGV

SEQ ID NO: 5302 - protein, 11 aa, Severe acute respiratory syndrome coronavirus 2
  REGION 1..11: note = Table A: HLA-B*40:06H
REHEHEIAWYT

SEQ ID NO: 5303 - protein, 11 aa, Severe acute respiratory syndrome coronavirus 2
  REGION 1..11: note = Table A: HLA-A*34:02H
EIAWYTERSEK

SEQ ID NO: 5304 - protein, 11 aa, Severe acute respiratory syndrome coronavirus 2
  REGION 1..11: note = Table A: HLA-A*30:02H
AWYTERSEKSY

SEQ ID NO: 5305 - protein, 11 aa, Severe acute respiratory syndrome coronavirus 2
  REGION 1..11: note = Table A: HLA-B*58:02M HLA-A*02:11H HLA-C*15:02H HLA-B*57:03M HLA-B*13:02H
KSYELQTPFEI

SEQ ID NO: 5306 - protein, 11 aa, Severe acute respiratory syndrome coronavirus 2
  REGION 1..11: note = Table A: HLA-B*40:01H HLA-B*40:02H
YELQTPFEIKL

SEQ ID NO: 5307 - protein, 11 aa, Severe acute respiratory syndrome coronavirus 2
  REGION 1..11: note = Table A: HLA-A*34:02H
QTPFEIKLAKK

SEQ ID NO: 5308 - protein, 11 aa, Severe acute respiratory syndrome coronavirus 2
  REGION 1..11: note = Table A: HLA-B*07:04H
TPFEIKLAKKF

SEQ ID NO: 5309 - protein, 11 aa, Severe acute respiratory syndrome coronavirus 2
  REGION 1..11: note = Table A: HLA-A*68:02H
DTFNGECPNFV

SEQ ID NO: 5310 - protein, 11 aa, Severe acute respiratory syndrome coronavirus 2
  REGION 1..11: note = Table A: HLA-A*02:11H HLA-A*02:05H
FVFPLNSIIKT

SEQ ID NO: 5311 - protein, 11 aa, Severe acute respiratory syndrome coronavirus 2
  REGION 1..11: note = Table A: HLA-A*24:07M HLA-A*23:01H
VFPLNSIIKTI

SEQ ID NO: 5312 - protein, 11 aa, Severe acute respiratory syndrome coronavirus 2
  REGION 1..11: note = Table A: HLA-A*30:01H
IIKTIQPRVEK

SEQ ID NO: 5313 - protein, 11 aa, Severe acute respiratory syndrome coronavirus 2
  REGION 1..11: note = Table A: HLA-A*02:11H HLA-A*02:08H HLA-A*02:03H
SVYPVASPNEC

SEQ ID NO: 5314 - protein, 11 aa, Severe acute respiratory syndrome coronavirus 2
  REGION 1..11: note = Table A: HLA-B*49:01H
GETSWQTGDFV

SEQ ID NO: 5315 - protein, 11 aa, Severe acute respiratory syndrome coronavirus 2
  REGION 1..11: note = Table A: HLA-A*36:01H HLA-A*68:01H HLA-A*68:02H HLA-A*34:02M
ETSWQTGDFVK

SEQ ID NO: 5316 - protein, 11 aa, Severe acute respiratory syndrome coronavirus 2
  REGION 1..11: note = Table A: HLA-A*26:01H
LTKEGATTCGY

SEQ ID NO: 5317 - protein, 11 aa, Severe acute respiratory syndrome coronavirus 2
  REGION 1..11: note = Table A: HLA-A*24:02M HLA-A*24:07M HLA-A*23:01M
GYLPQNAVVKI

SEQ ID NO: 5318 - protein, 11 aa, Severe acute respiratory syndrome coronavirus 2
  REGION 1..11: note = Table A: HLA-B*15:02H
YLPQNAVVKIY

SEQ ID NO: 5319 - protein, 11 aa, Severe acute respiratory syndrome coronavirus 2
  REGION 1..11: note = Table A: HLA-B*55:02H
LPQNAVVKIYC

SEQ ID NO: 5320 - protein, 11 aa, Severe acute respiratory syndrome coronavirus 2
  REGION 1..11: note = Table A: HLA-A*68:02H HLA-B*35:03H HLA-B*35:02H HLA-C*08:03H HLA-B*35:12H HLA-B*38:01H HLA-B*38:02H
HNSEVGPEHSL

SEQ ID NO: 5321 - protein, 11 aa, Severe acute respiratory syndrome coronavirus 2
  REGION 1..11: note = Table A: HLA-A*25:01H HLA-A*26:01H HLA-A*26:02H HLA-A*26:03H HLA-A*30:02H HLA-A*34:01M HLA-A*34:02H HLA-B*35:01H HLA-B*38:02H
EVGPEHSLAEY

SEQ ID NO: 5322 - protein, 11 aa, Severe acute respiratory syndrome coronavirus 2
  REGION 1..11: note = Table A: HLA-A*02:02M
SLAEYHNESGL

SEQ ID NO: 5323 - protein, 11 aa, Severe acute respiratory syndrome coronavirus 2
  REGION 1..11: note = Table A: HLA-A*36:01H
LAEYHNESGLK

SEQ ID NO: 5324 - protein, 11 aa, Severe acute respiratory syndrome coronavirus 2
  REGION 1..11: note = Table A: HLA-B*45:01H HLA-B*40:02H HLA-B*49:01H
AEYHNESGLKT

SEQ ID NO: 5325 - protein, 11 aa, Severe acute respiratory syndrome coronavirus 2
  REGION 1..11: note = Table A: HLA-A*33:03H HLA-A*24:02H
EYHNESGLKTI

SEQ ID NO: 5326 - protein, 11 aa, Severe acute respiratory syndrome coronavirus 2
  REGION 1..11: note = Table A: HLA-B*38:01M HLA-B*38:02H HLA-B*39:01M HLA-B*15:10H
YHNESGLKTIL

SEQ ID NO: 5327 - protein, 11 aa, Severe acute respiratory syndrome coronavirus 2
  REGION 1..11: note = Table A: HLA-A*33:01H HLA-A*33:03H HLA-A*68:01H
HNESGLKTILR

SEQ ID NO: 5328 - protein, 11 aa, Severe acute respiratory syndrome coronavirus 2
  REGION 1..11: note = Table A: HLA-B*58:02M
KTILRKGGRTI

SEQ ID NO: 5329 - protein, 11 aa, Severe acute respiratory syndrome coronavirus 2
  REGION 1..11: note = Table A: HLA-B*39:01H
NHTGVVGEGSE

SEQ ID NO: 5330 - protein, 11 aa, Severe acute respiratory syndrome coronavirus 2
  REGION 1..11: note = Table A: HLA-B*40:01H
GEGSEGLNDNL

SEQ ID NO: 5331 - protein, 11 aa, Severe acute respiratory syndrome coronavirus 2
  REGION 1..11: note = Table A: HLA-A*02:11H
NLLEILQKEKV

SEQ ID NO: 5332 - protein, 11 aa, Severe acute respiratory syndrome coronavirus 2
  REGION 1..11: note = Table A: HLA-A*02:11H
ILQKEKVNINI

SEQ ID NO: 5333 - protein, 11 aa, Severe acute respiratory syndrome coronavirus 2
  REGION 1..11: note = Table A: HLA-A*03:02M HLA-A*11:02H HLA-A*36:01H HLA-A*30:02H
KVNINIVGDFK

SEQ ID NO: 5334 - protein, 11 aa, Severe acute respiratory syndrome coronavirus 2
  REGION 1..11: note = Table A: HLA-A*02:11H HLA-A*02:02H
IVGDFKLNEEI

SEQ ID NO: 5335 - protein, 11 aa, Severe acute respiratory syndrome coronavirus 2
  REGION 1..11: note = Table A: HLA-A*02:11H HLA-A*02:04H HLA-A*02:02M
KLNEEIAIILA

SEQ ID NO: 5336 - protein, 11 aa, Severe acute respiratory syndrome coronavirus 2
  REGION 1..11: note = Table A: HLA-B*44:05H
NEEIAIILASF

SEQ ID NO: 5337 - protein, 11 aa, Severe acute respiratory syndrome coronavirus 2
  REGION 1..11: note = Table A: HLA-A*02:02H HLA-A*02:03H
ILASFSASTSA

SEQ ID NO: 5338 - protein, 11 aa, Severe acute respiratory syndrome coronavirus 2
  REGION 1..11: note = Table A: HLA-A*68:02H
FSASTSAFVET

SEQ ID NO: 5339 - protein, 11 aa, Severe acute respiratory syndrome coronavirus 2
  REGION 1..11: note = Table A: HLA-A*68:02H
SASTSAFVETV

SEQ ID NO: 5340 - protein, 11 aa, Severe acute respiratory syndrome coronavirus 2
  REGION 1..11: note = Table A: HLA-A*11:01M HLA-A*11:02H HLA-A*36:01H
ASTSAFVETVK

SEQ ID NO: 5341 - protein, 11 aa, Severe acute respiratory syndrome coronavirus 2
  REGION 1..11: note = Table A: HLA-A*68:02H
TSAFVETVKGL

SEQ ID NO: 5342 - protein, 11 aa, Severe acute respiratory syndrome coronavirus 2
  REGION 1..11: note = Table A: HLA-C*14:02H HLA-C*14:03M HLA-A*36:01H HLA-A*29:01M HLA-A*29:02H HLA-B*44:03H HLA-B*27:02H HLA-A*30:02H
AFVETVKGLDY

SEQ ID NO: 5343 - protein, 11 aa, Severe acute respiratory syndrome coronavirus 2
  REGION 1..11: note = Table A: HLA-A*36:01H HLA-A*34:02H
FVETVKGLDYK

SEQ ID NO: 5344 - protein, 11 aa, Severe acute respiratory syndrome coronavirus 2
  REGION 1..11: note = Table A: HLA-A*25:01H HLA-A*26:01M HLA-A*26:02M HLA-A*26:03M HLA-A*34:01H HLA-A*66:01H
ETVKGLDYKAF

SEQ ID NO: 5345 - protein, 11 aa, Severe acute respiratory syndrome coronavirus 2
  REGION 1..11: note = Table A: HLA-A*74:01H HLA-A*33:03H
TVKGLDYKAFK

SEQ ID NO: 5346 - protein, 11 aa, Severe acute respiratory syndrome coronavirus 2
  REGION 1..11: note = Table A: HLA-B*44:03H
GEQKSILSPLY

SEQ ID NO: 5347 - protein, 11 aa, Severe acute respiratory syndrome coronavirus 2
  REGION 1..11: note = Table A: HLA-B*56:01H HLA-B*55:02M HLA-B*54:01H
SPLYAFASEAA

SEQ ID NO: 5348 - protein, 11 aa, Severe acute respiratory syndrome coronavirus 2
  REGION 1..11: note = Table A: HLA-C*16:01H HLA-A*02:11H HLA-C*03:04H HLA-A*68:02H HLA-C*12:03H HLA-B*54:01H
YAFASEAARVV

SEQ ID NO: 5349 - protein, 11 aa, Severe acute respiratory syndrome coronavirus 2
  REGION 1..11: note = Table A: HLA-A*74:01H HLA-A*31:01H
AFASEAARVVR

SEQ ID NO: 5350 - protein, 11 aa, Severe acute respiratory syndrome coronavirus 2
  REGION 1..11: note = Table A: HLA-A*74:01H
AARVVRSIFSR

SEQ ID NO: 5351 - protein, 11 aa, Severe acute respiratory syndrome coronavirus 2
  REGION 1..11: note = Table A: HLA-B*58:02H HLA-B*07:04H HLA-B*57:03H
RVVRSIFSRTL

SEQ ID NO: 5352 - protein, 11 aa, Severe acute respiratory syndrome coronavirus 2
  REGION 1..11: note = Table A: HLA-A*02:08H
RSIFSRTLETA

SEQ ID NO: 5353 - protein, 11 aa, Severe acute respiratory syndrome coronavirus 2
  REGION 1..11: note = Table A: HLA-A*74:01H HLA-A*03:01H HLA-A*03:02H HLA-A*11:01H HLA-A*11:02H HLA-A*36:01H HLA-A*30:02H HLA-A*31:01M HLA-B*57:03H
RTLETAQNSVR

SEQ ID NO: 5354 - protein, 11 aa, Severe acute respiratory syndrome coronavirus 2
  REGION 1..11: note = Table A: HLA-B*40:02H
LETAQNSVRVL

SEQ ID NO: 5355 - protein, 11 aa, Severe acute respiratory syndrome coronavirus 2
  REGION 1..11: note = Table A: HLA-A*68:01H HLA-A*68:02H
ETAQNSVRVLQ

SEQ ID NO: 5356 - protein, 11 aa, Severe acute respiratory syndrome coronavirus 2
  REGION 1..11: note = Table A: HLA-A*03:02H HLA-A*11:01H HLA-A*34:02H
TAQNSVRVLQK

SEQ ID NO: 5357 - protein, 11 aa, Severe acute respiratory syndrome coronavirus 2
  REGION 1..11: note = Table A: HLA-B*38:02H
QKAAITILDGI

SEQ ID NO: 5358 - protein, 11 aa, Severe acute respiratory syndrome coronavirus 2
  REGION 1..11: note = Table A: HLA-A*30:02H HLA-B*15:01H
AITILDGISQY

SEQ ID NO: 5359 - protein, 11 aa, Severe acute respiratory syndrome coronavirus 2
  REGION 1..11: note = Table A: HLA-A*02:11H HLA-A*02:04M HLA-A*02:06H HLA-A*02:01H HLA-A*02:02H HLA-C*08:01H HLA-B*38:02H
TILDGISQYSL

SEQ ID NO: 5360 - protein, 11 aa, Severe acute respiratory syndrome coronavirus 2
  REGION 1..11: note = Table A: HLA-B*57:03M
YSLRLIDAMMF

SEQ ID NO: 5361 - protein, 11 aa, Severe acute respiratory syndrome coronavirus 2
  REGION 1..11: note = Table A: HLA-A*68:02M HLA-A*02:02H
FTSDLATNNLV

SEQ ID NO: 5362 - protein, 11 aa, Severe acute respiratory syndrome coronavirus 2
  REGION 1..11: note = Table A: HLA-A*68:02H HLA-B*35:03H HLA-C*17:01H
MAYITGGVVQL

SEQ ID NO: 5363 - protein, 11 aa, Severe acute respiratory syndrome coronavirus 2
  REGION 1..11: note = Table A: HLA-B*44:03H
KEGVEFLRDGW

SEQ ID NO: 5364 - protein, 11 aa, Severe acute respiratory syndrome coronavirus 2
  REGION 1..11: note = Table A: HLA-B*45:01M HLA-B*40:02H HLA-B*41:02H HLA-B*50:01M
CEIVGGQIVTC

SEQ ID NO: 5365 - protein, 11 aa, Severe acute respiratory syndrome coronavirus 2
  REGION 1..11: note = Table A: HLA-A*68:02H
EIVGGQIVTCA

SEQ ID NO: 5366 - protein, 11 aa, Severe acute respiratory syndrome coronavirus 2
  REGION 1..11: note = Table A: HLA-B*58:01H HLA-B*44:02H HLA-B*44:05M HLA-B*44:03M HLA-A*24:07H HLA-A*23:01H HLA-B*40:01M HLA-B*40:02H HLA-B*40:06H HLA-B*57:03M HLA-B*13:01H HLA-B*49:01H
KEIKESVQTFF

SEQ ID NO: 5367 - protein, 11 aa, Severe acute respiratory syndrome coronavirus 2
  REGION 1..11: note = Table A: HLA-A*34:02H
EIKESVQTFFK

SEQ ID NO: 5368 - protein, 11 aa, Severe acute respiratory syndrome coronavirus 2
  REGION 1..11: note = Table A: HLA-A*11:303H HLA-A*74:01H HLA-A*03:02M HLA-A*11:01M HLA-A*11:02M HLA-A*30:01H HLA-A*34:02H HLA-C*07:27H HLA-A*31:01H
SVQTFFKLVNK

SEQ ID NO: 5369 - protein, 11 aa, Severe acute respiratory syndrome coronavirus 2
  REGION 1..11: note = Table A: HLA-B*08:01H
FFKLVNKFLAL

SEQ ID NO: 5370 - protein, 11 aa, Severe acute respiratory syndrome coronavirus 2
  REGION 1..11: note = Table A: HLA-B*44:05M HLA-B*40:02H
ADSIIIGGAKL

SEQ ID NO: 5371 - protein, 11 aa, Severe acute respiratory syndrome coronavirus 2
  REGION 1..11: note = Table A: HLA-A*33:01H HLA-A*68:01M HLA-A*34:02M HLA-A*66:01M
DSIIIGGAKLK

SEQ ID NO: 5372 - protein, 11 aa, Severe acute respiratory syndrome coronavirus 2
  REGION 1..11: note = Table A: HLA-B*46:01H HLA-B*08:01H HLA-C*03:03H HLA-A*02:11H HLA-C*03:04H HLA-A*02:04H HLA-A*02:05H HLA-A*02:08H HLA-A*02:02H HLA-A*02:03H HLA-B*07:04H
IIIGGAKLKAL

SEQ ID NO: 5373 - protein, 11 aa, Severe acute respiratory syndrome coronavirus 2
  REGION 1..11: note = Table A: HLA-A*24:07H HLA-B*38:02H HLA-A*32:01H HLA-B*15:01H HLA-B*57:03M
KLKALNLGETF

SEQ ID NO: 5374 - protein, 11 aa, Severe acute respiratory syndrome coronavirus 2
  REGION 1..11: note = Table A: HLA-A*03:02H
NLGETFVTHSK

SEQ ID NO: 5375 - protein, 11 aa, Severe acute respiratory syndrome coronavirus 2
  REGION 1..11: note = Table A: HLA-B*44:05H HLA-B*40:02H
GETFVTHSKGL

SEQ ID NO: 5376 - protein, 11 aa, Severe acute respiratory syndrome coronavirus 2
  REGION 1..11: note = Table A: HLA-A*36:01M HLA-A*26:01H HLA-A*26:02H HLA-A*01:01H HLA-A*30:02H HLA-A*68:01H HLA-A*34:01H HLA-A*34:02M HLA-A*66:01H
ETFVTHSKGLY

SEQ ID NO: 5377 - protein, 11 aa, Severe acute respiratory syndrome coronavirus 2
  REGION 1..11: note = Table A: HLA-A*74:01H HLA-A*33:03H
TFVTHSKGLYR

SEQ ID NO: 5378 - protein, 11 aa, Severe acute respiratory syndrome coronavirus 2
  REGION 1..11: note = Table A: HLA-B*45:01H
EETGLLMPLKA

SEQ ID NO: 5379 - protein, 11 aa, Severe acute respiratory syndrome coronavirus 2
  REGION 1..11: note = Table A: HLA-A*02:11H
LLMPLKAPKEI

SEQ ID NO: 5380 - protein, 11 aa, Severe acute respiratory syndrome coronavirus 2
  REGION 1..11: note = Table A: HLA-B*53:01H HLA-B*35:03H HLA-B*35:01H HLA-B*35:08H HLA-B*35:07M HLA-B*54:01H
MPLKAPKEIIF

SEQ ID NO: 5381 - protein, 11 aa, Severe acute respiratory syndrome coronavirus 2
  REGION 1..11: note = Table A: HLA-B*44:05H HLA-B*40:01H HLA-B*40:02M
KEIIFLEGETL

SEQ ID NO: 5382 - protein, 11 aa, Severe acute respiratory syndrome coronavirus 2
  REGION 1..11: note = Table A: HLA-A*02:02H
FLEGETLPTEV

SEQ ID NO: 5383 - protein, 11 aa, Severe acute respiratory syndrome coronavirus 2
  REGION 1..11: note = Table A: HLA-B*40:01H
LEGETLPTEVL

SEQ ID NO: 5384 - protein, 11 aa, Severe acute respiratory syndrome coronavirus 2
  REGION 1..11: note = Table A: HLA-C*08:03H
VVLKTGDLQPL

SEQ ID NO: 5385 - protein, 11 aa, Severe acute respiratory syndrome coronavirus 2
  REGION 1..11: note = Table A: HLA-B*45:01H
LEQPTSEAVEA

SEQ ID NO: 5386 - protein, 11 aa, Severe acute respiratory syndrome coronavirus 2
  REGION 1..11: note = Table A: HLA-B*35:03H
QPTSEAVEAPL

SEQ ID NO: 5387 - protein, 11 aa, Severe acute respiratory syndrome coronavirus 2
  REGION 1..11: note = Table A: HLA-B*45:01H HLA-B*50:01H
VEAPLVGTPVC

SEQ ID NO: 5388 - protein, 11 aa, Severe acute respiratory syndrome coronavirus 2
  REGION 1..11: note = Table A: HLA-A*68:02H HLA-B*51:01H
EAPLVGTPVCI

SEQ ID NO: 5389 - protein, 11 aa, Severe acute respiratory syndrome coronavirus 2
  REGION 1..11: note = Table A: HLA-A*36:01H HLA-A*29:02H HLA-A*02:11H HLA-A*30:02H HLA-B*35:01H HLA-B*35:07H HLA-B*38:02M HLA-B*15:01H HLA-B*15:02H
MLLEIKDTEKY

SEQ ID NO: 5390 - protein, 11 aa, Severe acute respiratory syndrome coronavirus 2
  REGION 1..11: note = Table A: HLA-B*08:01H
EIKDTEKYCAL

SEQ ID NO: 5391 - protein, 11 aa, Severe acute respiratory syndrome coronavirus 2
  REGION 1..11: note = Table A: HLA-C*15:05M HLA-B*35:01H HLA-B*07:02M HLA-B*07:05M
APNMMVTNNTF

SEQ ID NO: 5392 - protein, 11 aa, Severe acute respiratory syndrome coronavirus 2
  REGION 1..11: note = Table A: HLA-A*36:01H HLA-A*34:02M
MMVTNNTFTLK

SEQ ID NO: 5393 - protein, 11 aa, Severe acute respiratory syndrome coronavirus 2
  REGION 1..11: note = Table A: HLA-C*08:03H
NTFTLKGGAPT

SEQ ID NO: 5394 - protein, 11 aa, Severe acute respiratory syndrome coronavirus 2
  REGION 1..11: note = Table A: HLA-A*02:11H
FTLKGGAPTKV

SEQ ID NO: 5395 - protein, 11 aa, Severe acute respiratory syndrome coronavirus 2
  REGION 1..11: note = Table A: HLA-A*68:02H HLA-A*02:05H HLA-A*02:06H HLA-A*02:08H
VTFGDDTVIEV

SEQ ID NO: 5396 - protein, 11 aa, Severe acute respiratory syndrome coronavirus 2
  REGION 1..11: note = Table A: HLA-B*27:02H
DDTVIEVQGYK

SEQ ID NO: 5397 - protein, 11 aa, Severe acute respiratory syndrome coronavirus 2
  REGION 1..11: note = Table A: HLA-A*26:03H HLA-A*02:11H HLA-A*68:01H HLA-A*68:02M HLA-A*02:05M HLA-A*02:06M HLA-A*02:07H HLA-A*02:08H HLA-A*02:02H HLA-A*02:03H HLA-B*38:02H
TVIEVQGYKSV

SEQ ID NO: 5398 - protein, 11 aa, Severe acute respiratory syndrome coronavirus 2
  REGION 1..11: note = Table A: HLA-B*49:01H
IEVQGYKSVNI

SEQ ID NO: 5399 - protein, 11 aa, Severe acute respiratory syndrome coronavirus 2
  REGION 1..11: note = Table A: HLA-A*11:02H
ITFELDERIDK

SEQ ID NO: 5400 - protein, 11 aa, Severe acute respiratory syndrome coronavirus 2
  REGION 1..11: note = Table A: HLA-B*40:02H
FELDERIDKVL

SEQ ID NO: 5401 - protein, 11 aa, Severe acute respiratory syndrome coronavirus 2
  REGION 1..11: note = Table A: HLA-A*68:02H
SAYTVELGTEV

SEQ ID NO: 5402 - protein, 11 aa, Severe acute respiratory syndrome coronavirus 2
  REGION 1..11: note = Table A: HLA-B*35:01H HLA-B*35:08H HLA-B*38:02H HLA-B*39:01H
TVELGTEVNEF

SEQ ID NO: 5403 - protein, 11 aa, Severe acute respiratory syndrome coronavirus 2
  REGION 1..11: note = Table A: HLA-B*50:01H
TEVNEFACVVA

SEQ ID NO: 5404 - protein, 11 aa, Severe acute respiratory syndrome coronavirus 2
  REGION 1..11: note = Table A: HLA-A*02:08H
CVVADAVIKTL

SEQ ID NO: 5405 - protein, 11 aa, Severe acute respiratory syndrome coronavirus 2
  REGION 1..11: note = Table A: HLA-B*58:01H HLA-A*36:01H HLA-B*57:01H HLA-B*57:03M
LTPLGIDLDEW

SEQ ID NO: 5406 - protein, 11 aa, Severe acute respiratory syndrome coronavirus 2
  REGION 1..11: note = Table A: HLA-C*14:02H HLA-C*14:03H HLA-A*24:02H HLA-C*08:01H HLA-A*23:01H
TYYLFDESGEF

SEQ ID NO: 5407 - protein, 11 aa, Severe acute respiratory syndrome coronavirus 2
  REGION 1..11: note = Table A: HLA-A*11:303H HLA-A*29:02H HLA-A*02:11H HLA-A*68:02M HLA-B*35:03H HLA-A*02:04H HLA-A*02:05H HLA-A*02:06H HLA-A*02:07H HLA-A*02:08H HLA-B*14:01H HLA-A*02:01H HLA-A*02:02H HLA-A*02:03M HLA-C*17:01H
  REGION 1..11: note = CONT. FROM ABOVE: HLA-C*08:01M HLA-B*38:01H HLA-B*38:02M HLA- B*40:06M HLA-B*13:01H HLA-B*13:02M
YLFDESGEFKL

SEQ ID NO: 5408 - protein, 11 aa, Severe acute respiratory syndrome coronavirus 2
  REGION 1..11: note = Table A: HLA-A*36:01H HLA-A*30:02H
SGEFKLASHMY

SEQ ID NO: 5409 - protein, 11 aa, Severe acute respiratory syndrome coronavirus 2
  REGION 1..11: note = Table A: HLA-B*18:01H
EEEEFEPSTQY

SEQ ID NO: 5410 - protein, 11 aa, Severe acute respiratory syndrome coronavirus 2
  REGION 1..11: note = Table A: HLA-B*44:02M HLA-B*44:05H HLA-C*16:04H HLA-B*44:03M HLA-B*18:01M HLA-C*07:01H HLA-B*27:02H HLA-B*07:05M
EEFEPSTQYEY

SEQ ID NO: 5411 - protein, 11 aa, Severe acute respiratory syndrome coronavirus 2
  REGION 1..11: note = Table A: HLA-B*38:02H HLA-B*39:01H
TQYEYGTEDDY

SEQ ID NO: 5412 - protein, 11 aa, Severe acute respiratory syndrome coronavirus 2
  REGION 1..11: note = Table A: HLA-B*56:01M HLA-B*55:02M HLA-C*15:05H HLA-B*55:01M HLA-B*54:01H HLA-B*07:05H HLA-B*50:01H
KPLEFGATSAA

SEQ ID NO: 5413 - protein, 11 aa, Severe acute respiratory syndrome coronavirus 2
  REGION 1..11: note = Table A: HLA-A*68:02H
QTTTIQTIVEV

SEQ ID NO: 5414 - protein, 11 aa, Severe acute respiratory syndrome coronavirus 2
  REGION 1..11: note = Table A: HLA-B*44:05H HLA-B*40:01H HLA-B*40:02H
VEVQPQLEMEL

SEQ ID NO: 5415 - protein, 11 aa, Severe acute respiratory syndrome coronavirus 2
  REGION 1..11: note = Table A: HLA-A*68:02H
ELTPVVQTIEV

SEQ ID NO: 5416 - protein, 11 aa, Severe acute respiratory syndrome coronavirus 2
  REGION 1..11: note = Table A: HLA-A*26:01H HLA-A*30:02H
QTIEVNSFSGY

SEQ ID NO: 5417 - protein, 11 aa, Severe acute respiratory syndrome coronavirus 2
  REGION 1..11: note = Table A: HLA-A*25:01H HLA-A*26:03H HLA-A*68:01H HLA-A*68:02H HLA-A*34:01H HLA-A*34:02H
EVNSFSGYLKL

SEQ ID NO: 5418 - protein, 11 aa, Severe acute respiratory syndrome coronavirus 2
  REGION 1..11: note = Table A: HLA-A*24:07H HLA-A*23:01H
GYLKLTDNVYI

SEQ ID NO: 5419 - protein, 11 aa, Severe acute respiratory syndrome coronavirus 2
  REGION 1..11: note = Table A: HLA-A*02:02H
KLTDNVYIKNA

SEQ ID NO: 5420 - protein, 11 aa, Severe acute respiratory syndrome coronavirus 2
  REGION 1..11: note = Table A: HLA-A*23:01H
VYIKNADIVEE

SEQ ID NO: 5421 - protein, 11 aa, Severe acute respiratory syndrome coronavirus 2
  REGION 1..11: note = Table A: HLA-A*02:05H HLA-A*02:08H
YIKNADIVEEA

SEQ ID NO: 5422 - protein, 11 aa, Severe acute respiratory syndrome coronavirus 2
  REGION 1..11: note = Table A: HLA-B*56:01H HLA-B*55:02M HLA-B*55:01H HLA-A*02:08M
KVKPTVVVNAA

SEQ ID NO: 5423 - protein, 11 aa, Severe acute respiratory syndrome coronavirus 2
  REGION 1..11: note = Table A: HLA-A*03:02M HLA-A*11:01M HLA-A*11:02M HLA-C*07:27H
VVVNAANVYLK

SEQ ID NO: 5424 - protein, 11 aa, Severe acute respiratory syndrome coronavirus 2
  REGION 1..11: note = Table A: HLA-A*02:02M HLA-A*02:03M HLA-B*38:02H
YLKHGGGVAGA

SEQ ID NO: 5425 - protein, 11 aa, Severe acute respiratory syndrome coronavirus 2
  REGION 1..11: note = Table A: HLA-A*03:02H HLA-A*36:01H HLA-B*27:02H HLA-A*34:02H
HGGGVAGALNK

SEQ ID NO: 5426 - protein, 11 aa, Severe acute respiratory syndrome coronavirus 2
  REGION 1..11: note = Table A: HLA-B*38:02H
NAMQVESDDYI

SEQ ID NO: 5427 - protein, 11 aa, Severe acute respiratory syndrome coronavirus 2
  REGION 1..11: note = Table A: HLA-A*24:07H
DYIATNGPLKV

SEQ ID NO: 5428 - protein, 11 aa, Severe acute respiratory syndrome coronavirus 2
  REGION 1..11: note = Table A: HLA-C*15:05M HLA-C*08:03H HLA-B*07:05H
GPLKVGGSCVL

SEQ ID NO: 5429 - protein, 11 aa, Severe acute respiratory syndrome coronavirus 2
  REGION 1..11: note = Table A: HLA-A*03:01H HLA-A*03:02H
CLHVVGPNVNK

SEQ ID NO: 5430 - protein, 11 aa, Severe acute respiratory syndrome coronavirus 2
  REGION 1..11: note = Table A: HLA-A*02:08H
NVNKGEDIQLL

SEQ ID NO: 5431 - protein, 11 aa, Severe acute respiratory syndrome coronavirus 2
  REGION 1..11: note = Table A: HLA-B*44:03H
GEDIQLLKSAY

SEQ ID NO: 5432 - protein, 11 aa, Severe acute respiratory syndrome coronavirus 2
  REGION 1..11: note = Table A: HLA-A*02:11H HLA-A*68:02H HLA-A*02:05H HLA-A*02:06H HLA-A*02:08H HLA-A*02:02H
SAYENFNQHEV

SEQ ID NO: 5433 - protein, 11 aa, Severe acute respiratory syndrome coronavirus 2
  REGION 1..11: note = Table A: HLA-C*08:01H
AYENFNQHEVL

SEQ ID NO: 5434 - protein, 11 aa, Severe acute respiratory syndrome coronavirus 2
  REGION 1..11: note = Table A: HLA-B*37:01H HLA-B*40:01M HLA-B*40:02H
YENFNQHEVLL

SEQ ID NO: 5435 - protein, 11 aa, Severe acute respiratory syndrome coronavirus 2
  REGION 1..11: note = Table A: HLA-C*08:01H HLA-B*38:02H
NQHEVLLAPLL

SEQ ID NO: 5436 - protein, 11 aa, Severe acute respiratory syndrome coronavirus 2
  REGION 1..11: note = Table A: HLA-B*45:01H HLA-B*40:06M HLA-B*50:01H
HEVLLAPLLSA

SEQ ID NO: 5437 - protein, 11 aa, Severe acute respiratory syndrome coronavirus 2
  REGION 1..11: note = Table A: HLA-B*56:01H HLA-B*55:02H
APLLSAGIFGA

SEQ ID NO: 5438 - protein, 11 aa, Severe acute respiratory syndrome coronavirus 2
  REGION 1..11: note = Table A: HLA-A*11:303H HLA-C*03:03H HLA-A*02:11M HLA-C*03:04H HLA-A*30:02H HLA-A*68:02H HLA-A*02:04M HLA-A*02:05M HLA-A*02:07H HLA-A*02:08M HLA-A*02:02M HLA-A*02:03H HLA-C*08:01H HLA-C*08:03H HLA-B*40:02H
  REGION 1..11: note = CONT. FROM ABOVE: HLA-B*40:06H
GIFGADPIHSL

SEQ ID NO: 5439 - protein, 11 aa, Severe acute respiratory syndrome coronavirus 2
  REGION 1..11: note = Table A: HLA-A*02:11H HLA-A*68:02H HLA-A*02:02H
FGADPIHSLRV

SEQ ID NO: 5440 - protein, 11 aa, Severe acute respiratory syndrome coronavirus 2
  REGION 1..11: note = Table A: HLA-B*46:01H HLA-C*12:02H HLA-C*12:03H
VCVDTVRTNVY

SEQ ID NO: 5441 - protein, 11 aa, Severe acute respiratory syndrome coronavirus 2
  REGION 1..11: note = Table A: HLA-C*04:03H HLA-A*02:11H HLA-A*02:07M HLA-A*02:01H
CVDTVRTNVYL

SEQ ID NO: 5442 - protein, 11 aa, Severe acute respiratory syndrome coronavirus 2
  REGION 1..11: note = Table A: HLA-A*68:02H
DTVRTNVYLAV

SEQ ID NO: 5443 - protein, 11 aa, Severe acute respiratory syndrome coronavirus 2
  REGION 1..11: note = Table A: HLA-A*29:02H HLA-A*30:02H HLA-A*24:07H HLA-A*23:01H
VYLAVFDKNLY

SEQ ID NO: 5444 - protein, 11 aa, Severe acute respiratory syndrome coronavirus 2
  REGION 1..11: note = Table A: HLA-A*02:11M HLA-A*68:02H HLA-A*02:04H HLA-A*02:05H HLA-A*02:06H HLA-A*02:07H HLA-A*02:08M HLA-A*02:02H HLA-C*08:01H HLA-B*13:01H
AVFDKNLYDKL

SEQ ID NO: 5445 - protein, 11 aa, Severe acute respiratory syndrome coronavirus 2
  REGION 1..11: note = Table A: HLA-A*02:11H HLA-A*02:02M
NLYDKLVSSFL

SEQ ID NO: 5446 - protein, 11 aa, Severe acute respiratory syndrome coronavirus 2
  REGION 1..11: note = Table A: HLA-A*03:02H HLA-A*11:01H
QVEQKIAEIPK

SEQ ID NO: 5447 - protein, 11 aa, Severe acute respiratory syndrome coronavirus 2
  REGION 1..11: note = Table A: HLA-B*44:02H HLA-B*44:05M HLA-B*45:01H HLA-B*44:03H
AEIPKEEVKPF

SEQ ID NO: 5448 - protein, 11 aa, Severe acute respiratory syndrome coronavirus 2
  REGION 1..11: note = Table A: HLA-B*56:01H HLA-B*55:02M HLA-C*15:05H HLA-B*07:04H
KPFITESKPSV

SEQ ID NO: 5449 - protein, 11 aa, Severe acute respiratory syndrome coronavirus 2
  REGION 1..11: note = Table A: HLA-A*68:01H
ITESKPSVEQR

SEQ ID NO: 5450 - protein, 11 aa, Severe acute respiratory syndrome coronavirus 2
  REGION 1..11: note = Table A: HLA-B*27:02M
EEVTTTLEETK

SEQ ID NO: 5451 - protein, 11 aa, Severe acute respiratory syndrome coronavirus 2
  REGION 1..11: note = Table A: HLA-A*26:01H HLA-A*26:02M
EVTTTLEETKF

SEQ ID NO: 5452 - protein, 11 aa, Severe acute respiratory syndrome coronavirus 2
  REGION 1..11: note = Table A: HLA-A*24:07H HLA-A*23:01H
KFLTENLLLYI

SEQ ID NO: 5453 - protein, 11 aa, Severe acute respiratory syndrome coronavirus 2
  REGION 1..11: note = Table A: HLA-A*02:11H
LLLYIDINGNL

SEQ ID NO: 5454 - protein, 11 aa, Severe acute respiratory syndrome coronavirus 2
  REGION 1..11: note = Table A: HLA-B*57:03M
ATLVSDIDITF

SEQ ID NO: 5455 - protein, 11 aa, Severe acute respiratory syndrome coronavirus 2
  REGION 1..11: note = Table A: HLA-A*02:11H HLA-A*02:04H HLA-A*02:05H HLA-A*02:07H HLA-A*02:01H HLA-A*02:02M HLA-C*08:01H HLA-B*38:02H HLA-B*13:01H
TLVSDIDITFL

SEQ ID NO: 5456 - protein, 11 aa, Severe acute respiratory syndrome coronavirus 2
  REGION 1..11: note = Table A: HLA-A*03:02H HLA-A*11:01H HLA-A*11:02H HLA-A*68:02H HLA-A*34:02H
LVSDIDITFLK

SEQ ID NO: 5457 - protein, 11 aa, Severe acute respiratory syndrome coronavirus 2
  REGION 1..11: note = Table A: HLA-A*36:01H
VSDIDITFLKK

SEQ ID NO: 5458 - protein, 11 aa, Severe acute respiratory syndrome coronavirus 2
  REGION 1..11: note = Table A: HLA-B*58:02H
ITFLKKDAPYI

SEQ ID NO: 5459 - protein, 11 aa, Severe acute respiratory syndrome coronavirus 2
  REGION 1..11: note = Table A: HLA-A*26:02H HLA-A*68:02H HLA-B*38:02H
DVVQEGVLTAV

SEQ ID NO: 5460 - protein, 11 aa, Severe acute respiratory syndrome coronavirus 2
  REGION 1..11: note = Table A: HLA-A*11:303H HLA-A*03:01H HLA-A*03:02M HLA-A*11:01H HLA-A*11:02H HLA-A*30:01H HLA-A*34:02H HLA-C*07:27H
GVLTAVVIPTK

SEQ ID NO: 5461 - protein, 11 aa, Severe acute respiratory syndrome coronavirus 2
  REGION 1..11: note = Table A: HLA-A*03:02H
VLTAVVIPTKK

SEQ ID NO: 5462 - protein, 11 aa, Severe acute respiratory syndrome coronavirus 2
  REGION 1..11: note = Table A: HLA-A*03:02H HLA-A*11:01H HLA-A*36:01H
KAGGTTEMLAK

SEQ ID NO: 5463 - protein, 11 aa, Severe acute respiratory syndrome coronavirus 2
  REGION 1..11: note = Table A: HLA-A*74:01M HLA-A*11:01H HLA-A*11:02H HLA-A*68:01H HLA-A*31:01H HLA-A*66:01H
GTTEMLAKALR

SEQ ID NO: 5464 - protein, 11 aa, Severe acute respiratory syndrome coronavirus 2
  REGION 1..11: note = Table A: HLA-A*30:02H
KALRKVPTDNY

SEQ ID NO: 5465 - protein, 11 aa, Severe acute respiratory syndrome coronavirus 2
  REGION 1..11: note = Table A: HLA-A*36:01H HLA-A*30:02H HLA-B*15:01H HLA-B*57:03H
KVPTDNYITTY

SEQ ID NO: 5466 - protein, 11 aa, Severe acute respiratory syndrome coronavirus 2
  REGION 1..11: note = Table A: HLA-A*03:01H HLA-A*11:01H HLA-A*11:02H HLA-A*36:01H HLA-B*57:01H HLA-A*25:01H HLA-B*46:01H HLA-A*26:01M HLA-A*26:02M HLA-A*26:03M HLA-A*29:01H HLA-A*29:02H HLA-A*01:01H HLA-A*30:02M HLA-A*68:01H HLA-A*34:02M
  REGION 1..11: note = CONT. FROM ABOVE: HLA-B*38:02H HLA-B*15:01M HLA-B*39:01H HLA- A*66:01H
TTYPGQGLNGY

SEQ ID NO: 5467 - protein, 11 aa, Severe acute respiratory syndrome coronavirus 2
  REGION 1..11: note = Table A: HLA-B*56:01H HLA-B*55:02H HLA-C*15:05H HLA-B*54:01H
YPGQGLNGYTV

SEQ ID NO: 5468 - protein, 11 aa, Severe acute respiratory syndrome coronavirus 2
  REGION 1..11: note = Table A: HLA-A*03:02M HLA-B*27:02H
GLNGYTVEEAK

SEQ ID NO: 5469 - protein, 11 aa, Severe acute respiratory syndrome coronavirus 2
  REGION 1..11: note = Table A: HLA-A*11:303H HLA-A*03:02H HLA-A*11:01M HLA-A*11:02M HLA-A*36:01H HLA-A*68:01M HLA-A*68:02H HLA-A*34:01H HLA-A*34:02H HLA-C*07:27H HLA-A*66:01M
YTVEEAKTVLK

SEQ ID NO: 5470 - protein, 11 aa, Severe acute respiratory syndrome coronavirus 2
  REGION 1..11: note = Table A: HLA-A*11:303H HLA-A*03:01H HLA-A*03:02M HLA-A*11:01M HLA-A*11:02M HLA-A*36:01H HLA-A*68:01M HLA-A*34:02M HLA-C*07:27H
TVEEAKTVLKK

SEQ ID NO: 5471 - protein, 11 aa, Severe acute respiratory syndrome coronavirus 2
  REGION 1..11: note = Table A: HLA-B*57:03H
KSAFYILPSII

SEQ ID NO: 5472 - protein, 11 aa, Severe acute respiratory syndrome coronavirus 2
  REGION 1..11: note = Table A: HLA-B*27:02H HLA-A*34:02H
YILPSIISNEK

SEQ ID NO: 5473 - protein, 11 aa, Severe acute respiratory syndrome coronavirus 2
  REGION 1..11: note = Table A: HLA-B*44:05H
QEILGTVSWNL

SEQ ID NO: 5474 - protein, 11 aa, Severe acute respiratory syndrome coronavirus 2
  REGION 1..11: note = Table A: HLA-A*33:01H HLA-A*33:03H HLA-A*68:01H HLA-A*34:01M HLA-A*34:02H HLA-A*66:01M
EILGTVSWNLR

SEQ ID NO: 5475 - protein, 11 aa, Severe acute respiratory syndrome coronavirus 2
  REGION 1..11: note = Table A: HLA-A*02:02M
MLAHAEETRKL

SEQ ID NO: 5476 - protein, 11 aa, Severe acute respiratory syndrome coronavirus 2
  REGION 1..11: note = Table A: HLA-B*35:03H HLA-B*54:01H
MPVCVETKAIV

SEQ ID NO: 5477 - protein, 11 aa, Severe acute respiratory syndrome coronavirus 2
  REGION 1..11: note = Table A: HLA-A*74:01H HLA-A*33:01M HLA-A*33:03H HLA-A*26:03M HLA-A*68:01H HLA-A*34:01M HLA-A*34:02M HLA-A*31:01H HLA-A*66:01M
ETKAIVSTIQR

SEQ ID NO: 5478 - protein, 11 aa, Severe acute respiratory syndrome coronavirus 2
  REGION 1..11: note = Table A: HLA-B*58:02M HLA-A*30:02M HLA-B*57:03H
KAIVSTIQRKY

SEQ ID NO: 5479 - protein, 11 aa, Severe acute respiratory syndrome coronavirus 2
  REGION 1..11: note = Table A: HLA-A*30:01H
AIVSTIQRKYK

SEQ ID NO: 5480 - protein, 11 aa, Severe acute respiratory syndrome coronavirus 2
  REGION 1..11: note = Table A: HLA-B*15:01H
GIKIQEGVVDY

SEQ ID NO: 5481 - protein, 11 aa, Severe acute respiratory syndrome coronavirus 2
  REGION 1..11: note = Table A: HLA-A*02:11H
KIQEGVVDYGA

SEQ ID NO: 5482 - protein, 11 aa, Severe acute respiratory syndrome coronavirus 2
  REGION 1..11: note = Table A: HLA-B*44:05H HLA-B*44:03H
QEGVVDYGARF

SEQ ID NO: 5483 - protein, 11 aa, Severe acute respiratory syndrome coronavirus 2
  REGION 1..11: note = Table A: HLA-A*36:01M HLA-A*29:02H
VVDYGARFYFY

SEQ ID NO: 5484 - protein, 11 aa, Severe acute respiratory syndrome coronavirus 2
  REGION 1..11: note = Table A: HLA-C*14:03H
RFYFYTSKTTV

SEQ ID NO: 5485 - protein, 11 aa, Severe acute respiratory syndrome coronavirus 2
  REGION 1..11: note = Table A: HLA-C*14:03H
FYFYTSKTTVA

SEQ ID NO: 5486 - protein, 11 aa, Severe acute respiratory syndrome coronavirus 2
  REGION 1..11: note = Table A: HLA-A*68:02H
YTSKTTVASLI

SEQ ID NO: 5487 - protein, 11 aa, Severe acute respiratory syndrome coronavirus 2
  REGION 1..11: note = Table A: HLA-B*58:01H HLA-B*58:02M HLA-B*57:01H HLA-C*15:02H HLA-A*02:08M HLA-B*57:03H
KTTVASLINTL

SEQ ID NO: 5488 - protein, 11 aa, Severe acute respiratory syndrome coronavirus 2
  REGION 1..11: note = Table A: HLA-B*44:03H HLA-B*18:01H HLA-B*07:05H
NETLVTMPLGY

SEQ ID NO: 5489 - protein, 11 aa, Severe acute respiratory syndrome coronavirus 2
  REGION 1..11: note = Table A: HLA-A*02:11H HLA-A*02:02H
TMPLGYVTHGL

SEQ ID NO: 5490 - protein, 11 aa, Severe acute respiratory syndrome coronavirus 2
  REGION 1..11: note = Table A: HLA-A*30:02H
HGLNLEEAARY

SEQ ID NO: 5491 - protein, 11 aa, Severe acute respiratory syndrome coronavirus 2
  REGION 1..11: note = Table A: HLA-B*58:02H HLA-A*02:11H HLA-C*15:05H HLA-B*57:03M HLA-B*13:02H
RSLKVPATVSV

SEQ ID NO: 5492 - protein, 11 aa, Severe acute respiratory syndrome coronavirus 2
  REGION 1..11: note = Table A: HLA-A*03:02H HLA-A*11:01H HLA-A*25:01H HLA-B*46:01H HLA-A*26:01H HLA-A*26:02M HLA-A*26:03H HLA-A*29:01H HLA-A*29:02H HLA-A*30:02M HLA-A*68:01H HLA-C*07:27H HLA-B*35:01H HLA-B*35:08H HLA-B*38:02M HLA-B*15:01M
  REGION 1..11: note = CONT. FROM ABOVE: HLA-B*15:02M HLA-B*07:05H HLA-B*15:11H
SVSSPDAVTAY

SEQ ID NO: 5493 - protein, 11 aa, Severe acute respiratory syndrome coronavirus 2
  REGION 1..11: note = Table A: HLA-B*35:01M HLA-B*35:08H HLA-B*07:05H
SPDAVTAYNGY

SEQ ID NO: 5494 - protein, 11 aa, Severe acute respiratory syndrome coronavirus 2
  REGION 1..11: note = Table A: HLA-B*58:02M HLA-A*02:11M HLA-A*68:02H HLA-A*02:05M HLA-A*02:06H HLA-A*02:07H HLA-A*02:08M HLA-B*57:03H
KTPEEHFIETI

SEQ ID NO: 5495 - protein, 11 aa, Severe acute respiratory syndrome coronavirus 2
  REGION 1..11: note = Table A: HLA-A*01:01H
FIETISLAGSY

SEQ ID NO: 5496 - protein, 11 aa, Severe acute respiratory syndrome coronavirus 2
  REGION 1..11: note = Table A: HLA-B*48:01H HLA-B*13:01H
GQSTQLGIEFL

SEQ ID NO: 5497 - protein, 11 aa, Severe acute respiratory syndrome coronavirus 2
  REGION 1..11: note = Table A: HLA-A*11:01H HLA-A*11:02H HLA-A*36:01H
QSTQLGIEFLK

SEQ ID NO: 5498 - protein, 11 aa, Severe acute respiratory syndrome coronavirus 2
  REGION 1..11: note = Table A: HLA-A*74:01H HLA-A*11:02H
STQLGIEFLKR

SEQ ID NO: 5499 - protein, 11 aa, Severe acute respiratory syndrome coronavirus 2
  REGION 1..11: note = Table A: HLA-A*25:01H HLA-B*46:01H HLA-A*26:02H HLA-C*15:05H HLA-C*12:02H HLA-B*38:02H HLA-B*15:01H HLA-B*15:02H HLA-B*07:05H
SVYYTSNPTTF

SEQ ID NO: 5500 - protein, 11 aa, Severe acute respiratory syndrome coronavirus 2
  REGION 1..11: note = Table A: HLA-A*24:02H HLA-A*24:07M HLA-A*23:01H
YYTSNPTTFHL

SEQ ID NO: 5501 - protein, 11 aa, Severe acute respiratory syndrome coronavirus 2
  REGION 1..11: note = Table A: HLA-A*25:01H HLA-A*26:01M HLA-A*26:02M HLA-A*26:03M HLA-A*68:02M HLA-A*34:01H HLA-A*66:01H
EVITFDNLKTL

SEQ ID NO: 5502 - protein, 11 aa, Severe acute respiratory syndrome coronavirus 2
  REGION 1..11: note = Table A: HLA-B*07:04H
SLREVRTIKVF

SEQ ID NO: 5503 - protein, 11 aa, Severe acute respiratory syndrome coronavirus 2
  REGION 1..11: note = Table A: HLA-B*58:01H HLA-A*02:11M HLA-A*68:02H HLA-A*02:04H HLA-A*02:05M HLA-A*02:06H HLA-A*02:08H HLA-A*02:02M HLA-A*32:01H HLA-B*40:01H HLA-B*57:03M
KVFTTVDNINL

SEQ ID NO: 5504 - protein, 11 aa, Severe acute respiratory syndrome coronavirus 2
  REGION 1..11: note = Table A: HLA-A*68:02H
TTVDNINLHTQ

SEQ ID NO: 5505 - protein, 11 aa, Severe acute respiratory syndrome coronavirus 2
  REGION 1..11: note = Table A: HLA-A*02:11H HLA-A*68:02H HLA-A*02:07M
TVDNINLHTQV

SEQ ID NO: 5506 - protein, 11 aa, Severe acute respiratory syndrome coronavirus 2
  REGION 1..11: note = Table A: HLA-A*36:01H HLA-A*01:01H HLA-A*30:02H
HTQVVDMSMTY

SEQ ID NO: 5507 - protein, 11 aa, Severe acute respiratory syndrome coronavirus 2
  REGION 1..11: note = Table A: HLA-A*26:01H HLA-A*29:02H HLA-A*30:02M HLA-A*34:02H
MTYGQQFGPTY

SEQ ID NO: 5508 - protein, 11 aa, Severe acute respiratory syndrome coronavirus 2
  REGION 1..11: note = Table A: HLA-A*02:05H HLA-A*02:08M HLA-B*38:02H
QQFGPTYLDGA

SEQ ID NO: 5509 - protein, 11 aa, Severe acute respiratory syndrome coronavirus 2
  REGION 1..11: note = Table A: HLA-A*11:01H
PTYLDGADVTK

SEQ ID NO: 5510 - protein, 11 aa, Severe acute respiratory syndrome coronavirus 2
  REGION 1..11: note = Table A: HLA-A*24:02M HLA-A*24:07M HLA-A*23:01H
TYLDGADVTKI

SEQ ID NO: 5511 - protein, 11 aa, Severe acute respiratory syndrome coronavirus 2
  REGION 1..11: note = Table A: HLA-A*33:01H
DGADVTKIKPH

SEQ ID NO: 5512 - protein, 11 aa, Severe acute respiratory syndrome coronavirus 2
  REGION 1..11: note = Table A: HLA-B*42:01H HLA-B*07:02H HLA-B*07:04H
KPHNSHEGKTF

SEQ ID NO: 5513 - protein, 11 aa, Severe acute respiratory syndrome coronavirus 2
  REGION 1..11: note = Table A: HLA-B*38:02H
TFYVLPNDDTL

SEQ ID NO: 5514 - protein, 11 aa, Severe acute respiratory syndrome coronavirus 2
  REGION 1..11: note = Table A: HLA-A*02:11H HLA-A*68:02H HLA-A*02:04H HLA-A*02:05H HLA-A*02:06M HLA-A*02:07H HLA-B*13:02H
YVLPNDDTLRV

SEQ ID NO: 5515 - protein, 11 aa, Severe acute respiratory syndrome coronavirus 2
  REGION 1..11: note = Table A: HLA-B*56:01H HLA-B*55:02H HLA-B*55:01M HLA-B*35:12H HLA-B*54:01M
LPNDDTLRVEA

SEQ ID NO: 5516 - protein, 11 aa, Severe acute respiratory syndrome coronavirus 2
  REGION 1..11: note = Table A: HLA-C*14:03H HLA-A*33:03H HLA-A*68:02H HLA-A*24:02H HLA-A*24:07H HLA-C*08:03H HLA-A*23:01H
EYYHTTDPSFL

SEQ ID NO: 5517 - protein, 11 aa, Severe acute respiratory syndrome coronavirus 2
  REGION 1..11: note = Table A: HLA-B*27:02H
YHTTDPSFLGR

SEQ ID NO: 5518 - protein, 11 aa, Severe acute respiratory syndrome coronavirus 2
  REGION 1..11: note = Table A: HLA-A*36:01M HLA-A*25:01H HLA-A*26:01M HLA-A*29:02H HLA-A*01:01H HLA-A*30:02H HLA-A*34:02M HLA-A*66:01H
HTTDPSFLGRY

SEQ ID NO: 5519 - protein, 11 aa, Severe acute respiratory syndrome coronavirus 2
  REGION 1..11: note = Table A: HLA-A*36:01H
TTDPSFLGRYM

SEQ ID NO: 5520 - protein, 11 aa, Severe acute respiratory syndrome coronavirus 2
  REGION 1..11: note = Table A: HLA-B*54:01H
DPSFLGRYMSA

SEQ ID NO: 5521 - protein, 11 aa, Severe acute respiratory syndrome coronavirus 2
  REGION 1..11: note = Table A: HLA-B*27:05H
GRYMSALNHTK

SEQ ID NO: 5522 - protein, 11 aa, Severe acute respiratory syndrome coronavirus 2
  REGION 1..11: note = Table A: HLA-A*30:02H
SALNHTKKWKY

SEQ ID NO: 5523 - protein, 11 aa, Severe acute respiratory syndrome coronavirus 2
  REGION 1..11: note = Table A: HLA-C*14:03H HLA-A*24:02M HLA-A*24:07M HLA-C*08:01H HLA-A*23:01M
KYPQVNGLTSI

SEQ ID NO: 5524 - protein, 11 aa, Severe acute respiratory syndrome coronavirus 2
  REGION 1..11: note = Table A: HLA-B*58:01H HLA-A*30:02H
TSIKWADNNCY

SEQ ID NO: 5525 - protein, 11 aa, Severe acute respiratory syndrome coronavirus 2
  REGION 1..11: note = Table A: HLA-A*03:02H HLA-B*27:02H
ALLTLQQIELK

SEQ ID NO: 5526 - protein, 11 aa, Severe acute respiratory syndrome coronavirus 2
  REGION 1..11: note = Table A: HLA-A*36:01H HLA-A*29:01H HLA-A*29:02H HLA-A*30:02H
KFNPPALQDAY

SEQ ID NO: 5527 - protein, 11 aa, Severe acute respiratory syndrome coronavirus 2
  REGION 1..11: note = Table A: HLA-A*29:02H
FNPPALQDAYY

SEQ ID NO: 5528 - protein, 11 aa, Severe acute respiratory syndrome coronavirus 2
  REGION 1..11: note = Table A: HLA-A*68:01H
NPPALQDAYYR

SEQ ID NO: 5529 - protein, 11 aa, Severe acute respiratory syndrome coronavirus 2
  REGION 1..11: note = Table A: HLA-B*38:02H
YRARAGEAANF

SEQ ID NO: 5530 - protein, 11 aa, Severe acute respiratory syndrome coronavirus 2
  REGION 1..11: note = Table A: HLA-B*57:03H
KTVGELGDVRE

SEQ ID NO: 5531 - protein, 11 aa, Severe acute respiratory syndrome coronavirus 2
  REGION 1..11: note = Table A: HLA-B*38:02H
ELGDVRETMSY

SEQ ID NO: 5532 - protein, 11 aa, Severe acute respiratory syndrome coronavirus 2
  REGION 1..11: note = Table A: HLA-A*02:11H HLA-A*02:02M HLA-B*38:02H
YLFQHANLDSC

SEQ ID NO: 5533 - protein, 11 aa, Severe acute respiratory syndrome coronavirus 2
  REGION 1..11: note = Table A: HLA-A*36:01H HLA-A*30:02H HLA-B*57:03H
TTLKGVEAVMY

SEQ ID NO: 5534 - protein, 11 aa, Severe acute respiratory syndrome coronavirus 2
  REGION 1..11: note = Table A: HLA-A*02:02H HLA-A*02:03H
TLKGVEAVMYM

SEQ ID NO: 5535 - protein, 11 aa, Severe acute respiratory syndrome coronavirus 2
  REGION 1..11: note = Table A: HLA-C*14:03H HLA-A*24:02M HLA-A*24:07H HLA-C*08:01H HLA-A*23:01M
MYMGTLSYEQF

SEQ ID NO: 5536 - protein, 11 aa, Severe acute respiratory syndrome coronavirus 2
  REGION 1..11: note = Table A: HLA-A*36:01H
YMGTLSYEQFK

SEQ ID NO: 5537 - protein, 11 aa, Severe acute respiratory syndrome coronavirus 2
  REGION 1..11: note = Table A: HLA-B*45:01H
YEQFKKGVQIP

SEQ ID NO: 5538 - protein, 11 aa, Severe acute respiratory syndrome coronavirus 2
  REGION 1..11: note = Table A: HLA-B*45:01H
QESPFVMMSAP

SEQ ID NO: 5539 - protein, 11 aa, Severe acute respiratory syndrome coronavirus 2
  REGION 1..11: note = Table A: HLA-B*55:02H
SPFVMMSAPPA

SEQ ID NO: 5540 - protein, 11 aa, Severe acute respiratory syndrome coronavirus 2
  REGION 1..11: note = Table A: HLA-A*29:02H
FVMMSAPPAQY

SEQ ID NO: 5541 - protein, 11 aa, Severe acute respiratory syndrome coronavirus 2
  REGION 1..11: note = Table A: HLA-A*02:02H
MMSAPPAQYEL

SEQ ID NO: 5542 - protein, 11 aa, Severe acute respiratory syndrome coronavirus 2
  REGION 1..11: note = Table A: HLA-A*03:02H HLA-A*11:01H HLA-A*11:02H HLA-A*36:01H HLA-A*68:01H HLA-A*68:02H HLA-A*34:02M
MSAPPAQYELK

SEQ ID NO: 5543 - protein, 11 aa, Severe acute respiratory syndrome coronavirus 2
  REGION 1..11: note = Table A: HLA-B*40:06H HLA-B*50:01M
YELKHGTFTCA

SEQ ID NO: 5544 - protein, 11 aa, Severe acute respiratory syndrome coronavirus 2
  REGION 1..11: note = Table A: HLA-A*34:02H
YTGNYQCGHYK

SEQ ID NO: 5545 - protein, 11 aa, Severe acute respiratory syndrome coronavirus 2
  REGION 1..11: note = Table A: HLA-A*24:07H
HYKHITSKETL

SEQ ID NO: 5546 - protein, 11 aa, Severe acute respiratory syndrome coronavirus 2
  REGION 1..11: note = Table A: HLA-B*15:03M
YKHITSKETLY

SEQ ID NO: 5547 - protein, 11 aa, Severe acute respiratory syndrome coronavirus 2
  REGION 1..11: note = Table A: HLA-B*18:01H HLA-B*35:01H
DGALLTKSSEY

SEQ ID NO: 5548 - protein, 11 aa, Severe acute respiratory syndrome coronavirus 2
  REGION 1..11: note = Table A: HLA-B*44:02H HLA-B*44:05M HLA-B*45:01H HLA-B*44:03M HLA-B*18:01H HLA-B*38:02H HLA-B*40:01M HLA-B*40:02H HLA-B*07:05H HLA-B*13:01H HLA-B*49:01H
SEYKGPITDVF

SEQ ID NO: 5549 - protein, 11 aa, Severe acute respiratory syndrome coronavirus 2
  REGION 1..11: note = Table A: HLA-A*33:03H HLA-A*29:02H HLA-A*30:02H
EYKGPITDVFY

SEQ ID NO: 5550 - protein, 11 aa, Severe acute respiratory syndrome coronavirus 2
  REGION 1..11: note = Table A: HLA-A*36:01M HLA-A*01:01M
ITDVFYKENSY

SEQ ID NO: 5551 - protein, 11 aa, Severe acute respiratory syndrome coronavirus 2
  REGION 1..11: note = Table A: HLA-A*24:02H HLA-A*24:07H HLA-A*23:01H
FYKENSYTTTI

SEQ ID NO: 5552 - protein, 11 aa, Severe acute respiratory syndrome coronavirus 2
  REGION 1..11: note = Table A: HLA-B*45:01H
KENSYTTTIKP

SEQ ID NO: 5553 - protein, 11 aa, Severe acute respiratory syndrome coronavirus 2
  REGION 1..11: note = Table A: HLA-C*14:03H HLA-A*30:02H HLA-A*24:07H
SYTTTIKPVTY

SEQ ID NO: 5554 - protein, 11 aa, Severe acute respiratory syndrome coronavirus 2
  REGION 1..11: note = Table A: HLA-A*34:02M
YTTTIKPVTYK

SEQ ID NO: 5555 - protein, 11 aa, Severe acute respiratory syndrome coronavirus 2
  REGION 1..11: note = Table A: HLA-A*36:01H HLA-A*01:01H
CTEIDPKLDNY

SEQ ID NO: 5556 - protein, 11 aa, Severe acute respiratory syndrome coronavirus 2
  REGION 1..11: note = Table A: HLA-B*44:02M HLA-B*44:05M HLA-C*16:04H HLA-B*44:03H HLA-B*18:01M HLA-A*30:02M HLA-B*38:02H HLA-B*39:01H HLA-B*07:05H
TEIDPKLDNYY

SEQ ID NO: 5557 - protein, 11 aa, Severe acute respiratory syndrome coronavirus 2
  REGION 1..11: note = Table A: HLA-A*36:01M HLA-A*34:02H
EIDPKLDNYYK

SEQ ID NO: 5558 - protein, 11 aa, Severe acute respiratory syndrome coronavirus 2
  REGION 1..11: note = Table A: HLA-A*33:01H
DNYYKKDNSYF

SEQ ID NO: 5559 - protein, 11 aa, Severe acute respiratory syndrome coronavirus 2
  REGION 1..11: note = Table A: HLA-B*35:01M HLA-B*35:07M HLA-B*38:02H HLA-B*15:11M
QPIDLVPNQPY

SEQ ID NO: 5560 - protein, 11 aa, Severe acute respiratory syndrome coronavirus 2
  REGION 1..11: note = Table A: HLA-B*42:01H HLA-B*55:02H HLA-C*15:05M HLA-B*35:01H HLA-B*07:02M HLA-B*07:04H HLA-B*07:05M HLA-B*15:11H
VPNQPYPNASF

SEQ ID NO: 5561 - protein, 11 aa, Severe acute respiratory syndrome coronavirus 2
  REGION 1..11: note = Table A: HLA-B*53:01M HLA-C*15:05H HLA-B*35:01H HLA-B*35:07H HLA-B*38:02H HLA-B*07:05H
QPYPNASFDNF

SEQ ID NO: 5562 - protein, 11 aa, Severe acute respiratory syndrome coronavirus 2
  REGION 1..11: note = Table A: HLA-B*53:01M HLA-B*35:01H HLA-B*35:07H
YPNASFDNFKF

SEQ ID NO: 5563 - protein, 11 aa, Severe acute respiratory syndrome coronavirus 2
  REGION 1..11: note = Table A: HLA-A*02:05H HLA-C*08:01H HLA-C*08:03H
NIKFADDLNQL

SEQ ID NO: 5564 - protein, 11 aa, Severe acute respiratory syndrome coronavirus 2
  REGION 1..11: note = Table A: HLA-A*36:01H HLA-A*01:01H HLA-B*35:01H HLA-B*35:08H HLA-B*35:07H HLA-B*38:02H
FADDLNQLTGY

SEQ ID NO: 5565 - protein, 11 aa, Severe acute respiratory syndrome coronavirus 2
  REGION 1..11: note = Table A: HLA-B*07:04H
KPASRELKVTF

SEQ ID NO: 5566 - protein, 11 aa, Severe acute respiratory syndrome coronavirus 2
  REGION 1..11: note = Table A: HLA-B*53:01H HLA-B*35:03M HLA-C*15:05H HLA-B*35:01H HLA-B*35:02M HLA-B*35:08M HLA-B*35:12M HLA-B*38:02H
FPDLNGDVVAI

SEQ ID NO: 5567 - protein, 11 aa, Severe acute respiratory syndrome coronavirus 2
  REGION 1..11: note = Table A: HLA-A*68:02H
DVVAIDYKHYT

SEQ ID NO: 5568 - protein, 11 aa, Severe acute respiratory syndrome coronavirus 2
  REGION 1..11: note = Table A: HLA-A*03:01H
IDYKHYTPSFK

SEQ ID NO: 5569 - protein, 11 aa, Severe acute respiratory syndrome coronavirus 2
  REGION 1..11: note = Table A: HLA-A*33:01H
DYKHYTPSFKK

SEQ ID NO: 5570 - protein, 11 aa, Severe acute respiratory syndrome coronavirus 2
  REGION 1..11: note = Table A: HLA-B*07:04H
TPSFKKGAKLL

SEQ ID NO: 5571 - protein, 11 aa, Severe acute respiratory syndrome coronavirus 2
  REGION 1..11: note = Table A: HLA-B*57:03H
GAKLLHKPIVW

SEQ ID NO: 5572 - protein, 11 aa, Severe acute respiratory syndrome coronavirus 2
  REGION 1..11: note = Table A: HLA-A*02:11M
KLLHKPIVWHV

SEQ ID NO: 5573 - protein, 11 aa, Severe acute respiratory syndrome coronavirus 2
  REGION 1..11: note = Table A: HLA-A*03:01H HLA-A*03:02H HLA-A*34:02H
IVWHVNNATNK

SEQ ID NO: 5574 - protein, 11 aa, Severe acute respiratory syndrome coronavirus 2
  REGION 1..11: note = Table A: HLA-B*58:01H HLA-A*03:02H HLA-A*36:01H HLA-A*25:01H HLA-B*46:01H HLA-A*26:01M HLA-A*26:02H HLA-A*29:02H HLA-A*30:02H HLA-C*12:02H HLA-B*35:01M HLA-B*35:08H HLA-B*35:07M HLA-B*38:02M HLA-A*32:01H HLA-B*15:01H
  REGION 1..11: note = CONT. FROM ABOVE: HLA-B*15:02H HLA-B*07:05H HLA-B*15:11H
HVNNATNKATY

SEQ ID NO: 5575 - protein, 11 aa, Severe acute respiratory syndrome coronavirus 2
  REGION 1..11: note = Table A: HLA-A*74:01M HLA-A*31:01H
ATYKPNTWCIR

SEQ ID NO: 5576 - protein, 11 aa, Severe acute respiratory syndrome coronavirus 2
  REGION 1..11: note = Table A: HLA-B*58:02H HLA-B*57:01M HLA-A*25:01H HLA-B*46:01H HLA-A*30:02H HLA-C*12:02H HLA-B*38:02H HLA-B*15:01H HLA-B*57:03M
STKPVETSNSF

SEQ ID NO: 5577 - protein, 11 aa, Severe acute respiratory syndrome coronavirus 2
  REGION 1..11: note = Table A: HLA-B*55:02H HLA-C*15:05H
KPVETSNSFDV

SEQ ID NO: 5578 - protein, 11 aa, Severe acute respiratory syndrome coronavirus 2
  REGION 1..11: note = Table A: HLA-B*45:01H
SEDAQGMDNLA

SEQ ID NO: 5579 - protein, 11 aa, Severe acute respiratory syndrome coronavirus 2
  REGION 1..11: note = Table A: HLA-B*44:05M HLA-B*40:01M HLA-B*40:02M HLA-B*41:02M
VENPTIQKDVL

SEQ ID NO: 5580 - protein, 11 aa, Severe acute respiratory syndrome coronavirus 2
  REGION 1..11: note = Table A: HLA-B*57:03M
KTTEVVGDIIL

SEQ ID NO: 5581 - protein, 11 aa, Severe acute respiratory syndrome coronavirus 2
  REGION 1..11: note = Table A: HLA-A*03:02H HLA-A*11:01H HLA-A*11:02H HLA-A*36:01H HLA-A*68:01H HLA-A*34:02H
TTEVVGDIILK

SEQ ID NO: 5582 - protein, 11 aa, Severe acute respiratory syndrome coronavirus 2
  REGION 1..11: note = Table A: HLA-B*45:01H HLA-B*40:06H
TEVVGDIILKP

SEQ ID NO: 5583 - protein, 11 aa, Severe acute respiratory syndrome coronavirus 2
  REGION 1..11: note = Table A: HLA-A*68:02H
EVVGDIILKPA

SEQ ID NO: 5584 - protein, 11 aa, Severe acute respiratory syndrome coronavirus 2
  REGION 1..11: note = Table A: HLA-B*08:01H
DIILKPANNSL

SEQ ID NO: 5585 - protein, 11 aa, Severe acute respiratory syndrome coronavirus 2
  REGION 1..11: note = Table A: HLA-A*03:02H
IILKPANNSLK

SEQ ID NO: 5586 - protein, 11 aa, Severe acute respiratory syndrome coronavirus 2
  REGION 1..11: note = Table A: HLA-C*08:03H
KITEEVGHTDL

SEQ ID NO: 5587 - protein, 11 aa, Severe acute respiratory syndrome coronavirus 2
  REGION 1..11: note = Table A: HLA-A*36:01H HLA-A*01:01H HLA-C*04:03H
ITEEVGHTDLM

SEQ ID NO: 5588 - protein, 11 aa, Severe acute respiratory syndrome coronavirus 2
  REGION 1..11: note = Table A: HLA-B*45:01H
TEEVGHTDLMA

SEQ ID NO: 5589 - protein, 11 aa, Severe acute respiratory syndrome coronavirus 2
  REGION 1..11: note = Table A: HLA-B*45:01M HLA-B*40:06H HLA-B*50:01M
EEVGHTDLMAA

SEQ ID NO: 5590 - protein, 11 aa, Severe acute respiratory syndrome coronavirus 2
  REGION 1..11: note = Table A: HLA-A*25:01H HLA-A*26:01H HLA-A*26:02H
EVGHTDLMAAY

SEQ ID NO: 5591 - protein, 11 aa, Severe acute respiratory syndrome coronavirus 2
  REGION 1..11: note = Table A: HLA-A*02:02H
LMAAYVDNSSL

SEQ ID NO: 5592 - protein, 11 aa, Severe acute respiratory syndrome coronavirus 2
  REGION 1..11: note = Table A: HLA-A*11:01H HLA-B*27:02H HLA-A*30:02H HLA-A*23:01H
AYVDNSSLTIK

SEQ ID NO: 5593 - protein, 11 aa, Severe acute respiratory syndrome coronavirus 2
  REGION 1..11: note = Table A: HLA-A*11:303H HLA-A*03:01H HLA-A*03:02M HLA-A*11:01H HLA-A*11:02H HLA-A*36:01H HLA-A*68:01H HLA-A*02:07H HLA-A*34:02M HLA-C*07:27H
YVDNSSLTIKK

SEQ ID NO: 5594 - protein, 11 aa, Severe acute respiratory syndrome coronavirus 2
  REGION 1..11: note = Table A: HLA-A*74:01H
LTIKKPNELSR

SEQ ID NO: 5595 - protein, 11 aa, Severe acute respiratory syndrome coronavirus 2
  REGION 1..11: note = Table A: HLA-B*42:01H HLA-C*15:05H HLA-B*07:02H HLA-B*07:04M
KPNELSRVLGL

SEQ ID NO: 5596 - protein, 11 aa, Severe acute respiratory syndrome coronavirus 2
  REGION 1..11: note = Table A: HLA-A*02:11H HLA-A*02:08H HLA-B*57:03H
KTLATHGLAAV

SEQ ID NO: 5597 - protein, 11 aa, Severe acute respiratory syndrome coronavirus 2
  REGION 1..11: note = Table A: HLA-C*08:01H HLA-B*38:02H
AAVNSVPWDTI

SEQ ID NO: 5598 - protein, 11 aa, Severe acute respiratory syndrome coronavirus 2
  REGION 1..11: note = Table A: HLA-A*26:01H HLA-A*30:02M
NSVPWDTIANY

SEQ ID NO: 5599 - protein, 11 aa, Severe acute respiratory syndrome coronavirus 2
  REGION 1..11: note = Table A: HLA-A*02:05H
SVPWDTIANYA

SEQ ID NO: 5600 - protein, 11 aa, Severe acute respiratory syndrome coronavirus 2
  REGION 1..11: note = Table A: HLA-B*55:02H HLA-B*07:04H
KPFLNKVVSTT

SEQ ID NO: 5601 - protein, 11 aa, Severe acute respiratory syndrome coronavirus 2
  REGION 1..11: note = Table A: HLA-A*02:08H
KVVSTTTNIVT

SEQ ID NO: 5602 - protein, 11 aa, Severe acute respiratory syndrome coronavirus 2
  REGION 1..11: note = Table A: HLA-A*11:303H HLA-A*74:01H HLA-A*03:01H HLA-A*03:02M HLA-A*11:01M HLA-A*11:02M HLA-A*36:01H HLA-B*57:01H HLA-A*33:01H HLA-A*33:03M HLA-B*27:02H HLA-A*30:02H HLA-A*68:01H HLA-A*68:02H HLA-A*34:01H
  REGION 1..11: note = CONT. FROM ABOVE: HLA-A*34:02H HLA-C*07:27H HLA-A*31:01M HLA- A*66:01H
VVSTTTNIVTR

SEQ ID NO: 5603 - protein, 11 aa, Severe acute respiratory syndrome coronavirus 2
  REGION 1..11: note = Table A: HLA-A*74:01H
TTNIVTRCLNR

SEQ ID NO: 5604 - protein, 11 aa, Severe acute respiratory syndrome coronavirus 2
  REGION 1..11: note = Table A: HLA-A*24:07H
NYMPYFFTLLL

SEQ ID NO: 5605 - protein, 11 aa, Severe acute respiratory syndrome coronavirus 2
  REGION 1..11: note = Table A: HLA-B*38:02H
SRIKASMPTTI

SEQ ID NO: 5606 - protein, 11 aa, Severe acute respiratory syndrome coronavirus 2
  REGION 1..11: note = Table A: HLA-A*02:11H HLA-A*02:07H
SMPTTIAKNTV

SEQ ID NO: 5607 - protein, 11 aa, Severe acute respiratory syndrome coronavirus 2
  REGION 1..11: note = Table A: HLA-B*56:01H HLA-B*55:02H HLA-A*34:02H HLA-B*54:01H
MPTTIAKNTVK

SEQ ID NO: 5608 - protein, 11 aa, Severe acute respiratory syndrome coronavirus 2
  REGION 1..11: note = Table A: HLA-A*02:08H
TTIAKNTVKSV

SEQ ID NO: 5609 - protein, 11 aa, Severe acute respiratory syndrome coronavirus 2
  REGION 1..11: note = Table A: HLA-B*15:03H
AKNTVKSVGKF

SEQ ID NO: 5610 - protein, 11 aa, Severe acute respiratory syndrome coronavirus 2
  REGION 1..11: note = Table A: HLA-B*58:02H HLA-B*57:03M
ASFNYLKSPNF

SEQ ID NO: 5611 - protein, 11 aa, Severe acute respiratory syndrome coronavirus 2
  REGION 1..11: note = Table A: HLA-A*24:07H HLA-A*23:01H
NYLKSPNFSKL

SEQ ID NO: 5612 - protein, 11 aa, Severe acute respiratory syndrome coronavirus 2
  REGION 1..11: note = Table A: HLA-B*58:02M HLA-A*74:01H HLA-A*02:11M HLA-A*02:08H HLA-B*57:03M
KSPNFSKLINI

SEQ ID NO: 5613 - protein, 11 aa, Severe acute respiratory syndrome coronavirus 2
  REGION 1..11: note = Table A: HLA-B*42:01H HLA-B*55:02H HLA-C*15:05H HLA-B*07:04M
SPNFSKLINII

SEQ ID NO: 5614 - protein, 11 aa, Severe acute respiratory syndrome coronavirus 2
  REGION 1..11: note = Table A: HLA-A*24:02H HLA-A*24:07M HLA-A*23:01H
IYSTAALGVLM

SEQ ID NO: 5615 - protein, 11 aa, Severe acute respiratory syndrome coronavirus 2
  REGION 1..11: note = Table A: HLA-A*30:02H
VLMSNLGMPSY

SEQ ID NO: 5616 - protein, 11 aa, Severe acute respiratory syndrome coronavirus 2
  REGION 1..11: note = Table A: HLA-B*51:01M
EGYLNSTNVTI

SEQ ID NO: 5617 - protein, 11 aa, Severe acute respiratory syndrome coronavirus 2
  REGION 1..11: note = Table A: HLA-A*02:07H
GLDSLDTYPSL

SEQ ID NO: 5618 - protein, 11 aa, Severe acute respiratory syndrome coronavirus 2
  REGION 1..11: note = Table A: HLA-A*68:01H HLA-A*68:02M HLA-A*34:02H HLA-A*66:01H
DTYPSLETIQI

SEQ ID NO: 5619 - protein, 11 aa, Severe acute respiratory syndrome coronavirus 2
  REGION 1..11: note = Table A: HLA-C*15:05H HLA-B*54:01H
YPSLETIQITI

SEQ ID NO: 5620 - protein, 11 aa, Severe acute respiratory syndrome coronavirus 2
  REGION 1..11: note = Table A: HLA-A*26:03H HLA-A*68:01H HLA-A*34:01H HLA-A*34:02H HLA-A*66:01M
ETIQITISSFK

SEQ ID NO: 5621 - protein, 11 aa, Severe acute respiratory syndrome coronavirus 2
  REGION 1..11: note = Table A: HLA-A*02:11H HLA-A*02:04H
YVLGLAAIMQL

SEQ ID NO: 5622 - protein, 11 aa, Severe acute respiratory syndrome coronavirus 2
  REGION 1..11: note = Table A: HLA-A*24:07H
YFAVHFISNSW

SEQ ID NO: 5623 - protein, 11 aa, Severe acute respiratory syndrome coronavirus 2
  REGION 1..11: note = Table A: HLA-C*03:03H HLA-C*03:04M HLA-C*17:01H
FAVHFISNSWL

SEQ ID NO: 5624 - protein, 11 aa, Severe acute respiratory syndrome coronavirus 2
  REGION 1..11: note = Table A: HLA-A*74:01H
VQMAPISAMVR

SEQ ID NO: 5625 - protein, 11 aa, Severe acute respiratory syndrome coronavirus 2
  REGION 1..11: note = Table A: HLA-A*02:11H HLA-A*02:02H
QMAPISAMVRM

SEQ ID NO: 5626 - protein, 11 aa, Severe acute respiratory syndrome coronavirus 2
  REGION 1..11: note = Table A: HLA-C*15:05H
APISAMVRMYI

SEQ ID NO: 5627 - protein, 11 aa, Severe acute respiratory syndrome coronavirus 2
  REGION 1..11: note = Table A: HLA-A*33:03H HLA-A*68:01H HLA-A*34:01H
ECTTIVNGVRR

SEQ ID NO: 5628 - protein, 11 aa, Severe acute respiratory syndrome coronavirus 2
  REGION 1..11: note = Table A: HLA-C*14:02H HLA-C*14:03H HLA-A*24:07M HLA-A*23:01H
FYVYANGGKGF

SEQ ID NO: 5629 - protein, 11 aa, Severe acute respiratory syndrome coronavirus 2
  REGION 1..11: note = Table A: HLA-C*14:03H
TFISDEVARDL

SEQ ID NO: 5630 - protein, 11 aa, Severe acute respiratory syndrome coronavirus 2
  REGION 1..11: note = Table A: HLA-C*04:03H HLA-C*15:02H HLA-A*02:07H HLA-C*08:01H HLA-C*08:02M
ISDEVARDLSL

SEQ ID NO: 5631 - protein, 11 aa, Severe acute respiratory syndrome coronavirus 2
  REGION 1..11: note = Table A: HLA-B*18:01H
DEVARDLSLQF

SEQ ID NO: 5632 - protein, 11 aa, Severe acute respiratory syndrome coronavirus 2
  REGION 1..11: note = Table A: HLA-A*33:03H HLA-A*68:01H HLA-A*68:02H HLA-A*34:01M HLA-A*34:02M HLA-A*66:01H
EVARDLSLQFK

SEQ ID NO: 5633 - protein, 11 aa, Severe acute respiratory syndrome coronavirus 2
  REGION 1..11: note = Table A: HLA-A*74:01H
VARDLSLQFKR

SEQ ID NO: 5634 - protein, 11 aa, Severe acute respiratory syndrome coronavirus 2
  REGION 1..11: note = Table A: HLA-B*53:01H HLA-B*55:02H HLA-A*30:02M HLA-C*15:05M HLA-B*35:01H HLA-B*35:08M HLA-B*35:07M HLA-B*38:02H HLA-B*07:02H HLA-B*15:01H HLA-B*15:02H HLA-B*15:03H HLA-B*07:05M HLA-B*15:11M
RPINPTDQSSY

SEQ ID NO: 5635 - protein, 11 aa, Severe acute respiratory syndrome coronavirus 2
  REGION 1..11: note = Table A: HLA-A*68:02H
QSSYIVDSVTV

SEQ ID NO: 5636 - protein, 11 aa, Severe acute respiratory syndrome coronavirus 2
  REGION 1..11: note = Table A: HLA-A*11:303H HLA-A*03:01H HLA-A*03:02H HLA-A*11:01M HLA-A*11:02M HLA-A*34:02H HLA-C*07:27H
SSYIVDSVTVK

SEQ ID NO: 5637 - protein, 11 aa, Severe acute respiratory syndrome coronavirus 2
  REGION 1..11: note = Table A: HLA-B*58:01H HLA-A*36:01M HLA-B*57:01H HLA-A*30:02M HLA-B*57:03H
VTVKNGSIHLY

SEQ ID NO: 5638 - protein, 11 aa, Severe acute respiratory syndrome coronavirus 2
  REGION 1..11: note = Table A: HLA-A*24:07M HLA-A*66:01H
TVKNGSIHLYF

SEQ ID NO: 5639 - protein, 11 aa, Severe acute respiratory syndrome coronavirus 2
  REGION 1..11: note = Table A: HLA-C*14:02H HLA-C*14:03M HLA-A*29:02H HLA-A*30:02M HLA-A*24:07H
LYFDKAGQKTY

SEQ ID NO: 5640 - protein, 11 aa, Severe acute respiratory syndrome coronavirus 2
  REGION 1..11: note = Table A: HLA-C*04:03H
YFDKAGQKTYE

SEQ ID NO: 5641 - protein, 11 aa, Severe acute respiratory syndrome coronavirus 2
  REGION 1..11: note = Table A: HLA-A*33:01H
FDKAGQKTYER

SEQ ID NO: 5642 - protein, 11 aa, Severe acute respiratory syndrome coronavirus 2
  REGION 1..11: note = Table A: HLA-B*58:02H HLA-B*57:03H
KTYERHSLSHF

SEQ ID NO: 5643 - protein, 11 aa, Severe acute respiratory syndrome coronavirus 2
  REGION 1..11: note = Table A: HLA-A*02:04H HLA-A*02:02M HLA-B*38:02H
SLSHFVNLDNL

SEQ ID NO: 5644 - protein, 11 aa, Severe acute respiratory syndrome coronavirus 2
  REGION 1..11: note = Table A: HLA-A*36:01H
LSHFVNLDNLR

SEQ ID NO: 5645 - protein, 11 aa, Severe acute respiratory syndrome coronavirus 2
  REGION 1..11: note = Table A: HLA-B*38:02H
SHFVNLDNLRA

SEQ ID NO: 5646 - protein, 11 aa, Severe acute respiratory syndrome coronavirus 2
  REGION 1..11: note = Table A: HLA-B*57:03H
KSASVYYSQLM

SEQ ID NO: 5647 - protein, 11 aa, Severe acute respiratory syndrome coronavirus 2
  REGION 1..11: note = Table A: HLA-A*02:11H HLA-A*68:02M HLA-A*02:05H HLA-A*02:06H HLA-A*02:07H HLA-A*02:08H HLA-A*02:02H
LVSDVGDSAEV

SEQ ID NO: 5648 - protein, 11 aa, Severe acute respiratory syndrome coronavirus 2
  REGION 1..11: note = Table A: HLA-A*26:03H HLA-A*68:01H HLA-A*34:02H
DVGDSAEVAVK

SEQ ID NO: 5649 - protein, 11 aa, Severe acute respiratory syndrome coronavirus 2
  REGION 1..11: note = Table A: HLA-C*04:03H
VGDSAEVAVKM

SEQ ID NO: 5650 - protein, 11 aa, Severe acute respiratory syndrome coronavirus 2
  REGION 1..11: note = Table A: HLA-B*44:03H
AEVAVKMFDAY

SEQ ID NO: 5651 - protein, 11 aa, Severe acute respiratory syndrome coronavirus 2
  REGION 1..11: note = Table A: HLA-A*68:02H
EVAVKMFDAYV

SEQ ID NO: 5652 - protein, 11 aa, Severe acute respiratory syndrome coronavirus 2
  REGION 1..11: note = Table A: HLA-C*15:05H HLA-B*51:01H HLA-B*38:02H
DAYVNTFSSTF

SEQ ID NO: 5653 - protein, 11 aa, Severe acute respiratory syndrome coronavirus 2
  REGION 1..11: note = Table A: HLA-A*11:01H HLA-A*11:02M HLA-A*34:02H
STFNVPMEKLK

SEQ ID NO: 5654 - protein, 11 aa, Severe acute respiratory syndrome coronavirus 2
  REGION 1..11: note = Table A: HLA-B*56:01M HLA-B*08:01H HLA-B*55:02M HLA-B*55:01M HLA-B*54:01M
VPMEKLKTLVA

SEQ ID NO: 5655 - protein, 11 aa, Severe acute respiratory syndrome coronavirus 2
  REGION 1..11: note = Table A: HLA-B*58:01H HLA-B*58:02H HLA-A*02:11H HLA-C*15:05H HLA-A*02:08M HLA-C*08:03H HLA-B*57:03H
KTLVATAEAEL

SEQ ID NO: 5656 - protein, 11 aa, Severe acute respiratory syndrome coronavirus 2
  REGION 1..11: note = Table A: HLA-A*11:01H HLA-A*02:11H HLA-A*68:02M HLA-A*02:05M HLA-A*02:06H HLA-A*02:08M HLA-A*02:02M
ATAEAELAKNV

SEQ ID NO: 5657 - protein, 11 aa, Severe acute respiratory syndrome coronavirus 2
  REGION 1..11: note = Table A: HLA-B*44:02M HLA-B*44:05H HLA-C*16:04H HLA-B*45:01M HLA-B*44:03M HLA-A*02:02H HLA-B*40:01H HLA-B*40:02H HLA-B*40:06H HLA-B*41:02H HLA-B*49:01H HLA-B*50:01H
AEAELAKNVSL

SEQ ID NO: 5658 - protein, 11 aa, Severe acute respiratory syndrome coronavirus 2
  REGION 1..11: note = Table A: HLA-B*38:02H
LAKNVSLDNVL

SEQ ID NO: 5659 - protein, 11 aa, Severe acute respiratory syndrome coronavirus 2
  REGION 1..11: note = Table A: HLA-B*57:03H
VSLDNVLSTFI

SEQ ID NO: 5660 - protein, 11 aa, Severe acute respiratory syndrome coronavirus 2
  REGION 1..11: note = Table A: HLA-A*34:01H HLA-A*66:01H
NVLSTFISAAR

SEQ ID NO: 5661 - protein, 11 aa, Severe acute respiratory syndrome coronavirus 2
  REGION 1..11: note = Table A: HLA-B*57:03H
STFISAARQGF

SEQ ID NO: 5662 - protein, 11 aa, Severe acute respiratory syndrome coronavirus 2
  REGION 1..11: note = Table A: HLA-B*27:02H
QGFVDSDVETK

SEQ ID NO: 5663 - protein, 11 aa, Severe acute respiratory syndrome coronavirus 2
  REGION 1..11: note = Table A: HLA-A*02:11H
YMLTYNKVENM

SEQ ID NO: 5664 - protein, 11 aa, Severe acute respiratory syndrome coronavirus 2
  REGION 1..11: note = Table A: HLA-A*74:01H HLA-A*33:01M HLA-A*33:03H HLA-A*31:01M
TYNKVENMTPR

SEQ ID NO: 5665 - protein, 11 aa, Severe acute respiratory syndrome coronavirus 2
  REGION 1..11: note = Table A: HLA-B*45:01M HLA-B*50:01H
VENMTPRDLGA

SEQ ID NO: 5666 - protein, 11 aa, Severe acute respiratory syndrome coronavirus 2
  REGION 1..11: note = Table A: HLA-A*02:11H
KSHNIALIWNV

SEQ ID NO: 5667 - protein, 11 aa, Severe acute respiratory syndrome coronavirus 2
  REGION 1..11: note = Table A: HLA-A*02:11H HLA-A*02:07H
LIWNVKDFMSL

SEQ ID NO: 5668 - protein, 11 aa, Severe acute respiratory syndrome coronavirus 2
  REGION 1..11: note = Table A: HLA-B*45:01H
SEQLRKQIRSA

SEQ ID NO: 5669 - protein, 11 aa, Severe acute respiratory syndrome coronavirus 2
  REGION 1..11: note = Table A: HLA-B*07:04H
AAKKNNLPFKL

SEQ ID NO: 5670 - protein, 11 aa, Severe acute respiratory syndrome coronavirus 2
  REGION 1..11: note = Table A: HLA-B*13:01H HLA-B*13:02M
RQVVNVVTTKI

SEQ ID NO: 5671 - protein, 11 aa, Severe acute respiratory syndrome coronavirus 2
  REGION 1..11: note = Table A: HLA-C*15:05H HLA-C*08:03H
VVNVVTTKIAL

SEQ ID NO: 5672 - protein, 11 aa, Severe acute respiratory syndrome coronavirus 2
  REGION 1..11: note = Table A: HLA-A*32:01H
ALKGGKIVNNW

SEQ ID NO: 5673 - protein, 11 aa, Severe acute respiratory syndrome coronavirus 2
  REGION 1..11: note = Table A: HLA-A*36:01H
KGGKIVNNWLK

SEQ ID NO: 5674 - protein, 11 aa, Severe acute respiratory syndrome coronavirus 2
  REGION 1..11: note = Table A: HLA-A*02:11M HLA-A*68:02H
AIFYLITPVHV

SEQ ID NO: 5675 - protein, 11 aa, Severe acute respiratory syndrome coronavirus 2
  REGION 1..11: note = Table A: HLA-C*14:03H HLA-A*24:07H
IFYLITPVHVM

SEQ ID NO: 5676 - protein, 11 aa, Severe acute respiratory syndrome coronavirus 2
  REGION 1..11: note = Table A: HLA-A*34:02H
YLITPVHVMSK

SEQ ID NO: 5677 - protein, 11 aa, Severe acute respiratory syndrome coronavirus 2
  REGION 1..11: note = Table A: HLA-B*58:01H HLA-A*36:01H HLA-A*01:01H HLA-A*34:02H HLA-B*35:08H
HTDFSSEIIGY

SEQ ID NO: 5678 - protein, 11 aa, Severe acute respiratory syndrome coronavirus 2
  REGION 1..11: note = Table A: HLA-A*11:01H HLA-A*11:02H HLA-B*27:02H HLA-A*34:02H
TDFSSEIIGYK

SEQ ID NO: 5679 - protein, 11 aa, Severe acute respiratory syndrome coronavirus 2
  REGION 1..11: note = Table A: HLA-A*26:03H
EIIGYKAIDGG

SEQ ID NO: 5680 - protein, 11 aa, Severe acute respiratory syndrome coronavirus 2
  REGION 1..11: note = Table A: HLA-A*74:01H HLA-A*33:01M HLA-A*33:03M HLA-A*31:01M
GYKAIDGGVTR

SEQ ID NO: 5681 - protein, 11 aa, Severe acute respiratory syndrome coronavirus 2
  REGION 1..11: note = Table A: HLA-B*58:02M HLA-A*02:11H HLA-C*08:01H HLA-B*57:03H
KAIDGGVTRDI

SEQ ID NO: 5682 - protein, 11 aa, Severe acute respiratory syndrome coronavirus 2
  REGION 1..11: note = Table A: HLA-B*38:01H HLA-B*38:02H
TRDIASTDTCF

SEQ ID NO: 5683 - protein, 11 aa, Severe acute respiratory syndrome coronavirus 2
  REGION 1..11: note = Table A: HLA-A*03:02H
IASTDTCFANK

SEQ ID NO: 5684 - protein, 11 aa, Severe acute respiratory syndrome coronavirus 2
  REGION 1..11: note = Table A: HLA-B*58:01H HLA-B*57:01H HLA-B*53:01M HLA-B*57:03M HLA-B*13:01H
FANKHADFDTW

SEQ ID NO: 5685 - protein, 11 aa, Severe acute respiratory syndrome coronavirus 2
  REGION 1..11: note = Table A: HLA-A*36:01H
HADFDTWFSQR

SEQ ID NO: 5686 - protein, 11 aa, Severe acute respiratory syndrome coronavirus 2
  REGION 1..11: note = Table A: HLA-A*36:01M HLA-A*26:01M HLA-A*01:01H HLA-A*34:02M HLA-A*66:01H
DTWFSQRGGSY

SEQ ID NO: 5687 - protein, 11 aa, Severe acute respiratory syndrome coronavirus 2
  REGION 1..11: note = Table A: HLA-B*57:03H
IAAVITREVGF

SEQ ID NO: 5688 - protein, 11 aa, Severe acute respiratory syndrome coronavirus 2
  REGION 1..11: note = Table A: HLA-A*02:11H
AVITREVGFVV

SEQ ID NO: 5689 - protein, 11 aa, Severe acute respiratory syndrome coronavirus 2
  REGION 1..11: note = Table A: HLA-B*50:01H
REVGFVVPGLP

SEQ ID NO: 5690 - protein, 11 aa, Severe acute respiratory syndrome coronavirus 2
  REGION 1..11: note = Table A: HLA-C*03:03H HLA-C*03:04H HLA-C*17:01H
FVVPGLPGTIL

SEQ ID NO: 5691 - protein, 11 aa, Severe acute respiratory syndrome coronavirus 2
  REGION 1..11: note = Table A: HLA-A*74:01H HLA-A*68:01H
VVPGLPGTILR

SEQ ID NO: 5692 - protein, 11 aa, Severe acute respiratory syndrome coronavirus 2
  REGION 1..11: note = Table A: HLA-B*58:02M HLA-C*15:02H HLA-B*57:03H
RTTNGDFLHFL

SEQ ID NO: 5693 - protein, 11 aa, Severe acute respiratory syndrome coronavirus 2
  REGION 1..11: note = Table A: HLA-A*02:11H
FLHFLPRVFSA

SEQ ID NO: 5694 - protein, 11 aa, Severe acute respiratory syndrome coronavirus 2
  REGION 1..11: note = Table A: HLA-A*30:02M HLA-B*15:01H
RVFSAVGNICY

SEQ ID NO: 5695 - protein, 11 aa, Severe acute respiratory syndrome coronavirus 2
  REGION 1..11: note = Table A: HLA-C*16:01H HLA-B*46:01M HLA-C*03:02H HLA-C*12:02H HLA-C*12:03H
ICYTPSKLIEY

SEQ ID NO: 5696 - protein, 11 aa, Severe acute respiratory syndrome coronavirus 2
  REGION 1..11: note = Table A: HLA-C*15:05H HLA-B*35:01H
TPSKLIEYTDF

SEQ ID NO: 5697 - protein, 11 aa, Severe acute respiratory syndrome coronavirus 2
  REGION 1..11: note = Table A: HLA-B*50:01H
IEYTDFATSAC

SEQ ID NO: 5698 - protein, 11 aa, Severe acute respiratory syndrome coronavirus 2
  REGION 1..11: note = Table A: HLA-C*04:03H HLA-C*08:02H
YTDFATSACVL

SEQ ID NO: 5699 - protein, 11 aa, Severe acute respiratory syndrome coronavirus 2
  REGION 1..11: note = Table A: HLA-A*11:02H
CVLAAECTIFK

SEQ ID NO: 5700 - protein, 11 aa, Severe acute respiratory syndrome coronavirus 2
  REGION 1..11: note = Table A: HLA-B*35:01H
DTNVLEGSVAY

SEQ ID NO: 5701 - protein, 11 aa, Severe acute respiratory syndrome coronavirus 2
  REGION 1..11: note = Table A: HLA-A*33:03H
ESLRPDTRYVL

SEQ ID NO: 5702 - protein, 11 aa, Severe acute respiratory syndrome coronavirus 2
  REGION 1..11: note = Table A: HLA-A*34:01H
FPNTYLEGSVR

SEQ ID NO: 5703 - protein, 11 aa, Severe acute respiratory syndrome coronavirus 2
  REGION 1..11: note = Table A: HLA-B*27:02H
VRVVTTFDSEY

SEQ ID NO: 5704 - protein, 11 aa, Severe acute respiratory syndrome coronavirus 2
  REGION 1..11: note = Table A: HLA-A*34:01H
EAGVCVSTSGR

SEQ ID NO: 5705 - protein, 11 aa, Severe acute respiratory syndrome coronavirus 2
  REGION 1..11: note = Table A: HLA-A*30:02H
SGRWVLNNDYY

SEQ ID NO: 5706 - protein, 11 aa, Severe acute respiratory syndrome coronavirus 2
  REGION 1..11: note = Table A: HLA-B*27:05H
GRWVLNNDYYR

SEQ ID NO: 5707 - protein, 11 aa, Severe acute respiratory syndrome coronavirus 2
  REGION 1..11: note = Table A: HLA-A*02:07H
GVDAVNLLTNM

SEQ ID NO: 5708 - protein, 11 aa, Severe acute respiratory syndrome coronavirus 2
  REGION 1..11: note = Table A: HLA-A*02:11H HLA-A*68:02H
FTPLIQPIGAL

SEQ ID NO: 5709 - protein, 11 aa, Severe acute respiratory syndrome coronavirus 2
  REGION 1..11: note = Table A: HLA-B*58:02H HLA-C*15:05H HLA-B*57:03H
ASIVAGGIVAI

SEQ ID NO: 5710 - protein, 11 aa, Severe acute respiratory syndrome coronavirus 2
  REGION 1..11: note = Table A: HLA-A*68:02H
IVAGGIVAIVV

SEQ ID NO: 5711 - protein, 11 aa, Severe acute respiratory syndrome coronavirus 2
  REGION 1..11: note = Table A: HLA-B*55:02H
RAFGEYSHVVA

SEQ ID NO: 5712 - protein, 11 aa, Severe acute respiratory syndrome coronavirus 2
  REGION 1..11: note = Table A: HLA-C*14:03H
AFGEYSHVVAF

SEQ ID NO: 5713 - protein, 11 aa, Severe acute respiratory syndrome coronavirus 2
  REGION 1..11: note = Table A: HLA-A*24:02H HLA-A*24:07H
EYSHVVAFNTL

SEQ ID NO: 5714 - protein, 11 aa, Severe acute respiratory syndrome coronavirus 2
  REGION 1..11: note = Table A: HLA-B*38:02H
SHVVAFNTLLF

SEQ ID NO: 5715 - protein, 11 aa, Severe acute respiratory syndrome coronavirus 2
  REGION 1..11: note = Table A: HLA-B*35:01H
TPVYSFLPGVY

SEQ ID NO: 5716 - protein, 11 aa, Severe acute respiratory syndrome coronavirus 2
  REGION 1..11: note = Table A: HLA-A*02:04H HLA-A*02:07H
FLPGVYSVIYL

SEQ ID NO: 5717 - protein, 11 aa, Severe acute respiratory syndrome coronavirus 2
  REGION 1..11: note = Table A: HLA-A*24:07H
VYSVIYLYLTF

SEQ ID NO: 5718 - protein, 11 aa, Severe acute respiratory syndrome coronavirus 2
  REGION 1..11: note = Table A: HLA-A*02:11H HLA-A*68:02H
LTNDVSFLAHI

SEQ ID NO: 5719 - protein, 11 aa, Severe acute respiratory syndrome coronavirus 2
  REGION 1..11: note = Table A: HLA-A*68:02H
DVSFLAHIQWM

SEQ ID NO: 5720 - protein, 11 aa, Severe acute respiratory syndrome coronavirus 2
  REGION 1..11: note = Table A: HLA-A*02:11H
VMFTPLVPFWI

SEQ ID NO: 5721 - protein, 11 aa, Severe acute respiratory syndrome coronavirus 2
  REGION 1..11: note = Table A: HLA-A*25:01M HLA-B*46:01H HLA-A*26:01H HLA-A*26:02H HLA-C*03:02H HLA-A*30:02H HLA-A*68:02H HLA-C*15:05H HLA-C*12:02H HLA-C*08:01H HLA-A*23:01H HLA-B*38:02M HLA-A*32:01H HLA-B*15:01M HLA-B*15:02H HLA-B*07:05H
  REGION 1..11: note = CONT. FROM ABOVE: HLA-B*57:03H
VVFNGVSFSTF

SEQ ID NO: 5722 - protein, 11 aa, Severe acute respiratory syndrome coronavirus 2
  REGION 1..11: note = Table A: HLA-A*25:01H HLA-A*26:01H HLA-A*26:02H HLA-B*38:02H HLA-B*57:03H
STFEEAALCTF

SEQ ID NO: 5723 - protein, 11 aa, Severe acute respiratory syndrome coronavirus 2
  REGION 1..11: note = Table A: HLA-A*02:11H
CTFLLNKEMYL

SEQ ID NO: 5724 - protein, 11 aa, Severe acute respiratory syndrome coronavirus 2
  REGION 1..11: note = Table A: HLA-A*02:11H HLA-A*02:04H HLA-A*02:02H
FLLNKEMYLKL

SEQ ID NO: 5725 - protein, 11 aa, Severe acute respiratory syndrome coronavirus 2
  REGION 1..11: note = Table A: HLA-A*74:01H
LLNKEMYLKLR

SEQ ID NO: 5726 - protein, 11 aa, Severe acute respiratory syndrome coronavirus 2
  REGION 1..11: note = Table A: HLA-B*58:01H HLA-A*36:01H HLA-A*01:01H HLA-B*57:03H
RSDVLLPLTQY

SEQ ID NO: 5727 - protein, 11 aa, Severe acute respiratory syndrome coronavirus 2
  REGION 1..11: note = Table A: HLA-A*33:01H HLA-A*33:03H
DVLLPLTQYNR

SEQ ID NO: 5728 - protein, 11 aa, Severe acute respiratory syndrome coronavirus 2
  REGION 1..11: note = Table A: HLA-A*29:02H HLA-A*30:02H
VLLPLTQYNRY

SEQ ID NO: 5729 - protein, 11 aa, Severe acute respiratory syndrome coronavirus 2
  REGION 1..11: note = Table A: HLA-A*02:02H
LLPLTQYNRYL

SEQ ID NO: 5730 - protein, 11 aa, Severe acute respiratory syndrome coronavirus 2
  REGION 1..11: note = Table A: HLA-A*30:02H
RYLALYNKYKY

SEQ ID NO: 5731 - protein, 11 aa, Severe acute respiratory syndrome coronavirus 2
  REGION 1..11: note = Table A: HLA-A*74:01H
ALYNKYKYFSG

SEQ ID NO: 5732 - protein, 11 aa, Severe acute respiratory syndrome coronavirus 2
  REGION 1..11: note = Table A: HLA-C*14:02H HLA-C*14:03M HLA-A*36:01H HLA-A*29:01M HLA-A*29:02M HLA-B*07:05H
YFSGAMDTTSY

SEQ ID NO: 5733 - protein, 11 aa, Severe acute respiratory syndrome coronavirus 2
  REGION 1..11: note = Table A: HLA-A*33:03H HLA-A*66:01H
FSGAMDTTSYR

SEQ ID NO: 5734 - protein, 11 aa, Severe acute respiratory syndrome coronavirus 2
  REGION 1..11: note = Table A: HLA-B*56:01H HLA-B*55:02H HLA-B*55:01H HLA-A*02:01H HLA-B*54:01H
GAMDTTSYREA

SEQ ID NO: 5735 - protein, 11 aa, Severe acute respiratory syndrome coronavirus 2
  REGION 1..11: note = Table A: HLA-B*38:02H HLA-B*39:01H
NDFSNSGSDVL

SEQ ID NO: 5736 - protein, 11 aa, Severe acute respiratory syndrome coronavirus 2
  REGION 1..11: note = Table A: HLA-A*02:11H HLA-A*02:05H HLA-A*02:06H HLA-A*02:08H HLA-A*02:01H HLA-A*02:03H HLA-B*38:02H HLA-B*39:06H
YQPPQTSITSA

SEQ ID NO: 5737 - protein, 11 aa, Severe acute respiratory syndrome coronavirus 2
  REGION 1..11: note = Table A: HLA-C*15:05H HLA-B*07:05H
QPPQTSITSAV

SEQ ID NO: 5738 - protein, 11 aa, Severe acute respiratory syndrome coronavirus 2
  REGION 1..11: note = Table A: HLA-A*36:01H HLA-A*68:01H HLA-A*34:02H HLA-A*66:01H
ITSAVLQSGFR

SEQ ID NO: 5739 - protein, 11 aa, Severe acute respiratory syndrome coronavirus 2
  REGION 1..11: note = Table A: HLA-A*11:01H HLA-A*11:02H HLA-A*34:02H
TSAVLQSGFRK

SEQ ID NO: 5740 - protein, 11 aa, Severe acute respiratory syndrome coronavirus 2
  REGION 1..11: note = Table A: HLA-A*02:11H
KMAFPSGKVEG

SEQ ID NO: 5741 - protein, 11 aa, Severe acute respiratory syndrome coronavirus 2
  REGION 1..11: note = Table A: HLA-A*02:08H
MAFPSGKVEGC

SEQ ID NO: 5742 - protein, 11 aa, Severe acute respiratory syndrome coronavirus 2
  REGION 1..11: note = Table A: HLA-A*74:01H HLA-A*26:03M HLA-B*27:02H HLA-A*68:01H HLA-A*34:01M HLA-A*66:01H
FLVQAGNVQLR

SEQ ID NO: 5743 - protein, 11 aa, Severe acute respiratory syndrome coronavirus 2
  REGION 1..11: note = Table A: HLA-A*11:303H HLA-A*74:01M HLA-A*03:01M HLA-A*03:02H HLA-A*11:01M HLA-A*11:02M HLA-A*36:01M HLA-A*34:02H HLA-C*07:27H
KVDTANPKTPK

SEQ ID NO: 5744 - protein, 11 aa, Severe acute respiratory syndrome coronavirus 2
  REGION 1..11: note = Table A: HLA-A*68:01H HLA-A*34:02M HLA-A*66:01H
DTANPKTPKYK

SEQ ID NO: 5745 - protein, 11 aa, Severe acute respiratory syndrome coronavirus 2
  REGION 1..11: note = Table A: HLA-A*24:02H HLA-A*24:07H HLA-A*23:01M HLA-B*57:03H
KFVRIQPGQTF

SEQ ID NO: 5746 - protein, 11 aa, Severe acute respiratory syndrome coronavirus 2
  REGION 1..11: note = Table A: HLA-B*46:01H HLA-A*30:02H HLA-B*15:01H
ACYNGSPSGVY

SEQ ID NO: 5747 - protein, 11 aa, Severe acute respiratory syndrome coronavirus 2
  REGION 1..11: note = Table A: HLA-B*42:01M HLA-B*55:02H HLA-C*15:05M HLA-B*55:01H HLA-B*07:02M HLA-B*07:04H HLA-B*07:05M
RPNFTIKGSFL

SEQ ID NO: 5748 - protein, 11 aa, Severe acute respiratory syndrome coronavirus 2
  REGION 1..11: note = Table A: HLA-A*02:11H HLA-A*02:07H HLA-A*02:02M HLA-A*02:03H
YMHHMELPTGV

SEQ ID NO: 5749 - protein, 11 aa, Severe acute respiratory syndrome coronavirus 2
  REGION 1..11: note = Table A: HLA-B*55:02H HLA-B*38:01H HLA-B*38:02M HLA-B*39:06M HLA-B*39:01H HLA-B*15:10H
HHMELPTGVHA

SEQ ID NO: 5750 - protein, 11 aa, Severe acute respiratory syndrome coronavirus 2
  REGION 1..11: note = Table A: HLA-B*35:03M HLA-C*15:05M HLA-B*35:02H HLA-B*35:12H HLA-B*07:02H HLA-B*07:04M HLA-B*07:05H
LPTGVHAGTDL

SEQ ID NO: 5751 - protein, 11 aa, Severe acute respiratory syndrome coronavirus 2
  REGION 1..11: note = Table A: HLA-B*38:02H HLA-B*39:01H
VHAGTDLEGNF

SEQ ID NO: 5752 - protein, 11 aa, Severe acute respiratory syndrome coronavirus 2
  REGION 1..11: note = Table A: HLA-A*36:01H HLA-B*35:01H HLA-B*35:08H
HAGTDLEGNFY

SEQ ID NO: 5753 - protein, 11 aa, Severe acute respiratory syndrome coronavirus 2
  REGION 1..11: note = Table A: HLA-A*33:03H HLA-A*34:01H
EGNFYGPFVDR

SEQ ID NO: 5754 - protein, 11 aa, Severe acute respiratory syndrome coronavirus 2
  REGION 1..11: note = Table A: HLA-A*02:02H
FYGPFVDRQTA

SEQ ID NO: 5755 - protein, 11 aa, Severe acute respiratory syndrome coronavirus 2
  REGION 1..11: note = Table A: HLA-B*56:01M HLA-B*55:02M HLA-C*15:05H HLA-B*55:01H HLA-B*54:01H HLA-B*07:02H HLA-B*07:05H
GPFVDRQTAQA

SEQ ID NO: 5756 - protein, 11 aa, Severe acute respiratory syndrome coronavirus 2
  REGION 1..11: note = Table A: HLA-A*68:02H
QAAGTDTTITV

SEQ ID NO: 5757 - protein, 11 aa, Severe acute respiratory syndrome coronavirus 2
  REGION 1..11: note = Table A: HLA-A*25:01H
DTTITVNVLAW

SEQ ID NO: 5758 - protein, 11 aa, Severe acute respiratory syndrome coronavirus 2
  REGION 1..11: note = Table A: HLA-A*24:02H HLA-A*24:07H HLA-A*23:01H HLA-B*57:03H
LYAAVINGDRW

SEQ ID NO: 5759 - protein, 11 aa, Severe acute respiratory syndrome coronavirus 2
  REGION 1..11: note = Table A: HLA-C*08:01H HLA-B*57:03H
AAVINGDRWFL

SEQ ID NO: 5760 - protein, 11 aa, Severe acute respiratory syndrome coronavirus 2
  REGION 1..11: note = Table A: HLA-A*74:01M
VINGDRWFLNR

SEQ ID NO: 5761 - protein, 11 aa, Severe acute respiratory syndrome coronavirus 2
  REGION 1..11: note = Table A: HLA-A*24:07H
RWFLNRFTTTL

SEQ ID NO: 5762 - protein, 11 aa, Severe acute respiratory syndrome coronavirus 2
  REGION 1..11: note = Table A: HLA-A*24:07H
RFTTTLNDFNL

SEQ ID NO: 5763 - protein, 11 aa, Severe acute respiratory syndrome coronavirus 2
  REGION 1..11: note = Table A: HLA-A*68:02H
FTTTLNDFNLV

SEQ ID NO: 5764 - protein, 11 aa, Severe acute respiratory syndrome coronavirus 2
  REGION 1..11: note = Table A: HLA-A*03:02H
TLNDFNLVAMK

SEQ ID NO: 5765 - protein, 11 aa, Severe acute respiratory syndrome coronavirus 2
  REGION 1..11: note = Table A: HLA-A*36:01H
LNDFNLVAMKY

SEQ ID NO: 5766 - protein, 11 aa, Severe acute respiratory syndrome coronavirus 2
  REGION 1..11: note = Table A: HLA-A*02:11H HLA-A*68:02H
YNYEPLTQDHV

SEQ ID NO: 5767 - protein, 11 aa, Severe acute respiratory syndrome coronavirus 2
  REGION 1..11: note = Table A: HLA-C*08:02H
TQDHVDILGPL

SEQ ID NO: 5768 - protein, 11 aa, Severe acute respiratory syndrome coronavirus 2
  REGION 1..11: note = Table A: HLA-B*38:02H HLA-B*39:06H HLA-B*54:01H HLA-B*39:01H
DHVDILGPLSA

SEQ ID NO: 5769 - protein, 11 aa, Severe acute respiratory syndrome coronavirus 2
  REGION 1..11: note = Table A: HLA-A*02:11H HLA-A*02:02H HLA-A*02:03H
ILGPLSAQTGI

SEQ ID NO: 5770 - protein, 11 aa, Severe acute respiratory syndrome coronavirus 2
  REGION 1..11: note = Table A: HLA-B*55:02H HLA-C*15:05M HLA-B*07:05H
GPLSAQTGIAV

SEQ ID NO: 5771 - protein, 11 aa, Severe acute respiratory syndrome coronavirus 2
  REGION 1..11: note = Table A: HLA-B*57:03H
ASLKELLQNGM

SEQ ID NO: 5772 - protein, 11 aa, Severe acute respiratory syndrome coronavirus 2
  REGION 1..11: note = Table A: HLA-A*02:02H HLA-A*02:03H
GMNGRTILGSA

SEQ ID NO: 5773 - protein, 11 aa, Severe acute respiratory syndrome coronavirus 2
  REGION 1..11: note = Table A: HLA-B*45:01H HLA-B*49:01H HLA-B*50:01H
LEDEFTPFDVV

SEQ ID NO: 5774 - protein, 11 aa, Severe acute respiratory syndrome coronavirus 2
  REGION 1..11: note = Table A: HLA-B*56:01H HLA-B*55:02H HLA-C*15:05H HLA-B*54:01H
TPFDVVRQCSG

SEQ ID NO: 5775 - protein, 11 aa, Severe acute respiratory syndrome coronavirus 2
  REGION 1..11: note = Table A: HLA-A*68:01H
SGVTFQSAVKR

SEQ ID NO: 5776 - protein, 11 aa, Severe acute respiratory syndrome coronavirus 2
  REGION 1..11: note = Table A: HLA-B*58:02M HLA-B*57:03H
VTFQSAVKRTI

SEQ ID NO: 5777 - protein, 11 aa, Severe acute respiratory syndrome coronavirus 2
  REGION 1..11: note = Table A: HLA-B*58:02M HLA-A*74:01H HLA-B*57:03M
RTIKGTHHWLL

SEQ ID NO: 5778 - protein, 11 aa, Severe acute respiratory syndrome coronavirus 2
  REGION 1..11: note = Table A: HLA-B*07:04H
TIKGTHHWLLL

SEQ ID NO: 5779 - protein, 11 aa, Severe acute respiratory syndrome coronavirus 2
  REGION 1..11: note = Table A: HLA-A*24:07H
FFLYENAFLPF

SEQ ID NO: 5780 - protein, 11 aa, Severe acute respiratory syndrome coronavirus 2
  REGION 1..11: note = Table A: HLA-A*02:04H HLA-A*02:02H
FLYENAFLPFA

SEQ ID NO: 5781 - protein, 11 aa, Severe acute respiratory syndrome coronavirus 2
  REGION 1..11: note = Table A: HLA-C*14:03H HLA-A*02:07H
FLPFAMGIIAM

SEQ ID NO: 5782 - protein, 11 aa, Severe acute respiratory syndrome coronavirus 2
  REGION 1..11: note = Table A: HLA-B*35:07H
FAMGIIAMSAF

SEQ ID NO: 5783 - protein, 11 aa, Severe acute respiratory syndrome coronavirus 2
  REGION 1..11: note = Table A: HLA-A*02:11H HLA-A*02:02H
MMFVKHKHAFL

SEQ ID NO: 5784 - protein, 11 aa, Severe acute respiratory syndrome coronavirus 2
  REGION 1..11: note = Table A: HLA-B*46:01H HLA-A*29:02H HLA-C*03:02H HLA-B*38:02H HLA-B*15:01H HLA-B*15:02M
FLLPSLATVAY

SEQ ID NO: 5785 - protein, 11 aa, Severe acute respiratory syndrome coronavirus 2
  REGION 1..11: note = Table A: HLA-A*74:01H HLA-A*33:03H HLA-A*34:02H
MVYMPASWVMR

SEQ ID NO: 5786 - protein, 11 aa, Severe acute respiratory syndrome coronavirus 2
  REGION 1..11: note = Table A: HLA-A*24:02M HLA-A*24:07H HLA-A*23:01M
VYMPASWVMRI

SEQ ID NO: 5787 - protein, 11 aa, Severe acute respiratory syndrome coronavirus 2
  REGION 1..11: note = Table A: HLA-A*36:01H HLA-B*27:02H HLA-A*34:01H HLA-A*34:02H HLA-A*66:01H
DMVDTSLSGFK

SEQ ID NO: 5788 - protein, 11 aa, Severe acute respiratory syndrome coronavirus 2
  REGION 1..11: note = Table A: HLA-A*02:07H HLA-C*08:01H HLA-B*38:02H
MVDTSLSGFKL

SEQ ID NO: 5789 - protein, 11 aa, Severe acute respiratory syndrome coronavirus 2
  REGION 1..11: note = Table A: HLA-B*58:01H HLA-B*57:01H HLA-A*25:01M HLA-B*53:01M HLA-B*35:07H HLA-B*15:13H HLA-B*38:02H HLA-A*32:01M HLA-B*15:02H HLA-B*57:03M
TVYDDGARRVW

SEQ ID NO: 5790 - protein, 11 aa, Severe acute respiratory syndrome coronavirus 2
  REGION 1..11: note = Table A: HLA-B*57:03H
RVWTLMNVLTL

SEQ ID NO: 5791 - protein, 11 aa, Severe acute respiratory syndrome coronavirus 2
  REGION 1..11: note = Table A: HLA-A*03:02H HLA-A*11:01H HLA-A*11:02M HLA-A*34:02H
TLMNVLTLVYK

SEQ ID NO: 5792 - protein, 11 aa, Severe acute respiratory syndrome coronavirus 2
  REGION 1..11: note = Table A: HLA-A*02:11H HLA-A*02:05M HLA-A*02:06H HLA-A*02:08H
KVYYGNALDQA

SEQ ID NO: 5793 - protein, 11 aa, Severe acute respiratory syndrome coronavirus 2
  REGION 1..11: note = Table A: HLA-A*23:01H
VYYGNALDQAI

SEQ ID NO: 5794 - protein, 11 aa, Severe acute respiratory syndrome coronavirus 2
  REGION 1..11: note = Table A: HLA-A*02:07H
ALDQAISMWAL

SEQ ID NO: 5795 - protein, 11 aa, Severe acute respiratory syndrome coronavirus 2
  REGION 1..11: note = Table A: HLA-B*07:05H
SNYSGVVTTVM

SEQ ID NO: 5796 - protein, 11 aa, Severe acute respiratory syndrome coronavirus 2
  REGION 1..11: note = Table A: HLA-A*24:02H HLA-A*24:07M HLA-A*23:01M
NYSGVVTTVMF

SEQ ID NO: 5797 - protein, 11 aa, Severe acute respiratory syndrome coronavirus 2
  REGION 1..11: note = Table A: HLA-B*35:03H HLA-C*15:05M HLA-B*07:05H
CPIFFITGNTL

SEQ ID NO: 5798 - protein, 11 aa, Severe acute respiratory syndrome coronavirus 2
  REGION 1..11: note = Table A: HLA-B*38:02H
FRLTLGVYDYL

SEQ ID NO: 5799 - protein, 11 aa, Severe acute respiratory syndrome coronavirus 2
  REGION 1..11: note = Table A: HLA-C*04:01H HLA-C*04:03H HLA-A*24:02M HLA-A*24:07H HLA-C*08:01H HLA-A*23:01M
VYDYLVSTQEF

SEQ ID NO: 5800 - protein, 11 aa, Severe acute respiratory syndrome coronavirus 2
  REGION 1..11: note = Table A: HLA-B*27:02H
YDYLVSTQEFR

SEQ ID NO: 5801 - protein, 11 aa, Severe acute respiratory syndrome coronavirus 2
  REGION 1..11: note = Table A: HLA-A*02:11H HLA-A*02:02H
YLVSTQEFRYM

SEQ ID NO: 5802 - protein, 11 aa, Severe acute respiratory syndrome coronavirus 2
  REGION 1..11: note = Table A: HLA-A*03:01H HLA-A*03:02H
YMNSQGLLPPK

SEQ ID NO: 5803 - protein, 11 aa, Severe acute respiratory syndrome coronavirus 2
  REGION 1..11: note = Table A: HLA-B*13:02H
SQGLLPPKNSI

SEQ ID NO: 5804 - protein, 11 aa, Severe acute respiratory syndrome coronavirus 2
  REGION 1..11: note = Table A: HLA-A*02:07H HLA-A*24:07H
LLPPKNSIDAF

SEQ ID NO: 5805 - protein, 11 aa, Severe acute respiratory syndrome coronavirus 2
  REGION 1..11: note = Table A: HLA-A*74:01H
KLNIKLLGVGG

SEQ ID NO: 5806 - protein, 11 aa, Severe acute respiratory syndrome coronavirus 2
  REGION 1..11: note = Table A: HLA-A*11:01H HLA-A*11:02H HLA-C*07:27H
ATVQSKMSDVK

SEQ ID NO: 5807 - protein, 11 aa, Severe acute respiratory syndrome coronavirus 2
  REGION 1..11: note = Table A: HLA-A*68:02H HLA-A*02:04H
SVVLLSVLQQL

SEQ ID NO: 5808 - protein, 11 aa, Severe acute respiratory syndrome coronavirus 2
  REGION 1..11: note = Table A: HLA-A*03:01H HLA-A*03:02H HLA-A*11:01H HLA-A*11:02H
VQLHNDILLAK

SEQ ID NO: 5809 - protein, 11 aa, Severe acute respiratory syndrome coronavirus 2
  REGION 1..11: note = Table A: HLA-B*40:01H
TEAFEKMVSLL

SEQ ID NO: 5810 - protein, 11 aa, Severe acute respiratory syndrome coronavirus 2
  REGION 1..11: note = Table A: HLA-A*03:02H HLA-A*11:01H HLA-A*11:02H
LSMQGAVDINK

SEQ ID NO: 5811 - protein, 11 aa, Severe acute respiratory syndrome coronavirus 2
  REGION 1..11: note = Table A: HLA-B*44:05H HLA-A*02:11H HLA-A*02:04H HLA-A*02:02M HLA-B*38:02H
SMQGAVDINKL

SEQ ID NO: 5812 - protein, 11 aa, Severe acute respiratory syndrome coronavirus 2
  REGION 1..11: note = Table A: HLA-B*44:05H HLA-B*40:01H HLA-B*40:02H HLA-B*41:02H
CEEMLDNRATL

SEQ ID NO: 5813 - protein, 11 aa, Severe acute respiratory syndrome coronavirus 2
  REGION 1..11: note = Table A: HLA-A*02:11M HLA-A*02:07H HLA-A*02:01H HLA-A*02:02H HLA-B*38:02M HLA-B*13:02H
MLDNRATLQAI

SEQ ID NO: 5814 - protein, 11 aa, Severe acute respiratory syndrome coronavirus 2
  REGION 1..11: note = Table A: HLA-B*57:03H
RATLQAIASEF

SEQ ID NO: 5815 - protein, 11 aa, Severe acute respiratory syndrome coronavirus 2
  REGION 1..11: note = Table A: HLA-C*16:01H HLA-B*46:01H HLA-C*03:02H HLA-A*30:02H HLA-C*12:02H HLA-B*35:01H HLA-B*35:07H
IASEFSSLPSY

SEQ ID NO: 5816 - protein, 11 aa, Severe acute respiratory syndrome coronavirus 2
  REGION 1..11: note = Table A: HLA-B*45:01M HLA-B*40:06H HLA-B*50:01M
SEFSSLPSYAA

SEQ ID NO: 5817 - protein, 11 aa, Severe acute respiratory syndrome coronavirus 2
  REGION 1..11: note = Table A: HLA-A*02:05H HLA-A*02:06H HLA-A*02:07H HLA-A*02:01H HLA-A*02:02H
SLPSYAAFATA

SEQ ID NO: 5818 - protein, 11 aa, Severe acute respiratory syndrome coronavirus 2
  REGION 1..11: note = Table A: HLA-B*35:01M HLA-B*35:07H HLA-B*38:02H
YAAFATAQEAY

SEQ ID NO: 5819 - protein, 11 aa, Severe acute respiratory syndrome coronavirus 2
  REGION 1..11: note = Table A: HLA-A*68:02H
ATAQEAYEQAV

SEQ ID NO: 5820 - protein, 11 aa, Severe acute respiratory syndrome coronavirus 2
  REGION 1..11: note = Table A: HLA-A*02:08H
AVANGDSEVVL

SEQ ID NO: 5821 - protein, 11 aa, Severe acute respiratory syndrome coronavirus 2
  REGION 1..11: note = Table A: HLA-A*11:303H HLA-A*03:02M HLA-A*11:01M HLA-A*11:02H HLA-A*36:01H HLA-B*27:02M HLA-A*30:02H HLA-A*68:01M HLA-A*34:02H HLA-C*07:27H
VANGDSEVVLK

SEQ ID NO: 5822 - protein, 11 aa, Severe acute respiratory syndrome coronavirus 2
  REGION 1..11: note = Table A: HLA-B*15:03H
KKSLNVAKSEF

SEQ ID NO: 5823 - protein, 11 aa, Severe acute respiratory syndrome coronavirus 2
  REGION 1..11: note = Table A: HLA-A*74:01H
SLNVAKSEFDR

SEQ ID NO: 5824 - protein, 11 aa, Severe acute respiratory syndrome coronavirus 2
  REGION 1..11: note = Table A: HLA-A*74:01H HLA-A*33:01H HLA-A*33:03H HLA-A*26:03H HLA-A*68:01H HLA-A*34:02H HLA-A*31:01H HLA-A*66:01H
SEFDRDAAMQR

SEQ ID NO: 5825 - protein, 11 aa, Severe acute respiratory syndrome coronavirus 2
  REGION 1..11: note = Table A: HLA-A*03:01M HLA-A*03:02H HLA-A*36:01M HLA-A*29:01H HLA-A*29:02M HLA-A*30:02M HLA-A*02:02M HLA-B*38:02H HLA-B*15:01M HLA-B*15:03H HLA-B*07:05H
KMADQAMTQMY

SEQ ID NO: 5826 - protein, 11 aa, Severe acute respiratory syndrome coronavirus 2
  REGION 1..11: note = Table A: HLA-A*11:01H HLA-A*36:01H HLA-A*34:02M
MADQAMTQMYK

SEQ ID NO: 5827 - protein, 11 aa, Severe acute respiratory syndrome coronavirus 2
  REGION 1..11: note = Table A: HLA-B*45:01M HLA-B*50:01H
SEDKRAKVTSA

SEQ ID NO: 5828 - protein, 11 aa, Severe acute respiratory syndrome coronavirus 2
  REGION 1..11: note = Table A: HLA-B*07:04H
RAKVTSAMQTM

SEQ ID NO: 5829 - protein, 11 aa, Severe acute respiratory syndrome coronavirus 2
  REGION 1..11: note = Table A: HLA-B*58:01H HLA-C*15:05H HLA-B*57:03M
KVTSAMQTMLF

SEQ ID NO: 5830 - protein, 11 aa, Severe acute respiratory syndrome coronavirus 2
  REGION 1..11: note = Table A: HLA-A*74:01H
AMQTMLFTMLR

SEQ ID NO: 5831 - protein, 11 aa, Severe acute respiratory syndrome coronavirus 2
  REGION 1..11: note = Table A: HLA-B*13:01H
KLDNDALNNII

SEQ ID NO: 5832 - protein, 11 aa, Severe acute respiratory syndrome coronavirus 2
  REGION 1..11: note = Table A: HLA-A*33:01M HLA-A*33:03M HLA-B*27:02H HLA-A*68:01M HLA-A*34:01H HLA-A*34:02H HLA-A*66:01M
DALNNIINNAR

SEQ ID NO: 5833 - protein, 11 aa, Severe acute respiratory syndrome coronavirus 2
  REGION 1..11: note = Table A: HLA-B*56:01H HLA-B*55:02H HLA-C*15:05H HLA-B*55:01M HLA-C*08:01H HLA-B*54:01H HLA-B*07:05H
VPLNIIPLTTA

SEQ ID NO: 5834 - protein, 11 aa, Severe acute respiratory syndrome coronavirus 2
  REGION 1..11: note = Table A: HLA-A*03:02H HLA-A*11:01M HLA-A*11:02M HLA-A*36:01H HLA-B*27:02H HLA-A*68:01H HLA-A*34:02M HLA-C*07:27H HLA-A*66:01H
MVVIPDYNTYK

SEQ ID NO: 5835 - protein, 11 aa, Severe acute respiratory syndrome coronavirus 2
  REGION 1..11: note = Table A: HLA-A*68:02H
NTCDGTTFTYA

SEQ ID NO: 5836 - protein, 11 aa, Severe acute respiratory syndrome coronavirus 2
  REGION 1..11: note = Table A: HLA-A*02:11H HLA-A*02:01M HLA-A*02:02H
ALWEIQQVVDA

SEQ ID NO: 5837 - protein, 11 aa, Severe acute respiratory syndrome coronavirus 2
  REGION 1..11: note = Table A: HLA-C*04:03H HLA-A*02:11H HLA-A*02:06H HLA-A*02:07H HLA-A*02:08H HLA-C*08:01H HLA-C*08:02M HLA-C*05:01H HLA-B*13:01H
VVDADSKIVQL

SEQ ID NO: 5838 - protein, 11 aa, Severe acute respiratory syndrome coronavirus 2
  REGION 1..11: note = Table A: HLA-B*44:05M HLA-B*40:01H HLA-B*40:02M HLA-B*49:01H
SEISMDNSPNL

SEQ ID NO: 5839 - protein, 11 aa, Severe acute respiratory syndrome coronavirus 2
  REGION 1..11: note = Table A: HLA-B*58:01M HLA-B*57:01M HLA-A*32:01H HLA-B*57:03M
ISMDNSPNLAW

SEQ ID NO: 5840 - protein, 11 aa, Severe acute respiratory syndrome coronavirus 2
  REGION 1..11: note = Table A: HLA-B*57:03H
TALRANSAVKL

SEQ ID NO: 5841 - protein, 11 aa, Severe acute respiratory syndrome coronavirus 2
  REGION 1..11: note = Table A: HLA-B*39:01H
LQNNELSPVAL

SEQ ID NO: 5842 - protein, 11 aa, Severe acute respiratory syndrome coronavirus 2
  REGION 1..11: note = Table A: HLA-A*33:01H HLA-A*33:03M HLA-A*68:01H
QNNELSPVALR

SEQ ID NO: 5843 - protein, 11 aa, Severe acute respiratory syndrome coronavirus 2
  REGION 1..11: note = Table A: HLA-B*56:01M HLA-B*55:02M HLA-B*55:01H HLA-B*54:01H
SPVALRQMSCA

SEQ ID NO: 5844 - protein, 11 aa, Severe acute respiratory syndrome coronavirus 2
  REGION 1..11: note = Table A: HLA-B*35:01H
TACTDDNALAY

SEQ ID NO: 5845 - protein, 11 aa, Severe acute respiratory syndrome coronavirus 2
  REGION 1..11: note = Table A: HLA-A*66:01H
LAYYNTTKGGR

SEQ ID NO: 5846 - protein, 11 aa, Severe acute respiratory syndrome coronavirus 2
  REGION 1..11: note = Table A: HLA-C*14:03H HLA-A*30:02H HLA-A*24:07H HLA-A*23:01H
AYYNTTKGGRF

SEQ ID NO: 5847 - protein, 11 aa, Severe acute respiratory syndrome coronavirus 2
  REGION 1..11: note = Table A: HLA-B*07:04H
TTKGGRFVLAL

SEQ ID NO: 5848 - protein, 11 aa, Severe acute respiratory syndrome coronavirus 2
  REGION 1..11: note = Table A: HLA-B*58:01H HLA-B*57:01H HLA-B*44:03H HLA-B*57:03M HLA-B*13:01M
ALLSDLQDLKW

SEQ ID NO: 5849 - protein, 11 aa, Severe acute respiratory syndrome coronavirus 2
  REGION 1..11: note = Table A: HLA-A*02:02H
LLSDLQDLKWA

SEQ ID NO: 5850 - protein, 11 aa, Severe acute respiratory syndrome coronavirus 2
  REGION 1..11: note = Table A: HLA-B*46:01H HLA-B*53:01H HLA-B*35:03H HLA-B*35:01H HLA-B*35:08M HLA-B*35:07H HLA-B*38:02H HLA-B*54:01H HLA-B*07:04H HLA-B*15:02M HLA-B*15:11H
FPKSDGTGTIY

SEQ ID NO: 5851 - protein, 11 aa, Severe acute respiratory syndrome coronavirus 2
  REGION 1..11: note = Table A: HLA-A*24:07H
IYTELEPPCRF

SEQ ID NO: 5852 - protein, 11 aa, Severe acute respiratory syndrome coronavirus 2
  REGION 1..11: note = Table A: HLA-A*03:02H
VTDTPKGPKVK

SEQ ID NO: 5853 - protein, 11 aa, Severe acute respiratory syndrome coronavirus 2
  REGION 1..11: note = Table A: HLA-A*02:11M HLA-A*02:04H HLA-A*02:02M HLA-A*02:03H
YLYFIKGLNNL

SEQ ID NO: 5854 - protein, 11 aa, Severe acute respiratory syndrome coronavirus 2
  REGION 1..11: note = Table A: HLA-A*02:11H HLA-A*02:04H HLA-A*02:02H
GLNNLNRGMVL

SEQ ID NO: 5855 - protein, 11 aa, Severe acute respiratory syndrome coronavirus 2
  REGION 1..11: note = Table A: HLA-A*34:01H HLA-A*34:02H HLA-A*66:01H
MVLGSLAATVR

SEQ ID NO: 5856 - protein, 11 aa, Severe acute respiratory syndrome coronavirus 2
  REGION 1..11: note = Table A: HLA-A*02:11H HLA-A*02:04H HLA-A*02:01H
VLGSLAATVRL

SEQ ID NO: 5857 - protein, 11 aa, Severe acute respiratory syndrome coronavirus 2
  REGION 1..11: note = Table A: HLA-A*25:01H HLA-A*26:01H HLA-A*26:02H HLA-A*26:03M HLA-A*68:01H HLA-A*34:01H HLA-A*34:02H HLA-A*66:01H
EVPANSTVLSF

SEQ ID NO: 5858 - protein, 11 aa, Severe acute respiratory syndrome coronavirus 2
  REGION 1..11: note = Table A: HLA-B*46:01H
CAFAVDAAKAY

SEQ ID NO: 5859 - protein, 11 aa, Severe acute respiratory syndrome coronavirus 2
  REGION 1..11: note = Table A: HLA-A*03:02H
AFAVDAAKAYK

SEQ ID NO: 5860 - protein, 11 aa, Severe acute respiratory syndrome coronavirus 2
  REGION 1..11: note = Table A: HLA-A*36:01H
AVDAAKAYKDY

SEQ ID NO: 5861 - protein, 11 aa, Severe acute respiratory syndrome coronavirus 2
  REGION 1..11: note = Table A: HLA-A*68:02H
DAAKAYKDYLA

SEQ ID NO: 5862 - protein, 11 aa, Severe acute respiratory syndrome coronavirus 2
  REGION 1..11: note = Table A: HLA-C*08:03H HLA-B*40:02H
KDYLASGGQPI

SEQ ID NO: 5863 - protein, 11 aa, Severe acute respiratory syndrome coronavirus 2
  REGION 1..11: note = Table A: HLA-B*38:01H HLA-B*38:02M HLA-B*39:01H HLA-B*15:10H
THTGTGQAITV

SEQ ID NO: 5864 - protein, 11 aa, Severe acute respiratory syndrome coronavirus 2
  REGION 1..11: note = Table A: HLA-B*35:01H HLA-B*35:08H
TPEANMDQESF

SEQ ID NO: 5865 - protein, 11 aa, Severe acute respiratory syndrome coronavirus 2
  REGION 1..11: note = Table A: HLA-A*26:01H
ESFGGASCCLY

SEQ ID NO: 5866 - protein, 11 aa, Severe acute respiratory syndrome coronavirus 2
  REGION 1..11: note = Table A: HLA-B*38:02H
CHIDHPNPKGF

SEQ ID NO: 5867 - protein, 11 aa, Severe acute respiratory syndrome coronavirus 2
  REGION 1..11: note = Table A: HLA-B*38:02H
DHPNPKGFCDL

SEQ ID NO: 5868 - protein, 11 aa, Severe acute respiratory syndrome coronavirus 2
  REGION 1..11: note = Table A: HLA-A*11:01H HLA-A*34:02H
CANDPVGFTLK

SEQ ID NO: 5869 - protein, 11 aa, Severe acute respiratory syndrome coronavirus 2
  REGION 1..11: note = Table A: HLA-B*51:01H HLA-B*54:01H
DPVGFTLKNTV

SEQ ID NO: 5870 - protein, 11 aa, Severe acute respiratory syndrome coronavirus 2
  REGION 1..11: note = Table A: HLA-B*39:06H
DQLREPMLQSA

SEQ ID NO: 5871 - protein, 11 aa, Severe acute respiratory syndrome coronavirus 2
  REGION 1..11: note = Table A: HLA-A*74:01H HLA-A*11:01H HLA-A*11:02H HLA-A*33:01H HLA-A*33:03H HLA-A*26:03M HLA-A*68:01H HLA-A*34:01M HLA-A*34:02M HLA-A*31:01M HLA-A*66:01H
QSADAQSFLNR

SEQ ID NO: 5872 - protein, 11 aa, Severe acute respiratory syndrome coronavirus 2
  REGION 1..11: note = Table A: HLA-B*38:02H
SADAQSFLNRV

SEQ ID NO: 5873 - protein, 11 aa, Severe acute respiratory syndrome coronavirus 2
  REGION 1..11: note = Table A: HLA-A*33:01H HLA-B*54:01H
DAQSFLNRVCG

SEQ ID NO: 5874 - protein, 11 aa, Severe acute respiratory syndrome coronavirus 2
  REGION 1..11: note = Table A: HLA-A*74:01H HLA-A*03:02H HLA-A*11:01M HLA-A*11:02H HLA-A*68:01M HLA-A*31:01H
GTGTSTDVVYR

SEQ ID NO: 5875 - protein, 11 aa, Severe acute respiratory syndrome coronavirus 2
  REGION 1..11: note = Table A: HLA-B*57:01H HLA-B*57:03H
GTSTDVVYRAF

SEQ ID NO: 5876 - protein, 11 aa, Severe acute respiratory syndrome coronavirus 2
  REGION 1..11: note = Table A: HLA-A*33:03H HLA-A*30:02H
IYNDKVAGFAK

SEQ ID NO: 5877 - protein, 11 aa, Severe acute respiratory syndrome coronavirus 2
  REGION 1..11: note = Table A: HLA-A*74:01H
KVAGFAKFLKT

SEQ ID NO: 5878 - protein, 11 aa, Severe acute respiratory syndrome coronavirus 2
  REGION 1..11: note = Table A: HLA-B*44:05H
DEDDNLIDSYF

SEQ ID NO: 5879 - protein, 11 aa, Severe acute respiratory syndrome coronavirus 2
  REGION 1..11: note = Table A: HLA-A*74:01M HLA-A*33:01H HLA-A*68:01H HLA-A*34:01H HLA-A*66:01H
NLIDSYFVVKR

SEQ ID NO: 5880 - protein, 11 aa, Severe acute respiratory syndrome coronavirus 2
  REGION 1..11: note = Table A: HLA-A*66:01H
DSYFVVKRHTF

SEQ ID NO: 5881 - protein, 11 aa, Severe acute respiratory syndrome coronavirus 2
  REGION 1..11: note = Table A: HLA-A*02:11M HLA-A*02:04H HLA-A*02:05M HLA-A*02:06H HLA-A*02:07H HLA-A*02:02H HLA-A*24:07H HLA-C*08:01M HLA-B*38:01H HLA-B*38:02M HLA-B*40:06H HLA-B*13:01M HLA-B*13:02H
YQHEETIYNLL

SEQ ID NO: 5882 - protein, 11 aa, Severe acute respiratory syndrome coronavirus 2
  REGION 1..11: note = Table A: HLA-A*74:01M
AVAKHDFFKFR

SEQ ID NO: 5883 - protein, 11 aa, Severe acute respiratory syndrome coronavirus 2
  REGION 1..11: note = Table A: HLA-B*38:02H
FRIDGDMVPHI

SEQ ID NO: 5884 - protein, 11 aa, Severe acute respiratory syndrome coronavirus 2
  REGION 1..11: note = Table A: HLA-B*38:01M HLA-B*38:02H HLA-B*39:01M HLA-B*15:10H
RHFDEGNCDTL

SEQ ID NO: 5885 - protein, 11 aa, Severe acute respiratory syndrome coronavirus 2
  REGION 1..11: note = Table A: HLA-A*24:07H
DYFNKKDWYDF

SEQ ID NO: 5886 - protein, 11 aa, Severe acute respiratory syndrome coronavirus 2
  REGION 1..11: note = Table A: HLA-A*36:01H HLA-A*25:01H HLA-B*46:01H HLA-A*26:01H HLA-A*29:02H HLA-C*03:02H HLA-A*30:02H HLA-C*12:02H HLA-B*35:01H HLA-B*35:07H HLA-B*38:02H HLA-B*15:02H HLA-C*02:02H
FVENPDILRVY

SEQ ID NO: 5887 - protein, 11 aa, Severe acute respiratory syndrome coronavirus 2
  REGION 1..11: note = Table A: HLA-B*45:01M HLA-B*40:06H HLA-B*50:01H
VENPDILRVYA

SEQ ID NO: 5888 - protein, 11 aa, Severe acute respiratory syndrome coronavirus 2
  REGION 1..11: note = Table A: HLA-A*74:01H
ILRVYANLGER

SEQ ID NO: 5889 - protein, 11 aa, Severe acute respiratory syndrome coronavirus 2
  REGION 1..11: note = Table A: HLA-A*74:01H HLA-A*30:02H HLA-A*31:01H
RVYANLGERVR

SEQ ID NO: 5890 - protein, 11 aa, Severe acute respiratory syndrome coronavirus 2
  REGION 1..11: note = Table A: HLA-A*68:02M HLA-B*51:01H
DAMRNAGIVGV

SEQ ID NO: 5891 - protein, 11 aa, Severe acute respiratory syndrome coronavirus 2
  REGION 1..11: note = Table A: HLA-A*30:02H
GSGVPVVDSYY

SEQ ID NO: 5892 - protein, 11 aa, Severe acute respiratory syndrome coronavirus 2
  REGION 1..11: note = Table A: HLA-A*24:02H HLA-A*24:07H
YYSLLMPILTL

SEQ ID NO: 5893 - protein, 11 aa, Severe acute respiratory syndrome coronavirus 2
  REGION 1..11: note = Table A: HLA-A*02:11H HLA-A*02:02H
LLMPILTLTRA

SEQ ID NO: 5894 - protein, 11 aa, Severe acute respiratory syndrome coronavirus 2
  REGION 1..11: note = Table A: HLA-B*54:01H
MPILTLTRALT

SEQ ID NO: 5895 - protein, 11 aa, Severe acute respiratory syndrome coronavirus 2
  REGION 1..11: note = Table A: HLA-A*68:02H
LTAESHVDTDL

SEQ ID NO: 5896 - protein, 11 aa, Severe acute respiratory syndrome coronavirus 2
  REGION 1..11: note = Table A: HLA-A*02:07H HLA-B*38:02H HLA-B*13:01H
HVDTDLTKPYI

SEQ ID NO: 5897 - protein, 11 aa, Severe acute respiratory syndrome coronavirus 2
  REGION 1..11: note = Table A: HLA-A*33:01H
DLLKYDFTEER

SEQ ID NO: 5898 - protein, 11 aa, Severe acute respiratory syndrome coronavirus 2
  REGION 1..11: note = Table A: HLA-A*02:02M
LLKYDFTEERL

SEQ ID NO: 5899 - protein, 11 aa, Severe acute respiratory syndrome coronavirus 2
  REGION 1..11: note = Table A: HLA-A*74:01H
RLKLFDRYFKY

SEQ ID NO: 5900 - protein, 11 aa, Severe acute respiratory syndrome coronavirus 2
  REGION 1..11: note = Table A: HLA-C*14:03H HLA-A*24:07H
LFSTVFPPTSF

SEQ ID NO: 5901 - protein, 11 aa, Severe acute respiratory syndrome coronavirus 2
  REGION 1..11: note = Table A: HLA-C*03:03H HLA-A*02:11H HLA-C*03:02H HLA-C*03:04H HLA-A*68:02M HLA-A*02:08H HLA-A*34:01H HLA-A*34:02H HLA-C*08:01H HLA-C*08:03M HLA-B*38:02H HLA-A*66:01H
TVFPPTSFGPL

SEQ ID NO: 5902 - protein, 11 aa, Severe acute respiratory syndrome coronavirus 2
  REGION 1..11: note = Table A: HLA-A*29:02H HLA-A*24:07M HLA-A*23:01H
VFPPTSFGPLV

SEQ ID NO: 5903 - protein, 11 aa, Severe acute respiratory syndrome coronavirus 2
  REGION 1..11: note = Table A: HLA-A*02:11M HLA-B*13:02H
KIFVDGVPFVV

SEQ ID NO: 5904 - protein, 11 aa, Severe acute respiratory syndrome coronavirus 2
  REGION 1..11: note = Table A: HLA-B*53:01H HLA-B*35:01H HLA-A*24:07H HLA-B*35:07H
VPFVVSTGYHF

SEQ ID NO: 5905 - protein, 11 aa, Severe acute respiratory syndrome coronavirus 2
  REGION 1..11: note = Table A: HLA-B*40:02H HLA-B*49:01H
RELGVVHNQDV

SEQ ID NO: 5906 - protein, 11 aa, Severe acute respiratory syndrome coronavirus 2
  REGION 1..11: note = Table A: HLA-A*33:01M HLA-A*33:03M
HNQDVNLHSSR

SEQ ID NO: 5907 - protein, 11 aa, Severe acute respiratory syndrome coronavirus 2
  REGION 1..11: note = Table A: HLA-B*38:01H HLA-B*38:02M
NQDVNLHSSRL

SEQ ID NO: 5908 - protein, 11 aa, Severe acute respiratory syndrome coronavirus 2
  REGION 1..11: note = Table A: HLA-B*27:05M HLA-C*07:01H
SRLSFKELLVY

SEQ ID NO: 5909 - protein, 11 aa, Severe acute respiratory syndrome coronavirus 2
  REGION 1..11: note = Table A: HLA-A*02:02H
RLSFKELLVYA

SEQ ID NO: 5910 - protein, 11 aa, Severe acute respiratory syndrome coronavirus 2
  REGION 1..11: note = Table A: HLA-A*02:02H
VYAADPAMHAA

SEQ ID NO: 5911 - protein, 11 aa, Severe acute respiratory syndrome coronavirus 2
  REGION 1..11: note = Table A: HLA-A*68:02H HLA-A*34:02H
YAADPAMHAAS

SEQ ID NO: 5912 - protein, 11 aa, Severe acute respiratory syndrome coronavirus 2
  REGION 1..11: note = Table A: HLA-A*02:11H HLA-A*02:02H HLA-B*13:02H
AMHAASGNLLL

SEQ ID NO: 5913 - protein, 11 aa, Severe acute respiratory syndrome coronavirus 2
  REGION 1..11: note = Table A: HLA-A*36:01H HLA-B*27:02H HLA-A*68:01H HLA-A*34:02M
HAASGNLLLDK

SEQ ID NO: 5914 - protein, 11 aa, Severe acute respiratory syndrome coronavirus 2
  REGION 1..11: note = Table A: HLA-C*15:05H HLA-B*35:01H HLA-B*15:01H HLA-B*15:02H HLA-B*07:05H HLA-B*57:03H
SVAALTNNVAF

SEQ ID NO: 5915 - protein, 11 aa, Severe acute respiratory syndrome coronavirus 2
  REGION 1..11: note = Table A: HLA-A*02:04H HLA-A*02:01H HLA-B*38:02H HLA-B*13:02H
ALTNNVAFQTV

SEQ ID NO: 5916 - protein, 11 aa, Severe acute respiratory syndrome coronavirus 2
  REGION 1..11: note = Table A: HLA-A*11:01H HLA-A*11:02H
LTNNVAFQTVK

SEQ ID NO: 5917 - protein, 11 aa, Severe acute respiratory syndrome coronavirus 2
  REGION 1..11: note = Table A: HLA-C*12:02H HLA-B*57:03H
VAFQTVKPGNF

SEQ ID NO: 5918 - protein, 11 aa, Severe acute respiratory syndrome coronavirus 2
  REGION 1..11: note = Table A: HLA-B*07:04H
TVKPGNFNKDF

SEQ ID NO: 5919 - protein, 11 aa, Severe acute respiratory syndrome coronavirus 2
  REGION 1..11: note = Table A: HLA-A*36:01H HLA-A*29:02H HLA-C*04:01H HLA-C*04:03M
FYDFAVSKGFF

SEQ ID NO: 5920 - protein, 11 aa, Severe acute respiratory syndrome coronavirus 2
  REGION 1..11: note = Table A: HLA-C*14:03H HLA-A*02:02H HLA-C*08:03M
GFFKEGSSVEL

SEQ ID NO: 5921 - protein, 11 aa, Severe acute respiratory syndrome coronavirus 2
  REGION 1..11: note = Table A: HLA-A*33:03H
FFKEGSSVELK

SEQ ID NO: 5922 - protein, 11 aa, Severe acute respiratory syndrome coronavirus 2
  REGION 1..11: note = Table A: HLA-B*57:03H
GSSVELKHFFF

SEQ ID NO: 5923 - protein, 11 aa, Severe acute respiratory syndrome coronavirus 2
  REGION 1..11: note = Table A: HLA-C*14:03H
FFFAQDGNAAI

SEQ ID NO: 5924 - protein, 11 aa, Severe acute respiratory syndrome coronavirus 2
  REGION 1..11: note = Table A: HLA-A*30:02H HLA-B*15:01H HLA-B*39:01H
AQDGNAAISDY

SEQ ID NO: 5925 - protein, 11 aa, Severe acute respiratory syndrome coronavirus 2
  REGION 1..11: note = Table A: HLA-A*29:02H
GNAAISDYDYY

SEQ ID NO: 5926 - protein, 11 aa, Severe acute respiratory syndrome coronavirus 2
  REGION 1..11: note = Table A: HLA-A*36:01H HLA-A*30:02H
AAISDYDYYRY

SEQ ID NO: 5927 - protein, 11 aa, Severe acute respiratory syndrome coronavirus 2
  REGION 1..11: note = Table A: HLA-A*11:01H HLA-A*11:02H
SAGFPFNKWGK

SEQ ID NO: 5928 - protein, 11 aa, Severe acute respiratory syndrome coronavirus 2
  REGION 1..11: note = Table A: HLA-A*29:01H HLA-A*29:02H HLA-A*30:02H
SYEDQDALFAY

SEQ ID NO: 5929 - protein, 11 aa, Severe acute respiratory syndrome coronavirus 2
  REGION 1..11: note = Table A: HLA-B*27:02H
EDQDALFAYTK

SEQ ID NO: 5930 - protein, 11 aa, Severe acute respiratory syndrome coronavirus 2
  REGION 1..11: note = Table A: HLA-B*39:06H
TQMNLKYAISA

SEQ ID NO: 5931 - protein, 11 aa, Severe acute respiratory syndrome coronavirus 2
  REGION 1..11: note = Table A: HLA-A*33:01H HLA-A*33:03H
NLKYAISAKNR

SEQ ID NO: 5932 - protein, 11 aa, Severe acute respiratory syndrome coronavirus 2
  REGION 1..11: note = Table A: HLA-A*74:01H
KYAISAKNRAR

SEQ ID NO: 5933 - protein, 11 aa, Severe acute respiratory syndrome coronavirus 2
  REGION 1..11: note = Table A: HLA-B*38:02H HLA-B*15:02H
TVAGVSICSTM

SEQ ID NO: 5934 - protein, 11 aa, Severe acute respiratory syndrome coronavirus 2
  REGION 1..11: note = Table A: HLA-A*11:303M HLA-A*74:01H HLA-A*03:01H HLA-A*03:02M HLA-A*11:01H HLA-A*11:02H HLA-A*30:01H HLA-A*30:02H HLA-A*68:01H HLA-A*34:02M HLA-C*07:27M
STMTNRQFHQK

SEQ ID NO: 5935 - protein, 11 aa, Severe acute respiratory syndrome coronavirus 2
  REGION 1..11: note = Table A: HLA-B*07:04H HLA-B*13:02H
RQFHQKLLKSI

SEQ ID NO: 5936 - protein, 11 aa, Severe acute respiratory syndrome coronavirus 2
  REGION 1..11: note = Table A: HLA-A*02:03H
LLKSIAATRGA

SEQ ID NO: 5937 - protein, 11 aa, Severe acute respiratory syndrome coronavirus 2
  REGION 1..11: note = Table A: HLA-B*58:02M HLA-B*57:03H
KSIAATRGATV

SEQ ID NO: 5938 - protein, 11 aa, Severe acute respiratory syndrome coronavirus 2
  REGION 1..11: note = Table A: HLA-A*03:01H HLA-A*03:02M HLA-A*11:01H HLA-A*11:02H HLA-A*36:01H HLA-B*27:02H HLA-A*30:02H
RGATVVIGTSK

SEQ ID NO: 5939 - protein, 11 aa, Severe acute respiratory syndrome coronavirus 2
  REGION 1..11: note = Table A: HLA-B*57:03H
GATVVIGTSKF

SEQ ID NO: 5940 - protein, 11 aa, Severe acute respiratory syndrome coronavirus 2
  REGION 1..11: note = Table A: HLA-A*36:01H HLA-A*30:02M
ATVVIGTSKFY

SEQ ID NO: 5941 - protein, 11 aa, Severe acute respiratory syndrome coronavirus 2
  REGION 1..11: note = Table A: HLA-A*02:11M HLA-A*68:02H HLA-A*02:04M HLA-A*02:05M HLA-A*02:06M HLA-A*02:07H HLA-A*02:08M HLA-A*02:01H HLA-A*02:02M HLA-C*08:01H HLA-B*38:02H HLA-B*13:01H
TVYSDVENPHL

SEQ ID NO: 5942 - protein, 11 aa, Severe acute respiratory syndrome coronavirus 2
  REGION 1..11: note = Table A: HLA-C*14:03H HLA-A*02:02H HLA-A*24:02M HLA-A*24:07M HLA-C*08:01H HLA-A*23:01M
VYSDVENPHLM

SEQ ID NO: 5943 - protein, 11 aa, Severe acute respiratory syndrome coronavirus 2
  REGION 1..11: note = Table A: HLA-B*44:03H
SDVENPHLMGW

SEQ ID NO: 5944 - protein, 11 aa, Severe acute respiratory syndrome coronavirus 2
  REGION 1..11: note = Table A: HLA-B*44:03H HLA-A*30:02H
VENPHLMGWDY

SEQ ID NO: 5945 - protein, 11 aa, Severe acute respiratory syndrome coronavirus 2
  REGION 1..11: note = Table A: HLA-B*56:01H HLA-B*55:02M
RAMPNMLRIMA

SEQ ID NO: 5946 - protein, 11 aa, Severe acute respiratory syndrome coronavirus 2
  REGION 1..11: note = Table A: HLA-B*42:01H HLA-B*35:03H HLA-C*15:05H HLA-B*07:02M HLA-B*07:04M
MPNMLRIMASL

SEQ ID NO: 5947 - protein, 11 aa, Severe acute respiratory syndrome coronavirus 2
  REGION 1..11: note = Table A: HLA-A*74:01H HLA-A*03:02H HLA-A*11:02H
RIMASLVLARK

SEQ ID NO: 5948 - protein, 11 aa, Severe acute respiratory syndrome coronavirus 2
  REGION 1..11: note = Table A: HLA-A*11:02H HLA-A*34:02H
MVMCGGSLYVK

SEQ ID NO: 5949 - protein, 11 aa, Severe acute respiratory syndrome coronavirus 2
  REGION 1..11: note = Table A: HLA-B*38:02H
SLYVKPGGTSS

SEQ ID NO: 5950 - protein, 11 aa, Severe acute respiratory syndrome coronavirus 2
  REGION 1..11: note = Table A: HLA-A*36:01H HLA-A*29:02H HLA-A*30:02M HLA-B*15:01H
GTSSGDATTAY

SEQ ID NO: 5951 - protein, 11 aa, Severe acute respiratory syndrome coronavirus 2
  REGION 1..11: note = Table A: HLA-B*54:01H
YANSVFNICQA

SEQ ID NO: 5952 - protein, 11 aa, Severe acute respiratory syndrome coronavirus 2
  REGION 1..11: note = Table A: HLA-B*58:01H HLA-A*36:01H HLA-A*01:01H HLA-A*30:02H
STDGNKIADKY

SEQ ID NO: 5953 - protein, 11 aa, Severe acute respiratory syndrome coronavirus 2
  REGION 1..11: note = Table A: HLA-A*33:01M HLA-A*33:03H
DGNKIADKYVR

SEQ ID NO: 5954 - protein, 11 aa, Severe acute respiratory syndrome coronavirus 2
  REGION 1..11: note = Table A: HLA-A*30:02H
KYVRNLQHRLY

SEQ ID NO: 5955 - protein, 11 aa, Severe acute respiratory syndrome coronavirus 2
  REGION 1..11: note = Table A: HLA-B*44:05M HLA-B*40:02H
RDVDTDFVNEF

SEQ ID NO: 5956 - protein, 11 aa, Severe acute respiratory syndrome coronavirus 2
  REGION 1..11: note = Table A: HLA-A*36:01H HLA-A*01:01H
DVDTDFVNEFY

SEQ ID NO: 5957 - protein, 11 aa, Severe acute respiratory syndrome coronavirus 2
  REGION 1..11: note = Table A: HLA-A*36:01H HLA-A*01:01H
DTDFVNEFYAY

SEQ ID NO: 5958 - protein, 11 aa, Severe acute respiratory syndrome coronavirus 2
  REGION 1..11: note = Table A: HLA-A*24:02H HLA-A*23:01H
TYASQGLVASI

SEQ ID NO: 5959 - protein, 11 aa, Severe acute respiratory syndrome coronavirus 2
  REGION 1..11: note = Table A: HLA-A*34:02H
YASQGLVASIK

SEQ ID NO: 5960 - protein, 11 aa, Severe acute respiratory syndrome coronavirus 2
  REGION 1..11: note = Table A: HLA-A*30:02H HLA-B*57:03H
ASIKNFKSVLY

SEQ ID NO: 5961 - protein, 11 aa, Severe acute respiratory syndrome coronavirus 2
  REGION 1..11: note = Table A: HLA-A*30:02H HLA-C*02:02H
SIKNFKSVLYY

SEQ ID NO: 5962 - protein, 11 aa, Severe acute respiratory syndrome coronavirus 2
  REGION 1..11: note = Table A: HLA-B*58:02H HLA-B*57:03M
KSVLYYQNNVF

SEQ ID NO: 5963 - protein, 11 aa, Severe acute respiratory syndrome coronavirus 2
  REGION 1..11: note = Table A: HLA-B*27:02H
YQNNVFMSEAK

SEQ ID NO: 5964 - protein, 11 aa, Severe acute respiratory syndrome coronavirus 2
  REGION 1..11: note = Table A: HLA-A*36:01M HLA-A*01:01H HLA-A*30:02H
HTMLVKQGDDY

SEQ ID NO: 5965 - protein, 11 aa, Severe acute respiratory syndrome coronavirus 2
  REGION 1..11: note = Table A: HLA-A*36:01H
KQGDDYVYLPY

SEQ ID NO: 5966 - protein, 11 aa, Severe acute respiratory syndrome coronavirus 2
  REGION 1..11: note = Table A: HLA-A*74:01H HLA-A*66:01H
YVYLPYPDPSR

SEQ ID NO: 5967 - protein, 11 aa, Severe acute respiratory syndrome coronavirus 2
  REGION 1..11: note = Table A: HLA-C*14:03H HLA-A*24:02M HLA-A*24:07H HLA-A*23:01H
VYLPYPDPSRI

SEQ ID NO: 5968 - protein, 11 aa, Severe acute respiratory syndrome coronavirus 2
  REGION 1..11: note = Table A: HLA-A*02:11H HLA-A*02:07H
YLPYPDPSRIL

SEQ ID NO: 5969 - protein, 11 aa, Severe acute respiratory syndrome coronavirus 2
  REGION 1..11: note = Table A: HLA-B*56:01H HLA-B*53:01H HLA-B*55:02H HLA-C*15:05H HLA-B*35:01H HLA-B*35:07H HLA-B*54:01M
LPYPDPSRILG

SEQ ID NO: 5970 - protein, 11 aa, Severe acute respiratory syndrome coronavirus 2
  REGION 1..11: note = Table A: HLA-A*24:07H
PYPDPSRILGA

SEQ ID NO: 5971 - protein, 11 aa, Severe acute respiratory syndrome coronavirus 2
  REGION 1..11: note = Table A: HLA-A*02:11H HLA-A*02:07H
FVDDIVKTDGT

SEQ ID NO: 5972 - protein, 11 aa, Severe acute respiratory syndrome coronavirus 2
  REGION 1..11: note = Table A: HLA-A*36:01M HLA-C*04:03H HLA-B*57:03M
KTDGTLMIERF

SEQ ID NO: 5973 - protein, 11 aa, Severe acute respiratory syndrome coronavirus 2
  REGION 1..11: note = Table A: HLA-A*02:11H HLA-A*02:04H
GTLMIERFVSL

SEQ ID NO: 5974 - protein, 11 aa, Severe acute respiratory syndrome coronavirus 2
  REGION 1..11: note = Table A: HLA-B*27:02H HLA-B*38:02H HLA-B*39:01H
ERFVSLAIDAY

SEQ ID NO: 5975 - protein, 11 aa, Severe acute respiratory syndrome coronavirus 2
  REGION 1..11: note = Table A: HLA-A*03:02H HLA-A*11:01H HLA-B*27:02H
SLAIDAYPLTK

SEQ ID NO: 5976 - protein, 11 aa, Severe acute respiratory syndrome coronavirus 2
  REGION 1..11: note = Table A: HLA-A*29:02H HLA-B*53:01H HLA-B*55:02H HLA-C*15:05H HLA-B*35:01H HLA-B*35:08H HLA-B*35:07H HLA-B*38:02H HLA-B*54:01H HLA-B*15:02H HLA-B*07:05H HLA-B*15:11M
YPLTKHPNQEY

SEQ ID NO: 5977 - protein, 11 aa, Severe acute respiratory syndrome coronavirus 2
  REGION 1..11: note = Table A: HLA-B*38:02H
KHPNQEYADVF

SEQ ID NO: 5978 - protein, 11 aa, Severe acute respiratory syndrome coronavirus 2
  REGION 1..11: note = Table A: HLA-A*36:01H
YADVFHLYLQY

SEQ ID NO: 5979 - protein, 11 aa, Severe acute respiratory syndrome coronavirus 2
  REGION 1..11: note = Table A: HLA-A*74:01H HLA-A*02:11M HLA-A*30:02H HLA-A*02:04H HLA-A*02:05H HLA-A*02:08H HLA-A*02:02H HLA-C*08:01H HLA-B*38:02H HLA-B*13:01M
KLHDELTGHML

SEQ ID NO: 5980 - protein, 11 aa, Severe acute respiratory syndrome coronavirus 2
  REGION 1..11: note = Table A: HLA-A*11:303H HLA-A*74:01M HLA-A*03:02M HLA-A*11:01M HLA-A*11:02M HLA-A*33:03H HLA-A*68:01M HLA-A*34:01H HLA-A*34:02H HLA-C*07:27M HLA-A*31:01H HLA-A*66:01M
SVMLTNDNTSR

SEQ ID NO: 5981 - protein, 11 aa, Severe acute respiratory syndrome coronavirus 2
  REGION 1..11: note = Table A: HLA-A*29:02H HLA-A*30:02M HLA-B*15:01H
VMLTNDNTSRY

SEQ ID NO: 5982 - protein, 11 aa, Severe acute respiratory syndrome coronavirus 2
  REGION 1..11: note = Table A: HLA-A*02:11H HLA-C*08:01H
RYWEPEFYEAM

SEQ ID NO: 5983 - protein, 11 aa, Severe acute respiratory syndrome coronavirus 2
  REGION 1..11: note = Table A: HLA-B*45:01H HLA-B*40:01H HLA-B*40:02H HLA-B*50:01H
YEAMYTPHTVL

SEQ ID NO: 5984 - protein, 11 aa, Severe acute respiratory syndrome coronavirus 2
  REGION 1..11: note = Table A: HLA-A*02:11H HLA-A*02:02H HLA-A*02:03M
AMYTPHTVLQA

SEQ ID NO: 5985 - protein, 11 aa, Severe acute respiratory syndrome coronavirus 2
  REGION 1..11: note = Table A: HLA-A*68:02H
YTPHTVLQAVG

SEQ ID NO: 5986 - protein, 11 aa, Severe acute respiratory syndrome coronavirus 2
  REGION 1..11: note = Table A: HLA-B*56:01M HLA-B*55:02H HLA-B*55:01H HLA-B*54:01M
TPHTVLQAVGA

SEQ ID NO: 5987 - protein, 11 aa, Severe acute respiratory syndrome coronavirus 2
  REGION 1..11: note = Table A: HLA-B*07:04H
HVISTSHKLVL

SEQ ID NO: 5988 - protein, 11 aa, Severe acute respiratory syndrome coronavirus 2
  REGION 1..11: note = Table A: HLA-A*36:01H
GCDVTDVTQLY

SEQ ID NO: 5989 - protein, 11 aa, Severe acute respiratory syndrome coronavirus 2
  REGION 1..11: note = Table A: HLA-A*68:02H
DVTDVTQLYLG

SEQ ID NO: 5990 - protein, 11 aa, Severe acute respiratory syndrome coronavirus 2
  REGION 1..11: note = Table A: HLA-A*36:01H
VTQLYLGGMSY

SEQ ID NO: 5991 - protein, 11 aa, Severe acute respiratory syndrome coronavirus 2
  REGION 1..11: note = Table A: HLA-A*30:02H HLA-B*38:02H HLA-B*15:01H
TQLYLGGMSYY

SEQ ID NO: 5992 - protein, 11 aa, Severe acute respiratory syndrome coronavirus 2
  REGION 1..11: note = Table A: HLA-A*24:07H
SFPLCANGQVF

SEQ ID NO: 5993 - protein, 11 aa, Severe acute respiratory syndrome coronavirus 2
  REGION 1..11: note = Table A: HLA-A*68:02H HLA-A*02:05H HLA-A*02:08H
NVTDFNAIATC

SEQ ID NO: 5994 - protein, 11 aa, Severe acute respiratory syndrome coronavirus 2
  REGION 1..11: note = Table A: HLA-A*33:01M HLA-A*33:03M
DYILANTCTER

SEQ ID NO: 5995 - protein, 11 aa, Severe acute respiratory syndrome coronavirus 2
  REGION 1..11: note = Table A: HLA-A*74:01M HLA-A*30:01H
RLKLFAAETLK

SEQ ID NO: 5996 - protein, 11 aa, Severe acute respiratory syndrome coronavirus 2
  REGION 1..11: note = Table A: HLA-A*02:11H HLA-A*02:02H
KLFAAETLKAT

SEQ ID NO: 5997 - protein, 11 aa, Severe acute respiratory syndrome coronavirus 2
  REGION 1..11: note = Table A: HLA-B*44:02H HLA-B*44:05M HLA-B*44:03H
AETLKATEETF

SEQ ID NO: 5998 - protein, 11 aa, Severe acute respiratory syndrome coronavirus 2
  REGION 1..11: note = Table A: HLA-A*34:02M
ETLKATEETFK

SEQ ID NO: 5999 - protein, 11 aa, Severe acute respiratory syndrome coronavirus 2
  REGION 1..11: note = Table A: HLA-A*02:02H
TLKATEETFKL

SEQ ID NO: 6000 - protein, 11 aa, Severe acute respiratory syndrome coronavirus 2
  REGION 1..11: note = Table A: HLA-B*58:01H HLA-A*36:01M HLA-A*30:02H HLA-B*57:03H
KATEETFKLSY

SEQ ID NO: 6001 - protein, 11 aa, Severe acute respiratory syndrome coronavirus 2
  REGION 1..11: note = Table A: HLA-A*68:02H
ETFKLSYGIAT

SEQ ID NO: 6002 - protein, 11 aa, Severe acute respiratory syndrome coronavirus 2
  REGION 1..11: note = Table A: HLA-B*07:04H
TVREVLSDREL

SEQ ID NO: 6003 - protein, 11 aa, Severe acute respiratory syndrome coronavirus 2
  REGION 1..11: note = Table A: HLA-A*24:07H HLA-A*32:01M
VLSDRELHLSW

SEQ ID NO: 6004 - protein, 11 aa, Severe acute respiratory syndrome coronavirus 2
  REGION 1..11: note = Table A: HLA-A*33:01H HLA-A*33:03M HLA-A*68:01H HLA-A*34:01M HLA-A*34:02H HLA-A*66:01H
EVGKPRPPLNR

SEQ ID NO: 6005 - protein, 11 aa, Severe acute respiratory syndrome coronavirus 2
  REGION 1..11: note = Table A: HLA-B*55:01H HLA-B*07:02H HLA-B*07:04H
KPRPPLNRNYV

SEQ ID NO: 6006 - protein, 11 aa, Severe acute respiratory syndrome coronavirus 2
  REGION 1..11: note = Table A: HLA-A*24:07H
PRPPLNRNYVF

SEQ ID NO: 6007 - protein, 11 aa, Severe acute respiratory syndrome coronavirus 2
  REGION 1..11: note = Table A: HLA-B*15:03H
TKNSKVQIGEY

SEQ ID NO: 6008 - protein, 11 aa, Severe acute respiratory syndrome coronavirus 2
  REGION 1..11: note = Table A: HLA-B*57:03H
NSKVQIGEYTF

SEQ ID NO: 6009 - protein, 11 aa, Severe acute respiratory syndrome coronavirus 2
  REGION 1..11: note = Table A: HLA-A*03:02H HLA-A*11:01H HLA-A*11:02H HLA-A*36:01H
KVQIGEYTFEK

SEQ ID NO: 6010 - protein, 11 aa, Severe acute respiratory syndrome coronavirus 2
  REGION 1..11: note = Table A: HLA-A*36:01H
IGEYTFEKGDY

SEQ ID NO: 6011 - protein, 11 aa, Severe acute respiratory syndrome coronavirus 2
  REGION 1..11: note = Table A: HLA-B*49:01H
FEKGDYGDAVV

SEQ ID NO: 6012 - protein, 11 aa, Severe acute respiratory syndrome coronavirus 2
  REGION 1..11: note = Table A: HLA-A*74:01H HLA-A*36:01M HLA-A*31:01H
KGDYGDAVVYR

SEQ ID NO: 6013 - protein, 11 aa, Severe acute respiratory syndrome coronavirus 2
  REGION 1..11: note = Table A: HLA-A*25:01H HLA-A*26:01H HLA-B*35:01M HLA-B*35:07H HLA-B*38:02H HLA-B*15:02M HLA-B*07:05H HLA-B*15:11H
DAVVYRGTTTY

SEQ ID NO: 6014 - protein, 11 aa, Severe acute respiratory syndrome coronavirus 2
  REGION 1..11: note = Table A: HLA-A*11:01H HLA-A*11:02H HLA-A*34:02H
AVVYRGTTTYK

SEQ ID NO: 6015 - protein, 11 aa, Severe acute respiratory syndrome coronavirus 2
  REGION 1..11: note = Table A: HLA-A*02:02H
VVYRGTTTYKL

SEQ ID NO: 6016 - protein, 11 aa, Severe acute respiratory syndrome coronavirus 2
  REGION 1..11: note = Table A: HLA-A*02:11H HLA-B*57:03M
TTYKLNVGDYF

SEQ ID NO: 6017 - protein, 11 aa, Severe acute respiratory syndrome coronavirus 2
  REGION 1..11: note = Table A: HLA-A*68:02H HLA-B*57:03H
HTVMPLSAPTL

SEQ ID NO: 6018 - protein, 11 aa, Severe acute respiratory syndrome coronavirus 2
  REGION 1..11: note = Table A: HLA-A*02:11H HLA-A*68:02H
TVMPLSAPTLV

SEQ ID NO: 6019 - protein, 11 aa, Severe acute respiratory syndrome coronavirus 2
  REGION 1..11: note = Table A: HLA-B*56:01H HLA-B*55:02H
APTLVPQEHYV

SEQ ID NO: 6020 - protein, 11 aa, Severe acute respiratory syndrome coronavirus 2
  REGION 1..11: note = Table A: HLA-C*14:03H HLA-A*24:02H HLA-A*24:07H HLA-C*08:01H HLA-A*23:01H
LYPTLNISDEF

SEQ ID NO: 6021 - protein, 11 aa, Severe acute respiratory syndrome coronavirus 2
  REGION 1..11: note = Table A: HLA-A*33:03H HLA-B*27:02H
EFSSNVANYQK

SEQ ID NO: 6022 - protein, 11 aa, Severe acute respiratory syndrome coronavirus 2
  REGION 1..11: note = Table A: HLA-A*68:02M
FSSNVANYQKV

SEQ ID NO: 6023 - protein, 11 aa, Severe acute respiratory syndrome coronavirus 2
  REGION 1..11: note = Table A: HLA-A*03:02H HLA-A*11:01H HLA-A*34:02H
VANYQKVGMQK

SEQ ID NO: 6024 - protein, 11 aa, Severe acute respiratory syndrome coronavirus 2
  REGION 1..11: note = Table A: HLA-A*29:02H HLA-A*30:02M
ANYQKVGMQKY

SEQ ID NO: 6025 - protein, 11 aa, Severe acute respiratory syndrome coronavirus 2
  REGION 1..11: note = Table A: HLA-A*11:303M HLA-A*03:01M HLA-A*03:02H HLA-A*11:01H HLA-A*11:02H HLA-A*36:01H HLA-B*27:02H HLA-A*30:01H HLA-A*30:02H HLA-A*68:01H HLA-A*34:02H HLA-C*07:27M
STLQGPPGTGK

SEQ ID NO: 6026 - protein, 11 aa, Severe acute respiratory syndrome coronavirus 2
  REGION 1..11: note = Table A: HLA-A*24:07H HLA-B*57:03H
QGPPGTGKSHF

SEQ ID NO: 6027 - protein, 11 aa, Severe acute respiratory syndrome coronavirus 2
  REGION 1..11: note = Table A: HLA-B*58:01H HLA-B*58:02H HLA-A*36:01M HLA-A*30:02M HLA-B*57:03H
KSHFAIGLALY

SEQ ID NO: 6028 - protein, 11 aa, Severe acute respiratory syndrome coronavirus 2
  REGION 1..11: note = Table A: HLA-A*29:02H HLA-B*38:02H
SHFAIGLALYY

SEQ ID NO: 6029 - protein, 11 aa, Severe acute respiratory syndrome coronavirus 2
  REGION 1..11: note = Table A: HLA-B*46:01H HLA-A*29:02H HLA-A*30:02M HLA-B*38:02H HLA-A*32:01H HLA-B*15:01H HLA-B*15:02H HLA-B*15:03H
ALYYPSARIVY

SEQ ID NO: 6030 - protein, 11 aa, Severe acute respiratory syndrome coronavirus 2
  REGION 1..11: note = Table A: HLA-B*56:01H HLA-B*55:02H HLA-B*54:01H
YPSARIVYTAC

SEQ ID NO: 6031 - protein, 11 aa, Severe acute respiratory syndrome coronavirus 2
  REGION 1..11: note = Table A: HLA-B*35:03H HLA-C*08:01H HLA-B*38:02H
TACSHAAVDAL

SEQ ID NO: 6032 - protein, 11 aa, Severe acute respiratory syndrome coronavirus 2
  REGION 1..11: note = Table A: HLA-A*23:01H
KYLPIDKCSRI

SEQ ID NO: 6033 - protein, 11 aa, Severe acute respiratory syndrome coronavirus 2
  REGION 1..11: note = Table A: HLA-A*30:02M
KFKVNSTLEQY

SEQ ID NO: 6034 - protein, 11 aa, Severe acute respiratory syndrome coronavirus 2
  REGION 1..11: note = Table A: HLA-B*58:01H HLA-A*32:01H HLA-B*57:03H
KVNSTLEQYVF

SEQ ID NO: 6035 - protein, 11 aa, Severe acute respiratory syndrome coronavirus 2
  REGION 1..11: note = Table A: HLA-A*02:07H
ALPETTADIVV

SEQ ID NO: 6036 - protein, 11 aa, Severe acute respiratory syndrome coronavirus 2
  REGION 1..11: note = Table A: HLA-B*53:01H HLA-B*35:03M HLA-B*35:01M HLA-B*35:02H HLA-B*35:08M HLA-B*35:07H HLA-B*35:12M
LPETTADIVVF

SEQ ID NO: 6037 - protein, 11 aa, Severe acute respiratory syndrome coronavirus 2
  REGION 1..11: note = Table A: HLA-A*68:02M HLA-C*08:01H HLA-B*38:02H
TTADIVVFDEI

SEQ ID NO: 6038 - protein, 11 aa, Severe acute respiratory syndrome coronavirus 2
  REGION 1..11: note = Table A: HLA-A*29:01H HLA-A*29:02H
VFDEISMATNY

SEQ ID NO: 6039 - protein, 11 aa, Severe acute respiratory syndrome coronavirus 2
  REGION 1..11: note = Table A: HLA-A*33:01M HLA-A*33:03M HLA-A*68:01M HLA-A*34:01H HLA-A*66:01H
TNYDLSVVNAR

SEQ ID NO: 6040 - protein, 11 aa, Severe acute respiratory syndrome coronavirus 2
  REGION 1..11: note = Table A: HLA-C*04:01H HLA-C*04:03H
NYDLSVVNARL

SEQ ID NO: 6041 - protein, 11 aa, Severe acute respiratory syndrome coronavirus 2
  REGION 1..11: note = Table A: HLA-A*33:01H
YDLSVVNARLR

SEQ ID NO: 6042 - protein, 11 aa, Severe acute respiratory syndrome coronavirus 2
  REGION 1..11: note = Table A: HLA-C*14:03H HLA-A*24:02H HLA-A*24:07M HLA-C*08:01H HLA-C*08:03H HLA-A*23:01M HLA-B*38:02H
HYVYIGDPAQL

SEQ ID NO: 6043 - protein, 11 aa, Severe acute respiratory syndrome coronavirus 2
  REGION 1..11: note = Table A: HLA-A*36:01M HLA-A*33:03H HLA-C*03:03H HLA-A*68:01H
IGDPAQLPAPR

SEQ ID NO: 6044 - protein, 11 aa, Severe acute respiratory syndrome coronavirus 2
  REGION 1..11: note = Table A: HLA-C*15:05H HLA-B*07:02H HLA-B*07:04M
APRTLLTKGTL

SEQ ID NO: 6045 - protein, 11 aa, Severe acute respiratory syndrome coronavirus 2
  REGION 1..11: note = Table A: HLA-B*57:01H HLA-A*68:02H HLA-B*57:03M
LTKGTLEPEYF

SEQ ID NO: 6046 - protein, 11 aa, Severe acute respiratory syndrome coronavirus 2
  REGION 1..11: note = Table A: HLA-A*02:11M HLA-A*68:02H HLA-A*02:04M HLA-A*02:06M HLA-A*02:07H HLA-A*02:01M HLA-C*08:03H HLA-B*38:02H
GTLEPEYFNSV

SEQ ID NO: 6047 - protein, 11 aa, Severe acute respiratory syndrome coronavirus 2
  REGION 1..11: note = Table A: HLA-B*57:03H HLA-B*13:01M
RLMKTIGPDMF

SEQ ID NO: 6048 - protein, 11 aa, Severe acute respiratory syndrome coronavirus 2
  REGION 1..11: note = Table A: HLA-A*02:11M HLA-A*02:02M
LMKTIGPDMFL

SEQ ID NO: 6049 - protein, 11 aa, Severe acute respiratory syndrome coronavirus 2
  REGION 1..11: note = Table A: HLA-A*02:08H
KTIGPDMFLGT

SEQ ID NO: 6050 - protein, 11 aa, Severe acute respiratory syndrome coronavirus 2
  REGION 1..11: note = Table A: HLA-B*56:01M HLA-B*55:02M HLA-B*54:01H
CPAEIVDTVSA

SEQ ID NO: 6051 - protein, 11 aa, Severe acute respiratory syndrome coronavirus 2
  REGION 1..11: note = Table A: HLA-B*49:01H
AEIVDTVSALV

SEQ ID NO: 6052 - protein, 11 aa, Severe acute respiratory syndrome coronavirus 2
  REGION 1..11: note = Table A: HLA-B*38:02H
EIVDTVSALVY

SEQ ID NO: 6053 - protein, 11 aa, Severe acute respiratory syndrome coronavirus 2
  REGION 1..11: note = Table A: HLA-A*68:02H HLA-A*02:02H
TVSALVYDNKL

SEQ ID NO: 6054 - protein, 11 aa, Severe acute respiratory syndrome coronavirus 2
  REGION 1..11: note = Table A: HLA-A*11:02H HLA-A*34:02H
LVYDNKLKAHK

SEQ ID NO: 6055 - protein, 11 aa, Severe acute respiratory syndrome coronavirus 2
  REGION 1..11: note = Table A: HLA-A*74:01M HLA-A*03:02H HLA-A*11:01H HLA-A*11:02H HLA-B*57:01H HLA-A*33:01H HLA-A*33:03M HLA-A*26:03H HLA-A*30:02H HLA-A*68:01H HLA-A*34:01H HLA-A*34:02H HLA-A*31:01M HLA-A*66:01M
ITHDVSSAINR

SEQ ID NO: 6056 - protein, 11 aa, Severe acute respiratory syndrome coronavirus 2
  REGION 1..11: note = Table A: HLA-B*38:01H HLA-B*38:02M
THDVSSAINRP

SEQ ID NO: 6057 - protein, 11 aa, Severe acute respiratory syndrome coronavirus 2
  REGION 1..11: note = Table A: HLA-A*68:02H
DVSSAINRPQI

SEQ ID NO: 6058 - protein, 11 aa, Severe acute respiratory syndrome coronavirus 2
  REGION 1..11: note = Table A: HLA-A*74:01H HLA-A*31:01H
AINRPQIGVVR

SEQ ID NO: 6059 - protein, 11 aa, Severe acute respiratory syndrome coronavirus 2
  REGION 1..11: note = Table A: HLA-B*42:01H HLA-B*07:02H HLA-B*07:04H
RPQIGVVREFL

SEQ ID NO: 6060 - protein, 11 aa, Severe acute respiratory syndrome coronavirus 2
  REGION 1..11: note = Table A: HLA-A*68:02H HLA-A*02:05H HLA-A*02:08H HLA-A*02:02H HLA-B*38:02H
FISPYNSQNAV

SEQ ID NO: 6061 - protein, 11 aa, Severe acute respiratory syndrome coronavirus 2
  REGION 1..11: note = Table A: HLA-B*55:02H HLA-C*15:05H
SPYNSQNAVAS

SEQ ID NO: 6062 - protein, 11 aa, Severe acute respiratory syndrome coronavirus 2
  REGION 1..11: note = Table A: HLA-A*26:01H
QTVDSSQGSEY

SEQ ID NO: 6063 - protein, 11 aa, Severe acute respiratory syndrome coronavirus 2
  REGION 1..11: note = Table A: HLA-B*45:01M HLA-B*40:06H HLA-B*49:01H HLA-B*50:01M
SEYDYVIFTQT

SEQ ID NO: 6064 - protein, 11 aa, Severe acute respiratory syndrome coronavirus 2
  REGION 1..11: note = Table A: HLA-A*68:02H HLA-A*02:05H HLA-A*02:08H
YVIFTQTTETA

SEQ ID NO: 6065 - protein, 11 aa, Severe acute respiratory syndrome coronavirus 2
  REGION 1..11: note = Table A: HLA-B*46:01H
VIFTQTTETAH

SEQ ID NO: 6066 - protein, 11 aa, Severe acute respiratory syndrome coronavirus 2
  REGION 1..11: note = Table A: HLA-A*74:01M HLA-A*33:01M HLA-A*33:03M HLA-A*68:01M HLA-A*34:01H HLA-A*34:02H HLA-A*31:01H HLA-A*66:01H
NVNRFNVAITR

SEQ ID NO: 6067 - protein, 11 aa, Severe acute respiratory syndrome coronavirus 2
  REGION 1..11: note = Table A: HLA-A*02:11M HLA-A*02:02H
IMSDRDLYDKL

SEQ ID NO: 6068 - protein, 11 aa, Severe acute respiratory syndrome coronavirus 2
  REGION 1..11: note = Table A: HLA-A*25:01H HLA-A*26:02H HLA-B*08:01H HLA-A*68:02H HLA-B*14:02H HLA-B*38:02H
DLYDKLQFTSL

SEQ ID NO: 6069 - protein, 11 aa, Severe acute respiratory syndrome coronavirus 2
  REGION 1..11: note = Table A: HLA-A*74:01H HLA-A*03:02H HLA-A*36:01H HLA-A*31:01H
KLQFTSLEIPR

SEQ ID NO: 6070 - protein, 11 aa, Severe acute respiratory syndrome coronavirus 2
  REGION 1..11: note = Table A: HLA-B*40:02H
LEIPRRNVATL

SEQ ID NO: 6071 - protein, 11 aa, Severe acute respiratory syndrome coronavirus 2
  REGION 1..11: note = Table A: HLA-B*56:01H HLA-B*55:02H HLA-B*55:01H
IPRRNVATLQA

SEQ ID NO: 6072 - protein, 11 aa, Severe acute respiratory syndrome coronavirus 2
  REGION 1..11: note = Table A: HLA-A*11:01H HLA-A*02:08H
ATLQAENVTGL

SEQ ID NO: 6073 - protein, 11 aa, Severe acute respiratory syndrome coronavirus 2
  REGION 1..11: note = Table A: HLA-B*38:02H
TLQAENVTGLF

SEQ ID NO: 6074 - protein, 11 aa, Severe acute respiratory syndrome coronavirus 2
  REGION 1..11: note = Table A: HLA-A*03:01M HLA-A*03:02M HLA-A*11:01M HLA-A*11:02M HLA-A*36:01H HLA-B*27:02H HLA-A*34:02H HLA-C*07:27H
LQAENVTGLFK

SEQ ID NO: 6075 - protein, 11 aa, Severe acute respiratory syndrome coronavirus 2
  REGION 1..11: note = Table A: HLA-A*02:05H HLA-A*02:08H
KVITGLHPTQA

SEQ ID NO: 6076 - protein, 11 aa, Severe acute respiratory syndrome coronavirus 2
  REGION 1..11: note = Table A: HLA-A*02:11H HLA-A*02:02M HLA-A*02:03H HLA-B*38:02H
GLHPTQAPTHL

SEQ ID NO: 6077 - protein, 11 aa, Severe acute respiratory syndrome coronavirus 2
  REGION 1..11: note = Table A: HLA-B*56:01H HLA-B*55:02M HLA-B*35:03H HLA-C*15:05H HLA-B*54:01H
HPTQAPTHLSV

SEQ ID NO: 6078 - protein, 11 aa, Severe acute respiratory syndrome coronavirus 2
  REGION 1..11: note = Table A: HLA-B*56:01H HLA-B*53:01H HLA-B*35:01H HLA-B*35:07H HLA-B*07:05H
APTHLSVDTKF

SEQ ID NO: 6079 - protein, 11 aa, Severe acute respiratory syndrome coronavirus 2
  REGION 1..11: note = Table A: HLA-A*26:01H
DIPGIPKDMTY

SEQ ID NO: 6080 - protein, 11 aa, Severe acute respiratory syndrome coronavirus 2
  REGION 1..11: note = Table A: HLA-A*02:11H HLA-A*02:02M
SMMGFKMNYQV

SEQ ID NO: 6081 - protein, 11 aa, Severe acute respiratory syndrome coronavirus 2
  REGION 1..11: note = Table A: HLA-B*13:02H
YQVNGYPNMFI

SEQ ID NO: 6082 - protein, 11 aa, Severe acute respiratory syndrome coronavirus 2
  REGION 1..11: note = Table A: HLA-B*56:01M HLA-B*55:02M HLA-B*55:01H HLA-B*54:01M
YPNMFITREEA

SEQ ID NO: 6083 - protein, 11 aa, Severe acute respiratory syndrome coronavirus 2
  REGION 1..11: note = Table A: HLA-A*02:11H HLA-A*02:06H HLA-A*02:02H
FITREEAIRHV

SEQ ID NO: 6084 - protein, 11 aa, Severe acute respiratory syndrome coronavirus 2
  REGION 1..11: note = Table A: HLA-A*74:01M HLA-A*33:03H HLA-A*31:01H
ITREEAIRHVR

SEQ ID NO: 6085 - protein, 11 aa, Severe acute respiratory syndrome coronavirus 2
  REGION 1..11: note = Table A: HLA-B*38:02H HLA-B*39:01H
TREAVGTNLPL

SEQ ID NO: 6086 - protein, 11 aa, Severe acute respiratory syndrome coronavirus 2
  REGION 1..11: note = Table A: HLA-A*68:01H HLA-A*68:02H HLA-A*34:01H HLA-A*34:02H
EAVGTNLPLQL

SEQ ID NO: 6087 - protein, 11 aa, Severe acute respiratory syndrome coronavirus 2
  REGION 1..11: note = Table A: HLA-B*54:01H
LPLQLGFSTGV

SEQ ID NO: 6088 - protein, 11 aa, Severe acute respiratory syndrome coronavirus 2
  REGION 1..11: note = Table A: HLA-A*30:02H
GVNLVAVPTGY

SEQ ID NO: 6089 - protein, 11 aa, Severe acute respiratory syndrome coronavirus 2
  REGION 1..11: note = Table A: HLA-C*08:01H
VAVPTGYVDTP

SEQ ID NO: 6090 - protein, 11 aa, Severe acute respiratory syndrome coronavirus 2
  REGION 1..11: note = Table A: HLA-B*27:02H HLA-A*23:01H HLA-B*39:01H
GYVDTPNNTDF

SEQ ID NO: 6091 - protein, 11 aa, Severe acute respiratory syndrome coronavirus 2
  REGION 1..11: note = Table A: HLA-A*26:01H HLA-A*68:01H HLA-A*68:02H
DTPNNTDFSRV

SEQ ID NO: 6092 - protein, 11 aa, Severe acute respiratory syndrome coronavirus 2
  REGION 1..11: note = Table A: HLA-B*58:01H HLA-B*57:01H HLA-B*15:01H HLA-B*57:03M
VSAKPPPGDQF

SEQ ID NO: 6093 - protein, 11 aa, Severe acute respiratory syndrome coronavirus 2
  REGION 1..11: note = Table A: HLA-B*07:04H
KPPPGDQFKHL

SEQ ID NO: 6094 - protein, 11 aa, Severe acute respiratory syndrome coronavirus 2
  REGION 1..11: note = Table A: HLA-B*07:04H
LPWNVVRIKIV

SEQ ID NO: 6095 - protein, 11 aa, Severe acute respiratory syndrome coronavirus 2
  REGION 1..11: note = Table A: HLA-B*38:02H HLA-A*32:01H HLA-B*15:01H HLA-B*15:02H
TLKNLSDRVVF

SEQ ID NO: 6096 - protein, 11 aa, Severe acute respiratory syndrome coronavirus 2
  REGION 1..11: note = Table A: HLA-A*24:07H
NLSDRVVFVLW

SEQ ID NO: 6097 - protein, 11 aa, Severe acute respiratory syndrome coronavirus 2
  REGION 1..11: note = Table A: HLA-B*57:03H
RVVFVLWAHGF

SEQ ID NO: 6098 - protein, 11 aa, Severe acute respiratory syndrome coronavirus 2
  REGION 1..11: note = Table A: HLA-B*38:02H
AHGFELTSMKY

SEQ ID NO: 6099 - protein, 11 aa, Severe acute respiratory syndrome coronavirus 2
  REGION 1..11: note = Table A: HLA-A*36:01H HLA-A*30:02H
ATCFSTASDTY

SEQ ID NO: 6100 - protein, 11 aa, Severe acute respiratory syndrome coronavirus 2
  REGION 1..11: note = Table A: HLA-B*38:02H
WHHSIGFDYVY

SEQ ID NO: 6101 - protein, 11 aa, Severe acute respiratory syndrome coronavirus 2
  REGION 1..11: note = Table A: HLA-A*24:07H
PFMIDVQQWGF

SEQ ID NO: 6102 - protein, 11 aa, Severe acute respiratory syndrome coronavirus 2
  REGION 1..11: note = Table A: HLA-A*36:01H HLA-A*30:02M HLA-B*35:01H
TGNLQSNHDLY

SEQ ID NO: 6103 - protein, 11 aa, Severe acute respiratory syndrome coronavirus 2
  REGION 1..11: note = Table A: HLA-B*35:03H HLA-B*35:02H
NAHVASCDAIM

SEQ ID NO: 6104 - protein, 11 aa, Severe acute respiratory syndrome coronavirus 2
  REGION 1..11: note = Table A: HLA-A*74:01H HLA-A*33:03H HLA-A*26:03H HLA-A*68:01M HLA-A*34:01M HLA-A*34:02H HLA-A*66:01M
HVASCDAIMTR

SEQ ID NO: 6105 - protein, 11 aa, Severe acute respiratory syndrome coronavirus 2
  REGION 1..11: note = Table A: HLA-A*02:07H HLA-C*08:01H
TIEYPIIGDEL

SEQ ID NO: 6106 - protein, 11 aa, Severe acute respiratory syndrome coronavirus 2
  REGION 1..11: note = Table A: HLA-A*24:07H
EYPIIGDELKI

SEQ ID NO: 6107 - protein, 11 aa, Severe acute respiratory syndrome coronavirus 2
  REGION 1..11: note = Table A: HLA-A*34:02H
MVVKAALLADK

SEQ ID NO: 6108 - protein, 11 aa, Severe acute respiratory syndrome coronavirus 2
  REGION 1..11: note = Table A: HLA-A*34:01H HLA-A*34:02H HLA-A*66:01H
FPVLHDIGNPK

SEQ ID NO: 6109 - protein, 11 aa, Severe acute respiratory syndrome coronavirus 2
  REGION 1..11: note = Table A: HLA-A*02:11H HLA-A*02:02H HLA-A*02:03H
VLHDIGNPKAI

SEQ ID NO: 6110 - protein, 11 aa, Severe acute respiratory syndrome coronavirus 2
  REGION 1..11: note = Table A: HLA-A*30:02H
AYKIEELFYSY

SEQ ID NO: 6111 - protein, 11 aa, Severe acute respiratory syndrome coronavirus 2
  REGION 1..11: note = Table A: HLA-A*29:02H HLA-A*24:02H HLA-A*24:07M HLA-C*08:01H HLA-A*23:01H
FYSYATHSDKF

SEQ ID NO: 6112 - protein, 11 aa, Severe acute respiratory syndrome coronavirus 2
  REGION 1..11: note = Table A: HLA-A*33:01H HLA-A*33:03H
DRYPANSIVCR

SEQ ID NO: 6113 - protein, 11 aa, Severe acute respiratory syndrome coronavirus 2
  REGION 1..11: note = Table A: HLA-A*24:02H HLA-A*24:07M HLA-A*23:01H
RYPANSIVCRF

SEQ ID NO: 6114 - protein, 11 aa, Severe acute respiratory syndrome coronavirus 2
  REGION 1..11: note = Table A: HLA-A*03:02H
GCDGGSLYVNK

SEQ ID NO: 6115 - protein, 11 aa, Severe acute respiratory syndrome coronavirus 2
  REGION 1..11: note = Table A: HLA-B*38:02M HLA-B*15:10H
FHTPAFDKSAF

SEQ ID NO: 6116 - protein, 11 aa, Severe acute respiratory syndrome coronavirus 2
  REGION 1..11: note = Table A: HLA-A*02:11H HLA-A*68:02M HLA-A*02:05H HLA-A*02:08H
HTPAFDKSAFV

SEQ ID NO: 6117 - protein, 11 aa, Severe acute respiratory syndrome coronavirus 2
  REGION 1..11: note = Table A: HLA-C*08:01H
PAFDKSAFVNL

SEQ ID NO: 6118 - protein, 11 aa, Severe acute respiratory syndrome coronavirus 2
  REGION 1..11: note = Table A: HLA-A*24:07H
AFVNLKQLPFF

SEQ ID NO: 6119 - protein, 11 aa, Severe acute respiratory syndrome coronavirus 2
  REGION 1..11: note = Table A: HLA-A*29:02H
VNLKQLPFFYY

SEQ ID NO: 6120 - protein, 11 aa, Severe acute respiratory syndrome coronavirus 2
  REGION 1..11: note = Table A: HLA-B*56:01H HLA-B*55:02H HLA-C*15:05H HLA-B*55:01H HLA-B*07:04H
SPCESHGKQVV

SEQ ID NO: 6121 - protein, 11 aa, Severe acute respiratory syndrome coronavirus 2
  REGION 1..11: note = Table A: HLA-A*03:02M HLA-A*11:01M HLA-A*11:02M HLA-A*36:01H HLA-A*30:02H HLA-A*34:02H
VVSDIDYVPLK

SEQ ID NO: 6122 - protein, 11 aa, Severe acute respiratory syndrome coronavirus 2
  REGION 1..11: note = Table A: HLA-B*38:02M
RHHANEYRLYL

SEQ ID NO: 6123 - protein, 11 aa, Severe acute respiratory syndrome coronavirus 2
  REGION 1..11: note = Table A: HLA-A*02:11H HLA-B*13:01H HLA-B*13:02H
RLYLDAYNMMI

SEQ ID NO: 6124 - protein, 11 aa, Severe acute respiratory syndrome coronavirus 2
  REGION 1..11: note = Table A: HLA-A*30:02H
SLWVYKQFDTY

SEQ ID NO: 6125 - protein, 11 aa, Severe acute respiratory syndrome coronavirus 2
  REGION 1..11: note = Table A: HLA-A*24:02H HLA-A*24:07M HLA-A*23:01M
VYKQFDTYNLW

SEQ ID NO: 6126 - protein, 11 aa, Severe acute respiratory syndrome coronavirus 2
  REGION 1..11: note = Table A: HLA-A*33:01M HLA-A*66:01M
DTYNLWNTFTR

SEQ ID NO: 6127 - protein, 11 aa, Severe acute respiratory syndrome coronavirus 2
  REGION 1..11: note = Table A: HLA-B*27:05H HLA-B*27:02H HLA-B*38:01H HLA-B*38:02M HLA-B*39:01H
TRLQSLENVAF

SEQ ID NO: 6128 - protein, 11 aa, Severe acute respiratory syndrome coronavirus 2
  REGION 1..11: note = Table A: HLA-B*38:02H
QSLENVAFNVV

SEQ ID NO: 6129 - protein, 11 aa, Severe acute respiratory syndrome coronavirus 2
  REGION 1..11: note = Table A: HLA-C*12:02H HLA-B*57:03H HLA-C*02:02H
VAFNVVNKGHF

SEQ ID NO: 6130 - protein, 11 aa, Severe acute respiratory syndrome coronavirus 2
  REGION 1..11: note = Table A: HLA-B*38:02H HLA-B*39:01H HLA-B*15:10H
GHFDGQQGEVP

SEQ ID NO: 6131 - protein, 11 aa, Severe acute respiratory syndrome coronavirus 2
  REGION 1..11: note = Table A: HLA-A*68:02H
EVPVSIINNTV

SEQ ID NO: 6132 - protein, 11 aa, Severe acute respiratory syndrome coronavirus 2
  REGION 1..11: note = Table A: HLA-B*55:02H HLA-B*35:01H HLA-B*35:07H HLA-B*54:01H HLA-B*15:02H HLA-B*07:05H HLA-B*15:11M
VPVSIINNTVY

SEQ ID NO: 6133 - protein, 11 aa, Severe acute respiratory syndrome coronavirus 2
  REGION 1..11: note = Table A: HLA-A*68:02H
TVYTKVDGVDV

SEQ ID NO: 6134 - protein, 11 aa, Severe acute respiratory syndrome coronavirus 2
  REGION 1..11: note = Table A: HLA-B*57:03H
YTKVDGVDVEL

SEQ ID NO: 6135 - protein, 11 aa, Severe acute respiratory syndrome coronavirus 2
  REGION 1..11: note = Table A: HLA-B*38:01H HLA-B*38:02H
TKVDGVDVELF

SEQ ID NO: 6136 - protein, 11 aa, Severe acute respiratory syndrome coronavirus 2
  REGION 1..11: note = Table A: HLA-B*27:02H
DGVDVELFENK

SEQ ID NO: 6137 - protein, 11 aa, Severe acute respiratory syndrome coronavirus 2
  REGION 1..11: note = Table A: HLA-A*02:04H HLA-B*57:03H
TTLPVNVAFEL

SEQ ID NO: 6138 - protein, 11 aa, Severe acute respiratory syndrome coronavirus 2
  REGION 1..11: note = Table A: HLA-A*24:07H
TLPVNVAFELW

SEQ ID NO: 6139 - protein, 11 aa, Severe acute respiratory syndrome coronavirus 2
  REGION 1..11: note = Table A: HLA-A*36:01H HLA-A*68:02H
IAANTVIWDYK

SEQ ID NO: 6140 - protein, 11 aa, Severe acute respiratory syndrome coronavirus 2
  REGION 1..11: note = Table A: HLA-A*02:11H
VIWDYKRDAPA

SEQ ID NO: 6141 - protein, 11 aa, Severe acute respiratory syndrome coronavirus 2
  REGION 1..11: note = Table A: HLA-A*68:02H HLA-B*51:01H
DAPAHISTIGV

SEQ ID NO: 6142 - protein, 11 aa, Severe acute respiratory syndrome coronavirus 2
  REGION 1..11: note = Table A: HLA-B*56:01M HLA-B*55:02M HLA-C*15:05H HLA-B*55:01H HLA-B*54:01H HLA-B*07:02H
APAHISTIGVC

SEQ ID NO: 6143 - protein, 11 aa, Severe acute respiratory syndrome coronavirus 2
  REGION 1..11: note = Table A: HLA-B*38:02H
AHISTIGVCSM

SEQ ID NO: 6144 - protein, 11 aa, Severe acute respiratory syndrome coronavirus 2
  REGION 1..11: note = Table A: HLA-A*03:02M HLA-A*11:01H HLA-A*11:02H
GVCSMTDIAKK

SEQ ID NO: 6145 - protein, 11 aa, Severe acute respiratory syndrome coronavirus 2
  REGION 1..11: note = Table A: HLA-B*27:05H HLA-B*27:02H
GRVDGQVDLFR

SEQ ID NO: 6146 - protein, 11 aa, Severe acute respiratory syndrome coronavirus 2
  REGION 1..11: note = Table A: HLA-A*11:303H HLA-A*02:11M HLA-A*02:04M HLA-A*02:05H HLA-A*02:06H HLA-A*02:08M HLA-A*02:01M HLA-A*02:02H HLA-A*02:03M HLA-B*38:02H
VLITEGSVKGL

SEQ ID NO: 6147 - protein, 11 aa, Severe acute respiratory syndrome coronavirus 2
  REGION 1..11: note = Table A: HLA-A*02:03H
GLQPSVGPKQA

SEQ ID NO: 6148 - protein, 11 aa, Severe acute respiratory syndrome coronavirus 2
  REGION 1..11: note = Table A: HLA-B*42:01H HLA-C*15:05M HLA-B*07:02M HLA-B*07:04M HLA-B*07:05H
QPSVGPKQASL

SEQ ID NO: 6149 - protein, 11 aa, Severe acute respiratory syndrome coronavirus 2
  REGION 1..11: note = Table A: HLA-B*13:02H
KQASLNGVTLI

SEQ ID NO: 6150 - protein, 11 aa, Severe acute respiratory syndrome coronavirus 2
  REGION 1..11: note = Table A: HLA-A*02:02H
SLNGVTLIGEA

SEQ ID NO: 6151 - protein, 11 aa, Severe acute respiratory syndrome coronavirus 2
  REGION 1..11: note = Table A: HLA-B*38:02M HLA-B*15:01M HLA-B*15:02H HLA-B*13:01H
TLIGEAVKTQF

SEQ ID NO: 6152 - protein, 11 aa, Severe acute respiratory syndrome coronavirus 2
  REGION 1..11: note = Table A: HLA-A*36:01H
IGEAVKTQFNY

SEQ ID NO: 6153 - protein, 11 aa, Severe acute respiratory syndrome coronavirus 2
  REGION 1..11: note = Table A: HLA-B*44:02H HLA-B*44:03H
GEAVKTQFNYY

SEQ ID NO: 6154 - protein, 11 aa, Severe acute respiratory syndrome coronavirus 2
  REGION 1..11: note = Table A: HLA-A*34:02H
EAVKTQFNYYK

SEQ ID NO: 6155 - protein, 11 aa, Severe acute respiratory syndrome coronavirus 2
  REGION 1..11: note = Table A: HLA-B*35:01H
DGVVQQLPETY

SEQ ID NO: 6156 - protein, 11 aa, Severe acute respiratory syndrome coronavirus 2
  REGION 1..11: note = Table A: HLA-A*74:01H
QLPETYFTQSR

SEQ ID NO: 6157 - protein, 11 aa, Severe acute respiratory syndrome coronavirus 2
  REGION 1..11: note = Table A: HLA-A*24:07M
YFTQSRNLQEF

SEQ ID NO: 6158 - protein, 11 aa, Severe acute respiratory syndrome coronavirus 2
  REGION 1..11: note = Table A: HLA-A*33:03H
QSRNLQEFKPR

SEQ ID NO: 6159 - protein, 11 aa, Severe acute respiratory syndrome coronavirus 2
  REGION 1..11: note = Table A: HLA-B*49:01H
QEFKPRSQMEI

SEQ ID NO: 6160 - protein, 11 aa, Severe acute respiratory syndrome coronavirus 2
  REGION 1..11: note = Table A: HLA-C*15:05H HLA-B*07:04H
KPRSQMEIDFL

SEQ ID NO: 6161 - protein, 11 aa, Severe acute respiratory syndrome coronavirus 2
  REGION 1..11: note = Table A: HLA-A*02:11M HLA-A*02:07H HLA-A*02:02H
AMDEFIERYKL

SEQ ID NO: 6162 - protein, 11 aa, Severe acute respiratory syndrome coronavirus 2
  REGION 1..11: note = Table A: HLA-A*02:11H HLA-A*02:05H HLA-A*02:08H HLA-C*08:01H
IVYGDFSHSQL

SEQ ID NO: 6163 - protein, 11 aa, Severe acute respiratory syndrome coronavirus 2
  REGION 1..11: note = Table A: HLA-A*24:07H
VYGDFSHSQLG

SEQ ID NO: 6164 - protein, 11 aa, Severe acute respiratory syndrome coronavirus 2
  REGION 1..11: note = Table A: HLA-B*38:02H HLA-B*57:03H
FSHSQLGGLHL

SEQ ID NO: 6165 - protein, 11 aa, Severe acute respiratory syndrome coronavirus 2
  REGION 1..11: note = Table A: HLA-B*38:01H HLA-B*38:02M
SHSQLGGLHLL

SEQ ID NO: 6166 - protein, 11 aa, Severe acute respiratory syndrome coronavirus 2
  REGION 1..11: note = Table A: HLA-A*02:02H
QLGGLHLLIGL

SEQ ID NO: 6167 - protein, 11 aa, Severe acute respiratory syndrome coronavirus 2
  REGION 1..11: note = Table A: HLA-B*35:03H HLA-B*35:07H
SPFELEDFIPM

SEQ ID NO: 6168 - protein, 11 aa, Severe acute respiratory syndrome coronavirus 2
  REGION 1..11: note = Table A: HLA-B*42:01H HLA-B*53:01M HLA-B*35:03H HLA-C*15:05H HLA-B*35:01H HLA-A*24:07H HLA-B*35:07M HLA-B*07:04H
IPMDSTVKNYF

SEQ ID NO: 6169 - protein, 11 aa, Severe acute respiratory syndrome coronavirus 2
  REGION 1..11: note = Table A: HLA-A*11:303H HLA-A*03:02H HLA-A*36:01H HLA-A*26:03H HLA-C*03:03H HLA-B*27:02H HLA-A*68:01H HLA-A*34:01H HLA-A*34:02M HLA-A*66:01H
FITDAQTGSSK

SEQ ID NO: 6170 - protein, 11 aa, Severe acute respiratory syndrome coronavirus 2
  REGION 1..11: note = Table A: HLA-A*68:02H
SVIDLLLDDFV

SEQ ID NO: 6171 - protein, 11 aa, Severe acute respiratory syndrome coronavirus 2
  REGION 1..11: note = Table A: HLA-A*26:03H HLA-A*68:02M HLA-B*38:02H
EIIKSQDLSVV

SEQ ID NO: 6172 - protein, 11 aa, Severe acute respiratory syndrome coronavirus 2
  REGION 1..11: note = Table A: HLA-B*58:02H HLA-A*02:11H
KSQDLSVVSKV

SEQ ID NO: 6173 - protein, 11 aa, Severe acute respiratory syndrome coronavirus 2
  REGION 1..11: note = Table A: HLA-A*68:02H
DLSVVSKVVKV

SEQ ID NO: 6174 - protein, 11 aa, Severe acute respiratory syndrome coronavirus 2
  REGION 1..11: note = Table A: HLA-B*57:03H
KVTIDYTEISF

SEQ ID NO: 6175 - protein, 11 aa, Severe acute respiratory syndrome coronavirus 2
  REGION 1..11: note = Table A: HLA-A*24:02H HLA-A*24:07M HLA-A*23:01H
FYPKLQSSQAW

SEQ ID NO: 6176 - protein, 11 aa, Severe acute respiratory syndrome coronavirus 2
  REGION 1..11: note = Table A: HLA-A*74:01H
VAMPNLYKMQR

SEQ ID NO: 6177 - protein, 11 aa, Severe acute respiratory syndrome coronavirus 2
  REGION 1..11: note = Table A: HLA-B*07:04H
MPNLYKMQRML

SEQ ID NO: 6178 - protein, 11 aa, Severe acute respiratory syndrome coronavirus 2
  REGION 1..11: note = Table A: HLA-B*39:01H
DLQNYGDSATL

SEQ ID NO: 6179 - protein, 11 aa, Severe acute respiratory syndrome coronavirus 2
  REGION 1..11: note = Table A: HLA-B*27:02H HLA-A*34:02H
QNYGDSATLPK

SEQ ID NO: 6180 - protein, 11 aa, Severe acute respiratory syndrome coronavirus 2
  REGION 1..11: note = Table A: HLA-A*11:02H HLA-A*02:11M HLA-A*02:06H HLA-A*31:01H
ATLPKGIMMNV

SEQ ID NO: 6181 - protein, 11 aa, Severe acute respiratory syndrome coronavirus 2
  REGION 1..11: note = Table A: HLA-A*02:11M HLA-A*02:02H
IMMNVAKYTQL

SEQ ID NO: 6182 - protein, 11 aa, Severe acute respiratory syndrome coronavirus 2
  REGION 1..11: note = Table A: HLA-A*74:01H HLA-A*03:01H HLA-A*03:02H HLA-A*11:01H HLA-A*11:02H HLA-A*36:01H HLA-A*30:02H
RVIHFGAGSDK

SEQ ID NO: 6183 - protein, 11 aa, Severe acute respiratory syndrome coronavirus 2
  REGION 1..11: note = Table A: HLA-B*38:02H
IHFGAGSDKGV

SEQ ID NO: 6184 - protein, 11 aa, Severe acute respiratory syndrome coronavirus 2
  REGION 1..11: note = Table A: HLA-A*74:01H HLA-A*31:01H
KGVAPGTAVLR

SEQ ID NO: 6185 - protein, 11 aa, Severe acute respiratory syndrome coronavirus 2
  REGION 1..11: note = Table A: HLA-A*02:11H HLA-B*13:02H
RQWLPTGTLLV

SEQ ID NO: 6186 - protein, 11 aa, Severe acute respiratory syndrome coronavirus 2
  REGION 1..11: note = Table A: HLA-A*02:02H
LLVDSDLNDFV

SEQ ID NO: 6187 - protein, 11 aa, Severe acute respiratory syndrome coronavirus 2
  REGION 1..11: note = Table A: HLA-B*35:02H
DADSTLIGDCA

SEQ ID NO: 6188 - protein, 11 aa, Severe acute respiratory syndrome coronavirus 2
  REGION 1..11: note = Table A: HLA-B*27:02H
DLIISDMYDPK

SEQ ID NO: 6189 - protein, 11 aa, Severe acute respiratory syndrome coronavirus 2
  REGION 1..11: note = Table A: HLA-A*03:02H
IISDMYDPKTK

SEQ ID NO: 6190 - protein, 11 aa, Severe acute respiratory syndrome coronavirus 2
  REGION 1..11: note = Table A: HLA-A*03:02H HLA-A*36:01H HLA-A*33:01H HLA-A*33:03M HLA-A*34:02H
MYDPKTKNVTK

SEQ ID NO: 6191 - protein, 11 aa, Severe acute respiratory syndrome coronavirus 2
  REGION 1..11: note = Table A: HLA-B*57:03H
VTKENDSKEGF

SEQ ID NO: 6192 - protein, 11 aa, Severe acute respiratory syndrome coronavirus 2
  REGION 1..11: note = Table A: HLA-A*03:02H
KLALGGSVAIK

SEQ ID NO: 6193 - protein, 11 aa, Severe acute respiratory syndrome coronavirus 2
  REGION 1..11: note = Table A: HLA-B*58:01H HLA-B*57:01H HLA-A*32:01M HLA-B*57:03M
SVAIKITEHSW

SEQ ID NO: 6194 - protein, 11 aa, Severe acute respiratory syndrome coronavirus 2
  REGION 1..11: note = Table A: HLA-A*36:01M HLA-A*01:01H
ITEHSWNADLY

SEQ ID NO: 6195 - protein, 11 aa, Severe acute respiratory syndrome coronavirus 2
  REGION 1..11: note = Table A: HLA-B*38:01H HLA-B*38:02M
EHSWNADLYKL

SEQ ID NO: 6196 - protein, 11 aa, Severe acute respiratory syndrome coronavirus 2
  REGION 1..11: note = Table A: HLA-A*24:07H
LYKLMGHFAWW

SEQ ID NO: 6197 - protein, 11 aa, Severe acute respiratory syndrome coronavirus 2
  REGION 1..11: note = Table A: HLA-A*36:01H
SSEAFLIGCNY

SEQ ID NO: 6198 - protein, 11 aa, Severe acute respiratory syndrome coronavirus 2
  REGION 1..11: note = Table A: HLA-B*44:05H HLA-B*40:01H HLA-B*40:02H
SEAFLIGCNYL

SEQ ID NO: 6199 - protein, 11 aa, Severe acute respiratory syndrome coronavirus 2
  REGION 1..11: note = Table A: HLA-A*30:02H
LGKPREQIDGY

SEQ ID NO: 6200 - protein, 11 aa, Severe acute respiratory syndrome coronavirus 2
  REGION 1..11: note = Table A: HLA-B*42:01M HLA-B*56:01H HLA-B*55:02H HLA-C*15:05H HLA-B*55:01H HLA-B*35:07H HLA-B*07:02H HLA-B*07:04M
KPREQIDGYVM

SEQ ID NO: 6201 - protein, 11 aa, Severe acute respiratory syndrome coronavirus 2
  REGION 1..11: note = Table A: HLA-B*45:01H
REQIDGYVMHA

SEQ ID NO: 6202 - protein, 11 aa, Severe acute respiratory syndrome coronavirus 2
  REGION 1..11: note = Table A: HLA-A*24:07H
GYVMHANYIFW

SEQ ID NO: 6203 - protein, 11 aa, Severe acute respiratory syndrome coronavirus 2
  REGION 1..11: note = Table A: HLA-C*14:03H
NYIFWRNTNPI

SEQ ID NO: 6204 - protein, 11 aa, Severe acute respiratory syndrome coronavirus 2
  REGION 1..11: note = Table A: HLA-A*24:07M
IFWRNTNPIQL

SEQ ID NO: 6205 - protein, 11 aa, Severe acute respiratory syndrome coronavirus 2
  REGION 1..11: note = Table A: HLA-A*30:02H
RNTNPIQLSSY

SEQ ID NO: 6206 - protein, 11 aa, Severe acute respiratory syndrome coronavirus 2
  REGION 1..11: note = Table A: HLA-B*53:01M HLA-B*35:01H HLA-B*35:07H
NPIQLSSYSLF

SEQ ID NO: 6207 - protein, 11 aa, Severe acute respiratory syndrome coronavirus 2
  REGION 1..11: note = Table A: HLA-B*57:03H
SSYSLFDMSKF

SEQ ID NO: 6208 - protein, 11 aa, Severe acute respiratory syndrome coronavirus 2
  REGION 1..11: note = Table A: HLA-A*11:303H HLA-A*74:01M HLA-A*03:01M HLA-A*03:02M HLA-A*11:01M HLA-A*11:02H HLA-A*30:01H HLA-A*30:02H HLA-A*34:02M
SLFDMSKFPLK

SEQ ID NO: 6209 - protein, 11 aa, Severe acute respiratory syndrome coronavirus 2
  REGION 1..11: note = Table A: HLA-C*04:03H
LFDMSKFPLKL

SEQ ID NO: 6210 - protein, 11 aa, Severe acute respiratory syndrome coronavirus 2
  REGION 1..11: note = Table A: HLA-B*35:07H HLA-B*07:04H
FPLKLRGTAVM

SEQ ID NO: 6211 - protein, 11 aa, Severe acute respiratory syndrome coronavirus 2
  REGION 1..11: note = Table A: HLA-A*02:02M HLA-B*38:02H
SLKEGQINDMI

SEQ ID NO: 6212 - protein, 11 aa, Severe acute respiratory syndrome coronavirus 2
  REGION 1..11: note = Table A: HLA-A*02:05H HLA-B*13:01H
GQINDMILSLL

SEQ ID NO: 6213 - protein, 11 aa, Severe acute respiratory syndrome coronavirus 2
  REGION 1..11: note = Table A: HLA-A*74:01H
SLLSKGRLIIR

SEQ ID NO: 6214 - protein, 11 aa, Severe acute respiratory syndrome coronavirus 2
  REGION 1..11: note = Table A: HLA-A*68:02H HLA-A*02:05H HLA-A*02:08H HLA-A*31:01M
VVISSDVLVNN

SEQ ID NO: 6215 - protein, 8 aa, Severe acute respiratory syndrome coronavirus 2
  REGION 1..8: note = Table A: HLA-B*15:01H
AQSFLNGF

SEQ ID NO: 6216 - protein, 8 aa, Severe acute respiratory syndrome coronavirus 2
  REGION 1..8: note = Table A: HLA-C*14:02M HLA-C*14:03H HLA-C*15:05H HLA-B*07:05H
SFLNGFAV

SEQ ID NO: 6217 - protein, 9 aa, Severe acute respiratory syndrome coronavirus 2
  REGION 1..9: note = Table A: HLA-A*25:01H HLA-A*33:01M HLA-A*33:03H HLA-A*26:02H HLA-A*26:03H HLA-C*15:05H HLA-B*35:01H HLA-B*51:01H HLA-B*38:02H HLA-B*07:05H
DAQSFLNGF

SEQ ID NO: 6218 - protein, 9 aa, Severe acute respiratory syndrome coronavirus 2
  REGION 1..9: note = Table A: HLA-A*11:303H HLA-C*16:01H HLA-C*16:04H HLA-A*36:01H HLA-B*56:01H HLA-C*06:02H HLA-B*55:02H HLA-A*68:02M HLA-C*15:05M HLA-C*12:03H HLA-C*15:02H HLA-A*02:04H HLA-B*52:01H HLA-C*08:01H HLA-C*08:03M
  REGION 1..9: note = CONT. FROM ABOVE: HLA-B*38:02M HLA-B*39:06H HLA-B*40:06H HLA- B*54:01M HLA-B*39:01H HLA-B*07:05H HLA-B*13:02M
QSFLNGFAV

SEQ ID NO: 6219 - protein, 10 aa, Severe acute respiratory syndrome coronavirus 2
  REGION 1..10: note = Table A: HLA-B*44:05H
ADAQSFLNGF

SEQ ID NO: 6220 - protein, 10 aa, Severe acute respiratory syndrome coronavirus 2
  REGION 1..10: note = Table A: HLA-A*68:02H HLA-A*02:04H HLA-A*02:06H HLA-A*02:01H HLA-C*08:03H HLA-B*38:02H HLA-B*13:02M
AQSFLNGFAV

SEQ ID NO: 6221 - protein, 11 aa, Severe acute respiratory syndrome coronavirus 2
  REGION 1..11: note = Table A: HLA-A*33:01H HLA-A*68:02H HLA-B*54:01H
DAQSFLNGFAV

SEQ ID NO: 6222 - protein, 8 aa, Severe acute respiratory syndrome coronavirus 2
  REGION 1..8: note = Table A: HLA-C*15:05H HLA-B*51:01H HLA-B*54:01H
LPLVSSQC

SEQ ID NO: 6223 - protein, 8 aa, Severe acute respiratory syndrome coronavirus 2
  REGION 1..8: note = Table A: HLA-B*08:01H HLA-B*14:02H HLA-B*14:01H
NLTTRTQL

SEQ ID NO: 6224 - protein, 8 aa, Severe acute respiratory syndrome coronavirus 2
  REGION 1..8: note = Table A: HLA-B*39:06H
TRTQLPPA

SEQ ID NO: 6225 - protein, 8 aa, Severe acute respiratory syndrome coronavirus 2
  REGION 1..8: note = Table A: HLA-B*58:02H HLA-A*36:01H HLA-A*30:02M
RTQLPPAY

SEQ ID NO: 6226 - protein, 8 aa, Severe acute respiratory syndrome coronavirus 2
  REGION 1..8: note = Table A: HLA-C*15:05H
PPAYTNSF

SEQ ID NO: 6227 - protein, 8 aa, Severe acute respiratory syndrome coronavirus 2
  REGION 1..8: note = Table A: HLA-C*14:03H
SFTRGVYY

SEQ ID NO: 6228 - protein, 8 aa, Severe acute respiratory syndrome coronavirus 2
  REGION 1..8: note = Table A: HLA-C*14:02H HLA-C*14:03H
VYYPDKVF

SEQ ID NO: 6229 - protein, 8 aa, Severe acute respiratory syndrome coronavirus 2
  REGION 1..8: note = Table A: HLA-A*33:03H
YYPDKVFR

SEQ ID NO: 6230 - protein, 8 aa, Severe acute respiratory syndrome coronavirus 2
  REGION 1..8: note = Table A: HLA-B*38:02H
LHSTQDLF

SEQ ID NO: 6231 - protein, 8 aa, Severe acute respiratory syndrome coronavirus 2
  REGION 1..8: note = Table A: HLA-A*24:07H
PFFSNVTW

SEQ ID NO: 6232 - protein, 8 aa, Severe acute respiratory syndrome coronavirus 2
  REGION 1..8: note = Table A: HLA-C*14:03H
TWFHAIHV

SEQ ID NO: 6233 - protein, 8 aa, Severe acute respiratory syndrome coronavirus 2
  REGION 1..8: note = Table A: HLA-C*04:03H
RFDNPVLP

SEQ ID NO: 6234 - protein, 8 aa, Severe acute respiratory syndrome coronavirus 2
  REGION 1..8: note = Table A: HLA-B*37:01M
FDNPVLPF

SEQ ID NO: 6235 - protein, 8 aa, Severe acute respiratory syndrome coronavirus 2
  REGION 1..8: note = Table A: HLA-B*35:01H HLA-B*35:07H
LPFNDGVY

SEQ ID NO: 6236 - protein, 8 aa, Severe acute respiratory syndrome coronavirus 2
  REGION 1..8: note = Table A: HLA-C*14:03H
VYFASTEK

SEQ ID NO: 6237 - protein, 8 aa, Severe acute respiratory syndrome coronavirus 2
  REGION 1..8: note = Table A: HLA-B*58:01H HLA-B*58:02M HLA-B*57:01H HLA-B*57:03H
KSNIIRGW

SEQ ID NO: 6238 - protein, 8 aa, Severe acute respiratory syndrome coronavirus 2
  REGION 1..8: note = Table A: HLA-A*36:01H
FGTTLDSK

SEQ ID NO: 6239 - protein, 8 aa, Severe acute respiratory syndrome coronavirus 2
  REGION 1..8: note = Table A: HLA-B*37:01H HLA-B*40:02H HLA-B*41:02H
LDSKTQSL

SEQ ID NO: 6240 - protein, 8 aa, Severe acute respiratory syndrome coronavirus 2
  REGION 1..8: note = Table A: HLA-C*16:01H HLA-C*04:03H HLA-A*02:11H HLA-A*68:02H HLA-C*15:05M HLA-C*12:03H HLA-C*15:02M HLA-A*02:04H HLA-B*14:01H HLA-A*02:02H HLA-A*02:03H HLA-B*52:01H HLA-B*37:01H HLA-B*13:02H HLA-C*07:04H
ATNVVIKV

SEQ ID NO: 6241 - protein, 8 aa, Severe acute respiratory syndrome coronavirus 2
  REGION 1..8: note = Table A: HLA-B*39:06H
TNVVIKVC

SEQ ID NO: 6242 - protein, 8 aa, Severe acute respiratory syndrome coronavirus 2
  REGION 1..8: note = Table A: HLA-B*38:02H HLA-B*15:01H
VVIKVCEF

SEQ ID NO: 6243 - protein, 8 aa, Severe acute respiratory syndrome coronavirus 2
  REGION 1..8: note = Table A: HLA-B*18:01H HLA-B*53:01H HLA-A*34:01H HLA-B*35:01H HLA-B*51:01H HLA-B*35:07H HLA-B*38:02M HLA-B*15:02H HLA-B*07:05H HLA-B*15:11H
DPFLGVYY

SEQ ID NO: 6244 - protein, 8 aa, Severe acute respiratory syndrome coronavirus 2
  REGION 1..8: note = Table A: HLA-B*58:01H HLA-B*58:02H HLA-B*57:03M
KSWMESEF

SEQ ID NO: 6245 - protein, 8 aa, Severe acute respiratory syndrome coronavirus 2
  REGION 1..8: note = Table A: HLA-B*44:02H HLA-B*46:01H HLA-B*44:03H HLA-B*18:01H HLA-C*07:01H HLA-C*03:02H HLA-B*15:02H HLA-B*07:05H HLA-B*41:02H HLA-B*49:01H HLA-B*50:01H
MESEFRVY

SEQ ID NO: 6246 - protein, 8 aa, Severe acute respiratory syndrome coronavirus 2
  REGION 1..8: note = Table A: HLA-B*18:01H HLA-B*40:06H
SEFRVYSS

SEQ ID NO: 6247 - protein, 8 aa, Severe acute respiratory syndrome coronavirus 2
  REGION 1..8: note = Table A: HLA-B*46:01H HLA-B*18:01H HLA-B*37:01H HLA-B*07:05H
FEYVSQPF

SEQ ID NO: 6248 - protein, 8 aa, Severe acute respiratory syndrome coronavirus 2
  REGION 1..8: note = Table A: HLA-C*15:05H HLA-C*07:04H
YVSQPFLM

SEQ ID NO: 6249 - protein, 8 aa, Severe acute respiratory syndrome coronavirus 2
  REGION 1..8: note = Table A: HLA-B*57:03H
KNLREFVF

SEQ ID NO: 6250 - protein, 8 aa, Severe acute respiratory syndrome coronavirus 2
  REGION 1..8: note = Table A: HLA-A*34:02H
NLREFVFK

SEQ ID NO: 6251 - protein, 8 aa, Severe acute respiratory syndrome coronavirus 2
  REGION 1..8: note = Table A: HLA-B*52:01H HLA-B*40:02H HLA-B*40:06H HLA-B*49:01M
REFVFKNI

SEQ ID NO: 6252 - protein, 8 aa, Severe acute respiratory syndrome coronavirus 2
  REGION 1..8: note = Table A: HLA-A*30:02H
VFKNIDGY

SEQ ID NO: 6253 - protein, 8 aa, Severe acute respiratory syndrome coronavirus 2
  REGION 1..8: note = Table A: HLA-A*11:02H
GYFKIYSK

SEQ ID NO: 6254 - protein, 8 aa, Severe acute respiratory syndrome coronavirus 2
  REGION 1..8: note = Table A: HLA-B*39:06H
KHTPINLV

SEQ ID NO: 6255 - protein, 8 aa, Severe acute respiratory syndrome coronavirus 2
  REGION 1..8: note = Table A: HLA-C*15:05M HLA-B*07:02H HLA-B*07:05H
LPQGFSAL

SEQ ID NO: 6256 - protein, 8 aa, Severe acute respiratory syndrome coronavirus 2
  REGION 1..8: note = Table A: HLA-C*04:03H
LVDLPIGI

SEQ ID NO: 6257 - protein, 8 aa, Severe acute respiratory syndrome coronavirus 2
  REGION 1..8: note = Table A: HLA-B*51:01H
DLPIGINI

SEQ ID NO: 6258 - protein, 8 aa, Severe acute respiratory syndrome coronavirus 2
  REGION 1..8: note = Table A: HLA-C*14:03H
RFQTLLAL

SEQ ID NO: 6259 - protein, 8 aa, Severe acute respiratory syndrome coronavirus 2
  REGION 1..8: note = Table A: HLA-A*34:02H
QTLLALHR

SEQ ID NO: 6260 - protein, 8 aa, Severe acute respiratory syndrome coronavirus 2
  REGION 1..8: note = Table A: HLA-B*08:01H
LALHRSYL

SEQ ID NO: 6261 - protein, 8 aa, Severe acute respiratory syndrome coronavirus 2
  REGION 1..8: note = Table A: HLA-B*39:06H
SGWTAGAA

SEQ ID NO: 6262 - protein, 8 aa, Severe acute respiratory syndrome coronavirus 2
  REGION 1..8: note = Table A: HLA-B*58:01H HLA-B*35:01M HLA-B*38:02H
TAGAAAYY

SEQ ID NO: 6263 - protein, 8 aa, Severe acute respiratory syndrome coronavirus 2
  REGION 1..8: note = Table A: HLA-C*15:05H HLA-C*17:01H
AAYYVGYL

SEQ ID NO: 6264 - protein, 8 aa, Severe acute respiratory syndrome coronavirus 2
  REGION 1..8: note = Table A: HLA-B*52:01H
VGYLQPRT

SEQ ID NO: 6265 - protein, 8 aa, Severe acute respiratory syndrome coronavirus 2
  REGION 1..8: note = Table A: HLA-B*08:01H HLA-A*02:02H
YLQPRTFL

SEQ ID NO: 6266 - protein, 8 aa, Severe acute respiratory syndrome coronavirus 2
  REGION 1..8: note = Table A: HLA-A*36:01H
LDPLSETK

SEQ ID NO: 6267 - protein, 8 aa, Severe acute respiratory syndrome coronavirus 2
  REGION 1..8: note = Table A: HLA-B*35:02H
DPLSETKC

SEQ ID NO: 6268 - protein, 8 aa, Severe acute respiratory syndrome coronavirus 2
  REGION 1..8: note = Table A: HLA-B*18:01H HLA-B*40:02H HLA-B*41:02M
VEKGIYQT

SEQ ID NO: 6269 - protein, 8 aa, Severe acute respiratory syndrome coronavirus 2
  REGION 1..8: note = Table A: HLA-A*33:03H
IYQTSNFR

SEQ ID NO: 6270 - protein, 8 aa, Severe acute respiratory syndrome coronavirus 2
  REGION 1..8: note = Table A: HLA-B*52:01H HLA-B*13:02M
YQTSNFRV

SEQ ID NO: 6271 - protein, 8 aa, Severe acute respiratory syndrome coronavirus 2
  REGION 1..8: note = Table A: HLA-B*52:01H
VQPTESIV

SEQ ID NO: 6272 - protein, 8 aa, Severe acute respiratory syndrome coronavirus 2
  REGION 1..8: note = Table A: HLA-A*26:03H HLA-A*34:01M HLA-A*66:01H
EVFNATRF

SEQ ID NO: 6273 - protein, 8 aa, Severe acute respiratory syndrome coronavirus 2
  REGION 1..8: note = Table A: HLA-C*15:05H HLA-B*51:01M HLA-B*54:01H
NATRFASV

SEQ ID NO: 6274 - protein, 8 aa, Severe acute respiratory syndrome coronavirus 2
  REGION 1..8: note = Table A: HLA-B*46:01H HLA-A*30:02H HLA-B*15:01H HLA-B*15:03H
ATRFASVY

SEQ ID NO: 6275 - protein, 8 aa, Severe acute respiratory syndrome coronavirus 2
  REGION 1..8: note = Table A: HLA-B*58:01H
RFASVYAW

SEQ ID NO: 6276 - protein, 8 aa, Severe acute respiratory syndrome coronavirus 2
  REGION 1..8: note = Table A: HLA-A*74:01H HLA-A*11:02H HLA-A*31:01H
ASVYAWNR

SEQ ID NO: 6277 - protein, 8 aa, Severe acute respiratory syndrome coronavirus 2
  REGION 1..8: note = Table A: HLA-A*11:02H
SVYAWNRK

SEQ ID NO: 6278 - protein, 8 aa, Severe acute respiratory syndrome coronavirus 2
  REGION 1..8: note = Table A: HLA-B*58:01H HLA-A*36:01M HLA-A*01:01H HLA-C*04:03M HLA-B*35:01H HLA-B*35:08H HLA-B*38:02H
VADYSVLY

SEQ ID NO: 6279 - protein, 8 aa, Severe acute respiratory syndrome coronavirus 2
  REGION 1..8: note = Table A: HLA-B*54:01H
YSVLYNSA

SEQ ID NO: 6280 - protein, 8 aa, Severe acute respiratory syndrome coronavirus 2
  REGION 1..8: note = Table A: HLA-B*46:01H HLA-B*38:02H HLA-B*15:01H HLA-B*15:02H
VLYNSASF

SEQ ID NO: 6281 - protein, 8 aa, Severe acute respiratory syndrome coronavirus 2
  REGION 1..8: note = Table A: HLA-C*15:05H HLA-B*07:05H
NSASFSTF

SEQ ID NO: 6282 - protein, 8 aa, Severe acute respiratory syndrome coronavirus 2
  REGION 1..8: note = Table A: HLA-A*03:02H HLA-A*11:01H HLA-A*11:02H HLA-A*36:01H HLA-A*34:02M
SASFSTFK

SEQ ID NO: 6283 - protein, 8 aa, Severe acute respiratory syndrome coronavirus 2
  REGION 1..8: note = Table A: HLA-A*02:11H
STFKCYGV

SEQ ID NO: 6284 - protein, 8 aa, Severe acute respiratory syndrome coronavirus 2
  REGION 1..8: note = Table A: HLA-C*15:05H HLA-C*17:01H
YGVSPTKL

SEQ ID NO: 6285 - protein, 8 aa, Severe acute respiratory syndrome coronavirus 2
  REGION 1..8: note = Table A: HLA-C*15:05H HLA-B*55:01H HLA-B*07:02M HLA-B*07:04H HLA-B*07:05H
SPTKLNDL

SEQ ID NO: 6286 - protein, 8 aa, Severe acute respiratory syndrome coronavirus 2
  REGION 1..8: note = Table A: HLA-A*24:02H HLA-C*08:01H HLA-A*23:01H
VYADSFVI

SEQ ID NO: 6287 - protein, 8 aa, Severe acute respiratory syndrome coronavirus 2
  REGION 1..8: note = Table A: HLA-C*03:03H HLA-A*02:11H HLA-C*03:04H HLA-A*02:05H HLA-C*08:01H HLA-B*38:02M HLA-B*39:01H HLA-B*13:02H
FVIRGDEV

SEQ ID NO: 6288 - protein, 8 aa, Severe acute respiratory syndrome coronavirus 2
  REGION 1..8: note = Table A: HLA-B*58:02H
RGDEVRQI

SEQ ID NO: 6289 - protein, 8 aa, Severe acute respiratory syndrome coronavirus 2
  REGION 1..8: note = Table A: HLA-B*18:01H
DEVRQIAP

SEQ ID NO: 6290 - protein, 8 aa, Severe acute respiratory syndrome coronavirus 2
  REGION 1..8: note = Table A: HLA-C*15:05M
APGQTGKI

SEQ ID NO: 6291 - protein, 8 aa, Severe acute respiratory syndrome coronavirus 2
  REGION 1..8: note = Table A: HLA-B*15:03H
GKIADYNY

SEQ ID NO: 6292 - protein, 8 aa, Severe acute respiratory syndrome coronavirus 2
  REGION 1..8: note = Table A: HLA-C*04:03H HLA-B*35:02H HLA-C*08:01H HLA-C*08:02M HLA-B*35:12H HLA-C*05:01H
IADYNYKL

SEQ ID NO: 6293 - protein, 8 aa, Severe acute respiratory syndrome coronavirus 2
  REGION 1..8: note = Table A: HLA-A*26:01H HLA-B*38:02H HLA-B*15:02H
DSKVGGNY

SEQ ID NO: 6294 - protein, 8 aa, Severe acute respiratory syndrome coronavirus 2
  REGION 1..8: note = Table A: HLA-B*58:01H HLA-A*30:02H
KVGGNYNY

SEQ ID NO: 6295 - protein, 8 aa, Severe acute respiratory syndrome coronavirus 2
  REGION 1..8: note = Table A: HLA-A*33:01M HLA-A*33:03M HLA-A*31:01H
SNLKPFER

SEQ ID NO: 6296 - protein, 8 aa, Severe acute respiratory syndrome coronavirus 2
  REGION 1..8: note = Table A: HLA-B*39:06H HLA-B*54:01H
ISTEIYQA

SEQ ID NO: 6297 - protein, 8 aa, Severe acute respiratory syndrome coronavirus 2
  REGION 1..8: note = Table A: HLA-C*14:03H
CYFPLQSY

SEQ ID NO: 6298 - protein, 8 aa, Severe acute respiratory syndrome coronavirus 2
  REGION 1..8: note = Table A: HLA-B*27:02H HLA-B*53:01M HLA-B*35:01M HLA-B*35:07M HLA-B*38:02H HLA-B*15:02H HLA-B*07:05H
FPLQSYGF

SEQ ID NO: 6299 - protein, 8 aa, Severe acute respiratory syndrome coronavirus 2
  REGION 1..8: note = Table A: HLA-B*35:01H
QPTNGVGY

SEQ ID NO: 6300 - protein, 8 aa, Severe acute respiratory syndrome coronavirus 2
  REGION 1..8: note = Table A: HLA-B*51:01H HLA-B*52:01H
VGYQPYRV

SEQ ID NO: 6301 - protein, 8 aa, Severe acute respiratory syndrome coronavirus 2
  REGION 1..8: note = Table A: HLA-B*52:01H
YQPYRVVV

SEQ ID NO: 6302 - protein, 8 aa, Severe acute respiratory syndrome coronavirus 2
  REGION 1..8: note = Table A: HLA-B*42:01H HLA-B*08:01M HLA-B*35:03H HLA-C*15:05M HLA-B*14:02H HLA-B*55:01H HLA-B*51:01M HLA-B*35:07H HLA-B*52:01H HLA-C*08:01H HLA-B*38:02H HLA-B*07:02H HLA-B*07:04H HLA-B*15:02H HLA-B*07:05H
QPYRVVVL

SEQ ID NO: 6303 - protein, 8 aa, Severe acute respiratory syndrome coronavirus 2
  REGION 1..8: note = Table A: HLA-B*54:01H
LSFELLHA

SEQ ID NO: 6304 - protein, 8 aa, Severe acute respiratory syndrome coronavirus 2
  REGION 1..8: note = Table A: HLA-B*50:01H
FELLHAPA

SEQ ID NO: 6305 - protein, 8 aa, Severe acute respiratory syndrome coronavirus 2
  REGION 1..8: note = Table A: HLA-A*02:11M HLA-B*14:01H HLA-A*02:01H HLA-A*02:02H HLA-A*02:03M HLA-B*38:02H HLA-B*13:02H
LLHAPATV

SEQ ID NO: 6306 - protein, 8 aa, Severe acute respiratory syndrome coronavirus 2
  REGION 1..8: note = Table A: HLA-B*39:06M HLA-B*15:10M
LHAPATVC

SEQ ID NO: 6307 - protein, 8 aa, Severe acute respiratory syndrome coronavirus 2
  REGION 1..8: note = Table A: HLA-C*15:05H HLA-B*07:02H HLA-B*07:04H
GPKKSTNL

SEQ ID NO: 6308 - protein, 8 aa, Severe acute respiratory syndrome coronavirus 2
  REGION 1..8: note = Table A: HLA-B*14:01H
NGLTGTGV

SEQ ID NO: 6309 - protein, 8 aa, Severe acute respiratory syndrome coronavirus 2
  REGION 1..8: note = Table A: HLA-A*24:07H HLA-A*23:01H
KFLPFQQF

SEQ ID NO: 6310 - protein, 8 aa, Severe acute respiratory syndrome coronavirus 2
  REGION 1..8: note = Table A: HLA-A*34:01H
LPFQQFGR

SEQ ID NO: 6311 - protein, 8 aa, Severe acute respiratory syndrome coronavirus 2
  REGION 1..8: note = Table A: HLA-C*08:02H
IADTTDAV

SEQ ID NO: 6312 - protein, 8 aa, Severe acute respiratory syndrome coronavirus 2
  REGION 1..8: note = Table A: HLA-B*35:02H
DAVRDPQT

SEQ ID NO: 6313 - protein, 8 aa, Severe acute respiratory syndrome coronavirus 2
  REGION 1..8: note = Table A: HLA-C*15:05H
AVRDPQTL

SEQ ID NO: 6314 - protein, 8 aa, Severe acute respiratory syndrome coronavirus 2
  REGION 1..8: note = Table A: HLA-B*40:02H
LDITPCSF

SEQ ID NO: 6315 - protein, 8 aa, Severe acute respiratory syndrome coronavirus 2
  REGION 1..8: note = Table A: HLA-C*15:05H
TSNQVAVL

SEQ ID NO: 6316 - protein, 8 aa, Severe acute respiratory syndrome coronavirus 2
  REGION 1..8: note = Table A: HLA-C*04:03H
CTEVPVAI

SEQ ID NO: 6317 - protein, 8 aa, Severe acute respiratory syndrome coronavirus 2
  REGION 1..8: note = Table A: HLA-B*18:01M HLA-B*07:05M HLA-B*41:02H HLA-B*49:01H
TEVPVAIH

SEQ ID NO: 6318 - protein, 8 aa, Severe acute respiratory syndrome coronavirus 2
  REGION 1..8: note = Table A: HLA-C*08:01H HLA-B*35:12H
VAIHADQL

SEQ ID NO: 6319 - protein, 8 aa, Severe acute respiratory syndrome coronavirus 2
  REGION 1..8: note = Table A: HLA-B*44:02H HLA-B*44:05H HLA-B*44:03H HLA-B*37:01H
ADQLTPTW

SEQ ID NO: 6320 - protein, 8 aa, Severe acute respiratory syndrome coronavirus 2
  REGION 1..8: note = Table A: HLA-B*46:01H
LTPTWRVY

SEQ ID NO: 6321 - protein, 8 aa, Severe acute respiratory syndrome coronavirus 2
  REGION 1..8: note = Table A: HLA-C*14:03H
VYSTGSNV

SEQ ID NO: 6322 - protein, 8 aa, Severe acute respiratory syndrome coronavirus 2
  REGION 1..8: note = Table A: HLA-A*74:01H HLA-A*11:01H HLA-A*11:02H HLA-B*57:01H HLA-A*33:01H HLA-A*33:03M HLA-A*68:01H HLA-A*31:01M
GSNVFQTR

SEQ ID NO: 6323 - protein, 8 aa, Severe acute respiratory syndrome coronavirus 2
  REGION 1..8: note = Table A: HLA-B*44:02H HLA-B*44:05H HLA-B*46:01H HLA-B*44:03H HLA-B*18:01H HLA-B*07:05H
AEHVNNSY

SEQ ID NO: 6324 - protein, 8 aa, Severe acute respiratory syndrome coronavirus 2
  REGION 1..8: note = Table A: HLA-B*51:01M
DIPIGAGI

SEQ ID NO: 6325 - protein, 8 aa, Severe acute respiratory syndrome coronavirus 2
  REGION 1..8: note = Table A: HLA-C*15:05H
IPIGAGIC

SEQ ID NO: 6326 - protein, 8 aa, Severe acute respiratory syndrome coronavirus 2
  REGION 1..8: note = Table A: HLA-A*33:03H
QTQTNSPR

SEQ ID NO: 6327 - protein, 8 aa, Severe acute respiratory syndrome coronavirus 2
  REGION 1..8: note = Table A: HLA-B*07:02H HLA-B*07:04H
SPRRARSV

SEQ ID NO: 6328 - protein, 8 aa, Severe acute respiratory syndrome coronavirus 2
  REGION 1..8: note = Table A: HLA-B*58:02H
RSVASQSI

SEQ ID NO: 6329 - protein, 8 aa, Severe acute respiratory syndrome coronavirus 2
  REGION 1..8: note = Table A: HLA-A*30:02H HLA-B*15:01M
ASQSIIAY

SEQ ID NO: 6330 - protein, 8 aa, Severe acute respiratory syndrome coronavirus 2
  REGION 1..8: note = Table A: HLA-B*58:01H HLA-B*58:02M HLA-B*38:02H HLA-B*07:05H
QSIIAYTM

SEQ ID NO: 6331 - protein, 8 aa, Severe acute respiratory syndrome coronavirus 2
  REGION 1..8: note = Table A: HLA-C*15:05H
IIAYTMSL

SEQ ID NO: 6332 - protein, 8 aa, Severe acute respiratory syndrome coronavirus 2
  REGION 1..8: note = Table A: HLA-B*35:01H HLA-B*39:01H
GAENSVAY

SEQ ID NO: 6333 - protein, 8 aa, Severe acute respiratory syndrome coronavirus 2
  REGION 1..8: note = Table A: HLA-C*15:05H HLA-B*51:01M HLA-B*52:01H
VAYSNNSI

SEQ ID NO: 6334 - protein, 8 aa, Severe acute respiratory syndrome coronavirus 2
  REGION 1..8: note = Table A: HLA-C*15:05H
SIAIPTNF

SEQ ID NO: 6335 - protein, 8 aa, Severe acute respiratory syndrome coronavirus 2
  REGION 1..8: note = Table A: HLA-C*15:05H
PTNFTISV

SEQ ID NO: 6336 - protein, 8 aa, Severe acute respiratory syndrome coronavirus 2
  REGION 1..8: note = Table A: HLA-C*15:05H
VTTEILPV

SEQ ID NO: 6337 - protein, 8 aa, Severe acute respiratory syndrome coronavirus 2
  REGION 1..8: note = Table A: HLA-B*44:05H HLA-B*18:01H HLA-B*37:01H HLA-B*40:01M HLA-B*40:02M HLA-B*39:01H HLA-B*07:05H HLA-B*41:02M HLA-B*49:01H
TEILPVSM

SEQ ID NO: 6338 - protein, 8 aa, Severe acute respiratory syndrome coronavirus 2
  REGION 1..8: note = Table A: HLA-A*03:01H
ILPVSMTK

SEQ ID NO: 6339 - protein, 8 aa, Severe acute respiratory syndrome coronavirus 2
  REGION 1..8: note = Table A: HLA-B*51:01H HLA-B*54:01H
LPVSMTKT

SEQ ID NO: 6340 - protein, 8 aa, Severe acute respiratory syndrome coronavirus 2
  REGION 1..8: note = Table A: HLA-B*08:01H
VSMTKTSV

SEQ ID NO: 6341 - protein, 8 aa, Severe acute respiratory syndrome coronavirus 2
  REGION 1..8: note = Table A: HLA-C*15:05H
RALTGIAV

SEQ ID NO: 6342 - protein, 8 aa, Severe acute respiratory syndrome coronavirus 2
  REGION 1..8: note = Table A: HLA-B*52:01H HLA-B*39:06H HLA-B*39:01H
TQEVFAQV

SEQ ID NO: 6343 - protein, 8 aa, Severe acute respiratory syndrome coronavirus 2
  REGION 1..8: note = Table A: HLA-B*52:01H
VFAQVKQI

SEQ ID NO: 6344 - protein, 8 aa, Severe acute respiratory syndrome coronavirus 2
  REGION 1..8: note = Table A: HLA-C*16:01H HLA-B*46:01M HLA-B*08:01H HLA-C*03:02H HLA-C*12:03H HLA-B*35:01H HLA-B*35:07H HLA-B*38:02H HLA-B*15:02H
FAQVKQIY

SEQ ID NO: 6345 - protein, 8 aa, Severe acute respiratory syndrome coronavirus 2
  REGION 1..8: note = Table A: HLA-A*11:01H HLA-A*11:02H
AQVKQIYK

SEQ ID NO: 6346 - protein, 8 aa, Severe acute respiratory syndrome coronavirus 2
  REGION 1..8: note = Table A: HLA-B*52:01H
QIYKTPPI

SEQ ID NO: 6347 - protein, 8 aa, Severe acute respiratory syndrome coronavirus 2
  REGION 1..8: note = Table A: HLA-A*30:01H
IYKTPPIK

SEQ ID NO: 6348 - protein, 8 aa, Severe acute respiratory syndrome coronavirus 2
  REGION 1..8: note = Table A: HLA-B*37:01M
KDFGGFNF

SEQ ID NO: 6349 - protein, 8 aa, Severe acute respiratory syndrome coronavirus 2
  REGION 1..8: note = Table A: HLA-A*11:02H
PDPSKPSK

SEQ ID NO: 6350 - protein, 8 aa, Severe acute respiratory syndrome coronavirus 2
  REGION 1..8: note = Table A: HLA-B*18:01H
EDLLFNKV

SEQ ID NO: 6351 - protein, 8 aa, Severe acute respiratory syndrome coronavirus 2
  REGION 1..8: note = Table A: HLA-B*08:01M HLA-A*02:11M HLA-A*02:04H HLA-A*02:02H
LLFNKVTL

SEQ ID NO: 6352 - protein, 8 aa, Severe acute respiratory syndrome coronavirus 2
  REGION 1..8: note = Table A: HLA-B*18:01H HLA-C*07:01H HLA-C*12:03H HLA-A*34:01H HLA-B*35:01M HLA-B*51:01H HLA-B*35:07H HLA-B*38:02H HLA-B*15:02H HLA-B*07:05H
DAGFIKQY

SEQ ID NO: 6353 - protein, 8 aa, Severe acute respiratory syndrome coronavirus 2
  REGION 1..8: note = Table A: HLA-B*40:02H HLA-B*41:02H
GDIAARDL

SEQ ID NO: 6354 - protein, 8 aa, Severe acute respiratory syndrome coronavirus 2
  REGION 1..8: note = Table A: HLA-C*15:05H HLA-B*35:01H
PPLLTDEM

SEQ ID NO: 6355 - protein, 8 aa, Severe acute respiratory syndrome coronavirus 2
  REGION 1..8: note = Table A: HLA-B*18:01H
TDEMIAQY

SEQ ID NO: 6356 - protein, 8 aa, Severe acute respiratory syndrome coronavirus 2
  REGION 1..8: note = Table A: HLA-B*18:01H HLA-B*07:05H
DEMIAQYT

SEQ ID NO: 6357 - protein, 8 aa, Severe acute respiratory syndrome coronavirus 2
  REGION 1..8: note = Table A: HLA-C*03:03H HLA-C*03:04H HLA-C*15:05H
IAQYTSAL

SEQ ID NO: 6358 - protein, 8 aa, Severe acute respiratory syndrome coronavirus 2
  REGION 1..8: note = Table A: HLA-B*48:01H HLA-B*52:01M HLA-B*38:02H HLA-B*15:01H HLA-B*15:03H HLA-B*13:02H
AQYTSALL

SEQ ID NO: 6359 - protein, 8 aa, Severe acute respiratory syndrome coronavirus 2
  REGION 1..8: note = Table A: HLA-C*15:05H HLA-B*51:01M HLA-B*52:01H
SALLAGTI

SEQ ID NO: 6360 - protein, 8 aa, Severe acute respiratory syndrome coronavirus 2
  REGION 1..8: note = Table A: HLA-B*58:01H
AGTITSGW

SEQ ID NO: 6361 - protein, 8 aa, Severe acute respiratory syndrome coronavirus 2
  REGION 1..8: note = Table A: HLA-B*58:01H
TITSGWTF

SEQ ID NO: 6362 - protein, 8 aa, Severe acute respiratory syndrome coronavirus 2
  REGION 1..8: note = Table A: HLA-C*14:02H HLA-C*14:03H HLA-C*15:05H HLA-C*01:02H HLA-B*39:01H
TFGAGAAL

SEQ ID NO: 6363 - protein, 8 aa, Severe acute respiratory syndrome coronavirus 2
  REGION 1..8: note = Table A: HLA-B*56:01H HLA-B*55:02H HLA-B*55:01H HLA-B*51:01H HLA-B*54:01M
IPFAMQMA

SEQ ID NO: 6364 - protein, 8 aa, Severe acute respiratory syndrome coronavirus 2
  REGION 1..8: note = Table A: HLA-A*33:03H HLA-A*66:01H
FAMQMAYR

SEQ ID NO: 6365 - protein, 8 aa, Severe acute respiratory syndrome coronavirus 2
  REGION 1..8: note = Table A: HLA-B*51:01M HLA-B*52:01H HLA-B*38:02H
MAYRFNGI

SEQ ID NO: 6366 - protein, 8 aa, Severe acute respiratory syndrome coronavirus 2
  REGION 1..8: note = Table A: HLA-C*06:02H HLA-B*14:01H
YRFNGIGV

SEQ ID NO: 6367 - protein, 8 aa, Severe acute respiratory syndrome coronavirus 2
  REGION 1..8: note = Table A: HLA-A*02:11H HLA-B*14:01H HLA-A*02:02H HLA-B*38:02H
VLYENQKL

SEQ ID NO: 6368 - protein, 8 aa, Severe acute respiratory syndrome coronavirus 2
  REGION 1..8: note = Table A: HLA-B*45:01H HLA-B*50:01H
YENQKLIA

SEQ ID NO: 6369 - protein, 8 aa, Severe acute respiratory syndrome coronavirus 2
  REGION 1..8: note = Table A: HLA-B*15:03H
QKLIANQF

SEQ ID NO: 6370 - protein, 8 aa, Severe acute respiratory syndrome coronavirus 2
  REGION 1..8: note = Table A: HLA-B*39:01H
NQFNSAIG

SEQ ID NO: 6371 - protein, 8 aa, Severe acute respiratory syndrome coronavirus 2
  REGION 1..8: note = Table A: HLA-B*08:01H HLA-C*08:03H HLA-B*41:02H
IGKIQDSL

SEQ ID NO: 6372 - protein, 8 aa, Severe acute respiratory syndrome coronavirus 2
  REGION 1..8: note = Table A: HLA-C*15:05H
LSSTASAL

SEQ ID NO: 6373 - protein, 8 aa, Severe acute respiratory syndrome coronavirus 2
  REGION 1..8: note = Table A: HLA-C*15:05M
TASALGKL

SEQ ID NO: 6374 - protein, 8 aa, Severe acute respiratory syndrome coronavirus 2
  REGION 1..8: note = Table A: HLA-A*02:01H HLA-A*02:02H HLA-A*02:03H
ALGKLQDV

SEQ ID NO: 6375 - protein, 8 aa, Severe acute respiratory syndrome coronavirus 2
  REGION 1..8: note = Table A: HLA-B*52:01H HLA-B*13:02H
AQALNTLV

SEQ ID NO: 6376 - protein, 8 aa, Severe acute respiratory syndrome coronavirus 2
  REGION 1..8: note = Table A: HLA-A*11:01H HLA-A*11:02H HLA-A*36:01H HLA-A*34:02H
QALNTLVK

SEQ ID NO: 6377 - protein, 8 aa, Severe acute respiratory syndrome coronavirus 2
  REGION 1..8: note = Table A: HLA-B*46:01H HLA-C*03:03H HLA-C*03:02H HLA-C*03:04M HLA-C*15:05H HLA-B*14:01H HLA-C*07:27H HLA-B*39:01H HLA-B*15:10H
FGAISSVL

SEQ ID NO: 6378 - protein, 8 aa, Severe acute respiratory syndrome coronavirus 2
  REGION 1..8: note = Table A: HLA-A*74:01H HLA-A*11:02H
VLNDILSR

SEQ ID NO: 6379 - protein, 8 aa, Severe acute respiratory syndrome coronavirus 2
  REGION 1..8: note = Table A: HLA-C*04:03H
LNDILSRL

SEQ ID NO: 6380 - protein, 8 aa, Severe acute respiratory syndrome coronavirus 2
  REGION 1..8: note = Table A: HLA-A*02:02H
ILSRLDKV

SEQ ID NO: 6381 - protein, 8 aa, Severe acute respiratory syndrome coronavirus 2
  REGION 1..8: note = Table A: HLA-B*39:06H
SRLDKVEA

SEQ ID NO: 6382 - protein, 8 aa, Severe acute respiratory syndrome coronavirus 2
  REGION 1..8: note = Table A: HLA-B*41:02H
LDKVEAEV

SEQ ID NO: 6383 - protein, 8 aa, Severe acute respiratory syndrome coronavirus 2
  REGION 1..8: note = Table A: HLA-B*44:05H HLA-B*40:01H HLA-B*40:02M HLA-B*41:02M
AEVQIDRL

SEQ ID NO: 6384 - protein, 8 aa, Severe acute respiratory syndrome coronavirus 2
  REGION 1..8: note = Table A: HLA-B*14:02M HLA-B*14:01M
DRLITGRL

SEQ ID NO: 6385 - protein, 8 aa, Severe acute respiratory syndrome coronavirus 2
  REGION 1..8: note = Table A: HLA-C*03:04H HLA-C*15:05M HLA-C*15:02H HLA-B*57:03H
ITGRLQSL

SEQ ID NO: 6386 - protein, 8 aa, Severe acute respiratory syndrome coronavirus 2
  REGION 1..8: note = Table A: HLA-A*30:02H HLA-B*15:01H
RLQSLQTY

SEQ ID NO: 6387 - protein, 8 aa, Severe acute respiratory syndrome coronavirus 2
  REGION 1..8: note = Table A: HLA-C*15:05H HLA-B*52:01H HLA-C*08:03H
QTYVTQQL

SEQ ID NO: 6388 - protein, 8 aa, Severe acute respiratory syndrome coronavirus 2
  REGION 1..8: note = Table A: HLA-C*06:02H HLA-A*24:02H HLA-A*23:01H
TYVTQQLI

SEQ ID NO: 6389 - protein, 8 aa, Severe acute respiratory syndrome coronavirus 2
  REGION 1..8: note = Table A: HLA-B*39:06H
TQQLIRAA

SEQ ID NO: 6390 - protein, 8 aa, Severe acute respiratory syndrome coronavirus 2
  REGION 1..8: note = Table A: HLA-B*52:01H HLA-B*38:02H HLA-B*13:02H
QLIRAAEI

SEQ ID NO: 6391 - protein, 8 aa, Severe acute respiratory syndrome coronavirus 2
  REGION 1..8: note = Table A: HLA-A*03:02H HLA-A*11:01H
SANLAATK

SEQ ID NO: 6392 - protein, 8 aa, Severe acute respiratory syndrome coronavirus 2
  REGION 1..8: note = Table A: HLA-B*07:05H
ANLAATKM

SEQ ID NO: 6393 - protein, 8 aa, Severe acute respiratory syndrome coronavirus 2
  REGION 1..8: note = Table A: HLA-C*15:05H
APHGVVFL

SEQ ID NO: 6394 - protein, 8 aa, Severe acute respiratory syndrome coronavirus 2
  REGION 1..8: note = Table A: HLA-B*51:01H HLA-B*52:01H
HGVVFLHV

SEQ ID NO: 6395 - protein, 8 aa, Severe acute respiratory syndrome coronavirus 2
  REGION 1..8: note = Table A: HLA-B*46:01H HLA-B*38:02H HLA-B*15:01H HLA-B*15:02M
VVFLHVTY

SEQ ID NO: 6396 - protein, 8 aa, Severe acute respiratory syndrome coronavirus 2
  REGION 1..8: note = Table A: HLA-B*52:01H
VFLHVTYV

SEQ ID NO: 6397 - protein, 8 aa, Severe acute respiratory syndrome coronavirus 2
  REGION 1..8: note = Table A: HLA-B*27:02H
TYVPAQEK

SEQ ID NO: 6398 - protein, 8 aa, Severe acute respiratory syndrome coronavirus 2
  REGION 1..8: note = Table A: HLA-B*45:01M HLA-B*50:01M
QEKNFTTA

SEQ ID NO: 6399 - protein, 8 aa, Severe acute respiratory syndrome coronavirus 2
  REGION 1..8: note = Table A: HLA-B*52:01H HLA-B*07:05H
NFTTAPAI

SEQ ID NO: 6400 - protein, 8 aa, Severe acute respiratory syndrome coronavirus 2
  REGION 1..8: note = Table A: HLA-A*33:01H
DGKAHFPR

SEQ ID NO: 6401 - protein, 8 aa, Severe acute respiratory syndrome coronavirus 2
  REGION 1..8: note = Table A: HLA-B*39:06H
AHFPREGV

SEQ ID NO: 6402 - protein, 8 aa, Severe acute respiratory syndrome coronavirus 2
  REGION 1..8: note = Table A: HLA-C*15:05H HLA-B*55:01H HLA-A*34:01H HLA-B*51:01M HLA-B*38:02H HLA-B*54:01H HLA-B*07:02H HLA-B*07:04H
FPREGVFV

SEQ ID NO: 6403 - protein, 8 aa, Severe acute respiratory syndrome coronavirus 2
  REGION 1..8: note = Table A: HLA-B*53:01H HLA-B*15:13H
FVSNGTHW

SEQ ID NO: 6404 - protein, 8 aa, Severe acute respiratory syndrome coronavirus 2
  REGION 1..8: note = Table A: HLA-B*52:01H
NFYEPQII

SEQ ID NO: 6405 - protein, 8 aa, Severe acute respiratory syndrome coronavirus 2
  REGION 1..8: note = Table A: HLA-B*51:01H
IGIVNNTV

SEQ ID NO: 6406 - protein, 8 aa, Severe acute respiratory syndrome coronavirus 2
  REGION 1..8: note = Table A: HLA-B*40:02H HLA-B*41:02H
YDPLQPEL

SEQ ID NO: 6407 - protein, 8 aa, Severe acute respiratory syndrome coronavirus 2
  REGION 1..8: note = Table A: HLA-B*37:01H
LDSFKEEL

SEQ ID NO: 6408 - protein, 8 aa, Severe acute respiratory syndrome coronavirus 2
  REGION 1..8: note = Table A: HLA-B*35:02H HLA-B*35:12H
HTSPDVDL

SEQ ID NO: 6409 - protein, 8 aa, Severe acute respiratory syndrome coronavirus 2
  REGION 1..8: note = Table A: HLA-C*15:05H
ISGINASV

SEQ ID NO: 6410 - protein, 8 aa, Severe acute respiratory syndrome coronavirus 2
  REGION 1..8: note = Table A: HLA-A*11:01H HLA-A*11:02H
ASVVNIQK

SEQ ID NO: 6411 - protein, 8 aa, Severe acute respiratory syndrome coronavirus 2
  REGION 1..8: note = Table A: HLA-B*58:02H HLA-B*52:01H
VVNIQKEI

SEQ ID NO: 6412 - protein, 8 aa, Severe acute respiratory syndrome coronavirus 2
  REGION 1..8: note = Table A: HLA-A*02:05H HLA-B*52:01H HLA-B*15:01H
IQKEIDRL

SEQ ID NO: 6413 - protein, 8 aa, Severe acute respiratory syndrome coronavirus 2
  REGION 1..8: note = Table A: HLA-A*11:303H HLA-B*46:01H HLA-C*03:02H HLA-A*02:04M HLA-A*02:05H HLA-A*02:01H HLA-A*02:02H HLA-A*02:03H HLA-B*38:02H
SLIDLQEL

SEQ ID NO: 6414 - protein, 8 aa, Severe acute respiratory syndrome coronavirus 2
  REGION 1..8: note = Table A: HLA-A*02:04H
WLGFIAGL

SEQ ID NO: 6415 - protein, 8 aa, Severe acute respiratory syndrome coronavirus 2
  REGION 1..8: note = Table A: HLA-C*15:05H
IAGLIAIV

SEQ ID NO: 6416 - protein, 8 aa, Severe acute respiratory syndrome coronavirus 2
  REGION 1..8: note = Table A: HLA-B*13:02H
GLIAIVMV

SEQ ID NO: 6417 - protein, 8 aa, Severe acute respiratory syndrome coronavirus 2
  REGION 1..8: note = Table A: HLA-B*58:02H HLA-C*15:05H HLA-B*51:01H HLA-B*52:01M HLA-C*08:01H HLA-B*38:02H HLA-B*57:03H
IAIVMVTI

SEQ ID NO: 6418 - protein, 8 aa, Severe acute respiratory syndrome coronavirus 2
  REGION 1..8: note = Table A: HLA-C*15:05H
IVMVTIML

SEQ ID NO: 6419 - protein, 8 aa, Severe acute respiratory syndrome coronavirus 2
  REGION 1..8: note = Table A: HLA-B*35:02H HLA-B*35:12H
EDDSEPVL

SEQ ID NO: 6420 - protein, 8 aa, Severe acute respiratory syndrome coronavirus 2
  REGION 1..8: note = Table A: HLA-B*49:01H
SEPVLKGV

SEQ ID NO: 6421 - protein, 8 aa, Severe acute respiratory syndrome coronavirus 2
  REGION 1..8: note = Table A: HLA-C*15:05H
PVLKGVKL

SEQ ID NO: 6422 - protein, 9 aa, Severe acute respiratory syndrome coronavirus 2
  REGION 1..9: note = Table A: HLA-B*38:02H
VLLPLVSSQ

SEQ ID NO: 6423 - protein, 9 aa, Severe acute respiratory syndrome coronavirus 2
  REGION 1..9: note = Table A: HLA-B*56:01H HLA-B*55:02H HLA-C*15:05M HLA-B*51:01H HLA-B*54:01M HLA-B*07:05H
LPLVSSQCV

SEQ ID NO: 6424 - protein, 9 aa, Severe acute respiratory syndrome coronavirus 2
  REGION 1..9: note = Table A: HLA-A*74:01H HLA-A*31:01H
SQCVNLTTR

SEQ ID NO: 6425 - protein, 9 aa, Severe acute respiratory syndrome coronavirus 2
  REGION 1..9: note = Table A: HLA-B*55:01H
TTRTQLPPA

SEQ ID NO: 6426 - protein, 9 aa, Severe acute respiratory syndrome coronavirus 2
  REGION 1..9: note = Table A: HLA-B*27:05M HLA-C*07:02H HLA-B*27:02M HLA-B*38:02H HLA-B*39:06H HLA-B*39:01M
TRTQLPPAY

SEQ ID NO: 6427 - protein, 9 aa, Severe acute respiratory syndrome coronavirus 2
  REGION 1..9: note = Table A: HLA-B*38:02H HLA-B*39:01H
TQLPPAYTN

SEQ ID NO: 6428 - protein, 9 aa, Severe acute respiratory syndrome coronavirus 2
  REGION 1..9: note = Table A: HLA-C*14:03H HLA-B*53:01M HLA-B*35:03H HLA-C*15:05M HLA-B*35:01M HLA-B*35:02H HLA-B*35:08H HLA-B*51:01H HLA-B*35:07M HLA-B*35:12H HLA-B*38:02H HLA-B*15:02H HLA-B*07:05M HLA-B*15:11H
LPPAYTNSF

SEQ ID NO: 6429 - protein, 9 aa, Severe acute respiratory syndrome coronavirus 2
  REGION 1..9: note = Table A: HLA-A*68:01H HLA-A*34:01H HLA-A*66:01H
PAYTNSFTR

SEQ ID NO: 6430 - protein, 9 aa, Severe acute respiratory syndrome coronavirus 2
  REGION 1..9: note = Table A: HLA-A*02:11H HLA-A*68:02H HLA-C*15:02H HLA-A*02:02H HLA-A*02:03H
YTNSFTRGV

SEQ ID NO: 6431 - protein, 9 aa, Severe acute respiratory syndrome coronavirus 2
  REGION 1..9: note = Table A: HLA-A*30:02H
TNSFTRGVY

SEQ ID NO: 6432 - protein, 9 aa, Severe acute respiratory syndrome coronavirus 2
  REGION 1..9: note = Table A: HLA-C*16:01M HLA-C*12:02H HLA-C*12:03H
NSFTRGVYY

SEQ ID NO: 6433 - protein, 9 aa, Severe acute respiratory syndrome coronavirus 2
  REGION 1..9: note = Table A: HLA-B*38:02H HLA-B*07:04H HLA-B*15:01H HLA-B*15:02M HLA-B*15:03H
GVYYPDKVF

SEQ ID NO: 6434 - protein, 9 aa, Severe acute respiratory syndrome coronavirus 2
  REGION 1..9: note = Table A: HLA-C*14:03H HLA-A*74:01H HLA-A*11:01H HLA-A*11:02H HLA-A*33:01H HLA-A*33:03H HLA-A*29:02H HLA-A*30:02H HLA-A*34:01H HLA-A*34:02H HLA-A*24:07H HLA-A*31:01H HLA-A*66:01H
VYYPDKVFR

SEQ ID NO: 6435 - protein, 9 aa, Severe acute respiratory syndrome coronavirus 2
  REGION 1..9: note = Table A: HLA-B*54:01H
YPDKVFRSS

SEQ ID NO: 6436 - protein, 9 aa, Severe acute respiratory syndrome coronavirus 2
  REGION 1..9: note = Table A: HLA-B*14:02H
DKVFRSSVL

SEQ ID NO: 6437 - protein, 9 aa, Severe acute respiratory syndrome coronavirus 2
  REGION 1..9: note = Table A: HLA-B*39:06H
FRSSVLHST

SEQ ID NO: 6438 - protein, 9 aa, Severe acute respiratory syndrome coronavirus 2
  REGION 1..9: note = Table A: HLA-C*15:05H
SVLHSTQDL

SEQ ID NO: 6439 - protein, 9 aa, Severe acute respiratory syndrome coronavirus 2
  REGION 1..9: note = Table A: HLA-A*24:07H HLA-B*38:02H HLA-B*13:01H
VLHSTQDLF

SEQ ID NO: 6440 - protein, 9 aa, Severe acute respiratory syndrome coronavirus 2
  REGION 1..9: note = Table A: HLA-B*38:01M HLA-B*38:02H HLA-B*15:10H
LHSTQDLFL

SEQ ID NO: 6441 - protein, 9 aa, Severe acute respiratory syndrome coronavirus 2
  REGION 1..9: note = Table A: HLA-C*04:03H HLA-B*38:01H HLA-B*38:02H HLA-B*13:01H
TQDLFLPFF

SEQ ID NO: 6442 - protein, 9 aa, Severe acute respiratory syndrome coronavirus 2
  REGION 1..9: note = Table A: HLA-B*58:01H HLA-B*53:01H HLA-B*35:01H HLA-B*51:01H HLA-B*35:07M HLA-B*38:02H HLA-B*54:01H HLA-B*07:05H
LPFFSNVTW

SEQ ID NO: 6443 - protein, 9 aa, Severe acute respiratory syndrome coronavirus 2
  REGION 1..9: note = Table A: HLA-A*24:07H
PFFSNVTWF

SEQ ID NO: 6444 - protein, 9 aa, Severe acute respiratory syndrome coronavirus 2
  REGION 1..9: note = Table A: HLA-A*29:02H
FFSNVTWFH

SEQ ID NO: 6445 - protein, 9 aa, Severe acute respiratory syndrome coronavirus 2
  REGION 1..9: note = Table A: HLA-C*15:02H HLA-A*02:04H
SNVTWFHAI

SEQ ID NO: 6446 - protein, 9 aa, Severe acute respiratory syndrome coronavirus 2
  REGION 1..9: note = Table A: HLA-B*58:02H HLA-C*04:03H HLA-C*07:01H HLA-A*02:11H HLA-A*68:02M HLA-C*15:02M HLA-A*02:04H HLA-A*02:06H HLA-A*02:07H HLA-A*34:02H HLA-C*08:01H HLA-B*40:06H HLA-B*57:03M HLA-B*13:02H HLA-C*07:04H
VTWFHAIHV

SEQ ID NO: 6447 - protein, 9 aa, Severe acute respiratory syndrome coronavirus 2
  REGION 1..9: note = Table A: HLA-B*38:02M HLA-B*39:06H HLA-B*39:01H HLA-B*15:10H
FHAIHVSGT

SEQ ID NO: 6448 - protein, 9 aa, Severe acute respiratory syndrome coronavirus 2
  REGION 1..9: note = Table A: HLA-B*38:01H HLA-B*38:02H HLA-B*39:06H HLA-B*39:01H
IHVSGTNGT

SEQ ID NO: 6449 - protein, 9 aa, Severe acute respiratory syndrome coronavirus 2
  REGION 1..9: note = Table A: HLA-A*03:02H HLA-A*68:01H HLA-A*34:01H HLA-A*34:02M HLA-A*66:01H
HVSGTNGTK

SEQ ID NO: 6450 - protein, 9 aa, Severe acute respiratory syndrome coronavirus 2
  REGION 1..9: note = Table A: HLA-B*15:03M
TKRFDNPVL

SEQ ID NO: 6451 - protein, 9 aa, Severe acute respiratory syndrome coronavirus 2
  REGION 1..9: note = Table A: HLA-C*06:02H HLA-B*27:05H
KRFDNPVLP

SEQ ID NO: 6452 - protein, 9 aa, Severe acute respiratory syndrome coronavirus 2
  REGION 1..9: note = Table A: HLA-C*04:01H HLA-C*04:03M HLA-A*24:07H
RFDNPVLPF

SEQ ID NO: 6453 - protein, 9 aa, Severe acute respiratory syndrome coronavirus 2
  REGION 1..9: note = Table A: HLA-B*53:01H HLA-B*35:03H HLA-C*15:05H HLA-A*34:01H HLA-B*35:01M HLA-B*35:02H HLA-B*35:08H HLA-B*35:07H HLA-B*35:12H HLA-B*38:02H HLA-B*54:01H HLA-B*15:02H HLA-B*07:05H HLA-B*15:11H
LPFNDGVYF

SEQ ID NO: 6454 - protein, 9 aa, Severe acute respiratory syndrome coronavirus 2
  REGION 1..9: note = Table A: HLA-A*11:303M HLA-A*03:01H HLA-A*03:02H HLA-A*11:01H HLA-A*11:02H HLA-A*36:01H HLA-B*27:02H HLA-A*30:02H HLA-A*68:01H HLA-A*34:01H HLA-A*34:02H HLA-C*07:27M HLA-A*66:01H
GVYFASTEK

SEQ ID NO: 6455 - protein, 9 aa, Severe acute respiratory syndrome coronavirus 2
  REGION 1..9: note = Table A: HLA-A*68:01M HLA-A*34:02H HLA-A*66:01H
STEKSNIIR

SEQ ID NO: 6456 - protein, 9 aa, Severe acute respiratory syndrome coronavirus 2
  REGION 1..9: note = Table A: HLA-B*58:02H
KSNIIRGWI

SEQ ID NO: 6457 - protein, 9 aa, Severe acute respiratory syndrome coronavirus 2
  REGION 1..9: note = Table A: HLA-C*16:01H
SNIIRGWIF

SEQ ID NO: 6458 - protein, 9 aa, Severe acute respiratory syndrome coronavirus 2
  REGION 1..9: note = Table A: HLA-B*48:01H HLA-B*15:03H HLA-B*57:03H
RGWIFGTTL

SEQ ID NO: 6459 - protein, 9 aa, Severe acute respiratory syndrome coronavirus 2
  REGION 1..9: note = Table A: HLA-A*36:01H
IFGTTLDSK

SEQ ID NO: 6460 - protein, 9 aa, Severe acute respiratory syndrome coronavirus 2
  REGION 1..9: note = Table A: HLA-A*11:303M HLA-B*08:01H HLA-A*02:11M HLA-C*15:05H HLA-C*01:02H HLA-A*02:05H HLA-A*02:07H HLA-B*14:01M HLA-A*02:01M HLA-A*02:02H HLA-A*02:03H HLA-C*08:01H HLA-C*08:02M HLA-B*38:01H HLA-B*38:02H
  REGION 1..9: note = CONT. FROM ABOVE: HLA-B*07:02H HLA-B*15:02H HLA-B*39:01H HLA- B*07:05H HLA-C*05:01H HLA-B*13:01M
TLDSKTQSL

SEQ ID NO: 6461 - protein, 9 aa, Severe acute respiratory syndrome coronavirus 2
  REGION 1..9: note = Table A: HLA-C*15:05H HLA-B*51:01M
DSKTQSLLI

SEQ ID NO: 6462 - protein, 9 aa, Severe acute respiratory syndrome coronavirus 2
  REGION 1..9: note = Table A: HLA-C*15:05H HLA-A*02:03H HLA-B*38:02H
IVNNATNVV

SEQ ID NO: 6463 - protein, 9 aa, Severe acute respiratory syndrome coronavirus 2
  REGION 1..9: note = Table A: HLA-C*15:05H
VNNATNVVI

SEQ ID NO: 6464 - protein, 9 aa, Severe acute respiratory syndrome coronavirus 2
  REGION 1..9: note = Table A: HLA-A*68:01H HLA-A*34:02H
NNATNVVIK

SEQ ID NO: 6465 - protein, 9 aa, Severe acute respiratory syndrome coronavirus 2
  REGION 1..9: note = Table A: HLA-B*58:01H HLA-A*11:303H HLA-C*16:01M HLA-C*16:04H HLA-C*06:02M HLA-A*29:01H HLA-C*04:03H HLA-C*12:05H HLA-A*02:11M HLA-B*53:01M HLA-C*03:04H HLA-A*68:01M HLA-A*68:02H HLA-B*35:03H HLA-C*15:05M
  REGION 1..9: note = CONT. FROM ABOVE: HLA-C*12:02H HLA-C*12:03H HLA-C*15:02H HLA- A*02:04M HLA-A*02:05H HLA-A*02:06H HLA-A*02:07M HLA-A*02:08H HLA-A*02:01M HLA-A*02:02M HLA-A*02:03H HLA-A*34:02H HLA-B*35 :01M HLA-B*35:02H HLA-B*51:01M HLA-C*17:01M HLA-B*35:07H
  REGION 1..9: note = CONT. FROM ABOVE: HLA-C*08:01M HLA-B*38:02M HLA-B*54:01H HLA- B*07:05H HLA-B*57:03H HLA-C*02:02M HLA-B*13:02H HLA-C*07:04M
NATNVVIKV

SEQ ID NO: 6466 - protein, 9 aa, Severe acute respiratory syndrome coronavirus 2
  REGION 1..9: note = Table A: HLA-A*25:01M HLA-A*26:01H HLA-A*26:02M HLA-B*38:02H HLA-B*15:02H
NVVIKVCEF

SEQ ID NO: 6467 - protein, 9 aa, Severe acute respiratory syndrome coronavirus 2
  REGION 1..9: note = Table A: HLA-B*50:01H
CEFQFCNDP

SEQ ID NO: 6468 - protein, 9 aa, Severe acute respiratory syndrome coronavirus 2
  REGION 1..9: note = Table A: HLA-A*02:05H HLA-B*38:02H
FQFCNDPFL

SEQ ID NO: 6469 - protein, 9 aa, Severe acute respiratory syndrome coronavirus 2
  REGION 1..9: note = Table A: HLA-A*36:01H
CNDPFLGVY

SEQ ID NO: 6470 - protein, 9 aa, Severe acute respiratory syndrome coronavirus 2
  REGION 1..9: note = Table A: HLA-A*33:01H HLA-A*34:01H HLA-A*34:02H HLA-B*35:01H HLA-B*35:07H
DPFLGVYYH

SEQ ID NO: 6471 - protein, 9 aa, Severe acute respiratory syndrome coronavirus 2
  REGION 1..9: note = Table A: HLA-A*03:01M HLA-A*03:02H HLA-A*11:01M HLA-A*11:02M HLA-A*34:02M HLA-C*07:27H
GVYYHKNNK

SEQ ID NO: 6472 - protein, 9 aa, Severe acute respiratory syndrome coronavirus 2
  REGION 1..9: note = Table A: HLA-A*24:07M
YYHKNNKSW

SEQ ID NO: 6473 - protein, 9 aa, Severe acute respiratory syndrome coronavirus 2
  REGION 1..9: note = Table A: HLA-B*15:03H
NKSWMESEF

SEQ ID NO: 6474 - protein, 9 aa, Severe acute respiratory syndrome coronavirus 2
  REGION 1..9: note = Table A: HLA-A*74:01H HLA-A*36:01H
KSWMESEFR

SEQ ID NO: 6475 - protein, 9 aa, Severe acute respiratory syndrome coronavirus 2
  REGION 1..9: note = Table A: HLA-A*02:01H
SWMESEFRV

SEQ ID NO: 6476 - protein, 9 aa, Severe acute respiratory syndrome coronavirus 2
  REGION 1..9: note = Table A: HLA-A*36:01H HLA-B*38:02H HLA-B*15:02M
WMESEFRVY

SEQ ID NO: 6477 - protein, 9 aa, Severe acute respiratory syndrome coronavirus 2
  REGION 1..9: note = Table A: HLA-B*45:01M HLA-B*44:03H HLA-B*18:01H HLA-A*68:02H HLA-B*40:06H HLA-B*49:01H HLA-B*50:01M
MESEFRVYS

SEQ ID NO: 6478 - protein, 9 aa, Severe acute respiratory syndrome coronavirus 2
  REGION 1..9: note = Table A: HLA-B*56:01H HLA-B*45:01H HLA-B*18:01H HLA-B*55:02H HLA-B*39:06H HLA-B*40:02M HLA-B*40:06H HLA-B*54:01H HLA-B*07:05H HLA-B*41:02H HLA-B*49:01H HLA-B*50:01H
SEFRVYSSA

SEQ ID NO: 6479 - protein, 9 aa, Severe acute respiratory syndrome coronavirus 2
  REGION 1..9: note = Table A: HLA-A*02:08H
RVYSSANNC

SEQ ID NO: 6480 - protein, 9 aa, Severe acute respiratory syndrome coronavirus 2
  REGION 1..9: note = Table A: HLA-C*15:05H
YSSANNCTF

SEQ ID NO: 6481 - protein, 9 aa, Severe acute respiratory syndrome coronavirus 2
  REGION 1..9: note = Table A: HLA-B*58:01H HLA-A*11:303H HLA-C*16:01H HLA-C*16:04M HLA-A*11:01H HLA-B*46:01M HLA-A*29:01M HLA-A*29:02H HLA-C*03:02H HLA-A*30:02H HLA-C*15:05H HLA-C*12:02H HLA-C*12:03H HLA-C*07:27H HLA-B*35:01H
  REGION 1..9: note = CONT. FROM ABOVE: HLA-B*35:08H HLA-B*35:07H HLA-B*38:02M HLA- B*15:01H HLA-B*15:02H HLA-B*07:05H HLA-C*02:02H
SANNCTFEY

SEQ ID NO: 6482 - protein, 9 aa, Severe acute respiratory syndrome coronavirus 2
  REGION 1..9: note = Table A: HLA-C*14:03H HLA-A*29:02H HLA-C*04:01H HLA-C*04:03H
TFEYVSQPF

SEQ ID NO: 6483 - protein, 9 aa, Severe acute respiratory syndrome coronavirus 2
  REGION 1..9: note = Table A: HLA-B*40:01M HLA-B*40:02M HLA-B*40:06H HLA-B*41:02H HLA-B*49:01M HLA-B*50:01H
FEYVSQPFL

SEQ ID NO: 6484 - protein, 9 aa, Severe acute respiratory syndrome coronavirus 2
  REGION 1..9: note = Table A: HLA-A*24:02H HLA-A*24:07M HLA-A*23:01H
EYVSQPFLM

SEQ ID NO: 6485 - protein, 9 aa, Severe acute respiratory syndrome coronavirus 2
  REGION 1..9: note = Table A: HLA-C*03:03H HLA-C*03:02H HLA-C*03:04H HLA-C*15:05H HLA-C*15:02M HLA-C*08:01H
VSQPFLMDL

SEQ ID NO: 6486 - protein, 9 aa, Severe acute respiratory syndrome coronavirus 2
  REGION 1..9: note = Table A: HLA-B*54:01H
QPFLMDLEG

SEQ ID NO: 6487 - protein, 9 aa, Severe acute respiratory syndrome coronavirus 2
  REGION 1..9: note = Table A: HLA-A*74:01M HLA-A*31:01H
KQGNFKNLR

SEQ ID NO: 6488 - protein, 9 aa, Severe acute respiratory syndrome coronavirus 2
  REGION 1..9: note = Table A: HLA-B*15:03H
FKNLREFVF

SEQ ID NO: 6489 - protein, 9 aa, Severe acute respiratory syndrome coronavirus 2
  REGION 1..9: note = Table A: HLA-A*36:01H HLA-A*26:01M HLA-A*26:02H HLA-A*29:01H HLA-A*29:02H HLA-A*30:02H HLA-A*34:02H HLA-B*35:01M HLA-B*35:07M HLA-B*38:02M HLA-B*15:01H HLA-B*15:02M
FVFKNIDGY

SEQ ID NO: 6490 - protein, 9 aa, Severe acute respiratory syndrome coronavirus 2
  REGION 1..9: note = Table A: HLA-C*14:02H HLA-C*14:03H HLA-A*29:02H HLA-A*30:02H HLA-A*24:02H HLA-A*24:07M HLA-A*23:01H
VFKNIDGYF

SEQ ID NO: 6491 - protein, 9 aa, Severe acute respiratory syndrome coronavirus 2
  REGION 1..9: note = Table A: HLA-C*15:02H HLA-B*57:03H
KNIDGYFKI

SEQ ID NO: 6492 - protein, 9 aa, Severe acute respiratory syndrome coronavirus 2
  REGION 1..9: note = Table A: HLA-A*36:01H HLA-A*02:07H
NIDGYFKIY

SEQ ID NO: 6493 - protein, 9 aa, Severe acute respiratory syndrome coronavirus 2
  REGION 1..9: note = Table A: HLA-A*33:01H HLA-A*33:03H HLA-A*34:02M
DGYFKIYSK

SEQ ID NO: 6494 - protein, 9 aa, Severe acute respiratory syndrome coronavirus 2
  REGION 1..9: note = Table A: HLA-B*58:02M HLA-C*16:01H HLA-B*08:01H HLA-C*03:04H HLA-A*68:02H HLA-C*12:02H HLA-C*12:03H HLA-C*15:02H HLA-C*17:01M HLA-B*07:04H HLA-B*57:03M HLA-C*02:02H HLA-C*07:04H
YSKHTPINL

SEQ ID NO: 6495 - protein, 9 aa, Severe acute respiratory syndrome coronavirus 2
  REGION 1..9: note = Table A: HLA-B*42:01H HLA-B*53:01H HLA-B*35:03M HLA-C*15:05M HLA-B*35:01H HLA-B*35:07H HLA-B*07:02H HLA-B*07:04M HLA-B*07:05H
TPINLVRDL

SEQ ID NO: 6496 - protein, 9 aa, Severe acute respiratory syndrome coronavirus 2
  REGION 1..9: note = Table A: HLA-B*38:02H HLA-B*15:01H HLA-B*57:03H
LVRDLPQGF

SEQ ID NO: 6497 - protein, 9 aa, Severe acute respiratory syndrome coronavirus 2
  REGION 1..9: note = Table A: HLA-B*40:06H HLA-B*50:01H
RDLPQGFSA

SEQ ID NO: 6498 - protein, 9 aa, Severe acute respiratory syndrome coronavirus 2
  REGION 1..9: note = Table A: HLA-A*25:01M HLA-A*26:01H HLA-A*26:02M HLA-A*26:03H HLA-B*08:01H HLA-A*68:02H HLA-C*01:02M HLA-B*14:01H HLA-A*34:01M HLA-A*34:02H HLA-B*38:02H HLA-B*15:02H HLA-B*07:05H HLA-A*66:01H
DLPQGFSAL

SEQ ID NO: 6499 - protein, 9 aa, Severe acute respiratory syndrome coronavirus 2
  REGION 1..9: note = Table A: HLA-A*11:303H HLA-C*03:03H HLA-C*03:04H HLA-C*17:01H HLA-C*08:01H
SALEPLVDL

SEQ ID NO: 6500 - protein, 9 aa, Severe acute respiratory syndrome coronavirus 2
  REGION 1..9: note = Table A: HLA-A*02:01H HLA-B*13:02H
PLVDLPIGI

SEQ ID NO: 6501 - protein, 9 aa, Severe acute respiratory syndrome coronavirus 2
  REGION 1..9: note = Table A: HLA-A*33:01H HLA-A*33:03H HLA-A*26:03H HLA-A*68:01M HLA-A*34:01H HLA-A*34:02H HLA-A*66:01M
LPIGINITR

SEQ ID NO: 6502 - protein, 9 aa, Severe acute respiratory syndrome coronavirus 2
  REGION 1..9: note = Table A: HLA-C*15:02H
INITRFQTL

SEQ ID NO: 6503 - protein, 9 aa, Severe acute respiratory syndrome coronavirus 2
  REGION 1..9: note = Table A: HLA-C*17:01H
NITRFQTLL

SEQ ID NO: 6504 - protein, 9 aa, Severe acute respiratory syndrome coronavirus 2
  REGION 1..9: note = Table A: HLA-C*06:02H HLA-B*27:05M HLA-C*07:01H HLA-B*27:02H HLA-B*14:02M HLA-B*14:01M HLA-B*38:02M HLA-B*39:01H HLA-B*15:10H
TRFQTLLAL

SEQ ID NO: 6505 - protein, 9 aa, Severe acute respiratory syndrome coronavirus 2
  REGION 1..9: note = Table A: HLA-A*30:02H
RFQTLLALH

SEQ ID NO: 6506 - protein, 9 aa, Severe acute respiratory syndrome coronavirus 2
  REGION 1..9: note = Table A: HLA-A*29:02H HLA-A*30:02H HLA-B*38:02H HLA-B*15:02M
TLLALHRSY

SEQ ID NO: 6507 - protein, 9 aa, Severe acute respiratory syndrome coronavirus 2
  REGION 1..9: note = Table A: HLA-A*02:11H HLA-A*02:02M
LLALHRSYL

SEQ ID NO: 6508 - protein, 9 aa, Severe acute respiratory syndrome coronavirus 2
  REGION 1..9: note = Table A: HLA-B*53:01H HLA-B*15:13H
TPGDSSSGW

SEQ ID NO: 6509 - protein, 9 aa, Severe acute respiratory syndrome coronavirus 2
  REGION 1..9: note = Table A: HLA-B*39:06H
SGWTAGAAA

SEQ ID NO: 6510 - protein, 9 aa, Severe acute respiratory syndrome coronavirus 2
  REGION 1..9: note = Table A: HLA-A*26:01M HLA-A*26:03H HLA-A*29:02M HLA-A*34:02H HLA-B*38:02H HLA-A*66:01H
WTAGAAAYY

SEQ ID NO: 6511 - protein, 9 aa, Severe acute respiratory syndrome coronavirus 2
  REGION 1..9: note = Table A: HLA-B*35:01M HLA-B*35:07H HLA-B*38:02H HLA-B*15:01H
GAAAYYVGY

SEQ ID NO: 6512 - protein, 9 aa, Severe acute respiratory syndrome coronavirus 2
  REGION 1..9: note = Table A: HLA-C*03:04H HLA-C*12:03H HLA-C*17:01M
AAAYYVGYL

SEQ ID NO: 6513 - protein, 9 aa, Severe acute respiratory syndrome coronavirus 2
  REGION 1..9: note = Table A: HLA-A*33:01M HLA-A*33:03H HLA-A*34:01H HLA-A*31:01H HLA-A*66:01H
YYVGYLQPR

SEQ ID NO: 6514 - protein, 9 aa, Severe acute respiratory syndrome coronavirus 2
  REGION 1..9: note = Table A: HLA-B*58:02M HLA-C*16:01H HLA-B*46:01H HLA-C*03:02H HLA-C*15:05H HLA-C*12:02H HLA-C*12:03H HLA-B*51:01H HLA-B*52:01H HLA-B*15:03H
VGYLQPRTF

SEQ ID NO: 6515 - protein, 9 aa, Severe acute respiratory syndrome coronavirus 2
  REGION 1..9: note = Table A: HLA-A*24:07H HLA-A*23:01H
GYLQPRTFL

SEQ ID NO: 6516 - protein, 9 aa, Severe acute respiratory syndrome coronavirus 2
  REGION 1..9: note = Table A: HLA-A*74:01H HLA-B*08:01H HLA-A*02:11M HLA-C*03:02H HLA-C*03:04H HLA-C*15:02H HLA-A*02:04H HLA-A*02:05H HLA-A*02:07H HLA-A*02:01H HLA-A*02:02H HLA-A*02:03H HLA-C*17:01H HLA-A*24:07H HLA-C*08:01H HLA-B*38:02H
  REGION 1..9: note = CONT. FROM ABOVE: HLA-B*40:06H HLA-C*07:04H
YLQPRTFLL

SEQ ID NO: 6517 - protein, 9 aa, Severe acute respiratory syndrome coronavirus 2
  REGION 1..9: note = Table A: HLA-B*35:07H HLA-B*38:02H HLA-B*07:04H
QPRTFLLKY

SEQ ID NO: 6518 - protein, 9 aa, Severe acute respiratory syndrome coronavirus 2
  REGION 1..9: note = Table A: HLA-B*45:01M HLA-B*50:01H
NENGTITDA

SEQ ID NO: 6519 - protein, 9 aa, Severe acute respiratory syndrome coronavirus 2
  REGION 1..9: note = Table A: HLA-A*02:05H HLA-A*02:08H HLA-B*39:01H
TITDAVDCA

SEQ ID NO: 6520 - protein, 9 aa, Severe acute respiratory syndrome coronavirus 2
  REGION 1..9: note = Table A: HLA-C*04:03M HLA-A*02:07H HLA-B*35:02M HLA-C*08:01H HLA-C*08:02M HLA-B*35:12H HLA-B*38:02H HLA-C*05:01H
ITDAVDCAL

SEQ ID NO: 6521 - protein, 9 aa, Severe acute respiratory syndrome coronavirus 2
  REGION 1..9: note = Table A: HLA-A*11:303H HLA-A*03:01H HLA-A*03:02M HLA-A*11:01H HLA-A*11:02H HLA-A*36:01M HLA-B*27:02H HLA-A*02:07H HLA-B*38:02H
ALDPLSETK

SEQ ID NO: 6522 - protein, 9 aa, Severe acute respiratory syndrome coronavirus 2
  REGION 1..9: note = Table A: HLA-A*02:02M
PLSETKCTL

SEQ ID NO: 6523 - protein, 9 aa, Severe acute respiratory syndrome coronavirus 2
  REGION 1..9: note = Table A: HLA-A*25:01H
ETKCTLKSF

SEQ ID NO: 6524 - protein, 9 aa, Severe acute respiratory syndrome coronavirus 2
  REGION 1..9: note = Table A: HLA-A*74:01M HLA-A*03:01M HLA-A*03:02M HLA-A*11:01H HLA-A*11:02H HLA-A*33:01H HLA-A*33:03H HLA-B*46:01H HLA-A*30:01M HLA-A*30:02H HLA-A*68:01H HLA-A*34:01H HLA-A*34:02M HLA-B*38:02H HLA-B*15:02H HLA-A*31:01H
  REGION 1..9: note = CONT. FROM ABOVE: HLA-A*66:01H
TLKSFTVEK

SEQ ID NO: 6525 - protein, 9 aa, Severe acute respiratory syndrome coronavirus 2
  REGION 1..9: note = Table A: HLA-B*58:01H HLA-B*58:02H HLA-A*02:11H HLA-B*57:03M HLA-B*13:02H
KSFTVEKGI

SEQ ID NO: 6526 - protein, 9 aa, Severe acute respiratory syndrome coronavirus 2
  REGION 1..9: note = Table A: HLA-A*34:01H HLA-A*66:01M
FTVEKGIYQ

SEQ ID NO: 6527 - protein, 9 aa, Severe acute respiratory syndrome coronavirus 2
  REGION 1..9: note = Table A: HLA-A*02:05H HLA-A*02:08H HLA-B*39:01H
TVEKGIYQT

SEQ ID NO: 6528 - protein, 9 aa, Severe acute respiratory syndrome coronavirus 2
  REGION 1..9: note = Table A: HLA-B*58:01H HLA-B*58:02H HLA-B*46:01H HLA-A*30:02H HLA-C*15:05H HLA-C*12:02H HLA-A*24:02H HLA-A*23:01H HLA-B*15:01M HLA-B*15:03H HLA-B*57:03M
KGIYQTSNF

SEQ ID NO: 6529 - protein, 9 aa, Severe acute respiratory syndrome coronavirus 2
  REGION 1..9: note = Table A: HLA-A*74:01H HLA-A*03:01H HLA-A*34:01H HLA-A*66:01H
GIYQTSNFR

SEQ ID NO: 6530 - protein, 9 aa, Severe acute respiratory syndrome coronavirus 2
  REGION 1..9: note = Table A: HLA-C*14:03H HLA-A*24:07H
IYQTSNFRV

SEQ ID NO: 6531 - protein, 9 aa, Severe acute respiratory syndrome coronavirus 2
  REGION 1..9: note = Table A: HLA-C*08:03H
TSNFRVQPT

SEQ ID NO: 6532 - protein, 9 aa, Severe acute respiratory syndrome coronavirus 2
  REGION 1..9: note = Table A: HLA-C*06:02H HLA-B*27:05H HLA-C*07:02H HLA-B*27:02M HLA-B*14:02M HLA-B*14:01M HLA-B*38:01M HLA-B*38:02H HLA-B*39:01M HLA-B*15:10H
FRVQPTESI

SEQ ID NO: 6533 - protein, 9 aa, Severe acute respiratory syndrome coronavirus 2
  REGION 1..9: note = Table A: HLA-C*15:05H HLA-B*38:02H HLA-B*13:02H
RVQPTESIV

SEQ ID NO: 6534 - protein, 9 aa, Severe acute respiratory syndrome coronavirus 2
  REGION 1..9: note = Table A: HLA-B*42:01H HLA-B*56:01H HLA-B*27:02H HLA-B*53:01H HLA-B*55:02H HLA-B*35:03M HLA-C*15:05M HLA-B*55:01H HLA-A*34:01H HLA-B*35:01H HLA-B*35:02M HLA-B*35:08M HLA-B*35:07H HLA-B*35:12M HLA-B*38:02H HLA-B*54:01H
  REGION 1..9: note = CONT. FROM ABOVE: HLA-B*07:02H HLA-B*07:04H HLA-B*07:05M HLA- B*57:03H
QPTESIVRF

SEQ ID NO: 6535 - protein, 9 aa, Severe acute respiratory syndrome coronavirus 2
  REGION 1..9: note = Table A: HLA-A*68:02H
ESIVRFPNI

SEQ ID NO: 6536 - protein, 9 aa, Severe acute respiratory syndrome coronavirus 2
  REGION 1..9: note = Table A: HLA-C*06:02H HLA-B*27:05H HLA-C*07:01M HLA-C*07:02M HLA-B*27:02H HLA-B*14:02H HLA-A*02:04H HLA-B*14:01M HLA-C*17:01H HLA-A*23:01H HLA-B*38:02M HLA-B*39:01M HLA-B*15:10H HLA-C*07:04M
VRFPNITNL

SEQ ID NO: 6537 - protein, 9 aa, Severe acute respiratory syndrome coronavirus 2
  REGION 1..9: note = Table A: HLA-B*38:02H HLA-B*15:02M
NLCPFGEVF

SEQ ID NO: 6538 - protein, 9 aa, Severe acute respiratory syndrome coronavirus 2
  REGION 1..9: note = Table A: HLA-B*56:01M HLA-B*55:02M HLA-B*54:01M
CPFGEVFNA

SEQ ID NO: 6539 - protein, 9 aa, Severe acute respiratory syndrome coronavirus 2
  REGION 1..9: note = Table A: HLA-B*44:02H HLA-B*44:05H HLA-B*44:03M HLA-B*40:01H HLA-B*40:02M HLA-B*07:05H HLA-B*41:02H HLA-B*49:01H
GEVFNATRF

SEQ ID NO: 6540 - protein, 9 aa, Severe acute respiratory syndrome coronavirus 2
  REGION 1..9: note = Table A: HLA-A*26:03H HLA-A*68:02H HLA-A*34:01M HLA-A*66:01H
EVFNATRFA

SEQ ID NO: 6541 - protein, 9 aa, Severe acute respiratory syndrome coronavirus 2
  REGION 1..9: note = Table A: HLA-C*16:01H HLA-B*08:01H HLA-C*15:02H HLA-A*02:03H
FNATRFASV

SEQ ID NO: 6542 - protein, 9 aa, Severe acute respiratory syndrome coronavirus 2
  REGION 1..9: note = Table A: HLA-C*16:01H HLA-C*16:04H HLA-B*53:01H HLA-C*03:02H HLA-C*12:02H HLA-C*12:03H HLA-B*35:01H HLA-B*35:07H HLA-B*38:02H HLA-B*15:02M HLA-B*07:05H HLA-C*02:02H
NATRFASVY

SEQ ID NO: 6543 - protein, 9 aa, Severe acute respiratory syndrome coronavirus 2
  REGION 1..9: note = Table A: HLA-B*27:05M HLA-C*07:01H HLA-B*27:02M HLA-B*14:02H HLA-B*38:01H HLA-B*38:02M
TRFASVYAW

SEQ ID NO: 6544 - protein, 9 aa, Severe acute respiratory syndrome coronavirus 2
  REGION 1..9: note = Table A: HLA-A*33:03H HLA-A*68:01H HLA-A*66:01H
FASVYAWNR

SEQ ID NO: 6545 - protein, 9 aa, Severe acute respiratory syndrome coronavirus 2
  REGION 1..9: note = Table A: HLA-A*74:01H HLA-A*11:02H HLA-A*33:01H HLA-A*33:03H HLA-A*34:01M HLA-A*34:02M HLA-A*31:01H HLA-A*66:01M
SVYAWNRKR

SEQ ID NO: 6546 - protein, 9 aa, Severe acute respiratory syndrome coronavirus 2
  REGION 1..9: note = Table A: HLA-A*24:07H
VYAWNRKRI

SEQ ID NO: 6547 - protein, 9 aa, Severe acute respiratory syndrome coronavirus 2
  REGION 1..9: note = Table A: HLA-A*30:02M HLA-B*15:01H
RISNCVADY

SEQ ID NO: 6548 - protein, 9 aa, Severe acute respiratory syndrome coronavirus 2
  REGION 1..9: note = Table A: HLA-A*26:01H HLA-A*29:01M HLA-A*29:02M HLA-A*30:02H HLA-B*35:01H HLA-B*35:07H HLA-B*38:02M HLA-B*15:01H HLA-B*15:02H HLA-B*07:05H
CVADYSVLY

SEQ ID NO: 6549 - protein, 9 aa, Severe acute respiratory syndrome coronavirus 2
  REGION 1..9: note = Table A: HLA-A*11:303H HLA-A*25:01H HLA-B*46:01H HLA-A*26:03H HLA-C*15:05H HLA-A*34:01H HLA-A*34:02H HLA-B*35:01H HLA-B*38:02H HLA-B*15:01M HLA-B*15:02M HLA-B*07:05M HLA-A*66:01H
SVLYNSASF

SEQ ID NO: 6550 - protein, 9 aa, Severe acute respiratory syndrome coronavirus 2
  REGION 1..9: note = Table A: HLA-C*15:05H HLA-B*38:02H HLA-B*07:05H
YNSASFSTF

SEQ ID NO: 6551 - protein, 9 aa, Severe acute respiratory syndrome coronavirus 2
  REGION 1..9: note = Table A: HLA-A*11:01M HLA-A*11:02H HLA-A*33:03H HLA-A*68:01H HLA-A*34:01H HLA-A*34:02H HLA-C*07:27H HLA-A*66:01M
NSASFSTFK

SEQ ID NO: 6552 - protein, 9 aa, Severe acute respiratory syndrome coronavirus 2
  REGION 1..9: note = Table A: HLA-A*30:02M HLA-B*15:01H
ASFSTFKCY

SEQ ID NO: 6553 - protein, 9 aa, Severe acute respiratory syndrome coronavirus 2
  REGION 1..9: note = Table A: HLA-A*31:01H
SFSTFKCYG

SEQ ID NO: 6554 - protein, 9 aa, Severe acute respiratory syndrome coronavirus 2
  REGION 1..9: note = Table A: HLA-A*03:01H
KCYGVSPTK

SEQ ID NO: 6555 - protein, 9 aa, Severe acute respiratory syndrome coronavirus 2
  REGION 1..9: note = Table A: HLA-A*24:02H HLA-A*23:01H
CYGVSPTKL

SEQ ID NO: 6556 - protein, 9 aa, Severe acute respiratory syndrome coronavirus 2
  REGION 1..9: note = Table A: HLA-C*01:02M
VSPTKLNDL

SEQ ID NO: 6557 - protein, 9 aa, Severe acute respiratory syndrome coronavirus 2
  REGION 1..9: note = Table A: HLA-B*18:01M HLA-B*07:05H
NDLCFTNVY

SEQ ID NO: 6558 - protein, 9 aa, Severe acute respiratory syndrome coronavirus 2
  REGION 1..9: note = Table A: HLA-B*58:01H HLA-C*14:03H HLA-C*16:01H HLA-B*46:01H HLA-B*35:01H HLA-B*38:02H
FTNVYADSF

SEQ ID NO: 6559 - protein, 9 aa, Severe acute respiratory syndrome coronavirus 2
  REGION 1..9: note = Table A: HLA-A*68:02H HLA-C*08:01H HLA-B*38:02H
NVYADSFVI

SEQ ID NO: 6560 - protein, 9 aa, Severe acute respiratory syndrome coronavirus 2
  REGION 1..9: note = Table A: HLA-A*74:01H HLA-A*11:01H HLA-A*11:02H HLA-A*33:01M HLA-A*33:03H HLA-A*30:02H HLA-A*68:01H HLA-A*34:01H HLA-A*34:02H HLA-A*23:01H HLA-A*31:01M HLA-A*66:01H
VYADSFVIR

SEQ ID NO: 6561 - protein, 9 aa, Severe acute respiratory syndrome coronavirus 2
  REGION 1..9: note = Table A: HLA-C*04:03M
YADSFVIRG

SEQ ID NO: 6562 - protein, 9 aa, Severe acute respiratory syndrome coronavirus 2
  REGION 1..9: note = Table A: HLA-C*14:02H HLA-C*14:03H HLA-B*38:02H
SFVIRGDEV

SEQ ID NO: 6563 - protein, 9 aa, Severe acute respiratory syndrome coronavirus 2
  REGION 1..9: note = Table A: HLA-A*26:03H HLA-A*68:01H HLA-A*34:01M HLA-A*66:01M
FVIRGDEVR

SEQ ID NO: 6564 - protein, 9 aa, Severe acute respiratory syndrome coronavirus 2
  REGION 1..9: note = Table A: HLA-C*06:02M HLA-B*38:02H
IRGDEVRQI

SEQ ID NO: 6565 - protein, 9 aa, Severe acute respiratory syndrome coronavirus 2
  REGION 1..9: note = Table A: HLA-B*45:01H
GDEVRQIAP

SEQ ID NO: 6566 - protein, 9 aa, Severe acute respiratory syndrome coronavirus 2
  REGION 1..9: note = Table A: HLA-B*15:01H HLA-B*15:03H HLA-B*13:02H
RQIAPGQTG

SEQ ID NO: 6567 - protein, 9 aa, Severe acute respiratory syndrome coronavirus 2
  REGION 1..9: note = Table A: HLA-A*03:01H HLA-A*03:02H HLA-A*34:02H
QIAPGQTGK

SEQ ID NO: 6568 - protein, 9 aa, Severe acute respiratory syndrome coronavirus 2
  REGION 1..9: note = Table A: HLA-C*15:05H HLA-B*51:01H
IAPGQTGKI

SEQ ID NO: 6569 - protein, 9 aa, Severe acute respiratory syndrome coronavirus 2
  REGION 1..9: note = Table A: HLA-B*56:01H HLA-B*55:02H HLA-B*55:01H HLA-B*07:04M
APGQTGKIA

SEQ ID NO: 6570 - protein, 9 aa, Severe acute respiratory syndrome coronavirus 2
  REGION 1..9: note = Table A: HLA-B*27:02H HLA-A*30:02M HLA-B*15:01H HLA-B*15:03M
GQTGKIADY

SEQ ID NO: 6571 - protein, 9 aa, Severe acute respiratory syndrome coronavirus 2
  REGION 1..9: note = Table A: HLA-A*30:02H
TGKIADYNY

SEQ ID NO: 6572 - protein, 9 aa, Severe acute respiratory syndrome coronavirus 2
  REGION 1..9: note = Table A: HLA-B*58:01H HLA-A*74:01H HLA-A*02:11M HLA-A*02:04M HLA-A*02:05H HLA-A*02:06M HLA-A*02:08H HLA-A*02:01M HLA-A*02:02H HLA-A*32:01H HLA-B*57:03M HLA-B*13:01H HLA-B*13:02H
KIADYNYKL

SEQ ID NO: 6573 - protein, 9 aa, Severe acute respiratory syndrome coronavirus 2
  REGION 1..9: note = Table A: HLA-A*02:11H HLA-A*02:05H HLA-A*02:06M HLA-A*02:07M HLA-A*02:08H HLA-A*02:01M HLA-A*02:02H HLA-A*02:03H
KLPDDFTGC

SEQ ID NO: 6574 - protein, 9 aa, Severe acute respiratory syndrome coronavirus 2
  REGION 1..9: note = Table A: HLA-C*15:05M
LPDDFTGCV

SEQ ID NO: 6575 - protein, 9 aa, Severe acute respiratory syndrome coronavirus 2
  REGION 1..9: note = Table A: HLA-A*02:05H HLA-A*02:02M
VIAWNSNNL

SEQ ID NO: 6576 - protein, 9 aa, Severe acute respiratory syndrome coronavirus 2
  REGION 1..9: note = Table A: HLA-A*36:01M HLA-A*30:02H
LDSKVGGNY

SEQ ID NO: 6577 - protein, 9 aa, Severe acute respiratory syndrome coronavirus 2
  REGION 1..9: note = Table A: HLA-B*38:02H HLA-B*15:03H
SKVGGNYNY

SEQ ID NO: 6578 - protein, 9 aa, Severe acute respiratory syndrome coronavirus 2
  REGION 1..9: note = Table A: HLA-A*02:05H HLA-A*02:08H HLA-A*02:02H
KVGGNYNYL

SEQ ID NO: 6579 - protein, 9 aa, Severe acute respiratory syndrome coronavirus 2
  REGION 1..9: note = Table A: HLA-A*29:02H HLA-A*30:02H
VGGNYNYLY

SEQ ID NO: 6580 - protein, 9 aa, Severe acute respiratory syndrome coronavirus 2
  REGION 1..9: note = Table A: HLA-A*31:01H
GGNYNYLYR

SEQ ID NO: 6581 - protein, 9 aa, Severe acute respiratory syndrome coronavirus 2
  REGION 1..9: note = Table A: HLA-A*02:04H
GNYNYLYRL

SEQ ID NO: 6582 - protein, 9 aa, Severe acute respiratory syndrome coronavirus 2
  REGION 1..9: note = Table A: HLA-A*24:02H HLA-A*24:07M HLA-A*23:01H
NYNYLYRLF

SEQ ID NO: 6583 - protein, 9 aa, Severe acute respiratory syndrome coronavirus 2
  REGION 1..9: note = Table A: HLA-A*66:01H
YNYLYRLFR

SEQ ID NO: 6584 - protein, 9 aa, Severe acute respiratory syndrome coronavirus 2
  REGION 1..9: note = Table A: HLA-B*14:02M
YRLFRKSNL

SEQ ID NO: 6585 - protein, 9 aa, Severe acute respiratory syndrome coronavirus 2
  REGION 1..9: note = Table A: HLA-A*74:01H
RLFRKSNLK

SEQ ID NO: 6586 - protein, 9 aa, Severe acute respiratory syndrome coronavirus 2
  REGION 1..9: note = Table A: HLA-A*74:01H HLA-A*36:01H HLA-A*33:03H HLA-A*31:01M
KSNLKPFER

SEQ ID NO: 6587 - protein, 9 aa, Severe acute respiratory syndrome coronavirus 2
  REGION 1..9: note = Table A: HLA-A*02:02H HLA-B*38:02H
NLKPFERDI

SEQ ID NO: 6588 - protein, 9 aa, Severe acute respiratory syndrome coronavirus 2
  REGION 1..9: note = Table A: HLA-B*42:01H HLA-B*56:01M HLA-B*55:02M HLA-C*15:05H HLA-B*14:02H HLA-B*55:01H HLA-B*39:06H HLA-B*54:01H HLA-B*07:02H HLA-B*07:04M
KPFERDIST

SEQ ID NO: 6589 - protein, 9 aa, Severe acute respiratory syndrome coronavirus 2
  REGION 1..9: note = Table A: HLA-B*38:02H HLA-B*40:02H HLA-B*41:02M HLA-B*49:01H HLA-B*50:01H
FERDISTEI

SEQ ID NO: 6590 - protein, 9 aa, Severe acute respiratory syndrome coronavirus 2
  REGION 1..9: note = Table A: HLA-B*39:01H
ERDISTEIY

SEQ ID NO: 6591 - protein, 9 aa, Severe acute respiratory syndrome coronavirus 2
  REGION 1..9: note = Table A: HLA-A*68:02M
DISTEIYQA

SEQ ID NO: 6592 - protein, 9 aa, Severe acute respiratory syndrome coronavirus 2
  REGION 1..9: note = Table A: HLA-C*14:03H
IYQAGSTPC

SEQ ID NO: 6593 - protein, 9 aa, Severe acute respiratory syndrome coronavirus 2
  REGION 1..9: note = Table A: HLA-B*53:01H HLA-B*35:01H
TPCNGVEGF

SEQ ID NO: 6594 - protein, 9 aa, Severe acute respiratory syndrome coronavirus 2
  REGION 1..9: note = Table A: HLA-B*35:01H
NGVEGFNCY

SEQ ID NO: 6595 - protein, 9 aa, Severe acute respiratory syndrome coronavirus 2
  REGION 1..9: note = Table A: HLA-B*46:01H HLA-B*38:02H HLA-B*15:02M
NCYFPLQSY

SEQ ID NO: 6596 - protein, 9 aa, Severe acute respiratory syndrome coronavirus 2
  REGION 1..9: note = Table A: HLA-C*14:02M HLA-C*14:03M HLA-A*29:02H HLA-C*04:03H HLA-A*24:02H HLA-A*24:07H HLA-A*23:01H
YFPLQSYGF

SEQ ID NO: 6597 - protein, 9 aa, Severe acute respiratory syndrome coronavirus 2
  REGION 1..9: note = Table A: HLA-A*02:11H HLA-A*68:02H HLA-A*02:05H HLA-B*14:01H HLA-A*02:03H HLA-B*51:01H HLA-B*52:01H HLA-B*38:02H HLA-B*54:01H HLA-B*13:02H HLA-B*49:01H
YGFQPTNGV

SEQ ID NO: 6598 - protein, 9 aa, Severe acute respiratory syndrome coronavirus 2
  REGION 1..9: note = Table A: HLA-C*14:03H HLA-B*46:01H HLA-A*29:01H HLA-A*30:02H HLA-B*38:02M HLA-B*15:01H HLA-B*15:02M HLA-B*15:03M HLA-B*39:01H
FQPTNGVGY

SEQ ID NO: 6599 - protein, 9 aa, Severe acute respiratory syndrome coronavirus 2
  REGION 1..9: note = Table A: HLA-A*02:11H
GVGYQPYRV

SEQ ID NO: 6600 - protein, 9 aa, Severe acute respiratory syndrome coronavirus 2
  REGION 1..9: note = Table A: HLA-B*51:01H HLA-B*52:01H
VGYQPYRVV

SEQ ID NO: 6601 - protein, 9 aa, Severe acute respiratory syndrome coronavirus 2
  REGION 1..9: note = Table A: HLA-C*14:03H
GYQPYRVVV

SEQ ID NO: 6602 - protein, 9 aa, Severe acute respiratory syndrome coronavirus 2
  REGION 1..9: note = Table A: HLA-C*14:02H HLA-C*14:03H HLA-C*06:02H HLA-B*08:01H HLA-B*14:02H HLA-C*12:03H HLA-C*17:01H HLA-B*38:02H HLA-C*07:04H
YQPYRVVVL

SEQ ID NO: 6603 - protein, 9 aa, Severe acute respiratory syndrome coronavirus 2
  REGION 1..9: note = Table A: HLA-A*24:07M
PYRVVVLSF

SEQ ID NO: 6604 - protein, 9 aa, Severe acute respiratory syndrome coronavirus 2
  REGION 1..9: note = Table A: HLA-A*02:06H HLA-B*40:06H HLA-B*57:03M
RVVVLSFEL

SEQ ID NO: 6605 - protein, 9 aa, Severe acute respiratory syndrome coronavirus 2
  REGION 1..9: note = Table A: HLA-A*02:06H HLA-C*08:01H
VVVLSFELL

SEQ ID NO: 6606 - protein, 9 aa, Severe acute respiratory syndrome coronavirus 2
  REGION 1..9: note = Table A: HLA-A*11:02H HLA-A*34:02H
VVLSFELLH

SEQ ID NO: 6607 - protein, 9 aa, Severe acute respiratory syndrome coronavirus 2
  REGION 1..9: note = Table A: HLA-A*02:02H HLA-A*02:03H
VLSFELLHA

SEQ ID NO: 6608 - protein, 9 aa, Severe acute respiratory syndrome coronavirus 2
  REGION 1..9: note = Table A: HLA-B*45:01H HLA-B*40:02H HLA-B*40:06M HLA-B*41:02H HLA-B*49:01H HLA-B*50:01M
FELLHAPAT

SEQ ID NO: 6609 - protein, 9 aa, Severe acute respiratory syndrome coronavirus 2
  REGION 1..9: note = Table A: HLA-A*26:03H HLA-A*02:11H HLA-A*68:02M HLA-A*02:04H HLA-B*14:01H HLA-A*02:01H HLA-A*02:03M HLA-B*38:02M HLA-B*39:01H HLA-B*13:02H
ELLHAPATV

SEQ ID NO: 6610 - protein, 9 aa, Severe acute respiratory syndrome coronavirus 2
  REGION 1..9: note = Table A: HLA-B*38:02H
LLHAPATVC

SEQ ID NO: 6611 - protein, 9 aa, Severe acute respiratory syndrome coronavirus 2
  REGION 1..9: note = Table A: HLA-B*38:02H HLA-B*39:06H HLA-B*39:01H HLA-B*15:10M
LHAPATVCG

SEQ ID NO: 6612 - protein, 9 aa, Severe acute respiratory syndrome coronavirus 2
  REGION 1..9: note = Table A: HLA-A*34:02H
APATVCGPK

SEQ ID NO: 6613 - protein, 9 aa, Severe acute respiratory syndrome coronavirus 2
  REGION 1..9: note = Table A: HLA-C*15:05H HLA-B*55:01H HLA-B*07:02H HLA-B*07:04M
GPKKSTNLV

SEQ ID NO: 6614 - protein, 9 aa, Severe acute respiratory syndrome coronavirus 2
  REGION 1..9: note = Table A: HLA-A*11:01H HLA-A*30:01H
KSTNLVKNK

SEQ ID NO: 6615 - protein, 9 aa, Severe acute respiratory syndrome coronavirus 2
  REGION 1..9: note = Table A: HLA-C*15:05H
CVNFNFNGL

SEQ ID NO: 6616 - protein, 9 aa, Severe acute respiratory syndrome coronavirus 2
  REGION 1..9: note = Table A: HLA-B*39:01H
NGLTGTGVL

SEQ ID NO: 6617 - protein, 9 aa, Severe acute respiratory syndrome coronavirus 2
  REGION 1..9: note = Table A: HLA-B*45:01M HLA-B*50:01H
TESNKKFLP

SEQ ID NO: 6618 - protein, 9 aa, Severe acute respiratory syndrome coronavirus 2
  REGION 1..9: note = Table A: HLA-A*25:01H HLA-A*34:02H HLA-A*66:01H
ESNKKFLPF

SEQ ID NO: 6619 - protein, 9 aa, Severe acute respiratory syndrome coronavirus 2
  REGION 1..9: note = Table A: HLA-B*15:03H
KKFLPFQQF

SEQ ID NO: 6620 - protein, 9 aa, Severe acute respiratory syndrome coronavirus 2
  REGION 1..9: note = Table A: HLA-B*50:01H
RDIADTTDA

SEQ ID NO: 6621 - protein, 9 aa, Severe acute respiratory syndrome coronavirus 2
  REGION 1..9: note = Table A: HLA-A*26:03H HLA-A*68:02M HLA-A*02:05H HLA-B*14:01H HLA-B*35:02H HLA-B*38:02H HLA-B*39:01M
DIADTTDAV

SEQ ID NO: 6622 - protein, 9 aa, Severe acute respiratory syndrome coronavirus 2
  REGION 1..9: note = Table A: HLA-B*53:01H HLA-A*68:02H HLA-B*35:03M HLA-C*15:05H HLA-A*34:01H HLA-B*35:01H HLA-B*35:02H HLA-B*51:01M HLA-C*08:01H HLA-B*35:12H HLA-B*38:02H HLA-B*39:01H
DAVRDPQTL

SEQ ID NO: 6623 - protein, 9 aa, Severe acute respiratory syndrome coronavirus 2
  REGION 1..9: note = Table A: HLA-C*06:02H HLA-C*07:02H HLA-C*15:05H HLA-C*15:02H HLA-B*14:01H HLA-C*08:01H HLA-B*38:01M HLA-B*38:02H HLA-B*39:01M HLA-B*13:02H
VRDPQTLEI

SEQ ID NO: 6624 - protein, 9 aa, Severe acute respiratory syndrome coronavirus 2
  REGION 1..9: note = Table A: HLA-B*13:02H
PQTLEILDI

SEQ ID NO: 6625 - protein, 9 aa, Severe acute respiratory syndrome coronavirus 2
  REGION 1..9: note = Table A: HLA-B*50:01H
LEILDITPC

SEQ ID NO: 6626 - protein, 9 aa, Severe acute respiratory syndrome coronavirus 2
  REGION 1..9: note = Table A: HLA-C*04:01H HLA-C*04:03M HLA-A*02:07M HLA-C*08:02H HLA-B*38:02M HLA-B*07:05H HLA-C*05:01H HLA-B*13:01H
ILDITPCSF

SEQ ID NO: 6627 - protein, 9 aa, Severe acute respiratory syndrome coronavirus 2
  REGION 1..9: note = Table A: HLA-B*13:02H
GVSVITPGT

SEQ ID NO: 6628 - protein, 9 aa, Severe acute respiratory syndrome coronavirus 2
  REGION 1..9: note = Table A: HLA-A*11:303H HLA-C*15:05H HLA-A*34:01H
SVITPGTNT

SEQ ID NO: 6629 - protein, 9 aa, Severe acute respiratory syndrome coronavirus 2
  REGION 1..9: note = Table A: HLA-A*68:02M HLA-B*35:03H HLA-C*15:05H
NTSNQVAVL

SEQ ID NO: 6630 - protein, 9 aa, Severe acute respiratory syndrome coronavirus 2
  REGION 1..9: note = Table A: HLA-B*58:01H HLA-A*11:01H HLA-A*36:01H HLA-B*57:01H HLA-A*29:01H HLA-A*29:02H HLA-A*30:02M HLA-C*15:05H HLA-B*35:01M HLA-B*35:07H HLA-B*38:02H HLA-B*15:01H HLA-B*07:05M HLA-B*57:03H
TSNQVAVLY

SEQ ID NO: 6631 - protein, 9 aa, Severe acute respiratory syndrome coronavirus 2
  REGION 1..9: note = Table A: HLA-A*68:02M HLA-A*02:05H HLA-B*38:02H HLA-B*13:02H
QVAVLYQDV

SEQ ID NO: 6632 - protein, 9 aa, Severe acute respiratory syndrome coronavirus 2
  REGION 1..9: note = Table A: HLA-B*14:01H HLA-A*02:03H HLA-B*38:02H
VLYQDVNCT

SEQ ID NO: 6633 - protein, 9 aa, Severe acute respiratory syndrome coronavirus 2
  REGION 1..9: note = Table A: HLA-A*02:06H HLA-A*02:07H HLA-A*02:01H HLA-C*08:02H HLA-B*38:02H HLA-B*39:01H HLA-C*05:01H HLA-B*13:02H
YQDVNCTEV

SEQ ID NO: 6634 - protein, 9 aa, Severe acute respiratory syndrome coronavirus 2
  REGION 1..9: note = Table A: HLA-A*68:02H
DVNCTEVPV

SEQ ID NO: 6635 - protein, 9 aa, Severe acute respiratory syndrome coronavirus 2
  REGION 1..9: note = Table A: HLA-B*35:03H HLA-C*08:01H HLA-B*38:02H
NCTEVPVAI

SEQ ID NO: 6636 - protein, 9 aa, Severe acute respiratory syndrome coronavirus 2
  REGION 1..9: note = Table A: HLA-B*44:05H HLA-B*45:01H HLA-B*39:06H HLA-B*40:02M HLA-B*40:06H HLA-B*07:05H HLA-B*41:02H HLA-B*49:01H HLA-B*50:01H
TEVPVAIHA

SEQ ID NO: 6637 - protein, 9 aa, Severe acute respiratory syndrome coronavirus 2
  REGION 1..9: note = Table A: HLA-A*02:05H HLA-A*02:08H
PVAIHADQL

SEQ ID NO: 6638 - protein, 9 aa, Severe acute respiratory syndrome coronavirus 2
  REGION 1..9: note = Table A: HLA-B*58:01H HLA-B*57:01H HLA-C*04:03H HLA-B*53:01H HLA-B*35:03H HLA-B*35:01H HLA-B*35:02M HLA-B*35:08M HLA-B*35:07M HLA-C*08:02H HLA-B*35:12H HLA-B*38:01H HLA-B*38:02M HLA-B*57:03H HLA-B*13:01H
HADQLTPTW

SEQ ID NO: 6639 - protein, 9 aa, Severe acute respiratory syndrome coronavirus 2
  REGION 1..9: note = Table A: HLA-A*68:02H HLA-B*38:02H HLA-B*13:02H
DQLTPTWRV

SEQ ID NO: 6640 - protein, 9 aa, Severe acute respiratory syndrome coronavirus 2
  REGION 1..9: note = Table A: HLA-C*16:01H HLA-B*46:01H HLA-A*30:02H HLA-B*38:02H HLA-B*15:02H
QLTPTWRVY

SEQ ID NO: 6641 - protein, 9 aa, Severe acute respiratory syndrome coronavirus 2
  REGION 1..9: note = Table A: HLA-B*42:01H HLA-B*56:01M HLA-B*08:01H HLA-B*55:02M HLA-B*55:01H HLA-B*54:01H HLA-B*07:02H HLA-B*07:04H
TPTWRVYST

SEQ ID NO: 6642 - protein, 9 aa, Severe acute respiratory syndrome coronavirus 2
  REGION 1..9: note = Table A: HLA-A*02:11H HLA-A*02:08H HLA-B*13:02H
RVYSTGSNV

SEQ ID NO: 6643 - protein, 9 aa, Severe acute respiratory syndrome coronavirus 2
  REGION 1..9: note = Table A: HLA-C*14:02H HLA-C*14:03H HLA-C*07:02H HLA-A*24:02H HLA-A*24:07H HLA-A*23:01M
VYSTGSNVF

SEQ ID NO: 6644 - protein, 9 aa, Severe acute respiratory syndrome coronavirus 2
  REGION 1..9: note = Table A: HLA-A*74:01M HLA-C*16:04H HLA-A*03:02H HLA-A*11:01H HLA-A*11:02H HLA-A*36:01H HLA-B*57:01H HLA-A*33:01M HLA-A*33:03H HLA-C*06:02H HLA-A*26:03H HLA-C*03:03H HLA-B*27:02H HLA-A*30:02H HLA-A*68:01H HLA-A*68:02M
  REGION 1..9: note = CONT. FROM ABOVE: HLA-A*34:01H HLA-A*34:02M HLA-B*35:01H HLA- B*38:02H HLA-A*31:01H HLA-B*13:02H HLA-B*49:01H HLA-A*66:01M
TGSNVFQTR

SEQ ID NO: 6645 - protein, 9 aa, Severe acute respiratory syndrome coronavirus 2
  REGION 1..9: note = Table A: HLA-C*14:02M HLA-C*14:03M
VFQTRAGCL

SEQ ID NO: 6646 - protein, 9 aa, Severe acute respiratory syndrome coronavirus 2
  REGION 1..9: note = Table A: HLA-B*38:02H HLA-B*13:01H HLA-B*13:02M
FQTRAGCLI

SEQ ID NO: 6647 - protein, 9 aa, Severe acute respiratory syndrome coronavirus 2
  REGION 1..9: note = Table A: HLA-B*39:06H
TRAGCLIGA

SEQ ID NO: 6648 - protein, 9 aa, Severe acute respiratory syndrome coronavirus 2
  REGION 1..9: note = Table A: HLA-B*58:01H HLA-A*36:01H HLA-A*01:01H HLA-B*35:01H
GAEHVNNSY

SEQ ID NO: 6649 - protein, 9 aa, Severe acute respiratory syndrome coronavirus 2
  REGION 1..9: note = Table A: HLA-B*38:02M HLA-B*39:06M HLA-B*39:01M HLA-B*15:10H
EHVNNSYEC

SEQ ID NO: 6650 - protein, 9 aa, Severe acute respiratory syndrome coronavirus 2
  REGION 1..9: note = Table A: HLA-B*45:01M HLA-B*39:06M HLA-B*40:06M HLA-B*54:01H HLA-B*50:01M
YECDIPIGA

SEQ ID NO: 6651 - protein, 9 aa, Severe acute respiratory syndrome coronavirus 2
  REGION 1..9: note = Table A: HLA-B*44:05H
CDIPIGAGI

SEQ ID NO: 6652 - protein, 9 aa, Severe acute respiratory syndrome coronavirus 2
  REGION 1..9: note = Table A: HLA-B*56:01H HLA-B*55:02H HLA-C*15:05M HLA-B*55:01M HLA-B*54:01H HLA-B*07:05H
IPIGAGICA

SEQ ID NO: 6653 - protein, 9 aa, Severe acute respiratory syndrome coronavirus 2
  REGION 1..9: note = Table A: HLA-B*46:01H HLA-A*29:02H HLA-A*30:02M HLA-B*35:01H HLA-B*15:01M HLA-B*15:02H HLA-B*07:05H
IGAGICASY

SEQ ID NO: 6654 - protein, 9 aa, Severe acute respiratory syndrome coronavirus 2
  REGION 1..9: note = Table A: HLA-C*14:02H HLA-C*14:03H
SYQTQTNSP

SEQ ID NO: 6655 - protein, 9 aa, Severe acute respiratory syndrome coronavirus 2
  REGION 1..9: note = Table A: HLA-A*74:01M HLA-A*11:01H HLA-A*33:03H HLA-A*26:03M HLA-B*27:02H HLA-A*68:01M HLA-A*34:01H HLA-A*34:02H HLA-A*31:01H HLA-A*66:01M
YQTQTNSPR

SEQ ID NO: 6656 - protein, 9 aa, Severe acute respiratory syndrome coronavirus 2
  REGION 1..9: note = Table A: HLA-A*74:01H HLA-A*11:01H HLA-A*33:03H HLA-A*30:02H HLA-A*68:01H HLA-A*34:02H HLA-C*07:27H HLA-A*66:01H
QTQTNSPRR

SEQ ID NO: 6657 - protein, 9 aa, Severe acute respiratory syndrome coronavirus 2
  REGION 1..9: note = Table A: HLA-A*74:01H HLA-A*33:03H HLA-A*66:01H
QTNSPRRAR

SEQ ID NO: 6658 - protein, 9 aa, Severe acute respiratory syndrome coronavirus 2
  REGION 1..9: note = Table A: HLA-B*55:01H HLA-B*07:02H HLA-B*07:04H
SPRRARSVA

SEQ ID NO: 6659 - protein, 9 aa, Severe acute respiratory syndrome coronavirus 2
  REGION 1..9: note = Table A: HLA-B*38:02H
ARSVASQSI

SEQ ID NO: 6660 - protein, 9 aa, Severe acute respiratory syndrome coronavirus 2
  REGION 1..9: note = Table A: HLA-B*58:01H HLA-B*58:02H HLA-B*57:03H
RSVASQSII

SEQ ID NO: 6661 - protein, 9 aa, Severe acute respiratory syndrome coronavirus 2
  REGION 1..9: note = Table A: HLA-B*58:01H HLA-A*11:303M HLA-C*16:01H HLA-C*16:04H HLA-A*11:01H HLA-A*11:02H HLA-A*36:01H HLA-B*46:01M HLA-A*29:01H HLA-A*29:02H HLA-C*12:05H HLA-B*53:01H HLA-C*03:02M HLA-A*30:02M HLA-C*15:05H
  REGION 1..9: note = CONT. FROM ABOVE: HLA-C*12:02M HLA-C*12:03M HLA-A*34:02H HLA- C*07:27M HLA-B*35:01H HLA-B*35:08M HLA-B*35:07H HLA-B*38:02M HLA-B*15:01H HLA-B*15:02M HLA-B*15:03H HLA-B*39:01H HLA-B*07 :05M HLA-C*02:02M HLA-B*15:11M HLA-C*07:04H
VASQSIIAY

SEQ ID NO: 6662 - protein, 9 aa, Severe acute respiratory syndrome coronavirus 2
  REGION 1..9: note = Table A: HLA-B*48:01H HLA-B*44:05H HLA-C*16:04M HLA-A*30:02H HLA-A*68:02H HLA-A*02:04H HLA-A*02:05M HLA-A*02:06H HLA-A*02:08H HLA-A*02:02M HLA-B*35:01H HLA-B*38:01H HLA-B*38:02M HLA-B*15:01M HLA-B*15:02H HLA-B*39:01H
  REGION 1..9: note = CONT. FROM ABOVE: HLA-B*07:05H HLA-B*13:01M HLA-B*13:02M HLA- C*07:04H
SQSIIAYTM

SEQ ID NO: 6663 - protein, 9 aa, Severe acute respiratory syndrome coronavirus 2
  REGION 1..9: note = Table A: HLA-C*14:03H HLA-A*11:303M HLA-A*11:02H HLA-A*25:01H HLA-B*46:01M HLA-C*03:03M HLA-A*02:11H HLA-C*03:02H HLA-C*03:04M HLA-A*68:02H HLA-B*35:03H HLA-C*15:05M HLA-C*01:02M HLA-C*15:02H HLA-A*02:04M
  REGION 1..9: note = CONT. FROM ABOVE: HLA-A*02:05M HLA-A*02:06H HLA-A*02:07H HLA- A*02:08H HLA-A*02:01H HLA-A*02:02H HLA-A*02:03M HLA-C*07:27H HLA-C*17:01H HLA-C*08:01M HLA-B*38:02H HLA-B*40:06H HLA-B*07 :02H HLA-B*15:01H HLA-B*07:05H HLA-C*07:04H
SIIAYTMSL

SEQ ID NO: 6664 - protein, 9 aa, Severe acute respiratory syndrome coronavirus 2
  REGION 1..9: note = Table A: HLA-B*54:01H
IAYTMSLGA

SEQ ID NO: 6665 - protein, 9 aa, Severe acute respiratory syndrome coronavirus 2
  REGION 1..9: note = Table A: HLA-B*38:02H
MSLGAENSV

SEQ ID NO: 6666 - protein, 9 aa, Severe acute respiratory syndrome coronavirus 2
  REGION 1..9: note = Table A: HLA-A*11:303M HLA-C*16:04H HLA-B*46:01M HLA-B*18:01H HLA-C*03:02H HLA-A*30:02H HLA-C*07:27H HLA-B*35:01H HLA-B*35:08M HLA-B*35:07M HLA-B*38:02M HLA-B*15:01M HLA-B*15:02M HLA-B*15:03M HLA-B*39:01M
  REGION 1..9: note = CONT. FROM ABOVE: HLA-B*07:05H HLA-B*15:11M
LGAENSVAY

SEQ ID NO: 6667 - protein, 9 aa, Severe acute respiratory syndrome coronavirus 2
  REGION 1..9: note = Table A: HLA-C*15:05H HLA-A*02:05H HLA-A*02:08M HLA-A*02:03H HLA-B*38:02M HLA-B*13:02H
SVAYSNNSI

SEQ ID NO: 6668 - protein, 9 aa, Severe acute respiratory syndrome coronavirus 2
  REGION 1..9: note = Table A: HLA-B*58:01M HLA-C*16:04H HLA-B*57:01H HLA-B*46:01H HLA-A*26:01H HLA-A*68:02H HLA-C*15:05M HLA-C*12:02M HLA-C*12:03H HLA-A*24:02H HLA-B*35:01H HLA-C*17:01H HLA-A*23:01H HLA-B*38:02H HLA-B*07:05M HLA-B*57:03M
  REGION 1..9: note = CONT. FROM ABOVE: HLA-C*02:02H
NSIAIPTNF

SEQ ID NO: 6669 - protein, 9 aa, Severe acute respiratory syndrome coronavirus 2
  REGION 1..9: note = Table A: HLA-B*58:01H HLA-B*58:02H HLA-A*11:303H HLA-B*57:01M HLA-C*03:03H HLA-C*12:05H HLA-A*02:11H HLA-B*53:01M HLA-C*03:02H HLA-C*03:04H HLA-A*68:02H HLA-B*35:03H HLA-C*15:05M HLA-C*12:03H HLA-C*15:02H
  REGION 1..9: note = CONT. FROM ABOVE: HLA-A*02:05H HLA-A*02:06H HLA-A*02:02H HLA- B*51:01M HLA-C*08:01M HLA-B*38:02M HLA-B*57:03H HLA-B*13:02H
IAIPTNFTI

SEQ ID NO: 6670 - protein, 9 aa, Severe acute respiratory syndrome coronavirus 2
  REGION 1..9: note = Table A: HLA-B*42:01H HLA-B*56:01H HLA-B*55:02H HLA-A*68:02H HLA-B*35:03H HLA-C*15:05H HLA-B*55:01H HLA-B*35:01H HLA-B*51:01M HLA-B*39:06H HLA-B*54:01H HLA-B*07:02H HLA-B*07:04H HLA-B*07:05M
IPTNFTISV

SEQ ID NO: 6671 - protein, 9 aa, Severe acute respiratory syndrome coronavirus 2
  REGION 1..9: note = Table A: HLA-A*11:303H HLA-C*16:04H HLA-A*25:01H HLA-B*46:01H HLA-C*03:03M HLA-A*02:11H HLA-C*03:02H HLA-C*03:04M HLA-A*68:02H HLA-B*35:03H HLA-C*15:05H HLA-C*12:03H HLA-C*15:02H HLA-A*02:05M HLA-A*02:06H
  REGION 1..9: note = CONT. FROM ABOVE: HLA-A*02:08H HLA-A*02:01H HLA-A*02:02H HLA- A*02:03H HLA-C*17:01H HLA-C*08:01H HLA-B*38:02M HLA-B*57:03H HLA-B*13:02H HLA-A*66:01H
FTISVTTEI

SEQ ID NO: 6672 - protein, 9 aa, Severe acute respiratory syndrome coronavirus 2
  REGION 1..9: note = Table A: HLA-B*35:03H
TISVTTEIL

SEQ ID NO: 6673 - protein, 9 aa, Severe acute respiratory syndrome coronavirus 2
  REGION 1..9: note = Table A: HLA-A*68:02H HLA-A*02:06H HLA-B*38:02H HLA-B*13:02H
SVTTEILPV

SEQ ID NO: 6674 - protein, 9 aa, Severe acute respiratory syndrome coronavirus 2
  REGION 1..9: note = Table A: HLA-C*04:01H HLA-C*04:03M HLA-B*18:01H HLA-B*35:03H HLA-C*15:05H HLA-B*35:01H HLA-B*35:02M HLA-B*35:08H HLA-B*35:12M HLA-B*39:01M HLA-B*07:05H
TTEILPVSM

SEQ ID NO: 6675 - protein, 9 aa, Severe acute respiratory syndrome coronavirus 2
  REGION 1..9: note = Table A: HLA-B*45:01H HLA-B*40:02H HLA-B*40:06H HLA-B*41:02H HLA-B*49:01M HLA-B*50:01H
TEILPVSMT

SEQ ID NO: 6676 - protein, 9 aa, Severe acute respiratory syndrome coronavirus 2
  REGION 1..9: note = Table A: HLA-A*03:01H HLA-A*03:02H HLA-A*11:01H HLA-A*11:02H HLA-A*36:01H HLA-A*33:03H HLA-A*26:03H HLA-A*68:01H HLA-A*34:01H HLA-A*34:02H HLA-A*66:01M
EILPVSMTK

SEQ ID NO: 6677 - protein, 9 aa, Severe acute respiratory syndrome coronavirus 2
  REGION 1..9: note = Table A: HLA-B*38:02H HLA-B*15:03H
TKTSVDCTM

SEQ ID NO: 6678 - protein, 9 aa, Severe acute respiratory syndrome coronavirus 2
  REGION 1..9: note = Table A: HLA-B*58:01H HLA-A*36:01M HLA-A*01:01H HLA-A*30:02H
KTSVDCTMY

SEQ ID NO: 6679 - protein, 9 aa, Severe acute respiratory syndrome coronavirus 2
  REGION 1..9: note = Table A: HLA-A*68:02H HLA-C*15:05H HLA-C*15:02H
TSVDCTMYI

SEQ ID NO: 6680 - protein, 9 aa, Severe acute respiratory syndrome coronavirus 2
  REGION 1..9: note = Table A: HLA-A*26:01H HLA-A*34:02M HLA-B*35:01H HLA-B*38:02H
ECSNLLLQY

SEQ ID NO: 6681 - protein, 9 aa, Severe acute respiratory syndrome coronavirus 2
  REGION 1..9: note = Table A: HLA-A*24:02H
QYGSFCTQL

SEQ ID NO: 6682 - protein, 9 aa, Severe acute respiratory syndrome coronavirus 2
  REGION 1..9: note = Table A: HLA-A*03:01H HLA-A*11:01H HLA-A*11:02H
GSFCTQLNR

SEQ ID NO: 6683 - protein, 9 aa, Severe acute respiratory syndrome coronavirus 2
  REGION 1..9: note = Table A: HLA-A*11:303H HLA-C*16:01M HLA-C*03:03H HLA-C*03:02H HLA-C*03:04M
FCTQLNRAL

SEQ ID NO: 6684 - protein, 9 aa, Severe acute respiratory syndrome coronavirus 2
  REGION 1..9: note = Table A: HLA-A*02:11H HLA-A*02:04H HLA-A*02:02M HLA-A*02:03M HLA-B*38:02M HLA-B*13:02H
QLNRALTGI

SEQ ID NO: 6685 - protein, 9 aa, Severe acute respiratory syndrome coronavirus 2
  REGION 1..9: note = Table A: HLA-B*14:02M HLA-B*14:01H HLA-B*38:02H HLA-B*39:06H HLA-B*39:01M HLA-B*15:10H
NRALTGIAV

SEQ ID NO: 6686 - protein, 9 aa, Severe acute respiratory syndrome coronavirus 2
  REGION 1..9: note = Table A: HLA-B*38:02H HLA-B*39:01H HLA-B*13:02H
EQDKNTQEV

SEQ ID NO: 6687 - protein, 9 aa, Severe acute respiratory syndrome coronavirus 2
  REGION 1..9: note = Table A: HLA-B*44:05H HLA-B*37:01H HLA-B*38:02H HLA-B*41:02H
QDKNTQEVF

SEQ ID NO: 6688 - protein, 9 aa, Severe acute respiratory syndrome coronavirus 2
  REGION 1..9: note = Table A: HLA-B*39:06H
DKNTQEVFA

SEQ ID NO: 6689 - protein, 9 aa, Severe acute respiratory syndrome coronavirus 2
  REGION 1..9: note = Table A: HLA-A*11:303H HLA-A*33:03H HLA-A*26:03H HLA-A*02:11M HLA-A*68:01H HLA-A*68:02H HLA-C*15:05H HLA-C*15:02H HLA-A*02:04M HLA-A*02:05M HLA-A*02:06H HLA-A*02:07M HLA-A*02:08H HLA-B*14:01H HLA-A*02:01M
  REGION 1..9: note = CONT. FROM ABOVE: HLA-A*02:03H HLA-C*08:01H HLA-B*38:02H HLA- B*39:01H HLA-B*13:02H
NTQEVFAQV

SEQ ID NO: 6690 - protein, 9 aa, Severe acute respiratory syndrome coronavirus 2
  REGION 1..9: note = Table A: HLA-B*27:02H
TQEVFAQVK

SEQ ID NO: 6691 - protein, 9 aa, Severe acute respiratory syndrome coronavirus 2
  REGION 1..9: note = Table A: HLA-A*25:01M HLA-A*26:01H HLA-A*26:02M HLA-A*26:03M HLA-A*68:01H HLA-A*68:02H HLA-A*02:08H HLA-A*34:01M HLA-A*34:02H HLA-B*51:01H HLA-B*38:02H
EVFAQVKQI

SEQ ID NO: 6692 - protein, 9 aa, Severe acute respiratory syndrome coronavirus 2
  REGION 1..9: note = Table A: HLA-C*14:02H HLA-C*14:03M HLA-C*16:01H HLA-A*29:01M HLA-A*29:02M HLA-A*30:02M HLA-A*24:02H HLA-A*24:07H HLA-A*23:01H HLA-B*15:01H HLA-B*15:02H HLA-B*07:05H
VFAQVKQIY

SEQ ID NO: 6693 - protein, 9 aa, Severe acute respiratory syndrome coronavirus 2
  REGION 1..9: note = Table A: HLA-A*11:02H HLA-A*33:03H HLA-A*34:02M
FAQVKQIYK

SEQ ID NO: 6694 - protein, 9 aa, Severe acute respiratory syndrome coronavirus 2
  REGION 1..9: note = Table A: HLA-A*02:05H HLA-A*02:08H HLA-B*13:02M
AQVKQIYKT

SEQ ID NO: 6695 - protein, 9 aa, Severe acute respiratory syndrome coronavirus 2
  REGION 1..9: note = Table A: HLA-A*74:01H HLA-B*52:01H HLA-B*38:02H HLA-B*15:01H HLA-B*15:03H HLA-B*13:01H HLA-B*13:02H
KQIYKTPPI

SEQ ID NO: 6696 - protein, 9 aa, Severe acute respiratory syndrome coronavirus 2
  REGION 1..9: note = Table A: HLA-A*11:303H HLA-A*74:01H HLA-A*03:01M HLA-A*03:02M HLA-A*11:01M HLA-A*11:02M HLA-A*30:01H HLA-A*34:02M HLA-C*07:27H
QIYKTPPIK

SEQ ID NO: 6697 - protein, 9 aa, Severe acute respiratory syndrome coronavirus 2
  REGION 1..9: note = Table A: HLA-B*15:03M
YKTPPIKDF

SEQ ID NO: 6698 - protein, 9 aa, Severe acute respiratory syndrome coronavirus 2
  REGION 1..9: note = Table A: HLA-A*11:01H HLA-A*11:02H HLA-B*13:02H
SQILPDPSK

SEQ ID NO: 6699 - protein, 9 aa, Severe acute respiratory syndrome coronavirus 2
  REGION 1..9: note = Table A: HLA-B*56:01H HLA-B*53:01H HLA-B*55:01H HLA-A*34:02H HLA-B*54:01H
LPDPSKPSK

SEQ ID NO: 6700 - protein, 9 aa, Severe acute respiratory syndrome coronavirus 2
  REGION 1..9: note = Table A: HLA-B*07:04H
PSKPSKRSF

SEQ ID NO: 6701 - protein, 9 aa, Severe acute respiratory syndrome coronavirus 2
  REGION 1..9: note = Table A: HLA-B*58:01H HLA-B*58:02H HLA-B*57:01H HLA-C*15:02H HLA-B*57:03H HLA-B*13:01H
RSFIEDLLF

SEQ ID NO: 6702 - protein, 9 aa, Severe acute respiratory syndrome coronavirus 2
  REGION 1..9: note = Table A: HLA-B*45:01H HLA-B*18:01H HLA-A*02:07H HLA-B*40:02H HLA-B*07:05H HLA-B*49:01H HLA-B*50:01H
IEDLLFNKV

SEQ ID NO: 6703 - protein, 9 aa, Severe acute respiratory syndrome coronavirus 2
  REGION 1..9: note = Table A: HLA-B*08:01H HLA-B*14:01H HLA-B*38:02H HLA-B*15:02H
DLLFNKVTL

SEQ ID NO: 6704 - protein, 9 aa, Severe acute respiratory syndrome coronavirus 2
  REGION 1..9: note = Table A: HLA-A*02:11M HLA-A*02:04H HLA-A*02:05H HLA-A*02:01H HLA-A*02:02H HLA-A*02:03M HLA-B*38:02H
LLFNKVTLA

SEQ ID NO: 6705 - protein, 9 aa, Severe acute respiratory syndrome coronavirus 2
  REGION 1..9: note = Table A: HLA-B*15:01H HLA-B*57:03H HLA-B*13:01H
KVTLADAGF

SEQ ID NO: 6706 - protein, 9 aa, Severe acute respiratory syndrome coronavirus 2
  REGION 1..9: note = Table A: HLA-A*03:01H HLA-A*03:02H HLA-A*11:01H HLA-A*11:02H HLA-A*36:01H HLA-A*34:01H HLA-A*34:02M
TLADAGFIK

SEQ ID NO: 6707 - protein, 9 aa, Severe acute respiratory syndrome coronavirus 2
  REGION 1..9: note = Table A: HLA-B*44:02M HLA-C*16:04H HLA-C*06:02H HLA-B*44:03M HLA-C*07:01H HLA-A*30:02H HLA-B*07:05H HLA-B*41:02H
ADAGFIKQY

SEQ ID NO: 6708 - protein, 9 aa, Severe acute respiratory syndrome coronavirus 2
  REGION 1..9: note = Table A: HLA-A*33:01H HLA-A*33:03H HLA-A*34:01H
DAGFIKQYG

SEQ ID NO: 6709 - protein, 9 aa, Severe acute respiratory syndrome coronavirus 2
  REGION 1..9: note = Table A: HLA-B*08:01H HLA-A*02:05H HLA-B*38:02H
FIKQYGDCL

SEQ ID NO: 6710 - protein, 9 aa, Severe acute respiratory syndrome coronavirus 2
  REGION 1..9: note = Table A: HLA-A*33:01H HLA-A*33:03M HLA-A*26:03H HLA-A*34:01M HLA-A*34:02H HLA-A*66:01H
DCLGDIAAR

SEQ ID NO: 6711 - protein, 9 aa, Severe acute respiratory syndrome coronavirus 2
  REGION 1..9: note = Table A: HLA-B*41:02H HLA-B*49:01H
GDIAARDLI

SEQ ID NO: 6712 - protein, 9 aa, Severe acute respiratory syndrome coronavirus 2
  REGION 1..9: note = Table A: HLA-A*02:05H HLA-B*54:01H
IAARDLICA

SEQ ID NO: 6713 - protein, 9 aa, Severe acute respiratory syndrome coronavirus 2
  REGION 1..9: note = Table A: HLA-B*37:01H
RDLICAQKF

SEQ ID NO: 6714 - protein, 9 aa, Severe acute respiratory syndrome coronavirus 2
  REGION 1..9: note = Table A: HLA-A*02:03H HLA-B*52:01M HLA-B*38:02H HLA-B*15:01H HLA-B*13:02M
AQKFNGLTV

SEQ ID NO: 6715 - protein, 9 aa, Severe acute respiratory syndrome coronavirus 2
  REGION 1..9: note = Table A: HLA-B*48:01H HLA-B*15:03H
QKFNGLTVL

SEQ ID NO: 6716 - protein, 9 aa, Severe acute respiratory syndrome coronavirus 2
  REGION 1..9: note = Table A: HLA-A*02:04M HLA-A*02:01H HLA-A*02:02H HLA-B*40:06H HLA-B*13:02H
GLTVLPPLL

SEQ ID NO: 6717 - protein, 9 aa, Severe acute respiratory syndrome coronavirus 2
  REGION 1..9: note = Table A: HLA-B*35:03H HLA-C*15:05H HLA-B*35:01H HLA-B*35:02H HLA-B*35:08H HLA-B*35:07H HLA-B*35:12M HLA-B*07:05M
LPPLLTDEM

SEQ ID NO: 6718 - protein, 9 aa, Severe acute respiratory syndrome coronavirus 2
  REGION 1..9: note = Table A: HLA-B*58:01H HLA-A*36:01H HLA-A*29:01H HLA-A*29:02H HLA-A*01:01H HLA-C*04:03H HLA-A*30:02H HLA-B*35:01H HLA-B*35:08H HLA-B*38:02H HLA-B*39:01H HLA-B*07:05H
LTDEMIAQY

SEQ ID NO: 6719 - protein, 9 aa, Severe acute respiratory syndrome coronavirus 2
  REGION 1..9: note = Table A: HLA-A*26:03M HLA-A*68:02H HLA-B*38:02H HLA-B*39:06M HLA-B*54:01M HLA-B*39:01H HLA-B*50:01H
EMIAQYTSA

SEQ ID NO: 6720 - protein, 9 aa, Severe acute respiratory syndrome coronavirus 2
  REGION 1..9: note = Table A: HLA-A*11:303H HLA-B*46:01H HLA-A*26:03H HLA-B*08:01M HLA-A*68:02H HLA-B*35:03M HLA-C*15:05H HLA-C*01:02H HLA-A*02:05H HLA-A*02:08H HLA-B*14:01H HLA-A*02:02H HLA-A*02:03H HLA-A*34:01H HLA-C*07:27H
  REGION 1..9: note = CONT. FROM ABOVE: HLA-B*35:01H HLA-B*35:02H HLA-B*38:02M HLA- B*07:02H HLA-B*15:01H HLA-B*15:02M HLA-B*39:01H HLA-B*07:05H
MIAQYTSAL

SEQ ID NO: 6721 - protein, 9 aa, Severe acute respiratory syndrome coronavirus 2
  REGION 1..9: note = Table A: HLA-A*11:303H HLA-C*03:03H HLA-C*03:04H HLA-C*15:05H HLA-C*17:01H HLA-C*08:01H HLA-B*38:02H
IAQYTSALL

SEQ ID NO: 6722 - protein, 9 aa, Severe acute respiratory syndrome coronavirus 2
  REGION 1..9: note = Table A: HLA-B*38:02H HLA-B*13:02H
AQYTSALLA

SEQ ID NO: 6723 - protein, 9 aa, Severe acute respiratory syndrome coronavirus 2
  REGION 1..9: note = Table A: HLA-A*68:02H
YTSALLAGT

SEQ ID NO: 6724 - protein, 9 aa, Severe acute respiratory syndrome coronavirus 2
  REGION 1..9: note = Table A: HLA-C*15:05H
TSALLAGTI

SEQ ID NO: 6725 - protein, 9 aa, Severe acute respiratory syndrome coronavirus 2
  REGION 1..9: note = Table A: HLA-B*58:01M HLA-B*57:01M HLA-A*25:01H HLA-B*53:01M HLA-B*57:03M
LAGTITSGW

SEQ ID NO: 6726 - protein, 9 aa, Severe acute respiratory syndrome coronavirus 2
  REGION 1..9: note = Table A: HLA-B*58:01H HLA-B*58:02H HLA-A*11:303H HLA-B*57:01M HLA-A*25:01H HLA-B*46:01M HLA-A*26:01H HLA-A*29:02H HLA-C*07:01H HLA-C*03:02H HLA-C*03:04H HLA-A*30:02H HLA-C*15:05H HLA-C*12:02H HLA-A*24:07H
  REGION 1..9: note = CONT. FROM ABOVE: HLA-A*23:01H HLA-B*38:02H HLA-A*32:01H HLA- B*15:01M HLA-B*15:03H HLA-B*39:01H HLA-B*07:05H HLA-B*57:03H HLA-C*02:02H
GTITSGWTF

SEQ ID NO: 6727 - protein, 9 aa, Severe acute respiratory syndrome coronavirus 2
  REGION 1..9: note = Table A: HLA-B*39:06H
SGWTFGAGA

SEQ ID NO: 6728 - protein, 9 aa, Severe acute respiratory syndrome coronavirus 2
  REGION 1..9: note = Table A: HLA-A*26:03H HLA-C*03:03H HLA-C*03:04H HLA-A*68:02H HLA-C*15:05H HLA-B*38:02H HLA-A*66:01H
WTFGAGAAL

SEQ ID NO: 6729 - protein, 9 aa, Severe acute respiratory syndrome coronavirus 2
  REGION 1..9: note = Table A: HLA-C*16:04H HLA-C*12:05H HLA-B*35:03H HLA-C*15:05H HLA-B*35:01H HLA-B*38:02H HLA-B*07:05H
AALQIPFAM

SEQ ID NO: 6730 - protein, 9 aa, Severe acute respiratory syndrome coronavirus 2
  REGION 1..9: note = Table A: HLA-A*11:303H HLA-B*46:01H HLA-C*03:02H HLA-C*15:05H HLA-C*12:03H HLA-A*02:04H HLA-A*02:05H HLA-C*08:01H HLA-B*38:02H HLA-B*15:01M HLA-B*15:02H HLA-B*15:03H HLA-B*13:02H
LQIPFAMQM

SEQ ID NO: 6731 - protein, 9 aa, Severe acute respiratory syndrome coronavirus 2
  REGION 1..9: note = Table A: HLA-A*29:02H HLA-B*18:01H HLA-B*53:01H HLA-C*15:05H HLA-B*35:01H HLA-B*35:08H HLA-B*35:07H HLA-B*38:02M HLA-B*54:01H HLA-B*15:02M HLA-B*15:03H HLA-B*07:05M HLA-B*15:11H
IPFAMQMAY

SEQ ID NO: 6732 - protein, 9 aa, Severe acute respiratory syndrome coronavirus 2
  REGION 1..9: note = Table A: HLA-B*53:01H HLA-B*35:07H HLA-B*57:03H
FAMQMAYRF

SEQ ID NO: 6733 - protein, 9 aa, Severe acute respiratory syndrome coronavirus 2
  REGION 1..9: note = Table A: HLA-A*30:01H
AYRFNGIGV

SEQ ID NO: 6734 - protein, 9 aa, Severe acute respiratory syndrome coronavirus 2
  REGION 1..9: note = Table A: HLA-C*06:02H HLA-B*39:01H
YRFNGIGVT

SEQ ID NO: 6735 - protein, 9 aa, Severe acute respiratory syndrome coronavirus 2
  REGION 1..9: note = Table A: HLA-C*12:05H HLA-A*02:11H HLA-A*68:02M HLA-C*15:05H HLA-A*02:05M HLA-A*02:06H HLA-A*02:03H HLA-B*51:01H HLA-C*08:01H HLA-B*38:02H HLA-B*13:02M
NGIGVTQNV

SEQ ID NO: 6736 - protein, 9 aa, Severe acute respiratory syndrome coronavirus 2
  REGION 1..9: note = Table A: HLA-A*02:11M HLA-A*02:04H HLA-A*02:01H HLA-A*02:02M HLA-A*02:03M HLA-B*51:01H HLA-B*52:01M HLA-B*38:02M HLA-B*13:02H
VLYENQKLI

SEQ ID NO: 6737 - protein, 9 aa, Severe acute respiratory syndrome coronavirus 2
  REGION 1..9: note = Table A: HLA-B*50:01H
YENQKLIAN

SEQ ID NO: 6738 - protein, 9 aa, Severe acute respiratory syndrome coronavirus 2
  REGION 1..9: note = Table A: HLA-B*46:01H HLA-B*08:01H HLA-B*18:01H HLA-C*12:02H HLA-A*24:02H HLA-B*38:02M HLA-B*15:01H HLA-B*15:02H HLA-B*15:03M HLA-B*07:05H HLA-C*02:02H
NQKLIANQF

SEQ ID NO: 6739 - protein, 9 aa, Severe acute respiratory syndrome coronavirus 2
  REGION 1..9: note = Table A: HLA-B*54:01H
LIANQFNSA

SEQ ID NO: 6740 - protein, 9 aa, Severe acute respiratory syndrome coronavirus 2
  REGION 1..9: note = Table A: HLA-C*15:05M HLA-B*51:01M HLA-B*38:02H
IANQFNSAI

SEQ ID NO: 6741 - protein, 9 aa, Severe acute respiratory syndrome coronavirus 2
  REGION 1..9: note = Table A: HLA-A*11:01H HLA-A*11:02H HLA-A*34:02H
NQFNSAIGK

SEQ ID NO: 6742 - protein, 9 aa, Severe acute respiratory syndrome coronavirus 2
  REGION 1..9: note = Table A: HLA-B*48:01H HLA-C*15:05H HLA-A*02:05H HLA-A*02:08H HLA-A*02:02H HLA-B*13:01H
AIGKIQDSL

SEQ ID NO: 6743 - protein, 9 aa, Severe acute respiratory syndrome coronavirus 2
  REGION 1..9: note = Table A: HLA-A*11:303H HLA-C*15:05H HLA-C*01:02H HLA-A*02:04H HLA-A*02:05H HLA-B*14:01H HLA-A*02:01H HLA-A*02:02H HLA-A*02:03M HLA-B*38:02M HLA-B*15:01H HLA-B*15:02H HLA-B*39:01H HLA-B*07:05H
SLSSTASAL

SEQ ID NO: 6744 - protein, 9 aa, Severe acute respiratory syndrome coronavirus 2
  REGION 1..9: note = Table A: HLA-A*11:01H HLA-A*11:02H HLA-A*34:02M HLA-C*07:27H
SSTASALGK

SEQ ID NO: 6745 - protein, 9 aa, Severe acute respiratory syndrome coronavirus 2
  REGION 1..9: note = Table A: HLA-A*11:01H HLA-A*25:01H HLA-A*26:01H HLA-A*26:02M HLA-A*26:03H HLA-A*68:01H HLA-A*68:02H HLA-C*15:05H HLA-A*02:05H HLA-A*02:08H HLA-A*34:01H HLA-A*34:02M HLA-A*66:01H
STASALGKL

SEQ ID NO: 6746 - protein, 9 aa, Severe acute respiratory syndrome coronavirus 2
  REGION 1..9: note = Table A: HLA-A*02:11H HLA-A*02:06H HLA-B*38:02H
SALGKLQDV

SEQ ID NO: 6747 - protein, 9 aa, Severe acute respiratory syndrome coronavirus 2
  REGION 1..9: note = Table A: HLA-A*02:11H HLA-A*02:02M HLA-B*13:02H
ALGKLQDVV

SEQ ID NO: 6748 - protein, 9 aa, Severe acute respiratory syndrome coronavirus 2
  REGION 1..9: note = Table A: HLA-A*02:11H HLA-A*02:01H HLA-A*02:02H
KLQDVVNQN

SEQ ID NO: 6749 - protein, 9 aa, Severe acute respiratory syndrome coronavirus 2
  REGION 1..9: note = Table A: HLA-A*02:11H HLA-A*02:05H HLA-A*02:06H HLA-A*02:07H HLA-A*02:01H HLA-C*08:02H HLA-B*38:02H
LQDVVNQNA

SEQ ID NO: 6750 - protein, 9 aa, Severe acute respiratory syndrome coronavirus 2
  REGION 1..9: note = Table A: HLA-A*26:03H
DVVNQNAQA

SEQ ID NO: 6751 - protein, 9 aa, Severe acute respiratory syndrome coronavirus 2
  REGION 1..9: note = Table A: HLA-A*11:303M HLA-C*16:04H HLA-A*03:02H HLA-B*46:01H HLA-A*26:03H HLA-B*08:01H HLA-C*03:04H HLA-B*35:03H HLA-C*15:05M HLA-C*01:02M HLA-A*02:05M HLA-A*02:08M HLA-B*14:01H HLA-A*02:02H HLA-C*07:27H
  REGION 1..9: note = CONT. FROM ABOVE: HLA-C*08:01H HLA-B*38:02M HLA-B*07:02H HLA- B*15:01M HLA-B*15:02H HLA-B*39:01H HLA-B*07:05M HLA-C*07:04H
VVNQNAQAL

SEQ ID NO: 6752 - protein, 9 aa, Severe acute respiratory syndrome coronavirus 2
  REGION 1..9: note = Table A: HLA-C*15:05H
QNAQALNTL

SEQ ID NO: 6753 - protein, 9 aa, Severe acute respiratory syndrome coronavirus 2
  REGION 1..9: note = Table A: HLA-C*15:05H HLA-B*51:01H
NAQALNTLV

SEQ ID NO: 6754 - protein, 9 aa, Severe acute respiratory syndrome coronavirus 2
  REGION 1..9: note = Table A: HLA-A*03:01H HLA-A*03:02H HLA-A*11:01M HLA-A*11:02M HLA-A*36:01H HLA-C*07:27H HLA-B*13:02H
AQALNTLVK

SEQ ID NO: 6755 - protein, 9 aa, Severe acute respiratory syndrome coronavirus 2
  REGION 1..9: note = Table A: HLA-A*11:303H HLA-B*44:02H HLA-B*44:05H HLA-A*03:01H HLA-C*06:02H HLA-B*08:01H HLA-B*44:03H HLA-C*07:01H HLA-A*02:11H HLA-C*15:05H HLA-C*15:02H HLA-A*02:04H HLA-A*02:05H HLA-A*02:07H HLA-A*02:08M
  REGION 1..9: note = CONT. FROM ABOVE: HLA-B*14:01M HLA-A*02:01M HLA-A*02:02H HLA- A*02:03H HLA-B*38:02M HLA-A*32:01H HLA-B*07:04M HLA-B*15:01H HLA-B*07:05H HLA-B*41:02H HLA-B*13:02H HLA-C*07:04H
ALNTLVKQL

SEQ ID NO: 6756 - protein, 9 aa, Severe acute respiratory syndrome coronavirus 2
  REGION 1..9: note = Table A: HLA-B*38:02H HLA-B*15:01H HLA-B*15:02H HLA-B*57:03H
LVKQLSSNF

SEQ ID NO: 6757 - protein, 9 aa, Severe acute respiratory syndrome coronavirus 2
  REGION 1..9: note = Table A: HLA-B*38:02H
QLSSNFGAI

SEQ ID NO: 6758 - protein, 9 aa, Severe acute respiratory syndrome coronavirus 2
  REGION 1..9: note = Table A: HLA-A*68:02M HLA-C*15:05H HLA-A*02:05H HLA-B*14:01H HLA-A*02:03H HLA-B*38:02H HLA-B*39:06H HLA-B*07:05H
SNFGAISSV

SEQ ID NO: 6759 - protein, 9 aa, Severe acute respiratory syndrome coronavirus 2
  REGION 1..9: note = Table A: HLA-C*14:02H HLA-C*14:03M HLA-B*07:05H
NFGAISSVL

SEQ ID NO: 6760 - protein, 9 aa, Severe acute respiratory syndrome coronavirus 2
  REGION 1..9: note = Table A: HLA-C*08:01H HLA-B*57:03H
ISSVLNDIL

SEQ ID NO: 6761 - protein, 9 aa, Severe acute respiratory syndrome coronavirus 2
  REGION 1..9: note = Table A: HLA-A*11:303M HLA-A*74:01M HLA-A*03:01H HLA-A*03:02H HLA-A*11:01H HLA-A*11:02H HLA-A*33:01H HLA-A*33:03M HLA-A*26:03M HLA-A*30:02H HLA-A*68:01M HLA-A*34:01M HLA-A*34:02M HLA-C*07:27M HLA-A*31:01M
  REGION 1..9: note = CONT. FROM ABOVE: HLA-A*66:01H
SVLNDILSR

SEQ ID NO: 6762 - protein, 9 aa, Severe acute respiratory syndrome coronavirus 2
  REGION 1..9: note = Table A: HLA-A*11:303H HLA-A*74:01M HLA-A*03:01H HLA-B*46:01H HLA-C*04:03H HLA-A*02:11H HLA-A*30:02H HLA-A*68:02H HLA-C*15:05H HLA-C*01:02H HLA-C*15:02H HLA-A*02:04H HLA-A*02:05M HLA-A*02:06H HLA-A*02:07H
  REGION 1..9: note = CONT. FROM ABOVE: HLA-B*14:01H HLA-A*02:01M HLA-A*02:02H HLA- A*02:03H HLA-C*08:01H HLA-B*38:02M HLA-B*15:01H HLA-B*13:02H
VLNDILSRL

SEQ ID NO: 6763 - protein, 9 aa, Severe acute respiratory syndrome coronavirus 2
  REGION 1..9: note = Table A: HLA-A*02:11M HLA-A*02:07M HLA-A*02:01M HLA-A*02:02M HLA-B*38:02H HLA-B*13:01M HLA-B*13:02H
RLDKVEAEV

SEQ ID NO: 6764 - protein, 9 aa, Severe acute respiratory syndrome coronavirus 2
  REGION 1..9: note = Table A: HLA-B*38:02H
DKVEAEVQI

SEQ ID NO: 6765 - protein, 9 aa, Severe acute respiratory syndrome coronavirus 2
  REGION 1..9: note = Table A: HLA-B*27:02H HLA-A*68:01H
VEAEVQIDR

SEQ ID NO: 6766 - protein, 9 aa, Severe acute respiratory syndrome coronavirus 2
  REGION 1..9: note = Table A: HLA-B*35:02H HLA-B*35:12H HLA-B*39:01H
EAEVQIDRL

SEQ ID NO: 6767 - protein, 9 aa, Severe acute respiratory syndrome coronavirus 2
  REGION 1..9: note = Table A: HLA-B*44:02H HLA-B*44:05M HLA-B*44:03M HLA-B*40:02H HLA-B*41:02H HLA-B*49:01M
AEVQIDRLI

SEQ ID NO: 6768 - protein, 9 aa, Severe acute respiratory syndrome coronavirus 2
  REGION 1..9: note = Table A: HLA-A*02:05H
VQIDRLITG

SEQ ID NO: 6769 - protein, 9 aa, Severe acute respiratory syndrome coronavirus 2
  REGION 1..9: note = Table A: HLA-A*74:01H HLA-A*33:01H HLA-A*33:03H HLA-A*68:01H HLA-A*34:01H
QIDRLITGR

SEQ ID NO: 6770 - protein, 9 aa, Severe acute respiratory syndrome coronavirus 2
  REGION 1..9: note = Table A: HLA-B*08:01M HLA-C*03:03H HLA-C*03:02H HLA-C*03:04H HLA-B*14:02H HLA-A*02:04H HLA-A*02:02H HLA-B*07:04H
LITGRLQSL

SEQ ID NO: 6771 - protein, 9 aa, Severe acute respiratory syndrome coronavirus 2
  REGION 1..9: note = Table A: HLA-C*16:04H HLA-B*27:05H HLA-B*27:02H HLA-B*38:02H HLA-B*39:01H
GRLQSLQTY

SEQ ID NO: 6772 - protein, 9 aa, Severe acute respiratory syndrome coronavirus 2
  REGION 1..9: note = Table A: HLA-A*02:11H HLA-A*02:04M HLA-A*02:07H HLA-A*02:01M HLA-A*02:02M HLA-A*02:03H HLA-B*38:02H HLA-B*13:02M
RLQSLQTYV

SEQ ID NO: 6773 - protein, 9 aa, Severe acute respiratory syndrome coronavirus 2
  REGION 1..9: note = Table A: HLA-B*48:01M HLA-A*02:11H HLA-A*68:02H HLA-A*02:04H HLA-A*02:05H HLA-A*02:06M HLA-A*02:08M HLA-A*02:02M HLA-C*08:01H HLA-B*38:02M HLA-B*15:01H HLA-B*39:01H HLA-B*13:01H HLA-B*13:02H
LQTYVTQQL

SEQ ID NO: 6774 - protein, 9 aa, Severe acute respiratory syndrome coronavirus 2
  REGION 1..9: note = Table A: HLA-B*58:01H HLA-B*58:02H HLA-B*57:01H HLA-A*68:02H HLA-C*15:05H HLA-C*15:02H HLA-B*38:02H HLA-B*57:03M HLA-B*13:02H
QTYVTQQLI

SEQ ID NO: 6775 - protein, 9 aa, Severe acute respiratory syndrome coronavirus 2
  REGION 1..9: note = Table A: HLA-A*33:03H
TYVTQQLIR

SEQ ID NO: 6776 - protein, 9 aa, Severe acute respiratory syndrome coronavirus 2
  REGION 1..9: note = Table A: HLA-B*56:01H HLA-A*02:11H HLA-B*55:02H HLA-A*68:02H HLA-A*02:05M HLA-A*02:06M HLA-A*02:08H HLA-A*02:02H HLA-A*02:03H HLA-B*38:02H HLA-B*40:06H HLA-B*54:01M
YVTQQLIRA

SEQ ID NO: 6777 - protein, 9 aa, Severe acute respiratory syndrome coronavirus 2
  REGION 1..9: note = Table A: HLA-B*08:01H HLA-B*14:02M HLA-A*02:06H HLA-B*14:01H HLA-B*52:01M HLA-B*38:02H HLA-B*13:01H HLA-B*13:02M
QQLIRAAEI

SEQ ID NO: 6778 - protein, 9 aa, Severe acute respiratory syndrome coronavirus 2
  REGION 1..9: note = Table A: HLA-A*34:01H
QLIRAAEIR

SEQ ID NO: 6779 - protein, 9 aa, Severe acute respiratory syndrome coronavirus 2
  REGION 1..9: note = Table A: HLA-B*56:01M HLA-A*02:11M HLA-B*55:02M HLA-C*15:05H HLA-B*55:01M HLA-A*02:05H HLA-A*02:08H HLA-A*02:02H HLA-B*38:02H HLA-B*39:06H HLA-B*54:01M HLA-B*07:02H HLA-B*07:04H HLA-B*07:05H HLA-B*50:01H
RAAEIRASA

SEQ ID NO: 6780 - protein, 9 aa, Severe acute respiratory syndrome coronavirus 2
  REGION 1..9: note = Table A: HLA-B*44:02M HLA-B*44:05H HLA-C*16:04H HLA-B*45:01M HLA-B*44:03H HLA-B*37:01H HLA-B*38:02H HLA-B*40:01H HLA-B*40:02H HLA-B*41:02H HLA-B*49:01H HLA-B*50:01H
AEIRASANL

SEQ ID NO: 6781 - protein, 9 aa, Severe acute respiratory syndrome coronavirus 2
  REGION 1..9: note = Table A: HLA-B*14:01H HLA-B*39:06H
IRASANLAA

SEQ ID NO: 6782 - protein, 9 aa, Severe acute respiratory syndrome coronavirus 2
  REGION 1..9: note = Table A: HLA-A*11:303H HLA-A*03:01H HLA-A*03:02M HLA-A*11:01H HLA-A*11:02M HLA-A*30:02H HLA-A*68:01H HLA-A*34:02M HLA-C*07:27M
ASANLAATK

SEQ ID NO: 6783 - protein, 9 aa, Severe acute respiratory syndrome coronavirus 2
  REGION 1..9: note = Table A: HLA-A*11:303M HLA-B*44:05H HLA-C*16:01H HLA-B*46:01H HLA-B*53:01H HLA-C*03:04H HLA-B*35:03M HLA-C*15:05H HLA-C*12:02H HLA-C*12:03H HLA-A*34:01H HLA-C*07:27H HLA-B*35:01M HLA-B*35:02H HLA-B*35:08H
  REGION 1..9: note = CONT. FROM ABOVE: HLA-B*51:01H HLA-B*35:07H HLA-B*35:12H HLA- B*38:02H HLA-B*07:02H HLA-B*15:01H HLA-B*15:02M HLA-B*07:05M HLA-C*02:02H HLA-C*07:04M
SANLAATKM

SEQ ID NO: 6784 - protein, 9 aa, Severe acute respiratory syndrome coronavirus 2
  REGION 1..9: note = Table A: HLA-A*34:01M HLA-A*66:01H
ECVLGQSKR

SEQ ID NO: 6785 - protein, 9 aa, Severe acute respiratory syndrome coronavirus 2
  REGION 1..9: note = Table A: HLA-A*36:01M
RVDFCGKGY

SEQ ID NO: 6786 - protein, 9 aa, Severe acute respiratory syndrome coronavirus 2
  REGION 1..9: note = Table A: HLA-B*15:03M
GKGYHLMSF

SEQ ID NO: 6787 - protein, 9 aa, Severe acute respiratory syndrome coronavirus 2
  REGION 1..9: note = Table A: HLA-B*56:01H HLA-A*02:11M HLA-B*55:02M HLA-B*55:01H HLA-B*14:01H HLA-A*02:01H HLA-A*02:02H HLA-A*02:03M HLA-B*38:02M HLA-B*39:06M HLA-B*54:01M HLA-B*13:02H HLA-B*50:01H
HLMSFPQSA

SEQ ID NO: 6788 - protein, 9 aa, Severe acute respiratory syndrome coronavirus 2
  REGION 1..9: note = Table A: HLA-B*46:01H HLA-C*03:02H HLA-C*12:02H HLA-A*34:01H HLA-A*34:02M HLA-C*08:03H HLA-A*66:01H
MSFPQSAPH

SEQ ID NO: 6789 - protein, 9 aa, Severe acute respiratory syndrome coronavirus 2
  REGION 1..9: note = Table A: HLA-B*56:01M HLA-A*02:11H HLA-B*55:02M HLA-C*15:05H HLA-B*55:01H HLA-A*02:03H HLA-B*51:01H HLA-B*54:01M HLA-B*07:04H
FPQSAPHGV

SEQ ID NO: 6790 - protein, 9 aa, Severe acute respiratory syndrome coronavirus 2
  REGION 1..9: note = Table A: HLA-B*58:01M HLA-B*58:02H HLA-B*57:01H HLA-B*46:01H HLA-C*15:05H HLA-C*12:02H HLA-C*12:03H HLA-B*35:01H HLA-B*38:02H HLA-B*15:01M HLA-B*15:02M HLA-B*15:03H HLA-B*07:05H HLA-B*57:03H HLA-C*07:04H
QSAPHGVVF

SEQ ID NO: 6791 - protein, 9 aa, Severe acute respiratory syndrome coronavirus 2
  REGION 1..9: note = Table A: HLA-C*14:03H HLA-C*04:03H HLA-A*02:11H HLA-B*53:01H HLA-A*68:02H HLA-C*01:02M HLA-C*12:02H HLA-A*02:05H HLA-C*17:01M HLA-C*08:01H HLA-C*07:04M
SAPHGVVFL

SEQ ID NO: 6792 - protein, 9 aa, Severe acute respiratory syndrome coronavirus 2
  REGION 1..9: note = Table A: HLA-B*38:02H
PHGVVFLHV

SEQ ID NO: 6793 - protein, 9 aa, Severe acute respiratory syndrome coronavirus 2
  REGION 1..9: note = Table A: HLA-A*29:01H HLA-A*29:02H HLA-A*30:02H HLA-B*35:01H HLA-B*35:07H HLA-B*38:02H HLA-B*15:01H HLA-B*15:02H HLA-B*15:03H HLA-B*07:05H
GVVFLHVTY

SEQ ID NO: 6794 - protein, 9 aa, Severe acute respiratory syndrome coronavirus 2
  REGION 1..9: note = Table A: HLA-A*02:11M HLA-A*68:02H HLA-C*15:02H HLA-A*02:04H HLA-A*02:05H HLA-A*02:06H HLA-A*02:07H HLA-A*02:02H HLA-A*02:03M HLA-B*38:02H
VVFLHVTYV

SEQ ID NO: 6795 - protein, 9 aa, Severe acute respiratory syndrome coronavirus 2
  REGION 1..9: note = Table A: HLA-A*68:02H
HVTYVPAQE

SEQ ID NO: 6796 - protein, 9 aa, Severe acute respiratory syndrome coronavirus 2
  REGION 1..9: note = Table A: HLA-A*11:303M HLA-A*74:01H HLA-A*03:01H HLA-A*03:02H HLA-A*11:01H HLA-A*11:02H HLA-A*36:01H HLA-A*33:03H HLA-A*30:01H HLA-A*30:02H HLA-A*68:01H HLA-A*34:01H HLA-A*34:02H HLA-C*07:27H HLA-A*31:01H
  REGION 1..9: note = CONT. FROM ABOVE: HLA-A*66:01H
VTYVPAQEK

SEQ ID NO: 6797 - protein, 9 aa, Severe acute respiratory syndrome coronavirus 2
  REGION 1..9: note = Table A: HLA-B*45:01H HLA-B*50:01H
AQEKNFTTA

SEQ ID NO: 6798 - protein, 9 aa, Severe acute respiratory syndrome coronavirus 2
  REGION 1..9: note = Table A: HLA-B*45:01H HLA-B*40:06M HLA-B*41:02H HLA-B*50:01H
QEKNFTTAP

SEQ ID NO: 6799 - protein, 9 aa, Severe acute respiratory syndrome coronavirus 2
  REGION 1..9: note = Table A: HLA-B*58:02H HLA-B*57:03H HLA-B*13:02H
KNFTTAPAI

SEQ ID NO: 6800 - protein, 9 aa, Severe acute respiratory syndrome coronavirus 2
  REGION 1..9: note = Table A: HLA-A*34:02M
FTTAPAICH

SEQ ID NO: 6801 - protein, 9 aa, Severe acute respiratory syndrome coronavirus 2
  REGION 1..9: note = Table A: HLA-A*02:11H HLA-B*07:04H
KAHFPREGV

SEQ ID NO: 6802 - protein, 9 aa, Severe acute respiratory syndrome coronavirus 2
  REGION 1..9: note = Table A: HLA-B*38:02M HLA-B*15:03M HLA-B*15:10M
AHFPREGVF

SEQ ID NO: 6803 - protein, 9 aa, Severe acute respiratory syndrome coronavirus 2
  REGION 1..9: note = Table A: HLA-C*04:03H
HFPREGVFV

SEQ ID NO: 6804 - protein, 9 aa, Severe acute respiratory syndrome coronavirus 2
  REGION 1..9: note = Table A: HLA-B*54:01H
FPREGVFVS

SEQ ID NO: 6805 - protein, 9 aa, Severe acute respiratory syndrome coronavirus 2
  REGION 1..9: note = Table A: HLA-C*14:03H HLA-A*24:02M HLA-A*24:07H HLA-A*23:01M
VFVSNGTHW

SEQ ID NO: 6806 - protein, 9 aa, Severe acute respiratory syndrome coronavirus 2
  REGION 1..9: note = Table A: HLA-C*15:02H
VSNGTHWFV

SEQ ID NO: 6807 - protein, 9 aa, Severe acute respiratory syndrome coronavirus 2
  REGION 1..9: note = Table A: HLA-A*11:303H HLA-A*74:01H HLA-A*03:01M HLA-A*03:02H HLA-A*11:01M HLA-A*11:02H HLA-A*36:01H HLA-B*57:01H HLA-A*33:01M HLA-A*33:03M HLA-A*26:03H HLA-B*27:05H HLA-A*30:01H HLA-A*30:02H HLA-A*68:01M
  REGION 1..9: note = CONT. FROM ABOVE: HLA-A*68:02H HLA-A*34:01M HLA-A*34:02H HLA- C*07:27M HLA-A*31:01H HLA-A*66:01H
GTHWFVTQR

SEQ ID NO: 6808 - protein, 9 aa, Severe acute respiratory syndrome coronavirus 2
  REGION 1..9: note = Table A: HLA-A*29:02H
WFVTQRNFY

SEQ ID NO: 6809 - protein, 9 aa, Severe acute respiratory syndrome coronavirus 2
  REGION 1..9: note = Table A: HLA-B*38:02H
QRNFYEPQI

SEQ ID NO: 6810 - protein, 9 aa, Severe acute respiratory syndrome coronavirus 2
  REGION 1..9: note = Table A: HLA-C*15:02M HLA-B*57:03H
RNFYEPQII

SEQ ID NO: 6811 - protein, 9 aa, Severe acute respiratory syndrome coronavirus 2
  REGION 1..9: note = Table A: HLA-B*39:01H
FYEPQIITT

SEQ ID NO: 6812 - protein, 9 aa, Severe acute respiratory syndrome coronavirus 2
  REGION 1..9: note = Table A: HLA-B*58:01H HLA-B*46:01H HLA-B*35:02H HLA-B*38:02M HLA-B*15:01M HLA-B*15:02M HLA-B*57:03H
QIITTDNTF

SEQ ID NO: 6813 - protein, 9 aa, Severe acute respiratory syndrome coronavirus 2
  REGION 1..9: note = Table A: HLA-A*02:11H HLA-A*68:02H HLA-A*02:05M HLA-A*02:06H HLA-A*02:08M
VVIGIVNNT

SEQ ID NO: 6814 - protein, 9 aa, Severe acute respiratory syndrome coronavirus 2
  REGION 1..9: note = Table A: HLA-B*46:01H HLA-B*35:01H HLA-B*15:01H HLA-B*15:02H HLA-B*15:03H HLA-B*15:11H
IGIVNNTVY

SEQ ID NO: 6815 - protein, 9 aa, Severe acute respiratory syndrome coronavirus 2
  REGION 1..9: note = Table A: HLA-B*58:01H HLA-C*14:02H HLA-C*14:03H HLA-A*11:303H HLA-B*44:05H HLA-A*36:01H HLA-C*06:02H HLA-A*29:01H HLA-A*29:02H HLA-C*04:01H HLA-C*04:03H HLA-C*03:03H HLA-C*07:01H HLA-C*07:02H HLA-A*02:11H
  REGION 1..9: note = CONT. FROM ABOVE: HLA-C*03:04H HLA-B*35:03M HLA-C*15:05M HLA- A*02:04H HLA-A*02:06H HLA-A*02:07H HLA-A*02:01H HLA-A*24:02H HLA-B*35:01H HLA-B*35:02M HLA-A*24:07H HLA-C*08:01H HLA-C*08 :02M HLA-A*23:01H HLA-B*35:12M HLA-B*38:01M HLA-B*38:02M
  REGION 1..9: note = CONT. FROM ABOVE: HLA-B*40:01H HLA-B*40:02H HLA-B*39:01H HLA- B*07:05H HLA-C*05:01M HLA-C*07:04H
VYDPLQPEL

SEQ ID NO: 6816 - protein, 9 aa, Severe acute respiratory syndrome coronavirus 2
  REGION 1..9: note = Table A: HLA-A*02:07M HLA-B*38:02H
ELDSFKEEL

SEQ ID NO: 6817 - protein, 9 aa, Severe acute respiratory syndrome coronavirus 2
  REGION 1..9: note = Table A: HLA-A*29:02H HLA-A*30:02M
SFKEELDKY

SEQ ID NO: 6818 - protein, 9 aa, Severe acute respiratory syndrome coronavirus 2
  REGION 1..9: note = Table A: HLA-B*38:01M HLA-B*38:02H HLA-B*39:01H HLA-B*15:10M
NHTSPDVDL

SEQ ID NO: 6819 - protein, 9 aa, Severe acute respiratory syndrome coronavirus 2
  REGION 1..9: note = Table A: HLA-A*26:03H HLA-A*68:02H HLA-C*15:05H HLA-B*14:01H HLA-B*38:02M HLA-B*39:01H HLA-B*07:05H
DISGINASV

SEQ ID NO: 6820 - protein, 9 aa, Severe acute respiratory syndrome coronavirus 2
  REGION 1..9: note = Table A: HLA-C*15:05H HLA-A*02:04H HLA-A*02:03H HLA-B*13:02H
GINASVVNI

SEQ ID NO: 6821 - protein, 9 aa, Severe acute respiratory syndrome coronavirus 2
  REGION 1..9: note = Table A: HLA-A*11:303H HLA-A*03:02H HLA-A*11:01M HLA-A*11:02H HLA-A*33:03H HLA-A*68:01H HLA-A*68:02H HLA-A*34:01H HLA-A*34:02H HLA-C*07:27H HLA-A*66:01H
NASVVNIQK

SEQ ID NO: 6822 - protein, 9 aa, Severe acute respiratory syndrome coronavirus 2
  REGION 1..9: note = Table A: HLA-A*02:11H HLA-A*68:02M HLA-A*02:05M HLA-A*02:06H HLA-A*02:08M HLA-A*02:02H HLA-B*38:02H HLA-B*40:06H HLA-B*57:03H HLA-B*13:02H
SVVNIQKEI

SEQ ID NO: 6823 - protein, 9 aa, Severe acute respiratory syndrome coronavirus 2
  REGION 1..9: note = Table A: HLA-B*44:05H HLA-B*46:01H HLA-B*45:01H HLA-A*02:11M HLA-A*68:02H HLA-C*15:02H HLA-A*02:05M HLA-A*02:06H HLA-A*02:07H HLA-A*02:08H HLA-B*14:01H HLA-A*02:01H HLA-A*02:02H HLA-A*02:03H HLA-B*37:01H HLA-B*38:02H
  REGION 1..9: note = CONT. FROM ABOVE: HLA-B*40:01H HLA-B*40:02H HLA-B*40:06H HLA- B*41:02M HLA-B*13:02H HLA-B*49:01H HLA-B*50:01H
KEIDRLNEV

SEQ ID NO: 6824 - protein, 9 aa, Severe acute respiratory syndrome coronavirus 2
  REGION 1..9: note = Table A: HLA-A*74:01H HLA-A*02:11H HLA-C*15:02H HLA-A*02:04M HLA-A*02:07H HLA-A*02:01H HLA-A*02:02H HLA-A*02:03H HLA-B*38:02H HLA-B*07:04H HLA-B*13:01H HLA-B*13:02H
RLNEVAKNL

SEQ ID NO: 6825 - protein, 9 aa, Severe acute respiratory syndrome coronavirus 2
  REGION 1..9: note = Table A: HLA-A*26:03H HLA-A*34:01H
EVAKNLNES

SEQ ID NO: 6826 - protein, 9 aa, Severe acute respiratory syndrome coronavirus 2
  REGION 1..9: note = Table A: HLA-A*11:303H HLA-C*16:01H HLA-B*46:01H HLA-B*08:01H HLA-C*03:04H HLA-C*12:02H HLA-C*12:03H HLA-A*02:05H HLA-A*02:02H HLA-C*08:01H HLA-B*38:02H HLA-B*07:04H HLA-B*15:01H HLA-B*57:03H
VAKNLNESL

SEQ ID NO: 6827 - protein, 9 aa, Severe acute respiratory syndrome coronavirus 2
  REGION 1..9: note = Table A: HLA-A*02:04M HLA-B*14:01H HLA-A*02:01H HLA-A*02:02H HLA-A*02:03H HLA-B*38:02H
NLNESLIDL

SEQ ID NO: 6828 - protein, 9 aa, Severe acute respiratory syndrome coronavirus 2
  REGION 1..9: note = Table A: HLA-A*68:02H
ESLIDLQEL

SEQ ID NO: 6829 - protein, 9 aa, Severe acute respiratory syndrome coronavirus 2
  REGION 1..9: note = Table A: HLA-A*36:01M
LIDLQELGK

SEQ ID NO: 6830 - protein, 9 aa, Severe acute respiratory syndrome coronavirus 2
  REGION 1..9: note = Table A: HLA-B*44:02M HLA-B*44:05H HLA-C*16:04H HLA-B*44:03H HLA-B*18:01M HLA-B*35:01H HLA-B*38:02H HLA-B*07:05M
QELGKYEQY

SEQ ID NO: 6831 - protein, 9 aa, Severe acute respiratory syndrome coronavirus 2
  REGION 1..9: note = Table A: HLA-B*15:03M
GKYEQYIKW

SEQ ID NO: 6832 - protein, 9 aa, Severe acute respiratory syndrome coronavirus 2
  REGION 1..9: note = Table A: HLA-C*06:02H HLA-A*24:02M HLA-A*24:07H HLA-A*23:01M
QYIKWPWYI

SEQ ID NO: 6833 - protein, 9 aa, Severe acute respiratory syndrome coronavirus 2
  REGION 1..9: note = Table A: HLA-C*14:03H
GFIAGLIAI

SEQ ID NO: 6834 - protein, 9 aa, Severe acute respiratory syndrome coronavirus 2
  REGION 1..9: note = Table A: HLA-A*02:11H HLA-A*68:02M HLA-A*02:04H HLA-A*02:05H HLA-A*02:02H HLA-A*02:03H HLA-B*38:02H
FIAGLIAIV

SEQ ID NO: 6835 - protein, 9 aa, Severe acute respiratory syndrome coronavirus 2
  REGION 1..9: note = Table A: HLA-B*35:03H HLA-C*15:05H HLA-B*35:01H HLA-C*07:04H
IAGLIAIVM

SEQ ID NO: 6836 - protein, 9 aa, Severe acute respiratory syndrome coronavirus 2
  REGION 1..9: note = Table A: HLA-A*68:02H HLA-B*57:03H
LIAIVMVTI

SEQ ID NO: 6837 - protein, 9 aa, Severe acute respiratory syndrome coronavirus 2
  REGION 1..9: note = Table A: HLA-B*46:01H HLA-C*03:02H HLA-C*03:04H HLA-B*35:03M HLA-C*15:05H HLA-C*12:03H HLA-B*35:01H HLA-C*17:01H HLA-B*35:07H HLA-B*38:02H HLA-B*15:02H
IAIVMVTIM

SEQ ID NO: 6838 - protein, 9 aa, Severe acute respiratory syndrome coronavirus 2
  REGION 1..9: note = Table A: HLA-A*34:02H
MTSCCSCLK

SEQ ID NO: 6839 - protein, 9 aa, Severe acute respiratory syndrome coronavirus 2
  REGION 1..9: note = Table A: HLA-B*44:05H HLA-B*35:02M HLA-B*35:12M HLA-B*38:01H HLA-B*38:02H HLA-B*40:01M HLA-B*40:02H HLA-B*39:01M HLA-B*07:05H HLA-B*41:02H HLA-B*49:01H
DEDDSEPVL

SEQ ID NO: 6840 - protein, 9 aa, Severe acute respiratory syndrome coronavirus 2
  REGION 1..9: note = Table A: HLA-A*68:02H
DSEPVLKGV

SEQ ID NO: 6841 - protein, 9 aa, Severe acute respiratory syndrome coronavirus 2
  REGION 1..9: note = Table A: HLA-A*34:01H HLA-B*07:04H
EPVLKGVKL

SEQ ID NO: 6842 - protein, 9 aa, Severe acute respiratory syndrome coronavirus 2
  REGION 1..9: note = Table A: HLA-A*29:02H HLA-A*30:02H HLA-B*38:02H
VLKGVKLHY

SEQ ID NO: 6843 - protein, 10 aa, Severe acute respiratory syndrome coronavirus 2
  REGION 1..10: note = Table A: HLA-A*30:01H HLA-A*30:02M
TTRTQLPPAY

SEQ ID NO: 6844 - protein, 10 aa, Severe acute respiratory syndrome coronavirus 2
  REGION 1..10: note = Table A: HLA-B*44:05H HLA-A*25:01H HLA-B*46:01H HLA-A*24:07H HLA-B*38:01H HLA-B*38:02M HLA-B*15:01H HLA-B*15:02M
QLPPAYTNSF

SEQ ID NO: 6845 - protein, 10 aa, Severe acute respiratory syndrome coronavirus 2
  REGION 1..10: note = Table A: HLA-A*26:01H HLA-A*30:02M
YTNSFTRGVY

SEQ ID NO: 6846 - protein, 10 aa, Severe acute respiratory syndrome coronavirus 2
  REGION 1..10: note = Table A: HLA-A*11:303H HLA-A*74:01H HLA-A*03:01H HLA-A*03:02H HLA-A*11:01M HLA-A*11:02H HLA-A*33:01M HLA-A*33:03H HLA-A*26:03H HLA-A*30:02H HLA-A*68:01M HLA-A*68:02H HLA-A*34:01M HLA-A*34:02M HLA-C*07:27H
  REGION 1..10: note = CONT. FROM ABOVE: HLA-A*31:01M HLA-A*66:01H
GVYYPDKVFR

SEQ ID NO: 6847 - protein, 10 aa, Severe acute respiratory syndrome coronavirus 2
  REGION 1..10: note = Table A: HLA-C*15:05H
YPDKVFRSSV

SEQ ID NO: 6848 - protein, 10 aa, Severe acute respiratory syndrome coronavirus 2
  REGION 1..10: note = Table A: HLA-A*02:04H HLA-A*02:01H HLA-A*02:02M
VLHSTQDLFL

SEQ ID NO: 6849 - protein, 10 aa, Severe acute respiratory syndrome coronavirus 2
  REGION 1..10: note = Table A: HLA-A*02:04H
STQDLFLPFF

SEQ ID NO: 6850 - protein, 10 aa, Severe acute respiratory syndrome coronavirus 2
  REGION 1..10: note = Table A: HLA-A*68:02H
DLFLPFFSNV

SEQ ID NO: 6851 - protein, 10 aa, Severe acute respiratory syndrome coronavirus 2
  REGION 1..10: note = Table A: HLA-B*38:02H
FLPFFSNVTW

SEQ ID NO: 6852 - protein, 10 aa, Severe acute respiratory syndrome coronavirus 2
  REGION 1..10: note = Table A: HLA-B*35:07H
LPFFSNVTWF

SEQ ID NO: 6853 - protein, 10 aa, Severe acute respiratory syndrome coronavirus 2
  REGION 1..10: note = Table A: HLA-A*68:02H
NVTWFHAIHV

SEQ ID NO: 6854 - protein, 10 aa, Severe acute respiratory syndrome coronavirus 2
  REGION 1..10: note = Table A: HLA-A*66:01H
HAIHVSGTNG

SEQ ID NO: 6855 - protein, 10 aa, Severe acute respiratory syndrome coronavirus 2
  REGION 1..10: note = Table A: HLA-A*26:03M HLA-A*68:01M HLA-A*34:01M HLA-A*34:02H HLA-A*66:01M
HVSGTNGTKR

SEQ ID NO: 6856 - protein, 10 aa, Severe acute respiratory syndrome coronavirus 2
  REGION 1..10: note = Table A: HLA-A*30:01H HLA-B*57:03H
GTKRFDNPVL

SEQ ID NO: 6857 - protein, 10 aa, Severe acute respiratory syndrome coronavirus 2
  REGION 1..10: note = Table A: HLA-B*27:05M HLA-C*07:01H HLA-C*07:02H HLA-B*27:02H
KRFDNPVLPF

SEQ ID NO: 6858 - protein, 10 aa, Severe acute respiratory syndrome coronavirus 2
  REGION 1..10: note = Table A: HLA-A*24:07H
VLPFNDGVYF

SEQ ID NO: 6859 - protein, 10 aa, Severe acute respiratory syndrome coronavirus 2
  REGION 1..10: note = Table A: HLA-B*56:01H HLA-B*55:02H HLA-B*54:01H
LPFNDGVYFA

SEQ ID NO: 6860 - protein, 10 aa, Severe acute respiratory syndrome coronavirus 2
  REGION 1..10: note = Table A: HLA-B*44:02H HLA-B*44:03M
TEKSNIIRGW

SEQ ID NO: 6861 - protein, 10 aa, Severe acute respiratory syndrome coronavirus 2
  REGION 1..10: note = Table A: HLA-B*58:02M HLA-B*57:03M
KSNIIRGWIF

SEQ ID NO: 6862 - protein, 10 aa, Severe acute respiratory syndrome coronavirus 2
  REGION 1..10: note = Table A: HLA-A*34:02H
WIFGTTLDSK

SEQ ID NO: 6863 - protein, 10 aa, Severe acute respiratory syndrome coronavirus 2
  REGION 1..10: note = Table A: HLA-A*25:01H HLA-A*26:03H HLA-A*68:02H HLA-C*15:05H HLA-A*02:08H HLA-A*34:02H HLA-B*38:02H HLA-B*57:03H
TTLDSKTQSL

SEQ ID NO: 6864 - protein, 10 aa, Severe acute respiratory syndrome coronavirus 2
  REGION 1..10: note = Table A: HLA-C*15:05H
IVNNATNVVI

SEQ ID NO: 6865 - protein, 10 aa, Severe acute respiratory syndrome coronavirus 2
  REGION 1..10: note = Table A: HLA-B*57:03H
VVIKVCEFQF

SEQ ID NO: 6866 - protein, 10 aa, Severe acute respiratory syndrome coronavirus 2
  REGION 1..10: note = Table A: HLA-B*46:01H
FCNDPFLGVY

SEQ ID NO: 6867 - protein, 10 aa, Severe acute respiratory syndrome coronavirus 2
  REGION 1..10: note = Table A: HLA-A*36:01H
CNDPFLGVYY

SEQ ID NO: 6868 - protein, 10 aa, Severe acute respiratory syndrome coronavirus 2
  REGION 1..10: note = Table A: HLA-A*24:07H
VYYHKNNKSW

SEQ ID NO: 6869 - protein, 10 aa, Severe acute respiratory syndrome coronavirus 2
  REGION 1..10: note = Table A: HLA-C*14:03H HLA-A*30:02H
SWMESEFRVY

SEQ ID NO: 6870 - protein, 10 aa, Severe acute respiratory syndrome coronavirus 2
  REGION 1..10: note = Table A: HLA-B*45:01H HLA-B*50:01H
MESEFRVYSS

SEQ ID NO: 6871 - protein, 10 aa, Severe acute respiratory syndrome coronavirus 2
  REGION 1..10: note = Table A: HLA-C*14:02H HLA-C*14:03H HLA-A*24:02H HLA-A*24:07M HLA-A*23:01M
VYSSANNCTF

SEQ ID NO: 6872 - protein, 10 aa, Severe acute respiratory syndrome coronavirus 2
  REGION 1..10: note = Table A: HLA-C*04:01H HLA-C*04:03H
TFEYVSQPFL

SEQ ID NO: 6873 - protein, 10 aa, Severe acute respiratory syndrome coronavirus 2
  REGION 1..10: note = Table A: HLA-B*49:01H
FEYVSQPFLM

SEQ ID NO: 6874 - protein, 10 aa, Severe acute respiratory syndrome coronavirus 2
  REGION 1..10: note = Table A: HLA-A*68:02H
YVSQPFLMDL

SEQ ID NO: 6875 - protein, 10 aa, Severe acute respiratory syndrome coronavirus 2
  REGION 1..10: note = Table A: HLA-B*37:01H
MDLEGKQGNF

SEQ ID NO: 6876 - protein, 10 aa, Severe acute respiratory syndrome coronavirus 2
  REGION 1..10: note = Table A: HLA-A*24:07M
NFKNLREFVF

SEQ ID NO: 6877 - protein, 10 aa, Severe acute respiratory syndrome coronavirus 2
  REGION 1..10: note = Table A: HLA-B*40:06H
REFVFKNIDG

SEQ ID NO: 6878 - protein, 10 aa, Severe acute respiratory syndrome coronavirus 2
  REGION 1..10: note = Table A: HLA-A*30:01H HLA-A*30:02H HLA-A*23:01H
VFKNIDGYFK

SEQ ID NO: 6879 - protein, 10 aa, Severe acute respiratory syndrome coronavirus 2
  REGION 1..10: note = Table A: HLA-A*30:02H
KNIDGYFKIY

SEQ ID NO: 6880 - protein, 10 aa, Severe acute respiratory syndrome coronavirus 2
  REGION 1..10: note = Table A: HLA-A*24:02H HLA-A*24:07M HLA-A*23:01H
IYSKHTPINL

SEQ ID NO: 6881 - protein, 10 aa, Severe acute respiratory syndrome coronavirus 2
  REGION 1..10: note = Table A: HLA-A*68:02H
YSKHTPINLV

SEQ ID NO: 6882 - protein, 10 aa, Severe acute respiratory syndrome coronavirus 2
  REGION 1..10: note = Table A: HLA-A*02:07H
LVDLPIGINI

SEQ ID NO: 6883 - protein, 10 aa, Severe acute respiratory syndrome coronavirus 2
  REGION 1..10: note = Table A: HLA-A*26:03H HLA-A*68:01H HLA-A*34:01H
DLPIGINITR

SEQ ID NO: 6884 - protein, 10 aa, Severe acute respiratory syndrome coronavirus 2
  REGION 1..10: note = Table A: HLA-A*25:01H HLA-B*56:01H HLA-B*53:01H HLA-B*55:02H HLA-A*68:01H HLA-B*35:03H HLA-C*15:05M HLA-A*34:01M HLA-B*35:01M HLA-B*51:01H HLA-B*35:07H HLA-B*54:01H HLA-B*07:02H HLA-B*07:04H HLA-B*07:05H HLA-B*15:11H
LPIGINITRF

SEQ ID NO: 6885 - protein, 10 aa, Severe acute respiratory syndrome coronavirus 2
  REGION 1..10: note = Table A: HLA-A*02:11H HLA-A*02:04H
TLLALHRSYL

SEQ ID NO: 6886 - protein, 10 aa, Severe acute respiratory syndrome coronavirus 2
  REGION 1..10: note = Table A: HLA-B*58:01H HLA-A*25:01M HLA-A*26:03H HLA-B*57:03H
LTPGDSSSGW

SEQ ID NO: 6887 - protein, 10 aa, Severe acute respiratory syndrome coronavirus 2
  REGION 1..10: note = Table A: HLA-A*30:02H HLA-B*35:01H HLA-B*39:01H HLA-B*15:11H
SGWTAGAAAY

SEQ ID NO: 6888 - protein, 10 aa, Severe acute respiratory syndrome coronavirus 2
  REGION 1..10: note = Table A: HLA-A*29:02H
GWTAGAAAYY

SEQ ID NO: 6889 - protein, 10 aa, Severe acute respiratory syndrome coronavirus 2
  REGION 1..10: note = Table A: HLA-A*68:02H
WTAGAAAYYV

SEQ ID NO: 6890 - protein, 10 aa, Severe acute respiratory syndrome coronavirus 2
  REGION 1..10: note = Table A: HLA-C*14:03H HLA-A*74:01H HLA-A*33:01H HLA-A*33:03H HLA-A*31:01H
AYYVGYLQPR

SEQ ID NO: 6891 - protein, 10 aa, Severe acute respiratory syndrome coronavirus 2
  REGION 1..10: note = Table A: HLA-A*24:07H HLA-A*23:01H
GYLQPRTFLL

SEQ ID NO: 6892 - protein, 10 aa, Severe acute respiratory syndrome coronavirus 2
  REGION 1..10: note = Table A: HLA-A*34:02H
YLQPRTFLLK

SEQ ID NO: 6893 - protein, 10 aa, Severe acute respiratory syndrome coronavirus 2
  REGION 1..10: note = Table A: HLA-A*30:02H
LQPRTFLLKY

SEQ ID NO: 6894 - protein, 10 aa, Severe acute respiratory syndrome coronavirus 2
  REGION 1..10: note = Table A: HLA-A*02:05H HLA-A*02:08M
GTITDAVDCA

SEQ ID NO: 6895 - protein, 10 aa, Severe acute respiratory syndrome coronavirus 2
  REGION 1..10: note = Table A: HLA-B*35:03H HLA-B*35:02M HLA-B*35:12H HLA-B*38:02H HLA-B*39:01H
TITDAVDCAL

SEQ ID NO: 6896 - protein, 10 aa, Severe acute respiratory syndrome coronavirus 2
  REGION 1..10: note = Table A: HLA-A*02:11H HLA-A*02:07H HLA-A*02:01H HLA-B*38:02H
ALDPLSETKC

SEQ ID NO: 6897 - protein, 10 aa, Severe acute respiratory syndrome coronavirus 2
  REGION 1..10: note = Table A: HLA-B*35:03H HLA-C*15:05M HLA-B*35:02H HLA-B*35:12H HLA-B*07:05H
DPLSETKCTL

SEQ ID NO: 6898 - protein, 10 aa, Severe acute respiratory syndrome coronavirus 2
  REGION 1..10: note = Table A: HLA-B*44:03H
SETKCTLKSF

SEQ ID NO: 6899 - protein, 10 aa, Severe acute respiratory syndrome coronavirus 2
  REGION 1..10: note = Table A: HLA-A*11:01H HLA-A*11:02H HLA-A*34:02H
CTLKSFTVEK

SEQ ID NO: 6900 - protein, 10 aa, Severe acute respiratory syndrome coronavirus 2
  REGION 1..10: note = Table A: HLA-A*02:02H HLA-A*02:03H
TLKSFTVEKG

SEQ ID NO: 6901 - protein, 10 aa, Severe acute respiratory syndrome coronavirus 2
  REGION 1..10: note = Table A: HLA-B*58:01H HLA-A*36:01M HLA-B*57:01H HLA-A*30:02M HLA-B*15:01H HLA-B*57:03H
KSFTVEKGIY

SEQ ID NO: 6902 - protein, 10 aa, Severe acute respiratory syndrome coronavirus 2
  REGION 1..10: note = Table A: HLA-A*02:11H HLA-A*68:02M HLA-A*02:05M HLA-A*02:06H HLA-A*02:08H HLA-A*02:02H
FTVEKGIYQT

SEQ ID NO: 6903 - protein, 10 aa, Severe acute respiratory syndrome coronavirus 2
  REGION 1..10: note = Table A: HLA-A*11:303H HLA-A*74:01H HLA-A*03:01H HLA-A*03:02M HLA-A*11:01M HLA-A*11:02M HLA-A*36:01H HLA-A*30:02H HLA-A*31:01H
RVQPTESIVR

SEQ ID NO: 6904 - protein, 10 aa, Severe acute respiratory syndrome coronavirus 2
  REGION 1..10: note = Table A: HLA-A*23:01H HLA-B*15:01M HLA-B*13:01H
VQPTESIVRF

SEQ ID NO: 6905 - protein, 10 aa, Severe acute respiratory syndrome coronavirus 2
  REGION 1..10: note = Table A: HLA-B*07:02H HLA-B*07:04M
IVRFPNITNL

SEQ ID NO: 6906 - protein, 10 aa, Severe acute respiratory syndrome coronavirus 2
  REGION 1..10: note = Table A: HLA-B*56:01H HLA-B*55:02H
CPFGEVFNAT

SEQ ID NO: 6907 - protein, 10 aa, Severe acute respiratory syndrome coronavirus 2
  REGION 1..10: note = Table A: HLA-B*45:01H HLA-B*40:06H HLA-B*50:01M
GEVFNATRFA

SEQ ID NO: 6908 - protein, 10 aa, Severe acute respiratory syndrome coronavirus 2
  REGION 1..10: note = Table A: HLA-B*57:01H HLA-A*32:01H HLA-B*57:03M
ATRFASVYAW

SEQ ID NO: 6909 - protein, 10 aa, Severe acute respiratory syndrome coronavirus 2
  REGION 1..10: note = Table A: HLA-A*74:01M HLA-A*31:01H
RFASVYAWNR

SEQ ID NO: 6910 - protein, 10 aa, Severe acute respiratory syndrome coronavirus 2
  REGION 1..10: note = Table A: HLA-B*35:01H
NCVADYSVLY

SEQ ID NO: 6911 - protein, 10 aa, Severe acute respiratory syndrome coronavirus 2
  REGION 1..10: note = Table A: HLA-B*50:01H
ADYSVLYNSA

SEQ ID NO: 6912 - protein, 10 aa, Severe acute respiratory syndrome coronavirus 2
  REGION 1..10: note = Table A: HLA-C*14:02H HLA-C*14:03H HLA-A*24:02M HLA-A*24:07M HLA-A*23:01M
LYNSASFSTF

SEQ ID NO: 6913 - protein, 10 aa, Severe acute respiratory syndrome coronavirus 2
  REGION 1..10: note = Table A: HLA-A*34:02H
YNSASFSTFK

SEQ ID NO: 6914 - protein, 10 aa, Severe acute respiratory syndrome coronavirus 2
  REGION 1..10: note = Table A: HLA-A*68:02H HLA-A*31:01H
ASFSTFKCYG

SEQ ID NO: 6915 - protein, 10 aa, Severe acute respiratory syndrome coronavirus 2
  REGION 1..10: note = Table A: HLA-A*03:01H HLA-A*02:08H
KCYGVSPTKL

SEQ ID NO: 6916 - protein, 10 aa, Severe acute respiratory syndrome coronavirus 2
  REGION 1..10: note = Table A: HLA-A*02:02H
GVSPTKLNDL

SEQ ID NO: 6917 - protein, 10 aa, Severe acute respiratory syndrome coronavirus 2
  REGION 1..10: note = Table A: HLA-C*15:05H
SPTKLNDLCF

SEQ ID NO: 6918 - protein, 10 aa, Severe acute respiratory syndrome coronavirus 2
  REGION 1..10: note = Table A: HLA-A*02:11H HLA-A*02:03H
KLNDLCFTNV

SEQ ID NO: 6919 - protein, 10 aa, Severe acute respiratory syndrome coronavirus 2
  REGION 1..10: note = Table A: HLA-A*33:01H HLA-A*33:03H HLA-A*68:01M HLA-A*68:02H HLA-A*34:01M HLA-A*34:02M HLA-A*66:01M
NVYADSFVIR

SEQ ID NO: 6920 - protein, 10 aa, Severe acute respiratory syndrome coronavirus 2
  REGION 1..10: note = Table A: HLA-A*68:02M HLA-B*38:02H
DSFVIRGDEV

SEQ ID NO: 6921 - protein, 10 aa, Severe acute respiratory syndrome coronavirus 2
  REGION 1..10: note = Table A: HLA-A*02:03H HLA-B*07:04H
VIRGDEVRQI

SEQ ID NO: 6922 - protein, 10 aa, Severe acute respiratory syndrome coronavirus 2
  REGION 1..10: note = Table A: HLA-A*03:01H HLA-A*03:02H HLA-A*11:01H HLA-A*11:02H
RQIAPGQTGK

SEQ ID NO: 6923 - protein, 10 aa, Severe acute respiratory syndrome coronavirus 2
  REGION 1..10: note = Table A: HLA-B*53:01H HLA-B*55:02H HLA-B*35:03M HLA-C*15:05M HLA-B*35:01H HLA-B*35:02M HLA-B*35:08H HLA-B*51:01H HLA-C*08:01H HLA-B*35:12M HLA-B*38:02M HLA-B*54:01H HLA-B*07:05H
LPDDFTGCVI

SEQ ID NO: 6924 - protein, 10 aa, Severe acute respiratory syndrome coronavirus 2
  REGION 1..10: note = Table A: HLA-A*36:01M HLA-A*01:01M HLA-A*30:02H
NLDSKVGGNY

SEQ ID NO: 6925 - protein, 10 aa, Severe acute respiratory syndrome coronavirus 2
  REGION 1..10: note = Table A: HLA-A*36:01H HLA-A*29:02H HLA-A*30:02H
KVGGNYNYLY

SEQ ID NO: 6926 - protein, 10 aa, Severe acute respiratory syndrome coronavirus 2
  REGION 1..10: note = Table A: HLA-B*18:01H
FERDISTEIY

SEQ ID NO: 6927 - protein, 10 aa, Severe acute respiratory syndrome coronavirus 2
  REGION 1..10: note = Table A: HLA-B*40:06H
RDISTEIYQA

SEQ ID NO: 6928 - protein, 10 aa, Severe acute respiratory syndrome coronavirus 2
  REGION 1..10: note = Table A: HLA-A*68:02H
DISTEIYQAG

SEQ ID NO: 6929 - protein, 10 aa, Severe acute respiratory syndrome coronavirus 2
  REGION 1..10: note = Table A: HLA-B*50:01H
TEIYQAGSTP

SEQ ID NO: 6930 - protein, 10 aa, Severe acute respiratory syndrome coronavirus 2
  REGION 1..10: note = Table A: HLA-B*39:01H
YQAGSTPCNG

SEQ ID NO: 6931 - protein, 10 aa, Severe acute respiratory syndrome coronavirus 2
  REGION 1..10: note = Table A: HLA-A*24:02H HLA-A*24:07M HLA-A*23:01H
CYFPLQSYGF

SEQ ID NO: 6932 - protein, 10 aa, Severe acute respiratory syndrome coronavirus 2
  REGION 1..10: note = Table A: HLA-A*29:01H HLA-A*29:02H HLA-B*27:02H HLA-A*30:02M HLA-B*15:01H HLA-B*39:01H HLA-B*07:05H
GFQPTNGVGY

SEQ ID NO: 6933 - protein, 10 aa, Severe acute respiratory syndrome coronavirus 2
  REGION 1..10: note = Table A: HLA-B*55:02H
QPTNGVGYQP

SEQ ID NO: 6934 - protein, 10 aa, Severe acute respiratory syndrome coronavirus 2
  REGION 1..10: note = Table A: HLA-B*52:01H
VGYQPYRVVV

SEQ ID NO: 6935 - protein, 10 aa, Severe acute respiratory syndrome coronavirus 2
  REGION 1..10: note = Table A: HLA-C*15:05H
QPYRVVVLSF

SEQ ID NO: 6936 - protein, 10 aa, Severe acute respiratory syndrome coronavirus 2
  REGION 1..10: note = Table A: HLA-B*57:03H
RVVVLSFELL

SEQ ID NO: 6937 - protein, 10 aa, Severe acute respiratory syndrome coronavirus 2
  REGION 1..10: note = Table A: HLA-A*02:11H HLA-A*02:05H HLA-A*02:06M HLA-A*02:01H HLA-A*02:03H
VVLSFELLHA

SEQ ID NO: 6938 - protein, 10 aa, Severe acute respiratory syndrome coronavirus 2
  REGION 1..10: note = Table A: HLA-A*02:03H HLA-B*40:02H HLA-B*40:06H HLA-B*49:01H HLA-B*50:01H
FELLHAPATV

SEQ ID NO: 6939 - protein, 10 aa, Severe acute respiratory syndrome coronavirus 2
  REGION 1..10: note = Table A: HLA-A*02:11H HLA-A*02:01H HLA-A*02:02H
LLHAPATVCG

SEQ ID NO: 6940 - protein, 10 aa, Severe acute respiratory syndrome coronavirus 2
  REGION 1..10: note = Table A: HLA-A*34:02H
HAPATVCGPK

SEQ ID NO: 6941 - protein, 10 aa, Severe acute respiratory syndrome coronavirus 2
  REGION 1..10: note = Table A: HLA-A*03:02M HLA-A*11:01M HLA-C*07:27H
GTGVLTESNK

SEQ ID NO: 6942 - protein, 10 aa, Severe acute respiratory syndrome coronavirus 2
  REGION 1..10: note = Table A: HLA-A*74:01M HLA-A*31:01H
KFLPFQQFGR

SEQ ID NO: 6943 - protein, 10 aa, Severe acute respiratory syndrome coronavirus 2
  REGION 1..10: note = Table A: HLA-C*15:05H HLA-B*51:01H HLA-B*07:04H
LPFQQFGRDI

SEQ ID NO: 6944 - protein, 10 aa, Severe acute respiratory syndrome coronavirus 2
  REGION 1..10: note = Table A: HLA-A*33:01H HLA-A*26:03M HLA-A*68:01M HLA-A*68:02H HLA-A*34:01H HLA-A*34:02H HLA-A*66:01M
DIADTTDAVR

SEQ ID NO: 6945 - protein, 10 aa, Severe acute respiratory syndrome coronavirus 2
  REGION 1..10: note = Table A: HLA-C*15:05H HLA-B*38:02H HLA-B*07:02H HLA-B*07:04H
AVRDPQTLEI

SEQ ID NO: 6946 - protein, 10 aa, Severe acute respiratory syndrome coronavirus 2
  REGION 1..10: note = Table A: HLA-B*38:02H
VRDPQTLEIL

SEQ ID NO: 6947 - protein, 10 aa, Severe acute respiratory syndrome coronavirus 2
  REGION 1..10: note = Table A: HLA-A*25:01H HLA-A*26:01H HLA-A*26:02H HLA-A*26:03M HLA-A*68:02H HLA-A*34:02H HLA-B*38:02H HLA-B*39:01H
EILDITPCSF

SEQ ID NO: 6948 - protein, 10 aa, Severe acute respiratory syndrome coronavirus 2
  REGION 1..10: note = Table A: HLA-B*56:01M HLA-B*55:02M HLA-C*15:05H HLA-B*55:01H HLA-B*54:01M HLA-B*07:05H
TPCSFGGVSV

SEQ ID NO: 6949 - protein, 10 aa, Severe acute respiratory syndrome coronavirus 2
  REGION 1..10: note = Table A: HLA-A*02:08H
SVITPGTNTS

SEQ ID NO: 6950 - protein, 10 aa, Severe acute respiratory syndrome coronavirus 2
  REGION 1..10: note = Table A: HLA-A*29:02H
NTSNQVAVLY

SEQ ID NO: 6951 - protein, 10 aa, Severe acute respiratory syndrome coronavirus 2
  REGION 1..10: note = Table A: HLA-B*53:01H HLA-B*35:03M HLA-C*15:05H HLA-B*35:01M HLA-B*35:02M HLA-B*35:08H HLA-B*35:07M HLA-C*08:01H HLA-B*35:12M HLA-B*38:02H HLA-B*07:02H HLA-B*07:05M
VPVAIHADQL

SEQ ID NO: 6952 - protein, 10 aa, Severe acute respiratory syndrome coronavirus 2
  REGION 1..10: note = Table A: HLA-B*38:01M HLA-B*38:02M HLA-B*39:01H
IHADQLTPTW

SEQ ID NO: 6953 - protein, 10 aa, Severe acute respiratory syndrome coronavirus 2
  REGION 1..10: note = Table A: HLA-B*15:02H
DQLTPTWRVY

SEQ ID NO: 6954 - protein, 10 aa, Severe acute respiratory syndrome coronavirus 2
  REGION 1..10: note = Table A: HLA-A*30:02H HLA-C*15:05H HLA-B*38:02H HLA-A*32:01H HLA-B*15:01M HLA-B*15:03H HLA-B*07:05H HLA-B*57:03M HLA-B*13:01H
RVYSTGSNVF

SEQ ID NO: 6955 - protein, 10 aa, Severe acute respiratory syndrome coronavirus 2
  REGION 1..10: note = Table A: HLA-A*11:303H HLA-A*74:01M HLA-A*03:01H HLA-A*03:02H HLA-A*11:01H HLA-A*11:02M HLA-A*36:01H HLA-B*57:01H HLA-A*33:01H HLA-A*33:03H HLA-A*26:03M HLA-B*27:02H HLA-A*30:02H HLA-A*68:01H HLA-A*68:02M
  REGION 1..10: note = CONT. FROM ABOVE: HLA-A*34:01M HLA-A*34:02M HLA-C*07:27H HLA- A*31:01M HLA-A*66:01M
STGSNVFQTR

SEQ ID NO: 6956 - protein, 10 aa, Severe acute respiratory syndrome coronavirus 2
  REGION 1..10: note = Table A: HLA-B*58:01H HLA-B*46:01M HLA-A*30:02M HLA-B*35:01H HLA-B*38:02M HLA-B*15:01M HLA-B*15:02H HLA-B*15:03H HLA-B*07:05H HLA-B*15:11H
IGAEHVNNSY

SEQ ID NO: 6957 - protein, 10 aa, Severe acute respiratory syndrome coronavirus 2
  REGION 1..10: note = Table A: HLA-B*45:01H
AEHVNNSYEC

SEQ ID NO: 6958 - protein, 10 aa, Severe acute respiratory syndrome coronavirus 2
  REGION 1..10: note = Table A: HLA-B*56:01H HLA-B*55:02H
IPIGAGICAS

SEQ ID NO: 6959 - protein, 10 aa, Severe acute respiratory syndrome coronavirus 2
  REGION 1..10: note = Table A: HLA-C*14:02H HLA-C*14:03H HLA-A*03:02H HLA-A*11:01H HLA-A*33:01M HLA-A*33:03H HLA-B*27:02H HLA-A*30:02H HLA-A*68:01H HLA-A*31:01M HLA-A*66:01H
SYQTQTNSPR

SEQ ID NO: 6960 - protein, 10 aa, Severe acute respiratory syndrome coronavirus 2
  REGION 1..10: note = Table A: HLA-A*03:01H HLA-A*03:02H HLA-A*11:01M HLA-A*11:02H HLA-A*25:01M HLA-B*46:01H HLA-A*26:01M HLA-A*26:02M HLA-A*26:03H HLA-A*29:01H HLA-A*29:02H HLA-A*30:02M HLA-A*68:01H HLA-C*15:05H HLA-A*34:02H HLA-C*07:27H
  REGION 1..10: note = CONT. FROM ABOVE: HLA-B*35:01M HLA-B*35:07H HLA-B*38:02M HLA- B*15:01M HLA-B*15:02M HLA-B*39:01H HLA-B*07:05M
SVASQSIIAY

SEQ ID NO: 6961 - protein, 10 aa, Severe acute respiratory syndrome coronavirus 2
  REGION 1..10: note = Table A: HLA-A*68:02H
VASQSIIAYT

SEQ ID NO: 6962 - protein, 10 aa, Severe acute respiratory syndrome coronavirus 2
  REGION 1..10: note = Table A: HLA-B*38:02H
TMSLGAENSV

SEQ ID NO: 6963 - protein, 10 aa, Severe acute respiratory syndrome coronavirus 2
  REGION 1..10: note = Table A: HLA-B*38:02H HLA-B*15:01M HLA-B*15:02M
SLGAENSVAY

SEQ ID NO: 6964 - protein, 10 aa, Severe acute respiratory syndrome coronavirus 2
  REGION 1..10: note = Table A: HLA-C*15:05H
VAYSNNSIAI

SEQ ID NO: 6965 - protein, 10 aa, Severe acute respiratory syndrome coronavirus 2
  REGION 1..10: note = Table A: HLA-B*55:02H
IPTNFTISVT

SEQ ID NO: 6966 - protein, 10 aa, Severe acute respiratory syndrome coronavirus 2
  REGION 1..10: note = Table A: HLA-A*68:02H
FTISVTTEIL

SEQ ID NO: 6967 - protein, 10 aa, Severe acute respiratory syndrome coronavirus 2
  REGION 1..10: note = Table A: HLA-A*68:02H HLA-C*15:05H HLA-B*57:03H
VTTEILPVSM

SEQ ID NO: 6968 - protein, 10 aa, Severe acute respiratory syndrome coronavirus 2
  REGION 1..10: note = Table A: HLA-B*56:01H HLA-B*55:02H HLA-C*15:05H HLA-B*51:01H HLA-B*54:01H
LPVSMTKTSV

SEQ ID NO: 6969 - protein, 10 aa, Severe acute respiratory syndrome coronavirus 2
  REGION 1..10: note = Table A: HLA-B*57:03H
KTSVDCTMYI

SEQ ID NO: 6970 - protein, 10 aa, Severe acute respiratory syndrome coronavirus 2
  REGION 1..10: note = Table A: HLA-B*44:03H HLA-B*07:05H
TECSNLLLQY

SEQ ID NO: 6971 - protein, 10 aa, Severe acute respiratory syndrome coronavirus 2
  REGION 1..10: note = Table A: HLA-A*02:06H HLA-A*02:03H HLA-B*38:02H HLA-B*13:02M
TQLNRALTGI

SEQ ID NO: 6972 - protein, 10 aa, Severe acute respiratory syndrome coronavirus 2
  REGION 1..10: note = Table A: HLA-B*45:01H HLA-B*41:02H HLA-B*49:01H
VEQDKNTQEV

SEQ ID NO: 6973 - protein, 10 aa, Severe acute respiratory syndrome coronavirus 2
  REGION 1..10: note = Table A: HLA-B*44:05H HLA-B*38:01M HLA-B*38:02M HLA-B*15:02H HLA-B*39:01M HLA-B*13:01M
EQDKNTQEVF

SEQ ID NO: 6974 - protein, 10 aa, Severe acute respiratory syndrome coronavirus 2
  REGION 1..10: note = Table A: HLA-A*03:02H HLA-A*11:01H HLA-A*11:02H HLA-A*36:01H HLA-A*68:01H HLA-A*34:02M
NTQEVFAQVK

SEQ ID NO: 6975 - protein, 10 aa, Severe acute respiratory syndrome coronavirus 2
  REGION 1..10: note = Table A: HLA-B*44:02H HLA-B*44:05M HLA-B*44:03M HLA-B*40:02H HLA-B*49:01M
QEVFAQVKQI

SEQ ID NO: 6976 - protein, 10 aa, Severe acute respiratory syndrome coronavirus 2
  REGION 1..10: note = Table A: HLA-A*25:01M HLA-A*26:01M HLA-A*26:02M HLA-A*26:03H HLA-A*34:01H HLA-A*34:02H HLA-B*35:01H HLA-B*35:07H HLA-B*38:02H HLA-B*15:02M
EVFAQVKQIY

SEQ ID NO: 6977 - protein, 10 aa, Severe acute respiratory syndrome coronavirus 2
  REGION 1..10: note = Table A: HLA-A*30:01H HLA-A*34:02H
VFAQVKQIYK

SEQ ID NO: 6978 - protein, 10 aa, Severe acute respiratory syndrome coronavirus 2
  REGION 1..10: note = Table A: HLA-A*30:01H
KQIYKTPPIK

SEQ ID NO: 6979 - protein, 10 aa, Severe acute respiratory syndrome coronavirus 2
  REGION 1..10: note = Table A: HLA-C*14:03H HLA-A*24:07H
IYKTPPIKDF

SEQ ID NO: 6980 - protein, 10 aa, Severe acute respiratory syndrome coronavirus 2
  REGION 1..10: note = Table A: HLA-A*11:01H
FSQILPDPSK

SEQ ID NO: 6981 - protein, 10 aa, Severe acute respiratory syndrome coronavirus 2
  REGION 1..10: note = Table A: HLA-A*74:01H HLA-A*03:01H HLA-A*03:02H HLA-A*11:01H HLA-A*11:02H HLA-A*30:02H
ILPDPSKPSK

SEQ ID NO: 6982 - protein, 10 aa, Severe acute respiratory syndrome coronavirus 2
  REGION 1..10: note = Table A: HLA-A*34:01H
LPDPSKPSKR

SEQ ID NO: 6983 - protein, 10 aa, Severe acute respiratory syndrome coronavirus 2
  REGION 1..10: note = Table A: HLA-A*02:11H HLA-A*02:06H HLA-A*02:07M
FIEDLLFNKV

SEQ ID NO: 6984 - protein, 10 aa, Severe acute respiratory syndrome coronavirus 2
  REGION 1..10: note = Table A: HLA-B*44:05H
EDLLFNKVTL

SEQ ID NO: 6985 - protein, 10 aa, Severe acute respiratory syndrome coronavirus 2
  REGION 1..10: note = Table A: HLA-A*11:01H HLA-A*11:02H HLA-A*36:01H HLA-A*34:02H
VTLADAGFIK

SEQ ID NO: 6986 - protein, 10 aa, Severe acute respiratory syndrome coronavirus 2
  REGION 1..10: note = Table A: HLA-A*36:01H
LADAGFIKQY

SEQ ID NO: 6987 - protein, 10 aa, Severe acute respiratory syndrome coronavirus 2
  REGION 1..10: note = Table A: HLA-A*68:02H HLA-A*02:02H
ADAGFIKQYG

SEQ ID NO: 6988 - protein, 10 aa, Severe acute respiratory syndrome coronavirus 2
  REGION 1..10: note = Table A: HLA-B*15:01H
AQKFNGLTVL

SEQ ID NO: 6989 - protein, 10 aa, Severe acute respiratory syndrome coronavirus 2
  REGION 1..10: note = Table A: HLA-B*45:01H HLA-B*18:01H HLA-B*07:05H HLA-B*50:01H
DEMIAQYTSA

SEQ ID NO: 6990 - protein, 10 aa, Severe acute respiratory syndrome coronavirus 2
  REGION 1..10: note = Table A: HLA-A*26:03H HLA-B*38:02H
EMIAQYTSAL

SEQ ID NO: 6991 - protein, 10 aa, Severe acute respiratory syndrome coronavirus 2
  REGION 1..10: note = Table A: HLA-A*68:02H HLA-A*34:01H
MIAQYTSALL

SEQ ID NO: 6992 - protein, 10 aa, Severe acute respiratory syndrome coronavirus 2
  REGION 1..10: note = Table A: HLA-A*68:02H
YTSALLAGTI

SEQ ID NO: 6993 - protein, 10 aa, Severe acute respiratory syndrome coronavirus 2
  REGION 1..10: note = Table A: HLA-A*25:01H HLA-B*15:13H HLA-B*38:02H
LLAGTITSGW

SEQ ID NO: 6994 - protein, 10 aa, Severe acute respiratory syndrome coronavirus 2
  REGION 1..10: note = Table A: HLA-C*08:03H
GAGAALQIPF

SEQ ID NO: 6995 - protein, 10 aa, Severe acute respiratory syndrome coronavirus 2
  REGION 1..10: note = Table A: HLA-A*02:05H
LQIPFAMQMA

SEQ ID NO: 6996 - protein, 10 aa, Severe acute respiratory syndrome coronavirus 2
  REGION 1..10: note = Table A: HLA-A*36:01H
QIPFAMQMAY

SEQ ID NO: 6997 - protein, 10 aa, Severe acute respiratory syndrome coronavirus 2
  REGION 1..10: note = Table A: HLA-A*34:01H
IPFAMQMAYR

SEQ ID NO: 6998 - protein, 10 aa, Severe acute respiratory syndrome coronavirus 2
  REGION 1..10: note = Table A: HLA-A*24:07H
PFAMQMAYRF

SEQ ID NO: 6999 - protein, 10 aa, Severe acute respiratory syndrome coronavirus 2
  REGION 1..10: note = Table A: HLA-A*02:11H HLA-A*68:02H HLA-B*54:01H
MAYRFNGIGV

SEQ ID NO: 7000 - protein, 10 aa, Severe acute respiratory syndrome coronavirus 2
  REGION 1..10: note = Table A: HLA-B*27:05M HLA-B*27:02H
YRFNGIGVTQ

SEQ ID NO: 7001 - protein, 10 aa, Severe acute respiratory syndrome coronavirus 2
  REGION 1..10: note = Table A: HLA-B*35:03H
NGIGVTQNVL

SEQ ID NO: 7002 - protein, 10 aa, Severe acute respiratory syndrome coronavirus 2
  REGION 1..10: note = Table A: HLA-B*27:02H
TQNVLYENQK

SEQ ID NO: 7003 - protein, 10 aa, Severe acute respiratory syndrome coronavirus 2
  REGION 1..10: note = Table A: HLA-B*56:01H HLA-A*02:11H HLA-B*55:02H HLA-B*55:01H HLA-B*14:01H HLA-A*02:01H HLA-A*02:02M HLA-A*02:03M HLA-C*08:01H HLA-B*38:02H HLA-B*54:01H HLA-B*13:02H HLA-B*50:01H
VLYENQKLIA

SEQ ID NO: 7004 - protein, 10 aa, Severe acute respiratory syndrome coronavirus 2
  REGION 1..10: note = Table A: HLA-B*56:01H HLA-A*02:11H HLA-B*55:02H HLA-A*02:05H HLA-A*02:06H HLA-A*02:08M HLA-A*02:02H HLA-A*02:03H HLA-B*38:02H HLA-B*40:06H HLA-B*50:01H
KLIANQFNSA

SEQ ID NO: 7005 - protein, 10 aa, Severe acute respiratory syndrome coronavirus 2
  REGION 1..10: note = Table A: HLA-A*03:02H HLA-A*11:01H
ANQFNSAIGK

SEQ ID NO: 7006 - protein, 10 aa, Severe acute respiratory syndrome coronavirus 2
  REGION 1..10: note = Table A: HLA-A*02:05H HLA-A*02:08H HLA-B*38:02H HLA-B*13:02H
NQFNSAIGKI

SEQ ID NO: 7007 - protein, 10 aa, Severe acute respiratory syndrome coronavirus 2
  REGION 1..10: note = Table A: HLA-A*11:303H HLA-C*03:03H HLA-C*12:05H HLA-C*03:04H HLA-A*68:02H HLA-B*35:03H HLA-C*15:05H HLA-A*02:05H HLA-A*02:08H HLA-B*35:02H HLA-C*08:01M HLA-C*08:03H HLA-B*35:12H HLA-B*38:02M HLA-B*07:05H
  REGION 1..10: note = CONT. FROM ABOVE: HLA-B*57:03H
SAIGKIQDSL

SEQ ID NO: 7008 - protein, 10 aa, Severe acute respiratory syndrome coronavirus 2
  REGION 1..10: note = Table A: HLA-A*34:02H
LSSTASALGK

SEQ ID NO: 7009 - protein, 10 aa, Severe acute respiratory syndrome coronavirus 2
  REGION 1..10: note = Table A: HLA-A*03:02H HLA-A*02:11H HLA-A*02:04H HLA-A*02:05H HLA-A*02:08M HLA-A*02:01M HLA-A*02:02H HLA-A*02:03M HLA-B*38:02H HLA-B*13:02H
KLQDVVNQNA

SEQ ID NO: 7010 - protein, 10 aa, Severe acute respiratory syndrome coronavirus 2
  REGION 1..10: note = Table A: HLA-A*25:01H HLA-A*26:02H HLA-A*26:03M HLA-A*68:01H HLA-A*68:02H
DVVNQNAQAL

SEQ ID NO: 7011 - protein, 10 aa, Severe acute respiratory syndrome coronavirus 2
  REGION 1..10: note = Table A: HLA-B*38:02H HLA-B*39:01H
NQNAQALNTL

SEQ ID NO: 7012 - protein, 10 aa, Severe acute respiratory syndrome coronavirus 2
  REGION 1..10: note = Table A: HLA-B*38:02H
TLVKQLSSNF

SEQ ID NO: 7013 - protein, 10 aa, Severe acute respiratory syndrome coronavirus 2
  REGION 1..10: note = Table A: HLA-A*68:02H HLA-C*15:05H
SSNFGAISSV

SEQ ID NO: 7014 - protein, 10 aa, Severe acute respiratory syndrome coronavirus 2
  REGION 1..10: note = Table A: HLA-A*11:02H HLA-A*02:11H HLA-A*68:02H HLA-A*02:04H HLA-A*02:05H HLA-A*02:06H HLA-A*02:08H HLA-A*02:02H HLA-A*34:01H HLA-A*34:02H HLA-A*66:01H
SVLNDILSRL

SEQ ID NO: 7015 - protein, 10 aa, Severe acute respiratory syndrome coronavirus 2
  REGION 1..10: note = Table A: HLA-B*44:05M HLA-B*44:03H HLA-A*68:02H HLA-B*38:02H HLA-B*40:01H HLA-B*40:02M HLA-B*41:02H HLA-B*49:01H
VEAEVQIDRL

SEQ ID NO: 7016 - protein, 10 aa, Severe acute respiratory syndrome coronavirus 2
  REGION 1..10: note = Table A: HLA-B*45:01H HLA-B*40:02H HLA-B*40:06H HLA-B*41:02H HLA-B*49:01H HLA-B*50:01H
AEVQIDRLIT

SEQ ID NO: 7017 - protein, 10 aa, Severe acute respiratory syndrome coronavirus 2
  REGION 1..10: note = Table A: HLA-A*74:01M HLA-A*31:01M
VQIDRLITGR

SEQ ID NO: 7018 - protein, 10 aa, Severe acute respiratory syndrome coronavirus 2
  REGION 1..10: note = Table A: HLA-A*74:01H HLA-B*46:01H HLA-B*08:01H HLA-A*02:11H HLA-C*01:02H HLA-A*02:04M HLA-A*02:05H HLA-A*02:08H HLA-A*02:01H HLA-A*02:02M HLA-A*02:03M HLA-B*38:02H HLA-B*07:04H HLA-B*13:01H HLA-B*13:02H
RLITGRLQSL

SEQ ID NO: 7019 - protein, 10 aa, Severe acute respiratory syndrome coronavirus 2
  REGION 1..10: note = Table A: HLA-A*02:04H HLA-A*02:02H HLA-B*38:02H
SLQTYVTQQL

SEQ ID NO: 7020 - protein, 10 aa, Severe acute respiratory syndrome coronavirus 2
  REGION 1..10: note = Table A: HLA-B*13:02H
LQTYVTQQLI

SEQ ID NO: 7021 - protein, 10 aa, Severe acute respiratory syndrome coronavirus 2
  REGION 1..10: note = Table A: HLA-A*74:01H HLA-A*36:01H HLA-A*68:01H HLA-A*34:01H HLA-A*34:02H HLA-A*66:01H
QTYVTQQLIR

SEQ ID NO: 7022 - protein, 10 aa, Severe acute respiratory syndrome coronavirus 2
  REGION 1..10: note = Table A: HLA-B*56:01H HLA-B*55:02H HLA-B*55:01H HLA-A*02:08H HLA-B*54:01H
YVTQQLIRAA

SEQ ID NO: 7023 - protein, 10 aa, Severe acute respiratory syndrome coronavirus 2
  REGION 1..10: note = Table A: HLA-B*38:02H
TQQLIRAAEI

SEQ ID NO: 7024 - protein, 10 aa, Severe acute respiratory syndrome coronavirus 2
  REGION 1..10: note = Table A: HLA-B*44:05H HLA-B*45:01H HLA-B*40:02H HLA-B*40:06M HLA-B*41:02H HLA-B*49:01M HLA-B*50:01H
AEIRASANLA

SEQ ID NO: 7025 - protein, 10 aa, Severe acute respiratory syndrome coronavirus 2
  REGION 1..10: note = Table A: HLA-A*03:01H HLA-A*03:02M
RASANLAATK

SEQ ID NO: 7026 - protein, 10 aa, Severe acute respiratory syndrome coronavirus 2
  REGION 1..10: note = Table A: HLA-A*68:01H HLA-C*15:05H HLA-B*57:03H
ASANLAATKM

SEQ ID NO: 7027 - protein, 10 aa, Severe acute respiratory syndrome coronavirus 2
  REGION 1..10: note = Table A: HLA-A*36:01H
MSECVLGQSK

SEQ ID NO: 7028 - protein, 10 aa, Severe acute respiratory syndrome coronavirus 2
  REGION 1..10: note = Table A: HLA-B*13:02H
GQSKRVDFCG

SEQ ID NO: 7029 - protein, 10 aa, Severe acute respiratory syndrome coronavirus 2
  REGION 1..10: note = Table A: HLA-B*27:05H
KRVDFCGKGY

SEQ ID NO: 7030 - protein, 10 aa, Severe acute respiratory syndrome coronavirus 2
  REGION 1..10: note = Table A: HLA-A*02:02H
VDFCGKGYHL

SEQ ID NO: 7031 - protein, 10 aa, Severe acute respiratory syndrome coronavirus 2
  REGION 1..10: note = Table A: HLA-B*39:06M
YHLMSFPQSA

SEQ ID NO: 7032 - protein, 10 aa, Severe acute respiratory syndrome coronavirus 2
  REGION 1..10: note = Table A: HLA-B*55:02H HLA-B*54:01H
FPQSAPHGVV

SEQ ID NO: 7033 - protein, 10 aa, Severe acute respiratory syndrome coronavirus 2
  REGION 1..10: note = Table A: HLA-B*15:01H
PQSAPHGVVF

SEQ ID NO: 7034 - protein, 10 aa, Severe acute respiratory syndrome coronavirus 2
  REGION 1..10: note = Table A: HLA-C*15:02H HLA-B*57:03H
QSAPHGVVFL

SEQ ID NO: 7035 - protein, 10 aa, Severe acute respiratory syndrome coronavirus 2
  REGION 1..10: note = Table A: HLA-B*56:01M HLA-B*55:02M HLA-C*15:05H HLA-B*55:01H HLA-B*07:04H
APHGVVFLHV

SEQ ID NO: 7036 - protein, 10 aa, Severe acute respiratory syndrome coronavirus 2
  REGION 1..10: note = Table A: HLA-A*03:01H HLA-A*03:02M HLA-A*11:01H HLA-A*11:02H HLA-A*36:01H HLA-B*27:02H HLA-A*68:01M HLA-A*68:02H HLA-A*34:01H HLA-A*34:02H HLA-A*66:01H
HVTYVPAQEK

SEQ ID NO: 7037 - protein, 10 aa, Severe acute respiratory syndrome coronavirus 2
  REGION 1..10: note = Table A: HLA-A*24:02H HLA-A*24:07M HLA-A*23:01M
TYVPAQEKNF

SEQ ID NO: 7038 - protein, 10 aa, Severe acute respiratory syndrome coronavirus 2
  REGION 1..10: note = Table A: HLA-A*68:02H
TTAPAICHDG

SEQ ID NO: 7039 - protein, 10 aa, Severe acute respiratory syndrome coronavirus 2
  REGION 1..10: note = Table A: HLA-C*06:02H HLA-A*02:11H HLA-A*68:02H HLA-A*02:05H HLA-A*02:02H HLA-B*38:01H HLA-B*38:02M HLA-B*39:06H HLA-B*39:01H HLA-B*15:10M
AHFPREGVFV

SEQ ID NO: 7040 - protein, 10 aa, Severe acute respiratory syndrome coronavirus 2
  REGION 1..10: note = Table A: HLA-B*56:01H HLA-B*55:02H HLA-B*54:01H
FPREGVFVSN

SEQ ID NO: 7041 - protein, 10 aa, Severe acute respiratory syndrome coronavirus 2
  REGION 1..10: note = Table A: HLA-B*58:01H HLA-B*57:01H HLA-A*25:01H HLA-B*15:13M HLA-A*32:01H HLA-B*57:03M
GVFVSNGTHW

SEQ ID NO: 7042 - protein, 10 aa, Severe acute respiratory syndrome coronavirus 2
  REGION 1..10: note = Table A: HLA-C*14:02H HLA-C*14:03H HLA-A*24:07M HLA-A*23:01H
VFVSNGTHWF

SEQ ID NO: 7043 - protein, 10 aa, Severe acute respiratory syndrome coronavirus 2
  REGION 1..10: note = Table A: HLA-A*68:02M HLA-A*02:02H
FVSNGTHWFV

SEQ ID NO: 7044 - protein, 10 aa, Severe acute respiratory syndrome coronavirus 2
  REGION 1..10: note = Table A: HLA-C*14:03H HLA-A*29:02H
HWFVTQRNFY

SEQ ID NO: 7045 - protein, 10 aa, Severe acute respiratory syndrome coronavirus 2
  REGION 1..10: note = Table A: HLA-B*52:01H HLA-B*13:02H
TQRNFYEPQI

SEQ ID NO: 7046 - protein, 10 aa, Severe acute respiratory syndrome coronavirus 2
  REGION 1..10: note = Table A: HLA-A*02:11H HLA-A*68:02H HLA-A*02:05M HLA-A*02:06H HLA-A*02:07H HLA-A*02:08M HLA-A*02:01H HLA-A*02:02H HLA-A*02:03H HLA-C*08:01H HLA-B*38:02H HLA-B*13:02H
VVIGIVNNTV

SEQ ID NO: 7047 - protein, 10 aa, Severe acute respiratory syndrome coronavirus 2
  REGION 1..10: note = Table A: HLA-A*11:303H HLA-A*03:01H HLA-A*03:02H HLA-A*11:01H HLA-A*11:02H HLA-A*02:11H HLA-C*03:04H HLA-A*30:02H HLA-A*68:01H HLA-A*68:02H HLA-B*35:03H HLA-C*15:05H HLA-A*02:04H HLA-A*02:05H HLA-A*02:06H
  REGION 1..10: note = CONT. FROM ABOVE: HLA-A*02:07H HLA-A*02:08H HLA-A*02:01H HLA- A*02:02H HLA-A*34:02H HLA-B*35:01H HLA-C*08:01H HLA-C*08:03H HLA-B*38:02H HLA-B*39:01H HLA-B*07:05H
TVYDPLQPEL

SEQ ID NO: 7048 - protein, 10 aa, Severe acute respiratory syndrome coronavirus 2
  REGION 1..10: note = Table A: HLA-B*35:01M HLA-B*35:02H HLA-B*35:08M HLA-B*35:07H HLA-B*35:12H HLA-B*38:02H HLA-B*39:01H HLA-B*07:05H
DPLQPELDSF

SEQ ID NO: 7049 - protein, 10 aa, Severe acute respiratory syndrome coronavirus 2
  REGION 1..10: note = Table A: HLA-B*35:01H
DSFKEELDKY

SEQ ID NO: 7050 - protein, 10 aa, Severe acute respiratory syndrome coronavirus 2
  REGION 1..10: note = Table A: HLA-B*39:01H
NHTSPDVDLG

SEQ ID NO: 7051 - protein, 10 aa, Severe acute respiratory syndrome coronavirus 2
  REGION 1..10: note = Table A: HLA-B*40:02H
GDISGINASV

SEQ ID NO: 7052 - protein, 10 aa, Severe acute respiratory syndrome coronavirus 2
  REGION 1..10: note = Table A: HLA-A*68:02H
DISGINASVV

SEQ ID NO: 7053 - protein, 10 aa, Severe acute respiratory syndrome coronavirus 2
  REGION 1..10: note = Table A: HLA-A*03:02H HLA-A*68:01H HLA-A*34:02H
INASVVNIQK

SEQ ID NO: 7054 - protein, 10 aa, Severe acute respiratory syndrome coronavirus 2
  REGION 1..10: note = Table A: HLA-B*45:01M HLA-B*40:02H HLA-B*40:06M HLA-B*50:01H
KEIDRLNEVA

SEQ ID NO: 7055 - protein, 10 aa, Severe acute respiratory syndrome coronavirus 2
  REGION 1..10: note = Table A: HLA-A*36:01H HLA-A*68:01H HLA-A*68:02H HLA-A*34:02H
EIDRLNEVAK

SEQ ID NO: 7056 - protein, 10 aa, Severe acute respiratory syndrome coronavirus 2
  REGION 1..10: note = Table A: HLA-A*68:02H HLA-A*02:08H
EVAKNLNESL

SEQ ID NO: 7057 - protein, 10 aa, Severe acute respiratory syndrome coronavirus 2
  REGION 1..10: note = Table A: HLA-B*44:05M HLA-B*40:01H HLA-B*40:02H
NESLIDLQEL

SEQ ID NO: 7058 - protein, 10 aa, Severe acute respiratory syndrome coronavirus 2
  REGION 1..10: note = Table A: HLA-A*03:02H HLA-A*11:01H HLA-A*11:02H HLA-B*27:02H
SLIDLQELGK

SEQ ID NO: 7059 - protein, 10 aa, Severe acute respiratory syndrome coronavirus 2
  REGION 1..10: note = Table A: HLA-A*36:01M HLA-A*01:01M
LIDLQELGKY

SEQ ID NO: 7060 - protein, 10 aa, Severe acute respiratory syndrome coronavirus 2
  REGION 1..10: note = Table A: HLA-A*36:01H HLA-A*01:01H
LQELGKYEQY

SEQ ID NO: 7061 - protein, 10 aa, Severe acute respiratory syndrome coronavirus 2
  REGION 1..10: note = Table A: HLA-B*49:01H
QELGKYEQYI

SEQ ID NO: 7062 - protein, 10 aa, Severe acute respiratory syndrome coronavirus 2
  REGION 1..10: note = Table A: HLA-A*24:07M
QYIKWPWYIW

SEQ ID NO: 7063 - protein, 10 aa, Severe acute respiratory syndrome coronavirus 2
  REGION 1..10: note = Table A: HLA-A*24:07M
KWPWYIWLGF

SEQ ID NO: 7064 - protein, 10 aa, Severe acute respiratory syndrome coronavirus 2
  REGION 1..10: note = Table A: HLA-B*39:01H
FDEDDSEPVL

SEQ ID NO: 7065 - protein, 10 aa, Severe acute respiratory syndrome coronavirus 2
  REGION 1..10: note = Table A: HLA-B*44:05H HLA-B*40:01H HLA-B*40:02M
SEPVLKGVKL

SEQ ID NO: 7066 - protein, 10 aa, Severe acute respiratory syndrome coronavirus 2
  REGION 1..10: note = Table A: HLA-A*02:02M HLA-A*02:03H
VLKGVKLHYT

SEQ ID NO: 7067 - protein, 11 aa, Severe acute respiratory syndrome coronavirus 2
  REGION 1..11: note = Table A: HLA-A*02:11H HLA-A*02:01H
VLLPLVSSQCV

SEQ ID NO: 7068 - protein, 11 aa, Severe acute respiratory syndrome coronavirus 2
  REGION 1..11: note = Table A: HLA-A*36:01H
LTTRTQLPPAY

SEQ ID NO: 7069 - protein, 11 aa, Severe acute respiratory syndrome coronavirus 2
  REGION 1..11: note = Table A: HLA-B*44:05H HLA-A*24:02H HLA-A*23:01H HLA-B*38:01H HLA-B*38:02M HLA-B*15:01M HLA-B*15:02H HLA-B*15:03H HLA-B*39:01H HLA-B*13:01H
TQLPPAYTNSF

SEQ ID NO: 7070 - protein, 11 aa, Severe acute respiratory syndrome coronavirus 2
  REGION 1..11: note = Table A: HLA-A*74:01M HLA-A*31:01H
RGVYYPDKVFR

SEQ ID NO: 7071 - protein, 11 aa, Severe acute respiratory syndrome coronavirus 2
  REGION 1..11: note = Table A: HLA-C*14:03H
YYPDKVFRSSV

SEQ ID NO: 7072 - protein, 11 aa, Severe acute respiratory syndrome coronavirus 2
  REGION 1..11: note = Table A: HLA-B*35:03H HLA-C*15:05H HLA-B*07:02H HLA-B*07:04H
YPDKVFRSSVL

SEQ ID NO: 7073 - protein, 11 aa, Severe acute respiratory syndrome coronavirus 2
  REGION 1..11: note = Table A: HLA-A*02:11H HLA-A*02:08H
KVFRSSVLHST

SEQ ID NO: 7074 - protein, 11 aa, Severe acute respiratory syndrome coronavirus 2
  REGION 1..11: note = Table A: HLA-B*58:01H HLA-B*57:03H
SSVLHSTQDLF

SEQ ID NO: 7075 - protein, 11 aa, Severe acute respiratory syndrome coronavirus 2
  REGION 1..11: note = Table A: HLA-B*57:03H
HSTQDLFLPFF

SEQ ID NO: 7076 - protein, 11 aa, Severe acute respiratory syndrome coronavirus 2
  REGION 1..11: note = Table A: HLA-A*24:07H HLA-A*23:01H
LFLPFFSNVTW

SEQ ID NO: 7077 - protein, 11 aa, Severe acute respiratory syndrome coronavirus 2
  REGION 1..11: note = Table A: HLA-C*08:03H
HAIHVSGTNGT

SEQ ID NO: 7078 - protein, 11 aa, Severe acute respiratory syndrome coronavirus 2
  REGION 1..11: note = Table A: HLA-A*03:02H HLA-A*36:01H HLA-A*30:02H
AIHVSGTNGTK

SEQ ID NO: 7079 - protein, 11 aa, Severe acute respiratory syndrome coronavirus 2
  REGION 1..11: note = Table A: HLA-A*34:01H
HVSGTNGTKRF

SEQ ID NO: 7080 - protein, 11 aa, Severe acute respiratory syndrome coronavirus 2
  REGION 1..11: note = Table A: HLA-B*35:01H
NPVLPFNDGVY

SEQ ID NO: 7081 - protein, 11 aa, Severe acute respiratory syndrome coronavirus 2
  REGION 1..11: note = Table A: HLA-A*24:07H HLA-B*57:03H
PVLPFNDGVYF

SEQ ID NO: 7082 - protein, 11 aa, Severe acute respiratory syndrome coronavirus 2
  REGION 1..11: note = Table A: HLA-A*24:02H HLA-A*24:07H HLA-A*23:01H
VYFASTEKSNI

SEQ ID NO: 7083 - protein, 11 aa, Severe acute respiratory syndrome coronavirus 2
  REGION 1..11: note = Table A: HLA-A*68:01H
FASTEKSNIIR

SEQ ID NO: 7084 - protein, 11 aa, Severe acute respiratory syndrome coronavirus 2
  REGION 1..11: note = Table A: HLA-B*58:01H HLA-B*57:01H HLA-B*57:03M
STEKSNIIRGW

SEQ ID NO: 7085 - protein, 11 aa, Severe acute respiratory syndrome coronavirus 2
  REGION 1..11: note = Table A: HLA-C*08:03H
GTTLDSKTQSL

SEQ ID NO: 7086 - protein, 11 aa, Severe acute respiratory syndrome coronavirus 2
  REGION 1..11: note = Table A: HLA-A*34:02H HLA-C*08:03H
TTLDSKTQSLL

SEQ ID NO: 7087 - protein, 11 aa, Severe acute respiratory syndrome coronavirus 2
  REGION 1..11: note = Table A: HLA-A*02:08H
KTQSLLIVNNA

SEQ ID NO: 7088 - protein, 11 aa, Severe acute respiratory syndrome coronavirus 2
  REGION 1..11: note = Table A: HLA-A*03:02M HLA-A*11:01M HLA-A*11:02H HLA-A*36:01H HLA-A*68:01H HLA-A*34:02H
IVNNATNVVIK

SEQ ID NO: 7089 - protein, 11 aa, Severe acute respiratory syndrome coronavirus 2
  REGION 1..11: note = Table A: HLA-B*57:03H
ATNVVIKVCEF

SEQ ID NO: 7090 - protein, 11 aa, Severe acute respiratory syndrome coronavirus 2
  REGION 1..11: note = Table A: HLA-C*12:02H
FCNDPFLGVYY

SEQ ID NO: 7091 - protein, 11 aa, Severe acute respiratory syndrome coronavirus 2
  REGION 1..11: note = Table A: HLA-A*33:01H
NNKSWMESEFR

SEQ ID NO: 7092 - protein, 11 aa, Severe acute respiratory syndrome coronavirus 2
  REGION 1..11: note = Table A: HLA-B*58:01H HLA-B*58:02M HLA-A*74:01H HLA-A*36:01M HLA-B*57:01H HLA-A*30:02H HLA-A*32:01M HLA-B*15:03H HLA-B*57:03H
KSWMESEFRVY

SEQ ID NO: 7093 - protein, 11 aa, Severe acute respiratory syndrome coronavirus 2
  REGION 1..11: note = Table A: HLA-B*45:01M HLA-B*40:06H HLA-B*50:01H
MESEFRVYSSA

SEQ ID NO: 7094 - protein, 11 aa, Severe acute respiratory syndrome coronavirus 2
  REGION 1..11: note = Table A: HLA-A*32:01H HLA-B*57:03H
RVYSSANNCTF

SEQ ID NO: 7095 - protein, 11 aa, Severe acute respiratory syndrome coronavirus 2
  REGION 1..11: note = Table A: HLA-C*04:03H
TFEYVSQPFLM

SEQ ID NO: 7096 - protein, 11 aa, Severe acute respiratory syndrome coronavirus 2
  REGION 1..11: note = Table A: HLA-A*34:02H
MDLEGKQGNFK

SEQ ID NO: 7097 - protein, 11 aa, Severe acute respiratory syndrome coronavirus 2
  REGION 1..11: note = Table A: HLA-A*11:01H HLA-A*11:02H HLA-A*34:02H
FVFKNIDGYFK

SEQ ID NO: 7098 - protein, 11 aa, Severe acute respiratory syndrome coronavirus 2
  REGION 1..11: note = Table A: HLA-A*24:07M HLA-A*23:01H
VFKNIDGYFKI

SEQ ID NO: 7099 - protein, 11 aa, Severe acute respiratory syndrome coronavirus 2
  REGION 1..11: note = Table A: HLA-B*58:02H HLA-A*74:01H HLA-A*02:11H HLA-A*02:08H HLA-B*57:03H
KIYSKHTPINL

SEQ ID NO: 7100 - protein, 11 aa, Severe acute respiratory syndrome coronavirus 2
  REGION 1..11: note = Table A: HLA-B*56:01H HLA-B*55:02H HLA-B*54:01H
LVRDLPQGFSA

SEQ ID NO: 7101 - protein, 11 aa, Severe acute respiratory syndrome coronavirus 2
  REGION 1..11: note = Table A: HLA-B*35:03H
LPQGFSALEPL

SEQ ID NO: 7102 - protein, 11 aa, Severe acute respiratory syndrome coronavirus 2
  REGION 1..11: note = Table A: HLA-A*26:01H
DLPIGINITRF

SEQ ID NO: 7103 - protein, 11 aa, Severe acute respiratory syndrome coronavirus 2
  REGION 1..11: note = Table A: HLA-A*25:01M HLA-B*15:13M HLA-B*38:02H
YLTPGDSSSGW

SEQ ID NO: 7104 - protein, 11 aa, Severe acute respiratory syndrome coronavirus 2
  REGION 1..11: note = Table A: HLA-B*56:01H HLA-B*55:02M
TPGDSSSGWTA

SEQ ID NO: 7105 - protein, 11 aa, Severe acute respiratory syndrome coronavirus 2
  REGION 1..11: note = Table A: HLA-A*29:02H HLA-A*30:02H
SGWTAGAAAYY

SEQ ID NO: 7106 - protein, 11 aa, Severe acute respiratory syndrome coronavirus 2
  REGION 1..11: note = Table A: HLA-A*74:01H
AAYYVGYLQPR

SEQ ID NO: 7107 - protein, 11 aa, Severe acute respiratory syndrome coronavirus 2
  REGION 1..11: note = Table A: HLA-C*14:02H HLA-C*14:03M HLA-A*24:02M HLA-A*24:07H HLA-A*23:01M
YYVGYLQPRTF

SEQ ID NO: 7108 - protein, 11 aa, Severe acute respiratory syndrome coronavirus 2
  REGION 1..11: note = Table A: HLA-A*29:02H
YLQPRTFLLKY

SEQ ID NO: 7109 - protein, 11 aa, Severe acute respiratory syndrome coronavirus 2
  REGION 1..11: note = Table A: HLA-B*57:03H
KSFTVEKGIYQ

SEQ ID NO: 7110 - protein, 11 aa, Severe acute respiratory syndrome coronavirus 2
  REGION 1..11: note = Table A: HLA-A*68:02H
FTVEKGIYQTS

SEQ ID NO: 7111 - protein, 11 aa, Severe acute respiratory syndrome coronavirus 2
  REGION 1..11: note = Table A: HLA-B*27:05H
FRVQPTESIVR

SEQ ID NO: 7112 - protein, 11 aa, Severe acute respiratory syndrome coronavirus 2
  REGION 1..11: note = Table A: HLA-B*58:01H HLA-A*74:01M HLA-A*03:02M HLA-A*11:01H HLA-A*11:02H HLA-B*57:01H HLA-A*30:02M HLA-A*32:01H HLA-B*15:01H HLA-A*31:01H HLA-B*57:03H HLA-B*13:01H
RVQPTESIVRF

SEQ ID NO: 7113 - protein, 11 aa, Severe acute respiratory syndrome coronavirus 2
  REGION 1..11: note = Table A: HLA-A*24:07M HLA-A*23:01H
PFGEVFNATRF

SEQ ID NO: 7114 - protein, 11 aa, Severe acute respiratory syndrome coronavirus 2
  REGION 1..11: note = Table A: HLA-A*25:01H HLA-A*26:01M HLA-A*26:02H HLA-A*26:03H HLA-A*68:02M HLA-A*34:01H HLA-A*34:02H HLA-A*66:01H
EVFNATRFASV

SEQ ID NO: 7115 - protein, 11 aa, Severe acute respiratory syndrome coronavirus 2
  REGION 1..11: note = Table A: HLA-C*14:03H
VFNATRFASVY

SEQ ID NO: 7116 - protein, 11 aa, Severe acute respiratory syndrome coronavirus 2
  REGION 1..11: note = Table A: HLA-B*27:05H
TRFASVYAWNR

SEQ ID NO: 7117 - protein, 11 aa, Severe acute respiratory syndrome coronavirus 2
  REGION 1..11: note = Table A: HLA-B*46:01H HLA-A*24:07H HLA-A*23:01H HLA-B*38:02H HLA-B*15:01H
VLYNSASFSTF

SEQ ID NO: 7118 - protein, 11 aa, Severe acute respiratory syndrome coronavirus 2
  REGION 1..11: note = Table A: HLA-C*03:04H
YGVSPTKLNDL

SEQ ID NO: 7119 - protein, 11 aa, Severe acute respiratory syndrome coronavirus 2
  REGION 1..11: note = Table A: HLA-A*68:02H
ADSFVIRGDEV

SEQ ID NO: 7120 - protein, 11 aa, Severe acute respiratory syndrome coronavirus 2
  REGION 1..11: note = Table A: HLA-A*33:01H HLA-A*68:01H HLA-A*68:02H
DSFVIRGDEVR

SEQ ID NO: 7121 - protein, 11 aa, Severe acute respiratory syndrome coronavirus 2
  REGION 1..11: note = Table A: HLA-A*25:01H HLA-A*02:11H HLA-A*68:02M HLA-A*02:05M HLA-A*02:06M HLA-A*02:08M HLA-A*02:02H HLA-A*02:03H HLA-B*38:02H
FVIRGDEVRQI

SEQ ID NO: 7122 - protein, 11 aa, Severe acute respiratory syndrome coronavirus 2
  REGION 1..11: note = Table A: HLA-A*33:03H HLA-A*34:01H
EVRQIAPGQTG

SEQ ID NO: 7123 - protein, 11 aa, Severe acute respiratory syndrome coronavirus 2
  REGION 1..11: note = Table A: HLA-A*30:02H HLA-B*38:02H HLA-B*13:01M HLA-B*13:02M
RQIAPGQTGKI

SEQ ID NO: 7124 - protein, 11 aa, Severe acute respiratory syndrome coronavirus 2
  REGION 1..11: note = Table A: HLA-B*35:01H
APGQTGKIADY

SEQ ID NO: 7125 - protein, 11 aa, Severe acute respiratory syndrome coronavirus 2
  REGION 1..11: note = Table A: HLA-A*30:02H
GQTGKIADYNY

SEQ ID NO: 7126 - protein, 11 aa, Severe acute respiratory syndrome coronavirus 2
  REGION 1..11: note = Table A: HLA-A*02:11H HLA-A*02:07H HLA-B*13:02H
KLPDDFTGCVI

SEQ ID NO: 7127 - protein, 11 aa, Severe acute respiratory syndrome coronavirus 2
  REGION 1..11: note = Table A: HLA-B*54:01H
LPDDFTGCVIA

SEQ ID NO: 7128 - protein, 11 aa, Severe acute respiratory syndrome coronavirus 2
  REGION 1..11: note = Table A: HLA-A*36:01H
IAWNSNNLDSK

SEQ ID NO: 7129 - protein, 11 aa, Severe acute respiratory syndrome coronavirus 2
  REGION 1..11: note = Table A: HLA-A*29:02H HLA-A*30:02H
NNLDSKVGGNY

SEQ ID NO: 7130 - protein, 11 aa, Severe acute respiratory syndrome coronavirus 2
  REGION 1..11: note = Table A: HLA-A*33:01H HLA-A*33:03H
DSKVGGNYNYL

SEQ ID NO: 7131 - protein, 11 aa, Severe acute respiratory syndrome coronavirus 2
  REGION 1..11: note = Table A: HLA-A*74:01H
KVGGNYNYLYR

SEQ ID NO: 7132 - protein, 11 aa, Severe acute respiratory syndrome coronavirus 2
  REGION 1..11: note = Table A: HLA-A*74:01H HLA-A*32:01H
RLFRKSNLKPF

SEQ ID NO: 7133 - protein, 11 aa, Severe acute respiratory syndrome coronavirus 2
  REGION 1..11: note = Table A: HLA-B*42:01H HLA-B*56:01H HLA-A*02:11H HLA-B*53:01H HLA-B*55:02H HLA-C*15:05M HLA-B*55:01H HLA-C*08:01H HLA-B*38:02H HLA-B*07:02H HLA-B*07:04H HLA-B*07:05H HLA-B*57:03H
KPFERDISTEI

SEQ ID NO: 7134 - protein, 11 aa, Severe acute respiratory syndrome coronavirus 2
  REGION 1..11: note = Table A: HLA-B*50:01H
TEIYQAGSTPC

SEQ ID NO: 7135 - protein, 11 aa, Severe acute respiratory syndrome coronavirus 2
  REGION 1..11: note = Table A: HLA-B*13:02H
YQAGSTPCNGV

SEQ ID NO: 7136 - protein, 11 aa, Severe acute respiratory syndrome coronavirus 2
  REGION 1..11: note = Table A: HLA-A*11:303H HLA-C*16:04H HLA-B*46:01M HLA-A*26:01H HLA-A*29:01H HLA-A*29:02H HLA-B*27:02H HLA-C*03:02H HLA-A*30:02H HLA-C*12:02H HLA-C*12:03H HLA-B*35:01H HLA-B*35:07H HLA-C*08:03H HLA-B*38:02H
  REGION 1..11: note = CONT. FROM ABOVE: HLA-B*15:01M HLA-B*15:02H HLA-B*15:03H HLA- B*39:01H HLA-C*02:02H HLA-B*15:11H
YGFQPTNGVGY

SEQ ID NO: 7137 - protein, 11 aa, Severe acute respiratory syndrome coronavirus 2
  REGION 1..11: note = Table A: HLA-B*35:01H
QPTNGVGYQPY

SEQ ID NO: 7138 - protein, 11 aa, Severe acute respiratory syndrome coronavirus 2
  REGION 1..11: note = Table A: HLA-A*68:02H HLA-A*02:03H HLA-B*38:02H
FNFNGLTGTGV

SEQ ID NO: 7139 - protein, 11 aa, Severe acute respiratory syndrome coronavirus 2
  REGION 1..11: note = Table A: HLA-C*08:03H
NFNGLTGTGVL

SEQ ID NO: 7140 - protein, 11 aa, Severe acute respiratory syndrome coronavirus 2
  REGION 1..11: note = Table A: HLA-B*27:02H
TGTGVLTESNK

SEQ ID NO: 7141 - protein, 11 aa, Severe acute respiratory syndrome coronavirus 2
  REGION 1..11: note = Table A: HLA-B*56:01M HLA-B*55:02H HLA-B*54:01H
LPFQQFGRDIA

SEQ ID NO: 7142 - protein, 11 aa, Severe acute respiratory syndrome coronavirus 2
  REGION 1..11: note = Table A: HLA-C*15:05H HLA-C*08:02H HLA-B*07:02H
TTDAVRDPQTL

SEQ ID NO: 7143 - protein, 11 aa, Severe acute respiratory syndrome coronavirus 2
  REGION 1..11: note = Table A: HLA-B*38:02H HLA-B*07:04H
AVRDPQTLEIL

SEQ ID NO: 7144 - protein, 11 aa, Severe acute respiratory syndrome coronavirus 2
  REGION 1..11: note = Table A: HLA-B*55:02H
TPGTNTSNQVA

SEQ ID NO: 7145 - protein, 11 aa, Severe acute respiratory syndrome coronavirus 2
  REGION 1..11: note = Table A: HLA-A*02:01H
VLYQDVNCTEV

SEQ ID NO: 7146 - protein, 11 aa, Severe acute respiratory syndrome coronavirus 2
  REGION 1..11: note = Table A: HLA-A*68:02H
EVPVAIHADQL

SEQ ID NO: 7147 - protein, 11 aa, Severe acute respiratory syndrome coronavirus 2
  REGION 1..11: note = Table A: HLA-B*58:01H HLA-B*57:03H
AIHADQLTPTW

SEQ ID NO: 7148 - protein, 11 aa, Severe acute respiratory syndrome coronavirus 2
  REGION 1..11: note = Table A: HLA-A*36:01H HLA-A*33:01H HLA-A*33:03M HLA-A*26:03H HLA-B*27:02H HLA-A*68:01M HLA-A*68:02H HLA-A*34:02H HLA-A*31:01H HLA-A*66:01M
YSTGSNVFQTR

SEQ ID NO: 7149 - protein, 11 aa, Severe acute respiratory syndrome coronavirus 2
  REGION 1..11: note = Table A: HLA-B*38:02M HLA-B*39:01H
EHVNNSYECDI

SEQ ID NO: 7150 - protein, 11 aa, Severe acute respiratory syndrome coronavirus 2
  REGION 1..11: note = Table A: HLA-B*49:01H
YECDIPIGAGI

SEQ ID NO: 7151 - protein, 11 aa, Severe acute respiratory syndrome coronavirus 2
  REGION 1..11: note = Table A: HLA-A*26:01H HLA-A*29:01H HLA-A*29:02H HLA-A*30:02H HLA-B*35:01H HLA-B*35:08H HLA-B*35:07M HLA-B*38:02H HLA-B*15:02H HLA-B*07:05H HLA-B*15:11M
IPIGAGICASY

SEQ ID NO: 7152 - protein, 11 aa, Severe acute respiratory syndrome coronavirus 2
  REGION 1..11: note = Table A: HLA-A*74:01M HLA-A*03:01H HLA-A*03:02H HLA-A*11:01M HLA-A*11:02M HLA-A*36:01H HLA-A*33:03H HLA-A*68:01M HLA-A*34:01H HLA-A*34:02H HLA-C*07:27H HLA-A*31:01H HLA-A*66:01M
ASYQTQTNSPR

SEQ ID NO: 7153 - protein, 11 aa, Severe acute respiratory syndrome coronavirus 2
  REGION 1..11: note = Table A: HLA-A*33:01H HLA-A*33:03H HLA-A*30:02H
SYQTQTNSPRR

SEQ ID NO: 7154 - protein, 11 aa, Severe acute respiratory syndrome coronavirus 2
  REGION 1..11: note = Table A: HLA-B*58:01H HLA-A*36:01H HLA-A*30:02H HLA-B*15:01H HLA-B*57:03H
RSVASQSIIAY

SEQ ID NO: 7155 - protein, 11 aa, Severe acute respiratory syndrome coronavirus 2
  REGION 1..11: note = Table A: HLA-A*68:02H HLA-A*02:05H HLA-A*02:08H
SVASQSIIAYT

SEQ ID NO: 7156 - protein, 11 aa, Severe acute respiratory syndrome coronavirus 2
  REGION 1..11: note = Table A: HLA-A*68:02H
YTMSLGAENSV

SEQ ID NO: 7157 - protein, 11 aa, Severe acute respiratory syndrome coronavirus 2
  REGION 1..11: note = Table A: HLA-A*36:01H HLA-A*29:01H HLA-A*30:02H HLA-A*34:02H HLA-B*35:01M HLA-B*35:08H HLA-B*35:07H HLA-B*38:02H HLA-B*15:01H HLA-B*15:02H HLA-B*39:01H
MSLGAENSVAY

SEQ ID NO: 7158 - protein, 11 aa, Severe acute respiratory syndrome coronavirus 2
  REGION 1..11: note = Table A: HLA-A*68:02H HLA-B*57:03H
NSIAIPTNFTI

SEQ ID NO: 7159 - protein, 11 aa, Severe acute respiratory syndrome coronavirus 2
  REGION 1..11: note = Table A: HLA-A*03:02H HLA-A*36:01H
TTEILPVSMTK

SEQ ID NO: 7160 - protein, 11 aa, Severe acute respiratory syndrome coronavirus 2
  REGION 1..11: note = Table A: HLA-A*36:01M HLA-A*01:01H
STECSNLLLQY

SEQ ID NO: 7161 - protein, 11 aa, Severe acute respiratory syndrome coronavirus 2
  REGION 1..11: note = Table A: HLA-B*27:02H
ALTGIAVEQDK

SEQ ID NO: 7162 - protein, 11 aa, Severe acute respiratory syndrome coronavirus 2
  REGION 1..11: note = Table A: HLA-B*44:02H HLA-B*44:05H HLA-B*44:03H HLA-B*40:01H HLA-B*40:02H HLA-B*41:02H
VEQDKNTQEVF

SEQ ID NO: 7163 - protein, 11 aa, Severe acute respiratory syndrome coronavirus 2
  REGION 1..11: note = Table A: HLA-B*44:02H HLA-B*44:03M
QEVFAQVKQIY

SEQ ID NO: 7164 - protein, 11 aa, Severe acute respiratory syndrome coronavirus 2
  REGION 1..11: note = Table A: HLA-A*03:02H HLA-A*11:01H HLA-A*11:02H HLA-A*33:01H HLA-A*33:03H HLA-A*68:01M HLA-A*68:02H HLA-A*34:01H HLA-A*34:02H HLA-A*66:01H
EVFAQVKQIYK

SEQ ID NO: 7165 - protein, 11 aa, Severe acute respiratory syndrome coronavirus 2
  REGION 1..11: note = Table A: HLA-A*74:01H HLA-A*36:01H HLA-A*30:02H HLA-B*57:03M
KTPPIKDFGGF

SEQ ID NO: 7166 - protein, 11 aa, Severe acute respiratory syndrome coronavirus 2
  REGION 1..11: note = Table A: HLA-A*03:02H HLA-A*11:01H HLA-A*11:02M HLA-A*30:01H HLA-A*30:02H
QILPDPSKPSK

SEQ ID NO: 7167 - protein, 11 aa, Severe acute respiratory syndrome coronavirus 2
  REGION 1..11: note = Table A: HLA-A*74:01M HLA-A*26:03H HLA-A*68:01H HLA-A*34:01H
ILPDPSKPSKR

SEQ ID NO: 7168 - protein, 11 aa, Severe acute respiratory syndrome coronavirus 2
  REGION 1..11: note = Table A: HLA-B*07:04H
KPSKRSFIEDL

SEQ ID NO: 7169 - protein, 11 aa, Severe acute respiratory syndrome coronavirus 2
  REGION 1..11: note = Table A: HLA-A*11:01H HLA-A*11:02H
RSFIEDLLFNK

SEQ ID NO: 7170 - protein, 11 aa, Severe acute respiratory syndrome coronavirus 2
  REGION 1..11: note = Table A: HLA-B*44:05H HLA-B*40:01M HLA-B*40:02M HLA-B*41:02H
IEDLLFNKVTL

SEQ ID NO: 7171 - protein, 11 aa, Severe acute respiratory syndrome coronavirus 2
  REGION 1..11: note = Table A: HLA-A*02:02M HLA-A*02:03H
LLFNKVTLADA

SEQ ID NO: 7172 - protein, 11 aa, Severe acute respiratory syndrome coronavirus 2
  REGION 1..11: note = Table A: HLA-A*11:01H HLA-A*36:01H
KVTLADAGFIK

SEQ ID NO: 7173 - protein, 11 aa, Severe acute respiratory syndrome coronavirus 2
  REGION 1..11: note = Table A: HLA-A*25:01H HLA-B*46:01H HLA-A*26:01M HLA-A*26:02H HLA-A*29:02H HLA-B*44:03H HLA-A*30:02M HLA-A*02:04H HLA-A*02:02H HLA-A*02:03H HLA-B*35:01H HLA-B*38:02M HLA-B*15:01H HLA-B*15:02M
TLADAGFIKQY

SEQ ID NO: 7174 - protein, 11 aa, Severe acute respiratory syndrome coronavirus 2
  REGION 1..11: note = Table A: HLA-A*02:11H HLA-A*02:02H
CLGDIAARDLI

SEQ ID NO: 7175 - protein, 11 aa, Severe acute respiratory syndrome coronavirus 2
  REGION 1..11: note = Table A: HLA-B*44:05H HLA-B*18:01H HLA-B*07:05H
DEMIAQYTSAL

SEQ ID NO: 7176 - protein, 11 aa, Severe acute respiratory syndrome coronavirus 2
  REGION 1..11: note = Table A: HLA-B*38:02H HLA-A*32:01H
ALLAGTITSGW

SEQ ID NO: 7177 - protein, 11 aa, Severe acute respiratory syndrome coronavirus 2
  REGION 1..11: note = Table A: HLA-A*30:02H HLA-B*15:01H
LQIPFAMQMAY

SEQ ID NO: 7178 - protein, 11 aa, Severe acute respiratory syndrome coronavirus 2
  REGION 1..11: note = Table A: HLA-B*35:01H
NGIGVTQNVLY

SEQ ID NO: 7179 - protein, 11 aa, Severe acute respiratory syndrome coronavirus 2
  REGION 1..11: note = Table A: HLA-A*03:02H HLA-A*11:01M HLA-A*11:02H
VTQNVLYENQK

SEQ ID NO: 7180 - protein, 11 aa, Severe acute respiratory syndrome coronavirus 2
  REGION 1..11: note = Table A: HLA-B*38:02H
TQNVLYENQKL

SEQ ID NO: 7181 - protein, 11 aa, Severe acute respiratory syndrome coronavirus 2
  REGION 1..11: note = Table A: HLA-B*54:01H
NVLYENQKLIA

SEQ ID NO: 7182 - protein, 11 aa, Severe acute respiratory syndrome coronavirus 2
  REGION 1..11: note = Table A: HLA-A*02:03H
VLYENQKLIAN

SEQ ID NO: 7183 - protein, 11 aa, Severe acute respiratory syndrome coronavirus 2
  REGION 1..11: note = Table A: HLA-B*44:05H
YENQKLIANQF

SEQ ID NO: 7184 - protein, 11 aa, Severe acute respiratory syndrome coronavirus 2
  REGION 1..11: note = Table A: HLA-A*03:02H HLA-A*34:02H
IANQFNSAIGK

SEQ ID NO: 7185 - protein, 11 aa, Severe acute respiratory syndrome coronavirus 2
  REGION 1..11: note = Table A: HLA-A*03:01M HLA-A*03:02M HLA-A*11:01H
SLSSTASALGK

SEQ ID NO: 7186 - protein, 11 aa, Severe acute respiratory syndrome coronavirus 2
  REGION 1..11: note = Table A: HLA-A*03:02H
KLQDVVNQNAQ

SEQ ID NO: 7187 - protein, 11 aa, Severe acute respiratory syndrome coronavirus 2
  REGION 1..11: note = Table A: HLA-B*44:05H HLA-B*40:02H
QDVVNQNAQAL

SEQ ID NO: 7188 - protein, 11 aa, Severe acute respiratory syndrome coronavirus 2
  REGION 1..11: note = Table A: HLA-A*02:08H
AQALNTLVKQL

SEQ ID NO: 7189 - protein, 11 aa, Severe acute respiratory syndrome coronavirus 2
  REGION 1..11: note = Table A: HLA-A*68:02H
LSSNFGAISSV

SEQ ID NO: 7190 - protein, 11 aa, Severe acute respiratory syndrome coronavirus 2
  REGION 1..11: note = Table A: HLA-C*15:05H HLA-C*08:03H
SSNFGAISSVL

SEQ ID NO: 7191 - protein, 11 aa, Severe acute respiratory syndrome coronavirus 2
  REGION 1..11: note = Table A: HLA-C*08:01H HLA-C*08:03H HLA-B*35:12H
GAISSVLNDIL

SEQ ID NO: 7192 - protein, 11 aa, Severe acute respiratory syndrome coronavirus 2
  REGION 1..11: note = Table A: HLA-B*13:01H
RLDKVEAEVQI

SEQ ID NO: 7193 - protein, 11 aa, Severe acute respiratory syndrome coronavirus 2
  REGION 1..11: note = Table A: HLA-B*44:03H HLA-B*49:01H
VEAEVQIDRLI

SEQ ID NO: 7194 - protein, 11 aa, Severe acute respiratory syndrome coronavirus 2
  REGION 1..11: note = Table A: HLA-B*45:01H HLA-B*40:02H HLA-B*40:06H HLA-B*50:01H
AEVQIDRLITG

SEQ ID NO: 7195 - protein, 11 aa, Severe acute respiratory syndrome coronavirus 2
  REGION 1..11: note = Table A: HLA-A*33:01H HLA-A*33:03H HLA-A*26:03M HLA-A*68:01M HLA-A*34:01M HLA-A*34:02H HLA-A*66:01M
EVQIDRLITGR

SEQ ID NO: 7196 - protein, 11 aa, Severe acute respiratory syndrome coronavirus 2
  REGION 1..11: note = Table A: HLA-B*14:02H HLA-B*14:01H
DRLITGRLQSL

SEQ ID NO: 7197 - protein, 11 aa, Severe acute respiratory syndrome coronavirus 2
  REGION 1..11: note = Table A: HLA-B*57:03H
ITGRLQSLQTY

SEQ ID NO: 7198 - protein, 11 aa, Severe acute respiratory syndrome coronavirus 2
  REGION 1..11: note = Table A: HLA-A*02:05H HLA-A*02:08H
QTYVTQQLIRA

SEQ ID NO: 7199 - protein, 11 aa, Severe acute respiratory syndrome coronavirus 2
  REGION 1..11: note = Table A: HLA-B*57:03H
VTQQLIRAAEI

SEQ ID NO: 7200 - protein, 11 aa, Severe acute respiratory syndrome coronavirus 2
  REGION 1..11: note = Table A: HLA-A*02:11H HLA-C*15:05H HLA-A*02:05H HLA-A*02:02H HLA-B*07:02H HLA-B*07:04H HLA-B*57:03H
RAAEIRASANL

SEQ ID NO: 7201 - protein, 11 aa, Severe acute respiratory syndrome coronavirus 2
  REGION 1..11: note = Table A: HLA-B*45:01H HLA-B*40:02H HLA-B*40:06M HLA-B*50:01H
AEIRASANLAA

SEQ ID NO: 7202 - protein, 11 aa, Severe acute respiratory syndrome coronavirus 2
  REGION 1..11: note = Table A: HLA-C*15:05H HLA-B*57:03H
RASANLAATKM

SEQ ID NO: 7203 - protein, 11 aa, Severe acute respiratory syndrome coronavirus 2
  REGION 1..11: note = Table A: HLA-A*03:02H
KMSECVLGQSK

SEQ ID NO: 7204 - protein, 11 aa, Severe acute respiratory syndrome coronavirus 2
  REGION 1..11: note = Table A: HLA-A*02:11M HLA-A*68:02M HLA-A*02:05H HLA-A*02:08H HLA-A*02:02H HLA-A*02:03H
MSFPQSAPHGV

SEQ ID NO: 7205 - protein, 11 aa, Severe acute respiratory syndrome coronavirus 2
  REGION 1..11: note = Table A: HLA-B*42:01H HLA-B*56:01H HLA-B*53:01M HLA-B*55:02M HLA-B*35:03M HLA-C*15:05M HLA-B*35:01H HLA-B*35:02H HLA-B*35:08M HLA-B*35:07H HLA-B*35:12H HLA-B*38:02H HLA-B*54:01H HLA-B*07:02H HLA-B*07:04M HLA-B*15:02H
  REGION 1..11: note = CONT. FROM ABOVE: HLA-B*07:05H HLA-B*15:11M
FPQSAPHGVVF

SEQ ID NO: 7206 - protein, 11 aa, Severe acute respiratory syndrome coronavirus 2
  REGION 1..11: note = Table A: HLA-B*56:01H HLA-B*55:02H
APHGVVFLHVT

SEQ ID NO: 7207 - protein, 11 aa, Severe acute respiratory syndrome coronavirus 2
  REGION 1..11: note = Table A: HLA-B*57:01H HLA-B*57:03H
VTYVPAQEKNF

SEQ ID NO: 7208 - protein, 11 aa, Severe acute respiratory syndrome coronavirus 2
  REGION 1..11: note = Table A: HLA-B*56:01M HLA-B*55:02H HLA-C*15:05M HLA-B*55:01M HLA-B*54:01M HLA-B*07:02H HLA-B*07:04H HLA-B*07:05H
VPAQEKNFTTA

SEQ ID NO: 7209 - protein, 11 aa, Severe acute respiratory syndrome coronavirus 2
  REGION 1..11: note = Table A: HLA-A*03:02H
TTAPAICHDGK

SEQ ID NO: 7210 - protein, 11 aa, Severe acute respiratory syndrome coronavirus 2
  REGION 1..11: note = Table A: HLA-B*15:03H
GKAHFPREGVF

SEQ ID NO: 7211 - protein, 11 aa, Severe acute respiratory syndrome coronavirus 2
  REGION 1..11: note = Table A: HLA-A*02:11H HLA-C*15:02H HLA-C*08:01H
KAHFPREGVFV

SEQ ID NO: 7212 - protein, 11 aa, Severe acute respiratory syndrome coronavirus 2
  REGION 1..11: note = Table A: HLA-B*44:03H
EGVFVSNGTHW

SEQ ID NO: 7213 - protein, 11 aa, Severe acute respiratory syndrome coronavirus 2
  REGION 1..11: note = Table A: HLA-B*44:05H HLA-B*53:01H HLA-B*35:01H
EPQIITTDNTF

SEQ ID NO: 7214 - protein, 11 aa, Severe acute respiratory syndrome coronavirus 2
  REGION 1..11: note = Table A: HLA-A*68:02H
DVVIGIVNNTV

SEQ ID NO: 7215 - protein, 11 aa, Severe acute respiratory syndrome coronavirus 2
  REGION 1..11: note = Table A: HLA-B*46:01H HLA-A*29:02H HLA-A*30:02H HLA-C*15:05H HLA-B*35:01H HLA-B*38:02H HLA-B*15:01M HLA-B*15:02H HLA-B*07:05H
VVIGIVNNTVY

SEQ ID NO: 7216 - protein, 11 aa, Severe acute respiratory syndrome coronavirus 2
  REGION 1..11: note = Table A: HLA-C*08:03H
GIVNNTVYDPL

SEQ ID NO: 7217 - protein, 11 aa, Severe acute respiratory syndrome coronavirus 2
  REGION 1..11: note = Table A: HLA-A*11:303H HLA-A*03:01H HLA-A*03:02H HLA-A*11:01H HLA-A*11:02H HLA-B*27:02H
GINASVVNIQK

SEQ ID NO: 7218 - protein, 11 aa, Severe acute respiratory syndrome coronavirus 2
  REGION 1..11: note = Table A: HLA-A*68:01M HLA-A*68:02H
SVVNIQKEIDR

SEQ ID NO: 7219 - protein, 11 aa, Severe acute respiratory syndrome coronavirus 2
  REGION 1..11: note = Table A: HLA-A*02:11H HLA-A*02:05H HLA-A*02:06H HLA-A*02:02M HLA-A*02:03H HLA-B*52:01H HLA-B*38:02H
IQKEIDRLNEV

SEQ ID NO: 7220 - protein, 11 aa, Severe acute respiratory syndrome coronavirus 2
  REGION 1..11: note = Table A: HLA-B*46:01H HLA-A*26:01M HLA-A*26:02M HLA-A*29:02H HLA-A*30:02M HLA-B*38:02H HLA-B*15:01H
SLIDLQELGKY

SEQ ID NO: 7221 - protein, 11 aa, Severe acute respiratory syndrome coronavirus 2
  REGION 1..11: note = Table A: HLA-B*38:02H
DLQELGKYEQY

SEQ ID NO: 7222 - protein, 11 aa, Severe acute respiratory syndrome coronavirus 2
  REGION 1..11: note = Table A: HLA-A*68:02H HLA-A*02:04H
FIAGLIAIVMV

SEQ ID NO: 7223 - protein, 8 aa, Severe acute respiratory syndrome coronavirus 2
  REGION 1..8: note = Table A: HLA-B*52:01H
LFMRIFTI

SEQ ID NO: 7224 - protein, 8 aa, Severe acute respiratory syndrome coronavirus 2
  REGION 1..8: note = Table A: HLA-A*02:11H HLA-B*52:01H HLA-B*13:02H
RIFTIGTV

SEQ ID NO: 7225 - protein, 8 aa, Severe acute respiratory syndrome coronavirus 2
  REGION 1..8: note = Table A: HLA-C*03:03H HLA-C*03:04M HLA-A*68:02H HLA-C*15:05H HLA-C*15:02H HLA-C*17:01H HLA-C*08:01H HLA-B*38:02H HLA-B*57:03H HLA-C*07:04H
FTIGTVTL

SEQ ID NO: 7226 - protein, 8 aa, Severe acute respiratory syndrome coronavirus 2
  REGION 1..8: note = Table A: HLA-A*03:01M HLA-A*03:02M HLA-A*11:01H HLA-A*11:02H HLA-A*36:01H HLA-A*34:02M
TIGTVTLK

SEQ ID NO: 7227 - protein, 8 aa, Severe acute respiratory syndrome coronavirus 2
  REGION 1..8: note = Table A: HLA-B*58:02H HLA-C*15:05H
VTLKQGEI

SEQ ID NO: 7228 - protein, 8 aa, Severe acute respiratory syndrome coronavirus 2
  REGION 1..8: note = Table A: HLA-B*50:01H
GEIKDATP

SEQ ID NO: 7229 - protein, 8 aa, Severe acute respiratory syndrome coronavirus 2
  REGION 1..8: note = Table A: HLA-B*51:01H
DATPSDFV

SEQ ID NO: 7230 - protein, 8 aa, Severe acute respiratory syndrome coronavirus 2
  REGION 1..8: note = Table A: HLA-B*56:01H HLA-B*55:02H HLA-B*55:01M HLA-B*54:01H
TPSDFVRA

SEQ ID NO: 7231 - protein, 8 aa, Severe acute respiratory syndrome coronavirus 2
  REGION 1..8: note = Table A: HLA-B*39:06H HLA-B*50:01H
SDFVRATA

SEQ ID NO: 7232 - protein, 8 aa, Severe acute respiratory syndrome coronavirus 2
  REGION 1..8: note = Table A: HLA-B*52:01H
FVRATATI

SEQ ID NO: 7233 - protein, 8 aa, Severe acute respiratory syndrome coronavirus 2
  REGION 1..8: note = Table A: HLA-C*15:05H HLA-B*39:06H HLA-B*54:01H
TATIPIQA

SEQ ID NO: 7234 - protein, 8 aa, Severe acute respiratory syndrome coronavirus 2
  REGION 1..8: note = Table A: HLA-B*58:01H HLA-B*53:01H
QASLPFGW

SEQ ID NO: 7235 - protein, 8 aa, Severe acute respiratory syndrome coronavirus 2
  REGION 1..8: note = Table A: HLA-B*51:01M HLA-B*54:01H
LPFGWLIV

SEQ ID NO: 7236 - protein, 8 aa, Severe acute respiratory syndrome coronavirus 2
  REGION 1..8: note = Table A: HLA-B*51:01H
FGWLIVGV

SEQ ID NO: 7237 - protein, 8 aa, Severe acute respiratory syndrome coronavirus 2
  REGION 1..8: note = Table A: HLA-A*03:02H HLA-A*11:02H
AVFQSASK

SEQ ID NO: 7238 - protein, 8 aa, Severe acute respiratory syndrome coronavirus 2
  REGION 1..8: note = Table A: HLA-B*52:01H
VFQSASKI

SEQ ID NO: 7239 - protein, 8 aa, Severe acute respiratory syndrome coronavirus 2
  REGION 1..8: note = Table A: HLA-B*52:01H
FQSASKII

SEQ ID NO: 7240 - protein, 8 aa, Severe acute respiratory syndrome coronavirus 2
  REGION 1..8: note = Table A: HLA-B*48:01H HLA-B*58:01H HLA-A*11:303H HLA-C*16:01H HLA-C*03:03H HLA-C*12:05H HLA-C*03:04H HLA-A*68:02H HLA-B*35:03H HLA-C*15:05H HLA-C*12:03H HLA-C*15:02M HLA-A*02:02H HLA-C*17:01H HLA-C*08:01H
  REGION 1..8: note = CONT. FROM ABOVE: HLA-B*38:02H HLA-B*40:01H HLA-B*40:02H HLA- B*07:02H HLA-B*07:04H HLA-B*07:05H HLA-B*41:02H HLA-B*57:03H HLA-C*07:04M
SASKIITL

SEQ ID NO: 7241 - protein, 8 aa, Severe acute respiratory syndrome coronavirus 2
  REGION 1..8: note = Table A: HLA-A*30:01H
ASKIITLK

SEQ ID NO: 7242 - protein, 8 aa, Severe acute respiratory syndrome coronavirus 2
  REGION 1..8: note = Table A: HLA-B*08:01M
TLKKRWQL

SEQ ID NO: 7243 - protein, 8 aa, Severe acute respiratory syndrome coronavirus 2
  REGION 1..8: note = Table A: HLA-B*38:02H HLA-B*15:02H
LLLFVTVY

SEQ ID NO: 7244 - protein, 8 aa, Severe acute respiratory syndrome coronavirus 2
  REGION 1..8: note = Table A: HLA-C*17:01H
FVTVYSHL

SEQ ID NO: 7245 - protein, 8 aa, Severe acute respiratory syndrome coronavirus 2
  REGION 1..8: note = Table A: HLA-B*58:02H HLA-C*15:02H HLA-B*57:03H
VTVYSHLL

SEQ ID NO: 7246 - protein, 8 aa, Severe acute respiratory syndrome coronavirus 2
  REGION 1..8: note = Table A: HLA-C*03:02H HLA-B*54:01H
YSHLLLVA

SEQ ID NO: 7247 - protein, 8 aa, Severe acute respiratory syndrome coronavirus 2
  REGION 1..8: note = Table A: HLA-B*55:02H HLA-B*39:06H HLA-B*54:01H
SHLLLVAA

SEQ ID NO: 7248 - protein, 8 aa, Severe acute respiratory syndrome coronavirus 2
  REGION 1..8: note = Table A: HLA-B*18:01H HLA-B*40:01H HLA-B*40:02H HLA-B*49:01M
LEAPFLYL

SEQ ID NO: 7249 - protein, 8 aa, Severe acute respiratory syndrome coronavirus 2
  REGION 1..8: note = Table A: HLA-C*14:03H
LYLYALVY

SEQ ID NO: 7250 - protein, 8 aa, Severe acute respiratory syndrome coronavirus 2
  REGION 1..8: note = Table A: HLA-C*14:02H HLA-C*14:03H
YFLQSINF

SEQ ID NO: 7251 - protein, 8 aa, Severe acute respiratory syndrome coronavirus 2
  REGION 1..8: note = Table A: HLA-A*02:04H
FLQSINFV

SEQ ID NO: 7252 - protein, 8 aa, Severe acute respiratory syndrome coronavirus 2
  REGION 1..8: note = Table A: HLA-B*58:02H HLA-B*52:01H
QSINFVRI

SEQ ID NO: 7253 - protein, 8 aa, Severe acute respiratory syndrome coronavirus 2
  REGION 1..8: note = Table A: HLA-B*58:02H
SINFVRII

SEQ ID NO: 7254 - protein, 8 aa, Severe acute respiratory syndrome coronavirus 2
  REGION 1..8: note = Table A: HLA-B*58:01H HLA-B*58:02H HLA-A*36:01H HLA-B*57:01H HLA-A*30:02H HLA-B*57:03H
RSKNPLLY

SEQ ID NO: 7255 - protein, 8 aa, Severe acute respiratory syndrome coronavirus 2
  REGION 1..8: note = Table A: HLA-C*04:01H
LYDANYFL

SEQ ID NO: 7256 - protein, 8 aa, Severe acute respiratory syndrome coronavirus 2
  REGION 1..8: note = Table A: HLA-B*35:01H HLA-B*35:08H
SPISEHDY

SEQ ID NO: 7257 - protein, 8 aa, Severe acute respiratory syndrome coronavirus 2
  REGION 1..8: note = Table A: HLA-B*18:01H HLA-B*38:02H HLA-B*15:02H
HDYQIGGY

SEQ ID NO: 7258 - protein, 8 aa, Severe acute respiratory syndrome coronavirus 2
  REGION 1..8: note = Table A: HLA-B*58:01M HLA-B*53:01H HLA-B*57:03H
IGGYTEKW

SEQ ID NO: 7259 - protein, 8 aa, Severe acute respiratory syndrome coronavirus 2
  REGION 1..8: note = Table A: HLA-B*18:01H HLA-B*15:02H
DCVVLHSY

SEQ ID NO: 7260 - protein, 8 aa, Severe acute respiratory syndrome coronavirus 2
  REGION 1..8: note = Table A: HLA-C*14:02M HLA-C*14:03M HLA-A*29:02H HLA-A*30:02H HLA-B*39:01H
SYFTSDYY

SEQ ID NO: 7261 - protein, 8 aa, Severe acute respiratory syndrome coronavirus 2
  REGION 1..8: note = Table A: HLA-A*36:01M HLA-A*01:01H
TSDYYQLY

SEQ ID NO: 7262 - protein, 8 aa, Severe acute respiratory syndrome coronavirus 2
  REGION 1..8: note = Table A: HLA-B*48:01H HLA-B*14:01H HLA-B*52:01H HLA-B*38:02H HLA-B*15:01H HLA-B*15:02H HLA-B*15:03H HLA-B*39:01H HLA-B*13:02H HLA-B*15:10H
YQLYSTQL

SEQ ID NO: 7263 - protein, 8 aa, Severe acute respiratory syndrome coronavirus 2
  REGION 1..8: note = Table A: HLA-B*08:01H HLA-B*14:02H HLA-B*35:01H HLA-B*38:02H HLA-B*15:02H HLA-C*07:04H
TGVEHVTF

SEQ ID NO: 7264 - protein, 8 aa, Severe acute respiratory syndrome coronavirus 2
  REGION 1..8: note = Table A: HLA-B*49:01H
VEHVTFFI

SEQ ID NO: 7265 - protein, 8 aa, Severe acute respiratory syndrome coronavirus 2
  REGION 1..8: note = Table A: HLA-B*38:02H
EHVTFFIY

SEQ ID NO: 7266 - protein, 8 aa, Severe acute respiratory syndrome coronavirus 2
  REGION 1..8: note = Table A: HLA-A*11:02H
VTFFIYNK

SEQ ID NO: 7267 - protein, 8 aa, Severe acute respiratory syndrome coronavirus 2
  REGION 1..8: note = Table A: HLA-B*38:01M HLA-B*38:02M HLA-B*39:06M HLA-B*39:01H HLA-B*15:10H
EHVQIHTI

SEQ ID NO: 7268 - protein, 8 aa, Severe acute respiratory syndrome coronavirus 2
  REGION 1..8: note = Table A: HLA-C*08:02H
TIDGSSGV

SEQ ID NO: 7269 - protein, 8 aa, Severe acute respiratory syndrome coronavirus 2
  REGION 1..8: note = Table A: HLA-B*15:02H HLA-B*07:05H
SGVVNPVM

SEQ ID NO: 7270 - protein, 8 aa, Severe acute respiratory syndrome coronavirus 2
  REGION 1..8: note = Table A: HLA-C*15:05H HLA-B*51:01H
EPTTTTSV

SEQ ID NO: 7271 - protein, 8 aa, Severe acute respiratory syndrome coronavirus 2
  REGION 1..8: note = Table A: HLA-C*03:04H HLA-B*35:03H HLA-C*15:05H HLA-C*08:03H HLA-B*39:01H
TTTTSVPL

SEQ ID NO: 7272 - protein, 9 aa, Severe acute respiratory syndrome coronavirus 2
  REGION 1..9: note = Table A: HLA-B*08:01M HLA-A*02:11H HLA-A*68:02M HLA-B*14:02H HLA-A*02:04M HLA-A*02:02H HLA-B*51:01H HLA-B*38:02H HLA-B*40:06H
DLFMRIFTI

SEQ ID NO: 7273 - protein, 9 aa, Severe acute respiratory syndrome coronavirus 2
  REGION 1..9: note = Table A: HLA-B*38:02H HLA-B*39:01H
MRIFTIGTV

SEQ ID NO: 7274 - protein, 9 aa, Severe acute respiratory syndrome coronavirus 2
  REGION 1..9: note = Table A: HLA-C*14:02M HLA-C*14:03M HLA-C*04:03H HLA-A*24:02M HLA-A*24:07M HLA-A*23:01M
IFTIGTVTL

SEQ ID NO: 7275 - protein, 9 aa, Severe acute respiratory syndrome coronavirus 2
  REGION 1..9: note = Table A: HLA-A*11:303H HLA-A*03:01H HLA-A*03:02H HLA-A*11:01M HLA-A*11:02M HLA-A*33:03H HLA-A*26:03M HLA-A*68:01M HLA-A*68:02H HLA-A*34:01M HLA-A*34:02H HLA-C*07:27H HLA-A*66:01H
FTIGTVTLK

SEQ ID NO: 7276 - protein, 9 aa, Severe acute respiratory syndrome coronavirus 2
  REGION 1..9: note = Table A: HLA-A*11:01H HLA-A*34:02H
VTLKQGEIK

SEQ ID NO: 7277 - protein, 9 aa, Severe acute respiratory syndrome coronavirus 2
  REGION 1..9: note = Table A: HLA-B*50:01H
GEIKDATPS

SEQ ID NO: 7278 - protein, 9 aa, Severe acute respiratory syndrome coronavirus 2
  REGION 1..9: note = Table A: HLA-B*15:03H
IKDATPSDF

SEQ ID NO: 7279 - protein, 9 aa, Severe acute respiratory syndrome coronavirus 2
  REGION 1..9: note = Table A: HLA-A*33:01H HLA-A*68:01M HLA-A*34:01M HLA-A*34:02H HLA-B*35:02H HLA-A*66:01M
DATPSDFVR

SEQ ID NO: 7280 - protein, 9 aa, Severe acute respiratory syndrome coronavirus 2
  REGION 1..9: note = Table A: HLA-A*02:05H HLA-A*02:06H HLA-A*02:07H HLA-A*02:08H
ATPSDFVRA

SEQ ID NO: 7281 - protein, 9 aa, Severe acute respiratory syndrome coronavirus 2
  REGION 1..9: note = Table A: HLA-B*42:01H HLA-B*56:01M HLA-B*55:02M HLA-C*15:05H HLA-B*55:01M HLA-B*54:01H HLA-B*07:02H HLA-B*07:04M HLA-B*07:05H
TPSDFVRAT

SEQ ID NO: 7282 - protein, 9 aa, Severe acute respiratory syndrome coronavirus 2
  REGION 1..9: note = Table A: HLA-B*37:01H
SDFVRATAT

SEQ ID NO: 7283 - protein, 9 aa, Severe acute respiratory syndrome coronavirus 2
  REGION 1..9: note = Table A: HLA-B*51:01H
DFVRATATI

SEQ ID NO: 7284 - protein, 9 aa, Severe acute respiratory syndrome coronavirus 2
  REGION 1..9: note = Table A: HLA-C*16:04H HLA-A*11:01H HLA-C*12:05H HLA-A*68:02M HLA-C*15:05H HLA-A*02:05H HLA-A*02:08M HLA-A*02:03H HLA-B*13:02H
ATATIPIQA

SEQ ID NO: 7285 - protein, 9 aa, Severe acute respiratory syndrome coronavirus 2
  REGION 1..9: note = Table A: HLA-B*48:01H HLA-B*58:01M HLA-B*58:02H HLA-A*11:303M HLA-B*44:05H HLA-B*57:01H HLA-B*46:01H HLA-A*26:03H HLA-C*03:03M HLA-C*12:05H HLA-A*02:11H HLA-C*03:04M HLA-A*30:02H HLA-A*68:02M HLA-C*15:05M
  REGION 1..9: note = CONT. FROM ABOVE: HLA-C*15:02H HLA-A*02:04H HLA-A*02:05M HLA- A*02:06H HLA-A*02:08M HLA-A*02:01H HLA-A*02:02H HLA-A*02:03H HLA-C*07:27H HLA-C*17:01H HLA-C*08:01H HLA-B*38:02H HLA-B*15 :01H HLA-B*39:01H HLA-B*07:05H HLA-B*57:03H HLA-B*13:02H
ATIPIQASL

SEQ ID NO: 7286 - protein, 9 aa, Severe acute respiratory syndrome coronavirus 2
  REGION 1..9: note = Table A: HLA-B*53:01H HLA-B*35:03H HLA-C*15:05H HLA-B*35:01H HLA-B*35:07M HLA-B*38:02H HLA-B*15:02H HLA-B*15:11H
IPIQASLPF

SEQ ID NO: 7287 - protein, 9 aa, Severe acute respiratory syndrome coronavirus 2
  REGION 1..9: note = Table A: HLA-B*58:01H HLA-B*57:03H HLA-B*13:01H
IQASLPFGW

SEQ ID NO: 7288 - protein, 9 aa, Severe acute respiratory syndrome coronavirus 2
  REGION 1..9: note = Table A: HLA-B*58:02H HLA-A*02:04H HLA-B*57:03H
ASLPFGWLI

SEQ ID NO: 7289 - protein, 9 aa, Severe acute respiratory syndrome coronavirus 2
  REGION 1..9: note = Table A: HLA-B*54:01H
LPFGWLIVG

SEQ ID NO: 7290 - protein, 9 aa, Severe acute respiratory syndrome coronavirus 2
  REGION 1..9: note = Table A: HLA-A*02:04H HLA-A*02:02H HLA-A*02:03H HLA-C*17:01H HLA-B*38:02H
WLIVGVALL

SEQ ID NO: 7291 - protein, 9 aa, Severe acute respiratory syndrome coronavirus 2
  REGION 1..9: note = Table A: HLA-A*11:303H HLA-B*45:01H HLA-A*02:11H HLA-B*55:02H HLA-A*02:04H HLA-A*02:06H HLA-A*02:07H HLA-B*14:01H HLA-A*02:01M HLA-A*02:03H HLA-B*38:02H HLA-B*39:06H HLA-B*40:06H HLA-B*54:01H HLA-B*13:02H
  REGION 1..9: note = CONT. FROM ABOVE: HLA-B*50:01H
ALLAVFQSA

SEQ ID NO: 7292 - protein, 9 aa, Severe acute respiratory syndrome coronavirus 2
  REGION 1..9: note = Table A: HLA-A*36:01H HLA-C*03:03H HLA-A*68:01H HLA-A*34:01H HLA-A*34:02M HLA-A*66:01H
LAVFQSASK

SEQ ID NO: 7293 - protein, 9 aa, Severe acute respiratory syndrome coronavirus 2
  REGION 1..9: note = Table A: HLA-A*02:05H HLA-A*02:08H HLA-B*38:02H HLA-B*13:02H
AVFQSASKI

SEQ ID NO: 7294 - protein, 9 aa, Severe acute respiratory syndrome coronavirus 2
  REGION 1..9: note = Table A: HLA-C*14:03H
VFQSASKII

SEQ ID NO: 7295 - protein, 9 aa, Severe acute respiratory syndrome coronavirus 2
  REGION 1..9: note = Table A: HLA-B*58:01H HLA-B*58:02H HLA-C*16:01H HLA-B*08:01H HLA-C*03:04H HLA-A*68:02M HLA-C*15:05M HLA-C*12:03H HLA-C*15:02M HLA-A*02:05H HLA-A*02:08H HLA-A*02:02H HLA-A*02:03H HLA-C*17:01H HLA-C*08:01H HLA-B*38:02M
  REGION 1..9: note = CONT. FROM ABOVE: HLA-B*07:04H HLA-B*39:01H HLA-B*57:03H HLA- C*07:04M
QSASKIITL

SEQ ID NO: 7296 - protein, 9 aa, Severe acute respiratory syndrome coronavirus 2
  REGION 1..9: note = Table A: HLA-A*11:303M HLA-A*74:01H HLA-A*03:01M HLA-A*03:02H HLA-A*11:01H HLA-A*11:02H HLA-A*36:01H HLA-B*57:01H HLA-A*33:03H HLA-C*06:02H HLA-A*30:01H HLA-A*30:02H HLA-A*68:01H HLA-A*68:02M HLA-A*02:05H
  REGION 1..9: note = CONT. FROM ABOVE: HLA-A*34:01M HLA-A*34:02H HLA-C*07:27H HLA- C*17:01H HLA-B*57:03H HLA-C*02:02H HLA-B*13:02H HLA-A*66:01M
SASKIITLK

SEQ ID NO: 7297 - protein, 9 aa, Severe acute respiratory syndrome coronavirus 2
  REGION 1..9: note = Table A: HLA-A*11:02H HLA-A*30:01M
ASKIITLKK

SEQ ID NO: 7298 - protein, 9 aa, Severe acute respiratory syndrome coronavirus 2
  REGION 1..9: note = Table A: HLA-B*57:03H
KIITLKKRW

SEQ ID NO: 7299 - protein, 9 aa, Severe acute respiratory syndrome coronavirus 2
  REGION 1..9: note = Table A: HLA-B*58:02H HLA-A*02:11H HLA-A*02:04H HLA-A*32:01H HLA-B*57:03M
ITLKKRWQL

SEQ ID NO: 7300 - protein, 9 aa, Severe acute respiratory syndrome coronavirus 2
  REGION 1..9: note = Table A: HLA-B*27:05M
KRWQLALSK

SEQ ID NO: 7301 - protein, 9 aa, Severe acute respiratory syndrome coronavirus 2
  REGION 1..9: note = Table A: HLA-B*13:02H
WQLALSKGV

SEQ ID NO: 7302 - protein, 9 aa, Severe acute respiratory syndrome coronavirus 2
  REGION 1..9: note = Table A: HLA-B*57:03H
LALSKGVHF

SEQ ID NO: 7303 - protein, 9 aa, Severe acute respiratory syndrome coronavirus 2
  REGION 1..9: note = Table A: HLA-A*02:11H HLA-A*68:02H HLA-C*15:02H HLA-A*02:04H HLA-A*02:05M HLA-A*02:06M HLA-A*02:08M HLA-A*02:01H HLA-A*02:02H HLA-A*02:03H HLA-B*38:02M HLA-B*13:02M
ALSKGVHFV

SEQ ID NO: 7304 - protein, 9 aa, Severe acute respiratory syndrome coronavirus 2
  REGION 1..9: note = Table A: HLA-B*38:02H
VHFVCNLLL

SEQ ID NO: 7305 - protein, 9 aa, Severe acute respiratory syndrome coronavirus 2
  REGION 1..9: note = Table A: HLA-A*02:11H HLA-A*02:04H HLA-A*02:06H HLA-A*02:07H
NLLLLFVTV

SEQ ID NO: 7306 - protein, 9 aa, Severe acute respiratory syndrome coronavirus 2
  REGION 1..9: note = Table A: HLA-B*38:02M HLA-B*15:02M
LLLLFVTVY

SEQ ID NO: 7307 - protein, 9 aa, Severe acute respiratory syndrome coronavirus 2
  REGION 1..9: note = Table A: HLA-C*14:02H HLA-C*14:03H HLA-A*24:07H HLA-A*23:01H
LFVTVYSHL

SEQ ID NO: 7308 - protein, 9 aa, Severe acute respiratory syndrome coronavirus 2
  REGION 1..9: note = Table A: HLA-A*02:11H HLA-C*03:04H HLA-A*68:02H HLA-C*15:02H HLA-A*02:04H HLA-A*02:05H HLA-A*02:06H HLA-A*02:02M HLA-C*17:01H HLA-C*08:01H
FVTVYSHLL

SEQ ID NO: 7309 - protein, 9 aa, Severe acute respiratory syndrome coronavirus 2
  REGION 1..9: note = Table A: HLA-C*15:02M HLA-B*57:03H
VTVYSHLLL

SEQ ID NO: 7310 - protein, 9 aa, Severe acute respiratory syndrome coronavirus 2
  REGION 1..9: note = Table A: HLA-A*03:01H HLA-A*11:02H HLA-C*06:02H HLA-A*29:02H HLA-A*02:11M HLA-A*68:02M HLA-C*15:05H HLA-C*15:02H HLA-A*02:04M HLA-A*02:05H HLA-A*02:06H HLA-A*02:07M HLA-A*02:01H HLA-A*02:02H HLA-A*02:03M HLA-A*34:01H
  REGION 1..9: note = CONT. FROM ABOVE: HLA-A*34:02M HLA-B*51:01H HLA-C*08:01M HLA- B*38:02M HLA-B*40:06H HLA-B*13:02M
TVYSHLLLV

SEQ ID NO: 7311 - protein, 9 aa, Severe acute respiratory syndrome coronavirus 2
  REGION 1..9: note = Table A: HLA-A*29:02H
VYSHLLLVA

SEQ ID NO: 7312 - protein, 9 aa, Severe acute respiratory syndrome coronavirus 2
  REGION 1..9: note = Table A: HLA-B*56:01M HLA-B*55:02M HLA-B*55:01H HLA-C*08:01H HLA-B*39:06M HLA-B*40:06H HLA-B*54:01H
YSHLLLVAA

SEQ ID NO: 7313 - protein, 9 aa, Severe acute respiratory syndrome coronavirus 2
  REGION 1..9: note = Table A: HLA-B*39:06H HLA-B*39:01H
SHLLLVAAG

SEQ ID NO: 7314 - protein, 9 aa, Severe acute respiratory syndrome coronavirus 2
  REGION 1..9: note = Table A: HLA-A*02:11H HLA-A*02:04H
HLLLVAAGL

SEQ ID NO: 7315 - protein, 9 aa, Severe acute respiratory syndrome coronavirus 2
  REGION 1..9: note = Table A: HLA-B*38:02H
LLVAAGLEA

SEQ ID NO: 7316 - protein, 9 aa, Severe acute respiratory syndrome coronavirus 2
  REGION 1..9: note = Table A: HLA-B*35:01H HLA-B*35:02H HLA-B*35:08H HLA-B*35:07H
VAAGLEAPF

SEQ ID NO: 7317 - protein, 9 aa, Severe acute respiratory syndrome coronavirus 2
  REGION 1..9: note = Table A: HLA-A*29:01H HLA-A*29:02H HLA-C*07:01H HLA-A*30:02H
AGLEAPFLY

SEQ ID NO: 7318 - protein, 9 aa, Severe acute respiratory syndrome coronavirus 2
  REGION 1..9: note = Table A: HLA-A*02:07H
GLEAPFLYL

SEQ ID NO: 7319 - protein, 9 aa, Severe acute respiratory syndrome coronavirus 2
  REGION 1..9: note = Table A: HLA-A*29:02H HLA-B*44:03H HLA-B*18:01H HLA-C*07:01H HLA-B*07:05H
LEAPFLYLY

SEQ ID NO: 7320 - protein, 9 aa, Severe acute respiratory syndrome coronavirus 2
  REGION 1..9: note = Table A: HLA-C*15:05H HLA-B*07:05H
APFLYLYAL

SEQ ID NO: 7321 - protein, 9 aa, Severe acute respiratory syndrome coronavirus 2
  REGION 1..9: note = Table A: HLA-B*38:02H HLA-B*15:02H
FLYLYALVY

SEQ ID NO: 7322 - protein, 9 aa, Severe acute respiratory syndrome coronavirus 2
  REGION 1..9: note = Table A: HLA-A*02:11M HLA-A*02:04M HLA-A*02:07H HLA-A*02:01H HLA-A*02:02M
YLYALVYFL

SEQ ID NO: 7323 - protein, 9 aa, Severe acute respiratory syndrome coronavirus 2
  REGION 1..9: note = Table A: HLA-A*02:04M HLA-A*02:02H HLA-A*02:03H HLA-B*38:02H HLA-B*13:02H
ALVYFLQSI

SEQ ID NO: 7324 - protein, 9 aa, Severe acute respiratory syndrome coronavirus 2
  REGION 1..9: note = Table A: HLA-C*14:02M HLA-C*14:03H HLA-A*29:02H HLA-C*07:02H HLA-A*24:02H HLA-A*24:07H HLA-C*08:01H HLA-A*23:01M
VYFLQSINF

SEQ ID NO: 7325 - protein, 9 aa, Severe acute respiratory syndrome coronavirus 2
  REGION 1..9: note = Table A: HLA-C*14:03H
YFLQSINFV

SEQ ID NO: 7326 - protein, 9 aa, Severe acute respiratory syndrome coronavirus 2
  REGION 1..9: note = Table A: HLA-A*74:01M
FLQSINFVR

SEQ ID NO: 7327 - protein, 9 aa, Severe acute respiratory syndrome coronavirus 2
  REGION 1..9: note = Table A: HLA-B*13:01H HLA-B*13:02H
LQSINFVRI

SEQ ID NO: 7328 - protein, 9 aa, Severe acute respiratory syndrome coronavirus 2
  REGION 1..9: note = Table A: HLA-B*58:02H HLA-C*16:01H HLA-C*06:02M HLA-A*68:02H HLA-C*12:03M HLA-C*15:02M
QSINFVRII

SEQ ID NO: 7329 - protein, 9 aa, Severe acute respiratory syndrome coronavirus 2
  REGION 1..9: note = Table A: HLA-C*15:05H HLA-B*07:04M HLA-C*07:04H
SINFVRIIM

SEQ ID NO: 7330 - protein, 9 aa, Severe acute respiratory syndrome coronavirus 2
  REGION 1..9: note = Table A: HLA-A*36:01H HLA-B*27:05H
CRSKNPLLY

SEQ ID NO: 7331 - protein, 9 aa, Severe acute respiratory syndrome coronavirus 2
  REGION 1..9: note = Table A: HLA-B*39:06H
SKNPLLYDA

SEQ ID NO: 7332 - protein, 9 aa, Severe acute respiratory syndrome coronavirus 2
  REGION 1..9: note = Table A: HLA-B*35:01M HLA-B*35:08H HLA-B*35:07H
NPLLYDANY

SEQ ID NO: 7333 - protein, 9 aa, Severe acute respiratory syndrome coronavirus 2
  REGION 1..9: note = Table A: HLA-A*02:11M HLA-A*02:04M HLA-A*02:07H HLA-A*02:01M HLA-A*02:02M
LLYDANYFL

SEQ ID NO: 7334 - protein, 9 aa, Severe acute respiratory syndrome coronavirus 2
  REGION 1..9: note = Table A: HLA-B*56:01H HLA-B*55:02H HLA-C*15:05H HLA-B*54:01H
IPYNSVTSS

SEQ ID NO: 7335 - protein, 9 aa, Severe acute respiratory syndrome coronavirus 2
  REGION 1..9: note = Table A: HLA-A*24:02H HLA-A*23:01H
PYNSVTSSI

SEQ ID NO: 7336 - protein, 9 aa, Severe acute respiratory syndrome coronavirus 2
  REGION 1..9: note = Table A: HLA-A*68:01H HLA-A*68:02H
VTSSIVITS

SEQ ID NO: 7337 - protein, 9 aa, Severe acute respiratory syndrome coronavirus 2
  REGION 1..9: note = Table A: HLA-C*08:02H
SGDGTTSPI

SEQ ID NO: 7338 - protein, 9 aa, Severe acute respiratory syndrome coronavirus 2
  REGION 1..9: note = Table A: HLA-A*11:01H HLA-C*07:27H
GTTSPISEH

SEQ ID NO: 7339 - protein, 9 aa, Severe acute respiratory syndrome coronavirus 2
  REGION 1..9: note = Table A: HLA-A*30:02H
TSPISEHDY

SEQ ID NO: 7340 - protein, 9 aa, Severe acute respiratory syndrome coronavirus 2
  REGION 1..9: note = Table A: HLA-A*02:05H HLA-A*02:02H
PISEHDYQI

SEQ ID NO: 7341 - protein, 9 aa, Severe acute respiratory syndrome coronavirus 2
  REGION 1..9: note = Table A: HLA-B*38:02H HLA-B*39:01M
EHDYQIGGY

SEQ ID NO: 7342 - protein, 9 aa, Severe acute respiratory syndrome coronavirus 2
  REGION 1..9: note = Table A: HLA-A*11:01H HLA-A*11:02H HLA-A*26:03H HLA-A*34:01H HLA-A*34:02H HLA-A*66:01H
YQIGGYTEK

SEQ ID NO: 7343 - protein, 9 aa, Severe acute respiratory syndrome coronavirus 2
  REGION 1..9: note = Table A: HLA-B*58:01H HLA-B*53:01M HLA-B*57:03H HLA-B*13:01H
QIGGYTEKW

SEQ ID NO: 7344 - protein, 9 aa, Severe acute respiratory syndrome coronavirus 2
  REGION 1..9: note = Table A: HLA-A*02:11H HLA-A*68:02H
YTEKWESGV

SEQ ID NO: 7345 - protein, 9 aa, Severe acute respiratory syndrome coronavirus 2
  REGION 1..9: note = Table A: HLA-B*49:01H
WESGVKDCV

SEQ ID NO: 7346 - protein, 9 aa, Severe acute respiratory syndrome coronavirus 2
  REGION 1..9: note = Table A: HLA-B*58:01M HLA-A*36:01H HLA-A*29:02H HLA-A*01:01M HLA-A*30:02M HLA-A*34:02H HLA-B*35:07H HLA-B*38:02M HLA-B*15:02H
HSYFTSDYY

SEQ ID NO: 7347 - protein, 9 aa, Severe acute respiratory syndrome coronavirus 2
  REGION 1..9: note = Table A: HLA-A*24:02H HLA-A*24:07M HLA-A*23:01H
YFTSDYYQL

SEQ ID NO: 7348 - protein, 9 aa, Severe acute respiratory syndrome coronavirus 2
  REGION 1..9: note = Table A: HLA-C*16:01H HLA-C*16:04H HLA-A*36:01M HLA-C*06:02H HLA-A*26:01M HLA-A*29:01M HLA-A*29:02M HLA-A*01:01H HLA-C*07:01H HLA-A*30:02H HLA-C*15:05H HLA-C*12:03H HLA-A*34:02M HLA-B*35:01H HLA-B*35:07H HLA-B*38:02H
  REGION 1..9: note = CONT. FROM ABOVE: HLA-C*02:02H HLA-A*66:01H
FTSDYYQLY

SEQ ID NO: 7349 - protein, 9 aa, Severe acute respiratory syndrome coronavirus 2
  REGION 1..9: note = Table A: HLA-C*14:02H HLA-C*14:03H HLA-C*04:01H HLA-C*07:01H HLA-C*07:02M HLA-A*24:02H HLA-A*24:07M HLA-C*08:01H HLA-A*23:01M HLA-B*39:01H
YYQLYSTQL

SEQ ID NO: 7350 - protein, 9 aa, Severe acute respiratory syndrome coronavirus 2
  REGION 1..9: note = Table A: HLA-B*38:02H HLA-B*13:02H
QLYSTQLST

SEQ ID NO: 7351 - protein, 9 aa, Severe acute respiratory syndrome coronavirus 2
  REGION 1..9: note = Table A: HLA-B*38:02H HLA-B*13:02M
TQLSTDTGV

SEQ ID NO: 7352 - protein, 9 aa, Severe acute respiratory syndrome coronavirus 2
  REGION 1..9: note = Table A: HLA-A*11:303H HLA-B*46:01H
LSTDTGVEH

SEQ ID NO: 7353 - protein, 9 aa, Severe acute respiratory syndrome coronavirus 2
  REGION 1..9: note = Table A: HLA-A*01:01H HLA-C*04:03M HLA-A*02:11M HLA-A*68:02M HLA-A*02:05H HLA-A*02:06M HLA-A*02:07M HLA-A*02:01H HLA-C*08:02M HLA-B*38:02H HLA-C*05:01M
STDTGVEHV

SEQ ID NO: 7354 - protein, 9 aa, Severe acute respiratory syndrome coronavirus 2
  REGION 1..9: note = Table A: HLA-A*25:01H HLA-A*26:02H HLA-B*35:01H HLA-B*15:02H
DTGVEHVTF

SEQ ID NO: 7355 - protein, 9 aa, Severe acute respiratory syndrome coronavirus 2
  REGION 1..9: note = Table A: HLA-C*12:02H HLA-C*12:03H HLA-C*17:01H HLA-B*38:02H HLA-B*57:03H HLA-C*07:04M
TGVEHVTFF

SEQ ID NO: 7356 - protein, 9 aa, Severe acute respiratory syndrome coronavirus 2
  REGION 1..9: note = Table A: HLA-B*44:03H HLA-B*18:01H HLA-B*07:05H
VEHVTFFIY

SEQ ID NO: 7357 - protein, 9 aa, Severe acute respiratory syndrome coronavirus 2
  REGION 1..9: note = Table A: HLA-A*11:01H HLA-A*11:02H HLA-A*36:01H HLA-A*34:02M
HVTFFIYNK

SEQ ID NO: 7358 - protein, 9 aa, Severe acute respiratory syndrome coronavirus 2
  REGION 1..9: note = Table A: HLA-B*58:02H HLA-A*02:11H HLA-A*68:02H HLA-B*57:03M
VTFFIYNKI

SEQ ID NO: 7359 - protein, 9 aa, Severe acute respiratory syndrome coronavirus 2
  REGION 1..9: note = Table A: HLA-C*04:01H HLA-C*04:03H HLA-A*02:11H HLA-A*68:02H HLA-A*02:06M HLA-A*02:07H HLA-A*02:01H HLA-B*35:02H HLA-C*08:01H HLA-C*08:02H HLA-B*35:12H HLA-B*38:02H HLA-C*05:01H HLA-B*13:01H
IVDEPEEHV

SEQ ID NO: 7360 - protein, 9 aa, Severe acute respiratory syndrome coronavirus 2
  REGION 1..9: note = Table A: HLA-B*44:05H
DEPEEHVQI

SEQ ID NO: 7361 - protein, 9 aa, Severe acute respiratory syndrome coronavirus 2
  REGION 1..9: note = Table A: HLA-B*35:01H HLA-B*35:02H
EPEEHVQIH

SEQ ID NO: 7362 - protein, 9 aa, Severe acute respiratory syndrome coronavirus 2
  REGION 1..9: note = Table A: HLA-B*44:02M HLA-B*44:05H HLA-B*45:01M HLA-B*44:03M HLA-B*18:01H HLA-A*68:02H HLA-B*40:02M HLA-B*40:06H HLA-B*41:02M HLA-B*49:01H
EEHVQIHTI

SEQ ID NO: 7363 - protein, 9 aa, Severe acute respiratory syndrome coronavirus 2
  REGION 1..9: note = Table A: HLA-A*11:303H HLA-A*25:01H HLA-A*26:01M HLA-A*26:02M HLA-A*26:03M HLA-A*02:11H HLA-A*68:02M HLA-C*15:05H HLA-C*15:02H HLA-A*02:05M HLA-A*02:06M HLA-A*02:08M HLA-A*02:01H HLA-A*02:02H HLA-A*02:03M
  REGION 1..9: note = CONT. FROM ABOVE: HLA-A*34:01H HLA-B*38:02M HLA-B*39:01H HLA- B*13:02H HLA-A*66:01M
HTIDGSSGV

SEQ ID NO: 7364 - protein, 9 aa, Severe acute respiratory syndrome coronavirus 2
  REGION 1..9: note = Table A: HLA-C*08:02H HLA-B*39:01H
TIDGSSGVV

SEQ ID NO: 7365 - protein, 9 aa, Severe acute respiratory syndrome coronavirus 2
  REGION 1..9: note = Table A: HLA-A*68:02H HLA-C*08:03H
GSSGVVNPV

SEQ ID NO: 7366 - protein, 9 aa, Severe acute respiratory syndrome coronavirus 2
  REGION 1..9: note = Table A: HLA-B*58:01H HLA-A*11:303H HLA-B*35:03H HLA-C*15:05M HLA-B*35:01H HLA-B*40:02H HLA-B*07:05H HLA-B*57:03H HLA-C*07:04H
SSGVVNPVM

SEQ ID NO: 7367 - protein, 9 aa, Severe acute respiratory syndrome coronavirus 2
  REGION 1..9: note = Table A: HLA-A*02:11H HLA-A*68:02H HLA-C*15:05H HLA-A*02:05H HLA-A*02:06H HLA-A*02:07H HLA-A*02:08H HLA-C*08:01H HLA-B*38:02H
VVNPVMEPI

SEQ ID NO: 7368 - protein, 9 aa, Severe acute respiratory syndrome coronavirus 2
  REGION 1..9: note = Table A: HLA-B*35:03H HLA-B*35:02M HLA-B*35:08H HLA-B*35:12H
EPIYDEPTT

SEQ ID NO: 7369 - protein, 9 aa, Severe acute respiratory syndrome coronavirus 2
  REGION 1..9: note = Table A: HLA-C*04:01H
IYDEPTTTT

SEQ ID NO: 7370 - protein, 9 aa, Severe acute respiratory syndrome coronavirus 2
  REGION 1..9: note = Table A: HLA-B*51:01H HLA-B*07:05M HLA-B*49:01H
DEPTTTTSV

SEQ ID NO: 7371 - protein, 9 aa, Severe acute respiratory syndrome coronavirus 2
  REGION 1..9: note = Table A: HLA-A*68:02H HLA-C*15:05H HLA-C*08:03H
PTTTTSVPL

SEQ ID NO: 7372 - protein, 10 aa, Severe acute respiratory syndrome coronavirus 2
  REGION 1..10: note = Table A: HLA-A*02:03H
FMRIFTIGTV

SEQ ID NO: 7373 - protein, 10 aa, Severe acute respiratory syndrome coronavirus 2
  REGION 1..10: note = Table A: HLA-B*48:01H HLA-B*58:02H HLA-A*74:01H HLA-A*02:11M HLA-A*68:02H HLA-C*15:05H HLA-C*15:02H HLA-A*02:04H HLA-A*02:05M HLA-A*02:08H HLA-A*02:02M HLA-A*02:03H HLA-C*08:01H HLA-C*08:03H HLA-A*32:01M HLA-B*40:02H
  REGION 1..10: note = CONT. FROM ABOVE: HLA-B*40:06H HLA-B*15:01H HLA-B*57:03M HLA- B*13:01H HLA-B*13:02H
RIFTIGTVTL

SEQ ID NO: 7374 - protein, 10 aa, Severe acute respiratory syndrome coronavirus 2
  REGION 1..10: note = Table A: HLA-A*34:02H
FTIGTVTLKQ

SEQ ID NO: 7375 - protein, 10 aa, Severe acute respiratory syndrome coronavirus 2
  REGION 1..10: note = Table A: HLA-C*08:03H
GTVTLKQGEI

SEQ ID NO: 7376 - protein, 10 aa, Severe acute respiratory syndrome coronavirus 2
  REGION 1..10: note = Table A: HLA-A*02:02H HLA-A*02:03H
TLKQGEIKDA

SEQ ID NO: 7377 - protein, 10 aa, Severe acute respiratory syndrome coronavirus 2
  REGION 1..10: note = Table A: HLA-A*25:01M HLA-A*26:01M HLA-A*26:02H HLA-A*26:03M HLA-A*34:01H
EIKDATPSDF

SEQ ID NO: 7378 - protein, 10 aa, Severe acute respiratory syndrome coronavirus 2
  REGION 1..10: note = Table A: HLA-A*68:02H
DATPSDFVRA

SEQ ID NO: 7379 - protein, 10 aa, Severe acute respiratory syndrome coronavirus 2
  REGION 1..10: note = Table A: HLA-B*42:01H HLA-B*56:01H HLA-B*55:02H HLA-A*68:02H HLA-C*15:05M HLA-B*55:01H HLA-B*39:06H HLA-B*54:01M HLA-B*07:02M HLA-B*07:04M HLA-B*07:05H HLA-B*50:01H
TPSDFVRATA

SEQ ID NO: 7380 - protein, 10 aa, Severe acute respiratory syndrome coronavirus 2
  REGION 1..10: note = Table A: HLA-B*56:01H HLA-B*55:02H
RATATIPIQA

SEQ ID NO: 7381 - protein, 10 aa, Severe acute respiratory syndrome coronavirus 2
  REGION 1..10: note = Table A: HLA-B*56:01H HLA-B*55:02M HLA-A*68:02H HLA-B*51:01H HLA-B*54:01M
LPFGWLIVGV

SEQ ID NO: 7382 - protein, 10 aa, Severe acute respiratory syndrome coronavirus 2
  REGION 1..10: note = Table A: HLA-B*55:02H HLA-B*54:01H
VALLAVFQSA

SEQ ID NO: 7383 - protein, 10 aa, Severe acute respiratory syndrome coronavirus 2
  REGION 1..10: note = Table A: HLA-A*03:01H HLA-A*03:02H
LLAVFQSASK

SEQ ID NO: 7384 - protein, 10 aa, Severe acute respiratory syndrome coronavirus 2
  REGION 1..10: note = Table A: HLA-A*02:02H HLA-B*38:02H HLA-B*13:01H
FQSASKIITL

SEQ ID NO: 7385 - protein, 10 aa, Severe acute respiratory syndrome coronavirus 2
  REGION 1..10: note = Table A: HLA-A*03:01H HLA-A*03:02H HLA-A*11:01M HLA-A*11:02H HLA-A*68:01H HLA-A*34:02H HLA-C*07:27H
QSASKIITLK

SEQ ID NO: 7386 - protein, 10 aa, Severe acute respiratory syndrome coronavirus 2
  REGION 1..10: note = Table A: HLA-A*03:02H HLA-A*11:01H HLA-A*11:02H HLA-A*68:01H HLA-A*34:02H
SASKIITLKK

SEQ ID NO: 7387 - protein, 10 aa, Severe acute respiratory syndrome coronavirus 2
  REGION 1..10: note = Table A: HLA-B*15:02H
NLLLLFVTVY

SEQ ID NO: 7388 - protein, 10 aa, Severe acute respiratory syndrome coronavirus 2
  REGION 1..10: note = Table A: HLA-A*02:02H
LLFVTVYSHL

SEQ ID NO: 7389 - protein, 10 aa, Severe acute respiratory syndrome coronavirus 2
  REGION 1..10: note = Table A: HLA-A*24:07H
LFVTVYSHLL

SEQ ID NO: 7390 - protein, 10 aa, Severe acute respiratory syndrome coronavirus 2
  REGION 1..10: note = Table A: HLA-C*15:02H
VTVYSHLLLV

SEQ ID NO: 7391 - protein, 10 aa, Severe acute respiratory syndrome coronavirus 2
  REGION 1..10: note = Table A: HLA-B*55:02H HLA-B*55:01H
TVYSHLLLVA

SEQ ID NO: 7392 - protein, 10 aa, Severe acute respiratory syndrome coronavirus 2
  REGION 1..10: note = Table A: HLA-B*55:02H
VYSHLLLVAA

SEQ ID NO: 7393 - protein, 10 aa, Severe acute respiratory syndrome coronavirus 2
  REGION 1..10: note = Table A: HLA-B*38:02H
SHLLLVAAGL

SEQ ID NO: 7394 - protein, 10 aa, Severe acute respiratory syndrome coronavirus 2
  REGION 1..10: note = Table A: HLA-A*36:01H HLA-A*29:02H
GLEAPFLYLY

SEQ ID NO: 7395 - protein, 10 aa, Severe acute respiratory syndrome coronavirus 2
  REGION 1..10: note = Table A: HLA-B*45:01H HLA-B*50:01H
LEAPFLYLYA

SEQ ID NO: 7396 - protein, 10 aa, Severe acute respiratory syndrome coronavirus 2
  REGION 1..10: note = Table A: HLA-A*02:11H HLA-A*02:04H
FLQSINFVRI

SEQ ID NO: 7397 - protein, 10 aa, Severe acute respiratory syndrome coronavirus 2
  REGION 1..10: note = Table A: HLA-A*74:01H
SINFVRIIMR

SEQ ID NO: 7398 - protein, 10 aa, Severe acute respiratory syndrome coronavirus 2
  REGION 1..10: note = Table A: HLA-A*36:01H HLA-A*30:02H
KNPLLYDANY

SEQ ID NO: 7399 - protein, 10 aa, Severe acute respiratory syndrome coronavirus 2
  REGION 1..10: note = Table A: HLA-A*68:02H
YDYCIPYNSV

SEQ ID NO: 7400 - protein, 10 aa, Severe acute respiratory syndrome coronavirus 2
  REGION 1..10: note = Table A: HLA-B*56:01H HLA-B*55:02H HLA-C*15:05H HLA-B*55:01H HLA-B*51:01H HLA-B*54:01H HLA-B*07:02H HLA-B*07:05M
IPYNSVTSSI

SEQ ID NO: 7401 - protein, 10 aa, Severe acute respiratory syndrome coronavirus 2
  REGION 1..10: note = Table A: HLA-A*68:02H
VTSSIVITSG

SEQ ID NO: 7402 - protein, 10 aa, Severe acute respiratory syndrome coronavirus 2
  REGION 1..10: note = Table A: HLA-A*36:01M HLA-A*01:01H HLA-A*30:02H HLA-A*68:02H
TTSPISEHDY

SEQ ID NO: 7403 - protein, 10 aa, Severe acute respiratory syndrome coronavirus 2
  REGION 1..10: note = Table A: HLA-B*53:01H HLA-B*35:03M HLA-C*15:05H HLA-B*35:02M HLA-B*35:12M
SPISEHDYQI

SEQ ID NO: 7404 - protein, 10 aa, Severe acute respiratory syndrome coronavirus 2
  REGION 1..10: note = Table A: HLA-B*44:02H HLA-B*44:05H HLA-B*44:03M HLA-B*18:01H
SEHDYQIGGY

SEQ ID NO: 7405 - protein, 10 aa, Severe acute respiratory syndrome coronavirus 2
  REGION 1..10: note = Table A: HLA-B*39:01H
EHDYQIGGYT

SEQ ID NO: 7406 - protein, 10 aa, Severe acute respiratory syndrome coronavirus 2
  REGION 1..10: note = Table A: HLA-A*33:03H
DYQIGGYTEK

SEQ ID NO: 7407 - protein, 10 aa, Severe acute respiratory syndrome coronavirus 2
  REGION 1..10: note = Table A: HLA-B*58:01H HLA-B*57:01H HLA-A*25:01M HLA-B*44:03H HLA-B*27:02H HLA-B*53:01M HLA-B*15:13M HLA-B*38:01H HLA-B*38:02M HLA-B*15:01H HLA-B*57:03H HLA-B*13:01H
YQIGGYTEKW

SEQ ID NO: 7408 - protein, 10 aa, Severe acute respiratory syndrome coronavirus 2
  REGION 1..10: note = Table A: HLA-B*38:02H
LHSYFTSDYY

SEQ ID NO: 7409 - protein, 10 aa, Severe acute respiratory syndrome coronavirus 2
  REGION 1..10: note = Table A: HLA-A*02:02H HLA-A*24:02H HLA-A*24:07H HLA-A*23:01H
SYFTSDYYQL

SEQ ID NO: 7410 - protein, 10 aa, Severe acute respiratory syndrome coronavirus 2
  REGION 1..10: note = Table A: HLA-A*29:01H HLA-A*29:02M
YFTSDYYQLY

SEQ ID NO: 7411 - protein, 10 aa, Severe acute respiratory syndrome coronavirus 2
  REGION 1..10: note = Table A: HLA-A*33:03H
DYYQLYSTQL

SEQ ID NO: 7412 - protein, 10 aa, Severe acute respiratory syndrome coronavirus 2
  REGION 1..10: note = Table A: HLA-A*68:02H
LSTDTGVEHV

SEQ ID NO: 7413 - protein, 10 aa, Severe acute respiratory syndrome coronavirus 2
  REGION 1..10: note = Table A: HLA-B*44:05M HLA-B*18:01H HLA-B*35:01H HLA-C*08:03H HLA-B*38:01H HLA-B*38:02H HLA-B*39:01H
TDTGVEHVTF

SEQ ID NO: 7414 - protein, 10 aa, Severe acute respiratory syndrome coronavirus 2
  REGION 1..10: note = Table A: HLA-A*02:11H HLA-A*02:05H HLA-A*02:06H HLA-A*02:08H HLA-A*02:02H
KIVDEPEEHV

SEQ ID NO: 7415 - protein, 10 aa, Severe acute respiratory syndrome coronavirus 2
  REGION 1..10: note = Table A: HLA-B*38:02H HLA-B*39:01H
EHVQIHTIDG

SEQ ID NO: 7416 - protein, 10 aa, Severe acute respiratory syndrome coronavirus 2
  REGION 1..10: note = Table A: HLA-A*26:01H HLA-A*68:02H HLA-A*66:01H
HTIDGSSGVV

SEQ ID NO: 7417 - protein, 10 aa, Severe acute respiratory syndrome coronavirus 2
  REGION 1..10: note = Table A: HLA-A*68:02H
DGSSGVVNPV

SEQ ID NO: 7418 - protein, 10 aa, Severe acute respiratory syndrome coronavirus 2
  REGION 1..10: note = Table A: HLA-C*15:05H HLA-C*08:03H
GSSGVVNPVM

SEQ ID NO: 7419 - protein, 10 aa, Severe acute respiratory syndrome coronavirus 2
  REGION 1..10: note = Table A: HLA-A*30:02H
VVNPVMEPIY

SEQ ID NO: 7420 - protein, 10 aa, Severe acute respiratory syndrome coronavirus 2
  REGION 1..10: note = Table A: HLA-A*68:02H HLA-B*35:03H HLA-C*15:05H
EPTTTTSVPL

SEQ ID NO: 7421 - protein, 11 aa, Severe acute respiratory syndrome coronavirus 2
  REGION 1..11: note = Table A: HLA-B*27:05H
MRIFTIGTVTL

SEQ ID NO: 7422 - protein, 11 aa, Severe acute respiratory syndrome coronavirus 2
  REGION 1..11: note = Table A: HLA-A*74:01M HLA-A*03:01M HLA-A*03:02M HLA-A*11:01H HLA-A*11:02M HLA-A*36:01H HLA-A*30:01H HLA-A*30:02H
RIFTIGTVTLK

SEQ ID NO: 7423 - protein, 11 aa, Severe acute respiratory syndrome coronavirus 2
  REGION 1..11: note = Table A: HLA-A*66:01H
FTIGTVTLKQG

SEQ ID NO: 7424 - protein, 11 aa, Severe acute respiratory syndrome coronavirus 2
  REGION 1..11: note = Table A: HLA-B*44:05M HLA-B*27:02H HLA-B*40:01H HLA-B*40:02H
GEIKDATPSDF

SEQ ID NO: 7425 - protein, 11 aa, Severe acute respiratory syndrome coronavirus 2
  REGION 1..11: note = Table A: HLA-A*68:02M
EIKDATPSDFV

SEQ ID NO: 7426 - protein, 11 aa, Severe acute respiratory syndrome coronavirus 2
  REGION 1..11: note = Table A: HLA-B*55:02H HLA-B*07:02H
TPSDFVRATAT

SEQ ID NO: 7427 - protein, 11 aa, Severe acute respiratory syndrome coronavirus 2
  REGION 1..11: note = Table A: HLA-B*53:01M
IPIQASLPFGW

SEQ ID NO: 7428 - protein, 11 aa, Severe acute respiratory syndrome coronavirus 2
  REGION 1..11: note = Table A: HLA-A*02:11H HLA-A*68:02H HLA-A*02:04H HLA-A*02:07H
SLPFGWLIVGV

SEQ ID NO: 7429 - protein, 11 aa, Severe acute respiratory syndrome coronavirus 2
  REGION 1..11: note = Table A: HLA-B*55:02H HLA-B*54:01H
LPFGWLIVGVA

SEQ ID NO: 7430 - protein, 11 aa, Severe acute respiratory syndrome coronavirus 2
  REGION 1..11: note = Table A: HLA-A*03:02H
ALLAVFQSASK

SEQ ID NO: 7431 - protein, 11 aa, Severe acute respiratory syndrome coronavirus 2
  REGION 1..11: note = Table A: HLA-C*14:02M HLA-C*14:03M HLA-A*24:02M HLA-A*24:07H HLA-A*23:01M
VFQSASKIITL

SEQ ID NO: 7432 - protein, 11 aa, Severe acute respiratory syndrome coronavirus 2
  REGION 1..11: note = Table A: HLA-A*74:01H
KIITLKKRWQL

SEQ ID NO: 7433 - protein, 11 aa, Severe acute respiratory syndrome coronavirus 2
  REGION 1..11: note = Table A: HLA-A*02:02H
LLFVTVYSHLL

SEQ ID NO: 7434 - protein, 11 aa, Severe acute respiratory syndrome coronavirus 2
  REGION 1..11: note = Table A: HLA-B*56:01H HLA-B*55:02M HLA-B*55:01H HLA-A*02:05H HLA-A*02:08H HLA-B*54:01H
TVYSHLLLVAA

SEQ ID NO: 7435 - protein, 11 aa, Severe acute respiratory syndrome coronavirus 2
  REGION 1..11: note = Table A: HLA-A*29:02H
VAAGLEAPFLY

SEQ ID NO: 7436 - protein, 11 aa, Severe acute respiratory syndrome coronavirus 2
  REGION 1..11: note = Table A: HLA-A*24:07H
YFLQSINFVRI

SEQ ID NO: 7437 - protein, 11 aa, Severe acute respiratory syndrome coronavirus 2
  REGION 1..11: note = Table A: HLA-A*74:01H
QSINFVRIIMR

SEQ ID NO: 7438 - protein, 11 aa, Severe acute respiratory syndrome coronavirus 2
  REGION 1..11: note = Table A: HLA-B*55:02H HLA-C*15:05H HLA-B*51:01H
IPYNSVTSSIV

SEQ ID NO: 7439 - protein, 11 aa, Severe acute respiratory syndrome coronavirus 2
  REGION 1..11: note = Table A: HLA-A*24:07H
PYNSVTSSIVI

SEQ ID NO: 7440 - protein, 11 aa, Severe acute respiratory syndrome coronavirus 2
  REGION 1..11: note = Table A: HLA-A*02:08H
IVITSGDGTTS

SEQ ID NO: 7441 - protein, 11 aa, Severe acute respiratory syndrome coronavirus 2
  REGION 1..11: note = Table A: HLA-A*36:01H HLA-A*30:02H
GTTSPISEHDY

SEQ ID NO: 7442 - protein, 11 aa, Severe acute respiratory syndrome coronavirus 2
  REGION 1..11: note = Table A: HLA-A*68:02H
TTSPISEHDYQ

SEQ ID NO: 7443 - protein, 11 aa, Severe acute respiratory syndrome coronavirus 2
  REGION 1..11: note = Table A: HLA-A*36:01H HLA-A*01:01H
ISEHDYQIGGY

SEQ ID NO: 7444 - protein, 11 aa, Severe acute respiratory syndrome coronavirus 2
  REGION 1..11: note = Table A: HLA-B*27:02H HLA-A*34:02H
HDYQIGGYTEK

SEQ ID NO: 7445 - protein, 11 aa, Severe acute respiratory syndrome coronavirus 2
  REGION 1..11: note = Table A: HLA-B*40:01H
WESGVKDCVVL

SEQ ID NO: 7446 - protein, 11 aa, Severe acute respiratory syndrome coronavirus 2
  REGION 1..11: note = Table A: HLA-A*30:02M
GVKDCVVLHSY

SEQ ID NO: 7447 - protein, 11 aa, Severe acute respiratory syndrome coronavirus 2
  REGION 1..11: note = Table A: HLA-A*30:02H
VLHSYFTSDYY

SEQ ID NO: 7448 - protein, 11 aa, Severe acute respiratory syndrome coronavirus 2
  REGION 1..11: note = Table A: HLA-A*29:02M
SYFTSDYYQLY

SEQ ID NO: 7449 - protein, 11 aa, Severe acute respiratory syndrome coronavirus 2
  REGION 1..11: note = Table A: HLA-A*02:11H HLA-A*02:02M
QLSTDTGVEHV

SEQ ID NO: 7450 - protein, 11 aa, Severe acute respiratory syndrome coronavirus 2
  REGION 1..11: note = Table A: HLA-B*58:01H HLA-B*44:05H HLA-B*57:01H HLA-C*04:03M HLA-C*15:05H HLA-B*35:08H HLA-C*08:01H HLA-C*08:02H HLA-B*38:01H HLA-B*38:02H HLA-B*57:03M HLA-C*05:01H
STDTGVEHVTF

SEQ ID NO: 7451 - protein, 11 aa, Severe acute respiratory syndrome coronavirus 2
  REGION 1..11: note = Table A: HLA-B*38:02H
EHVTFFIYNKI

SEQ ID NO: 7452 - protein, 11 aa, Severe acute respiratory syndrome coronavirus 2
  REGION 1..11: note = Table A: HLA-C*04:03M HLA-A*02:11M HLA-A*02:06H HLA-A*02:07H HLA-C*08:01H HLA-C*08:02M HLA-B*38:02H HLA-C*05:01M
IVDEPEEHVQI

SEQ ID NO: 7453 - protein, 11 aa, Severe acute respiratory syndrome coronavirus 2
  REGION 1..11: note = Table A: HLA-C*04:01H HLA-C*04:03H
IYDEPTTTTSV

SEQ ID NO: 7454 - protein, 11 aa, Severe acute respiratory syndrome coronavirus 2
  REGION 1..11: note = Table A: HLA-B*44:05H HLA-C*07:01H HLA-A*68:02H HLA-C*08:03H HLA-B*07:05H
DEPTTTTSVPL

SEQ ID NO: 7455 - protein, 8 aa, Severe acute respiratory syndrome coronavirus 2
  REGION 1..8: note = Table A: HLA-C*08:01H
YSFVSEET

SEQ ID NO: 7456 - protein, 8 aa, Severe acute respiratory syndrome coronavirus 2
  REGION 1..8: note = Table A: HLA-C*08:02H
VSEETGTL

SEQ ID NO: 7457 - protein, 8 aa, Severe acute respiratory syndrome coronavirus 2
  REGION 1..8: note = Table A: HLA-B*49:01H
SEETGTLI

SEQ ID NO: 7458 - protein, 8 aa, Severe acute respiratory syndrome coronavirus 2
  REGION 1..8: note = Table A: HLA-B*14:01H
TLIVNSVL

SEQ ID NO: 7459 - protein, 8 aa, Severe acute respiratory syndrome coronavirus 2
  REGION 1..8: note = Table A: HLA-A*02:04H
FLAFVVFL

SEQ ID NO: 7460 - protein, 8 aa, Severe acute respiratory syndrome coronavirus 2
  REGION 1..8: note = Table A: HLA-C*15:05H HLA-C*08:01H
VVFLLVTL

SEQ ID NO: 7461 - protein, 8 aa, Severe acute respiratory syndrome coronavirus 2
  REGION 1..8: note = Table A: HLA-C*15:05H HLA-A*02:04H HLA-B*14:01H HLA-B*38:02H
TLAILTAL

SEQ ID NO: 7462 - protein, 8 aa, Severe acute respiratory syndrome coronavirus 2
  REGION 1..8: note = Table A: HLA-A*34:01H HLA-A*66:01H
LAILTALR

SEQ ID NO: 7463 - protein, 8 aa, Severe acute respiratory syndrome coronavirus 2
  REGION 1..8: note = Table A: HLA-C*15:05H
AILTALRL

SEQ ID NO: 7464 - protein, 8 aa, Severe acute respiratory syndrome coronavirus 2
  REGION 1..8: note = Table A: HLA-B*38:02H HLA-B*15:02H
TALRLCAY

SEQ ID NO: 7465 - protein, 8 aa, Severe acute respiratory syndrome coronavirus 2
  REGION 1..8: note = Table A: HLA-A*03:01H HLA-A*36:01H
IVNVSLVK

SEQ ID NO: 7466 - protein, 8 aa, Severe acute respiratory syndrome coronavirus 2
  REGION 1..8: note = Table A: HLA-B*58:02H HLA-C*16:01M HLA-B*57:03H
VSLVKPSF

SEQ ID NO: 7467 - protein, 8 aa, Severe acute respiratory syndrome coronavirus 2
  REGION 1..8: note = Table A: HLA-A*02:11H
LVKPSFYV

SEQ ID NO: 7468 - protein, 8 aa, Severe acute respiratory syndrome coronavirus 2
  REGION 1..8: note = Table A: HLA-B*15:03H
VKPSFYVY

SEQ ID NO: 7469 - protein, 8 aa, Severe acute respiratory syndrome coronavirus 2
  REGION 1..8: note = Table A: HLA-B*58:02H
SSRVPDLL

SEQ ID NO: 7470 - protein, 8 aa, Severe acute respiratory syndrome coronavirus 2
  REGION 1..8: note = Table A: HLA-C*06:02H
SRVPDLLV

SEQ ID NO: 7471 - protein, 9 aa, Severe acute respiratory syndrome coronavirus 2
  REGION 1..9: note = Table A: HLA-A*11:303H HLA-A*26:03H HLA-C*03:04H HLA-B*35:03H HLA-A*02:05H HLA-A*02:02H HLA-A*02:03H HLA-A*34:01H HLA-B*35:02M HLA-C*08:01H HLA-C*08:02H HLA-B*35:12M HLA-B*38:02H HLA-B*15:02H HLA-B*39:01H
  REGION 1..9: note = CONT. FROM ABOVE: HLA-A*66:01H
FVSEETGTL

SEQ ID NO: 7472 - protein, 9 aa, Severe acute respiratory syndrome coronavirus 2
  REGION 1..9: note = Table A: HLA-B*58:01H HLA-C*04:03H HLA-C*08:02H HLA-C*05:01H HLA-B*49:01H
VSEETGTLI

SEQ ID NO: 7473 - protein, 9 aa, Severe acute respiratory syndrome coronavirus 2
  REGION 1..9: note = Table A: HLA-B*45:01M HLA-B*40:01H HLA-B*40:02H HLA-B*41:02H HLA-B*49:01H
SEETGTLIV

SEQ ID NO: 7474 - protein, 9 aa, Severe acute respiratory syndrome coronavirus 2
  REGION 1..9: note = Table A: HLA-C*12:05H HLA-A*68:02H HLA-C*15:05H HLA-B*51:01H HLA-B*38:02H HLA-B*39:06H HLA-B*13:02H
TGTLIVNSV

SEQ ID NO: 7475 - protein, 9 aa, Severe acute respiratory syndrome coronavirus 2
  REGION 1..9: note = Table A: HLA-A*02:01H HLA-A*02:02H HLA-B*38:02H
TLIVNSVLL

SEQ ID NO: 7476 - protein, 9 aa, Severe acute respiratory syndrome coronavirus 2
  REGION 1..9: note = Table A: HLA-B*58:01H HLA-A*02:11H HLA-A*68:02H HLA-C*15:05H HLA-C*15:02H HLA-A*02:04M HLA-A*02:07H HLA-C*08:01H HLA-B*38:02H HLA-B*13:02H HLA-C*07:04H
IVNSVLLFL

SEQ ID NO: 7477 - protein, 9 aa, Severe acute respiratory syndrome coronavirus 2
  REGION 1..9: note = Table A: HLA-A*68:02H HLA-A*02:04H
SVLLFLAFV

SEQ ID NO: 7478 - protein, 9 aa, Severe acute respiratory syndrome coronavirus 2
  REGION 1..9: note = Table A: HLA-A*02:04M HLA-A*02:02M
FLAFVVFLL

SEQ ID NO: 7479 - protein, 9 aa, Severe acute respiratory syndrome coronavirus 2
  REGION 1..9: note = Table A: HLA-A*68:02H HLA-C*15:02H
LAFVVFLLV

SEQ ID NO: 7480 - protein, 9 aa, Severe acute respiratory syndrome coronavirus 2
  REGION 1..9: note = Table A: HLA-A*02:11H HLA-A*68:02M HLA-A*02:04M HLA-A*02:05H HLA-A*02:06H HLA-C*17:01H HLA-C*08:01M HLA-B*38:02H HLA-B*40:06H
FVVFLLVTL

SEQ ID NO: 7481 - protein, 9 aa, Severe acute respiratory syndrome coronavirus 2
  REGION 1..9: note = Table A: HLA-C*14:03H HLA-A*24:07H
VFLLVTLAI

SEQ ID NO: 7482 - protein, 9 aa, Severe acute respiratory syndrome coronavirus 2
  REGION 1..9: note = Table A: HLA-A*02:04H
FLLVTLAIL

SEQ ID NO: 7483 - protein, 9 aa, Severe acute respiratory syndrome coronavirus 2
  REGION 1..9: note = Table A: HLA-B*54:01H
LVTLAILTA

SEQ ID NO: 7484 - protein, 9 aa, Severe acute respiratory syndrome coronavirus 2
  REGION 1..9: note = Table A: HLA-A*11:303H HLA-B*46:01H HLA-C*03:03H HLA-A*02:11M HLA-C*03:04H HLA-A*68:02H HLA-C*15:05M HLA-C*15:02H HLA-A*02:04M HLA-A*02:06H HLA-B*14:01H HLA-A*02:01H HLA-A*34:02H HLA-C*08:01H HLA-B*38:02H
  REGION 1..9: note = CONT. FROM ABOVE: HLA-B*07:05H HLA-B*57:03M
VTLAILTAL

SEQ ID NO: 7485 - protein, 9 aa, Severe acute respiratory syndrome coronavirus 2
  REGION 1..9: note = Table A: HLA-A*74:01M HLA-A*34:01H
TLAILTALR

SEQ ID NO: 7486 - protein, 9 aa, Severe acute respiratory syndrome coronavirus 2
  REGION 1..9: note = Table A: HLA-C*03:03H HLA-C*03:04H HLA-C*17:01H
LAILTALRL

SEQ ID NO: 7487 - protein, 9 aa, Severe acute respiratory syndrome coronavirus 2
  REGION 1..9: note = Table A: HLA-C*16:01M HLA-B*46:01H HLA-C*03:02H
LTALRLCAY

SEQ ID NO: 7488 - protein, 9 aa, Severe acute respiratory syndrome coronavirus 2
  REGION 1..9: note = Table A: HLA-A*11:303H
CCNIVNVSL

SEQ ID NO: 7489 - protein, 9 aa, Severe acute respiratory syndrome coronavirus 2
  REGION 1..9: note = Table A: HLA-A*34:02M HLA-A*66:01H
NIVNVSLVK

SEQ ID NO: 7490 - protein, 9 aa, Severe acute respiratory syndrome coronavirus 2
  REGION 1..9: note = Table A: HLA-B*35:01H HLA-B*15:02H HLA-B*07:05H
NVSLVKPSF

SEQ ID NO: 7491 - protein, 9 aa, Severe acute respiratory syndrome coronavirus 2
  REGION 1..9: note = Table A: HLA-B*58:01H HLA-B*58:02H HLA-C*16:01H HLA-A*36:01H HLA-A*30:02H HLA-B*57:03H
VSLVKPSFY

SEQ ID NO: 7492 - protein, 9 aa, Severe acute respiratory syndrome coronavirus 2
  REGION 1..9: note = Table A: HLA-A*02:11M HLA-A*68:02H HLA-A*02:04M HLA-A*02:06H HLA-A*02:01H HLA-A*02:02H HLA-B*38:02H HLA-B*13:02H
SLVKPSFYV

SEQ ID NO: 7493 - protein, 9 aa, Severe acute respiratory syndrome coronavirus 2
  REGION 1..9: note = Table A: HLA-B*58:02H HLA-C*16:01H HLA-B*57:01H HLA-B*46:01M HLA-A*29:01H HLA-A*29:02M HLA-C*03:02M HLA-A*30:01H HLA-A*30:02M HLA-C*12:02H HLA-B*35:07H HLA-B*38:02M HLA-B*07:04H HLA-B*15:01M HLA-B*15:02M HLA-C*02:02H
  REGION 1..9: note = CONT. FROM ABOVE: HLA-B*15:11H
LVKPSFYVY

SEQ ID NO: 7494 - protein, 9 aa, Severe acute respiratory syndrome coronavirus 2
  REGION 1..9: note = Table A: HLA-A*68:02H
PSFYVYSRV

SEQ ID NO: 7495 - protein, 9 aa, Severe acute respiratory syndrome coronavirus 2
  REGION 1..9: note = Table A: HLA-A*30:01H
SFYVYSRVK

SEQ ID NO: 7496 - protein, 9 aa, Severe acute respiratory syndrome coronavirus 2
  REGION 1..9: note = Table A: HLA-B*08:01M HLA-C*03:03H HLA-A*02:11M HLA-C*03:04H HLA-A*68:02H HLA-B*14:02H HLA-C*12:03H HLA-C*15:02H HLA-A*02:04H HLA-A*02:05H HLA-A*02:02M HLA-A*02:03M HLA-A*34:01H HLA-A*34:02H HLA-C*17:01M HLA-B*38:02H
  REGION 1..9: note = CONT. FROM ABOVE: HLA-B*07:04M HLA-A*66:01H
YVYSRVKNL

SEQ ID NO: 7497 - protein, 9 aa, Severe acute respiratory syndrome coronavirus 2
  REGION 1..9: note = Table A: HLA-A*74:01H HLA-A*33:03H HLA-A*30:02H HLA-A*31:01M
RVKNLNSSR

SEQ ID NO: 7498 - protein, 9 aa, Severe acute respiratory syndrome coronavirus 2
  REGION 1..9: note = Table A: HLA-A*68:02H
NSSRVPDLL

SEQ ID NO: 7499 - protein, 9 aa, Severe acute respiratory syndrome coronavirus 2
  REGION 1..9: note = Table A: HLA-B*58:02H HLA-A*30:01H HLA-A*68:02H HLA-C*15:05M HLA-C*15:02M HLA-B*52:01H HLA-C*08:01H HLA-B*38:02H HLA-B*07:04H HLA-B*57:03H HLA-B*13:02M HLA-B*49:01H
SSRVPDLLV

SEQ ID NO: 7500 - protein, 10 aa, Severe acute respiratory syndrome coronavirus 2
  REGION 1..10: note = Table A: HLA-A*68:02H HLA-A*02:05M HLA-A*02:06H HLA-A*02:02H HLA-B*38:02H
FVSEETGTLI

SEQ ID NO: 7501 - protein, 10 aa, Severe acute respiratory syndrome coronavirus 2
  REGION 1..10: note = Table A: HLA-A*68:02H
ETGTLIVNSV

SEQ ID NO: 7502 - protein, 10 aa, Severe acute respiratory syndrome coronavirus 2
  REGION 1..10: note = Table A: HLA-A*74:01H
VTLAILTALR

SEQ ID NO: 7503 - protein, 10 aa, Severe acute respiratory syndrome coronavirus 2
  REGION 1..10: note = Table A: HLA-A*02:02H
TLAILTALRL

SEQ ID NO: 7504 - protein, 10 aa, Severe acute respiratory syndrome coronavirus 2
  REGION 1..10: note = Table A: HLA-A*29:02H HLA-A*30:02H HLA-B*38:02H HLA-B*15:02H
SLVKPSFYVY

SEQ ID NO: 7505 - protein, 10 aa, Severe acute respiratory syndrome coronavirus 2
  REGION 1..10: note = Table A: HLA-B*27:05H
SRVKNLNSSR

SEQ ID NO: 7506 - protein, 10 aa, Severe acute respiratory syndrome coronavirus 2
  REGION 1..10: note = Table A: HLA-B*07:04H
RVKNLNSSRV

SEQ ID NO: 7507 - protein, 10 aa, Severe acute respiratory syndrome coronavirus 2
  REGION 1..10: note = Table A: HLA-A*68:02M HLA-C*15:05H HLA-C*15:02M HLA-B*13:02H
NSSRVPDLLV

SEQ ID NO: 7508 - protein, 11 aa, Severe acute respiratory syndrome coronavirus 2
  REGION 1..11: note = Table A: HLA-B*57:03H
GTLIVNSVLLF

SEQ ID NO: 7509 - protein, 11 aa, Severe acute respiratory syndrome coronavirus 2
  REGION 1..11: note = Table A: HLA-A*02:04H
TLIVNSVLLFL

SEQ ID NO: 7510 - protein, 11 aa, Severe acute respiratory syndrome coronavirus 2
  REGION 1..11: note = Table A: HLA-A*02:04H
LLVTLAILTAL

SEQ ID NO: 7511 - protein, 11 aa, Severe acute respiratory syndrome coronavirus 2
  REGION 1..11: note = Table A: HLA-B*57:03H
VTLAILTALRL

SEQ ID NO: 7512 - protein, 11 aa, Severe acute respiratory syndrome coronavirus 2
  REGION 1..11: note = Table A: HLA-B*57:03H
IVNVSLVKPSF

SEQ ID NO: 7513 - protein, 11 aa, Severe acute respiratory syndrome coronavirus 2
  REGION 1..11: note = Table A: HLA-A*74:01H
LVKPSFYVYSR

SEQ ID NO: 7514 - protein, 8 aa, Severe acute respiratory syndrome coronavirus 2
  REGION 1..8: note = Table A: HLA-B*51:01H
DSNGTITV

SEQ ID NO: 7515 - protein, 8 aa, Severe acute respiratory syndrome coronavirus 2
  REGION 1..8: note = Table A: HLA-A*11:303H HLA-C*15:05H HLA-A*02:05H HLA-C*08:03H HLA-B*40:02H HLA-B*39:01H
GTITVEEL

SEQ ID NO: 7516 - protein, 8 aa, Severe acute respiratory syndrome coronavirus 2
  REGION 1..8: note = Table A: HLA-A*02:11M HLA-A*02:04M HLA-A*02:02H
KLLEQWNL

SEQ ID NO: 7517 - protein, 8 aa, Severe acute respiratory syndrome coronavirus 2
  REGION 1..8: note = Table A: HLA-A*33:03H HLA-A*34:01H HLA-A*66:01H
FAYANRNR

SEQ ID NO: 7518 - protein, 8 aa, Severe acute respiratory syndrome coronavirus 2
  REGION 1..8: note = Table A: HLA-B*58:02M HLA-C*16:01H HLA-C*03:04H HLA-C*12:03H
YANRNRFL

SEQ ID NO: 7519 - protein, 8 aa, Severe acute respiratory syndrome coronavirus 2
  REGION 1..8: note = Table A: HLA-B*52:01H
FLYIIKLI

SEQ ID NO: 7520 - protein, 8 aa, Severe acute respiratory syndrome coronavirus 2
  REGION 1..8: note = Table A: HLA-C*17:01H
YIIKLIFL

SEQ ID NO: 7521 - protein, 8 aa, Severe acute respiratory syndrome coronavirus 2
  REGION 1..8: note = Table A: HLA-A*02:04H
WLLWPVTL

SEQ ID NO: 7522 - protein, 8 aa, Severe acute respiratory syndrome coronavirus 2
  REGION 1..8: note = Table A: HLA-A*02:11H HLA-A*02:01H
LLWPVTLA

SEQ ID NO: 7523 - protein, 8 aa, Severe acute respiratory syndrome coronavirus 2
  REGION 1..8: note = Table A: HLA-C*15:05H
WPVTLACF

SEQ ID NO: 7524 - protein, 8 aa, Severe acute respiratory syndrome coronavirus 2
  REGION 1..8: note = Table A: HLA-C*14:03H HLA-B*15:02H HLA-B*07:05H
CFVLAAVY

SEQ ID NO: 7525 - protein, 8 aa, Severe acute respiratory syndrome coronavirus 2
  REGION 1..8: note = Table A: HLA-A*66:01H
FVLAAVYR

SEQ ID NO: 7526 - protein, 8 aa, Severe acute respiratory syndrome coronavirus 2
  REGION 1..8: note = Table A: HLA-B*35:03H HLA-C*15:05H HLA-B*35:01H HLA-B*07:05H HLA-C*07:04H
TGGIAIAM

SEQ ID NO: 7527 - protein, 8 aa, Severe acute respiratory syndrome coronavirus 2
  REGION 1..8: note = Table A: HLA-B*39:06H
GGIAIAMA

SEQ ID NO: 7528 - protein, 8 aa, Severe acute respiratory syndrome coronavirus 2
  REGION 1..8: note = Table A: HLA-C*15:05H HLA-B*51:01H
IAIAMACL

SEQ ID NO: 7529 - protein, 8 aa, Severe acute respiratory syndrome coronavirus 2
  REGION 1..8: note = Table A: HLA-A*02:11H
LMWLSYFI

SEQ ID NO: 7530 - protein, 8 aa, Severe acute respiratory syndrome coronavirus 2
  REGION 1..8: note = Table A: HLA-A*33:03H
SYFIASFR

SEQ ID NO: 7531 - protein, 8 aa, Severe acute respiratory syndrome coronavirus 2
  REGION 1..8: note = Table A: HLA-A*24:07H
YFIASFRL

SEQ ID NO: 7532 - protein, 8 aa, Severe acute respiratory syndrome coronavirus 2
  REGION 1..8: note = Table A: HLA-C*03:02H
FIASFRLF

SEQ ID NO: 7533 - protein, 8 aa, Severe acute respiratory syndrome coronavirus 2
  REGION 1..8: note = Table A: HLA-A*74:01H HLA-A*11:02H HLA-A*31:01H
ASFRLFAR

SEQ ID NO: 7534 - protein, 8 aa, Severe acute respiratory syndrome coronavirus 2
  REGION 1..8: note = Table A: HLA-B*58:02H HLA-B*57:03H
RTRSMWSF

SEQ ID NO: 7535 - protein, 8 aa, Severe acute respiratory syndrome coronavirus 2
  REGION 1..8: note = Table A: HLA-B*42:01H HLA-B*35:03H HLA-C*15:05M HLA-B*07:02H HLA-B*07:04H HLA-B*07:05H
VPLHGTIL

SEQ ID NO: 7536 - protein, 8 aa, Severe acute respiratory syndrome coronavirus 2
  REGION 1..8: note = Table A: HLA-B*08:01H
TILTRPLL

SEQ ID NO: 7537 - protein, 8 aa, Severe acute respiratory syndrome coronavirus 2
  REGION 1..8: note = Table A: HLA-C*15:05M HLA-B*07:05H
RPLLESEL

SEQ ID NO: 7538 - protein, 8 aa, Severe acute respiratory syndrome coronavirus 2
  REGION 1..8: note = Table A: HLA-B*40:02H HLA-B*07:05H HLA-B*41:02H HLA-B*49:01M
SELVIGAV

SEQ ID NO: 7539 - protein, 8 aa, Severe acute respiratory syndrome coronavirus 2
  REGION 1..8: note = Table A: HLA-A*74:01H
VIGAVILR

SEQ ID NO: 7540 - protein, 8 aa, Severe acute respiratory syndrome coronavirus 2
  REGION 1..8: note = Table A: HLA-A*74:01H
VILRGHLR

SEQ ID NO: 7541 - protein, 8 aa, Severe acute respiratory syndrome coronavirus 2
  REGION 1..8: note = Table A: HLA-A*36:01H
IAGHHLGR

SEQ ID NO: 7542 - protein, 8 aa, Severe acute respiratory syndrome coronavirus 2
  REGION 1..8: note = Table A: HLA-B*51:01H
DLPKEITV

SEQ ID NO: 7543 - protein, 8 aa, Severe acute respiratory syndrome coronavirus 2
  REGION 1..8: note = Table A: HLA-B*56:01H HLA-B*55:02H HLA-B*55:01M HLA-B*39:06H HLA-B*54:01M
LPKEITVA

SEQ ID NO: 7544 - protein, 8 aa, Severe acute respiratory syndrome coronavirus 2
  REGION 1..8: note = Table A: HLA-A*33:03H HLA-A*26:03H HLA-A*68:01H HLA-A*34:01H HLA-A*66:01H
EITVATSR

SEQ ID NO: 7545 - protein, 8 aa, Severe acute respiratory syndrome coronavirus 2
  REGION 1..8: note = Table A: HLA-B*58:02H HLA-C*03:04H HLA-C*15:05H HLA-B*14:01H HLA-B*38:02H HLA-B*15:02H
TVATSRTL

SEQ ID NO: 7546 - protein, 8 aa, Severe acute respiratory syndrome coronavirus 2
  REGION 1..8: note = Table A: HLA-B*58:01H HLA-A*36:01M HLA-A*30:02H
ATSRTLSY

SEQ ID NO: 7547 - protein, 8 aa, Severe acute respiratory syndrome coronavirus 2
  REGION 1..8: note = Table A: HLA-B*46:01H
TSRTLSYY

SEQ ID NO: 7548 - protein, 8 aa, Severe acute respiratory syndrome coronavirus 2
  REGION 1..8: note = Table A: HLA-B*58:02H HLA-B*57:03H
RTLSYYKL

SEQ ID NO: 7549 - protein, 8 aa, Severe acute respiratory syndrome coronavirus 2
  REGION 1..8: note = Table A: HLA-A*02:02H
KLGASQRV

SEQ ID NO: 7550 - protein, 8 aa, Severe acute respiratory syndrome coronavirus 2
  REGION 1..8: note = Table A: HLA-B*07:05H
GDSGFAAY

SEQ ID NO: 7551 - protein, 8 aa, Severe acute respiratory syndrome coronavirus 2
  REGION 1..8: note = Table A: HLA-A*34:01H HLA-A*66:01H
FAAYSRYR

SEQ ID NO: 7552 - protein, 8 aa, Severe acute respiratory syndrome coronavirus 2
  REGION 1..8: note = Table A: HLA-C*07:02H HLA-B*38:02H
YRIGNYKL

SEQ ID NO: 7553 - protein, 8 aa, Severe acute respiratory syndrome coronavirus 2
  REGION 1..8: note = Table A: HLA-C*04:03M HLA-C*08:02H HLA-C*05:01H
SSDNIALL

SEQ ID NO: 7554 - protein, 9 aa, Severe acute respiratory syndrome coronavirus 2
  REGION 1..9: note = Table A: HLA-B*37:01H HLA-B*41:02H HLA-B*49:01H
ADSNGTITV

SEQ ID NO: 7555 - protein, 9 aa, Severe acute respiratory syndrome coronavirus 2
  REGION 1..9: note = Table A: HLA-B*35:03H HLA-B*39:01H
NGTITVEEL

SEQ ID NO: 7556 - protein, 9 aa, Severe acute respiratory syndrome coronavirus 2
  REGION 1..9: note = Table A: HLA-A*11:303H HLA-A*03:02H HLA-A*11:01M HLA-A*11:02M HLA-A*36:01H HLA-B*57:01H HLA-B*27:02H HLA-A*30:02H HLA-A*68:01H HLA-A*68:02H HLA-A*34:02H HLA-C*07:27M
GTITVEELK

SEQ ID NO: 7557 - protein, 9 aa, Severe acute respiratory syndrome coronavirus 2
  REGION 1..9: note = Table A: HLA-A*02:05H
ITVEELKKL

SEQ ID NO: 7558 - protein, 9 aa, Severe acute respiratory syndrome coronavirus 2
  REGION 1..9: note = Table A: HLA-A*25:01H HLA-B*38:02H HLA-B*57:03H
ELKKLLEQW

SEQ ID NO: 7559 - protein, 9 aa, Severe acute respiratory syndrome coronavirus 2
  REGION 1..9: note = Table A: HLA-B*48:01H
KKLLEQWNL

SEQ ID NO: 7560 - protein, 9 aa, Severe acute respiratory syndrome coronavirus 2
  REGION 1..9: note = Table A: HLA-A*02:11H HLA-A*02:04H HLA-A*02:07H HLA-A*02:01H HLA-A*02:02H HLA-B*13:02H
KLLEQWNLV

SEQ ID NO: 7561 - protein, 9 aa, Severe acute respiratory syndrome coronavirus 2
  REGION 1..9: note = Table A: HLA-A*74:01M
LLQFAYANR

SEQ ID NO: 7562 - protein, 9 aa, Severe acute respiratory syndrome coronavirus 2
  REGION 1..9: note = Table A: HLA-A*33:03H
QFAYANRNR

SEQ ID NO: 7563 - protein, 9 aa, Severe acute respiratory syndrome coronavirus 2
  REGION 1..9: note = Table A: HLA-C*03:02H HLA-C*12:02H HLA-B*35:07H HLA-C*02:02H
FAYANRNRF

SEQ ID NO: 7564 - protein, 9 aa, Severe acute respiratory syndrome coronavirus 2
  REGION 1..9: note = Table A: HLA-C*14:02H
AYANRNRFL

SEQ ID NO: 7565 - protein, 9 aa, Severe acute respiratory syndrome coronavirus 2
  REGION 1..9: note = Table A: HLA-B*58:01H HLA-C*16:01H HLA-A*36:01H HLA-A*29:02M HLA-B*53:01H HLA-A*30:02H HLA-B*35:07M HLA-B*57:03H HLA-C*02:02H
YANRNRFLY

SEQ ID NO: 7566 - protein, 9 aa, Severe acute respiratory syndrome coronavirus 2
  REGION 1..9: note = Table A: HLA-C*15:02H
ANRNRFLYI

SEQ ID NO: 7567 - protein, 9 aa, Severe acute respiratory syndrome coronavirus 2
  REGION 1..9: note = Table A: HLA-C*06:02M HLA-B*27:05H HLA-C*07:01H HLA-C*07:02H HLA-B*14:02M
NRFLYIIKL

SEQ ID NO: 7568 - protein, 9 aa, Severe acute respiratory syndrome coronavirus 2
  REGION 1..9: note = Table A: HLA-B*58:02H HLA-A*24:07H
RFLYIIKLI

SEQ ID NO: 7569 - protein, 9 aa, Severe acute respiratory syndrome coronavirus 2
  REGION 1..9: note = Table A: HLA-A*24:02H HLA-A*24:07H
LYIIKLIFL

SEQ ID NO: 7570 - protein, 9 aa, Severe acute respiratory syndrome coronavirus 2
  REGION 1..9: note = Table A: HLA-B*58:01H HLA-A*24:07H HLA-B*57:03M
YIIKLIFLW

SEQ ID NO: 7571 - protein, 9 aa, Severe acute respiratory syndrome coronavirus 2
  REGION 1..9: note = Table A: HLA-C*04:03H HLA-A*02:04H HLA-A*24:02H HLA-A*24:07H HLA-A*23:01H
LWLLWPVTL

SEQ ID NO: 7572 - protein, 9 aa, Severe acute respiratory syndrome coronavirus 2
  REGION 1..9: note = Table A: HLA-A*02:11M HLA-A*02:01H
LLWPVTLAC

SEQ ID NO: 7573 - protein, 9 aa, Severe acute respiratory syndrome coronavirus 2
  REGION 1..9: note = Table A: HLA-A*24:02H HLA-A*24:07H
LWPVTLACF

SEQ ID NO: 7574 - protein, 9 aa, Severe acute respiratory syndrome coronavirus 2
  REGION 1..9: note = Table A: HLA-B*46:01H HLA-B*38:02H HLA-B*15:02H HLA-B*15:03H
ACFVLAAVY

SEQ ID NO: 7575 - protein, 9 aa, Severe acute respiratory syndrome coronavirus 2
  REGION 1..9: note = Table A: HLA-A*02:11M HLA-A*68:02H HLA-A*02:04M HLA-A*02:06M HLA-A*02:01H HLA-C*08:01H HLA-B*38:02H HLA-B*13:02H
FVLAAVYRI

SEQ ID NO: 7576 - protein, 9 aa, Severe acute respiratory syndrome coronavirus 2
  REGION 1..9: note = Table A: HLA-B*58:01H HLA-B*57:01H HLA-B*53:01H HLA-B*57:03M
LAAVYRINW

SEQ ID NO: 7577 - protein, 9 aa, Severe acute respiratory syndrome coronavirus 2
  REGION 1..9: note = Table A: HLA-C*12:03H HLA-C*17:01H
AAVYRINWI

SEQ ID NO: 7578 - protein, 9 aa, Severe acute respiratory syndrome coronavirus 2
  REGION 1..9: note = Table A: HLA-A*02:11H
AVYRINWIT

SEQ ID NO: 7579 - protein, 9 aa, Severe acute respiratory syndrome coronavirus 2
  REGION 1..9: note = Table A: HLA-A*02:11H HLA-C*15:02H HLA-B*13:02H
RINWITGGI

SEQ ID NO: 7580 - protein, 9 aa, Severe acute respiratory syndrome coronavirus 2
  REGION 1..9: note = Table A: HLA-C*14:02H HLA-C*14:03H HLA-C*08:01H
NWITGGIAI

SEQ ID NO: 7581 - protein, 9 aa, Severe acute respiratory syndrome coronavirus 2
  REGION 1..9: note = Table A: HLA-A*68:02H HLA-C*15:05M HLA-B*35:01H HLA-B*07:05H HLA-B*57:03H HLA-C*07:04H
ITGGIAIAM

SEQ ID NO: 7582 - protein, 9 aa, Severe acute respiratory syndrome coronavirus 2
  REGION 1..9: note = Table A: HLA-B*51:01H
IAIAMACLV

SEQ ID NO: 7583 - protein, 9 aa, Severe acute respiratory syndrome coronavirus 2
  REGION 1..9: note = Table A: HLA-C*15:05H
IAMACLVGL

SEQ ID NO: 7584 - protein, 9 aa, Severe acute respiratory syndrome coronavirus 2
  REGION 1..9: note = Table A: HLA-B*53:01H
MACLVGLMW

SEQ ID NO: 7585 - protein, 9 aa, Severe acute respiratory syndrome coronavirus 2
  REGION 1..9: note = Table A: HLA-A*29:02H
LVGLMWLSY

SEQ ID NO: 7586 - protein, 9 aa, Severe acute respiratory syndrome coronavirus 2
  REGION 1..9: note = Table A: HLA-A*02:04H
WLSYFIASF

SEQ ID NO: 7587 - protein, 9 aa, Severe acute respiratory syndrome coronavirus 2
  REGION 1..9: note = Table A: HLA-A*74:01H HLA-A*34:01H HLA-A*34:02H HLA-A*66:01M
LSYFIASFR

SEQ ID NO: 7588 - protein, 9 aa, Severe acute respiratory syndrome coronavirus 2
  REGION 1..9: note = Table A: HLA-C*14:03H HLA-A*24:02H HLA-A*24:07M HLA-C*08:01H HLA-A*23:01H
SYFIASFRL

SEQ ID NO: 7589 - protein, 9 aa, Severe acute respiratory syndrome coronavirus 2
  REGION 1..9: note = Table A: HLA-C*14:02M HLA-C*14:03M HLA-C*16:01H HLA-A*29:02M HLA-C*03:02H HLA-A*24:02M HLA-A*24:07H HLA-A*23:01M
YFIASFRLF

SEQ ID NO: 7590 - protein, 9 aa, Severe acute respiratory syndrome coronavirus 2
  REGION 1..9: note = Table A: HLA-A*74:01H HLA-A*34:01H
IASFRLFAR

SEQ ID NO: 7591 - protein, 9 aa, Severe acute respiratory syndrome coronavirus 2
  REGION 1..9: note = Table A: HLA-A*02:11H
ASFRLFART

SEQ ID NO: 7592 - protein, 9 aa, Severe acute respiratory syndrome coronavirus 2
  REGION 1..9: note = Table A: HLA-A*74:01H HLA-A*33:03H
SFRLFARTR

SEQ ID NO: 7593 - protein, 9 aa, Severe acute respiratory syndrome coronavirus 2
  REGION 1..9: note = Table A: HLA-A*74:01H HLA-B*07:04H
RLFARTRSM

SEQ ID NO: 7594 - protein, 9 aa, Severe acute respiratory syndrome coronavirus 2
  REGION 1..9: note = Table A: HLA-A*24:07H
LFARTRSMW

SEQ ID NO: 7595 - protein, 9 aa, Severe acute respiratory syndrome coronavirus 2
  REGION 1..9: note = Table A: HLA-B*27:05M
ARTRSMWSF

SEQ ID NO: 7596 - protein, 9 aa, Severe acute respiratory syndrome coronavirus 2
  REGION 1..9: note = Table A: HLA-A*02:11H HLA-A*02:01H
SMWSFNPET

SEQ ID NO: 7597 - protein, 9 aa, Severe acute respiratory syndrome coronavirus 2
  REGION 1..9: note = Table A: HLA-C*14:02M HLA-C*14:03M HLA-B*39:01H
SFNPETNIL

SEQ ID NO: 7598 - protein, 9 aa, Severe acute respiratory syndrome coronavirus 2
  REGION 1..9: note = Table A: HLA-A*68:02H
PETNILLNV

SEQ ID NO: 7599 - protein, 9 aa, Severe acute respiratory syndrome coronavirus 2
  REGION 1..9: note = Table A: HLA-A*02:11H
ILLNVPLHG

SEQ ID NO: 7600 - protein, 9 aa, Severe acute respiratory syndrome coronavirus 2
  REGION 1..9: note = Table A: HLA-A*02:11H HLA-A*02:04H HLA-A*02:02H
LLNVPLHGT

SEQ ID NO: 7601 - protein, 9 aa, Severe acute respiratory syndrome coronavirus 2
  REGION 1..9: note = Table A: HLA-C*15:05H HLA-C*01:02H HLA-A*34:01H HLA-C*07:04H
NVPLHGTIL

SEQ ID NO: 7602 - protein, 9 aa, Severe acute respiratory syndrome coronavirus 2
  REGION 1..9: note = Table A: HLA-B*55:02H HLA-C*15:05H HLA-B*54:01H
VPLHGTILT

SEQ ID NO: 7603 - protein, 9 aa, Severe acute respiratory syndrome coronavirus 2
  REGION 1..9: note = Table A: HLA-A*74:01H HLA-A*26:03H HLA-A*34:01H
PLHGTILTR

SEQ ID NO: 7604 - protein, 9 aa, Severe acute respiratory syndrome coronavirus 2
  REGION 1..9: note = Table A: HLA-B*58:01H HLA-B*58:02H HLA-A*30:01H HLA-B*57:03M
GTILTRPLL

SEQ ID NO: 7605 - protein, 9 aa, Severe acute respiratory syndrome coronavirus 2
  REGION 1..9: note = Table A: HLA-C*06:02H HLA-B*39:01H
TRPLLESEL

SEQ ID NO: 7606 - protein, 9 aa, Severe acute respiratory syndrome coronavirus 2
  REGION 1..9: note = Table A: HLA-C*15:05H
RPLLESELV

SEQ ID NO: 7607 - protein, 9 aa, Severe acute respiratory syndrome coronavirus 2
  REGION 1..9: note = Table A: HLA-B*45:01M HLA-B*40:06H HLA-B*50:01H
LESELVIGA

SEQ ID NO: 7608 - protein, 9 aa, Severe acute respiratory syndrome coronavirus 2
  REGION 1..9: note = Table A: HLA-B*44:05M HLA-B*45:01H HLA-B*44:03H HLA-B*40:01H HLA-B*40:02H HLA-B*41:02H HLA-B*49:01H
SELVIGAVI

SEQ ID NO: 7609 - protein, 9 aa, Severe acute respiratory syndrome coronavirus 2
  REGION 1..9: note = Table A: HLA-A*74:01M HLA-A*11:02H HLA-A*33:03H HLA-A*26:03H HLA-A*68:01M HLA-A*34:01M HLA-A*34:02H HLA-A*66:01H
LVIGAVILR

SEQ ID NO: 7610 - protein, 9 aa, Severe acute respiratory syndrome coronavirus 2
  REGION 1..9: note = Table A: HLA-A*74:01M HLA-A*34:01H HLA-A*66:01H
AVILRGHLR

SEQ ID NO: 7611 - protein, 9 aa, Severe acute respiratory syndrome coronavirus 2
  REGION 1..9: note = Table A: HLA-B*38:02H HLA-B*07:04H
HLRIAGHHL

SEQ ID NO: 7612 - protein, 9 aa, Severe acute respiratory syndrome coronavirus 2
  REGION 1..9: note = Table A: HLA-A*74:01H HLA-A*34:01H
RIAGHHLGR

SEQ ID NO: 7613 - protein, 9 aa, Severe acute respiratory syndrome coronavirus 2
  REGION 1..9: note = Table A: HLA-B*38:02H
GHHLGRCDI

SEQ ID NO: 7614 - protein, 9 aa, Severe acute respiratory syndrome coronavirus 2
  REGION 1..9: note = Table A: HLA-B*08:01H HLA-A*68:02H
DIKDLPKEI

SEQ ID NO: 7615 - protein, 9 aa, Severe acute respiratory syndrome coronavirus 2
  REGION 1..9: note = Table A: HLA-A*02:11H HLA-A*02:06H HLA-A*02:01H HLA-B*37:01M HLA-B*40:02M HLA-B*40:06H HLA-B*41:02M HLA-B*13:02H HLA-B*49:01H HLA-C*07:04M
KDLPKEITV

SEQ ID NO: 7616 - protein, 9 aa, Severe acute respiratory syndrome coronavirus 2
  REGION 1..9: note = Table A: HLA-B*42:01H HLA-B*56:01M HLA-B*08:01H HLA-B*55:02M HLA-C*15:05H HLA-B*55:01M HLA-B*35:07H HLA-B*39:06H HLA-B*54:01M HLA-B*07:04H
LPKEITVAT

SEQ ID NO: 7617 - protein, 9 aa, Severe acute respiratory syndrome coronavirus 2
  REGION 1..9: note = Table A: HLA-B*50:01H
KEITVATSR

SEQ ID NO: 7618 - protein, 9 aa, Severe acute respiratory syndrome coronavirus 2
  REGION 1..9: note = Table A: HLA-B*58:02H HLA-A*11:303H HLA-C*16:01H HLA-B*57:01H HLA-C*03:03H HLA-C*03:04M HLA-C*15:05H HLA-C*15:02H HLA-B*57:03H
ITVATSRTL

SEQ ID NO: 7619 - protein, 9 aa, Severe acute respiratory syndrome coronavirus 2
  REGION 1..9: note = Table A: HLA-B*58:01H HLA-C*16:01H HLA-A*03:01H HLA-B*46:01H HLA-A*29:02H HLA-C*03:02M HLA-C*15:05H HLA-C*12:02H HLA-C*12:03H HLA-C*07:27H HLA-B*35:07H HLA-B*38:02H HLA-B*15:01H HLA-B*07:05H HLA-C*02:02H
VATSRTLSY

SEQ ID NO: 7620 - protein, 9 aa, Severe acute respiratory syndrome coronavirus 2
  REGION 1..9: note = Table A: HLA-B*58:01H HLA-A*03:01H HLA-A*11:01H HLA-A*36:01H HLA-A*26:01H HLA-A*29:02H HLA-A*01:01H HLA-A*30:02H HLA-A*34:02H HLA-B*15:01H HLA-B*57:03H
ATSRTLSYY

SEQ ID NO: 7621 - protein, 9 aa, Severe acute respiratory syndrome coronavirus 2
  REGION 1..9: note = Table A: HLA-A*34:02H
TSRTLSYYK

SEQ ID NO: 7622 - protein, 9 aa, Severe acute respiratory syndrome coronavirus 2
  REGION 1..9: note = Table A: HLA-B*27:05H
SRTLSYYKL

SEQ ID NO: 7623 - protein, 9 aa, Severe acute respiratory syndrome coronavirus 2
  REGION 1..9: note = Table A: HLA-A*74:01H
RTLSYYKLG

SEQ ID NO: 7624 - protein, 9 aa, Severe acute respiratory syndrome coronavirus 2
  REGION 1..9: note = Table A: HLA-A*33:01M HLA-A*33:03H HLA-A*26:03H HLA-A*34:01H HLA-A*31:01H HLA-A*66:01H
YYKLGASQR

SEQ ID NO: 7625 - protein, 9 aa, Severe acute respiratory syndrome coronavirus 2
  REGION 1..9: note = Table A: HLA-B*27:05H HLA-B*27:02M HLA-B*38:01M HLA-B*38:02M HLA-B*39:01H
QRVAGDSGF

SEQ ID NO: 7626 - protein, 9 aa, Severe acute respiratory syndrome coronavirus 2
  REGION 1..9: note = Table A: HLA-A*02:08H
RVAGDSGFA

SEQ ID NO: 7627 - protein, 9 aa, Severe acute respiratory syndrome coronavirus 2
  REGION 1..9: note = Table A: HLA-B*55:02H HLA-B*54:01H
VAGDSGFAA

SEQ ID NO: 7628 - protein, 9 aa, Severe acute respiratory syndrome coronavirus 2
  REGION 1..9: note = Table A: HLA-A*11:303H HLA-A*36:01H HLA-B*46:01M HLA-A*01:01M HLA-A*30:02M HLA-C*07:27H HLA-B*35:01H HLA-B*35:08H HLA-B*38:02H HLA-B*15:01H HLA-B*15:03H HLA-B*39:01M HLA-B*07:05H
AGDSGFAAY

SEQ ID NO: 7629 - protein, 9 aa, Severe acute respiratory syndrome coronavirus 2
  REGION 1..9: note = Table A: HLA-A*33:01M HLA-A*33:03H HLA-A*68:01M HLA-A*34:01H HLA-A*66:01H
DSGFAAYSR

SEQ ID NO: 7630 - protein, 9 aa, Severe acute respiratory syndrome coronavirus 2
  REGION 1..9: note = Table A: HLA-B*46:01H HLA-A*29:02H HLA-A*30:02M HLA-C*12:02H HLA-B*35:01H HLA-B*35:07H HLA-B*38:02H HLA-B*15:01H HLA-B*15:03H HLA-B*07:05H
SGFAAYSRY

SEQ ID NO: 7631 - protein, 9 aa, Severe acute respiratory syndrome coronavirus 2
  REGION 1..9: note = Table A: HLA-A*26:01H HLA-A*30:02H
YSRYRIGNY

SEQ ID NO: 7632 - protein, 9 aa, Severe acute respiratory syndrome coronavirus 2
  REGION 1..9: note = Table A: HLA-B*27:05H
SRYRIGNYK

SEQ ID NO: 7633 - protein, 9 aa, Severe acute respiratory syndrome coronavirus 2
  REGION 1..9: note = Table A: HLA-A*30:01H HLA-A*30:02H HLA-A*24:02H HLA-A*24:07M HLA-A*23:01H
RYRIGNYKL

SEQ ID NO: 7634 - protein, 9 aa, Severe acute respiratory syndrome coronavirus 2
  REGION 1..9: note = Table A: HLA-B*38:01M HLA-B*38:02M HLA-B*39:01M
DHSSSSDNI

SEQ ID NO: 7635 - protein, 9 aa, Severe acute respiratory syndrome coronavirus 2
  REGION 1..9: note = Table A: HLA-C*15:05H HLA-B*35:12H
SSSSDNIAL

SEQ ID NO: 7636 - protein, 9 aa, Severe acute respiratory syndrome coronavirus 2
  REGION 1..9: note = Table A: HLA-A*68:02M HLA-C*15:05H HLA-C*15:02H HLA-A*02:05H HLA-A*02:02H HLA-C*17:01H HLA-B*38:02H
SSSDNIALL

SEQ ID NO: 7637 - protein, 9 aa, Severe acute respiratory syndrome coronavirus 2
  REGION 1..9: note = Table A: HLA-A*36:01H HLA-A*68:02H HLA-C*15:05H HLA-C*15:02M HLA-A*02:07H HLA-B*13:02M
SSDNIALLV

SEQ ID NO: 7638 - protein, 10 aa, Severe acute respiratory syndrome coronavirus 2
  REGION 1..10: note = Table A: HLA-B*35:03H HLA-B*35:02H HLA-B*38:02H
MADSNGTITV

SEQ ID NO: 7639 - protein, 10 aa, Severe acute respiratory syndrome coronavirus 2
  REGION 1..10: note = Table A: HLA-A*11:303H HLA-A*11:01M HLA-A*11:02M HLA-A*36:01H HLA-A*34:02H HLA-C*07:27H
GTITVEELKK

SEQ ID NO: 7640 - protein, 10 aa, Severe acute respiratory syndrome coronavirus 2
  REGION 1..10: note = Table A: HLA-B*44:02M HLA-B*44:05H HLA-B*44:03H
EELKKLLEQW

SEQ ID NO: 7641 - protein, 10 aa, Severe acute respiratory syndrome coronavirus 2
  REGION 1..10: note = Table A: HLA-A*02:04H
KLLEQWNLVI

SEQ ID NO: 7642 - protein, 10 aa, Severe acute respiratory syndrome coronavirus 2
  REGION 1..10: note = Table A: HLA-A*24:07H
QWNLVIGFLF

SEQ ID NO: 7643 - protein, 10 aa, Severe acute respiratory syndrome coronavirus 2
  REGION 1..10: note = Table A: HLA-A*02:04H
FLFLTWICLL

SEQ ID NO: 7644 - protein, 10 aa, Severe acute respiratory syndrome coronavirus 2
  REGION 1..10: note = Table A: HLA-A*74:01H
CLLQFAYANR

SEQ ID NO: 7645 - protein, 10 aa, Severe acute respiratory syndrome coronavirus 2
  REGION 1..10: note = Table A: HLA-A*24:07H
QFAYANRNRF

SEQ ID NO: 7646 - protein, 10 aa, Severe acute respiratory syndrome coronavirus 2
  REGION 1..10: note = Table A: HLA-C*03:04H
FAYANRNRFL

SEQ ID NO: 7647 - protein, 10 aa, Severe acute respiratory syndrome coronavirus 2
  REGION 1..10: note = Table A: HLA-A*29:02H HLA-A*30:02H
AYANRNRFLY

SEQ ID NO: 7648 - protein, 10 aa, Severe acute respiratory syndrome coronavirus 2
  REGION 1..10: note = Table A: HLA-A*24:07M HLA-A*23:01H
RFLYIIKLIF

SEQ ID NO: 7649 - protein, 10 aa, Severe acute respiratory syndrome coronavirus 2
  REGION 1..10: note = Table A: HLA-A*02:11M HLA-A*02:04M HLA-A*02:02M HLA-A*02:03H
FLYIIKLIFL

SEQ ID NO: 7650 - protein, 10 aa, Severe acute respiratory syndrome coronavirus 2
  REGION 1..10: note = Table A: HLA-A*24:07H
LYIIKLIFLW

SEQ ID NO: 7651 - protein, 10 aa, Severe acute respiratory syndrome coronavirus 2
  REGION 1..10: note = Table A: HLA-A*02:11M HLA-A*02:04M
FLWLLWPVTL

SEQ ID NO: 7652 - protein, 10 aa, Severe acute respiratory syndrome coronavirus 2
  REGION 1..10: note = Table A: HLA-A*32:01H
VLAAVYRINW

SEQ ID NO: 7653 - protein, 10 aa, Severe acute respiratory syndrome coronavirus 2
  REGION 1..10: note = Table A: HLA-B*40:06H
AVYRINWITG

SEQ ID NO: 7654 - protein, 10 aa, Severe acute respiratory syndrome coronavirus 2
  REGION 1..10: note = Table A: HLA-A*02:08H
ITGGIAIAMA

SEQ ID NO: 7655 - protein, 10 aa, Severe acute respiratory syndrome coronavirus 2
  REGION 1..10: note = Table A: HLA-A*23:01H
MWLSYFIASF

SEQ ID NO: 7656 - protein, 10 aa, Severe acute respiratory syndrome coronavirus 2
  REGION 1..10: note = Table A: HLA-C*14:03H HLA-A*24:02H HLA-A*24:07M HLA-A*23:01H
SYFIASFRLF

SEQ ID NO: 7657 - protein, 10 aa, Severe acute respiratory syndrome coronavirus 2
  REGION 1..10: note = Table A: HLA-C*14:03H
YFIASFRLFA

SEQ ID NO: 7658 - protein, 10 aa, Severe acute respiratory syndrome coronavirus 2
  REGION 1..10: note = Table A: HLA-A*74:01H HLA-A*66:01H
FIASFRLFAR

SEQ ID NO: 7659 - protein, 10 aa, Severe acute respiratory syndrome coronavirus 2
  REGION 1..10: note = Table A: HLA-A*74:01H
ASFRLFARTR

SEQ ID NO: 7660 - protein, 10 aa, Severe acute respiratory syndrome coronavirus 2
  REGION 1..10: note = Table A: HLA-A*32:01M HLA-B*57:03H
RLFARTRSMW

SEQ ID NO: 7661 - protein, 10 aa, Severe acute respiratory syndrome coronavirus 2
  REGION 1..10: note = Table A: HLA-A*02:11H HLA-A*02:04H HLA-A*02:01H
ILLNVPLHGT

SEQ ID NO: 7662 - protein, 10 aa, Severe acute respiratory syndrome coronavirus 2
  REGION 1..10: note = Table A: HLA-A*34:01H HLA-A*34:02H
VPLHGTILTR

SEQ ID NO: 7663 - protein, 10 aa, Severe acute respiratory syndrome coronavirus 2
  REGION 1..10: note = Table A: HLA-B*57:03H
LTRPLLESEL

SEQ ID NO: 7664 - protein, 10 aa, Severe acute respiratory syndrome coronavirus 2
  REGION 1..10: note = Table A: HLA-C*15:05H
RPLLESELVI

SEQ ID NO: 7665 - protein, 10 aa, Severe acute respiratory syndrome coronavirus 2
  REGION 1..10: note = Table A: HLA-B*44:05M HLA-B*40:01M HLA-B*40:02M HLA-B*41:02H
SELVIGAVIL

SEQ ID NO: 7666 - protein, 10 aa, Severe acute respiratory syndrome coronavirus 2
  REGION 1..10: note = Table A: HLA-A*26:03M HLA-A*68:01H HLA-A*34:01M HLA-A*66:01H
ELVIGAVILR

SEQ ID NO: 7667 - protein, 10 aa, Severe acute respiratory syndrome coronavirus 2
  REGION 1..10: note = Table A: HLA-B*38:01H HLA-B*38:02M HLA-B*15:10H
GHLRIAGHHL

SEQ ID NO: 7668 - protein, 10 aa, Severe acute respiratory syndrome coronavirus 2
  REGION 1..10: note = Table A: HLA-B*27:05H
GRCDIKDLPK

SEQ ID NO: 7669 - protein, 10 aa, Severe acute respiratory syndrome coronavirus 2
  REGION 1..10: note = Table A: HLA-A*36:01H HLA-A*25:01H HLA-A*26:01H HLA-A*34:02H HLA-B*35:01H HLA-B*38:02H HLA-B*15:01H HLA-B*15:02M
TVATSRTLSY

SEQ ID NO: 7670 - protein, 10 aa, Severe acute respiratory syndrome coronavirus 2
  REGION 1..10: note = Table A: HLA-C*16:01H HLA-A*30:02H
VATSRTLSYY

SEQ ID NO: 7671 - protein, 10 aa, Severe acute respiratory syndrome coronavirus 2
  REGION 1..10: note = Table A: HLA-A*11:303H HLA-A*03:02H HLA-A*11:01M HLA-A*11:02M HLA-A*34:02H HLA-C*07:27H
ATSRTLSYYK

SEQ ID NO: 7672 - protein, 10 aa, Severe acute respiratory syndrome coronavirus 2
  REGION 1..10: note = Table A: HLA-A*74:01M HLA-A*03:01H HLA-A*11:01H HLA-A*33:01M HLA-A*33:03H HLA-A*26:03H HLA-A*68:01H HLA-A*34:01H HLA-A*34:02H HLA-A*31:01M HLA-A*66:01H
SYYKLGASQR

SEQ ID NO: 7673 - protein, 10 aa, Severe acute respiratory syndrome coronavirus 2
  REGION 1..10: note = Table A: HLA-B*38:02M HLA-B*15:01H HLA-B*15:02H HLA-B*15:03M
SQRVAGDSGF

SEQ ID NO: 7674 - protein, 10 aa, Severe acute respiratory syndrome coronavirus 2
  REGION 1..10: note = Table A: HLA-B*55:02H HLA-A*02:08M
RVAGDSGFAA

SEQ ID NO: 7675 - protein, 10 aa, Severe acute respiratory syndrome coronavirus 2
  REGION 1..10: note = Table A: HLA-A*11:303H HLA-C*16:04H HLA-A*36:01H HLA-B*46:01M HLA-A*26:03H HLA-A*29:02H HLA-C*03:02H HLA-A*30:02H HLA-C*12:02H HLA-A*34:01H HLA-A*34:02H HLA-B*35:01M HLA-B*35:08H HLA-B*35:07H HLA-B*38:02H
  REGION 1..10: note = CONT. FROM ABOVE: HLA-B*15:01H HLA-B*39:01H HLA-B*15:11H
VAGDSGFAAY

SEQ ID NO: 7676 - protein, 10 aa, Severe acute respiratory syndrome coronavirus 2
  REGION 1..10: note = Table A: HLA-B*27:02H
GDSGFAAYSR

SEQ ID NO: 7677 - protein, 10 aa, Severe acute respiratory syndrome coronavirus 2
  REGION 1..10: note = Table A: HLA-A*36:01H HLA-A*26:01H
DSGFAAYSRY

SEQ ID NO: 7678 - protein, 10 aa, Severe acute respiratory syndrome coronavirus 2
  REGION 1..10: note = Table A: HLA-A*30:02H
AYSRYRIGNY

SEQ ID NO: 7679 - protein, 10 aa, Severe acute respiratory syndrome coronavirus 2
  REGION 1..10: note = Table A: HLA-B*27:05M HLA-B*14:02H HLA-B*38:02H
SRYRIGNYKL

SEQ ID NO: 7680 - protein, 10 aa, Severe acute respiratory syndrome coronavirus 2
  REGION 1..10: note = Table A: HLA-A*68:02H HLA-C*15:02H HLA-B*13:02H
SSSDNIALLV

SEQ ID NO: 7681 - protein, 11 aa, Severe acute respiratory syndrome coronavirus 2
  REGION 1..11: note = Table A: HLA-A*02:05H HLA-A*02:08H
GTITVEELKKL

SEQ ID NO: 7682 - protein, 11 aa, Severe acute respiratory syndrome coronavirus 2
  REGION 1..11: note = Table A: HLA-A*74:01H
LLQFAYANRNR

SEQ ID NO: 7683 - protein, 11 aa, Severe acute respiratory syndrome coronavirus 2
  REGION 1..11: note = Table A: HLA-A*29:02H
FAYANRNRFLY

SEQ ID NO: 7684 - protein, 11 aa, Severe acute respiratory syndrome coronavirus 2
  REGION 1..11: note = Table A: HLA-A*24:07M
AYANRNRFLYI

SEQ ID NO: 7685 - protein, 11 aa, Severe acute respiratory syndrome coronavirus 2
  REGION 1..11: note = Table A: HLA-A*24:07H
IFLWLLWPVTL

SEQ ID NO: 7686 - protein, 11 aa, Severe acute respiratory syndrome coronavirus 2
  REGION 1..11: note = Table A: HLA-B*58:02H
RINWITGGIAI

SEQ ID NO: 7687 - protein, 11 aa, Severe acute respiratory syndrome coronavirus 2
  REGION 1..11: note = Table A: HLA-B*58:02H
LSYFIASFRLF

SEQ ID NO: 7688 - protein, 11 aa, Severe acute respiratory syndrome coronavirus 2
  REGION 1..11: note = Table A: HLA-A*02:11M
SMWSFNPETNI

SEQ ID NO: 7689 - protein, 11 aa, Severe acute respiratory syndrome coronavirus 2
  REGION 1..11: note = Table A: HLA-A*68:02H
WSFNPETNILL

SEQ ID NO: 7690 - protein, 11 aa, Severe acute respiratory syndrome coronavirus 2
  REGION 1..11: note = Table A: HLA-A*33:03H HLA-A*26:03H HLA-A*68:01H HLA-A*34:01M HLA-A*34:02H HLA-A*66:01H
NVPLHGTILTR

SEQ ID NO: 7691 - protein, 11 aa, Severe acute respiratory syndrome coronavirus 2
  REGION 1..11: note = Table A: HLA-A*74:01H
HLRIAGHHLGR

SEQ ID NO: 7692 - protein, 11 aa, Severe acute respiratory syndrome coronavirus 2
  REGION 1..11: note = Table A: HLA-B*08:01H HLA-A*68:02H HLA-B*38:02H
DIKDLPKEITV

SEQ ID NO: 7693 - protein, 11 aa, Severe acute respiratory syndrome coronavirus 2
  REGION 1..11: note = Table A: HLA-A*33:01H HLA-A*33:03M HLA-B*56:01H HLA-B*55:02H HLA-A*68:01H HLA-A*34:01H HLA-B*54:01H HLA-A*66:01H
LPKEITVATSR

SEQ ID NO: 7694 - protein, 11 aa, Severe acute respiratory syndrome coronavirus 2
  REGION 1..11: note = Table A: HLA-B*44:05H HLA-B*40:01H HLA-B*40:02H HLA-B*41:02H
KEITVATSRTL

SEQ ID NO: 7695 - protein, 11 aa, Severe acute respiratory syndrome coronavirus 2
  REGION 1..11: note = Table A: HLA-A*03:01H HLA-A*26:01M HLA-A*26:02H HLA-A*30:02M HLA-A*34:01H HLA-A*34:02H HLA-B*38:02M HLA-B*15:01H HLA-B*15:02H
TVATSRTLSYY

SEQ ID NO: 7696 - protein, 11 aa, Severe acute respiratory syndrome coronavirus 2
  REGION 1..11: note = Table A: HLA-B*57:03H
ATSRTLSYYKL

SEQ ID NO: 7697 - protein, 11 aa, Severe acute respiratory syndrome coronavirus 2
  REGION 1..11: note = Table A: HLA-A*74:01H
LSYYKLGASQR

SEQ ID NO: 7698 - protein, 11 aa, Severe acute respiratory syndrome coronavirus 2
  REGION 1..11: note = Table A: HLA-B*57:03H
ASQRVAGDSGF

SEQ ID NO: 7699 - protein, 11 aa, Severe acute respiratory syndrome coronavirus 2
  REGION 1..11: note = Table A: HLA-B*39:06H
QRVAGDSGFAA

SEQ ID NO: 7700 - protein, 11 aa, Severe acute respiratory syndrome coronavirus 2
  REGION 1..11: note = Table A: HLA-B*58:01H HLA-A*03:02M HLA-A*36:01M HLA-A*25:01H HLA-B*46:01H HLA-A*26:01H HLA-A*26:03H HLA-A*29:01H HLA-A*29:02H HLA-A*30:02H HLA-A*02:08H HLA-B*35:01H HLA-B*35:08H HLA-B*38:02H HLA-A*32:01H HLA-B*15:01H
  REGION 1..11: note = CONT. FROM ABOVE: HLA-B*07:05H HLA-B*57:03H HLA-B*13:01H
RVAGDSGFAAY

SEQ ID NO: 7701 - protein, 11 aa, Severe acute respiratory syndrome coronavirus 2
  REGION 1..11: note = Table A: HLA-A*36:01H HLA-A*29:02H HLA-B*27:02H HLA-A*30:02H
GDSGFAAYSRY

SEQ ID NO: 7702 - protein, 11 aa, Severe acute respiratory syndrome coronavirus 2
  REGION 1..11: note = Table A: HLA-A*33:01H
DSGFAAYSRYR

SEQ ID NO: 7703 - protein, 11 aa, Severe acute respiratory syndrome coronavirus 2
  REGION 1..11: note = Table A: HLA-A*30:02H
AAYSRYRIGNY

SEQ ID NO: 7704 - protein, 11 aa, Severe acute respiratory syndrome coronavirus 2
  REGION 1..11: note = Table A: HLA-B*38:01M HLA-B*38:02M HLA-B*39:01M HLA-B*15:10H
DHSSSSDNIAL

SEQ ID NO: 7705 - protein, 8 aa, Severe acute respiratory syndrome coronavirus 2
  REGION 1..8: note = Table A: HLA-B*38:02H HLA-B*39:06H
FHLVDFQV

SEQ ID NO: 7706 - protein, 8 aa, Severe acute respiratory syndrome coronavirus 2
  REGION 1..8: note = Table A: HLA-C*04:03H
LVDFQVTI

SEQ ID NO: 7707 - protein, 8 aa, Severe acute respiratory syndrome coronavirus 2
  REGION 1..8: note = Table A: HLA-B*52:01H HLA-B*38:02H HLA-B*13:02M HLA-B*49:01H
FQVTIAEI

SEQ ID NO: 7708 - protein, 8 aa, Severe acute respiratory syndrome coronavirus 2
  REGION 1..8: note = Table A: HLA-B*40:02H HLA-B*07:05H HLA-B*41:02H
AEILLIIM

SEQ ID NO: 7709 - protein, 8 aa, Severe acute respiratory syndrome coronavirus 2
  REGION 1..8: note = Table A: HLA-A*02:11H
IIMRTFKV

SEQ ID NO: 7710 - protein, 8 aa, Severe acute respiratory syndrome coronavirus 2
  REGION 1..8: note = Table A: HLA-B*58:01M HLA-B*58:02H HLA-B*57:01H HLA-A*32:01H HLA-B*57:03M
RTFKVSIW

SEQ ID NO: 7711 - protein, 8 aa, Severe acute respiratory syndrome coronavirus 2
  REGION 1..8: note = Table A: HLA-C*04:03H
NLDYIINL

SEQ ID NO: 7712 - protein, 8 aa, Severe acute respiratory syndrome coronavirus 2
  REGION 1..8: note = Table A: HLA-B*58:01H HLA-B*58:02H HLA-B*57:03H
KSLTENKY

SEQ ID NO: 7713 - protein, 8 aa, Severe acute respiratory syndrome coronavirus 2
  REGION 1..8: note = Table A: HLA-B*44:05H HLA-B*18:01H HLA-B*37:01H HLA-B*40:02H HLA-B*07:05H HLA-B*41:02H
TENKYSQL

SEQ ID NO: 7714 - protein, 9 aa, Severe acute respiratory syndrome coronavirus 2
  REGION 1..9: note = Table A: HLA-B*38:02H
FHLVDFQVT

SEQ ID NO: 7715 - protein, 9 aa, Severe acute respiratory syndrome coronavirus 2
  REGION 1..9: note = Table A: HLA-B*48:01H HLA-B*58:01H HLA-A*11:303H HLA-A*02:11H HLA-B*53:01H HLA-A*68:02M HLA-B*35:03H HLA-C*15:05H HLA-C*15:02H HLA-A*02:04H HLA-A*02:05M HLA-A*02:06M HLA-A*02:07M HLA-B*14:01H HLA-A*02:01M
  REGION 1..9: note = CONT. FROM ABOVE: HLA-A*02:02H HLA-A*02:03M HLA-B*51:01H HLA- B*52:01M HLA-C*08:01M HLA-B*15:13H HLA-B*38:01M HLA-B*38:02H HLA-B*40:02H HLA-B*40:06M HLA-B*15:02H HLA-B*57:03M HLA-B*13 :01M HLA-B*13:02H HLA-B*49:01H
HLVDFQVTI

SEQ ID NO: 7716 - protein, 9 aa, Severe acute respiratory syndrome coronavirus 2
  REGION 1..9: note = Table A: HLA-A*02:05H HLA-B*38:02H
FQVTIAEIL

SEQ ID NO: 7717 - protein, 9 aa, Severe acute respiratory syndrome coronavirus 2
  REGION 1..9: note = Table A: HLA-C*15:02M HLA-B*57:03H HLA-B*13:02H
VTIAEILLI

SEQ ID NO: 7718 - protein, 9 aa, Severe acute respiratory syndrome coronavirus 2
  REGION 1..9: note = Table A: HLA-A*68:02H HLA-C*15:05H HLA-C*15:02H HLA-A*02:04H HLA-B*38:02H HLA-B*13:02H
TIAEILLII

SEQ ID NO: 7719 - protein, 9 aa, Severe acute respiratory syndrome coronavirus 2
  REGION 1..9: note = Table A: HLA-C*04:03H
IAEILLIIM

SEQ ID NO: 7720 - protein, 9 aa, Severe acute respiratory syndrome coronavirus 2
  REGION 1..9: note = Table A: HLA-A*02:11H
LIIMRTFKV

SEQ ID NO: 7721 - protein, 9 aa, Severe acute respiratory syndrome coronavirus 2
  REGION 1..9: note = Table A: HLA-B*52:01H
IMRTFKVSI

SEQ ID NO: 7722 - protein, 9 aa, Severe acute respiratory syndrome coronavirus 2
  REGION 1..9: note = Table A: HLA-A*24:07H
TFKVSIWNL

SEQ ID NO: 7723 - protein, 9 aa, Severe acute respiratory syndrome coronavirus 2
  REGION 1..9: note = Table A: HLA-A*36:01H HLA-A*29:01H HLA-A*29:02H HLA-A*30:02M
KVSIWNLDY

SEQ ID NO: 7724 - protein, 9 aa, Severe acute respiratory syndrome coronavirus 2
  REGION 1..9: note = Table A: HLA-C*08:01H
VSIWNLDYI

SEQ ID NO: 7725 - protein, 9 aa, Severe acute respiratory syndrome coronavirus 2
  REGION 1..9: note = Table A: HLA-A*02:04M
WNLDYIINL

SEQ ID NO: 7726 - protein, 9 aa, Severe acute respiratory syndrome coronavirus 2
  REGION 1..9: note = Table A: HLA-C*04:03H HLA-A*02:11H HLA-A*02:07M HLA-B*38:02H
NLDYIINLI

SEQ ID NO: 7727 - protein, 9 aa, Severe acute respiratory syndrome coronavirus 2
  REGION 1..9: note = Table A: HLA-A*02:11M HLA-C*15:02H HLA-A*02:04M HLA-A*02:02H HLA-B*07:04H
IINLIIKNL

SEQ ID NO: 7728 - protein, 9 aa, Severe acute respiratory syndrome coronavirus 2
  REGION 1..9: note = Table A: HLA-A*34:02H
NLIIKNLSK

SEQ ID NO: 7729 - protein, 9 aa, Severe acute respiratory syndrome coronavirus 2
  REGION 1..9: note = Table A: HLA-B*08:01H HLA-B*07:02H HLA-B*07:04M
IIKNLSKSL

SEQ ID NO: 7730 - protein, 9 aa, Severe acute respiratory syndrome coronavirus 2
  REGION 1..9: note = Table A: HLA-B*38:02H HLA-B*15:03M
SKSLTENKY

SEQ ID NO: 7731 - protein, 9 aa, Severe acute respiratory syndrome coronavirus 2
  REGION 1..9: note = Table A: HLA-C*04:03H
LTENKYSQL

SEQ ID NO: 7732 - protein, 9 aa, Severe acute respiratory syndrome coronavirus 2
  REGION 1..9: note = Table A: HLA-B*35:02H HLA-B*38:02H HLA-B*39:01H
SQLDEEQPM

SEQ ID NO: 7733 - protein, 10 aa, Severe acute respiratory syndrome coronavirus 2
  REGION 1..10: note = Table A: HLA-B*38:01H HLA-B*38:02H
FHLVDFQVTI

SEQ ID NO: 7734 - protein, 10 aa, Severe acute respiratory syndrome coronavirus 2
  REGION 1..10: note = Table A: HLA-A*02:05H HLA-A*02:08H HLA-A*02:02H HLA-A*02:03M HLA-B*38:02H
HLVDFQVTIA

SEQ ID NO: 7735 - protein, 10 aa, Severe acute respiratory syndrome coronavirus 2
  REGION 1..10: note = Table A: HLA-B*40:06H
AEILLIIMRT

SEQ ID NO: 7736 - protein, 10 aa, Severe acute respiratory syndrome coronavirus 2
  REGION 1..10: note = Table A: HLA-B*58:02H HLA-A*74:01H HLA-A*02:11H HLA-A*02:08H HLA-A*32:01H HLA-B*57:03M
RTFKVSIWNL

SEQ ID NO: 7737 - protein, 10 aa, Severe acute respiratory syndrome coronavirus 2
  REGION 1..10: note = Table A: HLA-A*02:11H HLA-A*68:02H HLA-A*02:04H HLA-A*02:02H HLA-A*02:03H
YIINLIIKNL

SEQ ID NO: 7738 - protein, 10 aa, Severe acute respiratory syndrome coronavirus 2
  REGION 1..10: note = Table A: HLA-A*30:02M
LSKSLTENKY

SEQ ID NO: 7739 - protein, 10 aa, Severe acute respiratory syndrome coronavirus 2
  REGION 1..10: note = Table A: HLA-C*01:02H HLA-A*02:02H HLA-A*02:03H HLA-B*38:02H
SLTENKYSQL

SEQ ID NO: 7740 - protein, 10 aa, Severe acute respiratory syndrome coronavirus 2
  REGION 1..10: note = Table A: HLA-B*38:02H
QLDEEQPMEI

SEQ ID NO: 7741 - protein, 11 aa, Severe acute respiratory syndrome coronavirus 2
  REGION 1..11: note = Table A: HLA-B*13:02H
FQVTIAEILLI

SEQ ID NO: 7742 - protein, 11 aa, Severe acute respiratory syndrome coronavirus 2
  REGION 1..11: note = Table A: HLA-B*44:02H HLA-B*44:03H
AEILLIIMRTF

SEQ ID NO: 7743 - protein, 11 aa, Severe acute respiratory syndrome coronavirus 2
  REGION 1..11: note = Table A: HLA-A*02:11H HLA-A*02:04H
SIWNLDYIINL

SEQ ID NO: 7744 - protein, 11 aa, Severe acute respiratory syndrome coronavirus 2
  REGION 1..11: note = Table A: HLA-B*58:02H HLA-B*57:03M
KSLTENKYSQL

SEQ ID NO: 7745 - protein, 11 aa, Severe acute respiratory syndrome coronavirus 2
  REGION 1..11: note = Table A: HLA-A*02:06H HLA-A*02:01H HLA-B*38:02H HLA-B*13:02H
SQLDEEQPMEI

SEQ ID NO: 7746 - protein, 8 aa, Severe acute respiratory syndrome coronavirus 2
  REGION 1..8: note = Table A: HLA-A*02:01H HLA-A*02:03H
ALITLATC

SEQ ID NO: 7747 - protein, 8 aa, Severe acute respiratory syndrome coronavirus 2
  REGION 1..8: note = Table A: HLA-C*06:02H
VRGTTVLL

SEQ ID NO: 7748 - protein, 8 aa, Severe acute respiratory syndrome coronavirus 2
  REGION 1..8: note = Table A: HLA-B*53:01H HLA-B*35:02H
HPLADNKF

SEQ ID NO: 7749 - protein, 8 aa, Severe acute respiratory syndrome coronavirus 2
  REGION 1..8: note = Table A: HLA-C*07:01H HLA-A*30:02H HLA-B*35:01H HLA-B*35:07H
PDGVKHVY

SEQ ID NO: 7750 - protein, 8 aa, Severe acute respiratory syndrome coronavirus 2
  REGION 1..8: note = Table A: HLA-A*34:01H
HVYQLRAR

SEQ ID NO: 7751 - protein, 8 aa, Severe acute respiratory syndrome coronavirus 2
  REGION 1..8: note = Table A: HLA-B*52:01M HLA-B*13:02H
YQLRARSV

SEQ ID NO: 7752 - protein, 8 aa, Severe acute respiratory syndrome coronavirus 2
  REGION 1..8: note = Table A: HLA-B*14:01H HLA-B*39:01H
ARSVSPKL

SEQ ID NO: 7753 - protein, 8 aa, Severe acute respiratory syndrome coronavirus 2
  REGION 1..8: note = Table A: HLA-B*58:02M HLA-B*57:03H
RSVSPKLF

SEQ ID NO: 7754 - protein, 8 aa, Severe acute respiratory syndrome coronavirus 2
  REGION 1..8: note = Table A: HLA-C*15:05H HLA-C*15:02H
SVSPKLFI

SEQ ID NO: 7755 - protein, 8 aa, Severe acute respiratory syndrome coronavirus 2
  REGION 1..8: note = Table A: HLA-B*18:01H
QEEVQELY

SEQ ID NO: 7756 - protein, 8 aa, Severe acute respiratory syndrome coronavirus 2
  REGION 1..8: note = Table A: HLA-B*18:01H HLA-B*07:05H
QELYSPIF

SEQ ID NO: 7757 - protein, 8 aa, Severe acute respiratory syndrome coronavirus 2
  REGION 1..8: note = Table A: HLA-A*24:07H
LYSPIFLI

SEQ ID NO: 7758 - protein, 8 aa, Severe acute respiratory syndrome coronavirus 2
  REGION 1..8: note = Table A: HLA-B*51:01H
YSPIFLIV

SEQ ID NO: 7759 - protein, 8 aa, Severe acute respiratory syndrome coronavirus 2
  REGION 1..8: note = Table A: HLA-B*56:01M HLA-B*55:02M HLA-B*55:01M HLA-B*39:06H HLA-B*54:01M
SPIFLIVA

SEQ ID NO: 7760 - protein, 8 aa, Severe acute respiratory syndrome coronavirus 2
  REGION 1..8: note = Table A: HLA-B*54:01H
PIFLIVAA

SEQ ID NO: 7761 - protein, 8 aa, Severe acute respiratory syndrome coronavirus 2
  REGION 1..8: note = Table A: HLA-C*03:02H HLA-C*15:05H HLA-C*17:01H HLA-C*08:01H
AAIVFITL

SEQ ID NO: 7762 - protein, 9 aa, Severe acute respiratory syndrome coronavirus 2
  REGION 1..9: note = Table A: HLA-B*58:02H HLA-C*15:02H HLA-B*57:03H
KIILFLALI

SEQ ID NO: 7763 - protein, 9 aa, Severe acute respiratory syndrome coronavirus 2
  REGION 1..9: note = Table A: HLA-A*02:11H HLA-A*02:04M HLA-A*02:01H HLA-A*02:02H
ILFLALITL

SEQ ID NO: 7764 - protein, 9 aa, Severe acute respiratory syndrome coronavirus 2
  REGION 1..9: note = Table A: HLA-B*58:01H HLA-A*29:02H
ITLATCELY

SEQ ID NO: 7765 - protein, 9 aa, Severe acute respiratory syndrome coronavirus 2
  REGION 1..9: note = Table A: HLA-A*02:11H HLA-A*68:02M HLA-A*02:01H HLA-A*02:02M HLA-B*38:02M HLA-B*13:02H
ELYHYQECV

SEQ ID NO: 7766 - protein, 9 aa, Severe acute respiratory syndrome coronavirus 2
  REGION 1..9: note = Table A: HLA-B*45:01H HLA-B*37:01H HLA-B*41:02H HLA-B*49:01M HLA-B*50:01H
QECVRGTTV

SEQ ID NO: 7767 - protein, 9 aa, Severe acute respiratory syndrome coronavirus 2
  REGION 1..9: note = Table A: HLA-A*34:01H
ECVRGTTVL

SEQ ID NO: 7768 - protein, 9 aa, Severe acute respiratory syndrome coronavirus 2
  REGION 1..9: note = Table A: HLA-A*68:02H
TTVLLKEPC

SEQ ID NO: 7769 - protein, 9 aa, Severe acute respiratory syndrome coronavirus 2
  REGION 1..9: note = Table A: HLA-A*03:01H HLA-B*46:01H HLA-A*26:01H HLA-A*26:03H HLA-C*15:05H HLA-C*12:02H HLA-A*34:02H HLA-C*08:03H HLA-B*38:02H HLA-B*15:01H HLA-B*15:02H HLA-B*07:05H HLA-A*66:01H
GTYEGNSPF

SEQ ID NO: 7770 - protein, 9 aa, Severe acute respiratory syndrome coronavirus 2
  REGION 1..9: note = Table A: HLA-B*45:01H HLA-B*40:06H HLA-B*50:01H
YEGNSPFHP

SEQ ID NO: 7771 - protein, 9 aa, Severe acute respiratory syndrome coronavirus 2
  REGION 1..9: note = Table A: HLA-A*68:02H
EGNSPFHPL

SEQ ID NO: 7772 - protein, 9 aa, Severe acute respiratory syndrome coronavirus 2
  REGION 1..9: note = Table A: HLA-B*38:01H HLA-B*38:02M
FHPLADNKF

SEQ ID NO: 7773 - protein, 9 aa, Severe acute respiratory syndrome coronavirus 2
  REGION 1..9: note = Table A: HLA-A*02:04H HLA-A*02:02H
PLADNKFAL

SEQ ID NO: 7774 - protein, 9 aa, Severe acute respiratory syndrome coronavirus 2
  REGION 1..9: note = Table A: HLA-B*45:01H HLA-B*50:01H
ADNKFALTC

SEQ ID NO: 7775 - protein, 9 aa, Severe acute respiratory syndrome coronavirus 2
  REGION 1..9: note = Table A: HLA-B*15:02H
ALTCFSTQF

SEQ ID NO: 7776 - protein, 9 aa, Severe acute respiratory syndrome coronavirus 2
  REGION 1..9: note = Table A: HLA-B*38:02H
TCFSTQFAF

SEQ ID NO: 7777 - protein, 9 aa, Severe acute respiratory syndrome coronavirus 2
  REGION 1..9: note = Table A: HLA-A*02:11H HLA-A*68:02H HLA-A*02:03H HLA-B*38:02H
FAFACPDGV

SEQ ID NO: 7778 - protein, 9 aa, Severe acute respiratory syndrome coronavirus 2
  REGION 1..9: note = Table A: HLA-A*36:01H HLA-B*53:01M HLA-A*30:02M HLA-B*35:01H HLA-B*35:02H HLA-B*35:08H HLA-B*35:07H HLA-B*35:12H HLA-B*38:02H HLA-B*15:02H HLA-B*07:05H
CPDGVKHVY

SEQ ID NO: 7779 - protein, 9 aa, Severe acute respiratory syndrome coronavirus 2
  REGION 1..9: note = Table A: HLA-A*74:01M HLA-A*33:01H HLA-A*33:03H HLA-A*34:01H HLA-A*31:01M HLA-A*66:01H
GVKHVYQLR

SEQ ID NO: 7780 - protein, 9 aa, Severe acute respiratory syndrome coronavirus 2
  REGION 1..9: note = Table A: HLA-C*14:02H HLA-C*14:03H
VYQLRARSV

SEQ ID NO: 7781 - protein, 9 aa, Severe acute respiratory syndrome coronavirus 2
  REGION 1..9: note = Table A: HLA-B*58:02M HLA-A*30:01H HLA-B*07:04M HLA-B*57:03M
RARSVSPKL

SEQ ID NO: 7782 - protein, 9 aa, Severe acute respiratory syndrome coronavirus 2
  REGION 1..9: note = Table A: HLA-B*27:05H
ARSVSPKLF

SEQ ID NO: 7783 - protein, 9 aa, Severe acute respiratory syndrome coronavirus 2
  REGION 1..9: note = Table A: HLA-B*58:01H HLA-B*58:02H HLA-C*15:02M HLA-B*57:03M HLA-B*13:02M
RSVSPKLFI

SEQ ID NO: 7784 - protein, 9 aa, Severe acute respiratory syndrome coronavirus 2
  REGION 1..9: note = Table A: HLA-A*11:303H HLA-A*74:01H HLA-A*03:01H HLA-A*03:02H HLA-A*11:01M HLA-A*11:02H HLA-A*36:01H HLA-A*33:01H HLA-A*33:03M HLA-A*30:02H HLA-A*68:01M HLA-A*68:02H HLA-A*02:04H HLA-A*34:01M HLA-A*34:02H
  REGION 1..9: note = CONT. FROM ABOVE: HLA-C*07:27H HLA-A*31:01M HLA-A*66:01H
SVSPKLFIR

SEQ ID NO: 7785 - protein, 9 aa, Severe acute respiratory syndrome coronavirus 2
  REGION 1..9: note = Table A: HLA-A*02:11M HLA-A*02:02M HLA-B*13:02H
KLFIRQEEV

SEQ ID NO: 7786 - protein, 9 aa, Severe acute respiratory syndrome coronavirus 2
  REGION 1..9: note = Table A: HLA-C*06:02H HLA-C*07:02H HLA-B*14:02H HLA-B*14:01M HLA-B*38:01H HLA-B*38:02M HLA-B*39:01M HLA-C*07:04H
IRQEEVQEL

SEQ ID NO: 7787 - protein, 9 aa, Severe acute respiratory syndrome coronavirus 2
  REGION 1..9: note = Table A: HLA-A*36:01H HLA-A*30:02H HLA-B*15:01M HLA-B*15:03M HLA-B*13:01H
RQEEVQELY

SEQ ID NO: 7788 - protein, 9 aa, Severe acute respiratory syndrome coronavirus 2
  REGION 1..9: note = Table A: HLA-B*45:01H
EEVQELYSP

SEQ ID NO: 7789 - protein, 9 aa, Severe acute respiratory syndrome coronavirus 2
  REGION 1..9: note = Table A: HLA-A*26:03H HLA-A*68:02H
EVQELYSPI

SEQ ID NO: 7790 - protein, 9 aa, Severe acute respiratory syndrome coronavirus 2
  REGION 1..9: note = Table A: HLA-B*40:01H
QELYSPIFL

SEQ ID NO: 7791 - protein, 9 aa, Severe acute respiratory syndrome coronavirus 2
  REGION 1..9: note = Table A: HLA-A*68:02H
ELYSPIFLI

SEQ ID NO: 7792 - protein, 9 aa, Severe acute respiratory syndrome coronavirus 2
  REGION 1..9: note = Table A: HLA-C*06:02H HLA-A*29:02H HLA-A*68:02H HLA-C*15:02H HLA-A*24:02H HLA-A*24:07H HLA-C*08:01H
LYSPIFLIV

SEQ ID NO: 7793 - protein, 9 aa, Severe acute respiratory syndrome coronavirus 2
  REGION 1..9: note = Table A: HLA-B*56:01H HLA-B*55:02H HLA-C*15:05H HLA-B*55:01H HLA-B*39:06M HLA-B*54:01H HLA-B*07:05H
SPIFLIVAA

SEQ ID NO: 7794 - protein, 9 aa, Severe acute respiratory syndrome coronavirus 2
  REGION 1..9: note = Table A: HLA-A*68:02H
IVAAIVFIT

SEQ ID NO: 7795 - protein, 9 aa, Severe acute respiratory syndrome coronavirus 2
  REGION 1..9: note = Table A: HLA-B*58:01H HLA-B*58:02H HLA-A*11:303H HLA-C*16:01H HLA-C*16:04M HLA-B*57:01H HLA-C*03:03M HLA-C*12:05M HLA-C*03:02H HLA-C*03:04M HLA-A*68:02H HLA-B*35:03H HLA-C*15:05M HLA-C*12:02H HLA-C*12:03H
  REGION 1..9: note = CONT. FROM ABOVE: HLA-C*15:02H HLA-A*02:05H HLA-A*02:06H HLA- B*35:01H HLA-C*17:01M HLA-C*08:01M HLA-B*38:02H HLA-B*57:03M HLA-C*07:04H
VAAIVFITL

SEQ ID NO: 7796 - protein, 9 aa, Severe acute respiratory syndrome coronavirus 2
  REGION 1..9: note = Table A: HLA-C*14:03H HLA-A*24:02H HLA-A*24:07M HLA-A*23:01H
VFITLCFTL

SEQ ID NO: 7797 - protein, 9 aa, Severe acute respiratory syndrome coronavirus 2
  REGION 1..9: note = Table A: HLA-A*34:02H
FITLCFTLK

SEQ ID NO: 7798 - protein, 9 aa, Severe acute respiratory syndrome coronavirus 2
  REGION 1..9: note = Table A: HLA-A*34:02H
ITLCFTLKR

SEQ ID NO: 7799 - protein, 10 aa, Severe acute respiratory syndrome coronavirus 2
  REGION 1..10: note = Table A: HLA-A*02:04H
IILFLALITL

SEQ ID NO: 7800 - protein, 10 aa, Severe acute respiratory syndrome coronavirus 2
  REGION 1..10: note = Table A: HLA-A*02:03H
FLALITLATC

SEQ ID NO: 7801 - protein, 10 aa, Severe acute respiratory syndrome coronavirus 2
  REGION 1..10: note = Table A: HLA-C*01:02H HLA-A*02:02H HLA-A*02:03H HLA-B*38:02H
ALITLATCEL

SEQ ID NO: 7802 - protein, 10 aa, Severe acute respiratory syndrome coronavirus 2
  REGION 1..10: note = Table A: HLA-A*33:03H HLA-A*34:01H
ELYHYQECVR

SEQ ID NO: 7803 - protein, 10 aa, Severe acute respiratory syndrome coronavirus 2
  REGION 1..10: note = Table A: HLA-A*03:01H
CVRGTTVLLK

SEQ ID NO: 7804 - protein, 10 aa, Severe acute respiratory syndrome coronavirus 2
  REGION 1..10: note = Table A: HLA-A*11:303M HLA-A*74:01H HLA-A*03:01H HLA-A*03:02M HLA-A*11:01H HLA-A*11:02M HLA-A*36:01H HLA-A*30:02H HLA-A*34:02M HLA-C*07:27M HLA-C*08:03H
GTYEGNSPFH

SEQ ID NO: 7805 - protein, 10 aa, Severe acute respiratory syndrome coronavirus 2
  REGION 1..10: note = Table A: HLA-B*40:01H HLA-B*40:02H
YEGNSPFHPL

SEQ ID NO: 7806 - protein, 10 aa, Severe acute respiratory syndrome coronavirus 2
  REGION 1..10: note = Table A: HLA-A*24:07H HLA-A*23:01H
PFHPLADNKF

SEQ ID NO: 7807 - protein, 10 aa, Severe acute respiratory syndrome coronavirus 2
  REGION 1..10: note = Table A: HLA-B*42:01H HLA-B*53:01H HLA-B*35:03M HLA-C*15:05H HLA-B*35:01H HLA-B*35:02H HLA-B*35:07M HLA-B*35:12H HLA-B*07:04H
HPLADNKFAL

SEQ ID NO: 7808 - protein, 10 aa, Severe acute respiratory syndrome coronavirus 2
  REGION 1..10: note = Table A: HLA-A*02:06H
FACPDGVKHV

SEQ ID NO: 7809 - protein, 10 aa, Severe acute respiratory syndrome coronavirus 2
  REGION 1..10: note = Table A: HLA-B*46:01H HLA-A*30:02M HLA-C*12:02H HLA-B*15:01H HLA-B*15:02H
ACPDGVKHVY

SEQ ID NO: 7810 - protein, 10 aa, Severe acute respiratory syndrome coronavirus 2
  REGION 1..10: note = Table A: HLA-B*07:04M HLA-B*57:03H
RARSVSPKLF

SEQ ID NO: 7811 - protein, 10 aa, Severe acute respiratory syndrome coronavirus 2
  REGION 1..10: note = Table A: HLA-A*74:01M
RSVSPKLFIR

SEQ ID NO: 7812 - protein, 10 aa, Severe acute respiratory syndrome coronavirus 2
  REGION 1..10: note = Table A: HLA-B*38:02H
FIRQEEVQEL

SEQ ID NO: 7813 - protein, 10 aa, Severe acute respiratory syndrome coronavirus 2
  REGION 1..10: note = Table A: HLA-B*27:02H
IRQEEVQELY

SEQ ID NO: 7814 - protein, 10 aa, Severe acute respiratory syndrome coronavirus 2
  REGION 1..10: note = Table A: HLA-A*25:01H
EVQELYSPIF

SEQ ID NO: 7815 - protein, 10 aa, Severe acute respiratory syndrome coronavirus 2
  REGION 1..10: note = Table A: HLA-C*15:05H
SPIFLIVAAI

SEQ ID NO: 7816 - protein, 10 aa, Severe acute respiratory syndrome coronavirus 2
  REGION 1..10: note = Table A: HLA-A*68:02M HLA-C*15:05H
IVAAIVFITL

SEQ ID NO: 7817 - protein, 11 aa, Severe acute respiratory syndrome coronavirus 2
  REGION 1..11: note = Table A: HLA-A*34:02H
ECVRGTTVLLK

SEQ ID NO: 7818 - protein, 11 aa, Severe acute respiratory syndrome coronavirus 2
  REGION 1..11: note = Table A: HLA-A*30:02H HLA-B*15:01H
LLKEPCSSGTY

SEQ ID NO: 7819 - protein, 11 aa, Severe acute respiratory syndrome coronavirus 2
  REGION 1..11: note = Table A: HLA-C*08:01H
TYEGNSPFHPL

SEQ ID NO: 7820 - protein, 11 aa, Severe acute respiratory syndrome coronavirus 2
  REGION 1..11: note = Table A: HLA-B*42:01H HLA-B*56:01H HLA-B*53:01H HLA-B*55:02H HLA-B*35:03M HLA-C*15:05M HLA-B*35:01M HLA-B*35:02H HLA-B*35:08H HLA-B*35:07H HLA-B*35:12H HLA-B*38:02H HLA-B*54:01H HLA-B*07:02H HLA-B*07:04H HLA-B*07:05M
  REGION 1..11: note = CONT. FROM ABOVE: HLA-B*57:03H
SPFHPLADNKF

SEQ ID NO: 7821 - protein, 11 aa, Severe acute respiratory syndrome coronavirus 2
  REGION 1..11: note = Table A: HLA-B*13:02H
TQFAFACPDGV

SEQ ID NO: 7822 - protein, 11 aa, Severe acute respiratory syndrome coronavirus 2
  REGION 1..11: note = Table A: HLA-B*58:01H HLA-B*53:01H HLA-A*30:02H HLA-B*35:01M HLA-B*35:08H HLA-B*35:07H
FACPDGVKHVY

SEQ ID NO: 7823 - protein, 11 aa, Severe acute respiratory syndrome coronavirus 2
  REGION 1..11: note = Table A: HLA-B*42:01H HLA-C*15:05H HLA-B*07:02H HLA-B*07:04H
CPDGVKHVYQL

SEQ ID NO: 7824 - protein, 11 aa, Severe acute respiratory syndrome coronavirus 2
  REGION 1..11: note = Table A: HLA-B*58:02H
RARSVSPKLFI

SEQ ID NO: 7825 - protein, 11 aa, Severe acute respiratory syndrome coronavirus 2
  REGION 1..11: note = Table A: HLA-B*42:01H HLA-B*08:01H HLA-B*55:02H HLA-B*07:04H
SPKLFIRQEEV

SEQ ID NO: 7826 - protein, 11 aa, Severe acute respiratory syndrome coronavirus 2
  REGION 1..11: note = Table A: HLA-B*38:02H
FIRQEEVQELY

SEQ ID NO: 7827 - protein, 11 aa, Severe acute respiratory syndrome coronavirus 2
  REGION 1..11: note = Table A: HLA-A*68:02H
EVQELYSPIFL

SEQ ID NO: 7828 - protein, 8 aa, Severe acute respiratory syndrome coronavirus 2
  REGION 1..8: note = Table A: HLA-B*07:05H
IELSLIDF

SEQ ID NO: 7829 - protein, 8 aa, Severe acute respiratory syndrome coronavirus 2
  REGION 1..8: note = Table A: HLA-C*14:03H
IFWFSLEL

SEQ ID NO: 7830 - protein, 8 aa, Severe acute respiratory syndrome coronavirus 2
  REGION 1..8: note = Table A: HLA-B*39:06M
DHNETCHA

SEQ ID NO: 7831 - protein, 9 aa, Severe acute respiratory syndrome coronavirus 2
  REGION 1..9: note = Table A: HLA-A*36:01H HLA-B*44:03H HLA-B*18:01H HLA-A*30:02H HLA-B*07:05H
IELSLIDFY

SEQ ID NO: 7832 - protein, 9 aa, Severe acute respiratory syndrome coronavirus 2
  REGION 1..9: note = Table A: HLA-A*68:02M HLA-A*02:04H HLA-A*02:02H
ELSLIDFYL

SEQ ID NO: 7833 - protein, 9 aa, Severe acute respiratory syndrome coronavirus 2
  REGION 1..9: note = Table A: HLA-A*26:01H HLA-A*29:02H HLA-C*03:02H HLA-A*02:04H HLA-B*38:02H HLA-B*15:02H
SLIDFYLCF

SEQ ID NO: 7834 - protein, 9 aa, Severe acute respiratory syndrome coronavirus 2
  REGION 1..9: note = Table A: HLA-C*04:03H
LIDFYLCFL

SEQ ID NO: 7835 - protein, 9 aa, Severe acute respiratory syndrome coronavirus 2
  REGION 1..9: note = Table A: HLA-A*02:04H
FLAFLLFLV

SEQ ID NO: 7836 - protein, 9 aa, Severe acute respiratory syndrome coronavirus 2
  REGION 1..9: note = Table A: HLA-A*02:11H HLA-A*02:04H
LLFLVLIML

SEQ ID NO: 7837 - protein, 9 aa, Severe acute respiratory syndrome coronavirus 2
  REGION 1..9: note = Table A: HLA-C*15:02M HLA-C*08:01H
IIFWFSLEL

SEQ ID NO: 7838 - protein, 9 aa, Severe acute respiratory syndrome coronavirus 2
  REGION 1..9: note = Table A: HLA-B*38:02H
ELQDHNETC

SEQ ID NO: 7839 - protein, 9 aa, Severe acute respiratory syndrome coronavirus 2
  REGION 1..9: note = Table A: HLA-B*38:02H
QDHNETCHA

SEQ ID NO: 7840 - protein, 10 aa, Severe acute respiratory syndrome coronavirus 2
  REGION 1..10: note = Table A: HLA-A*36:01H
MIELSLIDFY

SEQ ID NO: 7841 - protein, 10 aa, Severe acute respiratory syndrome coronavirus 2
  REGION 1..10: note = Table A: HLA-A*02:11H HLA-A*02:04H HLA-A*02:01H HLA-A*02:02M HLA-A*02:03H
SLIDFYLCFL

SEQ ID NO: 7842 - protein, 10 aa, Severe acute respiratory syndrome coronavirus 2
  REGION 1..10: note = Table A: HLA-B*38:02H
LQDHNETCHA

SEQ ID NO: 7843 - protein, 8 aa, Severe acute respiratory syndrome coronavirus 2
  REGION 1..8: note = Table A: HLA-A*02:11M HLA-A*68:02H HLA-A*02:04H HLA-A*02:05H HLA-A*02:06H HLA-A*02:07H HLA-B*14:01H HLA-A*02:01H HLA-A*02:02M HLA-A*02:03H HLA-B*38:02M HLA-B*13:02H HLA-B*49:01H
FLGIITTV

SEQ ID NO: 7844 - protein, 8 aa, Severe acute respiratory syndrome coronavirus 2
  REGION 1..8: note = Table A: HLA-B*39:06H
LGIITTVA

SEQ ID NO: 7845 - protein, 8 aa, Severe acute respiratory syndrome coronavirus 2
  REGION 1..8: note = Table A: HLA-B*39:06H
GIITTVAA

SEQ ID NO: 7846 - protein, 8 aa, Severe acute respiratory syndrome coronavirus 2
  REGION 1..8: note = Table A: HLA-B*46:01H HLA-C*15:05H HLA-B*15:01H HLA-B*07:05H
IITTVAAF

SEQ ID NO: 7847 - protein, 8 aa, Severe acute respiratory syndrome coronavirus 2
  REGION 1..8: note = Table A: HLA-C*16:01H HLA-C*12:03H
VAAFHQEC

SEQ ID NO: 7848 - protein, 8 aa, Severe acute respiratory syndrome coronavirus 2
  REGION 1..8: note = Table A: HLA-B*52:01M HLA-B*38:02H HLA-B*39:06M HLA-B*39:01H HLA-B*13:02M
TQHQPYVV

SEQ ID NO: 7849 - protein, 8 aa, Severe acute respiratory syndrome coronavirus 2
  REGION 1..8: note = Table A: HLA-B*35:01H
DPCPIHFY

SEQ ID NO: 7850 - protein, 8 aa, Severe acute respiratory syndrome coronavirus 2
  REGION 1..8: note = Table A: HLA-A*33:03H
WYIRVGAR

SEQ ID NO: 7851 - protein, 8 aa, Severe acute respiratory syndrome coronavirus 2
  REGION 1..8: note = Table A: HLA-B*58:01H HLA-B*58:02H HLA-C*16:01H HLA-C*03:02H HLA-C*03:04H HLA-C*15:05M HLA-C*15:02H HLA-C*17:01H HLA-C*08:01H HLA-B*57:03M HLA-C*07:04H
KSAPLIEL

SEQ ID NO: 7852 - protein, 8 aa, Severe acute respiratory syndrome coronavirus 2
  REGION 1..8: note = Table A: HLA-C*15:05H
SPIQYIDI

SEQ ID NO: 7853 - protein, 8 aa, Severe acute respiratory syndrome coronavirus 2
  REGION 1..8: note = Table A: HLA-A*30:02H HLA-B*39:01H
QYIDIGNY

SEQ ID NO: 7854 - protein, 8 aa, Severe acute respiratory syndrome coronavirus 2
  REGION 1..8: note = Table A: HLA-B*38:02H HLA-B*40:02H HLA-B*41:02H
IDIGNYTV

SEQ ID NO: 7855 - protein, 8 aa, Severe acute respiratory syndrome coronavirus 2
  REGION 1..8: note = Table A: HLA-B*58:02H
VSCLPFTI

SEQ ID NO: 7856 - protein, 8 aa, Severe acute respiratory syndrome coronavirus 2
  REGION 1..8: note = Table A: HLA-A*74:01H
KLGSLVVR

SEQ ID NO: 7857 - protein, 8 aa, Severe acute respiratory syndrome coronavirus 2
  REGION 1..8: note = Table A: HLA-C*14:02H HLA-C*14:03H HLA-A*36:01H HLA-A*29:02H
FYEDFLEY

SEQ ID NO: 7858 - protein, 8 aa, Severe acute respiratory syndrome coronavirus 2
  REGION 1..8: note = Table A: HLA-B*49:01H
LEYHDVRV

SEQ ID NO: 7859 - protein, 8 aa, Severe acute respiratory syndrome coronavirus 2
  REGION 1..8: note = Table A: HLA-B*38:01H HLA-B*38:02M HLA-B*39:01H HLA-B*15:10M
YHDVRVVL

SEQ ID NO: 7860 - protein, 8 aa, Severe acute respiratory syndrome coronavirus 2
  REGION 1..8: note = Table A: HLA-B*15:02M
DVRVVLDF

SEQ ID NO: 7861 - protein, 8 aa, Severe acute respiratory syndrome coronavirus 2
  REGION 1..8: note = Table A: HLA-C*06:02H HLA-B*38:02H
VRVVLDFI

SEQ ID NO: 7862 - protein, 9 aa, Severe acute respiratory syndrome coronavirus 2
  REGION 1..9: note = Table A: HLA-C*14:02H HLA-C*14:03M HLA-A*29:02H HLA-C*04:01H HLA-C*04:03H HLA-A*02:11M HLA-C*15:05H HLA-A*02:04H HLA-A*02:07H HLA-A*02:01H HLA-A*02:03H HLA-A*24:02H HLA-B*51:01H HLA-A*24:07H HLA-B*52:01H HLA-C*08:01H
  REGION 1..9: note = CONT. FROM ABOVE: HLA-A*23:01M HLA-B*38:02M HLA-B*07:05H HLA- B*13:02H HLA-B*49:01H
VFLGIITTV

SEQ ID NO: 7863 - protein, 9 aa, Severe acute respiratory syndrome coronavirus 2
  REGION 1..9: note = Table A: HLA-A*02:02H HLA-A*02:03H
FLGIITTVA

SEQ ID NO: 7864 - protein, 9 aa, Severe acute respiratory syndrome coronavirus 2
  REGION 1..9: note = Table A: HLA-B*54:01H
LGIITTVAA

SEQ ID NO: 7865 - protein, 9 aa, Severe acute respiratory syndrome coronavirus 2
  REGION 1..9: note = Table A: HLA-A*11:303M HLA-A*25:01M HLA-B*46:01H HLA-A*26:01M HLA-A*26:02M HLA-A*26:03M HLA-C*03:02H HLA-C*15:05H HLA-C*12:02H HLA-A*02:03H HLA-B*35:01H HLA-B*38:02M HLA-B*15:01H HLA-B*15:02M HLA-B*15:03H
  REGION 1..9: note = CONT. FROM ABOVE: HLA-B*07:05H
GIITTVAAF

SEQ ID NO: 7866 - protein, 9 aa, Severe acute respiratory syndrome coronavirus 2
  REGION 1..9: note = Table A: HLA-A*68:02M HLA-A*02:05H HLA-A*02:08H HLA-B*38:02H
TVAAFHQEC

SEQ ID NO: 7867 - protein, 9 aa, Severe acute respiratory syndrome coronavirus 2
  REGION 1..9: note = Table A: HLA-B*48:01H HLA-A*11:303M HLA-B*46:01H HLA-C*03:03H HLA-C*12:05H HLA-C*03:02H HLA-C*03:04M HLA-B*35:03H HLA-C*15:05H HLA-C*12:02H HLA-C*12:03H HLA-A*02:05H HLA-A*02:02H HLA-C*07:27H HLA-B*35:02H
  REGION 1..9: note = CONT. FROM ABOVE: HLA-C*17:01H HLA-C*08:01M HLA-B*35:12H HLA- B*38:02M HLA-B*39:01H
AAFHQECSL

SEQ ID NO: 7868 - protein, 9 aa, Severe acute respiratory syndrome coronavirus 2
  REGION 1..9: note = Table A: HLA-A*02:11H HLA-A*68:02H
CTQHQPYVV

SEQ ID NO: 7869 - protein, 9 aa, Severe acute respiratory syndrome coronavirus 2
  REGION 1..9: note = Table A: HLA-B*35:02H HLA-B*35:12H
QPYVVDDPC

SEQ ID NO: 7870 - protein, 9 aa, Severe acute respiratory syndrome coronavirus 2
  REGION 1..9: note = Table A: HLA-A*68:02H HLA-A*02:06H HLA-B*35:02H HLA-C*08:01H HLA-B*35:12H HLA-B*38:02H
YVVDDPCPI

SEQ ID NO: 7871 - protein, 9 aa, Severe acute respiratory syndrome coronavirus 2
  REGION 1..9: note = Table A: HLA-C*04:03M
VDDPCPIHF

SEQ ID NO: 7872 - protein, 9 aa, Severe acute respiratory syndrome coronavirus 2
  REGION 1..9: note = Table A: HLA-B*53:01M
CPIHFYSKW

SEQ ID NO: 7873 - protein, 9 aa, Severe acute respiratory syndrome coronavirus 2
  REGION 1..9: note = Table A: HLA-B*38:02M
IHFYSKWYI

SEQ ID NO: 7874 - protein, 9 aa, Severe acute respiratory syndrome coronavirus 2
  REGION 1..9: note = Table A: HLA-B*39:06H
SKWYIRVGA

SEQ ID NO: 7875 - protein, 9 aa, Severe acute respiratory syndrome coronavirus 2
  REGION 1..9: note = Table A: HLA-B*57:03H
GARKSAPLI

SEQ ID NO: 7876 - protein, 9 aa, Severe acute respiratory syndrome coronavirus 2
  REGION 1..9: note = Table A: HLA-B*48:01M HLA-B*15:03M
RKSAPLIEL

SEQ ID NO: 7877 - protein, 9 aa, Severe acute respiratory syndrome coronavirus 2
  REGION 1..9: note = Table A: HLA-A*68:02H HLA-A*02:05H HLA-A*02:08M HLA-B*57:03H
KSAPLIELC

SEQ ID NO: 7878 - protein, 9 aa, Severe acute respiratory syndrome coronavirus 2
  REGION 1..9: note = Table A: HLA-C*15:05H HLA-B*51:01H HLA-B*13:02H
SAPLIELCV

SEQ ID NO: 7879 - protein, 9 aa, Severe acute respiratory syndrome coronavirus 2
  REGION 1..9: note = Table A: HLA-B*58:02M HLA-B*57:01H HLA-A*30:01H HLA-B*57:03H HLA-B*13:02H
GSKSPIQYI

SEQ ID NO: 7880 - protein, 9 aa, Severe acute respiratory syndrome coronavirus 2
  REGION 1..9: note = Table A: HLA-B*57:03H
KSPIQYIDI

SEQ ID NO: 7881 - protein, 9 aa, Severe acute respiratory syndrome coronavirus 2
  REGION 1..9: note = Table A: HLA-A*30:02M HLA-B*38:02H HLA-B*15:01M HLA-B*15:02H HLA-B*15:03M
IQYIDIGNY

SEQ ID NO: 7882 - protein, 9 aa, Severe acute respiratory syndrome coronavirus 2
  REGION 1..9: note = Table A: HLA-C*04:03M HLA-A*02:11M HLA-A*02:04H HLA-A*02:05H HLA-A*02:06M HLA-A*02:07M HLA-A*02:01M HLA-A*02:02H HLA-B*35:02H HLA-C*08:01H HLA-C*08:02M HLA-B*38:02H HLA-C*05:01H
YIDIGNYTV

SEQ ID NO: 7883 - protein, 9 aa, Severe acute respiratory syndrome coronavirus 2
  REGION 1..9: note = Table A: HLA-A*68:02H HLA-B*13:02H
TVSCLPFTI

SEQ ID NO: 7884 - protein, 9 aa, Severe acute respiratory syndrome coronavirus 2
  REGION 1..9: note = Table A: HLA-A*34:02H HLA-A*66:01H
FTINCQEPK

SEQ ID NO: 7885 - protein, 9 aa, Severe acute respiratory syndrome coronavirus 2
  REGION 1..9: note = Table A: HLA-B*49:01M
QEPKLGSLV

SEQ ID NO: 7886 - protein, 9 aa, Severe acute respiratory syndrome coronavirus 2
  REGION 1..9: note = Table A: HLA-B*55:01H HLA-B*51:01H
EPKLGSLVV

SEQ ID NO: 7887 - protein, 9 aa, Severe acute respiratory syndrome coronavirus 2
  REGION 1..9: note = Table A: HLA-A*02:11H HLA-A*02:02H
KLGSLVVRC

SEQ ID NO: 7888 - protein, 9 aa, Severe acute respiratory syndrome coronavirus 2
  REGION 1..9: note = Table A: HLA-B*57:03H
GSLVVRCSF

SEQ ID NO: 7889 - protein, 9 aa, Severe acute respiratory syndrome coronavirus 2
  REGION 1..9: note = Table A: HLA-C*14:02H HLA-C*14:03H HLA-A*36:01H HLA-B*46:01H HLA-A*29:01H HLA-A*29:02H HLA-C*03:02M HLA-A*30:02H HLA-C*15:05H HLA-A*34:02H HLA-B*35:01H HLA-B*35:07H HLA-B*38:02M HLA-B*15:02M HLA-B*15:03H HLA-B*07:05H
SFYEDFLEY

SEQ ID NO: 7890 - protein, 9 aa, Severe acute respiratory syndrome coronavirus 2
  REGION 1..9: note = Table A: HLA-A*68:02H
EDFLEYHDV

SEQ ID NO: 7891 - protein, 9 aa, Severe acute respiratory syndrome coronavirus 2
  REGION 1..9: note = Table A: HLA-A*33:01H HLA-A*33:03H
DFLEYHDVR

SEQ ID NO: 7892 - protein, 9 aa, Severe acute respiratory syndrome coronavirus 2
  REGION 1..9: note = Table A: HLA-C*04:03H HLA-A*02:11H HLA-A*02:04H HLA-A*02:06H HLA-A*02:07H HLA-A*02:02M HLA-B*38:02H
FLEYHDVRV

SEQ ID NO: 7893 - protein, 9 aa, Severe acute respiratory syndrome coronavirus 2
  REGION 1..9: note = Table A: HLA-B*45:01H HLA-B*40:02M HLA-B*40:06M HLA-B*41:02M HLA-B*49:01H HLA-B*50:01M
LEYHDVRVV

SEQ ID NO: 7894 - protein, 9 aa, Severe acute respiratory syndrome coronavirus 2
  REGION 1..9: note = Table A: HLA-A*33:03H HLA-A*24:02H HLA-A*24:07M HLA-C*08:01H HLA-A*23:01H
EYHDVRVVL

SEQ ID NO: 7895 - protein, 9 aa, Severe acute respiratory syndrome coronavirus 2
  REGION 1..9: note = Table A: HLA-B*40:02H
HDVRVVLDF

SEQ ID NO: 7896 - protein, 9 aa, Severe acute respiratory syndrome coronavirus 2
  REGION 1..9: note = Table A: HLA-A*33:01H HLA-A*68:02H HLA-C*15:05H HLA-B*51:01M HLA-C*08:01H HLA-B*38:02M HLA-B*13:02H
DVRVVLDFI

SEQ ID NO: 7897 - protein, 10 aa, Severe acute respiratory syndrome coronavirus 2
  REGION 1..10: note = Table A: HLA-A*02:11H HLA-B*55:02H HLA-A*68:02M HLA-A*02:04H HLA-A*02:05M HLA-A*02:06H HLA-A*02:08M HLA-A*02:02H HLA-A*02:03M HLA-B*38:02H HLA-B*54:01H
LVFLGIITTV

SEQ ID NO: 7898 - protein, 10 aa, Severe acute respiratory syndrome coronavirus 2
  REGION 1..10: note = Table A: HLA-A*68:02H
TTVAAFHQEC

SEQ ID NO: 7899 - protein, 10 aa, Severe acute respiratory syndrome coronavirus 2
  REGION 1..10: note = Table A: HLA-B*38:02H
FHQECSLQSC

SEQ ID NO: 7900 - protein, 10 aa, Severe acute respiratory syndrome coronavirus 2
  REGION 1..10: note = Table A: HLA-C*04:03H HLA-A*02:07M HLA-C*08:02H HLA-C*05:01M
VVDDPCPIHF

SEQ ID NO: 7901 - protein, 10 aa, Severe acute respiratory syndrome coronavirus 2
  REGION 1..10: note = Table A: HLA-A*36:01H HLA-A*01:01H
VDDPCPIHFY

SEQ ID NO: 7902 - protein, 10 aa, Severe acute respiratory syndrome coronavirus 2
  REGION 1..10: note = Table A: HLA-B*27:05H
ARKSAPLIEL

SEQ ID NO: 7903 - protein, 10 aa, Severe acute respiratory syndrome coronavirus 2
  REGION 1..10: note = Table A: HLA-C*15:02H HLA-B*13:02H
KSAPLIELCV

SEQ ID NO: 7904 - protein, 10 aa, Severe acute respiratory syndrome coronavirus 2
  REGION 1..10: note = Table A: HLA-A*68:02H HLA-A*02:02H HLA-A*24:02H HLA-C*08:01H HLA-A*23:01H
QYIDIGNYTV

SEQ ID NO: 7905 - protein, 10 aa, Severe acute respiratory syndrome coronavirus 2
  REGION 1..10: note = Table A: HLA-B*45:01H HLA-B*40:02H HLA-B*49:01H
QEPKLGSLVV

SEQ ID NO: 7906 - protein, 10 aa, Severe acute respiratory syndrome coronavirus 2
  REGION 1..10: note = Table A: HLA-A*33:03H HLA-A*34:01M HLA-A*66:01H
EPKLGSLVVR

SEQ ID NO: 7907 - protein, 10 aa, Severe acute respiratory syndrome coronavirus 2
  REGION 1..10: note = Table A: HLA-A*02:02H HLA-A*02:03H
FLEYHDVRVV

SEQ ID NO: 7908 - protein, 10 aa, Severe acute respiratory syndrome coronavirus 2
  REGION 1..10: note = Table A: HLA-B*40:01H HLA-B*40:02H
LEYHDVRVVL

SEQ ID NO: 7909 - protein, 10 aa, Severe acute respiratory syndrome coronavirus 2
  REGION 1..10: note = Table A: HLA-B*38:02H
YHDVRVVLDF

SEQ ID NO: 7910 - protein, 10 aa, Severe acute respiratory syndrome coronavirus 2
  REGION 1..10: note = Table A: HLA-A*68:02M HLA-C*08:01H HLA-C*08:03H HLA-B*38:02M HLA-B*40:02H HLA-B*13:02H
HDVRVVLDFI

SEQ ID NO: 7911 - protein, 11 aa, Severe acute respiratory syndrome coronavirus 2
  REGION 1..11: note = Table A: HLA-A*02:11M HLA-A*02:04H HLA-A*02:03H HLA-B*38:02H
FLVFLGIITTV

SEQ ID NO: 7912 - protein, 11 aa, Severe acute respiratory syndrome coronavirus 2
  REGION 1..11: note = Table A: HLA-B*55:02H HLA-B*54:01H
LVFLGIITTVA

SEQ ID NO: 7913 - protein, 11 aa, Severe acute respiratory syndrome coronavirus 2
  REGION 1..11: note = Table A: HLA-A*36:01H
VVDDPCPIHFY

SEQ ID NO: 7914 - protein, 11 aa, Severe acute respiratory syndrome coronavirus 2
  REGION 1..11: note = Table A: HLA-B*53:01H
DPCPIHFYSKW

SEQ ID NO: 7915 - protein, 11 aa, Severe acute respiratory syndrome coronavirus 2
  REGION 1..11: note = Table A: HLA-B*18:01H HLA-B*07:05H
DEAGSKSPIQY

SEQ ID NO: 7916 - protein, 11 aa, Severe acute respiratory syndrome coronavirus 2
  REGION 1..11: note = Table A: HLA-A*26:01H HLA-A*30:02H HLA-B*35:01M HLA-B*35:08H HLA-B*35:07H
SPIQYIDIGNY

SEQ ID NO: 7917 - protein, 11 aa, Severe acute respiratory syndrome coronavirus 2
  REGION 1..11: note = Table A: HLA-A*02:11H HLA-A*02:06H HLA-B*13:02H
IQYIDIGNYTV

SEQ ID NO: 7918 - protein, 11 aa, Severe acute respiratory syndrome coronavirus 2
  REGION 1..11: note = Table A: HLA-C*04:03H HLA-B*38:01H HLA-B*38:02H
YHDVRVVLDFI

SEQ ID NO: 7919 - protein, 8 aa, Severe acute respiratory syndrome coronavirus 2
  REGION 1..8: note = Table A: HLA-A*33:01H HLA-A*33:03H
DNGPQNQR

SEQ ID NO: 7920 - protein, 8 aa, Severe acute respiratory syndrome coronavirus 2
  REGION 1..8: note = Table A: HLA-B*52:01M
NQRNAPRI

SEQ ID NO: 7921 - protein, 8 aa, Severe acute respiratory syndrome coronavirus 2
  REGION 1..8: note = Table A: HLA-B*39:01H
FGGPSDST

SEQ ID NO: 7922 - protein, 8 aa, Severe acute respiratory syndrome coronavirus 2
  REGION 1..8: note = Table A: HLA-B*53:01M
LPNNTASW

SEQ ID NO: 7923 - protein, 8 aa, Severe acute respiratory syndrome coronavirus 2
  REGION 1..8: note = Table A: HLA-B*35:01H HLA-B*35:08H
SPDDQIGY

SEQ ID NO: 7924 - protein, 8 aa, Severe acute respiratory syndrome coronavirus 2
  REGION 1..8: note = Table A: HLA-A*36:01H
PDDQIGYY

SEQ ID NO: 7925 - protein, 8 aa, Severe acute respiratory syndrome coronavirus 2
  REGION 1..8: note = Table A: HLA-A*33:01H
DDQIGYYR

SEQ ID NO: 7926 - protein, 8 aa, Severe acute respiratory syndrome coronavirus 2
  REGION 1..8: note = Table A: HLA-A*11:303H HLA-A*02:01H HLA-A*02:03H HLA-B*38:02H HLA-B*54:01H HLA-B*39:01H
YLGTGPEA

SEQ ID NO: 7927 - protein, 8 aa, Severe acute respiratory syndrome coronavirus 2
  REGION 1..8: note = Table A: HLA-B*40:06H
KDGIIWVA

SEQ ID NO: 7928 - protein, 8 aa, Severe acute respiratory syndrome coronavirus 2
  REGION 1..8: note = Table A: HLA-C*15:05H
NPANNAAI

SEQ ID NO: 7929 - protein, 8 aa, Severe acute respiratory syndrome coronavirus 2
  REGION 1..8: note = Table A: HLA-C*15:05H HLA-B*51:01M HLA-C*17:01H HLA-B*07:05H
NAAIVLQL

SEQ ID NO: 7930 - protein, 8 aa, Severe acute respiratory syndrome coronavirus 2
  REGION 1..8: note = Table A: HLA-C*01:02H
QLPQGTTL

SEQ ID NO: 7931 - protein, 8 aa, Severe acute respiratory syndrome coronavirus 2
  REGION 1..8: note = Table A: HLA-A*11:01H HLA-A*11:02H
PQGTTLPK

SEQ ID NO: 7932 - protein, 8 aa, Severe acute respiratory syndrome coronavirus 2
  REGION 1..8: note = Table A: HLA-C*15:05H HLA-B*51:01M
DAALALLL

SEQ ID NO: 7933 - protein, 8 aa, Severe acute respiratory syndrome coronavirus 2
  REGION 1..8: note = Table A: HLA-C*04:03H HLA-A*02:11H HLA-A*02:02H HLA-C*08:02H
LLDRLNQL

SEQ ID NO: 7934 - protein, 8 aa, Severe acute respiratory syndrome coronavirus 2
  REGION 1..8: note = Table A: HLA-B*52:01H HLA-B*13:02H
QQQQGQTV

SEQ ID NO: 7935 - protein, 8 aa, Severe acute respiratory syndrome coronavirus 2
  REGION 1..8: note = Table A: HLA-A*11:01H
QQGQTVTK

SEQ ID NO: 7936 - protein, 8 aa, Severe acute respiratory syndrome coronavirus 2
  REGION 1..8: note = Table A: HLA-A*03:02H
QGQTVTKK

SEQ ID NO: 7937 - protein, 8 aa, Severe acute respiratory syndrome coronavirus 2
  REGION 1..8: note = Table A: HLA-B*58:01H HLA-C*15:05H HLA-B*51:01H HLA-B*13:02H
TATKAYNV

SEQ ID NO: 7938 - protein, 8 aa, Severe acute respiratory syndrome coronavirus 2
  REGION 1..8: note = Table A: HLA-C*14:02H HLA-C*14:03H HLA-B*46:01H HLA-C*15:05H HLA-A*24:02H HLA-A*23:01H HLA-B*37:01M HLA-B*15:01H HLA-B*39:01H
AYNVTQAF

SEQ ID NO: 7939 - protein, 8 aa, Severe acute respiratory syndrome coronavirus 2
  REGION 1..8: note = Table A: HLA-A*68:01H HLA-A*34:01H HLA-A*66:01H
NVTQAFGR

SEQ ID NO: 7940 - protein, 8 aa, Severe acute respiratory syndrome coronavirus 2
  REGION 1..8: note = Table A: HLA-B*46:01M HLA-B*38:02H HLA-B*15:02H
LIRQGTDY

SEQ ID NO: 7941 - protein, 8 aa, Severe acute respiratory syndrome coronavirus 2
  REGION 1..8: note = Table A: HLA-B*46:01H HLA-C*01:02H HLA-B*51:01H
FAPSASAF

SEQ ID NO: 7942 - protein, 8 aa, Severe acute respiratory syndrome coronavirus 2
  REGION 1..8: note = Table A: HLA-C*15:05H HLA-B*07:05H
APSASAFF

SEQ ID NO: 7943 - protein, 8 aa, Severe acute respiratory syndrome coronavirus 2
  REGION 1..8: note = Table A: HLA-A*11:01H HLA-A*11:02H HLA-A*33:03H HLA-A*34:01M HLA-A*34:02H HLA-A*66:01M
SAFFGMSR

SEQ ID NO: 7944 - protein, 8 aa, Severe acute respiratory syndrome coronavirus 2
  REGION 1..8: note = Table A: HLA-B*52:01H
AFFGMSRI

SEQ ID NO: 7945 - protein, 8 aa, Severe acute respiratory syndrome coronavirus 2
  REGION 1..8: note = Table A: HLA-B*08:01H
FGMSRIGM

SEQ ID NO: 7946 - protein, 8 aa, Severe acute respiratory syndrome coronavirus 2
  REGION 1..8: note = Table A: HLA-C*16:01H HLA-C*03:02H HLA-C*15:05H HLA-B*51:01H HLA-B*52:01H
MSRIGMEV

SEQ ID NO: 7947 - protein, 8 aa, Severe acute respiratory syndrome coronavirus 2
  REGION 1..8: note = Table A: HLA-A*25:01M HLA-B*15:13M
EVTPSGTW

SEQ ID NO: 7948 - protein, 8 aa, Severe acute respiratory syndrome coronavirus 2
  REGION 1..8: note = Table A: HLA-C*01:02H
VTPSGTWL

SEQ ID NO: 7949 - protein, 8 aa, Severe acute respiratory syndrome coronavirus 2
  REGION 1..8: note = Table A: HLA-A*24:07H HLA-B*39:01H
TYTGAIKL

SEQ ID NO: 7950 - protein, 8 aa, Severe acute respiratory syndrome coronavirus 2
  REGION 1..8: note = Table A: HLA-C*04:03H
FKDQVILL

SEQ ID NO: 7951 - protein, 8 aa, Severe acute respiratory syndrome coronavirus 2
  REGION 1..8: note = Table A: HLA-B*15:01H
LNKHIDAY

SEQ ID NO: 7952 - protein, 8 aa, Severe acute respiratory syndrome coronavirus 2
  REGION 1..8: note = Table A: HLA-B*57:03H
KTFPPTEP

SEQ ID NO: 7953 - protein, 8 aa, Severe acute respiratory syndrome coronavirus 2
  REGION 1..8: note = Table A: HLA-C*15:05H HLA-C*08:02M HLA-C*05:01H
KADETQAL

SEQ ID NO: 7954 - protein, 8 aa, Severe acute respiratory syndrome coronavirus 2
  REGION 1..8: note = Table A: HLA-A*33:01H HLA-A*33:03M HLA-A*68:01H HLA-A*34:02H
ETQALPQR

SEQ ID NO: 7955 - protein, 8 aa, Severe acute respiratory syndrome coronavirus 2
  REGION 1..8: note = Table A: HLA-A*11:02H
QALPQRQK

SEQ ID NO: 7956 - protein, 8 aa, Severe acute respiratory syndrome coronavirus 2
  REGION 1..8: note = Table A: HLA-B*52:01M HLA-B*13:02H
RQKKQQTV

SEQ ID NO: 7957 - protein, 8 aa, Severe acute respiratory syndrome coronavirus 2
  REGION 1..8: note = Table A: HLA-B*48:01H
KKQQTVTL

SEQ ID NO: 7958 - protein, 8 aa, Severe acute respiratory syndrome coronavirus 2
  REGION 1..8: note = Table A: HLA-B*48:01H HLA-B*52:01H HLA-B*15:01H
KQQTVTLL

SEQ ID NO: 7959 - protein, 8 aa, Severe acute respiratory syndrome coronavirus 2
  REGION 1..8: note = Table A: HLA-B*56:01H HLA-B*55:02H HLA-B*55:01M HLA-B*39:06H HLA-B*54:01M
TVTLLPAA

SEQ ID NO: 7960 - protein, 8 aa, Severe acute respiratory syndrome coronavirus 2
  REGION 1..8: note = Table A: HLA-C*08:02H HLA-B*40:02H HLA-B*41:02H
LDDFSKQL

SEQ ID NO: 7961 - protein, 9 aa, Severe acute respiratory syndrome coronavirus 2
  REGION 1..9: note = Table A: HLA-A*33:01H HLA-A*33:03H HLA-A*68:01H
SDNGPQNQR

SEQ ID NO: 7962 - protein, 9 aa, Severe acute respiratory syndrome coronavirus 2
  REGION 1..9: note = Table A: HLA-B*07:02H
GPQNQRNAP

SEQ ID NO: 7963 - protein, 9 aa, Severe acute respiratory syndrome coronavirus 2
  REGION 1..9: note = Table A: HLA-A*74:01H HLA-A*34:01H
PQNQRNAPR

SEQ ID NO: 7964 - protein, 9 aa, Severe acute respiratory syndrome coronavirus 2
  REGION 1..9: note = Table A: HLA-B*27:05H HLA-C*07:01H HLA-B*27:02H HLA-B*14:02H HLA-B*38:02H
QRNAPRITF

SEQ ID NO: 7965 - protein, 9 aa, Severe acute respiratory syndrome coronavirus 2
  REGION 1..9: note = Table A: HLA-B*55:01H HLA-B*07:02H HLA-B*50:01H
APRITFGGP

SEQ ID NO: 7966 - protein, 9 aa, Severe acute respiratory syndrome coronavirus 2
  REGION 1..9: note = Table A: HLA-B*56:01H HLA-B*55:02H HLA-C*15:05H
RPQGLPNNT

SEQ ID NO: 7967 - protein, 9 aa, Severe acute respiratory syndrome coronavirus 2
  REGION 1..9: note = Table A: HLA-B*15:13H
GLPNNTASW

SEQ ID NO: 7968 - protein, 9 aa, Severe acute respiratory syndrome coronavirus 2
  REGION 1..9: note = Table A: HLA-B*53:01H
LPNNTASWF

SEQ ID NO: 7969 - protein, 9 aa, Severe acute respiratory syndrome coronavirus 2
  REGION 1..9: note = Table A: HLA-A*25:01H HLA-C*03:03H HLA-C*03:04H HLA-A*68:02M HLA-C*15:05H HLA-A*02:04H HLA-A*34:02H HLA-C*08:01H HLA-A*66:01H
NTASWFTAL

SEQ ID NO: 7970 - protein, 9 aa, Severe acute respiratory syndrome coronavirus 2
  REGION 1..9: note = Table A: HLA-C*14:03H
SWFTALTQH

SEQ ID NO: 7971 - protein, 9 aa, Severe acute respiratory syndrome coronavirus 2
  REGION 1..9: note = Table A: HLA-A*68:01H HLA-A*34:02M HLA-A*66:01H
FTALTQHGK

SEQ ID NO: 7972 - protein, 9 aa, Severe acute respiratory syndrome coronavirus 2
  REGION 1..9: note = Table A: HLA-B*38:01M HLA-B*38:02H
QHGKEDLKF

SEQ ID NO: 7973 - protein, 9 aa, Severe acute respiratory syndrome coronavirus 2
  REGION 1..9: note = Table A: HLA-C*15:05H HLA-A*34:01H HLA-B*51:01H HLA-B*54:01H HLA-B*07:02H HLA-B*07:04H
FPRGQGVPI

SEQ ID NO: 7974 - protein, 9 aa, Severe acute respiratory syndrome coronavirus 2
  REGION 1..9: note = Table A: HLA-A*36:01M HLA-A*01:01H HLA-B*53:01H HLA-A*30:02H HLA-C*15:05H HLA-A*34:02H HLA-B*35:01M HLA-B*35:08M HLA-B*35:07H HLA-B*38:02H HLA-B*39:01M HLA-B*07:05H
SPDDQIGYY

SEQ ID NO: 7975 - protein, 9 aa, Severe acute respiratory syndrome coronavirus 2
  REGION 1..9: note = Table A: HLA-A*33:01M
DDQIGYYRR

SEQ ID NO: 7976 - protein, 9 aa, Severe acute respiratory syndrome coronavirus 2
  REGION 1..9: note = Table A: HLA-B*07:04M
RIRGGDGKM

SEQ ID NO: 7977 - protein, 9 aa, Severe acute respiratory syndrome coronavirus 2
  REGION 1..9: note = Table A: HLA-B*58:01H HLA-A*32:01M HLA-B*57:03H
KMKDLSPRW

SEQ ID NO: 7978 - protein, 9 aa, Severe acute respiratory syndrome coronavirus 2
  REGION 1..9: note = Table A: HLA-A*36:01H
LSPRWYFYY

SEQ ID NO: 7979 - protein, 9 aa, Severe acute respiratory syndrome coronavirus 2
  REGION 1..9: note = Table A: HLA-B*42:01M HLA-B*07:04M
SPRWYFYYL

SEQ ID NO: 7980 - protein, 9 aa, Severe acute respiratory syndrome coronavirus 2
  REGION 1..9: note = Table A: HLA-C*14:02H HLA-C*14:03H HLA-C*08:01H HLA-B*54:01H HLA-B*39:01H
YYLGTGPEA

SEQ ID NO: 7981 - protein, 9 aa, Severe acute respiratory syndrome coronavirus 2
  REGION 1..9: note = Table A: HLA-C*14:02H HLA-C*14:03H HLA-A*36:01H HLA-B*46:01H HLA-B*35:01H HLA-B*15:02H
TGPEAGLPY

SEQ ID NO: 7982 - protein, 9 aa, Severe acute respiratory syndrome coronavirus 2
  REGION 1..9: note = Table A: HLA-A*03:02H HLA-A*11:01H HLA-A*11:02H
AGLPYGANK

SEQ ID NO: 7983 - protein, 9 aa, Severe acute respiratory syndrome coronavirus 2
  REGION 1..9: note = Table A: HLA-B*58:01H HLA-B*53:01H HLA-B*57:03H
GANKDGIIW

SEQ ID NO: 7984 - protein, 9 aa, Severe acute respiratory syndrome coronavirus 2
  REGION 1..9: note = Table A: HLA-B*39:06H
NKDGIIWVA

SEQ ID NO: 7985 - protein, 9 aa, Severe acute respiratory syndrome coronavirus 2
  REGION 1..9: note = Table A: HLA-A*02:11H
IIWVATEGA

SEQ ID NO: 7986 - protein, 9 aa, Severe acute respiratory syndrome coronavirus 2
  REGION 1..9: note = Table A: HLA-A*03:02H HLA-A*11:01H
TEGALNTPK

SEQ ID NO: 7987 - protein, 9 aa, Severe acute respiratory syndrome coronavirus 2
  REGION 1..9: note = Table A: HLA-B*13:01H HLA-B*13:02H
ALNTPKDHI

SEQ ID NO: 7988 - protein, 9 aa, Severe acute respiratory syndrome coronavirus 2
  REGION 1..9: note = Table A: HLA-A*33:01H HLA-A*33:03M HLA-A*26:03M HLA-A*68:01H HLA-B*55:01H HLA-A*34:01H HLA-A*34:02H HLA-B*07:04H HLA-A*66:01M
TPKDHIGTR

SEQ ID NO: 7989 - protein, 9 aa, Severe acute respiratory syndrome coronavirus 2
  REGION 1..9: note = Table A: HLA-B*39:06H
DHIGTRNPA

SEQ ID NO: 7990 - protein, 9 aa, Severe acute respiratory syndrome coronavirus 2
  REGION 1..9: note = Table A: HLA-B*39:06M HLA-B*39:01H
TRNPANNAA

SEQ ID NO: 7991 - protein, 9 aa, Severe acute respiratory syndrome coronavirus 2
  REGION 1..9: note = Table A: HLA-B*35:03H HLA-C*15:05H
NPANNAAIV

SEQ ID NO: 7992 - protein, 9 aa, Severe acute respiratory syndrome coronavirus 2
  REGION 1..9: note = Table A: HLA-B*35:03H HLA-C*15:05H
PANNAAIVL

SEQ ID NO: 7993 - protein, 9 aa, Severe acute respiratory syndrome coronavirus 2
  REGION 1..9: note = Table A: HLA-A*68:02H
NNAAIVLQL

SEQ ID NO: 7994 - protein, 9 aa, Severe acute respiratory syndrome coronavirus 2
  REGION 1..9: note = Table A: HLA-B*48:01M HLA-A*11:303H HLA-B*14:01H HLA-B*38:02H HLA-B*15:01H HLA-B*15:03H HLA-B*39:01H HLA-B*15:10H
LQLPQGTTL

SEQ ID NO: 7995 - protein, 9 aa, Severe acute respiratory syndrome coronavirus 2
  REGION 1..9: note = Table A: HLA-A*03:02H HLA-A*68:01H HLA-A*34:01M HLA-A*34:02M HLA-A*66:01H
LPQGTTLPK

SEQ ID NO: 7996 - protein, 9 aa, Severe acute respiratory syndrome coronavirus 2
  REGION 1..9: note = Table A: HLA-A*36:01H HLA-A*30:02M
GTTLPKGFY

SEQ ID NO: 7997 - protein, 9 aa, Severe acute respiratory syndrome coronavirus 2
  REGION 1..9: note = Table A: HLA-A*02:11H HLA-A*34:02H
TTLPKGFYA

SEQ ID NO: 7998 - protein, 9 aa, Severe acute respiratory syndrome coronavirus 2
  REGION 1..9: note = Table A: HLA-B*56:01H HLA-B*55:01H HLA-B*54:01H
LPKGFYAEG

SEQ ID NO: 7999 - protein, 9 aa, Severe acute respiratory syndrome coronavirus 2
  REGION 1..9: note = Table A: HLA-B*39:01H
SRNSTPGSS

SEQ ID NO: 8000 - protein, 9 aa, Severe acute respiratory syndrome coronavirus 2
  REGION 1..9: note = Table A: HLA-A*33:03H HLA-A*34:01H HLA-A*31:01H
RNSTPGSSR

SEQ ID NO: 8001 - protein, 9 aa, Severe acute respiratory syndrome coronavirus 2
  REGION 1..9: note = Table A: HLA-A*11:303H HLA-B*35:03H HLA-C*15:05H HLA-B*35:02M HLA-B*35:12M HLA-B*38:02H HLA-B*39:01M
AGNGGDAAL

SEQ ID NO: 8002 - protein, 9 aa, Severe acute respiratory syndrome coronavirus 2
  REGION 1..9: note = Table A: HLA-B*35:03H HLA-B*39:01H
NGGDAALAL

SEQ ID NO: 8003 - protein, 9 aa, Severe acute respiratory syndrome coronavirus 2
  REGION 1..9: note = Table A: HLA-C*15:05H HLA-B*51:01H
DAALALLLL

SEQ ID NO: 8004 - protein, 9 aa, Severe acute respiratory syndrome coronavirus 2
  REGION 1..9: note = Table A: HLA-A*02:11H HLA-C*08:01H
LALLLLDRL

SEQ ID NO: 8005 - protein, 9 aa, Severe acute respiratory syndrome coronavirus 2
  REGION 1..9: note = Table A: HLA-A*11:303H HLA-B*08:01M HLA-A*02:11H HLA-A*02:04H HLA-A*02:05H HLA-A*02:06H HLA-A*02:07M HLA-B*14:01M HLA-A*02:01H HLA-A*02:02H HLA-A*02:03M HLA-C*08:01H HLA-B*38:02H HLA-B*40:06H
LLLDRLNQL

SEQ ID NO: 8006 - protein, 9 aa, Severe acute respiratory syndrome coronavirus 2
  REGION 1..9: note = Table A: HLA-A*02:11H HLA-A*30:02H HLA-A*02:02M HLA-B*38:02H HLA-B*15:01M HLA-B*13:01M HLA-B*13:02H
RLNQLESKM

SEQ ID NO: 8007 - protein, 9 aa, Severe acute respiratory syndrome coronavirus 2
  REGION 1..9: note = Table A: HLA-A*03:01H HLA-A*03:02H
QLESKMSGK

SEQ ID NO: 8008 - protein, 9 aa, Severe acute respiratory syndrome coronavirus 2
  REGION 1..9: note = Table A: HLA-B*48:01H HLA-B*52:01M HLA-B*38:02H HLA-B*15:01M HLA-B*39:01H HLA-B*13:02H
GQQQQGQTV

SEQ ID NO: 8009 - protein, 9 aa, Severe acute respiratory syndrome coronavirus 2
  REGION 1..9: note = Table A: HLA-B*39:01H
QQQQGQTVT

SEQ ID NO: 8010 - protein, 9 aa, Severe acute respiratory syndrome coronavirus 2
  REGION 1..9: note = Table A: HLA-A*11:303H HLA-A*03:02M HLA-A*11:01M HLA-A*11:02M HLA-A*30:02H HLA-C*07:27H HLA-B*15:01H HLA-B*13:02H
QQQGQTVTK

SEQ ID NO: 8011 - protein, 9 aa, Severe acute respiratory syndrome coronavirus 2
  REGION 1..9: note = Table A: HLA-A*03:01H HLA-A*03:02H HLA-A*11:01H
QQGQTVTKK

SEQ ID NO: 8012 - protein, 9 aa, Severe acute respiratory syndrome coronavirus 2
  REGION 1..9: note = Table A: HLA-B*39:06M HLA-B*15:01H HLA-B*13:02H HLA-B*50:01H
GQTVTKKSA

SEQ ID NO: 8013 - protein, 9 aa, Severe acute respiratory syndrome coronavirus 2
  REGION 1..9: note = Table A: HLA-A*02:08H HLA-A*02:03H
VTKKSAAEA

SEQ ID NO: 8014 - protein, 9 aa, Severe acute respiratory syndrome coronavirus 2
  REGION 1..9: note = Table A: HLA-A*34:01H HLA-A*34:02M
EASKKPRQK

SEQ ID NO: 8015 - protein, 9 aa, Severe acute respiratory syndrome coronavirus 2
  REGION 1..9: note = Table A: HLA-B*07:04H
KPRQKRTAT

SEQ ID NO: 8016 - protein, 9 aa, Severe acute respiratory syndrome coronavirus 2
  REGION 1..9: note = Table A: HLA-B*15:03M
QKRTATKAY

SEQ ID NO: 8017 - protein, 9 aa, Severe acute respiratory syndrome coronavirus 2
  REGION 1..9: note = Table A: HLA-B*58:02H HLA-A*02:11H HLA-A*68:02H HLA-C*15:02H HLA-A*02:05M HLA-A*02:08M HLA-A*02:02M HLA-B*57:03M HLA-B*13:02H
RTATKAYNV

SEQ ID NO: 8018 - protein, 9 aa, Severe acute respiratory syndrome coronavirus 2
  REGION 1..9: note = Table A: HLA-B*57:03H
ATKAYNVTQ

SEQ ID NO: 8019 - protein, 9 aa, Severe acute respiratory syndrome coronavirus 2
  REGION 1..9: note = Table A: HLA-B*39:06H
TKAYNVTQA

SEQ ID NO: 8020 - protein, 9 aa, Severe acute respiratory syndrome coronavirus 2
  REGION 1..9: note = Table A: HLA-B*48:01H HLA-B*58:01H HLA-B*58:02H HLA-C*14:02H HLA-C*14:03H HLA-A*11:303M HLA-B*44:05H HLA-C*16:01H HLA-C*16:04M HLA-B*57:01M HLA-A*25:01H HLA-B*46:01H HLA-C*03:03M HLA-C*07:01H HLA-A*02:11H HLA-B*53:01H
  REGION 1..9: note = CONT. FROM ABOVE: HLA-C*03:02H HLA-C*03:04M HLA-A*30:02H HLA- A*68:02H HLA-C*15:05M HLA-C*12:02H HLA-C*12:03M HLA-C*15:02H HLA-A*02:08H HLA-A*34:01H HLA-C*07:27H HLA-A*24:02H HLA-B*35 :01M HLA-A*24:07H HLA-B*35:07M HLA-C*08:01M HLA-A*23:01H
  REGION 1..9: note = CONT. FROM ABOVE: HLA-B*37:01H HLA-B*38:02M HLA-A*32:01M HLA- B*07:02H HLA-B*07:04H HLA-B*15:01H HLA-B*15:02M HLA-B*15:03H HLA-B*07:05M HLA-B*57:03H HLA-C*02:02M HLA-B*13:01H HLA-B*13 :02H HLA-A*66:01H
KAYNVTQAF

SEQ ID NO: 8021 - protein, 9 aa, Severe acute respiratory syndrome coronavirus 2
  REGION 1..9: note = Table A: HLA-A*33:01H HLA-A*33:03H HLA-A*68:01H HLA-A*66:01H
YNVTQAFGR

SEQ ID NO: 8022 - protein, 9 aa, Severe acute respiratory syndrome coronavirus 2
  REGION 1..9: note = Table A: HLA-A*26:03H HLA-A*68:01H HLA-A*34:01M HLA-A*34:02M HLA-A*66:01M
NVTQAFGRR

SEQ ID NO: 8023 - protein, 9 aa, Severe acute respiratory syndrome coronavirus 2
  REGION 1..9: note = Table A: HLA-C*15:05H HLA-B*07:05H
GPEQTQGNF

SEQ ID NO: 8024 - protein, 9 aa, Severe acute respiratory syndrome coronavirus 2
  REGION 1..9: note = Table A: HLA-B*35:03H HLA-B*35:02H HLA-B*35:12H HLA-B*39:01H
QGNFGDQEL

SEQ ID NO: 8025 - protein, 9 aa, Severe acute respiratory syndrome coronavirus 2
  REGION 1..9: note = Table A: HLA-A*25:01H HLA-A*26:01M HLA-A*26:02M HLA-A*26:03H HLA-A*34:01H HLA-B*15:13H HLA-B*38:02M HLA-B*15:01M HLA-B*15:02H HLA-B*39:01H
ELIRQGTDY

SEQ ID NO: 8026 - protein, 9 aa, Severe acute respiratory syndrome coronavirus 2
  REGION 1..9: note = Table A: HLA-A*34:02H
LIRQGTDYK

SEQ ID NO: 8027 - protein, 9 aa, Severe acute respiratory syndrome coronavirus 2
  REGION 1..9: note = Table A: HLA-B*13:01M
RQGTDYKHW

SEQ ID NO: 8028 - protein, 9 aa, Severe acute respiratory syndrome coronavirus 2
  REGION 1..9: note = Table A: HLA-A*02:11H HLA-B*37:01H HLA-B*40:02H HLA-B*40:06H HLA-B*49:01H
TDYKHWPQI

SEQ ID NO: 8029 - protein, 9 aa, Severe acute respiratory syndrome coronavirus 2
  REGION 1..9: note = Table A: HLA-B*48:01H HLA-B*58:01H HLA-B*58:02H HLA-B*27:05H HLA-A*02:11H HLA-A*24:07H HLA-A*23:01H HLA-B*38:01H HLA-B*38:02M HLA-A*32:01H HLA-B*39:06H HLA-B*15:01H HLA-B*15:03H HLA-B*39:01H HLA-B*57:03M HLA-B*15:10H
KHWPQIAQF

SEQ ID NO: 8030 - protein, 9 aa, Severe acute respiratory syndrome coronavirus 2
  REGION 1..9: note = Table A: HLA-B*39:06H
QIAQFAPSA

SEQ ID NO: 8031 - protein, 9 aa, Severe acute respiratory syndrome coronavirus 2
  REGION 1..9: note = Table A: HLA-B*38:02H HLA-B*39:06M HLA-B*15:01H HLA-B*13:02H HLA-B*50:01H
AQFAPSASA

SEQ ID NO: 8032 - protein, 9 aa, Severe acute respiratory syndrome coronavirus 2
  REGION 1..9: note = Table A: HLA-C*14:02H HLA-C*14:03H HLA-B*46:01M HLA-C*15:05H HLA-A*24:02H HLA-B*35:01H HLA-A*24:07H HLA-A*23:01H HLA-B*38:02M HLA-B*15:01M HLA-B*15:02H HLA-B*15:03H HLA-B*39:01H HLA-B*07:05M HLA-B*15:11H
QFAPSASAF

SEQ ID NO: 8033 - protein, 9 aa, Severe acute respiratory syndrome coronavirus 2
  REGION 1..9: note = Table A: HLA-C*14:03H HLA-B*46:01H HLA-C*04:03H HLA-B*53:01H HLA-C*03:02H HLA-C*01:02M HLA-C*12:02H HLA-A*34:01H HLA-B*38:02H HLA-C*02:02H HLA-A*66:01H
FAPSASAFF

SEQ ID NO: 8034 - protein, 9 aa, Severe acute respiratory syndrome coronavirus 2
  REGION 1..9: note = Table A: HLA-A*74:01M HLA-A*11:01M HLA-A*11:02M HLA-A*68:01H HLA-A*34:01H HLA-A*34:02H HLA-A*31:01H HLA-A*66:01M
ASAFFGMSR

SEQ ID NO: 8035 - protein, 9 aa, Severe acute respiratory syndrome coronavirus 2
  REGION 1..9: note = Table A: HLA-C*12:05H HLA-A*02:11H HLA-B*53:01H HLA-A*68:02H HLA-C*15:05H HLA-C*12:03H HLA-A*02:05H HLA-A*34:01H HLA-B*51:01M HLA-C*17:01H HLA-C*08:01H HLA-B*38:02H HLA-B*57:03H HLA-B*49:01H HLA-A*66:01H
SAFFGMSRI

SEQ ID NO: 8036 - protein, 9 aa, Severe acute respiratory syndrome coronavirus 2
  REGION 1..9: note = Table A: HLA-C*14:02H HLA-C*14:03H
FFGMSRIGM

SEQ ID NO: 8037 - protein, 9 aa, Severe acute respiratory syndrome coronavirus 2
  REGION 1..9: note = Table A: HLA-A*02:11M HLA-C*15:05H HLA-A*02:01H HLA-A*02:02H HLA-A*02:03M HLA-B*52:01H HLA-B*38:02H HLA-B*13:02H
GMSRIGMEV

SEQ ID NO: 8038 - protein, 9 aa, Severe acute respiratory syndrome coronavirus 2
  REGION 1..9: note = Table A: HLA-B*39:06H
SRIGMEVTP

SEQ ID NO: 8039 - protein, 9 aa, Severe acute respiratory syndrome coronavirus 2
  REGION 1..9: note = Table A: HLA-B*58:01H HLA-B*44:02M HLA-B*44:05M HLA-C*16:04H HLA-B*44:03M HLA-B*15:13M HLA-B*49:01H HLA-B*50:01H
MEVTPSGTW

SEQ ID NO: 8040 - protein, 9 aa, Severe acute respiratory syndrome coronavirus 2
  REGION 1..9: note = Table A: HLA-A*34:01H
EVTPSGTWL

SEQ ID NO: 8041 - protein, 9 aa, Severe acute respiratory syndrome coronavirus 2
  REGION 1..9: note = Table A: HLA-A*29:01H HLA-A*29:02H HLA-B*53:01M HLA-C*15:05H HLA-A*34:01H HLA-A*34:02H HLA-B*35:01H HLA-B*35:08H HLA-B*35:07M HLA-B*38:02H HLA-B*15:02H HLA-B*07:05M HLA-B*15:11M
TPSGTWLTY

SEQ ID NO: 8042 - protein, 9 aa, Severe acute respiratory syndrome coronavirus 2
  REGION 1..9: note = Table A: HLA-A*68:02H HLA-C*15:05H HLA-C*12:03H HLA-C*15:02H HLA-A*02:05H HLA-A*02:08H HLA-A*34:02H HLA-C*17:01M HLA-B*57:03M
LTYTGAIKL

SEQ ID NO: 8043 - protein, 9 aa, Severe acute respiratory syndrome coronavirus 2
  REGION 1..9: note = Table A: HLA-B*58:01H HLA-A*02:11H HLA-A*02:07H HLA-B*38:01H HLA-B*38:02H HLA-B*57:03H HLA-C*05:01H HLA-B*13:01H
KLDDKDPNF

SEQ ID NO: 8044 - protein, 9 aa, Severe acute respiratory syndrome coronavirus 2
  REGION 1..9: note = Table A: HLA-B*53:01H HLA-B*35:03H HLA-C*15:05H HLA-B*35:02M HLA-B*51:01M HLA-B*35:12H
DPNFKDQVI

SEQ ID NO: 8045 - protein, 9 aa, Severe acute respiratory syndrome coronavirus 2
  REGION 1..9: note = Table A: HLA-C*14:03H HLA-A*24:07H
NFKDQVILL

SEQ ID NO: 8046 - protein, 9 aa, Severe acute respiratory syndrome coronavirus 2
  REGION 1..9: note = Table A: HLA-A*36:01H HLA-B*46:01H HLA-A*29:02H HLA-A*30:02M HLA-A*02:02H HLA-B*35:07H HLA-B*38:02M HLA-B*15:01M HLA-B*15:02M
LLNKHIDAY

SEQ ID NO: 8047 - protein, 9 aa, Severe acute respiratory syndrome coronavirus 2
  REGION 1..9: note = Table A: HLA-A*23:01H HLA-B*38:01H HLA-B*38:02M HLA-B*15:03M HLA-B*15:10H
KHIDAYKTF

SEQ ID NO: 8048 - protein, 9 aa, Severe acute respiratory syndrome coronavirus 2
  REGION 1..9: note = Table A: HLA-A*11:303M HLA-A*74:01M HLA-A*03:01H HLA-A*03:02H HLA-A*11:01H HLA-A*11:02H HLA-A*36:01M HLA-B*57:01H HLA-B*46:01H HLA-A*30:01M HLA-A*30:02H HLA-A*68:01H HLA-A*68:02H HLA-A*34:01M HLA-A*34:02H
  REGION 1..9: note = CONT. FROM ABOVE: HLA-C*07:27M HLA-C*08:03H HLA-B*37:01H HLA- A*31:01H HLA-B*57:03H HLA-A*66:01M
KTFPPTEPK

SEQ ID NO: 8049 - protein, 9 aa, Severe acute respiratory syndrome coronavirus 2
  REGION 1..9: note = Table A: HLA-B*48:01M HLA-B*15:03H
KKADETQAL

SEQ ID NO: 8050 - protein, 9 aa, Severe acute respiratory syndrome coronavirus 2
  REGION 1..9: note = Table A: HLA-A*33:01M HLA-A*33:03H HLA-A*26:03H HLA-B*18:01H HLA-B*27:02H HLA-A*68:01H HLA-A*68:02H HLA-A*34:01H HLA-A*34:02H HLA-B*07:05H
DETQALPQR

SEQ ID NO: 8051 - protein, 9 aa, Severe acute respiratory syndrome coronavirus 2
  REGION 1..9: note = Table A: HLA-A*33:03H HLA-A*68:02H
ETQALPQRQ

SEQ ID NO: 8052 - protein, 9 aa, Severe acute respiratory syndrome coronavirus 2
  REGION 1..9: note = Table A: HLA-A*03:01M HLA-A*03:02H HLA-A*11:01M HLA-A*11:02H HLA-A*34:02H HLA-C*07:27H
TQALPQRQK

SEQ ID NO: 8053 - protein, 9 aa, Severe acute respiratory syndrome coronavirus 2
  REGION 1..9: note = Table A: HLA-A*34:02H
QALPQRQKK

SEQ ID NO: 8054 - protein, 9 aa, Severe acute respiratory syndrome coronavirus 2
  REGION 1..9: note = Table A: HLA-B*15:03H
QKKQQTVTL

SEQ ID NO: 8055 - protein, 9 aa, Severe acute respiratory syndrome coronavirus 2
  REGION 1..9: note = Table A: HLA-B*48:01H HLA-B*15:03H
KKQQTVTLL

SEQ ID NO: 8056 - protein, 9 aa, Severe acute respiratory syndrome coronavirus 2
  REGION 1..9: note = Table A: HLA-B*13:02H
KQQTVTLLP

SEQ ID NO: 8057 - protein, 9 aa, Severe acute respiratory syndrome coronavirus 2
  REGION 1..9: note = Table A: HLA-B*39:06H
QQTVTLLPA

SEQ ID NO: 8058 - protein, 9 aa, Severe acute respiratory syndrome coronavirus 2
  REGION 1..9: note = Table A: HLA-B*56:01H HLA-B*55:02H HLA-A*02:05H HLA-B*39:06H HLA-B*54:01H
QTVTLLPAA

SEQ ID NO: 8059 - protein, 9 aa, Severe acute respiratory syndrome coronavirus 2
  REGION 1..9: note = Table A: HLA-B*53:01M HLA-B*35:03M HLA-C*15:05H HLA-B*35:01H HLA-B*35:02H HLA-B*35:08H HLA-B*35:07M HLA-B*35:12H HLA-B*39:01H HLA-B*07:05H
LPAADLDDF

SEQ ID NO: 8060 - protein, 9 aa, Severe acute respiratory syndrome coronavirus 2
  REGION 1..9: note = Table A: HLA-A*02:07M HLA-B*14:01H HLA-B*38:02H
DLDDFSKQL

SEQ ID NO: 8061 - protein, 9 aa, Severe acute respiratory syndrome coronavirus 2
  REGION 1..9: note = Table A: HLA-C*16:01H HLA-B*46:01H HLA-B*08:01H HLA-C*12:03H HLA-B*38:02H HLA-B*57:03H HLA-C*02:02H
FSKQLQQSM

SEQ ID NO: 8062 - protein, 9 aa, Severe acute respiratory syndrome coronavirus 2
  REGION 1..9: note = Table A: HLA-B*38:02H
QLQQSMSSA

SEQ ID NO: 8063 - protein, 9 aa, Severe acute respiratory syndrome coronavirus 2
  REGION 1..9: note = Table A: HLA-B*54:01H HLA-B*39:01H
MSSADSTQA

SEQ ID NO: 8064 - protein, 10 aa, Severe acute respiratory syndrome coronavirus 2
  REGION 1..10: note = Table A: HLA-A*68:01H
MSDNGPQNQR

SEQ ID NO: 8065 - protein, 10 aa, Severe acute respiratory syndrome coronavirus 2
  REGION 1..10: note = Table A: HLA-B*38:02H HLA-B*15:01H HLA-B*15:02M HLA-B*15:03H
NQRNAPRITF

SEQ ID NO: 8066 - protein, 10 aa, Severe acute respiratory syndrome coronavirus 2
  REGION 1..10: note = Table A: HLA-A*02:08H
ITFGGPSDST

SEQ ID NO: 8067 - protein, 10 aa, Severe acute respiratory syndrome coronavirus 2
  REGION 1..10: note = Table A: HLA-B*56:01H HLA-B*55:02H HLA-C*15:05H HLA-B*55:01H HLA-B*54:01H HLA-B*07:02H HLA-B*07:04H HLA-B*07:05H
RPQGLPNNTA

SEQ ID NO: 8068 - protein, 10 aa, Severe acute respiratory syndrome coronavirus 2
  REGION 1..10: note = Table A: HLA-B*58:01H HLA-B*57:03H
QGLPNNTASW

SEQ ID NO: 8069 - protein, 10 aa, Severe acute respiratory syndrome coronavirus 2
  REGION 1..10: note = Table A: HLA-B*38:01H HLA-B*38:02M HLA-B*15:01H HLA-B*15:02H HLA-B*13:01M HLA-B*13:02H
TQHGKEDLKF

SEQ ID NO: 8070 - protein, 10 aa, Severe acute respiratory syndrome coronavirus 2
  REGION 1..10: note = Table A: HLA-A*74:01H HLA-A*33:03H
HGKEDLKFPR

SEQ ID NO: 8071 - protein, 10 aa, Severe acute respiratory syndrome coronavirus 2
  REGION 1..10: note = Table A: HLA-A*36:01H HLA-A*01:01H
NSSPDDQIGY

SEQ ID NO: 8072 - protein, 10 aa, Severe acute respiratory syndrome coronavirus 2
  REGION 1..10: note = Table A: HLA-A*36:01H HLA-A*26:01M HLA-A*26:02H HLA-A*01:01H HLA-A*30:02H HLA-B*39:01H
SSPDDQIGYY

SEQ ID NO: 8073 - protein, 10 aa, Severe acute respiratory syndrome coronavirus 2
  REGION 1..10: note = Table A: HLA-A*33:03H HLA-B*27:02H HLA-A*68:01H HLA-A*34:01H HLA-A*66:01H
SPDDQIGYYR

SEQ ID NO: 8074 - protein, 10 aa, Severe acute respiratory syndrome coronavirus 2
  REGION 1..10: note = Table A: HLA-A*74:01H HLA-A*03:01H HLA-A*30:01H
RIRGGDGKMK

SEQ ID NO: 8075 - protein, 10 aa, Severe acute respiratory syndrome coronavirus 2
  REGION 1..10: note = Table A: HLA-A*33:01H
DGKMKDLSPR

SEQ ID NO: 8076 - protein, 10 aa, Severe acute respiratory syndrome coronavirus 2
  REGION 1..10: note = Table A: HLA-A*30:02H
KMKDLSPRWY

SEQ ID NO: 8077 - protein, 10 aa, Severe acute respiratory syndrome coronavirus 2
  REGION 1..10: note = Table A: HLA-C*14:02H HLA-C*14:03H HLA-B*55:02H HLA-C*08:01H HLA-B*54:01H
FYYLGTGPEA

SEQ ID NO: 8078 - protein, 10 aa, Severe acute respiratory syndrome coronavirus 2
  REGION 1..10: note = Table A: HLA-A*02:11H HLA-A*02:01H HLA-A*02:02M HLA-A*02:03H HLA-C*08:03H HLA-B*38:02H
YLGTGPEAGL

SEQ ID NO: 8079 - protein, 10 aa, Severe acute respiratory syndrome coronavirus 2
  REGION 1..10: note = Table A: HLA-A*11:01H HLA-A*36:01M HLA-A*29:01H HLA-A*29:02H HLA-A*01:01H HLA-A*30:02H HLA-C*07:27H HLA-C*08:03H HLA-B*15:01H
GTGPEAGLPY

SEQ ID NO: 8080 - protein, 10 aa, Severe acute respiratory syndrome coronavirus 2
  REGION 1..10: note = Table A: HLA-B*55:02H
GPEAGLPYGA

SEQ ID NO: 8081 - protein, 10 aa, Severe acute respiratory syndrome coronavirus 2
  REGION 1..10: note = Table A: HLA-A*33:03H HLA-A*68:01H HLA-A*34:01H HLA-A*34:02M
EAGLPYGANK

SEQ ID NO: 8082 - protein, 10 aa, Severe acute respiratory syndrome coronavirus 2
  REGION 1..10: note = Table A: HLA-C*15:05H HLA-B*51:01H
LPYGANKDGI

SEQ ID NO: 8083 - protein, 10 aa, Severe acute respiratory syndrome coronavirus 2
  REGION 1..10: note = Table A: HLA-A*11:303M HLA-A*03:01H HLA-A*03:02H HLA-A*11:01H HLA-A*11:02M HLA-A*36:01M HLA-A*30:02H HLA-A*68:01H HLA-A*34:02M HLA-C*07:27M
ATEGALNTPK

SEQ ID NO: 8084 - protein, 10 aa, Severe acute respiratory syndrome coronavirus 2
  REGION 1..10: note = Table A: HLA-A*26:03M HLA-A*68:01H HLA-A*34:01H HLA-A*34:02H
NTPKDHIGTR

SEQ ID NO: 8085 - protein, 10 aa, Severe acute respiratory syndrome coronavirus 2
  REGION 1..10: note = Table A: HLA-B*38:02H HLA-B*39:01H
TRNPANNAAI

SEQ ID NO: 8086 - protein, 10 aa, Severe acute respiratory syndrome coronavirus 2
  REGION 1..10: note = Table A: HLA-B*35:03M HLA-C*15:05H HLA-B*35:01H HLA-B*07:02H HLA-B*07:05H
NPANNAAIVL

SEQ ID NO: 8087 - protein, 10 aa, Severe acute respiratory syndrome coronavirus 2
  REGION 1..10: note = Table A: HLA-A*11:303H
VLQLPQGTTL

SEQ ID NO: 8088 - protein, 10 aa, Severe acute respiratory syndrome coronavirus 2
  REGION 1..10: note = Table A: HLA-A*03:01M HLA-A*03:02M HLA-A*11:01H HLA-A*11:02H HLA-A*36:01H HLA-A*34:01H HLA-A*34:02M
QLPQGTTLPK

SEQ ID NO: 8089 - protein, 10 aa, Severe acute respiratory syndrome coronavirus 2
  REGION 1..10: note = Table A: HLA-A*30:02H
QGTTLPKGFY

SEQ ID NO: 8090 - protein, 10 aa, Severe acute respiratory syndrome coronavirus 2
  REGION 1..10: note = Table A: HLA-A*02:07H
TLPKGFYAEG

SEQ ID NO: 8091 - protein, 10 aa, Severe acute respiratory syndrome coronavirus 2
  REGION 1..10: note = Table A: HLA-B*45:01H
AEGSRGGSQA

SEQ ID NO: 8092 - protein, 10 aa, Severe acute respiratory syndrome coronavirus 2
  REGION 1..10: note = Table A: HLA-B*27:05M
SRNSTPGSSR

SEQ ID NO: 8093 - protein, 10 aa, Severe acute respiratory syndrome coronavirus 2
  REGION 1..10: note = Table A: HLA-C*15:05H
TPGSSRGTSP

SEQ ID NO: 8094 - protein, 10 aa, Severe acute respiratory syndrome coronavirus 2
  REGION 1..10: note = Table A: HLA-B*35:03M HLA-B*35:01H HLA-B*35:02M HLA-B*35:12H HLA-B*38:02H HLA-B*39:01H
MAGNGGDAAL

SEQ ID NO: 8095 - protein, 10 aa, Severe acute respiratory syndrome coronavirus 2
  REGION 1..10: note = Table A: HLA-A*02:04H HLA-A*02:02M
ALALLLLDRL

SEQ ID NO: 8096 - protein, 10 aa, Severe acute respiratory syndrome coronavirus 2
  REGION 1..10: note = Table A: HLA-A*02:04M HLA-A*02:02H
LLLLDRLNQL

SEQ ID NO: 8097 - protein, 10 aa, Severe acute respiratory syndrome coronavirus 2
  REGION 1..10: note = Table A: HLA-B*14:02H HLA-B*14:01H
DRLNQLESKM

SEQ ID NO: 8098 - protein, 10 aa, Severe acute respiratory syndrome coronavirus 2
  REGION 1..10: note = Table A: HLA-B*48:01H HLA-C*08:03H HLA-B*15:01H
GQQQQGQTVT

SEQ ID NO: 8099 - protein, 10 aa, Severe acute respiratory syndrome coronavirus 2
  REGION 1..10: note = Table A: HLA-A*11:303H HLA-A*03:02M HLA-A*11:01H HLA-A*11:02H HLA-A*30:02H
QQQQGQTVTK

SEQ ID NO: 8100 - protein, 10 aa, Severe acute respiratory syndrome coronavirus 2
  REGION 1..10: note = Table A: HLA-A*03:01H HLA-A*03:02M HLA-A*11:01H
QQQGQTVTKK

SEQ ID NO: 8101 - protein, 10 aa, Severe acute respiratory syndrome coronavirus 2
  REGION 1..10: note = Table A: HLA-A*33:03H HLA-A*26:03H HLA-A*68:01M HLA-A*34:01M HLA-A*34:02H HLA-A*66:01M
SAAEASKKPR

SEQ ID NO: 8102 - protein, 10 aa, Severe acute respiratory syndrome coronavirus 2
  REGION 1..10: note = Table A: HLA-A*30:02H HLA-B*15:01M HLA-B*15:03H
RQKRTATKAY

SEQ ID NO: 8103 - protein, 10 aa, Severe acute respiratory syndrome coronavirus 2
  REGION 1..10: note = Table A: HLA-A*02:08H
ATKAYNVTQA

SEQ ID NO: 8104 - protein, 10 aa, Severe acute respiratory syndrome coronavirus 2
  REGION 1..10: note = Table A: HLA-B*38:02H HLA-B*15:03M
TKAYNVTQAF

SEQ ID NO: 8105 - protein, 10 aa, Severe acute respiratory syndrome coronavirus 2
  REGION 1..10: note = Table A: HLA-B*58:01H HLA-A*03:01H HLA-A*02:11H HLA-A*30:02H HLA-A*68:02H HLA-B*57:03H
KAYNVTQAFG

SEQ ID NO: 8106 - protein, 10 aa, Severe acute respiratory syndrome coronavirus 2
  REGION 1..10: note = Table A: HLA-B*27:02H
AYNVTQAFGR

SEQ ID NO: 8107 - protein, 10 aa, Severe acute respiratory syndrome coronavirus 2
  REGION 1..10: note = Table A: HLA-A*66:01H
YNVTQAFGRR

SEQ ID NO: 8108 - protein, 10 aa, Severe acute respiratory syndrome coronavirus 2
  REGION 1..10: note = Table A: HLA-B*57:03H
RGPEQTQGNF

SEQ ID NO: 8109 - protein, 10 aa, Severe acute respiratory syndrome coronavirus 2
  REGION 1..10: note = Table A: HLA-B*44:02M HLA-B*44:05H HLA-B*44:03M
QELIRQGTDY

SEQ ID NO: 8110 - protein, 10 aa, Severe acute respiratory syndrome coronavirus 2
  REGION 1..10: note = Table A: HLA-A*34:02H
ELIRQGTDYK

SEQ ID NO: 8111 - protein, 10 aa, Severe acute respiratory syndrome coronavirus 2
  REGION 1..10: note = Table A: HLA-B*50:01H
TDYKHWPQIA

SEQ ID NO: 8112 - protein, 10 aa, Severe acute respiratory syndrome coronavirus 2
  REGION 1..10: note = Table A: HLA-B*15:03M
YKHWPQIAQF

SEQ ID NO: 8113 - protein, 10 aa, Severe acute respiratory syndrome coronavirus 2
  REGION 1..10: note = Table A: HLA-B*44:05H HLA-B*46:01H HLA-B*38:02H HLA-B*15:01H HLA-B*15:02H HLA-B*15:03H
AQFAPSASAF

SEQ ID NO: 8114 - protein, 10 aa, Severe acute respiratory syndrome coronavirus 2
  REGION 1..10: note = Table A: HLA-C*14:03H HLA-A*24:02M HLA-A*24:07M HLA-A*23:01H
QFAPSASAFF

SEQ ID NO: 8115 - protein, 10 aa, Severe acute respiratory syndrome coronavirus 2
  REGION 1..10: note = Table A: HLA-C*15:05M HLA-B*07:05H
APSASAFFGM

SEQ ID NO: 8116 - protein, 10 aa, Severe acute respiratory syndrome coronavirus 2
  REGION 1..10: note = Table A: HLA-A*68:01H HLA-A*66:01M
SASAFFGMSR

SEQ ID NO: 8117 - protein, 10 aa, Severe acute respiratory syndrome coronavirus 2
  REGION 1..10: note = Table A: HLA-C*14:03H
AFFGMSRIGM

SEQ ID NO: 8118 - protein, 10 aa, Severe acute respiratory syndrome coronavirus 2
  REGION 1..10: note = Table A: HLA-A*02:11H
FGMSRIGMEV

SEQ ID NO: 8119 - protein, 10 aa, Severe acute respiratory syndrome coronavirus 2
  REGION 1..10: note = Table A: HLA-B*44:05H HLA-B*40:01H HLA-B*40:02H HLA-B*49:01H
MEVTPSGTWL

SEQ ID NO: 8120 - protein, 10 aa, Severe acute respiratory syndrome coronavirus 2
  REGION 1..10: note = Table A: HLA-A*36:01H HLA-B*46:01H HLA-A*29:01H HLA-A*29:02H HLA-A*30:02H
VTPSGTWLTY

SEQ ID NO: 8121 - protein, 10 aa, Severe acute respiratory syndrome coronavirus 2
  REGION 1..10: note = Table A: HLA-A*03:01H HLA-A*03:02H HLA-A*36:01H
KLDDKDPNFK

SEQ ID NO: 8122 - protein, 10 aa, Severe acute respiratory syndrome coronavirus 2
  REGION 1..10: note = Table A: HLA-B*35:03H
DPNFKDQVIL

SEQ ID NO: 8123 - protein, 10 aa, Severe acute respiratory syndrome coronavirus 2
  REGION 1..10: note = Table A: HLA-A*36:01H HLA-A*29:02H HLA-A*30:02M HLA-B*38:02M HLA-B*15:01H HLA-B*15:02H
ILLNKHIDAY

SEQ ID NO: 8124 - protein, 10 aa, Severe acute respiratory syndrome coronavirus 2
  REGION 1..10: note = Table A: HLA-A*11:303H HLA-A*74:01H HLA-A*03:01M HLA-A*03:02M HLA-A*11:01M HLA-A*11:02M HLA-A*36:01H HLA-A*30:01M HLA-A*30:02M HLA-A*34:02H HLA-C*07:27M
KTFPPTEPKK

SEQ ID NO: 8125 - protein, 10 aa, Severe acute respiratory syndrome coronavirus 2
  REGION 1..10: note = Table A: HLA-A*36:01H
KADETQALPQ

SEQ ID NO: 8126 - protein, 10 aa, Severe acute respiratory syndrome coronavirus 2
  REGION 1..10: note = Table A: HLA-A*03:02H HLA-A*11:01H HLA-A*33:03M HLA-A*26:03H HLA-A*68:01M HLA-A*34:01H HLA-A*34:02H HLA-A*66:01H
ETQALPQRQK

SEQ ID NO: 8127 - protein, 10 aa, Severe acute respiratory syndrome coronavirus 2
  REGION 1..10: note = Table A: HLA-B*07:04H HLA-B*15:01H
RQKKQQTVTL

SEQ ID NO: 8128 - protein, 10 aa, Severe acute respiratory syndrome coronavirus 2
  REGION 1..10: note = Table A: HLA-A*02:08H
KQLQQSMSSA

SEQ ID NO: 8129 - protein, 10 aa, Severe acute respiratory syndrome coronavirus 2
  REGION 1..10: note = Table A: HLA-A*02:03H HLA-B*38:02H HLA-B*39:01H
SMSSADSTQA

SEQ ID NO: 8130 - protein, 11 aa, Severe acute respiratory syndrome coronavirus 2
  REGION 1..11: note = Table A: HLA-B*39:01H
FGGPSDSTGSN

SEQ ID NO: 8131 - protein, 11 aa, Severe acute respiratory syndrome coronavirus 2
  REGION 1..11: note = Table A: HLA-B*39:06H
RRPQGLPNNTA

SEQ ID NO: 8132 - protein, 11 aa, Severe acute respiratory syndrome coronavirus 2
  REGION 1..11: note = Table A: HLA-B*55:02H
RPQGLPNNTAS

SEQ ID NO: 8133 - protein, 11 aa, Severe acute respiratory syndrome coronavirus 2
  REGION 1..11: note = Table A: HLA-B*55:02H HLA-B*54:01H
LPNNTASWFTA

SEQ ID NO: 8134 - protein, 11 aa, Severe acute respiratory syndrome coronavirus 2
  REGION 1..11: note = Table A: HLA-B*57:03H
LTQHGKEDLKF

SEQ ID NO: 8135 - protein, 11 aa, Severe acute respiratory syndrome coronavirus 2
  REGION 1..11: note = Table A: HLA-A*36:01H HLA-A*26:01H HLA-A*01:01M HLA-A*30:02H
NSSPDDQIGYY

SEQ ID NO: 8136 - protein, 11 aa, Severe acute respiratory syndrome coronavirus 2
  REGION 1..11: note = Table A: HLA-A*74:01H HLA-A*11:01H HLA-A*11:02H HLA-A*33:03H HLA-A*68:01M HLA-A*68:02H HLA-A*66:01H
SSPDDQIGYYR

SEQ ID NO: 8137 - protein, 11 aa, Severe acute respiratory syndrome coronavirus 2
  REGION 1..11: note = Table A: HLA-B*15:03H
GKMKDLSPRWY

SEQ ID NO: 8138 - protein, 11 aa, Severe acute respiratory syndrome coronavirus 2
  REGION 1..11: note = Table A: HLA-A*74:01H HLA-A*02:11H HLA-A*32:01H
KMKDLSPRWYF

SEQ ID NO: 8139 - protein, 11 aa, Severe acute respiratory syndrome coronavirus 2
  REGION 1..11: note = Table A: HLA-A*03:02H HLA-A*11:01H
VATEGALNTPK

SEQ ID NO: 8140 - protein, 11 aa, Severe acute respiratory syndrome coronavirus 2
  REGION 1..11: note = Table A: HLA-A*33:01H HLA-A*33:03H
LNTPKDHIGTR

SEQ ID NO: 8141 - protein, 11 aa, Severe acute respiratory syndrome coronavirus 2
  REGION 1..11: note = Table A: HLA-A*02:11M HLA-C*15:05H HLA-A*02:04H HLA-C*08:01H HLA-B*38:02H HLA-B*07:05H HLA-B*57:03H
IVLQLPQGTTL

SEQ ID NO: 8142 - protein, 11 aa, Severe acute respiratory syndrome coronavirus 2
  REGION 1..11: note = Table A: HLA-A*11:01H HLA-A*11:02H
LQLPQGTTLPK

SEQ ID NO: 8143 - protein, 11 aa, Severe acute respiratory syndrome coronavirus 2
  REGION 1..11: note = Table A: HLA-A*31:01H
TTLPKGFYAEG

SEQ ID NO: 8144 - protein, 11 aa, Severe acute respiratory syndrome coronavirus 2
  REGION 1..11: note = Table A: HLA-A*74:01H HLA-A*31:01H
GSRGGSQASSR

SEQ ID NO: 8145 - protein, 11 aa, Severe acute respiratory syndrome coronavirus 2
  REGION 1..11: note = Table A: HLA-A*74:01H HLA-A*33:03H HLA-A*31:01H HLA-A*66:01H
SSRNSTPGSSR

SEQ ID NO: 8146 - protein, 11 aa, Severe acute respiratory syndrome coronavirus 2
  REGION 1..11: note = Table A: HLA-A*02:02H HLA-B*13:01H
RMAGNGGDAAL

SEQ ID NO: 8147 - protein, 11 aa, Severe acute respiratory syndrome coronavirus 2
  REGION 1..11: note = Table A: HLA-A*02:11M HLA-A*02:04M
ALLLLDRLNQL

SEQ ID NO: 8148 - protein, 11 aa, Severe acute respiratory syndrome coronavirus 2
  REGION 1..11: note = Table A: HLA-A*74:01H
RLNQLESKMSG

SEQ ID NO: 8149 - protein, 11 aa, Severe acute respiratory syndrome coronavirus 2
  REGION 1..11: note = Table A: HLA-A*02:02H
KMSGKGQQQQG

SEQ ID NO: 8150 - protein, 11 aa, Severe acute respiratory syndrome coronavirus 2
  REGION 1..11: note = Table A: HLA-A*11:303M HLA-A*03:01H HLA-A*03:02H HLA-A*11:01M HLA-A*11:02M HLA-B*27:05H HLA-B*27:02M HLA-A*30:02M HLA-C*07:27M HLA-B*15:01H HLA-B*13:02H
GQQQQGQTVTK

SEQ ID NO: 8151 - protein, 11 aa, Severe acute respiratory syndrome coronavirus 2
  REGION 1..11: note = Table A: HLA-A*03:02H
QQQQGQTVTKK

SEQ ID NO: 8152 - protein, 11 aa, Severe acute respiratory syndrome coronavirus 2
  REGION 1..11: note = Table A: HLA-A*74:01M
KSAAEASKKPR

SEQ ID NO: 8153 - protein, 11 aa, Severe acute respiratory syndrome coronavirus 2
  REGION 1..11: note = Table A: HLA-B*15:01H HLA-B*57:03H
ATKAYNVTQAF

SEQ ID NO: 8154 - protein, 11 aa, Severe acute respiratory syndrome coronavirus 2
  REGION 1..11: note = Table A: HLA-A*74:01H HLA-A*03:02H HLA-A*11:01H HLA-A*11:02H HLA-A*36:01H HLA-A*68:01H HLA-A*31:01H HLA-A*66:01H
KAYNVTQAFGR

SEQ ID NO: 8155 - protein, 11 aa, Severe acute respiratory syndrome coronavirus 2
  REGION 1..11: note = Table A: HLA-B*15:02H
DQELIRQGTDY

SEQ ID NO: 8156 - protein, 11 aa, Severe acute respiratory syndrome coronavirus 2
  REGION 1..11: note = Table A: HLA-A*24:07H HLA-A*23:01H
DYKHWPQIAQF

SEQ ID NO: 8157 - protein, 11 aa, Severe acute respiratory syndrome coronavirus 2
  REGION 1..11: note = Table A: HLA-B*54:01H
WPQIAQFAPSA

SEQ ID NO: 8158 - protein, 11 aa, Severe acute respiratory syndrome coronavirus 2
  REGION 1..11: note = Table A: HLA-A*30:02H HLA-B*38:02H HLA-B*15:01M HLA-B*15:03H HLA-B*13:01H
AQFAPSASAFF

SEQ ID NO: 8159 - protein, 11 aa, Severe acute respiratory syndrome coronavirus 2
  REGION 1..11: note = Table A: HLA-A*02:02H
GMSRIGMEVTP

SEQ ID NO: 8160 - protein, 11 aa, Severe acute respiratory syndrome coronavirus 2
  REGION 1..11: note = Table A: HLA-B*58:01M HLA-B*57:01H HLA-B*53:01H HLA-B*57:03M
IGMEVTPSGTW

SEQ ID NO: 8161 - protein, 11 aa, Severe acute respiratory syndrome coronavirus 2
  REGION 1..11: note = Table A: HLA-A*25:01M HLA-A*26:01M HLA-A*26:02H HLA-A*26:03H HLA-A*34:02H
EVTPSGTWLTY

SEQ ID NO: 8162 - protein, 11 aa, Severe acute respiratory syndrome coronavirus 2
  REGION 1..11: note = Table A: HLA-A*30:02H
VILLNKHIDAY

SEQ ID NO: 8163 - protein, 11 aa, Severe acute respiratory syndrome coronavirus 2
  REGION 1..11: note = Table A: HLA-A*30:01H
AYKTFPPTEPK

SEQ ID NO: 8164 - protein, 11 aa, Severe acute respiratory syndrome coronavirus 2
  REGION 1..11: note = Table A: HLA-A*36:01H
KADETQALPQR

SEQ ID NO: 8165 - protein, 11 aa, Severe acute respiratory syndrome coronavirus 2
  REGION 1..11: note = Table A: HLA-A*33:03H
ETQALPQRQKK

SEQ ID NO: 8166 - protein, 11 aa, Severe acute respiratory syndrome coronavirus 2
  REGION 1..11: note = Table A: HLA-B*07:04H
LPQRQKKQQTV

SEQ ID NO: 8167 - protein, 11 aa, Severe acute respiratory syndrome coronavirus 2
  REGION 1..11: note = Table A: HLA-B*38:02H
TLLPAADLDDF

SEQ ID NO: 8168 - protein, 11 aa, Severe acute respiratory syndrome coronavirus 2
  REGION 1..11: note = Table A: HLA-C*08:02H
AADLDDFSKQL

SEQ ID NO: 8169 - protein, 8 aa, Severe acute respiratory syndrome coronavirus 2
  REGION 1..8: note = Table A: HLA-B*46:01H HLA-C*03:02M HLA-B*35:07M HLA-B*38:02H HLA-B*15:02H
FAFPFTIY

SEQ ID NO: 8170 - protein, 8 aa, Severe acute respiratory syndrome coronavirus 2
  REGION 1..8: note = Table A: HLA-B*35:03H HLA-C*15:05H HLA-B*35:01H HLA-B*51:01H HLA-B*35:07M HLA-C*08:01H HLA-B*38:02H HLA-B*54:01H HLA-B*15:02H HLA-B*07:05H
FPFTIYSL

SEQ ID NO: 8171 - protein, 8 aa, Severe acute respiratory syndrome coronavirus 2
  REGION 1..8: note = Table A: HLA-B*39:06H
SRNYIAQV

SEQ ID NO: 8172 - protein, 8 aa, Severe acute respiratory syndrome coronavirus 2
  REGION 1..8: note = Table A: HLA-B*38:02H
YIAQVDVV

SEQ ID NO: 8173 - protein, 8 aa, Severe acute respiratory syndrome coronavirus 2
  REGION 1..8: note = Table A: HLA-B*44:05H HLA-B*38:02H HLA-B*15:01M HLA-B*15:03H
AQVDVVNF

SEQ ID NO: 8174 - protein, 8 aa, Severe acute respiratory syndrome coronavirus 2
  REGION 1..8: note = Table A: HLA-B*37:01H HLA-B*40:02H HLA-B*41:02H
VDVVNFNL

SEQ ID NO: 8175 - protein, 9 aa, Severe acute respiratory syndrome coronavirus 2
  REGION 1..9: note = Table A: HLA-A*02:11M HLA-A*68:02M HLA-A*02:04H HLA-A*02:07H HLA-A*02:03H HLA-B*51:01H HLA-C*08:01H HLA-B*38:02H HLA-B*40:06H HLA-B*07:05H HLA-B*13:02H
NVFAFPFTI

SEQ ID NO: 8176 - protein, 9 aa, Severe acute respiratory syndrome coronavirus 2
  REGION 1..9: note = Table A: HLA-C*14:03H HLA-A*29:02H
VFAFPFTIY

SEQ ID NO: 8177 - protein, 9 aa, Severe acute respiratory syndrome coronavirus 2
  REGION 1..9: note = Table A: HLA-C*14:02M HLA-C*14:03M HLA-A*24:07H
AFPFTIYSL

SEQ ID NO: 8178 - protein, 9 aa, Severe acute respiratory syndrome coronavirus 2
  REGION 1..9: note = Table A: HLA-B*53:01H HLA-B*35:03H HLA-B*35:07H
FPFTIYSLL

SEQ ID NO: 8179 - protein, 9 aa, Severe acute respiratory syndrome coronavirus 2
  REGION 1..9: note = Table A: HLA-A*24:07H
PFTIYSLLL

SEQ ID NO: 8180 - protein, 9 aa, Severe acute respiratory syndrome coronavirus 2
  REGION 1..9: note = Table A: HLA-A*02:02H
RMNSRNYIA

SEQ ID NO: 8181 - protein, 9 aa, Severe acute respiratory syndrome coronavirus 2
  REGION 1..9: note = Table A: HLA-A*68:02H HLA-C*15:05H HLA-C*15:02H HLA-A*02:03H HLA-B*52:01H HLA-B*38:02H
NSRNYIAQV

SEQ ID NO: 8182 - protein, 9 aa, Severe acute respiratory syndrome coronavirus 2
  REGION 1..9: note = Table A: HLA-C*15:02H
RNYIAQVDV

SEQ ID NO: 8183 - protein, 9 aa, Severe acute respiratory syndrome coronavirus 2
  REGION 1..9: note = Table A: HLA-C*14:03H HLA-A*24:02H HLA-C*08:01H HLA-B*38:02H HLA-B*39:01M
NYIAQVDVV

SEQ ID NO: 8184 - protein, 9 aa, Severe acute respiratory syndrome coronavirus 2
  REGION 1..9: note = Table A: HLA-B*58:01H HLA-A*11:303H HLA-B*57:01H HLA-B*46:01H HLA-C*04:03M HLA-B*53:01M HLA-B*35:03H HLA-C*15:05H HLA-C*12:02H HLA-B*35:01M HLA-B*35:02H HLA-B*35:08M HLA-B*35:07H HLA-C*08:01H HLA-B*35:12H
  REGION 1..9: note = CONT. FROM ABOVE: HLA-B*38:02H HLA-B*15:01H HLA-B*07:05H HLA- B*57:03M HLA-C*02:02H HLA-C*05:01H
IAQVDVVNF

SEQ ID NO: 8185 - protein, 9 aa, Severe acute respiratory syndrome coronavirus 2
  REGION 1..9: note = Table A: HLA-C*04:03M HLA-A*02:11H HLA-A*02:06H HLA-A*02:07H HLA-A*02:01H HLA-B*35:02H HLA-C*08:01H HLA-C*08:02M HLA-B*35:12H HLA-B*38:02H
QVDVVNFNL

SEQ ID NO: 8186 - protein, 9 aa, Severe acute respiratory syndrome coronavirus 2
  REGION 1..9: note = Table A: HLA-C*08:03H HLA-B*40:02H HLA-B*50:01H
VDVVNFNLT

SEQ ID NO: 8187 - protein, 10 aa, Severe acute respiratory syndrome coronavirus 2
  REGION 1..10: note = Table A: HLA-A*29:02H
GYINVFAFPF

SEQ ID NO: 8188 - protein, 10 aa, Severe acute respiratory syndrome coronavirus 2
  REGION 1..10: note = Table A: HLA-C*16:01H HLA-B*46:01H HLA-C*03:03H HLA-A*02:11H HLA-C*03:02H HLA-C*03:04M HLA-A*68:02H HLA-C*12:03H HLA-A*02:04M HLA-A*02:05M HLA-A*02:02M HLA-A*02:03H HLA-C*17:01H
FAFPFTIYSL

SEQ ID NO: 8189 - protein, 10 aa, Severe acute respiratory syndrome coronavirus 2
  REGION 1..10: note = Table A: HLA-A*26:02H HLA-A*68:02H HLA-A*02:05H HLA-B*35:01H HLA-B*38:02H HLA-B*15:01H HLA-B*57:03H
YIAQVDVVNF

SEQ ID NO: 8190 - protein, 10 aa, Severe acute respiratory syndrome coronavirus 2
  REGION 1..10: note = Table A: HLA-B*48:01H HLA-A*02:11H HLA-A*02:04M HLA-A*02:05M HLA-A*02:06M HLA-A*02:08H HLA-A*02:01H HLA-A*02:02M HLA-C*08:01H HLA-B*38:02H HLA-B*40:06H HLA-B*13:01H HLA-B*13:02M
AQVDVVNFNL

SEQ ID NO: 8191 - protein, 10 aa, Severe acute respiratory syndrome coronavirus 2
  REGION 1..10: note = Table A: HLA-C*08:03H
QVDVVNFNLT

SEQ ID NO: 8192 - protein, 11 aa, Severe acute respiratory syndrome coronavirus 2
  REGION 1..11: note = Table A: HLA-C*17:01H
FAFPFTIYSLL

SEQ ID NO: 8193 - protein, 11 aa, Severe acute respiratory syndrome coronavirus 2
  REGION 1..11: note = Table A: HLA-A*02:11H
RMNSRNYIAQV

SEQ ID NO: 8194 - protein, 11 aa, Severe acute respiratory syndrome coronavirus 2
  REGION 1..11: note = Table A: HLA-C*14:03H HLA-A*24:02M HLA-A*24:07M HLA-C*08:01H HLA-A*23:01M
NYIAQVDVVNF

SEQ ID NO: 8195 - protein, 11 aa, Severe acute respiratory syndrome coronavirus 2
  REGION 1..11: note = Table A: HLA-B*48:01H HLA-C*06:02H HLA-B*27:02H HLA-A*68:02H HLA-A*02:05M HLA-A*02:06M HLA-C*08:01H HLA-C*08:03H HLA-B*38:02H HLA-B*40:06H HLA-B*39:01H HLA-B*13:02H
AQVDVVNFNLT

SEQ ID NO: 8196 - protein, 12 aa, Severe acute respiratory syndrome coronavirus 2
  REGION 1..12: note = Table B: HLA-DQA1*03:02-B1*03:03L HLA-DQA1*05:01-B1*03:01L HLA-DRB1*01:03L HLA-DRB1*04:05L HLA-DRB1*01:02L HLA-DQA1*01:01-B1*05:01L HLA-DQA1*05:05-B1*03:19L HLA-DQA1*05:01-B1*02:01L HLA-DRB1*04:08L HLA-DRB1*15:03L
ESLVPGFNEKTH

SEQ ID NO: 8197 - protein, 11 aa, Severe acute respiratory syndrome coronavirus 2
  REGION 1..11: note = Table B: HLA-DQA1*03:02-B1*03:03L HLA-DQA1*05:01-B1*03:01L HLA-DRB1*04:03L HLA-DRB1*13:03L HLA-DRB1*01:03L HLA-DRB1*04:02L HLA-DRB1*04:05L HLA-DQA1*01:02-B1*06:02L HLA-DRB1*14:01L HLA-DQA1*01:01-B1*05:01L HLA-DRB1*08:01L
  REGION 1..11: note = CONT. FROM ABOVE: HLA-DQA1*05:01-B1*02:01L HLA-DRB1*12:01L HLA-D RB1*14:17L HLA-DPA1*01:02-B1*04:01L HLA-DRB1*16:01L HLA-DQA1*01: 03-B1*06:01L HLA-DRB1*04:08L HLA-DQA1*02:01-B1*03:03L
VPGFNEKTHVQ

SEQ ID NO: 8198 - protein, 10 aa, Severe acute respiratory syndrome coronavirus 2
  REGION 1..10: note = Table B: HLA-DQA1*03:02-B1*03:03L HLA-DQA1*05:05-B1*03:19L
NEKTHVQLSL

SEQ ID NO: 8199 - protein, 10 aa, Severe acute respiratory syndrome coronavirus 2
  REGION 1..10: note = Table B: HLA-DQA1*03:02-B1*03:03L HLA-DQA1*05:05-B1*03:19L HLA-DQA1*03:01-B1*03:02L HLA-DPA1*01:03-B1*104:01L HLA-DQA1*02:01-B1*03:03L HLA-DRB1*15:03L
VQLSLPVLQV

SEQ ID NO: 8200 - protein, 10 aa, Severe acute respiratory syndrome coronavirus 2
  REGION 1..10: note = Table B: HLA-DQA1*03:02-B1*03:03L HLA-DQA1*05:01-B1*03:01L HLA-DRB1*13:03L HLA-DQA1*01:02-B1*06:02L HLA-DPA1*03:01-B1*04:02L HLA-DRB1*14:01L HLA-DQA1*01-B1*05L HLA-DQA1*05:01-B1*02:01L HLA-DPA1*03:01-B1*105:01L
  REGION 1..10: note = CONT. FROM ABOVE: HLA-DQA1*03:01-B1*03:02L HLA-DPA1*01:02-B1*04: 01L HLA-DQA1*02:01-B1*03:03L
LPVLQVRDVL

SEQ ID NO: 8201 - protein, 12 aa, Severe acute respiratory syndrome coronavirus 2
  REGION 1..12: note = Table B: HLA-DQA1*03:02-B1*03:03L HLA-DQA1*05:01-B1*03:01L HLA-DRB1*13:03L HLA-DRB1*01:03L HLA-DRB1*04:05L HLA-DQA1*01:02-B1*06:02L HLA-DRB1*01:02L HLA-DRB3*02:01L HLA-DPA1*01:03-B1*03:01L HLA-DPA1*03:01-B1*04:02L
  REGION 1..12: note = CONT. FROM ABOVE: HLA-DQA1*01:01-B1*05:01L HLA-DRB1*08:01L HLA-D RB1*04:10L HLA-DPA1*01:03-B1*04:02L HLA-DRB1*12:01L HLA-DPA1*02: 01-B1*13:01L HLA-DPA1*03:01-B1*105:01L HLA-DQA1*05:05-B1*03:01L HLA-DRB1*14:17L HLA-DPA1*01:02-B1*04:01L
  REGION 1..12: note = CONT. FROM ABOVE: HLA-DQA1*01:03-B1*06:01L HLA-DRB1*04:08L HLA-D QA1*02:01-B1*03:03L
DVLVRGFGDSVE

SEQ ID NO: 8202 - protein, 12 aa, Severe acute respiratory syndrome coronavirus 2
  REGION 1..12: note = Table B: HLA-DQA1*03:02-B1*03:03L HLA-DRB1*13:03L HLA-DRB1*01:03L HLA-DRB1*04:04L HLA-DQA1*01:02-B1*06:02L HLA-DRB1*01:02L HLA-DRB4*03:01NL HLA-DPA1*03:01-B1*04:02L HLA-DRB1*08:01L HLA-DRB1*12:01L HLA-DPA1*02:01-B1*13:01L
  REGION 1..12: note = CONT. FROM ABOVE: HLA-DPA1*03:01-B1*105:01L HLA-DRB1*14:17L HLA- DQA1*01:03-B1*06:01L HLA-DRB1*04:08L HLA-DQA1*02:01-B1*03:03L
VLVRGFGDSVEE

SEQ ID NO: 8203 - protein, 10 aa, Severe acute respiratory syndrome coronavirus 2
  REGION 1..10: note = Table B: HLA-DQA1*03:02-B1*03:03L HLA-DQA1*02:01-B1*03:03L
RGFGDSVEEV

SEQ ID NO: 8204 - protein, 10 aa, Severe acute respiratory syndrome coronavirus 2
  REGION 1..10: note = Table B: HLA-DQA1*03:02-B1*03:03L HLA-DQA1*01-B1*05L HLA-DQA1*05:01-B1*02:01L HLA-DQA1*03:01-B1*03:02L
GFGDSVEEVL

SEQ ID NO: 8205 - protein, 12 aa, Severe acute respiratory syndrome coronavirus 2
  REGION 1..12: note = Table B: HLA-DQA1*03:02-B1*03:03L HLA-DQA1*05:01-B1*03:01L HLA-DRB1*04:03L HLA-DRB1*04:05L HLA-DQA1*01:02-B1*06:02L HLA-DQA1*01:01-B1*05:01L HLA-DQA1*01-B1*05L HLA-DQA1*05:01-B1*02:01L HLA-DRB1*16:01L
GDSVEEVLSEAR

SEQ ID NO: 8206 - protein, 12 aa, Severe acute respiratory syndrome coronavirus 2
  REGION 1..12: note = Table B: HLA-DQA1*03:02-B1*03:03L HLA-DQA1*05:01-B1*03:01L HLA-DRB1*04:03L HLA-DRB1*04:05L HLA-DQA1*01:02-B1*06:02L HLA-DQA1*01:01-B1*05:01L HLA-DQA1*01-B1*05L HLA-DQA1*05:05-B1*03:19L HLA-DQA1*05:01-B1*02:01L
  REGION 1..12: note = CONT. FROM ABOVE: HLA-DRB1*04:10L HLA-DPA1*03:01-B1*105:01L HLA- DRB1*16:01L
DSVEEVLSEARQ

SEQ ID NO: 8207 - protein, 12 aa, Severe acute respiratory syndrome coronavirus 2
  REGION 1..12: note = Table B: HLA-DQA1*03:02-B1*03:03L HLA-DQA1*05:01-B1*03:01L HLA-DQA1*01:02-B1*06:02L HLA-DQA1*01:01-B1*05:01L HLA-DQA1*05:01-B1*02:01L HLA-DRB1*16:01L
SVEEVLSEARQH

SEQ ID NO: 8208 - protein, 10 aa, Severe acute respiratory syndrome coronavirus 2
  REGION 1..10: note = Table B: HLA-DQA1*03:02-B1*03:03L HLA-DQA1*05:01-B1*03:01L HLA-DRB1*13:03L HLA-DQA1*01:02-B1*06:02M HLA-DRB1*01:02L HLA-DRB4*03:01NL HLA-DPA1*01:03-B1*03:01L HLA-DPA1*03:01-B1*04:02L HLA-DRB1*14:01L HLA-DRB1*14:02L
  REGION 1..10: note = CONT. FROM ABOVE: HLA-DRB1*08:01L HLA-DQA1*05:05-B1*03:19L HLA-D QA1*05:01-B1*02:01L HLA-DPA1*01:03-B1*04:01L HLA-DQA1*05:05-B1*0 3:116L HLA-DRB1*09:01L HLA-DRB1*12:01L HLA-DPA1*02:01-B1*13:01L HLA-DPA1*03:01-B1*105:01M HLA-DQA1*03:01-B1*03:02L
  REGION 1..10: note = CONT. FROM ABOVE: HLA-DQA1*05:05-B1*03:01L HLA-DPA1*01:02-B1*04: 01L HLA-DQA1*01:03-B1*06:01L HLA-DQA1*02:01-B1*03:03L HLA-DRB1*1 5:03L
EVLSEARQHL

SEQ ID NO: 8209 - protein, 12 aa, Severe acute respiratory syndrome coronavirus 2
  REGION 1..12: note = Table B: HLA-DQA1*03:02-B1*03:03L HLA-DQA1*05:01-B1*03:01L HLA-DQA1*05:05-B1*03:19L HLA-DPA1*03:01-B1*105:01L HLA-DQA1*03:01-B1*03:02L HLA-DQA1*05:05-B1*03:01L
DGTCGLVEVEKG

SEQ ID NO: 8210 - protein, 10 aa, Severe acute respiratory syndrome coronavirus 2
  REGION 1..10: note = Table B: HLA-DQA1*03:02-B1*03:03L HLA-DQA1*03:01-B1*03:02L
GLVEVEKGVL

SEQ ID NO: 8211 - protein, 10 aa, Severe acute respiratory syndrome coronavirus 2
  REGION 1..10: note = Table B: HLA-DQA1*03:02-B1*03:03L HLA-DRB1*04:03L HLA-DRB1*04:02L HLA-DQA1*03:01-B1*03:02L HLA-DRB1*14:17L HLA-DQA1*02:01-B1*03:03L
VEVEKGVLPQ

SEQ ID NO: 8212 - protein, 10 aa, Severe acute respiratory syndrome coronavirus 2
  REGION 1..10: note = Table B: HLA-DQA1*03:02-B1*03:03L HLA-DQA1*05:01-B1*03:01L HLA-DQA1*01:02-B1*06:02L HLA-DPA1*03:01-B1*04:02L HLA-DQA1*05:05-B1*03:19L HLA-DQA1*05:01-B1*02:01L HLA-DQA1*05:05-B1*03:116L HLA-DRB1*09:01L
  REGION 1..10: note = CONT. FROM ABOVE: HLA-DPA1*03:01-B1*105:01L HLA-DQA1*03:01-B1*03 :02L HLA-DPA1*01:02-B1*04:01L HLA-DQA1*02:01-B1*03:03L HLA-DRB1* 15:03L
EVEKGVLPQL

SEQ ID NO: 8213 - protein, 12 aa, Severe acute respiratory syndrome coronavirus 2
  REGION 1..12: note = Table B: HLA-DQA1*03:02-B1*03:03L HLA-DQA1*01:02-B1*06:02L HLA-DQA1*05:01-B1*02:01L HLA-DQA1*03:01-B1*03:02L HLA-DQA1*01:03-B1*06:01L HLA-DQA1*02:01-B1*03:03L
VEKGVLPQLEQP

SEQ ID NO: 8214 - protein, 10 aa, Severe acute respiratory syndrome coronavirus 2
  REGION 1..10: note = Table B: HLA-DQA1*03:02-B1*03:03L HLA-DQA1*05:01-B1*03:01L HLA-DRB1*04:03L HLA-DRB1*13:02L HLA-DRB1*13:03L HLA-DRB1*01:03L HLA-DRB1*04:02L HLA-DRB1*04:05L HLA-DQA1*01:02-B1*06:02M HLA-DRB4*03:01NL HLA-DRB1*08:77L HLA-DPA1*01:03-B1*03:01L
  REGION 1..10: note = CONT. FROM ABOVE: HLA-DPA1*03:01-B1*04:02L HLA-DRB1*03:01L HLA-D RB1*14:01L HLA-DRB1*11:02L HLA-DRB1*14:02L HLA-DRB1*11:01L HLA-D QA1*01-B1*05L HLA-DQA1*05:05-B1*03:19M HLA-DQA1*05:01-B1*02:01M HLA-DRB4*01:01L HLA-DPA1*01:03-B1*04:01L
  REGION 1..10: note = CONT. FROM ABOVE: HLA-DQA1*05:05-B1*03:116L HLA-DPA1*01:03-B1*04 :02L HLA-DRB1*12:01L HLA-DPA1*02:01-B1*13:01L HLA-DPA1*03:01-B1* 105:01L HLA-DQA1*03:01-B1*03:02L HLA-DPA1*01:03-B1*104:01L HLA-D QA1*05:05-B1*03:01L HLA-DPA1*01:02-B1*04:01L HLA-DRB1*10:01L
  REGION 1..10: note = CONT. FROM ABOVE: HLA-DRB1*16:01L HLA-DQA1*01:03-B1*06:01L HLA-D RB1*08:02L HLA-DQA1*02:01-B1*03:03L HLA-DRB1*15:03L
GVLPQLEQPY

SEQ ID NO: 8215 - protein, 10 aa, Severe acute respiratory syndrome coronavirus 2
  REGION 1..10: note = Table B: HLA-DQA1*03:02-B1*03:03L HLA-DQA1*05:01-B1*03:01L HLA-DQA1*01:02-B1*06:02L HLA-DRB1*01:02L HLA-DPA1*03:01-B1*04:02L HLA-DRB1*14:01L HLA-DQA1*01-B1*05L HLA-DQA1*05:05-B1*03:19L HLA-DQA1*05:01-B1*02:01L
  REGION 1..10: note = CONT. FROM ABOVE: HLA-DQA1*05:05-B1*03:116L HLA-DPA1*02:01-B1*13 :01L HLA-DPA1*03:01-B1*105:01L HLA-DQA1*03:01-B1*03:02L HLA-DPA1 *01:03-B1*104:01L HLA-DPA1*01:02-B1*04:01L HLA-DRB1*16:01L HLA-D QA1*01:03-B1*06:01L HLA-DQA1*02:01-B1*03:03L HLA-DRB1*15:03L
VLPQLEQPYV

SEQ ID NO: 8216 - protein, 11 aa, Severe acute respiratory syndrome coronavirus 2
  REGION 1..11: note = Table B: HLA-DQA1*03:02-B1*03:03L HLA-DRB1*13:03L HLA-DRB1*14:01L HLA-DPA1*01:02-B1*04:01L
DARTAPHGHVM

SEQ ID NO: 8217 - protein, 10 aa, Severe acute respiratory syndrome coronavirus 2
  REGION 1..10: note = Table B: HLA-DQA1*03:02-B1*03:03L HLA-DQA1*05:01-B1*03:01L HLA-DRB1*01:03L HLA-DQA1*01:02-B1*06:02L HLA-DRB1*01:02L HLA-DRB1*14:01L HLA-DRB1*08:01L HLA-DQA1*05:05-B1*03:19L HLA-DQA1*03:01-B1*03:02L HLA-DRB1*16:01L
  REGION 1..10: note = CONT. FROM ABOVE: HLA-DQA1*01:03-B1*06:01L HLA-DQA1*02:01-B1*03: 03L HLA-DRB1*15:03L
RTAPHGHVMV

SEQ ID NO: 8218 - protein, 10 aa, Severe acute respiratory syndrome coronavirus 2
  REGION 1..10: note = Table B: HLA-DQA1*03:02-B1*03:03L
HVMVELVAEL

SEQ ID NO: 8219 - protein, 10 aa, Severe acute respiratory syndrome coronavirus 2
  REGION 1..10: note = Table B: HLA-DQA1*03:02-B1*03:03L HLA-DRB1*11:02L HLA-DQA1*05:05-B1*03:19M HLA-DPA1*01:03-B1*104:01M
VELVAELEGI

SEQ ID NO: 8220 - protein, 10 aa, Severe acute respiratory syndrome coronavirus 2
  REGION 1..10: note = Table B: HLA-DQA1*03:02-B1*03:03L HLA-DRB1*13:02L HLA-DRB1*13:03L HLA-DRB4*03:01NL HLA-DRB3*02:01L HLA-DRB1*08:01L HLA-DPA1*01:03-B1*04:02L HLA-DRB1*12:01L HLA-DQA1*03:01-B1*03:02L HLA-DQA1*05:05-B1*03:01L
AELEGIQYGR

SEQ ID NO: 8221 - protein, 11 aa, Severe acute respiratory syndrome coronavirus 2
  REGION 1..11: note = Table B: HLA-DQA1*03:02-B1*03:03L HLA-DQA1*05:01-B1*03:01L HLA-DRB1*04:03L HLA-DRB1*04:02L HLA-DQA1*05:05-B1*03:19L HLA-DQA1*05:05-B1*03:01L HLA-DRB1*14:17L HLA-DQA1*01:03-B1*06:01L
EGIQYGRSGET

SEQ ID NO: 8222 - protein, 10 aa, Severe acute respiratory syndrome coronavirus 2
  REGION 1..10: note = Table B: HLA-DQA1*03:02-B1*03:03M HLA-DQA1*05:01-B1*03:01L HLA-DRB1*04:03L HLA-DRB1*13:02L HLA-DRB1*13:03L HLA-DRB1*01:03L HLA-DRB1*04:02L HLA-DRB1*04:05L HLA-DQA1*01:02-B1*06:02L HLA-DRB1*01:01L HLA-DRB1*01:02L HLA-DRB4*03:01NL HLA-DRB1*08:77L
  REGION 1..10: note = CONT. FROM ABOVE: HLA-DRB3*02:01L HLA-DPA1*01:03-B1*03:01L HLA-D PA1*03:01-B1*04:02L HLA-DRB1*14:01L HLA-DRB1*11:03L HLA-DRB1*11: 04L HLA-DRB1*14:02L HLA-DQA1*01:01-B1*05:01L HLA-DRB1*08:01L HLA -DRB1*11:01L HLA-DRB5*01:01L HLA-DQA1*01-B1*05L
  REGION 1..10: note = CONT. FROM ABOVE: HLA-DQA1*05:05-B1*03:19L HLA-DQA1*05:01-B1*02: 01L HLA-DRB4*01:01L HLA-DPA1*01:03-B1*04:01L HLA-DQA1*05:05-B1*0 3:116L HLA-DRB1*09:01L HLA-DPA1*01:03-B1*04:02L HLA-DRB1*12:01L HLA-DPA1*02:01-B1*13:01L HLA-DPA1*03:01-B1*105:01L
  REGION 1..10: note = CONT. FROM ABOVE: HLA-DQA1*03:01-B1*03:02L HLA-DQA1*05:05-B1*03: 01L HLA-DPA1*01:02-B1*04:01L HLA-DRB1*07:01L HLA-DRB1*10:01L HLA -DRB1*16:01L HLA-DQA1*01:03-B1*06:01L HLA-DRB1*08:02L HLA-DRB1*0 8:03L HLA-DQA1*02:01-B1*03:03L HLA-DRB1*15:03L
IQYGRSGETL

SEQ ID NO: 8223 - protein, 10 aa, Severe acute respiratory syndrome coronavirus 2
  REGION 1..10: note = Table B: HLA-DQA1*03:02-B1*03:03L HLA-DQA1*03:01-B1*03:02L
GETLGVLVPH

SEQ ID NO: 8224 - protein, 10 aa, Severe acute respiratory syndrome coronavirus 2
  REGION 1..10: note = Table B: HLA-DQA1*03:02-B1*03:03M HLA-DQA1*05:01-B1*03:01L HLA-DRB1*13:03L HLA-DQA1*01:02-B1*06:02M HLA-DRB1*01:02M HLA-DPA1*03:01-B1*04:02L HLA-DRB1*14:01L HLA-DRB1*14:02L HLA-DQA1*05:05-B1*03:19L HLA-DQA1*05:01-B1*02:01L
  REGION 1..10: note = CONT. FROM ABOVE: HLA-DPA1*01:03-B1*04:01L HLA-DQA1*05:05-B1*03: 116L HLA-DRB1*09:01L HLA-DRB1*12:01L HLA-DPA1*02:01-B1*13:01L HL A-DPA1*03:01-B1*105:01H HLA-DQA1*03:01-B1*03:02L HLA-DPA1*01:03- B1*104:01L HLA-DQA1*05:05-B1*03:01L HLA-DPA1*01:02-B1*04:01L
  REGION 1..10: note = CONT. FROM ABOVE: HLA-DQA1*01:03-B1*06:01L HLA-DRB1*08:03L HLA-D QA1*02:01-B1*03:03L HLA-DRB1*15:03M
ETLGVLVPHV

SEQ ID NO: 8225 - protein, 11 aa, Severe acute respiratory syndrome coronavirus 2
  REGION 1..11: note = Table B: HLA-DQA1*03:02-B1*03:03L HLA-DRB1*04:03L HLA-DQA1*03:01-B1*03:02L HLA-DQA1*02:01-B1*03:03L
VLVPHVGEIPV

SEQ ID NO: 8226 - protein, 12 aa, Severe acute respiratory syndrome coronavirus 2
  REGION 1..12: note = Table B: HLA-DQA1*03:02-B1*03:03L HLA-DRB1*04:03L HLA-DQA1*05:05-B1*03:01L
LVPHVGEIPVAY

SEQ ID NO: 8227 - protein, 12 aa, Severe acute respiratory syndrome coronavirus 2
  REGION 1..12: note = Table B: HLA-DQA1*03:02-B1*03:03L HLA-DRB1*04:03L HLA-DRB1*04:02L HLA-DRB1*01:02L HLA-DQA1*01:01-B1*05:01L HLA-DRB1*14:17L HLA-DRB1*04:08L
VPHVGEIPVAYR

SEQ ID NO: 8228 - protein, 10 aa, Severe acute respiratory syndrome coronavirus 2
  REGION 1..10: note = Table B: HLA-DQA1*03:02-B1*03:03M HLA-DQA1*05:01-B1*03:01L HLA-DRB1*08:77L HLA-DRB1*11:02M HLA-DQA1*05:05-B1*03:19H HLA-DQA1*05:01-B1*02:01L HLA-DPA1*01:03-B1*04:01L HLA-DRB1*09:01L HLA-DQA1*03:01-B1*03:02L
  REGION 1..10: note = CONT. FROM ABOVE: HLA-DPA1*01:03-B1*104:01M
GEIPVAYRKV

SEQ ID NO: 8229 - protein, 14 aa, Severe acute respiratory syndrome coronavirus 2
  REGION 1..14: note = Table B: HLA-DQA1*03:02-B1*03:03L
NGNKGAGGHSYGAD

SEQ ID NO: 8230 - protein, 11 aa, Severe acute respiratory syndrome coronavirus 2
  REGION 1..11: note = Table B: HLA-DQA1*03:02-B1*03:03L HLA-DQA1*03:01-B1*03:02L
GAGGHSYGADL

SEQ ID NO: 8231 - protein, 10 aa, Severe acute respiratory syndrome coronavirus 2
  REGION 1..10: note = Table B: HLA-DQA1*03:02-B1*03:03L HLA-DQA1*05:01-B1*03:01L HLA-DRB1*04:03L HLA-DRB1*13:02L HLA-DRB1*13:03L HLA-DRB1*01:03L HLA-DRB1*04:05L HLA-DQA1*01:02-B1*06:02M HLA-DRB1*01:01L HLA-DRB1*01:02L HLA-DRB1*08:77L HLA-DPA1*01:03-B1*03:01L
  REGION 1..10: note = CONT. FROM ABOVE: HLA-DPA1*03:01-B1*04:02L HLA-DRB1*03:01L HLA-D RB1*14:01L HLA-DRB1*14:02L HLA-DRB1*11:01L HLA-DQA1*01-B1*05L HL A-DQA1*05:05-B1*03:19L HLA-DQA1*05:01-B1*02:01L HLA-DRB4*01:01L HLA-DPA1*01:03-B1*04:01L HLA-DQA1*05:05-B1*03:116L
  REGION 1..10: note = CONT. FROM ABOVE: HLA-DPA1*01:03-B1*04:02L HLA-DRB1*12:01L HLA-D PA1*02:01-B1*13:01L HLA-DPA1*03:01-B1*105:01M HLA-DPA1*01:02-B1* 04:01L HLA-DRB1*10:01L HLA-DRB1*16:01L HLA-DQA1*01:03-B1*06:01L HLA-DRB1*08:02L HLA-DQA1*02:01-B1*03:03M HLA-DRB1*15:03L
HSYGADLKSF

SEQ ID NO: 8232 - protein, 12 aa, Severe acute respiratory syndrome coronavirus 2
  REGION 1..12: note = Table B: HLA-DQA1*03:02-B1*03:03L HLA-DQA1*05:01-B1*03:01L HLA-DRB1*04:03L HLA-DRB1*13:03L HLA-DRB1*04:02L HLA-DRB1*04:05L HLA-DQA1*01:02-B1*06:02L HLA-DRB1*08:04L HLA-DRB1*08:01L HLA-DQA1*05:05-B1*03:19L HLA-DQA1*05:01-B1*02:01L
  REGION 1..12: note = CONT. FROM ABOVE: HLA-DPA1*03:01-B1*105:01L HLA-DQA1*05:05-B1*03 :01L HLA-DQA1*01:03-B1*06:01L HLA-DRB1*04:08L HLA-DQA1*02:01-B1* 03:03L
SYGADLKSFDLG

SEQ ID NO: 8233 - protein, 12 aa, Severe acute respiratory syndrome coronavirus 2
  REGION 1..12: note = Table B: HLA-DQA1*03:02-B1*03:03L HLA-DRB1*04:05L HLA-DQA1*01:01-B1*05:01L
GADLKSFDLGDE

SEQ ID NO: 8234 - protein, 12 aa, Severe acute respiratory syndrome coronavirus 2
  REGION 1..12: note = Table B: HLA-DQA1*03:02-B1*03:03L
ADLKSFDLGDEL

SEQ ID NO: 8235 - protein, 16 aa, Severe acute respiratory syndrome coronavirus 2
  REGION 1..16: note = Table B: HLA-DQA1*03:02-B1*03:03L HLA-DPA1*02:01-B1*13:01L HLA-DQA1*05:05-B1*03:01L HLA-DQA1*02:01-B1*03:03L
DLKSFDLGDELGTDPY

SEQ ID NO: 8236 - protein, 13 aa, Severe acute respiratory syndrome coronavirus 2
  REGION 1..13: note = Table B: HLA-DQA1*03:02-B1*03:03L
DLGDELGTDPYED

SEQ ID NO: 8237 - protein, 11 aa, Severe acute respiratory syndrome coronavirus 2
  REGION 1..11: note = Table B: HLA-DQA1*03:02-B1*03:03L HLA-DQA1*01:02-B1*06:02L HLA-DQA1*05:05-B1*03:19L HLA-DQA1*05:01-B1*02:01L HLA-DPA1*03:01-B1*105:01L HLA-DQA1*03:01-B1*03:02L HLA-DQA1*01:03-B1*06:01L HLA-DQA1*02:01-B1*03:03L
DELGTDPYEDF

SEQ ID NO: 8238 - protein, 11 aa, Severe acute respiratory syndrome coronavirus 2
  REGION 1..11: note = Table B: HLA-DQA1*03:02-B1*03:03L HLA-DRB1*04:03L HLA-DQA1*05:01-B1*02:01L HLA-DQA1*03:01-B1*03:02L HLA-DRB1*15:03L
GTDPYEDFQEN

SEQ ID NO: 8239 - protein, 13 aa, Severe acute respiratory syndrome coronavirus 2
  REGION 1..13: note = Table B: HLA-DQA1*03:02-B1*03:03L HLA-DRB1*16:01L HLA-DQA1*02:01-B1*03:03L
DPYEDFQENWNTK

SEQ ID NO: 8240 - protein, 13 aa, Severe acute respiratory syndrome coronavirus 2
  REGION 1..13: note = Table B: HLA-DQA1*03:02-B1*03:03L HLA-DQA1*05:01-B1*03:01L HLA-DRB1*04:05L HLA-DRB1*01:02L HLA-DRB4*03:01NL HLA-DRB1*08:04L HLA-DRB1*14:01L HLA-DQA1*01-B1*05L HLA-DRB1*14:54L HLA-DRB1*16:01L HLA-DRB1*04:08L
DFQENWNTKHSSG

SEQ ID NO: 8241 - protein, 13 aa, Severe acute respiratory syndrome coronavirus 2
  REGION 1..13: note = Table B: HLA-DQA1*03:02-B1*03:03L HLA-DQA1*05:05-B1*03:01L HLA-DRB1*16:01L HLA-DQA1*01:03-B1*06:01L
QENWNTKHSSGVT

SEQ ID NO: 8242 - protein, 10 aa, Severe acute respiratory syndrome coronavirus 2
  REGION 1..10: note = Table B: HLA-DQA1*03:02-B1*03:03L HLA-DQA1*05:01-B1*03:01L HLA-DRB1*13:02L HLA-DRB1*13:03L HLA-DRB1*01:03L HLA-DRB1*04:02L HLA-DQA1*01:02-B1*06:02L HLA-DRB1*14:01L HLA-DQA1*01:01-B1*05:01L HLA-DRB1*08:01L HLA-DRB3*01:01L
  REGION 1..10: note = CONT. FROM ABOVE: HLA-DQA1*03:01-B1*03:02L HLA-DPA1*01:02-B1*04: 01L HLA-DRB1*16:01L HLA-DQA1*01:03-B1*06:01L HLA-DQA1*02:01-B1*0 3:03L
KHSSGVTREL

SEQ ID NO: 8243 - protein, 11 aa, Severe acute respiratory syndrome coronavirus 2
  REGION 1..11: note = Table B: HLA-DQA1*03:02-B1*03:03L HLA-DRB1*04:03L HLA-DPA1*03:01-B1*04:02L HLA-DQA1*03:01-B1*03:02L HLA-DQA1*05:05-B1*03:01L HLA-DPA1*01:02-B1*04:01L
ELMRELNGGAY

SEQ ID NO: 8244 - protein, 10 aa, Severe acute respiratory syndrome coronavirus 2
  REGION 1..10: note = Table B: HLA-DQA1*03:02-B1*03:03L HLA-DQA1*05:01-B1*03:01M HLA-DRB1*14:04L HLA-DRB1*04:01L HLA-DRB1*04:03L HLA-DRB1*13:02M HLA-DRB1*13:03M HLA-DRB1*01:03M HLA-DRB1*04:02L HLA-DRB1*04:05L HLA-DQA1*01:02-B1*06:02H HLA-DRB1*01:01L HLA-DRB1*01:02L
  REGION 1..10: note = CONT. FROM ABOVE: HLA-DRB4*03:01NM HLA-DRB1*08:77M HLA-DPA1*01:0 3-B1*03:01M HLA-DPA1*03:01-B1*04:02M HLA-DRB1*03:01M HLA-DRB1*14 :01M HLA-DRB1*11:02L HLA-DRB1*11:03L HLA-DRB1*11:04L HLA-DRB1*14 :02M HLA-DRB1*08:01L HLA-DRB1*11:01L HLA-DRB5*01:01M
  REGION 1..10: note = CONT. FROM ABOVE: HLA-DQA1*01-B1*05M HLA-DQA1*05:05-B1*03:19M HL A-DRB4*02:01NL HLA-DQA1*05:01-B1*02:01M HLA-DRB4*01:01M HLA-DPA1 *01:03-B1*04:01H HLA-DQA1*05:05-B1*03:116M HLA-DRB1*09:01L HLA-D PA1*01:03-B1*04:02M HLA-DRB1*12:01M HLA-DRB1*12:02L
  REGION 1..10: note = CONT. FROM ABOVE: HLA-DPA1*02:01-B1*13:01L HLA-DPA1*03:01-B1*105 :01M HLA-DQA1*03:01-B1*03:02L HLA-DRB1*14:54L HLA-DPA1*01:03-B1* 104:01M HLA-DQA1*05:05-B1*03:01L HLA-DRB1*14:17L HLA-DPA1*01:02- B1*04:01L HLA-DRB1*10:01M HLA-DRB1*16:01M
  REGION 1..10: note = CONT. FROM ABOVE: HLA-DQA1*01:03-B1*06:01L HLA-DRB1*08:02L HLA- DRB1*08:03L HLA-DQA1*02:01-B1*03:03M HLA-DRB1*15:01L HLA-DRB1*15:03M
ELNGGAYTRY

SEQ ID NO: 8245 - protein, 10 aa, Severe acute respiratory syndrome coronavirus 2
  REGION 1..10: note = Table B: HLA-DQA1*03:02-B1*03:03L HLA-DQA1*03:01-B1*03:02L HLA-DQA1*01:03-B1*06:01L HLA-DQA1*02:01-B1*03:03L
GGAYTRYVDN

SEQ ID NO: 8246 - protein, 10 aa, Severe acute respiratory syndrome coronavirus 2
  REGION 1..10: note = Table B: HLA-DQA1*03:02-B1*03:03L HLA-DRB1*04:03L HLA-DRB1*04:02L HLA-DQA1*01-B1*05L HLA-DQA1*03:01-B1*03:02L HLA-DPA1*01:02-B1*04:01L HLA-DQA1*01:03-B1*06:01L HLA-DQA1*02:01-B1*03:03L
GAYTRYVDNN

SEQ ID NO: 8247 - protein, 14 aa, Severe acute respiratory syndrome coronavirus 2
  REGION 1..14: note = Table B: HLA-DQA1*03:02-B1*03:03L HLA-DQA1*05:01-B1*03:01L HLA-DQA1*01-B1*05L HLA-DQA1*05:05-B1*03:19L HLA-DQA1*05:01-B1*02:01L HLA-DPA1*02:01-B1*13:01L HLA-DPA1*03:01-B1*105:01L HLA-DQA1*03:01-B1*03:02L
  REGION 1..14: note = CONT. FROM ABOVE: HLA-DQA1*05:05-B1*03:01L HLA-DQA1*02:01-B1*03: 03L
VDNNFCGPDGYPLE

SEQ ID NO: 8248 - protein, 13 aa, Severe acute respiratory syndrome coronavirus 2
  REGION 1..13: note = Table B: HLA-DQA1*03:02-B1*03:03L HLA-DQA1*01:02-B1*06:02L HLA-DPA1*03:01-B1*105:01L HLA-DQA1*03:01-B1*03:02L HLA-DQA1*05:05-B1*03:01L HLA-DQA1*01:03-B1*06:01L HLA-DQA1*02:01-B1*03:03L
GPDGYPLECIKDL

SEQ ID NO: 8249 - protein, 16 aa, Severe acute respiratory syndrome coronavirus 2
  REGION 1..16: note = Table B: HLA-DQA1*03:02-B1*03:03L HLA-DPA1*03:01-B1*105:01L HLA-DRB1*15:03L
DLLARAGKASCTLSEQ

SEQ ID NO: 8250 - protein, 10 aa, Severe acute respiratory syndrome coronavirus 2
  REGION 1..10: note = Table B: HLA-DQA1*03:02-B1*03:03L HLA-DQA1*03:01-B1*03:02L
SEQLDFIDTK

SEQ ID NO: 8251 - protein, 10 aa, Severe acute respiratory syndrome coronavirus 2
  REGION 1..10: note = Table B: HLA-DQA1*03:02-B1*03:03L HLA-DQA1*05:01-B1*03:01L HLA-DRB1*04:03L HLA-DRB1*13:02L HLA-DRB1*13:03L HLA-DRB1*01:03L HLA-DRB1*04:05L HLA-DQA1*01:02-B1*06:02M HLA-DRB1*01:01L HLA-DRB1*01:02L HLA-DRB4*03:01NL HLA-DRB1*08:77L
  REGION 1..10: note = CONT. FROM ABOVE: HLA-DPA1*01:03-B1*03:01L HLA-DPA1*03:01-B1*04: 02L HLA-DRB1*03:01L HLA-DRB1*14:01L HLA-DRB1*11:02L HLA-DRB1*14: 02L HLA-DQA1*01:01-B1*05:01L HLA-DRB1*08:01L HLA-DRB1*11:01L HLA -DRB5*01:01L HLA-DQA1*01-B1*05L HLA-DQA1*05:05-B1*03:19L
  REGION 1..10: note = CONT. FROM ABOVE: HLA-DQA1*05:01-B1*02:01L HLA-DRB4*01:01L HLA-D PA1*01:03-B1*04:01L HLA-DQA1*05:05-B1*03:116L HLA-DPA1*01:03-B1* 04:02L HLA-DRB1*12:01L HLA-DPA1*02:01-B1*13:01L HLA-DPA1*03:01-B 1*105:01L HLA-DQA1*03:01-B1*03:02L HLA-DPA1*01:03-B1*104:01L
  REGION 1..10: note = CONT. FROM ABOVE: HLA-DQA1*05:05-B1*03:01L HLA-DPA1*01:02-B1*04: 01L HLA-DRB1*10:01L HLA-DRB1*16:01L HLA-DQA1*01:03-B1*06:01L HLA -DRB1*08:02L HLA-DQA1*02:01-B1*03:03M HLA-DRB1*15:03L
DFIDTKRGVY

SEQ ID NO: 8252 - protein, 12 aa, Severe acute respiratory syndrome coronavirus 2
  REGION 1..12: note = Table B: HLA-DQA1*03:02-B1*03:03L HLA-DRB1*04:03L HLA-DRB1*04:02L HLA-DRB1*04:05L HLA-DQA1*01:02-B1*06:02L HLA-DQA1*05:01-B1*02:01L HLA-DRB1*04:10L HLA-DRB1*12:01L HLA-DRB1*14:17L HLA-DRB1*16:01L HLA-DQA1*02:01-B1*03:03L
  REGION 1..12: note = CONT. FROM ABOVE: HLA-DRB1*15:03L
EHEIAWYTERSE

SEQ ID NO: 8253 - protein, 12 aa, Severe acute respiratory syndrome coronavirus 2
  REGION 1..12: note = Table B: HLA-DQA1*03:02-B1*03:03L HLA-DRB1*14:01L HLA-DRB1*08:01L HLA-DQA1*05:05-B1*03:01L
IAWYTERSEKSY

SEQ ID NO: 8254 - protein, 12 aa, Severe acute respiratory syndrome coronavirus 2
  REGION 1..12: note = Table B: HLA-DQA1*03:02-B1*03:03L HLA-DRB3*01:01L
AWYTERSEKSYE

SEQ ID NO: 8255 - protein, 10 aa, Severe acute respiratory syndrome coronavirus 2
  REGION 1..10: note = Table B: HLA-DQA1*03:02-B1*03:03M HLA-DQA1*05:05-B1*03:19L HLA-DRB1*09:01L HLA-DQA1*03:01-B1*03:02L HLA-DRB1*16:01L
TERSEKSYEL

SEQ ID NO: 8256 - protein, 10 aa, Severe acute respiratory syndrome coronavirus 2
  REGION 1..10: note = Table B: HLA-DQA1*03:02-B1*03:03L HLA-DQA1*01-B1*05L HLA-DQA1*03:01-B1*03:02L HLA-DQA1*02:01-B1*03:03L
KSYELQTPFE

SEQ ID NO: 8257 - protein, 10 aa, Severe acute respiratory syndrome coronavirus 2
  REGION 1..10: note = Table B: HLA-DQA1*03:02-B1*03:03L HLA-DQA1*05:05-B1*03:19L HLA-DPA1*02:01-B1*13:01L HLA-DPA1*01:03-B1*104:01L HLA-DQA1*01:03-B1*06:01L HLA-DRB1*15:03L
SYELQTPFEI

SEQ ID NO: 8258 - protein, 10 aa, Severe acute respiratory syndrome coronavirus 2
  REGION 1..10: note = Table B: HLA-DQA1*03:02-B1*03:03L HLA-DQA1*05:01-B1*03:01L HLA-DRB1*04:03L HLA-DRB1*13:02L HLA-DRB1*13:03L HLA-DRB1*01:03L HLA-DRB1*04:02L HLA-DQA1*01:02-B1*06:02L HLA-DRB1*01:02L HLA-DRB4*03:01NL HLA-DRB1*08:77L HLA-DRB3*02:01L HLA-DRB1*11:03L
  REGION 1..10: note = CONT. FROM ABOVE: HLA-DQA1*01-B1*05L HLA-DQA1*05:05-B1*03:19L HL A-DQA1*05:01-B1*02:01L HLA-DRB1*12:01L HLA-DPA1*03:01-B1*105:01L HLA-DQA1*03:01-B1*03:02L HLA-DQA1*05:05-B1*03:01L HLA-DRB1*14:17 L HLA-DPA1*01:02-B1*04:01L HLA-DRB1*16:01L
  REGION 1..10: note = CONT. FROM ABOVE: HLA-DQA1*01:03-B1*06:01L HLA-DRB1*04:08L HLA-D QA1*02:01-B1*03:03L HLA-DRB1*15:03L
YELQTPFEIK

SEQ ID NO: 8259 - protein, 10 aa, Severe acute respiratory syndrome coronavirus 2
  REGION 1..10: note = Table B: HLA-DQA1*03:02-B1*03:03M HLA-DQA1*05:01-B1*03:01L HLA-DRB1*13:03L HLA-DQA1*01:02-B1*06:02L HLA-DRB1*01:02L HLA-DPA1*03:01-B1*04:02L HLA-DRB1*14:01L HLA-DRB1*14:02L HLA-DQA1*05:05-B1*03:19L HLA-DQA1*05:01-B1*02:01L
  REGION 1..10: note = CONT. FROM ABOVE: HLA-DPA1*01:03-B1*04:01L HLA-DQA1*05:05-B1*03: 116L HLA-DRB1*09:01L HLA-DRB1*12:01L HLA-DPA1*02:01-B1*13:01L HL A-DPA1*03:01-B1*105:01M HLA-DQA1*03:01-B1*03:02L HLA-DPA1*01:02- B1*04:01L HLA-DRB1*16:01L HLA-DQA1*01:03-B1*06:01L
  REGION 1..10: note = CONT. FROM ABOVE: HLA-DQA1*02:01-B1*03:03L HLA-DRB1*15:03L
ELQTPFEIKL

SEQ ID NO: 8260 - protein, 15 aa, Severe acute respiratory syndrome coronavirus 2
  REGION 1..15: note = Table B: HLA-DQA1*03:02-B1*03:03L HLA-DRB1*04:04L HLA-DRB1*01:01L HLA-DRB3*02:01L HLA-DPA1*01:03-B1*03:01L HLA-DRB1*03:01L HLA-DRB1*11:02L HLA-DQA1*05:05-B1*03:19L HLA-DRB1*13:01L HLA-DQA1*05:05-B1*03:116L
  REGION 1..15: note = CONT. FROM ABOVE: HLA-DPA1*01:03-B1*04:02L HLA-DPA1*01:03-B1*02: 01L HLA-DPA1*01:03-B1*104:01L HLA-DQA1*05:05-B1*03:01L HLA-DRB1* 07:01L HLA-DRB1*10:01L HLA-DRB1*08:02L
TPFEIKLAKKFDTFN

SEQ ID NO: 8261 - protein, 15 aa, Severe acute respiratory syndrome coronavirus 2
  REGION 1..15: note = Table B: HLA-DQA1*03:02-B1*03:03L HLA-DRB1*01:03L HLA-DPA1*01:03-B1*03:01L HLA-DRB1*16:01L HLA-DRB1*04:08L
FDTFNGECPNFVFPL

SEQ ID NO: 8262 - protein, 15 aa, Severe acute respiratory syndrome coronavirus 2
  REGION 1..15: note = Table B: HLA-DQA1*03:02-B1*03:03L HLA-DPA1*01:03-B1*03:01L HLA-DQA1*05:01-B1*02:01L HLA-DQA1*03:01-B1*03:02L
DTFNGECPNFVFPLN

SEQ ID NO: 8263 - protein, 10 aa, Severe acute respiratory syndrome coronavirus 2
  REGION 1..10: note = Table B: HLA-DQA1*03:02-B1*03:03L HLA-DQA1*05:01-B1*03:01L HLA-DQA1*01:02-B1*06:02L HLA-DRB1*01:01L HLA-DPA1*03:01-B1*04:02L HLA-DRB1*14:01L HLA-DQA1*05:05-B1*03:116M HLA-DPA1*02:01-B1*13:01M
  REGION 1..10: note = CONT. FROM ABOVE: HLA-DPA1*03:01-B1*105:01L HLA-DPA1*01:02-B1*04 :01L HLA-DQA1*01:03-B1*06:01L HLA-DRB1*08:03L HLA-DRB1*15:03L
FPLNSIIKTI

SEQ ID NO: 8264 - protein, 10 aa, Severe acute respiratory syndrome coronavirus 2
  REGION 1..10: note = Table B: HLA-DQA1*03:02-B1*03:03L HLA-DQA1*05:01-B1*03:01L HLA-DQA1*01:02-B1*06:02L HLA-DRB1*14:01L HLA-DQA1*05:05-B1*03:19L HLA-DPA1*03:01-B1*105:01L HLA-DQA1*03:01-B1*03:02L HLA-DRB1*16:01L
  REGION 1..10: note = CONT. FROM ABOVE: HLA-DQA1*01:03-B1*06:01L HLA-DQA1*02:01-B1*03: 03L HLA-DRB1*15:03L
SIIKTIQPRV

SEQ ID NO: 8265 - protein, 10 aa, Severe acute respiratory syndrome coronavirus 2
  REGION 1..10: note = Table B: HLA-DQA1*03:02-B1*03:03L HLA-DQA1*05:01-B1*03:01L HLA-DRB1*04:03L HLA-DRB1*13:02L HLA-DRB1*13:03L HLA-DRB1*01:03L HLA-DRB1*04:02L HLA-DRB1*04:05L HLA-DQA1*01:02-B1*06:02L HLA-DRB1*01:02L HLA-DRB4*03:01NL HLA-DRB1*08:77L HLA-DRB3*02:01L
  REGION 1..10: note = CONT. FROM ABOVE: HLA-DPA1*03:01-B1*04:02L HLA-DRB1*14:01L HLA-D QA1*05:01-B1*02:01L HLA-DRB1*12:01L HLA-DRB1*12:02L HLA-DPA1*03: 01-B1*105:01L HLA-DQA1*03:01-B1*03:02L HLA-DRB1*14:54L HLA-DQA1* 05:05-B1*03:01L HLA-DRB1*14:17L HLA-DPA1*01:02-B1*04:01L
  REGION 1..10: note = CONT. FROM ABOVE: HLA-DRB1*16:01L HLA-DQA1*01:03-B1*06:01L HLA-D RB1*04:08L HLA-DQA1*02:01-B1*03:03L HLA-DRB1*15:03L
IIKTIQPRVE

SEQ ID NO: 8266 - protein, 11 aa, Severe acute respiratory syndrome coronavirus 2
  REGION 1..11: note = Table B: HLA-DQA1*03:02-B1*03:03L HLA-DQA1*05:01-B1*03:01L HLA-DRB1*04:03L HLA-DRB1*04:02L HLA-DQA1*01:02-B1*06:02L HLA-DRB4*03:01NL HLA-DRB1*04:10L HLA-DQA1*05:05-B1*03:01L HLA-DRB1*14:17L HLA-DQA1*01:03-B1*06:01L
  REGION 1..11: note = CONT. FROM ABOVE: HLA-DQA1*02:01-B1*03:03L
IRSVYPVASPN

SEQ ID NO: 8267 - protein, 10 aa, Severe acute respiratory syndrome coronavirus 2
  REGION 1..10: note = Table B: HLA-DQA1*03:02-B1*03:03L HLA-DQA1*05:01-B1*03:01L HLA-DRB1*04:03L HLA-DRB1*13:02L HLA-DRB1*13:03L HLA-DRB1*01:03L HLA-DRB1*04:02L HLA-DRB1*04:05L HLA-DQA1*01:02-B1*06:02L HLA-DRB4*03:01NL HLA-DRB1*08:77L HLA-DRB1*14:01L HLA-DRB1*11:04L
  REGION 1..10: note = CONT. FROM ABOVE: HLA-DRB1*14:02L HLA-DQA1*01-B1*05L HLA-DQA1*05 :05-B1*03:19L HLA-DQA1*05:01-B1*02:01L HLA-DRB1*04:10L HLA-DRB1* 12:01L HLA-DRB1*12:02L HLA-DPA1*03:01-B1*105:01L HLA-DQA1*03:01- B1*03:02L HLA-DRB1*14:54L HLA-DQA1*05:05-B1*03:01L
  REGION 1..10: note = CONT. FROM ABOVE: HLA-DRB1*14:17L HLA-DPA1*01:02-B1*04:01L HLA-D RB1*10:01L HLA-DRB1*16:01L HLA-DQA1*01:03-B1*06:01L HLA-DQA1*02: 01-B1*03:03L
SVYPVASPNE

SEQ ID NO: 8268 - protein, 12 aa, Severe acute respiratory syndrome coronavirus 2
  REGION 1..12: note = Table B: HLA-DQA1*03:02-B1*03:03L HLA-DQA1*05:01-B1*03:01L HLA-DRB1*04:03L HLA-DQA1*01:02-B1*06:02L HLA-DQA1*05:05-B1*03:19L HLA-DQA1*03:01-B1*03:02L HLA-DQA1*05:05-B1*03:01L HLA-DQA1*02:01-B1*03:03L
VYPVASPNECNQ

SEQ ID NO: 8269 - protein, 10 aa, Severe acute respiratory syndrome coronavirus 2
  REGION 1..10: note = Table B: HLA-DQA1*03:02-B1*03:03L HLA-DQA1*05:01-B1*03:01L HLA-DRB1*08:77L HLA-DPA1*03:01-B1*04:02L HLA-DRB1*03:01L HLA-DQA1*01-B1*05L HLA-DQA1*05:05-B1*03:19L HLA-DQA1*05:01-B1*02:01L HLA-DRB4*01:01L
  REGION 1..10: note = CONT. FROM ABOVE: HLA-DPA1*01:03-B1*04:01L HLA-DQA1*03:01-B1*03: 02L HLA-DPA1*01:03-B1*104:01L HLA-DPA1*01:02-B1*04:01L HLA-DRB1* 16:01L HLA-DRB1*15:03L
GETSWQTGDF

SEQ ID NO: 8270 - protein, 10 aa, Severe acute respiratory syndrome coronavirus 2
  REGION 1..10: note = Table B: HLA-DQA1*03:02-B1*03:03L HLA-DPA1*03:01-B1*105:01L
ETSWQTGDFV

SEQ ID NO: 8271 - protein, 10 aa, Severe acute respiratory syndrome coronavirus 2
  REGION 1..10: note = Table B: HLA-DQA1*03:02-B1*03:03L HLA-DQA1*05:01-B1*03:01L HLA-DRB1*04:03L HLA-DRB1*13:03L HLA-DRB1*04:02L HLA-DRB4*03:01NL HLA-DQA1*05:01-B1*02:01L HLA-DQA1*03:01-B1*03:02L HLA-DQA1*05:05-B1*03:01L HLA-DQA1*01:03-B1*06:01L
  REGION 1..10: note = CONT. FROM ABOVE: HLA-DQA1*02:01-B1*03:03L
TSWQTGDFVK

SEQ ID NO: 8272 - protein, 10 aa, Severe acute respiratory syndrome coronavirus 2
  REGION 1..10: note = Table B: HLA-DQA1*03:02-B1*03:03L HLA-DPA1*03:01-B1*04:02L HLA-DQA1*01-B1*05L HLA-DPA1*03:01-B1*105:01L HLA-DQA1*03:01-B1*03:02L HLA-DPA1*01:02-B1*04:01L HLA-DRB1*16:01L HLA-DQA1*01:03-B1*06:01L
  REGION 1..10: note = CONT. FROM ABOVE: HLA-DQA1*02:01-B1*03:03L
SWQTGDFVKA

SEQ ID NO: 8273 - protein, 10 aa, Severe acute respiratory syndrome coronavirus 2
  REGION 1..10: note = Table B: HLA-DQA1*03:02-B1*03:03L HLA-DQA1*05:01-B1*03:01L HLA-DRB1*04:03L HLA-DRB1*01:03L HLA-DQA1*01:02-B1*06:02L HLA-DPA1*03:01-B1*04:02L HLA-DQA1*01-B1*05L HLA-DQA1*05:05-B1*03:19L HLA-DQA1*05:01-B1*02:01L
  REGION 1..10: note = CONT. FROM ABOVE: HLA-DPA1*01:03-B1*04:01L HLA-DPA1*01:03-B1*04: 02L HLA-DPA1*03:01-B1*105:01L HLA-DQA1*03:01-B1*03:02L HLA-DQA1* 05:05-B1*03:01L HLA-DPA1*01:02-B1*04:01L HLA-DRB1*16:01L HLA-DQA 1*01:03-B1*06:01M HLA-DRB1*04:08L HLA-DQA1*02:01-B1*03:03L
WQTGDFVKAT

SEQ ID NO: 8274 - protein, 15 aa, Severe acute respiratory syndrome coronavirus 2
  REGION 1..15: note = Table B: HLA-DQA1*03:02-B1*03:03L HLA-DRB1*04:03L HLA-DRB1*13:02L HLA-DPA1*03:01-B1*04:02L HLA-DRB1*14:01L HLA-DRB1*12:01L HLA-DRB1*16:01L
GDFVKATCEFCGTEN

SEQ ID NO: 8275 - protein, 10 aa, Severe acute respiratory syndrome coronavirus 2
  REGION 1..10: note = Table B: HLA-DQA1*03:02-B1*03:03L
TENLTKEGAT

SEQ ID NO: 8276 - protein, 10 aa, Severe acute respiratory syndrome coronavirus 2
  REGION 1..10: note = Table B: HLA-DQA1*03:02-B1*03:03L HLA-DQA1*05:01-B1*03:01L HLA-DRB1*04:03L HLA-DRB1*13:02L HLA-DRB1*13:03L HLA-DRB1*01:03L HLA-DRB1*04:02L HLA-DRB1*04:05L HLA-DQA1*01:02-B1*06:02L HLA-DRB1*01:01L HLA-DRB1*01:02L HLA-DRB4*03:01NL HLA-DRB3*02:01L
  REGION 1..10: note = CONT. FROM ABOVE: HLA-DRB1*14:01L HLA-DRB1*11:04L HLA-DRB1*14:02 L HLA-DRB1*08:01L HLA-DRB5*01:01L HLA-DQA1*01-B1*05L HLA-DQA1*05 :01-B1*02:01L HLA-DRB1*12:01L HLA-DRB1*12:02L HLA-DPA1*03:01-B1* 105:01L HLA-DQA1*03:01-B1*03:02M HLA-DRB1*14:54L
  REGION 1..10: note = CONT. FROM ABOVE: HLA-DQA1*05:05-B1*03:01L HLA-DRB1*14:17L HLA-D PA1*01:02-B1*04:01L HLA-DRB1*16:01L HLA-DQA1*01:03-B1*06:01L HLA -DRB1*04:08L HLA-DQA1*02:01-B1*03:03L
GYLPQNAVVK

SEQ ID NO: 8277 - protein, 10 aa, Severe acute respiratory syndrome coronavirus 2
  REGION 1..10: note = Table B: HLA-DQA1*03:02-B1*03:03M HLA-DQA1*05:01-B1*03:01L HLA-DRB1*01:03L HLA-DRB1*04:05L HLA-DQA1*01:02-B1*06:02L HLA-DRB1*01:01L HLA-DRB1*01:02L HLA-DRB1*08:77L HLA-DPA1*03:01-B1*04:02L HLA-DRB1*14:01L HLA-DRB1*14:02L
  REGION 1..10: note = CONT. FROM ABOVE: HLA-DQA1*01-B1*05L HLA-DQA1*05:05-B1*03:19L HL A-DQA1*05:01-B1*02:01L HLA-DQA1*05:05-B1*03:116M HLA-DRB1*09:01L HLA-DPA1*02:01-B1*13:01M HLA-DPA1*03:01-B1*105:01L HLA-DQA1*03:0 1-B1*03:02L HLA-DPA1*01:03-B1*104:01L HLA-DPA1*01:02-B1*04:01L
  REGION 1..10: note = CONT. FROM ABOVE: HLA-DRB1*10:01L HLA-DRB1*16:01L HLA-DQA1*01:03 -B1*06:01M HLA-DRB1*08:03L HLA-DQA1*02:01-B1*03:03L HLA-DRB1*15: 03L
YLPQNAVVKI

SEQ ID NO: 8278 - protein, 13 aa, Severe acute respiratory syndrome coronavirus 2
  REGION 1..13: note = Table B: HLA-DQA1*03:02-B1*03:03L HLA-DQA1*03:01-B1*03:02L HLA-DQA1*05:05-B1*03:01L HLA-DQA1*01:03-B1*06:01L
LPQNAVVKIYCPA

SEQ ID NO: 8279 - protein, 10 aa, Severe acute respiratory syndrome coronavirus 2
  REGION 1..10: note = Table B: HLA-DQA1*03:02-B1*03:03M HLA-DQA1*05:01-B1*03:01L HLA-DRB1*13:03L HLA-DRB1*08:77L HLA-DPA1*03:01-B1*04:02L HLA-DRB1*14:02L HLA-DQA1*01-B1*05L HLA-DQA1*05:05-B1*03:19L HLA-DQA1*05:01-B1*02:01L HLA-DQA1*05:05-B1*03:116L
  REGION 1..10: note = CONT. FROM ABOVE: HLA-DRB1*09:01L HLA-DPA1*01:03-B1*04:02L HLA-D QA1*03:01-B1*03:02L HLA-DPA1*01:03-B1*104:01L HLA-DPA1*01:02-B1* 04:01L HLA-DRB1*16:01L HLA-DQA1*02:01-B1*03:03L HLA-DRB1*15:03L
NSEVGPEHSL

SEQ ID NO: 8280 - protein, 10 aa, Severe acute respiratory syndrome coronavirus 2
  REGION 1..10: note = Table B: HLA-DQA1*03:02-B1*03:03L HLA-DQA1*05:05-B1*03:19L HLA-DQA1*03:01-B1*03:02L
SEVGPEHSLA

SEQ ID NO: 8281 - protein, 12 aa, Severe acute respiratory syndrome coronavirus 2
  REGION 1..12: note = Table B: HLA-DQA1*03:02-B1*03:03L HLA-DQA1*05:01-B1*03:01L HLA-DRB1*04:03L HLA-DQA1*01:01-B1*05:01L HLA-DQA1*05:05-B1*03:01L HLA-DQA1*01:03-B1*06:01L
VGPEHSLAEYHN

SEQ ID NO: 8282 - protein, 13 aa, Severe acute respiratory syndrome coronavirus 2
  REGION 1..13: note = Table B: HLA-DQA1*03:02-B1*03:03L
GPEHSLAEYHNES

SEQ ID NO: 8283 - protein, 11 aa, Severe acute respiratory syndrome coronavirus 2
  REGION 1..11: note = Table B: HLA-DQA1*03:02-B1*03:03L
SLAEYHNESGL

SEQ ID NO: 8284 - protein, 11 aa, Severe acute respiratory syndrome coronavirus 2
  REGION 1..11: note = Table B: HLA-DQA1*03:02-B1*03:03L HLA-DRB1*04:03L HLA-DRB1*13:03L HLA-DRB1*01:03L HLA-DRB1*04:02L HLA-DRB1*04:05L HLA-DRB1*01:02L HLA-DRB4*03:01NL HLA-DRB1*12:01L HLA-DRB1*14:17L HLA-DRB1*16:01L HLA-DRB1*04:08L HLA-DQA1*02:01-B1*03:03L
AEYHNESGLKT

SEQ ID NO: 8285 - protein, 10 aa, Severe acute respiratory syndrome coronavirus 2
  REGION 1..10: note = Table B: HLA-DQA1*03:02-B1*03:03L HLA-DQA1*05:01-B1*03:01L HLA-DRB1*13:03L HLA-DRB1*04:05L HLA-DQA1*01:02-B1*06:02L HLA-DRB1*01:02L HLA-DPA1*03:01-B1*04:02L HLA-DRB1*14:01L HLA-DRB1*11:02L HLA-DRB1*08:01L HLA-DQA1*01-B1*05L
  REGION 1..10: note = CONT. FROM ABOVE: HLA-DQA1*05:05-B1*03:19M HLA-DQA1*05:01-B1*02: 01L HLA-DPA1*01:03-B1*04:01L HLA-DQA1*05:05-B1*03:116L HLA-DPA1* 02:01-B1*13:01L HLA-DPA1*03:01-B1*105:01L HLA-DQA1*03:01-B1*03:0 2L HLA-DPA1*01:03-B1*104:01L HLA-DPA1*01:02-B1*04:01L
  REGION 1..10: note = CONT. FROM ABOVE: HLA-DRB1*10:01L HLA-DRB1*16:01L HLA-DQA1*01:03 -B1*06:01L HLA-DQA1*02:01-B1*03:03L HLA-DRB1*15:03L
YHNESGLKTI

SEQ ID NO: 8286 - protein, 10 aa, Severe acute respiratory syndrome coronavirus 2
  REGION 1..10: note = Table B: HLA-DQA1*03:02-B1*03:03L
HNESGLKTIL

SEQ ID NO: 8287 - protein, 15 aa, Severe acute respiratory syndrome coronavirus 2
  REGION 1..15: note = Table B: HLA-DQA1*03:02-B1*03:03L HLA-DRB1*01:03L HLA-DRB1*12:01L HLA-DPA1*02:01-B1*13:01L HLA-DPA1*01:03-B1*104:01L HLA-DRB1*16:01L HLA-DRB1*15:03L
GRTIAFGGCVFSYVG

SEQ ID NO: 8288 - protein, 10 aa, Severe acute respiratory syndrome coronavirus 2
  REGION 1..10: note = Table B: HLA-DQA1*03:02-B1*03:03L HLA-DQA1*05:01-B1*03:01L HLA-DRB1*04:03L HLA-DRB1*13:03L HLA-DRB1*01:03L HLA-DRB1*04:02L HLA-DRB4*03:01NL HLA-DRB1*14:01L HLA-DQA1*05:05-B1*03:19L HLA-DQA1*05:01-B1*02:01L HLA-DQA1*03:01-B1*03:02L
  REGION 1..10: note = CONT. FROM ABOVE: HLA-DQA1*05:05-B1*03:01L HLA-DRB1*14:17L HLA-D PA1*01:02-B1*04:01L HLA-DRB1*16:01L HLA-DQA1*02:01-B1*03:03L
WVPRASANIG

SEQ ID NO: 8289 - protein, 14 aa, Severe acute respiratory syndrome coronavirus 2
  REGION 1..14: note = Table B: HLA-DQA1*03:02-B1*03:03L HLA-DRB1*04:03L HLA-DRB1*13:02L HLA-DRB1*01:03L HLA-DRB1*04:04L HLA-DQA1*01:01-B1*05:01L HLA-DRB1*08:01L HLA-DQA1*05:05-B1*03:19L HLA-DPA1*02:01-B1*13:01L
  REGION 1..14: note = CONT. FROM ABOVE: HLA-DPA1*03:01-B1*105:01L HLA-DPA1*01:03-B1*10 4:01L HLA-DRB1*07:01L HLA-DRB1*04:08L
VPRASANIGCNHTG

SEQ ID NO: 8290 - protein, 13 aa, Severe acute respiratory syndrome coronavirus 2
  REGION 1..13: note = Table B: HLA-DQA1*03:02-B1*03:03L HLA-DRB1*14:04L HLA-DRB1*13:03L HLA-DRB1*01:03L HLA-DRB1*04:05L HLA-DRB1*01:02L HLA-DRB4*03:01NL HLA-DRB1*08:77L HLA-DRB3*02:01L HLA-DPA1*01:03-B1*03:01L HLA-DPA1*03:01-B1*04:02L
  REGION 1..13: note = CONT. FROM ABOVE: HLA-DRB1*11:03L HLA-DRB1*11:04L HLA-DRB1*14:02 L HLA-DRB1*08:01L HLA-DQA1*05:05-B1*03:19L HLA-DQA1*05:01-B1*02: 01L HLA-DPA1*02:01-B1*13:01L HLA-DPA1*03:01-B1*105:01L HLA-DPA1* 01:03-B1*104:01L HLA-DRB1*14:17L HLA-DRB1*16:01L HLA-DRB1*04:08L
SANIGCNHTGVVG

SEQ ID NO: 8291 - protein, 11 aa, Severe acute respiratory syndrome coronavirus 2
  REGION 1..11: note = Table B: HLA-DQA1*03:02-B1*03:03L HLA-DQA1*05:01-B1*03:01L HLA-DQA1*01:02-B1*06:02L HLA-DQA1*05:05-B1*03:19L HLA-DPA1*03:01-B1*105:01L HLA-DQA1*03:01-B1*03:02L HLA-DQA1*05:05-B1*03:01L
NHTGVVGEGSE

SEQ ID NO: 8292 - protein, 11 aa, Severe acute respiratory syndrome coronavirus 2
  REGION 1..11: note = Table B: HLA-DQA1*03:02-B1*03:03L HLA-DQA1*05:01-B1*03:01L HLA-DQA1*01:02-B1*06:02L HLA-DQA1*01:01-B1*05:01L HLA-DQA1*05:05-B1*03:19L HLA-DQA1*03:01-B1*03:02L HLA-DQA1*05:05-B1*03:01L
HTGVVGEGSEG

SEQ ID NO: 8293 - protein, 10 aa, Severe acute respiratory syndrome coronavirus 2
  REGION 1..10: note = Table B: HLA-DQA1*03:02-B1*03:03L HLA-DQA1*03:01-B1*03:02L
GVVGEGSEGL

SEQ ID NO: 8294 - protein, 12 aa, Severe acute respiratory syndrome coronavirus 2
  REGION 1..12: note = Table B: HLA-DQA1*03:02-B1*03:03L HLA-DQA1*05:01-B1*03:01L HLA-DRB1*04:03L HLA-DRB1*13:02L HLA-DRB1*13:03L HLA-DRB1*01:03L HLA-DRB1*04:02L HLA-DRB1*04:05L HLA-DQA1*01:02-B1*06:02L HLA-DRB1*01:02L HLA-DRB4*03:01NL HLA-DRB1*08:77L
  REGION 1..12: note = CONT. FROM ABOVE: HLA-DPA1*01:03-B1*03:01L HLA-DRB1*11:03L HLA-D RB1*14:02L HLA-DQA1*01:01-B1*05:01L HLA-DQA1*01-B1*05L HLA-DQA1* 05:05-B1*03:19L HLA-DQA1*05:01-B1*02:01L HLA-DRB1*04:10L HLA-DRB 1*12:01L HLA-DRB1*12:02L HLA-DPA1*03:01-B1*105:01L
  REGION 1..12: note = CONT. FROM ABOVE: HLA-DRB1*14:54L HLA-DQA1*05:05-B1*03:01L HLA-D RB1*14:17L HLA-DRB1*07:01L HLA-DRB1*10:01L HLA-DRB1*16:01L HLA-D QA1*01:03-B1*06:01L HLA-DRB1*04:08L HLA-DQA1*02:01-B1*03:03L HLA -DRB1*15:03L
VVGEGSEGLNDN

SEQ ID NO: 8295 - protein, 11 aa, Severe acute respiratory syndrome coronavirus 2
  REGION 1..11: note = Table B: HLA-DQA1*03:02-B1*03:03L HLA-DQA1*05:05-B1*03:19L HLA-DQA1*03:01-B1*03:02L
GEGSEGLNDNL

SEQ ID NO: 8296 - protein, 10 aa, Severe acute respiratory syndrome coronavirus 2
  REGION 1..10: note = Table B: HLA-DQA1*03:02-B1*03:03L HLA-DQA1*01-B1*05L
GSEGLNDNLL

SEQ ID NO: 8297 - protein, 11 aa, Severe acute respiratory syndrome coronavirus 2
  REGION 1..11: note = Table B: HLA-DQA1*03:02-B1*03:03L HLA-DRB1*11:02L HLA-DQA1*05:05-B1*03:19M HLA-DQA1*03:01-B1*03:02L HLA-DPA1*01:03-B1*104:01L
SEGLNDNLLEI

SEQ ID NO: 8298 - protein, 10 aa, Severe acute respiratory syndrome coronavirus 2
  REGION 1..10: note = Table B: HLA-DQA1*03:02-B1*03:03L
GLNDNLLEIL

SEQ ID NO: 8299 - protein, 13 aa, Severe acute respiratory syndrome coronavirus 2
  REGION 1..13: note = Table B: HLA-DQA1*03:02-B1*03:03L HLA-DRB1*14:04L HLA-DRB1*04:03L HLA-DRB4*03:01NL HLA-DRB3*02:01L HLA-DPA1*01:03-B1*03:01L HLA-DRB1*11:02L HLA-DRB1*11:03L HLA-DRB1*14:02L HLA-DQA1*05:05-B1*03:19L
  REGION 1..13: note = CONT. FROM ABOVE: HLA-DQA1*05:01-B1*02:01L HLA-DQA1*05:05-B1*03: 116L HLA-DPA1*01:03-B1*04:02L HLA-DRB1*12:02L HLA-DPA1*02:01-B1* 13:01L HLA-DPA1*03:01-B1*105:01L HLA-DPA1*01:03-B1*02:01L HLA-DQ A1*05:05-B1*03:01L HLA-DRB1*14:17L HLA-DRB1*07:01L
  REGION 1..13: note = CONT. FROM ABOVE: HLA-DRB1*08:02L HLA-DRB1*08:03L
DNLLEILQKEKVN

SEQ ID NO: 8300 - protein, 13 aa, Severe acute respiratory syndrome coronavirus 2
  REGION 1..13: note = Table B: HLA-DQA1*03:02-B1*03:03L HLA-DQA1*05:01-B1*03:01L HLA-DRB1*04:03L HLA-DRB1*13:02L HLA-DRB1*01:03L HLA-DRB1*04:02L HLA-DRB1*04:05L HLA-DQA1*01:02-B1*06:02L HLA-DRB1*01:02L HLA-DPA1*01:03-B1*03:01L HLA-DQA1*05:01-B1*02:01L
  REGION 1..13: note = CONT. FROM ABOVE: HLA-DRB1*12:01L HLA-DPA1*02:01-B1*13:01L HLA-D PA1*03:01-B1*105:01L HLA-DQA1*03:01-B1*03:02L HLA-DQA1*05:05-B1* 03:01L HLA-DRB1*16:01L HLA-DQA1*02:01-B1*03:03L HLA-DRB1*15:03L
ILQKEKVNINIVG

SEQ ID NO: 8301 - protein, 10 aa, Severe acute respiratory syndrome coronavirus 2
  REGION 1..10: note = Table B: HLA-DQA1*03:02-B1*03:03L HLA-DRB1*04:03L HLA-DRB1*04:02L HLA-DQA1*01:02-B1*06:02L HLA-DQA1*05:01-B1*02:01L HLA-DQA1*03:01-B1*03:02L HLA-DRB1*14:17L HLA-DQA1*01:03-B1*06:01L
  REGION 1..10: note = CONT. FROM ABOVE: HLA-DQA1*02:01-B1*03:03L
VNINIVGDFK

SEQ ID NO: 8302 - protein, 10 aa, Severe acute respiratory syndrome coronavirus 2
  REGION 1..10: note = Table B: HLA-DQA1*03:02-B1*03:03L HLA-DQA1*05:01-B1*03:01L HLA-DRB1*04:03L HLA-DRB1*13:02L HLA-DRB1*13:03L HLA-DRB1*01:03L HLA-DRB1*04:02L HLA-DRB1*04:05L HLA-DRB1*01:02L HLA-DRB4*03:01NL HLA-DPA1*01:03-B1*03:01L HLA-DRB1*14:01L HLA-DRB1*14:02L
  REGION 1..10: note = CONT. FROM ABOVE: HLA-DQA1*01-B1*05L HLA-DQA1*05:01-B1*02:01L HL A-DRB1*12:01L HLA-DPA1*03:01-B1*105:01L HLA-DQA1*03:01-B1*03:02L HLA-DRB1*14:54L HLA-DRB1*14:17L HLA-DPA1*01:02-B1*04:01L HLA-DRB 1*16:01L HLA-DQA1*01:03-B1*06:01L HLA-DRB1*04:08L
  REGION 1..10: note = CONT. FROM ABOVE: HLA-DQA1*02:01-B1*03:03L HLA-DRB1*15:03L
IVGDFKLNEE

SEQ ID NO: 8303 - protein, 13 aa, Severe acute respiratory syndrome coronavirus 2
  REGION 1..13: note = Table B: HLA-DQA1*03:02-B1*03:03L HLA-DQA1*05:01-B1*03:01L HLA-DRB1*04:03L HLA-DQA1*01:02-B1*06:02L HLA-DRB1*01:02L HLA-DRB1*08:04L HLA-DRB1*08:77L HLA-DPA1*01:03-B1*03:01L HLA-DRB1*14:02L HLA-DQA1*05:05-B1*03:19L
  REGION 1..13: note = CONT. FROM ABOVE: HLA-DPA1*01:03-B1*04:01L HLA-DRB1*09:01L HLA-D RB1*12:02L HLA-DPA1*02:01-B1*13:01L HLA-DPA1*03:01-B1*105:01L HL A-DQA1*05:05-B1*03:01L HLA-DPA1*01:02-B1*04:01L HLA-DRB1*07:01L HLA-DQA1*01:03-B1*06:01L HLA-DQA1*02:01-B1*03:03L
VGDFKLNEEIAII

SEQ ID NO: 8304 - protein, 10 aa, Severe acute respiratory syndrome coronavirus 2
  REGION 1..10: note = Table B: HLA-DQA1*03:02-B1*03:03L HLA-DPA1*03:01-B1*04:02L HLA-DQA1*03:01-B1*03:02L HLA-DQA1*02:01-B1*03:03L HLA-DRB1*15:03L
KLNEEIAIIL

SEQ ID NO: 8305 - protein, 10 aa, Severe acute respiratory syndrome coronavirus 2
  REGION 1..10: note = Table B: HLA-DQA1*03:02-B1*03:03M HLA-DQA1*05:01-B1*03:01M HLA-DRB1*13:03L HLA-DQA1*01:02-B1*06:02L HLA-DRB4*03:01NL HLA-DRB1*08:77M HLA-DPA1*01:03-B1*03:01L HLA-DPA1*03:01-B1*04:02L HLA-DRB1*03:01L HLA-DRB1*11:02L
  REGION 1..10: note = CONT. FROM ABOVE: HLA-DQA1*01-B1*05L HLA-DQA1*05:05-B1*03:19M HL A-DQA1*05:01-B1*02:01L HLA-DRB4*01:01M HLA-DPA1*01:03-B1*04:01M HLA-DQA1*05:05-B1*03:116L HLA-DRB1*09:01L HLA-DPA1*01:03-B1*04:0 2L HLA-DRB1*12:01L HLA-DPA1*02:01-B1*13:01L
  REGION 1..10: note = CONT. FROM ABOVE: HLA-DPA1*03:01-B1*105:01L HLA-DQA1*03:01-B1*03 :02L HLA-DPA1*01:03-B1*104:01L HLA-DPA1*01:02-B1*04:01L HLA-DRB1 *10:01L HLA-DRB1*16:01L HLA-DRB1*15:03M
EEIAIILASF

SEQ ID NO: 8306 - protein, 14 aa, Severe acute respiratory syndrome coronavirus 2
  REGION 1..14: note = Table B: HLA-DQA1*03:02-B1*03:03L HLA-DRB1*13:02L HLA-DRB1*01:03L HLA-DPA1*03:01-B1*04:02L HLA-DQA1*01-B1*05L HLA-DRB4*01:01L HLA-DPA1*01:03-B1*104:01L HLA-DRB1*10:01L HLA-DQA1*01:03-B1*06:01L
IAIILASFSASTSA

SEQ ID NO: 8307 - protein, 10 aa, Severe acute respiratory syndrome coronavirus 2
  REGION 1..10: note = Table B: HLA-DQA1*03:02-B1*03:03L HLA-DQA1*05:01-B1*03:01L HLA-DRB1*13:03L HLA-DRB1*01:03L HLA-DQA1*01:02-B1*06:02L HLA-DRB1*08:77L HLA-DRB1*14:02L HLA-DQA1*05:05-B1*03:19L HLA-DQA1*05:01-B1*02:01L HLA-DPA1*01:03-B1*04:01L
  REGION 1..10: note = CONT. FROM ABOVE: HLA-DPA1*02:01-B1*13:01L HLA-DPA1*03:01-B1*105 :01L HLA-DQA1*01:03-B1*06:01L HLA-DQA1*02:01-B1*03:03L HLA-DRB1* 15:03L
ASFSASTSAF

SEQ ID NO: 8308 - protein, 12 aa, Severe acute respiratory syndrome coronavirus 2
  REGION 1..12: note = Table B: HLA-DQA1*03:02-B1*03:03L HLA-DQA1*05:01-B1*03:01L HLA-DRB1*01:02L HLA-DRB4*03:01NL HLA-DRB1*08:77L HLA-DQA1*05:05-B1*03:19L HLA-DQA1*05:01-B1*02:01L HLA-DRB1*12:01L HLA-DQA1*05:05-B1*03:01L HLA-DRB1*07:01L
  REGION 1..12: note = CONT. FROM ABOVE: HLA-DRB1*16:01L HLA-DQA1*02:01-B1*03:03L
SFSASTSAFVET

SEQ ID NO: 8309 - protein, 10 aa, Severe acute respiratory syndrome coronavirus 2
  REGION 1..10: note = Table B: HLA-DQA1*03:02-B1*03:03L HLA-DQA1*05:01-B1*03:01L HLA-DRB1*13:02L HLA-DRB1*13:03L HLA-DRB1*01:03L HLA-DQA1*01:02-B1*06:02L HLA-DRB4*03:01NL HLA-DRB1*08:01L HLA-DRB5*01:01L HLA-DQA1*05:05-B1*03:19L
  REGION 1..10: note = CONT. FROM ABOVE: HLA-DQA1*05:01-B1*02:01L HLA-DPA1*01:03-B1*04: 02L HLA-DRB1*12:01L HLA-DPA1*03:01-B1*105:01L HLA-DQA1*03:01-B1* 03:02L HLA-DQA1*05:05-B1*03:01M HLA-DRB1*16:01L HLA-DQA1*01:03-B 1*06:01M HLA-DQA1*02:01-B1*03:03L
STSAFVETVK

SEQ ID NO: 8310 - protein, 10 aa, Severe acute respiratory syndrome coronavirus 2
  REGION 1..10: note = Table B: HLA-DQA1*03:02-B1*03:03L HLA-DQA1*05:01-B1*03:01L HLA-DRB1*04:03L HLA-DQA1*01:02-B1*06:02L HLA-DQA1*01:01-B1*05:01L HLA-DQA1*05:05-B1*03:19L HLA-DQA1*05:01-B1*02:01L HLA-DPA1*03:01-B1*105:01L
  REGION 1..10: note = CONT. FROM ABOVE: HLA-DQA1*03:01-B1*03:02L HLA-DQA1*05:05-B1*03: 01L HLA-DQA1*01:03-B1*06:01M HLA-DQA1*02:01-B1*03:03L
TSAFVETVKG

SEQ ID NO: 8311 - protein, 10 aa, Severe acute respiratory syndrome coronavirus 2
  REGION 1..10: note = Table B: HLA-DQA1*03:02-B1*03:03L HLA-DQA1*05:01-B1*03:01L HLA-DQA1*01:02-B1*06:02L HLA-DQA1*05:05-B1*03:19L HLA-DPA1*03:01-B1*105:01L HLA-DQA1*03:01-B1*03:02L HLA-DQA1*01:03-B1*06:01L HLA-DQA1*02:01-B1*03:03L
SAFVETVKGL

SEQ ID NO: 8312 - protein, 10 aa, Severe acute respiratory syndrome coronavirus 2
  REGION 1..10: note = Table B: HLA-DQA1*03:02-B1*03:03L HLA-DQA1*05:01-B1*03:01L HLA-DRB1*04:03L HLA-DRB1*13:02L HLA-DRB1*13:03L HLA-DRB1*01:03L HLA-DRB1*04:02L HLA-DRB1*04:05L HLA-DQA1*01:02-B1*06:02L HLA-DRB4*03:01NL HLA-DRB1*08:77M HLA-DPA1*01:03-B1*03:01M
  REGION 1..10: note = CONT. FROM ABOVE: HLA-DPA1*03:01-B1*04:02L HLA-DRB1*03:01L HLA-D RB1*14:01L HLA-DRB1*11:02L HLA-DRB1*11:03L HLA-DRB1*14:02L HLA-D RB1*11:01L HLA-DQA1*01-B1*05M HLA-DQA1*05:05-B1*03:19M HLA-DQA1* 05:01-B1*02:01M HLA-DRB4*01:01L HLA-DPA1*01:03-B1*04:01L
  REGION 1..10: note = CONT. FROM ABOVE: HLA-DQA1*05:05-B1*03:116L HLA-DPA1*01:03-B1*04 :02L HLA-DRB1*12:01L HLA-DPA1*02:01-B1*13:01L HLA-DPA1*03:01-B1* 105:01L HLA-DRB1*14:54L HLA-DPA1*01:03-B1*104:01M HLA-DPA1*01:02 -B1*04:01L HLA-DRB1*10:01L HLA-DRB1*16:01M
  REGION 1..10: note = CONT. FROM ABOVE: HLA-DQA1*01:03-B1*06:01L HLA-DRB1*08:02L HLA-D QA1*02:01-B1*03:03L HLA-DRB1*15:03L
FVETVKGLDY

SEQ ID NO: 8313 - protein, 10 aa, Severe acute respiratory syndrome coronavirus 2
  REGION 1..10: note = Table B: HLA-DQA1*03:02-B1*03:03L HLA-DQA1*05:01-B1*03:01L HLA-DRB1*04:03L HLA-DRB1*13:02L HLA-DRB1*13:03L HLA-DRB1*01:03L HLA-DRB1*04:02L HLA-DRB1*04:05L HLA-DQA1*01:02-B1*06:02L HLA-DRB1*01:02L HLA-DRB4*03:01NL HLA-DRB1*08:77L HLA-DRB3*02:01L
  REGION 1..10: note = CONT. FROM ABOVE: HLA-DPA1*03:01-B1*04:02L HLA-DRB1*14:01L HLA-D QA1*01:01-B1*05:01L HLA-DQA1*01-B1*05L HLA-DQA1*05:05-B1*03:19L HLA-DQA1*05:01-B1*02:01L HLA-DRB1*12:01L HLA-DPA1*03:01-B1*105:0 1L HLA-DQA1*03:01-B1*03:02L HLA-DRB1*14:54L
  REGION 1..10: note = CONT. FROM ABOVE: HLA-DQA1*05:05-B1*03:01L HLA-DRB1*14:17L HLA-D PA1*01:02-B1*04:01L HLA-DRB1*16:01L HLA-DQA1*01:03-B1*06:01L HLA -DRB1*04:08L HLA-DQA1*02:01-B1*03:03L HLA-DRB1*15:03L
VETVKGLDYK

SEQ ID NO: 8314 - protein, 12 aa, Severe acute respiratory syndrome coronavirus 2
  REGION 1..12: note = Table B: HLA-DQA1*03:02-B1*03:03L HLA-DRB1*13:02L HLA-DRB1*04:04L HLA-DRB1*08:04L HLA-DPA1*01:03-B1*03:01L HLA-DRB3*01:01L HLA-DPA1*02:01-B1*13:01L HLA-DRB1*08:03L
LDYKAFKQIVES

SEQ ID NO: 8315 - protein, 11 aa, Severe acute respiratory syndrome coronavirus 2
  REGION 1..11: note = Table B: HLA-DQA1*03:02-B1*03:03L HLA-DQA1*05:01-B1*03:01L HLA-DQA1*01:02-B1*06:02L HLA-DQA1*05:01-B1*02:01L HLA-DPA1*02:01-B1*13:01L HLA-DPA1*03:01-B1*105:01L HLA-DPA1*01:03-B1*104:01L HLA-DRB1*16:01L
  REGION 1..11: note = CONT. FROM ABOVE: HLA-DQA1*01:03-B1*06:01L HLA-DRB1*15:03L
GAWNIGEQKSI

SEQ ID NO: 8316 - protein, 10 aa, Severe acute respiratory syndrome coronavirus 2
  REGION 1..10: note = Table B: HLA-DQA1*03:02-B1*03:03L HLA-DQA1*03:01-B1*03:02L HLA-DQA1*01:03-B1*06:01L HLA-DQA1*02:01-B1*03:03L
WNIGEQKSIL

SEQ ID NO: 8317 - protein, 10 aa, Severe acute respiratory syndrome coronavirus 2
  REGION 1..10: note = Table B: HLA-DQA1*03:02-B1*03:03M HLA-DRB1*13:03L HLA-DQA1*05:05-B1*03:19L HLA-DQA1*05:05-B1*03:116L HLA-DRB1*09:01L HLA-DPA1*01:03-B1*04:02L HLA-DQA1*03:01-B1*03:02L HLA-DPA1*01:03-B1*104:01L
  REGION 1..10: note = CONT. FROM ABOVE: HLA-DQA1*02:01-B1*03:03L
GEQKSILSPL

SEQ ID NO: 8318 - protein, 10 aa, Severe acute respiratory syndrome coronavirus 2
  REGION 1..10: note = Table B: HLA-DQA1*03:02-B1*03:03L HLA-DQA1*05:01-B1*03:01L HLA-DRB1*13:02L HLA-DRB1*13:03L HLA-DRB1*01:03L HLA-DQA1*01:02-B1*06:02M HLA-DRB4*03:01NL HLA-DRB1*08:77L HLA-DPA1*01:03-B1*03:01L HLA-DPA1*03:01-B1*04:02L
  REGION 1..10: note = CONT. FROM ABOVE: HLA-DRB1*03:01L HLA-DRB1*14:01L HLA-DRB1*14:02 L HLA-DQA1*01-B1*05L HLA-DQA1*05:05-B1*03:19L HLA-DQA1*05:01-B1* 02:01L HLA-DRB4*01:01L HLA-DPA1*01:03-B1*04:01L HLA-DQA1*05:05-B 1*03:116L HLA-DPA1*01:03-B1*04:02L HLA-DRB1*12:01L
  REGION 1..10: note = CONT. FROM ABOVE: HLA-DPA1*02:01-B1*13:01L HLA-DPA1*03:01-B1*105 :01L HLA-DQA1*03:01-B1*03:02L HLA-DPA1*01:03-B1*104:01L HLA-DQA1 *05:05-B1*03:01L HLA-DPA1*01:02-B1*04:01L HLA-DRB1*10:01L HLA-DR B1*16:01L HLA-DQA1*01:03-B1*06:01L HLA-DRB1*08:02L
  REGION 1..10: note = CONT. FROM ABOVE: HLA-DQA1*02:01-B1*03:03L HLA-DRB1*15:03L
EQKSILSPLY

SEQ ID NO: 8319 - protein, 12 aa, Severe acute respiratory syndrome coronavirus 2
  REGION 1..12: note = Table B: HLA-DQA1*03:02-B1*03:03L HLA-DRB1*04:01L HLA-DRB1*13:02L HLA-DRB1*13:03L HLA-DRB1*01:03L HLA-DRB1*04:04L HLA-DRB1*04:05L HLA-DQA1*01:02-B1*06:02L HLA-DRB1*01:01L HLA-DRB1*01:02L HLA-DRB4*03:01NL HLA-DRB1*08:04L HLA-DRB1*08:77L
  REGION 1..12: note = CONT. FROM ABOVE: HLA-DRB3*02:01L HLA-DPA1*01:03-B1*03:01L HLA-D PA1*03:01-B1*04:02L HLA-DRB1*14:01L HLA-DRB1*11:03L HLA-DRB1*11: 04L HLA-DRB1*14:02L HLA-DQA1*01:01-B1*05:01L HLA-DRB1*08:01L HLA -DRB1*11:01L HLA-DRB5*01:01L HLA-DQA1*05:05-B1*03:19L
  REGION 1..12: note = CONT. FROM ABOVE: HLA-DQA1*05:01-B1*02:01L HLA-DPA1*01:03-B1*04: 01L HLA-DRB1*04:10M HLA-DRB1*09:01L HLA-DPA1*01:03-B1*04:02L HLA -DRB1*12:01L HLA-DRB1*12:02L HLA-DRB3*01:01L HLA-DPA1*02:01-B1*1 3:01L HLA-DPA1*03:01-B1*105:01L HLA-DRB1*14:54L
  REGION 1..12: note = CONT. FROM ABOVE: HLA-DPA1*01:03-B1*104:01L HLA-DQA1*05:05-B1*03 :01L HLA-DPA1*01:02-B1*04:01L HLA-DRB1*07:01L HLA-DRB1*10:01L HL A-DQA1*01:03-B1*06:01L HLA-DRB1*04:08L HLA-DRB1*08:03L HLA-DRB1* 15:01L HLA-DRB1*15:03L
SPLYAFASEAAR

SEQ ID NO: 8320 - protein, 10 aa, Severe acute respiratory syndrome coronavirus 2
  REGION 1..10: note = Table B: HLA-DQA1*03:02-B1*03:03L HLA-DQA1*05:05-B1*03:19L HLA-DPA1*02:01-B1*13:01L HLA-DQA1*03:01-B1*03:02L HLA-DQA1*02:01-B1*03:03L HLA-DRB1*15:03L
YAFASEAARV

SEQ ID NO: 8321 - protein, 10 aa, Severe acute respiratory syndrome coronavirus 2
  REGION 1..10: note = Table B: HLA-DQA1*03:02-B1*03:03L HLA-DQA1*05:01-B1*03:01L HLA-DRB1*04:03L HLA-DQA1*01:02-B1*06:02L HLA-DPA1*03:01-B1*04:02L HLA-DQA1*01-B1*05L HLA-DQA1*05:05-B1*03:19L HLA-DQA1*05:01-B1*02:01L
  REGION 1..10: note = CONT. FROM ABOVE: HLA-DRB1*12:01L HLA-DPA1*02:01-B1*13:01L HLA-D PA1*03:01-B1*105:01L HLA-DQA1*03:01-B1*03:02L HLA-DQA1*05:05-B1* 03:01L HLA-DPA1*01:02-B1*04:01L HLA-DRB1*16:01L HLA-DQA1*01:03-B 1*06:01L HLA-DQA1*02:01-B1*03:03L HLA-DRB1*15:03L
AFASEAARVV

SEQ ID NO: 8322 - protein, 10 aa, Severe acute respiratory syndrome coronavirus 2
  REGION 1..10: note = Table B: HLA-DQA1*03:02-B1*03:03L HLA-DQA1*05:01-B1*03:01L HLA-DRB1*04:01L HLA-DRB1*04:03L HLA-DRB1*13:02L HLA-DRB1*13:03M HLA-DRB1*01:03L HLA-DRB1*04:02L HLA-DRB1*04:04L HLA-DRB1*04:05L HLA-DQA1*01:02-B1*06:02L HLA-DRB1*01:01L HLA-DRB1*01:02L
  REGION 1..10: note = CONT. FROM ABOVE: HLA-DRB4*03:01NL HLA-DRB1*08:77L HLA-DRB3*02:0 1L HLA-DPA1*03:01-B1*04:02L HLA-DRB1*14:01L HLA-DRB1*11:03L HLA- DRB1*11:04L HLA-DRB1*14:02L HLA-DRB1*08:01L HLA-DRB1*11:01L HLA- DRB5*01:01L HLA-DQA1*01-B1*05L HLA-DQA1*05:05-B1*03:19L
  REGION 1..10: note = CONT. FROM ABOVE: HLA-DQA1*05:01-B1*02:01L HLA-DPA1*01:03-B1*04: 01L HLA-DPA1*01:03-B1*04:02L HLA-DRB1*12:01M HLA-DRB1*12:02L HLA -DRB3*01:01L HLA-DPA1*03:01-B1*105:01L HLA-DQA1*03:01-B1*03:02M HLA-DRB1*14:54L HLA-DQA1*05:05-B1*03:01L HLA-DRB1*14:17L
  REGION 1..10: note = CONT. FROM ABOVE: HLA-DPA1*01:02-B1*04:01L HLA-DRB1*07:01L HLA-D RB1*10:01L HLA-DRB1*16:01L HLA-DQA1*01:03-B1*06:01L HLA-DRB1*04: 08L HLA-DRB1*08:03L HLA-DQA1*02:01-B1*03:03M HLA-DRB1*15:03L
FASEAARVVR

SEQ ID NO: 8323 - protein, 10 aa, Severe acute respiratory syndrome coronavirus 2
  REGION 1..10: note = Table B: HLA-DQA1*03:02-B1*03:03M HLA-DQA1*05:01-B1*03:01L HLA-DRB1*08:77L HLA-DPA1*03:01-B1*04:02L HLA-DRB1*11:02M HLA-DQA1*05:05-B1*03:19H HLA-DQA1*05:01-B1*02:01L HLA-DRB4*01:01L HLA-DPA1*01:03-B1*04:01L
  REGION 1..10: note = CONT. FROM ABOVE: HLA-DQA1*05:05-B1*03:116L HLA-DRB1*09:01L HLA- DPA1*01:03-B1*04:02L HLA-DQA1*03:01-B1*03:02L HLA-DPA1*01:03-B1* 104:01M HLA-DRB1*10:01L HLA-DRB1*16:01L HLA-DQA1*01:03-B1*06:01L HLA-DQA1*02:01-B1*03:03L HLA-DRB1*15:03L
SEAARVVRSI

SEQ ID NO: 8324 - protein, 10 aa, Severe acute respiratory syndrome coronavirus 2
  REGION 1..10: note = Table B: HLA-DQA1*03:02-B1*03:03L HLA-DQA1*05:01-B1*03:01L HLA-DRB1*04:03L HLA-DRB1*13:03L HLA-DRB1*01:03L HLA-DQA1*01:02-B1*06:02L HLA-DRB1*01:02L HLA-DPA1*03:01-B1*04:02L HLA-DRB1*14:01L HLA-DRB1*14:02L
  REGION 1..10: note = CONT. FROM ABOVE: HLA-DQA1*05:05-B1*03:19L HLA-DQA1*05:01-B1*02: 01L HLA-DPA1*03:01-B1*105:01L HLA-DQA1*03:01-B1*03:02L HLA-DPA1* 01:02-B1*04:01L HLA-DRB1*16:01L HLA-DQA1*01:03-B1*06:01L HLA-DQA 1*02:01-B1*03:03L HLA-DRB1*15:03L
SIFSRTLETA

SEQ ID NO: 8325 - protein, 10 aa, Severe acute respiratory syndrome coronavirus 2
  REGION 1..10: note = Table B: HLA-DQA1*03:02-B1*03:03M HLA-DQA1*05:01-B1*03:01L HLA-DRB1*13:03L HLA-DRB1*01:03L HLA-DQA1*01:02-B1*06:02L HLA-DRB1*01:02L HLA-DPA1*03:01-B1*04:02L HLA-DRB1*14:01L HLA-DRB1*14:02L HLA-DRB1*08:01L HLA-DQA1*05:05-B1*03:19L
  REGION 1..10: note = CONT. FROM ABOVE: HLA-DQA1*05:01-B1*02:01L HLA-DPA1*01:03-B1*04: 01L HLA-DQA1*05:05-B1*03:116L HLA-DRB1*09:01L HLA-DPA1*01:03-B1* 04:02L HLA-DRB1*12:01L HLA-DPA1*02:01-B1*13:01L HLA-DPA1*03:01-B 1*105:01L HLA-DQA1*03:01-B1*03:02L HLA-DPA1*01:03-B1*104:01L
  REGION 1..10: note = CONT. FROM ABOVE: HLA-DPA1*01:02-B1*04:01L HLA-DRB1*10:01L HLA-D RB1*16:01L HLA-DQA1*01:03-B1*06:01L HLA-DRB1*08:03L HLA-DQA1*02: 01-B1*03:03L HLA-DRB1*15:03L
RTLETAQNSV

SEQ ID NO: 8326 - protein, 10 aa, Severe acute respiratory syndrome coronavirus 2
  REGION 1..10: note = Table B: HLA-DQA1*03:02-B1*03:03L HLA-DQA1*05:01-B1*03:01L HLA-DRB1*04:03L HLA-DRB1*13:02L HLA-DRB1*13:03L HLA-DRB1*01:03L HLA-DRB1*04:02L HLA-DRB1*04:04L HLA-DRB1*04:05L HLA-DRB1*01:01L HLA-DRB1*01:02L HLA-DRB4*03:01NL HLA-DRB1*11:04L
  REGION 1..10: note = CONT. FROM ABOVE: HLA-DQA1*01:01-B1*05:01L HLA-DRB1*08:01L HLA-D RB5*01:01L HLA-DQA1*01-B1*05L HLA-DQA1*05:01-B1*02:01L HLA-DRB1* 04:10L HLA-DRB1*12:01L HLA-DPA1*03:01-B1*105:01L HLA-DQA1*03:01- B1*03:02L HLA-DRB1*14:54L HLA-DQA1*05:05-B1*03:01L
  REGION 1..10: note = CONT. FROM ABOVE: HLA-DRB1*14:17L HLA-DRB1*16:01L HLA-DQA1*01:03 -B1*06:01L HLA-DQA1*02:01-B1*03:03L
TLETAQNSVR

SEQ ID NO: 8327 - protein, 10 aa, Severe acute respiratory syndrome coronavirus 2
  REGION 1..10: note = Table B: HLA-DQA1*03:02-B1*03:03L HLA-DQA1*05:01-B1*03:01L HLA-DRB1*11:02L HLA-DQA1*05:05-B1*03:19M HLA-DQA1*05:01-B1*02:01L HLA-DRB1*09:01L HLA-DQA1*03:01-B1*03:02L HLA-DPA1*01:03-B1*104:01L
  REGION 1..10: note = CONT. FROM ABOVE: HLA-DRB1*16:01L HLA-DQA1*01:03-B1*06:01L HLA-D QA1*02:01-B1*03:03L HLA-DRB1*15:03L
LETAQNSVRV

SEQ ID NO: 8328 - protein, 10 aa, Severe acute respiratory syndrome coronavirus 2
  REGION 1..10: note = Table B: HLA-DQA1*03:02-B1*03:03M HLA-DQA1*05:01-B1*03:01L HLA-DRB1*13:02L HLA-DRB1*13:03M HLA-DQA1*01:02-B1*06:02M HLA-DRB1*01:01L HLA-DRB1*01:02M HLA-DRB4*03:01NL HLA-DRB3*02:01L HLA-DPA1*01:03-B1*03:01L HLA-DPA1*03:01-B1*04:02L
  REGION 1..10: note = CONT. FROM ABOVE: HLA-DRB1*14:01L HLA-DRB1*11:04L HLA-DRB1*14:02 L HLA-DRB1*08:01L HLA-DRB5*01:01L HLA-DQA1*05:01-B1*02:01L HLA-D PA1*01:03-B1*04:01L HLA-DQA1*05:05-B1*03:116L HLA-DRB1*09:01L HL A-DRB1*12:01L HLA-DPA1*02:01-B1*13:01L HLA-DPA1*03:01-B1*105:01M
  REGION 1..10: note = CONT. FROM ABOVE: HLA-DQA1*03:01-B1*03:02L HLA-DQA1*05:05-B1*03: 01L HLA-DPA1*01:02-B1*04:01L HLA-DQA1*01:03-B1*06:01L HLA-DRB1*0 8:03L HLA-DQA1*02:01-B1*03:03L HLA-DRB1*15:01L HLA-DRB1*15:03M
ETAQNSVRVL

SEQ ID NO: 8329 - protein, 10 aa, Severe acute respiratory syndrome coronavirus 2
  REGION 1..10: note = Table B: HLA-DQA1*03:02-B1*03:03L HLA-DQA1*05:01-B1*03:01L HLA-DQA1*05:05-B1*03:19L HLA-DQA1*03:01-B1*03:02L HLA-DRB1*16:01L HLA-DQA1*01:03-B1*06:01L HLA-DQA1*02:01-B1*03:03L
RVLQKAAITI

SEQ ID NO: 8330 - protein, 12 aa, Severe acute respiratory syndrome coronavirus 2
  REGION 1..12: note = Table B: HLA-DQA1*03:02-B1*03:03L HLA-DQA1*05:01-B1*03:01L HLA-DRB1*04:03L HLA-DRB1*13:02L HLA-DRB1*13:03L HLA-DRB1*01:03L HLA-DRB1*04:02L HLA-DRB1*04:05L HLA-DQA1*01:02-B1*06:02L HLA-DRB1*01:02L HLA-DRB4*03:01NL HLA-DRB1*08:04L
  REGION 1..12: note = CONT. FROM ABOVE: HLA-DPA1*01:03-B1*03:01L HLA-DRB1*14:01L HLA-D QA1*01:01-B1*05:01L HLA-DQA1*05:05-B1*03:19L HLA-DQA1*05:01-B1*0 2:01L HLA-DRB1*04:10L HLA-DRB1*12:01L HLA-DRB1*12:02L HLA-DPA1*0 2:01-B1*13:01L HLA-DPA1*03:01-B1*105:01L
  REGION 1..12: note = CONT. FROM ABOVE: HLA-DQA1*03:01-B1*03:02L HLA-DRB1*14:54L HLA-D PA1*01:03-B1*104:01L HLA-DQA1*05:05-B1*03:01L HLA-DRB1*14:17L HL A-DRB1*07:01L HLA-DRB1*16:01L HLA-DQA1*01:03-B1*06:01L HLA-DRB1* 04:08L HLA-DQA1*02:01-B1*03:03L HLA-DRB1*15:03L
VLQKAAITILDG

SEQ ID NO: 8331 - protein, 12 aa, Severe acute respiratory syndrome coronavirus 2
  REGION 1..12: note = Table B: HLA-DQA1*03:02-B1*03:03L HLA-DQA1*05:01-B1*03:01L HLA-DRB1*13:02L HLA-DRB1*13:03L HLA-DRB1*01:03L HLA-DRB1*04:04L HLA-DQA1*01:02-B1*06:02L HLA-DRB1*01:02L HLA-DRB1*08:04L HLA-DPA1*01:03-B1*03:01L HLA-DRB1*14:01L HLA-DRB1*11:04L
  REGION 1..12: note = CONT. FROM ABOVE: HLA-DQA1*01-B1*05L HLA-DRB1*12:02L HLA-DQA1*05 :05-B1*03:01L HLA-DRB1*10:01L HLA-DRB1*04:08L HLA-DRB1*08:03L HL A-DRB1*15:03L
KAAITILDGISQ

SEQ ID NO: 8332 - protein, 10 aa, Severe acute respiratory syndrome coronavirus 2
  REGION 1..10: note = Table B: HLA-DQA1*03:02-B1*03:03L HLA-DQA1*05:01-B1*03:01L HLA-DRB1*04:03L HLA-DRB1*13:02L HLA-DRB1*13:03L HLA-DRB1*01:03L HLA-DQA1*01:02-B1*06:02M HLA-DRB4*03:01NL HLA-DRB1*08:77L HLA-DPA1*01:03-B1*03:01L HLA-DPA1*03:01-B1*04:02L
  REGION 1..10: note = CONT. FROM ABOVE: HLA-DRB1*03:01L HLA-DRB1*14:01L HLA-DRB1*11:02 L HLA-DRB1*14:02L HLA-DQA1*01-B1*05L HLA-DQA1*05:05-B1*03:19M HL A-DQA1*05:01-B1*02:01M HLA-DRB4*01:01L HLA-DPA1*01:03-B1*04:01L HLA-DQA1*05:05-B1*03:116L HLA-DPA1*01:03-B1*04:02L
  REGION 1..10: note = CONT. FROM ABOVE: HLA-DRB1*12:01L HLA-DPA1*02:01-B1*13:01L HLA-D PA1*03:01-B1*105:01L HLA-DPA1*01:03-B1*104:01L HLA-DQA1*05:05-B1 *03:01L HLA-DPA1*01:02-B1*04:01L HLA-DRB1*10:01L HLA-DRB1*16:01L HLA-DQA1*01:03-B1*06:01L HLA-DRB1*08:02L
  REGION 1..10: note = CONT. FROM ABOVE: HLA-DQA1*02:01-B1*03:03L HLA-DRB1*15:03L
ITILDGISQY

SEQ ID NO: 8333 - protein, 10 aa, Severe acute respiratory syndrome coronavirus 2
  REGION 1..10: note = Table B: HLA-DQA1*03:02-B1*03:03M HLA-DQA1*05:01-B1*03:01L HLA-DRB1*13:03L HLA-DQA1*01:02-B1*06:02L HLA-DPA1*03:01-B1*04:02L HLA-DRB1*14:01L HLA-DRB1*14:02L HLA-DRB1*08:01L HLA-DQA1*05:05-B1*03:19L
  REGION 1..10: note = CONT. FROM ABOVE: HLA-DQA1*05:01-B1*02:01L HLA-DRB4*01:01L HLA-D QA1*05:05-B1*03:116L HLA-DRB1*09:01L HLA-DPA1*01:03-B1*04:02L HL A-DPA1*02:01-B1*13:01L HLA-DPA1*03:01-B1*105:01L HLA-DQA1*03:01- B1*03:02L HLA-DPA1*01:03-B1*104:01L HLA-DPA1*01:02-B1*04:01L
  REGION 1..10: note = CONT. FROM ABOVE: HLA-DRB1*10:01L HLA-DRB1*16:01L HLA-DQA1*01:03 -B1*06:01L HLA-DRB1*08:03L HLA-DQA1*02:01-B1*03:03L HLA-DRB1*15: 03L
ILDGISQYSL

SEQ ID NO: 8334 - protein, 12 aa, Severe acute respiratory syndrome coronavirus 2
  REGION 1..12: note = Table B: HLA-DQA1*03:02-B1*03:03L HLA-DQA1*05:01-B1*03:01L HLA-DRB1*04:03L HLA-DRB1*04:02L HLA-DQA1*01:02-B1*06:02L HLA-DPA1*03:01-B1*04:02L HLA-DRB1*14:01L HLA-DQA1*05:01-B1*02:01L HLA-DRB1*12:01L
  REGION 1..12: note = CONT. FROM ABOVE: HLA-DPA1*03:01-B1*105:01L HLA-DQA1*03:01-B1*03 :02L HLA-DPA1*01:02-B1*04:01L HLA-DRB1*16:01L HLA-DQA1*01:03-B1* 06:01L HLA-DQA1*02:01-B1*03:03L HLA-DRB1*15:03L
DGISQYSLRLID

SEQ ID NO: 8335 - protein, 10 aa, Severe acute respiratory syndrome coronavirus 2
  REGION 1..10: note = Table B: HLA-DQA1*03:02-B1*03:03L HLA-DQA1*03:01-B1*03:02L HLA-DQA1*02:01-B1*03:03L
SQYSLRLIDA

SEQ ID NO: 8336 - protein, 11 aa, Severe acute respiratory syndrome coronavirus 2
  REGION 1..11: note = Table B: HLA-DQA1*03:02-B1*03:03L HLA-DQA1*05:01-B1*03:01L HLA-DRB1*04:03L HLA-DQA1*01:02-B1*06:02L HLA-DPA1*03:01-B1*04:02L HLA-DPA1*03:01-B1*105:01L HLA-DQA1*03:01-B1*03:02L HLA-DPA1*01:02-B1*04:01L
  REGION 1..11: note = CONT. FROM ABOVE: HLA-DRB1*16:01L HLA-DQA1*01:03-B1*06:01L HLA-D QA1*02:01-B1*03:03L HLA-DRB1*15:03L
RLIDAMMFTSD

SEQ ID NO: 8337 - protein, 13 aa, Severe acute respiratory syndrome coronavirus 2
  REGION 1..13: note = Table B: HLA-DQA1*03:02-B1*03:03L HLA-DRB1*04:03L HLA-DRB1*04:02L HLA-DRB1*04:05L HLA-DQA1*01:02-B1*06:02L HLA-DQA1*05:01-B1*02:01L HLA-DRB1*04:10L HLA-DRB1*12:01L HLA-DPA1*03:01-B1*105:01L HLA-DQA1*03:01-B1*03:02L
  REGION 1..13: note = CONT. FROM ABOVE: HLA-DQA1*05:05-B1*03:01L HLA-DRB1*14:17L HLA-D RB1*16:01L HLA-DQA1*01:03-B1*06:01L HLA-DQA1*02:01-B1*03:03L
IDAMMFTSDLATN

SEQ ID NO: 8338 - protein, 12 aa, Severe acute respiratory syndrome coronavirus 2
  REGION 1..12: note = Table B: HLA-DQA1*03:02-B1*03:03L HLA-DRB1*04:02L HLA-DRB1*04:05L HLA-DQA1*01:02-B1*06:02L HLA-DQA1*01-B1*05L HLA-DQA1*05:05-B1*03:01L HLA-DRB1*16:01L
AMMFTSDLATNN

SEQ ID NO: 8339 - protein, 10 aa, Severe acute respiratory syndrome coronavirus 2
  REGION 1..10: note = Table B: HLA-DQA1*03:02-B1*03:03M HLA-DQA1*05:01-B1*03:01L HLA-DRB1*04:03L HLA-DRB1*13:03L HLA-DRB1*01:03L HLA-DRB1*04:02L HLA-DRB1*04:05L HLA-DQA1*01:02-B1*06:02L HLA-DRB1*01:02L HLA-DRB4*03:01NL HLA-DRB1*08:77L HLA-DRB3*02:01L
  REGION 1..10: note = CONT. FROM ABOVE: HLA-DPA1*01:03-B1*03:01L HLA-DPA1*03:01-B1*04: 02L HLA-DRB1*14:01L HLA-DRB1*14:02L HLA-DRB1*08:01L HLA-DQA1*01- B1*05L HLA-DQA1*05:05-B1*03:19L HLA-DQA1*05:01-B1*02:01L HLA-DRB 4*01:01L HLA-DPA1*01:03-B1*04:01L HLA-DQA1*05:05-B1*03:116L
  REGION 1..10: note = CONT. FROM ABOVE: HLA-DRB1*09:01L HLA-DPA1*01:03-B1*04:02L HLA-D RB1*12:01L HLA-DPA1*02:01-B1*13:01L HLA-DPA1*03:01-B1*105:01L HL A-DQA1*03:01-B1*03:02M HLA-DPA1*01:03-B1*104:01L HLA-DQA1*05:05- B1*03:01L HLA-DPA1*01:02-B1*04:01L HLA-DRB1*07:01L
  REGION 1..10: note = CONT. FROM ABOVE: HLA-DRB1*10:01L HLA-DRB1*16:01L HLA-DQA1*01:03 -B1*06:01L HLA-DRB1*08:03L HLA-DQA1*02:01-B1*03:03L HLA-DRB1*15: 03L
FTSDLATNNL

SEQ ID NO: 8340 - protein, 10 aa, Severe acute respiratory syndrome coronavirus 2
  REGION 1..10: note = Table B: HLA-DQA1*03:02-B1*03:03L
TSDLATNNLV

SEQ ID NO: 8341 - protein, 10 aa, Severe acute respiratory syndrome coronavirus 2
  REGION 1..10: note = Table B: HLA-DQA1*03:02-B1*03:03L
SDLATNNLVV

SEQ ID NO: 8342 - protein, 10 aa, Severe acute respiratory syndrome coronavirus 2
  REGION 1..10: note = Table B: HLA-DQA1*03:02-B1*03:03L HLA-DQA1*05:01-B1*03:01L HLA-DRB1*13:03L HLA-DQA1*01:02-B1*06:02L HLA-DQA1*05:01-B1*02:01L HLA-DRB1*12:01L HLA-DPA1*03:01-B1*105:01L HLA-DQA1*03:01-B1*03:02L
  REGION 1..10: note = CONT. FROM ABOVE: HLA-DQA1*01:03-B1*06:01L HLA-DQA1*02:01-B1*03: 03L HLA-DRB1*15:03L
DLATNNLVVM

SEQ ID NO: 8343 - protein, 10 aa, Severe acute respiratory syndrome coronavirus 2
  REGION 1..10: note = Table B: HLA-DQA1*03:02-B1*03:03L HLA-DQA1*05:01-B1*03:01L HLA-DRB1*04:03L HLA-DRB1*13:02L HLA-DRB1*13:03M HLA-DRB1*01:03L HLA-DQA1*01:02-B1*06:02M HLA-DRB4*03:01NL HLA-DRB1*08:77M HLA-DPA1*01:03-B1*03:01M HLA-DPA1*03:01-B1*04:02L
  REGION 1..10: note = CONT. FROM ABOVE: HLA-DRB1*03:01M HLA-DRB1*14:01L HLA-DRB1*11:02 L HLA-DRB1*11:03L HLA-DRB1*14:02L HLA-DRB1*11:01L HLA-DRB5*01:01 L HLA-DQA1*01-B1*05M HLA-DQA1*05:05-B1*03:19M HLA-DQA1*05:01-B1* 02:01M HLA-DRB4*01:01M HLA-DPA1*01:03-B1*04:01M
  REGION 1..10: note = CONT. FROM ABOVE: HLA-DQA1*05:05-B1*03:116L HLA-DPA1*01:03-B1*04 :02L HLA-DRB1*12:01L HLA-DPA1*02:01-B1*13:01L HLA-DPA1*03:01-B1* 105:01L HLA-DPA1*01:03-B1*104:01M HLA-DQA1*05:05-B1*03:01L HLA-D PA1*01:02-B1*04:01L HLA-DRB1*10:01L HLA-DRB1*16:01M
  REGION 1..10: note = CONT. FROM ABOVE: HLA-DQA1*01:03-B1*06:01L HLA-DRB1*08:02L HLA-D QA1*02:01-B1*03:03L HLA-DRB1*15:03L
ATNNLVVMAY

SEQ ID NO: 8344 - protein, 10 aa, Severe acute respiratory syndrome coronavirus 2
  REGION 1..10: note = Table B: HLA-DQA1*03:02-B1*03:03L HLA-DQA1*05:01-B1*03:01L HLA-DRB1*04:03L HLA-DQA1*05:01-B1*02:01L HLA-DQA1*03:01-B1*03:02L HLA-DQA1*02:01-B1*03:03L
MAYITGGVVQ

SEQ ID NO: 8345 - protein, 10 aa, Severe acute respiratory syndrome coronavirus 2
  REGION 1..10: note = Table B: HLA-DQA1*03:02-B1*03:03M HLA-DQA1*05:01-B1*03:01M HLA-DRB1*04:01L HLA-DRB1*04:03L HLA-DRB1*13:02L HLA-DRB1*13:03L HLA-DRB1*01:03L HLA-DRB1*04:02L HLA-DRB1*04:05M HLA-DQA1*01:02-B1*06:02L HLA-DRB1*01:01L HLA-DRB1*01:02L
  REGION 1..10: note = CONT. FROM ABOVE: HLA-DRB1*08:77L HLA-DRB3*02:01L HLA-DPA1*03:01 -B1*04:02M HLA-DRB1*14:01L HLA-DRB1*11:02L HLA-DRB1*11:03L HLA-D RB1*14:02M HLA-DQA1*01:01-B1*05:01L HLA-DRB1*08:01L HLA-DRB1*11: 01L HLA-DQA1*01-B1*05L HLA-DQA1*05:05-B1*03:19L
  REGION 1..10: note = CONT. FROM ABOVE: HLA-DQA1*05:01-B1*02:01L HLA-DRB4*01:01L HLA-D PA1*01:03-B1*04:01L HLA-DQA1*05:05-B1*03:116M HLA-DRB1*09:01L HL A-DPA1*01:03-B1*04:02L HLA-DRB1*12:01L HLA-DPA1*02:01-B1*13:01M HLA-DPA1*03:01-B1*105:01L HLA-DQA1*03:01-B1*03:02M
  REGION 1..10: note = CONT. FROM ABOVE: HLA-DPA1*01:03-B1*104:01L HLA-DPA1*01:02-B1*04 :01L HLA-DRB1*07:01L HLA-DRB1*10:01L HLA-DRB1*16:01L HLA-DQA1*01 :03-B1*06:01M HLA-DRB1*08:03M HLA-DQA1*02:01-B1*03:03M HLA-DRB1* 15:03M
AYITGGVVQL

SEQ ID NO: 8346 - protein, 11 aa, Severe acute respiratory syndrome coronavirus 2
  REGION 1..11: note = Table B: HLA-DQA1*03:02-B1*03:03L HLA-DQA1*05:01-B1*03:01L HLA-DQA1*01:02-B1*06:02L HLA-DQA1*05:05-B1*03:19L HLA-DPA1*03:01-B1*105:01L HLA-DQA1*03:01-B1*03:02L HLA-DQA1*05:05-B1*03:01L HLA-DRB1*04:08L
  REGION 1..11: note = CONT. FROM ABOVE: HLA-DQA1*02:01-B1*03:03L
ITGGVVQLTSQ

SEQ ID NO: 8347 - protein, 14 aa, Severe acute respiratory syndrome coronavirus 2
  REGION 1..14: note = Table B: HLA-DQA1*03:02-B1*03:03L HLA-DPA1*01:03-B1*03:01L HLA-DPA1*02:01-B1*13:01L HLA-DQA1*03:01-B1*03:02L HLA-DPA1*01:03-B1*104:01L HLA-DPA1*01:02-B1*04:01L HLA-DRB1*04:08L
VVQLTSQWLTNIFG

SEQ ID NO: 8348 - protein, 14 aa, Severe acute respiratory syndrome coronavirus 2
  REGION 1..14: note = Table B: HLA-DQA1*03:02-B1*03:03L HLA-DRB1*13:02L HLA-DRB1*08:04L HLA-DRB1*08:01L HLA-DRB1*11:01L HLA-DQA1*02:01-B1*03:03L
TSQWLTNIFGTVYE

SEQ ID NO: 8349 - protein, 10 aa, Severe acute respiratory syndrome coronavirus 2
  REGION 1..10: note = Table B: HLA-DQA1*03:02-B1*03:03L HLA-DQA1*05:01-B1*03:01L HLA-DRB1*04:03L HLA-DRB1*13:02L HLA-DRB1*13:03L HLA-DRB1*01:03L HLA-DRB1*04:05L HLA-DQA1*01:02-B1*06:02L HLA-DRB1*01:02L HLA-DRB1*08:77L HLA-DRB3*02:01L HLA-DPA1*01:03-B1*03:01L
  REGION 1..10: note = CONT. FROM ABOVE: HLA-DPA1*03:01-B1*04:02M HLA-DRB1*14:01L HLA-D RB1*11:03L HLA-DRB1*11:04L HLA-DRB1*14:02L HLA-DRB1*08:01L HLA-D RB1*11:01L HLA-DQA1*01-B1*05L HLA-DQA1*05:05-B1*03:19L HLA-DQA1* 05:01-B1*02:01L HLA-DRB4*01:01L HLA-DPA1*01:03-B1*04:01L
  REGION 1..10: note = CONT. FROM ABOVE: HLA-DQA1*05:05-B1*03:116L HLA-DRB1*09:01L HLA- DPA1*01:03-B1*04:02L HLA-DRB1*12:01L HLA-DPA1*02:01-B1*13:01L HL A-DPA1*03:01-B1*105:01M HLA-DQA1*03:01-B1*03:02L HLA-DPA1*01:03- B1*104:01L HLA-DQA1*05:05-B1*03:01L HLA-DPA1*01:02-B1*04:01M
  REGION 1..10: note = CONT. FROM ABOVE: HLA-DRB1*07:01L HLA-DRB1*16:01L HLA-DQA1*01:03 -B1*06:01L HLA-DRB1*04:08L HLA-DRB1*08:03L HLA-DQA1*02:01-B1*03: 03L HLA-DRB1*15:03L
NIFGTVYEKL

SEQ ID NO: 8350 - protein, 10 aa, Severe acute respiratory syndrome coronavirus 2
  REGION 1..10: note = Table B: HLA-DQA1*03:02-B1*03:03L HLA-DQA1*05:01-B1*03:01L HLA-DRB1*13:02L HLA-DRB1*13:03L HLA-DRB1*01:03L HLA-DRB1*04:02L HLA-DQA1*01:02-B1*06:02L HLA-DRB1*01:02L HLA-DPA1*01:03-B1*03:01L HLA-DPA1*03:01-B1*04:02L
  REGION 1..10: note = CONT. FROM ABOVE: HLA-DRB1*14:01L HLA-DRB1*14:02L HLA-DRB1*08:01 L HLA-DQA1*01-B1*05L HLA-DQA1*05:05-B1*03:19L HLA-DQA1*05:01-B1* 02:01L HLA-DPA1*01:03-B1*04:01L HLA-DQA1*05:05-B1*03:116L HLA-DP A1*01:03-B1*04:02L HLA-DRB1*12:01L HLA-DPA1*02:01-B1*13:01L
  REGION 1..10: note = CONT. FROM ABOVE: HLA-DPA1*03:01-B1*105:01L HLA-DQA1*03:01-B1*03 :02L HLA-DQA1*05:05-B1*03:01L HLA-DPA1*01:02-B1*04:01L HLA-DRB1* 16:01L HLA-DQA1*01:03-B1*06:01L HLA-DQA1*02:01-B1*03:03L HLA-DRB 1*15:03L
TVYEKLKPVL

SEQ ID NO: 8351 - protein, 16 aa, Severe acute respiratory syndrome coronavirus 2
  REGION 1..16: note = Table B: HLA-DQA1*03:02-B1*03:03L HLA-DQA1*05:01-B1*03:01L HLA-DRB3*02:01L HLA-DPA1*01:03-B1*03:01L HLA-DRB1*11:02L HLA-DRB1*14:02L HLA-DQA1*05:05-B1*03:19L HLA-DPA1*01:03-B1*104:01L HLA-DQA1*05:05-B1*03:01L
  REGION 1..16: note = CONT. FROM ABOVE: HLA-DRB1*08:03L
KPVLDWLEEKFKEGVE

SEQ ID NO: 8352 - protein, 10 aa, Severe acute respiratory syndrome coronavirus 2
  REGION 1..10: note = Table B: HLA-DQA1*03:02-B1*03:03L HLA-DQA1*05:01-B1*03:01L HLA-DRB1*08:77L HLA-DPA1*01:03-B1*03:01L HLA-DPA1*03:01-B1*04:02L HLA-DRB1*03:01L HLA-DQA1*01-B1*05L HLA-DQA1*05:05-B1*03:19L HLA-DQA1*05:01-B1*02:01L
  REGION 1..10: note = CONT. FROM ABOVE: HLA-DRB4*01:01L HLA-DPA1*01:03-B1*04:01L HLA-D QA1*03:01-B1*03:02L HLA-DPA1*01:03-B1*104:01L HLA-DPA1*01:02-B1* 04:01L HLA-DRB1*10:01L HLA-DRB1*16:01L HLA-DRB1*15:03L
EEKFKEGVEF

SEQ ID NO: 8353 - protein, 15 aa, Severe acute respiratory syndrome coronavirus 2
  REGION 1..15: note = Table B: HLA-DQA1*03:02-B1*03:03L HLA-DQA1*05:01-B1*03:01L HLA-DRB1*13:03L HLA-DQA1*01:01-B1*05:01L HLA-DQA1*05:05-B1*03:19L HLA-DPA1*01:03-B1*04:01L HLA-DRB3*01:01L HLA-DQA1*05:05-B1*03:01L
EKFKEGVEFLRDGWE

SEQ ID NO: 8354 - protein, 10 aa, Severe acute respiratory syndrome coronavirus 2
  REGION 1..10: note = Table B: HLA-DQA1*03:02-B1*03:03M HLA-DRB1*11:02L HLA-DQA1*05:05-B1*03:19H HLA-DQA1*05:01-B1*02:01L HLA-DRB1*09:01L HLA-DQA1*03:01-B1*03:02L HLA-DPA1*01:03-B1*104:01M
VEFLRDGWEI

SEQ ID NO: 8355 - protein, 11 aa, Severe acute respiratory syndrome coronavirus 2
  REGION 1..11: note = Table B: HLA-DQA1*03:02-B1*03:03L HLA-DQA1*05:01-B1*03:01L HLA-DRB1*04:03L HLA-DRB1*13:02L HLA-DRB1*13:03L HLA-DRB1*04:02L HLA-DRB1*04:05L HLA-DQA1*01:02-B1*06:02L HLA-DRB1*01:02L HLA-DRB4*03:01NL HLA-DRB1*08:04L HLA-DPA1*01:03-B1*03:01L
  REGION 1..11: note = CONT. FROM ABOVE: HLA-DRB1*14:01L HLA-DRB1*11:04L HLA-DRB1*08:01 L HLA-DRB1*11:01L HLA-DQA1*05:05-B1*03:19L HLA-DQA1*05:01-B1*02: 01L HLA-DRB1*12:01L HLA-DPA1*02:01-B1*13:01L HLA-DQA1*03:01-B1*0 3:02L HLA-DRB1*14:54L HLA-DPA1*01:03-B1*02:01L
  REGION 1..11: note = CONT. FROM ABOVE: HLA-DPA1*01:03-B1*104:01L HLA-DQA1*05:05-B1*03 :01L HLA-DRB1*14:17L HLA-DQA1*02:01-B1*03:03L HLA-DRB1*15:03L
DGWEIVKFIST

SEQ ID NO: 8356 - protein, 16 aa, Severe acute respiratory syndrome coronavirus 2
  REGION 1..16: note = Table B: HLA-DQA1*03:02-B1*03:03L HLA-DRB1*04:03L HLA-DRB3*02:01L HLA-DRB1*11:02L HLA-DRB1*14:02L HLA-DQA1*05:01-B1*02:01L HLA-DPA1*01:03-B1*04:01L HLA-DRB1*10:01L
IVKFISTCACEIVGGQ

SEQ ID NO: 8357 - protein, 10 aa, Severe acute respiratory syndrome coronavirus 2
  REGION 1..10: note = Table B: HLA-DQA1*03:02-B1*03:03L HLA-DQA1*01:02-B1*06:02L HLA-DPA1*03:01-B1*105:01L HLA-DQA1*01:03-B1*06:01L HLA-DRB1*15:03L
EIVGGQIVTC

SEQ ID NO: 8358 - protein, 11 aa, Severe acute respiratory syndrome coronavirus 2
  REGION 1..11: note = Table B: HLA-DQA1*03:02-B1*03:03L HLA-DQA1*05:01-B1*03:01L HLA-DQA1*01:02-B1*06:02L HLA-DQA1*05:05-B1*03:19L HLA-DPA1*03:01-B1*105:01L HLA-DQA1*03:01-B1*03:02L HLA-DQA1*05:05-B1*03:01L HLA-DQA1*02:01-B1*03:03L
IVGGQIVTCAK

SEQ ID NO: 8359 - protein, 10 aa, Severe acute respiratory syndrome coronavirus 2
  REGION 1..10: note = Table B: HLA-DQA1*03:02-B1*03:03M HLA-DQA1*05:01-B1*03:01H HLA-DRB1*04:01L HLA-DRB1*13:02L HLA-DRB1*13:03L HLA-DRB1*01:03M HLA-DRB1*04:02L HLA-DRB1*04:05L HLA-DQA1*01:02-B1*06:02L HLA-DRB4*03:01NM HLA-DRB1*08:77H HLA-DPA1*01:03-B1*03:01L
  REGION 1..10: note = CONT. FROM ABOVE: HLA-DPA1*03:01-B1*04:02M HLA-DRB1*03:01M HLA-D RB1*14:01L HLA-DRB1*11:02L HLA-DRB1*14:02L HLA-DRB1*11:01L HLA-D QA1*01-B1*05M HLA-DQA1*05:05-B1*03:19M HLA-DQA1*05:01-B1*02:01M HLA-DRB4*01:01M HLA-DPA1*01:03-B1*04:01H
  REGION 1..10: note = CONT. FROM ABOVE: HLA-DQA1*05:05-B1*03:116M HLA-DRB1*09:01L HLA- DPA1*01:03-B1*04:02M HLA-DRB1*12:01L HLA-DPA1*02:01-B1*13:01L HL A-DPA1*03:01-B1*105:01L HLA-DQA1*03:01-B1*03:02M HLA-DPA1*01:03- B1*104:01L HLA-DPA1*01:02-B1*04:01M HLA-DRB1*10:01M
  REGION 1..10: note = CONT. FROM ABOVE: HLA-DRB1*16:01M HLA-DQA1*01:03-B1*06:01L HLA-D RB1*08:02L HLA-DQA1*02:01-B1*03:03M HLA-DRB1*15:03M
KEIKESVQTF

SEQ ID NO: 8360 - protein, 10 aa, Severe acute respiratory syndrome coronavirus 2
  REGION 1..10: note = Table B: HLA-DQA1*03:02-B1*03:03L HLA-DQA1*05:01-B1*03:01L HLA-DRB1*13:03L HLA-DRB1*01:03L HLA-DQA1*01:02-B1*06:02M HLA-DRB1*08:77L HLA-DPA1*01:03-B1*03:01L HLA-DPA1*03:01-B1*04:02L HLA-DRB1*03:01L HLA-DRB1*14:01L
  REGION 1..10: note = CONT. FROM ABOVE: HLA-DRB1*14:02L HLA-DQA1*05:05-B1*03:19L HLA-D QA1*05:01-B1*02:01L HLA-DPA1*01:03-B1*04:01L HLA-DRB1*12:01L HLA -DPA1*02:01-B1*13:01L HLA-DPA1*03:01-B1*105:01L HLA-DQA1*05:05-B 1*03:01L HLA-DPA1*01:02-B1*04:01L HLA-DQA1*01:03-B1*06:01L
  REGION 1..10: note = CONT. FROM ABOVE: HLA-DQA1*02:01-B1*03:03L HLA-DRB1*15:03L
EIKESVQTFF

SEQ ID NO: 8361 - protein, 10 aa, Severe acute respiratory syndrome coronavirus 2
  REGION 1..10: note = Table B: HLA-DQA1*03:02-B1*03:03L HLA-DQA1*05:05-B1*03:19M HLA-DQA1*03:01-B1*03:02L HLA-DPA1*01:03-B1*104:01L
KESVQTFFKL

SEQ ID NO: 8362 - protein, 10 aa, Severe acute respiratory syndrome coronavirus 2
  REGION 1..10: note = Table B: HLA-DQA1*03:02-B1*03:03L HLA-DQA1*05:01-B1*03:01L HLA-DRB1*01:03L HLA-DQA1*01:02-B1*06:02L HLA-DRB1*14:02L HLA-DQA1*05:05-B1*03:19L HLA-DQA1*05:01-B1*02:01L HLA-DPA1*01:03-B1*04:01L HLA-DPA1*02:01-B1*13:01L
  REGION 1..10: note = CONT. FROM ABOVE: HLA-DPA1*03:01-B1*105:01L HLA-DQA1*03:01-B1*03 :02L HLA-DPA1*01:02-B1*04:01L HLA-DRB1*16:01L HLA-DQA1*01:03-B1* 06:01L HLA-DQA1*02:01-B1*03:03L HLA-DRB1*15:03L
QTFFKLVNKF

SEQ ID NO: 8363 - protein, 10 aa, Severe acute respiratory syndrome coronavirus 2
  REGION 1..10: note = Table B: HLA-DQA1*03:02-B1*03:03L HLA-DRB1*04:03L HLA-DQA1*03:01-B1*03:02L HLA-DQA1*01:03-B1*06:01L HLA-DQA1*02:01-B1*03:03L
ADSIIIGGAK

SEQ ID NO: 8364 - protein, 10 aa, Severe acute respiratory syndrome coronavirus 2
  REGION 1..10: note = Table B: HLA-DQA1*03:02-B1*03:03L HLA-DQA1*05:01-B1*03:01L HLA-DRB1*13:03L HLA-DQA1*01:02-B1*06:02L HLA-DRB1*01:02L HLA-DPA1*03:01-B1*04:02L HLA-DRB1*14:01L HLA-DRB1*08:01L HLA-DQA1*05:05-B1*03:19L HLA-DQA1*05:01-B1*02:01L
  REGION 1..10: note = CONT. FROM ABOVE: HLA-DPA1*01:03-B1*04:01L HLA-DRB1*12:01L HLA-D PA1*03:01-B1*105:01L HLA-DQA1*03:01-B1*03:02L HLA-DPA1*01:02-B1* 04:01L HLA-DQA1*01:03-B1*06:01L HLA-DQA1*02:01-B1*03:03L HLA-DRB 1*15:03L
DSIIIGGAKL

SEQ ID NO: 8365 - protein, 11 aa, Severe acute respiratory syndrome coronavirus 2
  REGION 1..11: note = Table B: HLA-DQA1*03:02-B1*03:03L HLA-DQA1*01:02-B1*06:02L HLA-DPA1*03:01-B1*04:02L HLA-DQA1*05:05-B1*03:19L HLA-DQA1*05:01-B1*02:01L HLA-DPA1*03:01-B1*105:01L HLA-DQA1*05:05-B1*03:01L
IIIGGAKLKAL

SEQ ID NO: 8366 - protein, 11 aa, Severe acute respiratory syndrome coronavirus 2
  REGION 1..11: note = Table B: HLA-DQA1*03:02-B1*03:03L HLA-DRB1*04:03L HLA-DRB1*01:03L HLA-DRB1*04:02L HLA-DRB1*01:02L HLA-DQA1*05:05-B1*03:19L HLA-DPA1*01:03-B1*04:02L HLA-DRB1*12:01L HLA-DQA1*03:01-B1*03:02L HLA-DRB1*14:17L
  REGION 1..11: note = CONT. FROM ABOVE: HLA-DPA1*01:02-B1*04:01L HLA-DRB1*16:01L HLA-D RB1*04:08L HLA-DRB1*15:03L
IIGGAKLKALN

SEQ ID NO: 8367 - protein, 10 aa, Severe acute respiratory syndrome coronavirus 2
  REGION 1..10: note = Table B: HLA-DQA1*03:02-B1*03:03L HLA-DQA1*03:01-B1*03:02L HLA-DQA1*02:01-B1*03:03L
GETFVTHSKG

SEQ ID NO: 8368 - protein, 10 aa, Severe acute respiratory syndrome coronavirus 2
  REGION 1..10: note = Table B: HLA-DQA1*03:02-B1*03:03L HLA-DQA1*05:01-B1*03:01L HLA-DRB1*13:03L HLA-DQA1*01:02-B1*06:02L HLA-DRB1*01:02L HLA-DPA1*01:03-B1*03:01L HLA-DRB1*14:01L HLA-DQA1*05:01-B1*02:01L HLA-DPA1*01:03-B1*04:01L
  REGION 1..10: note = CONT. FROM ABOVE: HLA-DRB1*12:01L HLA-DPA1*03:01-B1*105:01L HLA- DQA1*03:01-B1*03:02L HLA-DQA1*05:05-B1*03:01L HLA-DPA1*01:02-B1* 04:01L HLA-DQA1*01:03-B1*06:01L HLA-DQA1*02:01-B1*03:03L HLA-DRB 1*15:03L
ETFVTHSKGL

SEQ ID NO: 8369 - protein, 10 aa, Severe acute respiratory syndrome coronavirus 2
  REGION 1..10: note = Table B: HLA-DQA1*03:02-B1*03:03L HLA-DQA1*05:05-B1*03:19L HLA-DRB1*09:01L HLA-DQA1*03:01-B1*03:02L
REETGLLMPL

SEQ ID NO: 8370 - protein, 10 aa, Severe acute respiratory syndrome coronavirus 2
  REGION 1..10: note = Table B: HLA-DQA1*03:02-B1*03:03L HLA-DQA1*05:01-B1*03:01L HLA-DRB1*04:03L HLA-DRB1*13:03L HLA-DRB1*01:03L HLA-DRB1*04:02L HLA-DQA1*01:02-B1*06:02M HLA-DRB1*01:02L HLA-DRB4*03:01NL HLA-DRB1*14:02L HLA-DQA1*01:01-B1*05:01L HLA-DRB1*08:01L
  REGION 1..10: note = CONT. FROM ABOVE: HLA-DQA1*05:05-B1*03:19L HLA-DRB4*02:01NL HLA- DQA1*05:01-B1*02:01L HLA-DPA1*01:03-B1*04:02L HLA-DRB1*12:01L HL A-DPA1*03:01-B1*105:01L HLA-DQA1*03:01-B1*03:02L HLA-DQA1*05:05- B1*03:01M HLA-DPA1*01:02-B1*04:01L HLA-DRB1*16:01L
  REGION 1..10: note = CONT. FROM ABOVE: HLA-DQA1*01:03-B1*06:01M HLA-DRB1*04:08L HLA-D QA1*02:01-B1*03:03M
EETGLLMPLK

SEQ ID NO: 8371 - protein, 12 aa, Severe acute respiratory syndrome coronavirus 2
  REGION 1..12: note = Table B: HLA-DQA1*03:02-B1*03:03L HLA-DRB1*14:04L HLA-DRB1*13:02L HLA-DRB1*08:04L HLA-DRB1*08:77L HLA-DRB3*02:01L HLA-DPA1*01:03-B1*03:01L HLA-DPA1*03:01-B1*04:02L HLA-DRB1*11:03L HLA-DRB1*11:04L HLA-DQA1*01:01-B1*05:01L
  REGION 1..12: note = CONT. FROM ABOVE: HLA-DQA1*01-B1*05L HLA-DQA1*05:05-B1*03:19L HL A-DQA1*05:01-B1*02:01L HLA-DRB1*09:01L HLA-DRB1*12:02L HLA-DPA1* 02:01-B1*13:01L HLA-DPA1*03:01-B1*105:01L HLA-DQA1*05:05-B1*03:0 1L HLA-DRB1*07:01L HLA-DRB1*10:01L HLA-DRB1*08:03L
TGLLMPLKAPKE

SEQ ID NO: 8372 - protein, 11 aa, Severe acute respiratory syndrome coronavirus 2
  REGION 1..11: note = Table B: HLA-DQA1*03:02-B1*03:03L
KEIIFLEGETL

SEQ ID NO: 8373 - protein, 10 aa, Severe acute respiratory syndrome coronavirus 2
  REGION 1..10: note = Table B: HLA-DQA1*03:02-B1*03:03L HLA-DRB1*11:02L HLA-DQA1*05:05-B1*03:19M HLA-DRB1*09:01L HLA-DQA1*03:01-B1*03:02L HLA-DPA1*01:03-B1*104:01L
LEGETLPTEV

SEQ ID NO: 8374 - protein, 10 aa, Severe acute respiratory syndrome coronavirus 2
  REGION 1..10: note = Table B: HLA-DQA1*03:02-B1*03:03L HLA-DQA1*03:01-B1*03:02L
EGETLPTEVL

SEQ ID NO: 8375 - protein, 13 aa, Severe acute respiratory syndrome coronavirus 2
  REGION 1..13: note = Table B: HLA-DQA1*03:02-B1*03:03L HLA-DQA1*01:03-B1*06:01L
ETLPTEVLTEEVV

SEQ ID NO: 8376 - protein, 10 aa, Severe acute respiratory syndrome coronavirus 2
  REGION 1..10: note = Table B: HLA-DQA1*03:02-B1*03:03M HLA-DQA1*05:05-B1*03:19L HLA-DRB1*09:01L HLA-DQA1*03:01-B1*03:02L
TEVLTEEVVL

SEQ ID NO: 8377 - protein, 10 aa, Severe acute respiratory syndrome coronavirus 2
  REGION 1..10: note = Table B: HLA-DQA1*03:02-B1*03:03L HLA-DQA1*03:01-B1*03:02L
TEEVVLKTGD

SEQ ID NO: 8378 - protein, 10 aa, Severe acute respiratory syndrome coronavirus 2
  REGION 1..10: note = Table B: HLA-DQA1*03:02-B1*03:03L HLA-DQA1*05:05-B1*03:19L HLA-DQA1*03:01-B1*03:02L
EEVVLKTGDL

SEQ ID NO: 8379 - protein, 11 aa, Severe acute respiratory syndrome coronavirus 2
  REGION 1..11: note = Table B: HLA-DQA1*03:02-B1*03:03L HLA-DQA1*05:01-B1*03:01L HLA-DQA1*05:05-B1*03:19L HLA-DQA1*05:01-B1*02:01L HLA-DQA1*03:01-B1*03:02L HLA-DQA1*05:05-B1*03:01L HLA-DRB1*16:01L
VLKTGDLQPLE

SEQ ID NO: 8380 - protein, 13 aa, Severe acute respiratory syndrome coronavirus 2
  REGION 1..13: note = Table B: HLA-DQA1*03:02-B1*03:03L
LKTGDLQPLEQPT

SEQ ID NO: 8381 - protein, 12 aa, Severe acute respiratory syndrome coronavirus 2
  REGION 1..12: note = Table B: HLA-DQA1*03:02-B1*03:03L HLA-DRB1*13:03L HLA-DRB1*14:01L HLA-DRB1*12:01L HLA-DRB1*12:02L HLA-DRB1*14:54L HLA-DQA1*02:01-B1*03:03L
TGDLQPLEQPTS

SEQ ID NO: 8382 - protein, 12 aa, Severe acute respiratory syndrome coronavirus 2
  REGION 1..12: note = Table B: HLA-DQA1*03:02-B1*03:03L HLA-DRB1*13:03L HLA-DRB1*01:03L HLA-DRB1*12:01L HLA-DRB1*12:02L HLA-DRB1*14:54L HLA-DQA1*05:05-B1*03:01L HLA-DRB1*10:01L HLA-DRB1*04:08L HLA-DQA1*02:01-B1*03:03L
GDLQPLEQPTSE

SEQ ID NO: 8383 - protein, 12 aa, Severe acute respiratory syndrome coronavirus 2
  REGION 1..12: note = Table B: HLA-DQA1*03:02-B1*03:03L HLA-DRB1*04:02L HLA-DQA1*05:01-B1*02:01L HLA-DRB1*04:10L HLA-DQA1*02:01-B1*03:03L
DLQPLEQPTSEA

SEQ ID NO: 8384 - protein, 12 aa, Severe acute respiratory syndrome coronavirus 2
  REGION 1..12: note = Table B: HLA-DQA1*03:02-B1*03:03L HLA-DQA1*05:01-B1*02:01L HLA-DQA1*03:01-B1*03:02L HLA-DQA1*02:01-B1*03:03L
QPLEQPTSEAVE

SEQ ID NO: 8385 - protein, 12 aa, Severe acute respiratory syndrome coronavirus 2
  REGION 1..12: note = Table B: HLA-DQA1*03:02-B1*03:03L HLA-DQA1*05:01-B1*02:01L HLA-DQA1*03:01-B1*03:02L
EQPTSEAVEAPL

SEQ ID NO: 8386 - protein, 12 aa, Severe acute respiratory syndrome coronavirus 2
  REGION 1..12: note = Table B: HLA-DQA1*03:02-B1*03:03L HLA-DQA1*05:01-B1*02:01L HLA-DQA1*03:01-B1*03:02L HLA-DQA1*01:03-B1*06:01L HLA-DQA1*02:01-B1*03:03L
PTSEAVEAPLVG

SEQ ID NO: 8387 - protein, 10 aa, Severe acute respiratory syndrome coronavirus 2
  REGION 1..10: note = Table B: HLA-DQA1*03:02-B1*03:03L HLA-DQA1*05:05-B1*03:19L HLA-DQA1*03:01-B1*03:02L HLA-DPA1*01:03-B1*104:01L
VEAPLVGTPV

SEQ ID NO: 8388 - protein, 12 aa, Severe acute respiratory syndrome coronavirus 2
  REGION 1..12: note = Table B: HLA-DQA1*03:02-B1*03:03L HLA-DQA1*05:01-B1*03:01L HLA-DRB1*04:03L HLA-DRB1*01:03L HLA-DRB1*04:02L HLA-DRB1*04:05L HLA-DQA1*01:02-B1*06:02L HLA-DRB1*01:02L HLA-DPA1*01:03-B1*03:01L HLA-DPA1*03:01-B1*04:02L
  REGION 1..12: note = CONT. FROM ABOVE: HLA-DQA1*01-B1*05L HLA-DQA1*05:05-B1*03:19L HL A-DQA1*05:01-B1*02:01L HLA-DPA1*01:03-B1*04:01L HLA-DPA1*01:03-B 1*04:02L HLA-DRB1*12:01L HLA-DPA1*02:01-B1*13:01L HLA-DPA1*03:01 -B1*105:01L HLA-DQA1*03:01-B1*03:02L HLA-DPA1*01:03-B1*104:01L
  REGION 1..12: note = CONT. FROM ABOVE: HLA-DQA1*05:05-B1*03:01L HLA-DRB1*14:17L HLA-D PA1*01:02-B1*04:01L HLA-DRB1*16:01L HLA-DQA1*01:03-B1*06:01L HLA -DRB1*04:08L HLA-DQA1*02:01-B1*03:03L HLA-DRB1*15:03L
APLVGTPVCING

SEQ ID NO: 8389 - protein, 13 aa, Severe acute respiratory syndrome coronavirus 2
  REGION 1..13: note = Table B: HLA-DQA1*03:02-B1*03:03L HLA-DRB1*04:03L HLA-DRB1*01:02L HLA-DPA1*01:03-B1*03:01L HLA-DQA1*01-B1*05L HLA-DQA1*05:01-B1*02:01L HLA-DPA1*01:03-B1*04:01L HLA-DRB1*12:01L HLA-DRB1*16:01L HLA-DRB1*15:03L
INGLMLLEIKDTE

SEQ ID NO: 8390 - protein, 10 aa, Severe acute respiratory syndrome coronavirus 2
  REGION 1..10: note = Table B: HLA-DQA1*03:02-B1*03:03L HLA-DQA1*05:01-B1*03:01L HLA-DRB1*04:03L HLA-DRB1*13:02L HLA-DRB1*13:03L HLA-DRB1*01:03L HLA-DQA1*01:02-B1*06:02L HLA-DRB1*08:77L HLA-DPA1*01:03-B1*03:01M HLA-DPA1*03:01-B1*04:02L
  REGION 1..10: note = CONT. FROM ABOVE: HLA-DRB1*03:01L HLA-DRB1*11:02L HLA-DRB1*14:02 L HLA-DQA1*01-B1*05L HLA-DQA1*05:05-B1*03:19M HLA-DQA1*05:01-B1* 02:01M HLA-DRB4*01:01L HLA-DPA1*01:03-B1*04:01L HLA-DQA1*05:05-B 1*03:116L HLA-DPA1*01:03-B1*04:02L HLA-DRB1*12:01L
  REGION 1..10: note = CONT. FROM ABOVE: HLA-DPA1*03:01-B1*105:01L HLA-DQA1*03:01-B1*03 :02L HLA-DPA1*01:03-B1*104:01M HLA-DPA1*01:02-B1*04:01L HLA-DRB1 *10:01L HLA-DRB1*16:01M HLA-DQA1*01:03-B1*06:01L HLA-DRB1*08:02L HLA-DQA1*02:01-B1*03:03L HLA-DRB1*15:03L
LLEIKDTEKY

SEQ ID NO: 8391 - protein, 15 aa, Severe acute respiratory syndrome coronavirus 2
  REGION 1..15: note = Table B: HLA-DQA1*03:02-B1*03:03L HLA-DRB1*04:03L HLA-DRB1*13:03L HLA-DRB1*04:02L HLA-DRB1*01:01L HLA-DRB3*02:01L HLA-DRB1*03:01L HLA-DRB1*11:02L HLA-DRB1*11:03L HLA-DRB1*14:02L HLA-DQA1*01:01-B1*05:01L HLA-DQA1*01-B1*05L
  REGION 1..15: note = CONT. FROM ABOVE: HLA-DQA1*05:05-B1*03:19L HLA-DRB1*08:02L HLA-D RB1*08:03L
LEIKDTEKYCALAPN

SEQ ID NO: 8392 - protein, 12 aa, Severe acute respiratory syndrome coronavirus 2
  REGION 1..12: note = Table B: HLA-DQA1*03:02-B1*03:03L HLA-DQA1*05:01-B1*03:01L HLA-DQA1*01:02-B1*06:02L HLA-DPA1*01:03-B1*03:01L HLA-DPA1*03:01-B1*04:02L HLA-DQA1*05:05-B1*03:19L HLA-DPA1*01:03-B1*04:02L HLA-DQA1*05:05-B1*03:01L
  REGION 1..12: note = CONT. FROM ABOVE: HLA-DQA1*02:01-B1*03:03L
DTEKYCALAPNM

SEQ ID NO: 8393 - protein, 12 aa, Severe acute respiratory syndrome coronavirus 2
  REGION 1..12: note = Table B: HLA-DQA1*03:02-B1*03:03L HLA-DQA1*05:01-B1*03:01L HLA-DRB1*01:02L HLA-DPA1*01:03-B1*03:01L HLA-DPA1*03:01-B1*04:02L HLA-DQA1*05:05-B1*03:19L HLA-DQA1*05:01-B1*02:01L HLA-DRB1*12:01L
  REGION 1..12: note = CONT. FROM ABOVE: HLA-DPA1*02:01-B1*13:01L HLA-DPA1*03:01-B1*105 :01L HLA-DQA1*03:01-B1*03:02L HLA-DPA1*01:03-B1*104:01L HLA-DQA1 *05:05-B1*03:01L HLA-DRB1*16:01L HLA-DQA1*02:01-B1*03:03L HLA-DR B1*15:03L
TEKYCALAPNMM

SEQ ID NO: 8394 - protein, 12 aa, Severe acute respiratory syndrome coronavirus 2
  REGION 1..12: note = Table B: HLA-DQA1*03:02-B1*03:03L HLA-DRB1*04:03L HLA-DRB1*01:03L HLA-DRB1*04:02L HLA-DRB1*04:05L HLA-DRB4*03:01NL HLA-DPA1*01:03-B1*03:01L HLA-DRB1*14:01L HLA-DQA1*01:01-B1*05:01L HLA-DQA1*01-B1*05L
  REGION 1..12: note = CONT. FROM ABOVE: HLA-DQA1*05:05-B1*03:19L HLA-DRB1*04:10L HLA-D RB1*12:01L HLA-DRB1*12:02L HLA-DQA1*03:01-B1*03:02L HLA-DRB1*14: 54L HLA-DQA1*05:05-B1*03:01L HLA-DRB1*14:17L HLA-DRB1*16:01L HLA -DRB1*04:08L
APNMMVTNNTFT

SEQ ID NO: 8395 - protein, 10 aa, Severe acute respiratory syndrome coronavirus 2
  REGION 1..10: note = Table B: HLA-DQA1*03:02-B1*03:03L HLA-DQA1*03:01-B1*03:02L HLA-DQA1*02:01-B1*03:03L HLA-DRB1*15:03L
MMVTNNTFTL

SEQ ID NO: 8396 - protein, 12 aa, Severe acute respiratory syndrome coronavirus 2
  REGION 1..12: note = Table B: HLA-DQA1*03:02-B1*03:03L HLA-DQA1*05:01-B1*03:01L HLA-DRB1*13:02L HLA-DQA1*01:02-B1*06:02L HLA-DRB1*01:02L HLA-DRB1*08:04L HLA-DRB1*08:77L HLA-DRB1*14:01L HLA-DRB1*11:03L HLA-DRB1*11:04L HLA-DRB1*14:02L HLA-DQA1*01:01-B1*05:01L
  REGION 1..12: note = CONT. FROM ABOVE: HLA-DRB1*11:01L HLA-DQA1*05:05-B1*03:19L HLA-D QA1*05:01-B1*02:01L HLA-DRB1*04:10L HLA-DRB1*12:01L HLA-DRB1*12: 02L HLA-DPA1*03:01-B1*105:01L HLA-DQA1*05:05-B1*03:01L HLA-DRB1* 10:01L HLA-DQA1*01:03-B1*06:01L HLA-DRB1*04:08L HLA-DRB1*08:03L
NNTFTLKGGAPT

SEQ ID NO: 8397 - protein, 10 aa, Severe acute respiratory syndrome coronavirus 2
  REGION 1..10: note = Table B: HLA-DQA1*03:02-B1*03:03L HLA-DQA1*03:01-B1*03:02L HLA-DRB1*16:01L HLA-DQA1*02:01-B1*03:03L
TLKGGAPTKV

SEQ ID NO: 8398 - protein, 12 aa, Severe acute respiratory syndrome coronavirus 2
  REGION 1..12: note = Table B: HLA-DQA1*03:02-B1*03:03L HLA-DQA1*05:01-B1*03:01L HLA-DQA1*01:02-B1*06:02L HLA-DQA1*05:05-B1*03:19L HLA-DQA1*05:05-B1*03:01L HLA-DQA1*01:03-B1*06:01L HLA-DQA1*02:01-B1*03:03L
GGAPTKVTFGDD

SEQ ID NO: 8399 - protein, 12 aa, Severe acute respiratory syndrome coronavirus 2
  REGION 1..12: note = Table B: HLA-DQA1*03:02-B1*03:03L
GAPTKVTFGDDT

SEQ ID NO: 8400 - protein, 14 aa, Severe acute respiratory syndrome coronavirus 2
  REGION 1..14: note = Table B: HLA-DQA1*03:02-B1*03:03L HLA-DQA1*05:01-B1*03:01L HLA-DRB1*04:03L HLA-DRB1*13:02L HLA-DRB1*13:03L HLA-DRB1*01:03L HLA-DRB1*04:02L HLA-DRB1*04:04L HLA-DRB1*04:05L HLA-DQA1*01:02-B1*06:02L HLA-DRB1*01:02L HLA-DRB4*03:01NL
  REGION 1..14: note = CONT. FROM ABOVE: HLA-DRB1*08:04L HLA-DRB3*02:01L HLA-DPA1*01:03 -B1*03:01L HLA-DPA1*03:01-B1*04:02L HLA-DRB1*14:01L HLA-DRB1*14: 02L HLA-DQA1*01:01-B1*05:01L HLA-DRB1*08:01L HLA-DQA1*05:05-B1*0 3:19L HLA-DPA1*01:03-B1*04:01L HLA-DRB1*04:10L
  REGION 1..14: note = CONT. FROM ABOVE: HLA-DPA1*01:03-B1*04:02L HLA-DRB1*12:01L HLA-D RB1*12:02L HLA-DRB3*01:01L HLA-DPA1*02:01-B1*13:01L HLA-DPA1*03: 01-B1*105:01L HLA-DRB1*14:54L HLA-DPA1*01:03-B1*104:01L HLA-DQA1 *05:05-B1*03:01L HLA-DRB1*14:17L HLA-DPA1*01:02-B1*04:01L
  REGION 1..14: note = CONT. FROM ABOVE: HLA-DRB1*07:01L HLA-DRB1*16:01L HLA-DQA1*01:03 -B1*06:01L HLA-DRB1*04:08L HLA-DRB1*08:03L HLA-DRB1*15:03L
APTKVTFGDDTVIE

SEQ ID NO: 8401 - protein, 11 aa, Severe acute respiratory syndrome coronavirus 2
  REGION 1..11: note = Table B: HLA-DQA1*03:02-B1*03:03L
VTFGDDTVIEV

SEQ ID NO: 8402 - protein, 11 aa, Severe acute respiratory syndrome coronavirus 2
  REGION 1..11: note = Table B: HLA-DQA1*03:02-B1*03:03L HLA-DRB1*04:03L HLA-DQA1*01:01-B1*05:01L
DDTVIEVQGYK

SEQ ID NO: 8403 - protein, 11 aa, Severe acute respiratory syndrome coronavirus 2
  REGION 1..11: note = Table B: HLA-DQA1*03:02-B1*03:03L HLA-DQA1*05:01-B1*02:01L
DTVIEVQGYKS

SEQ ID NO: 8404 - protein, 11 aa, Severe acute respiratory syndrome coronavirus 2
  REGION 1..11: note = Table B: HLA-DQA1*03:02-B1*03:03L HLA-DQA1*05:05-B1*03:19L HLA-DPA1*01:03-B1*104:01L HLA-DRB1*15:03L
TVIEVQGYKSV

SEQ ID NO: 8405 - protein, 10 aa, Severe acute respiratory syndrome coronavirus 2
  REGION 1..10: note = Table B: HLA-DQA1*03:02-B1*03:03L HLA-DRB1*04:03L HLA-DQA1*01-B1*05L HLA-DQA1*03:01-B1*03:02L HLA-DPA1*01:02-B1*04:01L HLA-DQA1*02:01-B1*03:03L
IEVQGYKSVN

SEQ ID NO: 8406 - protein, 10 aa, Severe acute respiratory syndrome coronavirus 2
  REGION 1..10: note = Table B: HLA-DQA1*03:02-B1*03:03L HLA-DQA1*01:02-B1*06:02L HLA-DRB1*01:02L HLA-DQA1*05:05-B1*03:19L HLA-DPA1*03:01-B1*105:01L HLA-DPA1*01:03-B1*104:01L HLA-DRB1*15:03L
EVQGYKSVNI

SEQ ID NO: 8407 - protein, 12 aa, Severe acute respiratory syndrome coronavirus 2
  REGION 1..12: note = Table B: HLA-DQA1*03:02-B1*03:03L HLA-DQA1*05:01-B1*03:01L HLA-DRB1*13:02L HLA-DRB1*01:02L HLA-DRB3*02:01L HLA-DPA1*01:03-B1*03:01L HLA-DPA1*03:01-B1*04:02L HLA-DRB1*14:01L HLA-DRB1*08:01L HLA-DQA1*05:05-B1*03:19L
  REGION 1..12: note = CONT. FROM ABOVE: HLA-DQA1*05:01-B1*02:01L HLA-DRB1*12:01L HLA-D QA1*05:05-B1*03:01L HLA-DRB1*14:17L HLA-DRB1*04:08L HLA-DRB1*15: 01L
VQGYKSVNITFE

SEQ ID NO: 8408 - protein, 10 aa, Severe acute respiratory syndrome coronavirus 2
  REGION 1..10: note = Table B: HLA-DQA1*03:02-B1*03:03L HLA-DRB1*04:03L HLA-DPA1*03:01-B1*04:02L HLA-DQA1*01-B1*05L HLA-DQA1*05:01-B1*02:01L HLA-DPA1*03:01-B1*105:01L HLA-DQA1*03:01-B1*03:02L HLA-DPA1*01:02-B1*04:01L
  REGION 1..10: note = CONT. FROM ABOVE: HLA-DRB1*16:01L HLA-DQA1*01:03-B1*06:01L HLA-D QA1*02:01-B1*03:03L HLA-DRB1*15:03L
ITFELDERID

SEQ ID NO: 8409 - protein, 10 aa, Severe acute respiratory syndrome coronavirus 2
  REGION 1..10: note = Table B: HLA-DQA1*03:02-B1*03:03M HLA-DQA1*05:01-B1*03:01L HLA-DRB1*13:02L HLA-DRB1*13:03L HLA-DQA1*01:02-B1*06:02L HLA-DRB1*01:02L HLA-DRB1*08:77L HLA-DPA1*03:01-B1*04:02L HLA-DRB1*03:01L HLA-DRB1*14:01L HLA-DRB1*11:02M HLA-DRB1*14:02L
  REGION 1..10: note = CONT. FROM ABOVE: HLA-DRB1*11:01L HLA-DQA1*05:05-B1*03:19H HLA-D QA1*05:01-B1*02:01L HLA-DRB4*01:01L HLA-DPA1*01:03-B1*04:01L HLA -DQA1*05:05-B1*03:116L HLA-DRB1*09:01L HLA-DPA1*01:03-B1*04:02L HLA-DPA1*02:01-B1*13:01L HLA-DPA1*03:01-B1*105:01L
  REGION 1..10: note = CONT. FROM ABOVE: HLA-DQA1*03:01-B1*03:02M HLA-DPA1*01:03-B1*104 :01M HLA-DPA1*01:02-B1*04:01L HLA-DRB1*10:01L HLA-DRB1*16:01L HL A-DQA1*01:03-B1*06:01L HLA-DRB1*08:03L HLA-DQA1*02:01-B1*03:03L HLA-DRB1*15:03L
FELDERIDKV

SEQ ID NO: 8410 - protein, 12 aa, Severe acute respiratory syndrome coronavirus 2
  REGION 1..12: note = Table B: HLA-DQA1*03:02-B1*03:03L HLA-DQA1*05:01-B1*03:01L HLA-DRB1*04:03L HLA-DQA1*01:02-B1*06:02L HLA-DRB1*01:02L HLA-DQA1*01-B1*05L HLA-DQA1*05:05-B1*03:19L HLA-DRB1*12:01L HLA-DQA1*03:01-B1*03:02L HLA-DQA1*05:05-B1*03:01L
  REGION 1..12: note = CONT. FROM ABOVE: HLA-DRB1*16:01L HLA-DQA1*01:03-B1*06:01L HLA-D RB1*15:03L
SAYTVELGTEVN

SEQ ID NO: 8411 - protein, 10 aa, Severe acute respiratory syndrome coronavirus 2
  REGION 1..10: note = Table B: HLA-DQA1*03:02-B1*03:03L HLA-DQA1*05:01-B1*03:01M HLA-DRB1*13:03L HLA-DRB1*01:03L HLA-DQA1*01:02-B1*06:02L HLA-DRB4*03:01NL HLA-DRB1*08:77M HLA-DPA1*01:03-B1*03:01L HLA-DPA1*03:01-B1*04:02M HLA-DRB1*03:01L HLA-DRB1*14:01L
  REGION 1..10: note = CONT. FROM ABOVE: HLA-DRB1*11:02L HLA-DRB1*14:02L HLA-DQA1*01-B1 *05L HLA-DQA1*05:05-B1*03:19L HLA-DQA1*05:01-B1*02:01L HLA-DRB4* 01:01M HLA-DPA1*01:03-B1*04:01M HLA-DQA1*05:05-B1*03:116L HLA-DR B1*09:01L HLA-DPA1*01:03-B1*04:02L HLA-DRB1*12:01L
  REGION 1..10: note = CONT. FROM ABOVE: HLA-DPA1*02:01-B1*13:01L HLA-DQA1*03:01-B1*03: 02L HLA-DPA1*01:03-B1*104:01L HLA-DPA1*01:02-B1*04:01L HLA-DRB1* 10:01L HLA-DRB1*16:01L HLA-DQA1*02:01-B1*03:03L HLA-DRB1*15:03M
VELGTEVNEF

SEQ ID NO: 8412 - protein, 10 aa, Severe acute respiratory syndrome coronavirus 2
  REGION 1..10: note = Table B: HLA-DQA1*03:02-B1*03:03L HLA-DQA1*05:05-B1*03:19M HLA-DPA1*01:03-B1*104:01L
TEVNEFACVV

SEQ ID NO: 8413 - protein, 12 aa, Severe acute respiratory syndrome coronavirus 2
  REGION 1..12: note = Table B: HLA-DQA1*03:02-B1*03:03L HLA-DQA1*05:01-B1*03:01L HLA-DRB1*01:03L HLA-DRB1*04:05L HLA-DRB1*01:02L HLA-DPA1*01:03-B1*03:01L HLA-DQA1*05:05-B1*03:19L HLA-DQA1*05:01-B1*02:01L HLA-DRB1*12:01L
  REGION 1..12: note = CONT. FROM ABOVE: HLA-DPA1*03:01-B1*105:01L HLA-DQA1*03:01-B1*03 :02L HLA-DQA1*05:05-B1*03:01L HLA-DRB1*16:01L HLA-DRB1*04:08L HL A-DRB1*15:03L
EFACVVADAVIK

SEQ ID NO: 8414 - protein, 10 aa, Severe acute respiratory syndrome coronavirus 2
  REGION 1..10: note = Table B: HLA-DQA1*03:02-B1*03:03M HLA-DQA1*05:01-B1*03:01M HLA-DRB1*04:01L HLA-DRB1*04:03L HLA-DRB1*13:02L HLA-DRB1*13:03L HLA-DRB1*01:03L HLA-DRB1*04:02L HLA-DRB1*04:04L HLA-DRB1*04:05L HLA-DQA1*01:02-B1*06:02M HLA-DRB1*01:01L HLA-DRB1*01:02L
  REGION 1..10: note = CONT. FROM ABOVE: HLA-DRB4*03:01NL HLA-DRB1*08:77L HLA-DRB3*02:0 1L HLA-DPA1*01:03-B1*03:01L HLA-DPA1*03:01-B1*04:02M HLA-DRB1*03 :01L HLA-DRB1*14:01L HLA-DRB1*11:02L HLA-DRB1*11:04L HLA-DRB1*14 :02M HLA-DRB1*08:01L HLA-DRB1*11:01L HLA-DRB5*01:01L
  REGION 1..10: note = CONT. FROM ABOVE: HLA-DQA1*01-B1*05L HLA-DQA1*05:05-B1*03:19L HL A-DQA1*05:01-B1*02:01M HLA-DRB4*01:01L HLA-DPA1*01:03-B1*04:01L HLA-DQA1*05:05-B1*03:116M HLA-DRB1*09:01L HLA-DPA1*01:03-B1*04:0 2M HLA-DRB1*12:01L HLA-DPA1*02:01-B1*13:01L
  REGION 1..10: note = CONT. FROM ABOVE: HLA-DPA1*03:01-B1*105:01M HLA-DQA1*03:01-B1*03 :02M HLA-DPA1*01:03-B1*104:01L HLA-DQA1*05:05-B1*03:01L HLA-DPA1 *01:02-B1*04:01L HLA-DRB1*07:01L HLA-DRB1*10:01L HLA-DRB1*16:01L HLA-DQA1*01:03-B1*06:01L HLA-DRB1*08:02L HLA-DRB1*08:03L
  REGION 1..10: note = CONT. FROM ABOVE: HLA-DQA1*02:01-B1*03:03M HLA-DRB1*15:03M
VVADAVIKTL

SEQ ID NO: 8415 - protein, 11 aa, Severe acute respiratory syndrome coronavirus 2
  REGION 1..11: note = Table B: HLA-DQA1*03:02-B1*03:03L HLA-DRB1*04:05L HLA-DQA1*01:02-B1*06:02L HLA-DRB4*03:01NL HLA-DQA1*05:01-B1*02:01L HLA-DRB1*04:10L HLA-DRB1*14:54L
DAVIKTLQPVS

SEQ ID NO: 8416 - protein, 10 aa, Severe acute respiratory syndrome coronavirus 2
  REGION 1..10: note = Table B: HLA-DQA1*03:02-B1*03:03L HLA-DQA1*05:01-B1*03:01L HLA-DRB1*04:03L HLA-DRB1*13:02L HLA-DRB1*13:03L HLA-DRB1*01:03L HLA-DRB1*04:02L HLA-DRB1*04:04L HLA-DRB1*04:05L HLA-DQA1*01:02-B1*06:02L HLA-DRB1*01:02L HLA-DRB4*03:01NL
  REGION 1..10: note = CONT. FROM ABOVE: HLA-DRB1*14:01L HLA-DQA1*01-B1*05L HLA-DQA1*05 :01-B1*02:01L HLA-DRB1*04:10L HLA-DRB1*12:01L HLA-DRB1*12:02L HL A-DPA1*03:01-B1*105:01L HLA-DQA1*03:01-B1*03:02L HLA-DRB1*14:54L HLA-DQA1*05:05-B1*03:01L HLA-DRB1*14:17L
  REGION 1..10: note = CONT. FROM ABOVE: HLA-DPA1*01:02-B1*04:01L HLA-DRB1*16:01L HLA-D QA1*01:03-B1*06:01L HLA-DRB1*04:08L HLA-DQA1*02:01-B1*03:03L HLA -DRB1*15:03L
VIKTLQPVSE

SEQ ID NO: 8417 - protein, 10 aa, Severe acute respiratory syndrome coronavirus 2
  REGION 1..10: note = Table B: HLA-DQA1*03:02-B1*03:03L HLA-DQA1*01-B1*05L HLA-DQA1*03:01-B1*03:02L
IKTLQPVSEL

SEQ ID NO: 8418 - protein, 10 aa, Severe acute respiratory syndrome coronavirus 2
  REGION 1..10: note = Table B: HLA-DQA1*03:02-B1*03:03L HLA-DQA1*03:01-B1*03:02L
KTLQPVSELL

SEQ ID NO: 8419 - protein, 12 aa, Severe acute respiratory syndrome coronavirus 2
  REGION 1..12: note = Table B: HLA-DQA1*03:02-B1*03:03L HLA-DRB1*04:02L HLA-DRB1*04:05L HLA-DQA1*01:02-B1*06:02L HLA-DRB4*03:01NL HLA-DRB1*04:10L HLA-DRB1*12:01L HLA-DPA1*03:01-B1*105:01L HLA-DRB1*14:54L HLA-DRB1*14:17L HLA-DRB1*16:01L HLA-DRB1*15:03L
LQPVSELLTPLG

SEQ ID NO: 8420 - protein, 10 aa, Severe acute respiratory syndrome coronavirus 2
  REGION 1..10: note = Table B: HLA-DQA1*03:02-B1*03:03L HLA-DPA1*03:01-B1*105:01L
ELLTPLGIDL

SEQ ID NO: 8421 - protein, 10 aa, Severe acute respiratory syndrome coronavirus 2
  REGION 1..10: note = Table B: HLA-DQA1*03:02-B1*03:03L HLA-DQA1*05:05-B1*03:19L HLA-DQA1*03:01-B1*03:02L
DEWSMATYYL

SEQ ID NO: 8422 - protein, 12 aa, Severe acute respiratory syndrome coronavirus 2
  REGION 1..12: note = Table B: HLA-DQA1*03:02-B1*03:03L HLA-DRB1*04:03L HLA-DPA1*03:01-B1*04:02L HLA-DRB1*14:02L HLA-DQA1*01-B1*05L HLA-DQA1*05:01-B1*02:01L HLA-DRB1*12:01L HLA-DPA1*03:01-B1*105:01L HLA-DQA1*03:01-B1*03:02L
  REGION 1..12: note = CONT. FROM ABOVE: HLA-DRB1*16:01L
ATYYLFDESGEF

SEQ ID NO: 8423 - protein, 10 aa, Severe acute respiratory syndrome coronavirus 2
  REGION 1..10: note = Table B: HLA-DQA1*03:02-B1*03:03L HLA-DQA1*05:01-B1*03:01L HLA-DRB1*04:01L HLA-DRB1*04:03L HLA-DRB1*13:02L HLA-DRB1*13:03L HLA-DRB1*01:03L HLA-DRB1*04:02L HLA-DRB1*04:04L HLA-DRB1*04:05L HLA-DQA1*01:02-B1*06:02L HLA-DRB1*01:01L HLA-DRB1*01:02L
  REGION 1..10: note = CONT. FROM ABOVE: HLA-DRB4*03:01NL HLA-DRB1*08:04L HLA-DRB1*08:7 7L HLA-DRB3*02:01L HLA-DPA1*01:03-B1*03:01L HLA-DPA1*03:01-B1*04 :02L HLA-DRB1*03:01L HLA-DRB1*14:01L HLA-DRB1*11:03L HLA-DRB1*11 :04L HLA-DRB1*14:02M HLA-DQA1*01:01-B1*05:01L HLA-DRB1*08:01L
  REGION 1..10: note = CONT. FROM ABOVE: HLA-DRB1*11:01L HLA-DRB5*01:01L HLA-DQA1*01-B1 *05L HLA-DQA1*05:05-B1*03:19L HLA-DQA1*05:01-B1*02:01L HLA-DRB1* 13:01L HLA-DRB4*01:01L HLA-DPA1*01:03-B1*04:01L HLA-DRB1*04:10L HLA-DRB1*09:01L HLA-DPA1*01:03-B1*04:02L HLA-DRB1*12:01L
  REGION 1..10: note = CONT. FROM ABOVE: HLA-DRB1*12:02L HLA-DRB3*01:01L HLA-DPA1*02:01 -B1*13:01L HLA-DPA1*03:01-B1*105:01L HLA-DQA1*03:01-B1*03:02L HL A-DRB1*14:54L HLA-DPA1*01:03-B1*104:01L HLA-DQA1*05:05-B1*03:01L HLA-DRB1*14:17L HLA-DPA1*01:02-B1*04:01L HLA-DRB1*07:01L
  REGION 1..10: note = CONT. FROM ABOVE: HLA-DRB1*10:01L HLA-DRB1*16:01L HLA-DQA1*01:03 -B1*06:01L HLA-DRB1*04:08L HLA-DRB1*08:02L HLA-DRB1*08:03L HLA -DQA1*02:01-B1*03:03L HLA-DRB1*15:03L
YLFDESGEFK

SEQ ID NO: 8424 - protein, 10 aa, Severe acute respiratory syndrome coronavirus 2
  REGION 1..10: note = Table B: HLA-DQA1*03:02-B1*03:03M HLA-DQA1*05:01-B1*03:01L HLA-DQA1*01:02-B1*06:02L HLA-DRB1*01:02L HLA-DPA1*03:01-B1*04:02L HLA-DRB1*14:01L HLA-DRB1*11:02L HLA-DRB1*14:02L HLA-DRB1*08:01L HLA-DQA1*01-B1*05L
  REGION 1..10: note = CONT. FROM ABOVE: HLA-DQA1*05:05-B1*03:19L HLA-DQA1*05:01-B1*02: 01L HLA-DRB4*01:01L HLA-DPA1*01:03-B1*04:01L HLA-DQA1*05:05-B1*0 3:116L HLA-DRB1*09:01L HLA-DPA1*01:03-B1*04:02L HLA-DRB1*12:01L HLA-DPA1*02:01-B1*13:01L HLA-DPA1*03:01-B1*105:01L
  REGION 1..10: note = CONT. FROM ABOVE: HLA-DQA1*03:01-B1*03:02M HLA-DPA1*01:03-B1*104 :01L HLA-DPA1*01:02-B1*04:01L HLA-DRB1*10:01L HLA-DRB1*16:01L HL A-DQA1*01:03-B1*06:01L HLA-DRB1*08:03L HLA-DQA1*02:01-B1*03:03L HLA-DRB1*15:03L
LFDESGEFKL

SEQ ID NO: 8425 - protein, 11 aa, Severe acute respiratory syndrome coronavirus 2
  REGION 1..11: note = Table B: HLA-DQA1*03:02-B1*03:03L HLA-DQA1*05:01-B1*03:01L HLA-DRB1*04:03L HLA-DRB1*01:03L HLA-DQA1*01:02-B1*06:02L HLA-DQA1*01:01-B1*05:01L HLA-DQA1*05:05-B1*03:19L HLA-DPA1*03:01-B1*105:01L HLA-DQA1*05:05-B1*03:01L
  REGION 1..11: note = CONT. FROM ABOVE: HLA-DRB1*16:01L
DESGEFKLASH

SEQ ID NO: 8426 - protein, 10 aa, Severe acute respiratory syndrome coronavirus 2
  REGION 1..10: note = Table B: HLA-DQA1*03:02-B1*03:03M HLA-DQA1*05:01-B1*03:01H HLA-DRB1*04:01L HLA-DRB1*13:02L HLA-DRB1*13:03L HLA-DRB1*01:03M HLA-DRB1*04:02L HLA-DRB1*04:05L HLA-DQA1*01:02-B1*06:02L HLA-DRB1*01:01L HLA-DRB4*03:01NM HLA-DRB1*08:77H
  REGION 1..10: note = CONT. FROM ABOVE: HLA-DPA1*01:03-B1*03:01M HLA-DPA1*03:01-B1*04: 02H HLA-DRB1*03:01M HLA-DRB1*14:01L HLA-DRB1*11:02L HLA-DRB1*11: 03L HLA-DRB1*11:04L HLA-DRB1*14:02L HLA-DRB1*11:01L HLA-DRB5*01: 01L HLA-DQA1*01-B1*05M HLA-DQA1*05:05-B1*03:19M
  REGION 1..10: note = CONT. FROM ABOVE: HLA-DQA1*05:01-B1*02:01M HLA-DRB4*01:01H HLA-D PA1*01:03-B1*04:01H HLA-DQA1*05:05-B1*03:116M HLA-DRB1*09:01L HL A-DPA1*01:03-B1*04:02M HLA-DRB1*12:01M HLA-DPA1*02:01-B1*13:01L HLA-DPA1*03:01-B1*105:01L HLA-DQA1*03:01-B1*03:02M
  REGION 1..10: note = CONT. FROM ABOVE: HLA-DRB1*14:54L HLA-DPA1*01:03-B1*104:01M HLA- DPA1*01:02-B1*04:01M HLA-DRB1*10:01M HLA-DRB1*16:01M HLA-DQA1*01 :03-B1*06:01L HLA-DRB1*08:02L HLA-DQA1*02:01-B1*03:03L HLA-DRB1* 15:03M
GEFKLASHMY

SEQ ID NO: 8427 - protein, 16 aa, Severe acute respiratory syndrome coronavirus 2
  REGION 1..16: note = Table B: HLA-DQA1*03:02-B1*03:03L
YPPDEDEEEGDCEEEE

SEQ ID NO: 8428 - protein, 14 aa, Severe acute respiratory syndrome coronavirus 2
  REGION 1..14: note = Table B: HLA-DQA1*03:02-B1*03:03L HLA-DQA1*01:02-B1*06:02L HLA-DQA1*01-B1*05L HLA-DQA1*03:01-B1*03:02L HLA-DQA1*01:03-B1*06:01L HLA-DQA1*02:01-B1*03:03L
EEEGDCEEEEFEPS

SEQ ID NO: 8429 - protein, 10 aa, Severe acute respiratory syndrome coronavirus 2
  REGION 1..10: note = Table B: HLA-DQA1*03:02-B1*03:03L HLA-DQA1*05:01-B1*03:01M HLA-DRB1*13:03L HLA-DQA1*01:02-B1*06:02L HLA-DRB4*03:01NL HLA-DRB1*08:77M HLA-DPA1*01:03-B1*03:01M HLA-DPA1*03:01-B1*04:02L HLA-DRB1*03:01M HLA-DRB1*11:02L
  REGION 1..10: note = CONT. FROM ABOVE: HLA-DQA1*01-B1*05L HLA-DQA1*05:05-B1*03:19M HL A-DQA1*05:01-B1*02:01M HLA-DRB4*01:01M HLA-DPA1*01:03-B1*04:01M HLA-DQA1*05:05-B1*03:116L HLA-DPA1*01:03-B1*04:02L HLA-DRB1*12:0 1L HLA-DQA1*03:01-B1*03:02L HLA-DPA1*01:03-B1*104:01M
  REGION 1..10: note = CONT. FROM ABOVE: HLA-DPA1*01:02-B1*04:01L HLA-DRB1*10:01M HLA-D RB1*16:01M HLA-DRB1*15:03L
EEEFEPSTQY

SEQ ID NO: 8430 - protein, 11 aa, Severe acute respiratory syndrome coronavirus 2
  REGION 1..11: note = Table B: HLA-DQA1*03:02-B1*03:03L HLA-DRB1*13:02L HLA-DRB4*03:01NL HLA-DRB1*14:01L HLA-DRB1*12:01L HLA-DQA1*03:01-B1*03:02L HLA-DQA1*05:05-B1*03:01L HLA-DPA1*01:02-B1*04:01L HLA-DQA1*01:03-B1*06:01L
  REGION 1..11: note = CONT. FROM ABOVE: HLA-DRB1*08:02L
EEFEPSTQYEY

SEQ ID NO: 8431 - protein, 13 aa, Severe acute respiratory syndrome coronavirus 2
  REGION 1..13: note = Table B: HLA-DQA1*03:02-B1*03:03L HLA-DRB1*04:03L HLA-DRB1*12:01L HLA-DQA1*01:03-B1*06:01L
EFEPSTQYEYGTE

SEQ ID NO: 8432 - protein, 13 aa, Severe acute respiratory syndrome coronavirus 2
  REGION 1..13: note = Table B: HLA-DQA1*03:02-B1*03:03L HLA-DQA1*01-B1*05L HLA-DQA1*05:01-B1*02:01L HLA-DQA1*01:03-B1*06:01L HLA-DQA1*02:01-B1*03:03L
EPSTQYEYGTEDD

SEQ ID NO: 8433 - protein, 10 aa, Severe acute respiratory syndrome coronavirus 2
  REGION 1..10: note = Table B: HLA-DQA1*03:02-B1*03:03L HLA-DRB1*04:03L HLA-DRB1*04:02L HLA-DQA1*01-B1*05L HLA-DQA1*05:01-B1*02:01L HLA-DQA1*03:01-B1*03:02L HLA-DRB1*14:17L HLA-DRB1*16:01L HLA-DQA1*02:01-B1*03:03L
GTEDDYQGKP

SEQ ID NO: 8434 - protein, 10 aa, Severe acute respiratory syndrome coronavirus 2
  REGION 1..10: note = Table B: HLA-DQA1*03:02-B1*03:03M HLA-DRB1*13:03L HLA-DRB1*08:77L HLA-DQA1*01-B1*05L HLA-DQA1*05:05-B1*03:19L HLA-DQA1*05:05-B1*03:116L HLA-DRB1*09:01L HLA-DPA1*01:03-B1*04:02L HLA-DQA1*03:01-B1*03:02L
  REGION 1..10: note = CONT. FROM ABOVE: HLA-DPA1*01:03-B1*104:01L HLA-DPA1*01:02-B1*04 :01L HLA-DRB1*16:01L
TEDDYQGKPL

SEQ ID NO: 8435 - protein, 10 aa, Severe acute respiratory syndrome coronavirus 2
  REGION 1..10: note = Table B: HLA-DQA1*03:02-B1*03:03L HLA-DQA1*05:01-B1*03:01L HLA-DRB1*04:03L HLA-DRB1*04:02L HLA-DQA1*01-B1*05L HLA-DQA1*05:05-B1*03:19L HLA-DQA1*05:01-B1*02:01L HLA-DQA1*03:01-B1*03:02L HLA-DRB1*16:01L
  REGION 1..10: note = CONT. FROM ABOVE: HLA-DQA1*01:03-B1*06:01L HLA-DQA1*02:01-B1*03: 03L
EDDYQGKPLE

SEQ ID NO: 8436 - protein, 10 aa, Severe acute respiratory syndrome coronavirus 2
  REGION 1..10: note = Table B: HLA-DQA1*03:02-B1*03:03L HLA-DQA1*05:01-B1*03:01L HLA-DRB1*13:03L HLA-DRB1*01:03L HLA-DRB1*04:05L HLA-DQA1*01:02-B1*06:02M HLA-DRB1*01:01L HLA-DRB1*08:77L HLA-DPA1*03:01-B1*04:02L HLA-DRB1*03:01L HLA-DRB1*14:01L
  REGION 1..10: note = CONT. FROM ABOVE: HLA-DRB1*14:02L HLA-DQA1*01-B1*05L HLA-DQA1*05 :05-B1*03:19L HLA-DQA1*05:01-B1*02:01L HLA-DRB4*01:01L HLA-DPA1* 01:03-B1*04:01L HLA-DQA1*05:05-B1*03:116L HLA-DPA1*01:03-B1*04:0 2L HLA-DPA1*02:01-B1*13:01L HLA-DPA1*03:01-B1*105:01L
  REGION 1..10: note = CONT. FROM ABOVE: HLA-DPA1*01:02-B1*04:01L HLA-DRB1*10:01L HLA-D RB1*16:01L HLA-DQA1*01:03-B1*06:01L HLA-DQA1*02:01-B1*03:03L HLA -DRB1*15:03L
DDYQGKPLEF

SEQ ID NO: 8437 - protein, 10 aa, Severe acute respiratory syndrome coronavirus 2
  REGION 1..10: note = Table B: HLA-DQA1*03:02-B1*03:03M HLA-DQA1*05:05-B1*03:19L HLA-DRB1*09:01L HLA-DQA1*03:01-B1*03:02L
LEFGATSAAL

SEQ ID NO: 8438 - protein, 12 aa, Severe acute respiratory syndrome coronavirus 2
  REGION 1..12: note = Table B: HLA-DQA1*03:02-B1*03:03L HLA-DQA1*05:05-B1*03:19L HLA-DQA1*03:01-B1*03:02L HLA-DQA1*05:05-B1*03:01L HLA-DQA1*02:01-B1*03:03L
EFGATSAALQPE

SEQ ID NO: 8439 - protein, 12 aa, Severe acute respiratory syndrome coronavirus 2
  REGION 1..12: note = Table B: HLA-DQA1*03:02-B1*03:03L HLA-DQA1*05:01-B1*03:01L HLA-DQA1*01:02-B1*06:02L HLA-DQA1*05:05-B1*03:19L HLA-DQA1*05:01-B1*02:01L HLA-DQA1*05:05-B1*03:01L
FGATSAALQPEE

SEQ ID NO: 8440 - protein, 10 aa, Severe acute respiratory syndrome coronavirus 2
  REGION 1..10: note = Table B: HLA-DQA1*03:02-B1*03:03L HLA-DQA1*01:02-B1*06:02L HLA-DQA1*05:01-B1*02:01L HLA-DQA1*03:01-B1*03:02L HLA-DQA1*01:03-B1*06:01L HLA-DQA1*02:01-B1*03:03L
TSAALQPEEE

SEQ ID NO: 8441 - protein, 10 aa, Severe acute respiratory syndrome coronavirus 2
  REGION 1..10: note = Table B: HLA-DQA1*03:02-B1*03:03L HLA-DQA1*05:01-B1*02:01L HLA-DQA1*03:01-B1*03:02L HLA-DQA1*01:03-B1*06:01L HLA-DQA1*02:01-B1*03:03L
SAALQPEEEQ

SEQ ID NO: 8442 - protein, 12 aa, Severe acute respiratory syndrome coronavirus 2
  REGION 1..12: note = Table B: HLA-DQA1*03:02-B1*03:03L HLA-DRB1*04:05L HLA-DQA1*01:01-B1*05:01L HLA-DRB1*04:10L HLA-DRB1*16:01L
AALQPEEEQEED

SEQ ID NO: 8443 - protein, 12 aa, Severe acute respiratory syndrome coronavirus 2
  REGION 1..12: note = Table B: HLA-DQA1*03:02-B1*03:03L HLA-DQA1*01-B1*05L HLA-DQA1*01:03-B1*06:01L
ALQPEEEQEEDW

SEQ ID NO: 8444 - protein, 11 aa, Severe acute respiratory syndrome coronavirus 2
  REGION 1..11: note = Table B: HLA-DQA1*03:02-B1*03:03L HLA-DQA1*01-B1*05L HLA-DQA1*05:01-B1*02:01L HLA-DQA1*03:01-B1*03:02L
QPEEEQEEDWL

SEQ ID NO: 8445 - protein, 14 aa, Severe acute respiratory syndrome coronavirus 2
  REGION 1..14: note = Table B: HLA-DQA1*03:02-B1*03:03L HLA-DRB1*04:05L HLA-DPA1*02:01-B1*13:01L
EEQEEDWLDDDSQQ

SEQ ID NO: 8446 - protein, 10 aa, Severe acute respiratory syndrome coronavirus 2
  REGION 1..10: note = Table B: HLA-DQA1*03:02-B1*03:03M HLA-DQA1*05:01-B1*03:01L HLA-DRB1*04:04L HLA-DPA1*03:01-B1*04:02L HLA-DRB1*14:01L HLA-DRB1*11:02L HLA-DRB1*14:02L HLA-DQA1*05:05-B1*03:19M HLA-DQA1*05:05-B1*03:116L HLA-DRB1*09:01L
  REGION 1..10: note = CONT. FROM ABOVE: HLA-DQA1*03:01-B1*03:02L HLA-DPA1*01:03-B1*104 :01L HLA-DPA1*01:02-B1*04:01L HLA-DRB1*10:01L HLA-DRB1*16:01L HL A-DRB1*08:03L HLA-DQA1*02:01-B1*03:03L HLA-DRB1*15:03L
WLDDDSQQTV

SEQ ID NO: 8447 - protein, 12 aa, Severe acute respiratory syndrome coronavirus 2
  REGION 1..12: note = Table B: HLA-DQA1*03:02-B1*03:03L HLA-DQA1*03:01-B1*03:02L
DDDSQQTVGQQD

SEQ ID NO: 8448 - protein, 12 aa, Severe acute respiratory syndrome coronavirus 2
  REGION 1..12: note = Table B: HLA-DQA1*03:02-B1*03:03L HLA-DQA1*05:01-B1*03:01L HLA-DRB1*04:03L HLA-DQA1*01:01-B1*05:01L HLA-DQA1*05:01-B1*02:01L HLA-DQA1*05:05-B1*03:01L HLA-DQA1*01:03-B1*06:01L
DDSQQTVGQQDG

SEQ ID NO: 8449 - protein, 13 aa, Severe acute respiratory syndrome coronavirus 2
  REGION 1..13: note = Table B: HLA-DQA1*03:02-B1*03:03L HLA-DQA1*05:01-B1*02:01L HLA-DQA1*01:03-B1*06:01L
DSQQTVGQQDGSE

SEQ ID NO: 8450 - protein, 14 aa, Severe acute respiratory syndrome coronavirus 2
  REGION 1..14: note = Table B: HLA-DQA1*03:02-B1*03:03L HLA-DQA1*05:01-B1*03:01L HLA-DRB1*04:03L HLA-DRB1*04:02L HLA-DRB1*04:05L HLA-DQA1*01:02-B1*06:02L HLA-DQA1*01:01-B1*05:01L HLA-DQA1*05:05-B1*03:19L HLA-DQA1*05:01-B1*02:01L
  REGION 1..14: note = CONT. FROM ABOVE: HLA-DRB1*04:10L HLA-DQA1*05:05-B1*03:01L HLA-D RB1*14:17L HLA-DRB1*16:01L
SQQTVGQQDGSEDN

SEQ ID NO: 8451 - protein, 14 aa, Severe acute respiratory syndrome coronavirus 2
  REGION 1..14: note = Table B: HLA-DQA1*03:02-B1*03:03L HLA-DQA1*05:01-B1*02:01L HLA-DQA1*03:01-B1*03:02L
VGQQDGSEDNQTTT

SEQ ID NO: 8452 - protein, 15 aa, Severe acute respiratory syndrome coronavirus 2
  REGION 1..15: note = Table B: HLA-DQA1*03:02-B1*03:03L HLA-DQA1*03:01-B1*03:02L
GQQDGSEDNQTTTIQ

SEQ ID NO: 8453 - protein, 13 aa, Severe acute respiratory syndrome coronavirus 2
  REGION 1..13: note = Table B: HLA-DQA1*03:02-B1*03:03L HLA-DQA1*05:01-B1*03:01L HLA-DQA1*05:01-B1*02:01L HLA-DPA1*03:01-B1*105:01L HLA-DQA1*03:01-B1*03:02L
SEDNQTTTIQTIV

SEQ ID NO: 8454 - protein, 11 aa, Severe acute respiratory syndrome coronavirus 2
  REGION 1..11: note = Table B: HLA-DQA1*03:02-B1*03:03L HLA-DQA1*05:01-B1*03:01L HLA-DQA1*05:05-B1*03:19L HLA-DQA1*05:01-B1*02:01L HLA-DPA1*03:01-B1*105:01L HLA-DQA1*05:05-B1*03:01L
NQTTTIQTIVE

SEQ ID NO: 8455 - protein, 10 aa, Severe acute respiratory syndrome coronavirus 2
  REGION 1..10: note = Table B: HLA-DQA1*03:02-B1*03:03L
TTTIQTIVEV

SEQ ID NO: 8456 - protein, 10 aa, Severe acute respiratory syndrome coronavirus 2
  REGION 1..10: note = Table B: HLA-DQA1*03:02-B1*03:03L HLA-DQA1*03:01-B1*03:02L HLA-DQA1*02:01-B1*03:03L
QTIVEVQPQL

SEQ ID NO: 8457 - protein, 10 aa, Severe acute respiratory syndrome coronavirus 2
  REGION 1..10: note = Table B: HLA-DQA1*03:02-B1*03:03L HLA-DRB1*04:03L HLA-DQA1*01:02-B1*06:02L HLA-DQA1*05:01-B1*02:01L HLA-DQA1*03:01-B1*03:02L HLA-DRB1*14:17L HLA-DQA1*01:03-B1*06:01L HLA-DQA1*02:01-B1*03:03L
TIVEVQPQLE

SEQ ID NO: 8458 - protein, 10 aa, Severe acute respiratory syndrome coronavirus 2
  REGION 1..10: note = Table B: HLA-DQA1*03:02-B1*03:03L HLA-DQA1*05:01-B1*03:01L HLA-DRB1*04:03L HLA-DRB1*04:02L HLA-DQA1*01-B1*05L HLA-DQA1*05:05-B1*03:19L HLA-DQA1*05:01-B1*02:01L HLA-DRB1*12:01L HLA-DQA1*03:01-B1*03:02L HLA-DRB1*14:17L
  REGION 1..10: note = CONT. FROM ABOVE: HLA-DRB1*16:01L HLA-DQA1*01:03-B1*06:01L HLA-D QA1*02:01-B1*03:03L
IVEVQPQLEM

SEQ ID NO: 8459 - protein, 10 aa, Severe acute respiratory syndrome coronavirus 2
  REGION 1..10: note = Table B: HLA-DQA1*03:02-B1*03:03L HLA-DQA1*01:02-B1*06:02L HLA-DPA1*03:01-B1*105:01L HLA-DRB1*15:03L
EVQPQLEMEL

SEQ ID NO: 8460 - protein, 13 aa, Severe acute respiratory syndrome coronavirus 2
  REGION 1..13: note = Table B: HLA-DQA1*03:02-B1*03:03L HLA-DQA1*05:01-B1*03:01L HLA-DRB1*13:02L HLA-DRB1*13:03L HLA-DRB1*01:03L HLA-DRB1*04:02L HLA-DRB1*04:04L HLA-DRB1*04:05L HLA-DQA1*01:02-B1*06:02L HLA-DRB1*01:02L HLA-DRB4*03:01NL HLA-DRB1*08:04L HLA-DRB1*08:77L
  REGION 1..13: note = CONT. FROM ABOVE: HLA-DRB3*02:01L HLA-DRB1*14:01L HLA-DRB1*11:03 L HLA-DRB1*11:04L HLA-DRB1*14:02L HLA-DQA1*01-B1*05L HLA-DRB1*04 :10L HLA-DRB1*12:01L HLA-DRB1*12:02L HLA-DPA1*03:01-B1*105:01L H LA-DRB1*14:54L HLA-DQA1*05:05-B1*03:01L HLA-DRB1*10:01L
  REGION 1..13: note = CONT. FROM ABOVE: HLA-DRB1*16:01L HLA-DRB1*04:08L HLA-DRB1*08:03 L HLA-DQA1*02:01-B1*03:03L HLA-DRB1*15:03L
QPQLEMELTPVVQ

SEQ ID NO: 8461 - protein, 10 aa, Severe acute respiratory syndrome coronavirus 2
  REGION 1..10: note = Table B: HLA-DQA1*03:02-B1*03:03M HLA-DQA1*05:01-B1*03:01L HLA-DQA1*01:02-B1*06:02L HLA-DRB1*08:77L HLA-DPA1*03:01-B1*04:02L HLA-DRB1*11:02H HLA-DRB1*14:02L HLA-DRB1*11:01L HLA-DQA1*05:05-B1*03:19H
  REGION 1..10: note = CONT. FROM ABOVE: HLA-DQA1*05:01-B1*02:01M HLA-DRB4*01:01L HLA-D PA1*01:03-B1*04:01L HLA-DQA1*05:05-B1*03:116L HLA-DRB1*09:01L HL A-DPA1*01:03-B1*04:02L HLA-DPA1*02:01-B1*13:01L HLA-DQA1*03:01-B 1*03:02M HLA-DPA1*01:03-B1*104:01H HLA-DPA1*01:02-B1*04:01L
  REGION 1..10: note = CONT. FROM ABOVE: HLA-DRB1*10:01L HLA-DRB1*16:01L HLA-DQA1*01:03 -B1*06:01L HLA-DRB1*08:03L HLA-DQA1*02:01-B1*03:03L HLA-DRB1*15: 03L
MELTPVVQTI

SEQ ID NO: 8462 - protein, 11 aa, Severe acute respiratory syndrome coronavirus 2
  REGION 1..11: note = Table B: HLA-DQA1*03:02-B1*03:03L HLA-DQA1*05:05-B1*03:19L
ELTPVVQTIEV

SEQ ID NO: 8463 - protein, 11 aa, Severe acute respiratory syndrome coronavirus 2
  REGION 1..11: note = Table B: HLA-DQA1*03:02-B1*03:03L HLA-DQA1*05:01-B1*03:01L HLA-DRB1*04:03L HLA-DRB1*13:03L HLA-DRB1*08:77L HLA-DPA1*03:01-B1*04:02L HLA-DRB1*14:01L HLA-DQA1*05:05-B1*03:19L HLA-DQA1*05:01-B1*02:01L
  REGION 1..11: note = CONT. FROM ABOVE: HLA-DRB4*01:01L HLA-DPA1*01:03-B1*04:01L HLA-D RB1*12:01L HLA-DQA1*03:01-B1*03:02L HLA-DPA1*01:02-B1*04:01L HLA -DRB1*16:01L
PVVQTIEVNSF

SEQ ID NO: 8464 - protein, 11 aa, Severe acute respiratory syndrome coronavirus 2
  REGION 1..11: note = Table B: HLA-DQA1*03:02-B1*03:03L HLA-DRB1*13:02L HLA-DRB1*14:01L HLA-DPA1*02:01-B1*13:01L HLA-DQA1*01:03-B1*06:01L HLA-DRB1*08:02L
QTIEVNSFSGY

SEQ ID NO: 8465 - protein, 10 aa, Severe acute respiratory syndrome coronavirus 2
  REGION 1..10: note = Table B: HLA-DQA1*03:02-B1*03:03L HLA-DQA1*05:05-B1*03:19L HLA-DQA1*03:01-B1*03:02L HLA-DPA1*01:03-B1*104:01L
IEVNSFSGYL

SEQ ID NO: 8466 - protein, 11 aa, Severe acute respiratory syndrome coronavirus 2
  REGION 1..11: note = Table B: HLA-DQA1*03:02-B1*03:03L HLA-DQA1*05:01-B1*03:01L HLA-DRB1*01:02L HLA-DRB1*14:02L HLA-DQA1*05:05-B1*03:19L HLA-DRB1*15:03L
EVNSFSGYLKL

SEQ ID NO: 8467 - protein, 11 aa, Severe acute respiratory syndrome coronavirus 2
  REGION 1..11: note = Table B: HLA-DQA1*03:02-B1*03:03L HLA-DQA1*05:01-B1*03:01L HLA-DRB1*01:03L HLA-DQA1*01:02-B1*06:02L HLA-DRB1*08:04L HLA-DPA1*03:01-B1*04:02L HLA-DRB1*08:01L HLA-DQA1*05:05-B1*03:19L HLA-DPA1*01:03-B1*04:01L
  REGION 1..11: note = CONT. FROM ABOVE: HLA-DPA1*01:03-B1*04:02L HLA-DQA1*05:05-B1*03: 01L HLA-DRB1*16:01L HLA-DRB1*04:08L
SFSGYLKLTDN

SEQ ID NO: 8468 - protein, 10 aa, Severe acute respiratory syndrome coronavirus 2
  REGION 1..10: note = Table B: HLA-DQA1*03:02-B1*03:03L HLA-DQA1*05:01-B1*03:01L HLA-DRB1*04:03L HLA-DRB1*13:02L HLA-DRB1*13:03L HLA-DRB1*01:03L HLA-DRB1*04:05L HLA-DQA1*01:02-B1*06:02M HLA-DRB1*01:01L HLA-DRB1*08:77L HLA-DPA1*01:03-B1*03:01L
  REGION 1..10: note = CONT. FROM ABOVE: HLA-DPA1*03:01-B1*04:02L HLA-DRB1*03:01L HLA-D RB1*14:01L HLA-DRB1*11:02L HLA-DRB1*14:02L HLA-DQA1*01:01-B1*05: 01L HLA-DRB1*11:01L HLA-DQA1*01-B1*05L HLA-DQA1*05:05-B1*03:19M HLA-DQA1*05:01-B1*02:01L HLA-DRB4*01:01L
  REGION 1..10: note = CONT. FROM ABOVE: HLA-DPA1*01:03-B1*04:01L HLA-DQA1*05:05-B1*03: 116L HLA-DPA1*01:03-B1*04:02L HLA-DRB1*12:01L HLA-DPA1*02:01-B1* 13:01M HLA-DPA1*03:01-B1*105:01L HLA-DQA1*03:01-B1*03:02L HLA-DP A1*01:03-B1*104:01L HLA-DQA1*05:05-B1*03:01L
  REGION 1..10: note = CONT. FROM ABOVE: HLA-DPA1*01:02-B1*04:01L HLA-DRB1*10:01L HLA-D RB1*16:01L HLA-DQA1*01:03-B1*06:01M HLA-DRB1*08:02L HLA-DQA1*02: 01-B1*03:03L HLA-DRB1*15:03L
GYLKLTDNVY

SEQ ID NO: 8469 - protein, 13 aa, Severe acute respiratory syndrome coronavirus 2
  REGION 1..13: note = Table B: HLA-DQA1*03:02-B1*03:03L HLA-DQA1*05:01-B1*03:01L HLA-DQA1*01:02-B1*06:02L HLA-DQA1*05:05-B1*03:19L HLA-DPA1*03:01-B1*105:01L
LTDNVYIKNADIV

SEQ ID NO: 8470 - protein, 11 aa, Severe acute respiratory syndrome coronavirus 2
  REGION 1..11: note = Table B: HLA-DQA1*03:02-B1*03:03L HLA-DRB1*13:03L HLA-DRB4*03:01NL HLA-DRB1*14:01L HLA-DRB1*08:01L HLA-DRB1*04:10L HLA-DRB1*14:54L HLA-DRB1*04:08L
NVYIKNADIVE

SEQ ID NO: 8471 - protein, 11 aa, Severe acute respiratory syndrome coronavirus 2
  REGION 1..11: note = Table B: HLA-DQA1*03:02-B1*03:03L HLA-DQA1*05:01-B1*03:01L HLA-DRB1*13:03L HLA-DRB4*03:01NL HLA-DRB1*14:01L HLA-DRB1*04:10L HLA-DRB1*14:54L HLA-DRB1*04:08L
VYIKNADIVEE

SEQ ID NO: 8472 - protein, 11 aa, Severe acute respiratory syndrome coronavirus 2
  REGION 1..11: note = Table B: HLA-DQA1*03:02-B1*03:03L HLA-DQA1*05:01-B1*03:01L HLA-DRB1*04:03L HLA-DQA1*01:02-B1*06:02L HLA-DQA1*01:01-B1*05:01L HLA-DQA1*05:01-B1*02:01L HLA-DPA1*03:01-B1*105:01L HLA-DQA1*05:05-B1*03:01L
  REGION 1..11: note = CONT. FROM ABOVE: HLA-DRB1*16:01L HLA-DQA1*01:03-B1*06:01L
IKNADIVEEAK

SEQ ID NO: 8473 - protein, 10 aa, Severe acute respiratory syndrome coronavirus 2
  REGION 1..10: note = Table B: HLA-DQA1*03:02-B1*03:03M HLA-DQA1*05:01-B1*03:01L HLA-DQA1*01:02-B1*06:02L HLA-DRB1*11:02L HLA-DQA1*05:05-B1*03:19M HLA-DQA1*05:01-B1*02:01L HLA-DRB1*09:01L HLA-DPA1*01:03-B1*04:02L
  REGION 1..10: note = CONT. FROM ABOVE: HLA-DQA1*03:01-B1*03:02L HLA-DPA1*01:03-B1*104 :01M HLA-DRB1*16:01L HLA-DQA1*01:03-B1*06:01L HLA-DQA1*02:01-B1* 03:03L
EEAKKVKPTV

SEQ ID NO: 8474 - protein, 11 aa, Severe acute respiratory syndrome coronavirus 2
  REGION 1..11: note = Table B: HLA-DQA1*03:02-B1*03:03L HLA-DQA1*05:01-B1*03:01L HLA-DRB1*04:03L HLA-DRB1*04:02L HLA-DQA1*01:02-B1*06:02L HLA-DRB4*03:01NL HLA-DQA1*05:01-B1*02:01L HLA-DQA1*03:01-B1*03:02L HLA-DQA1*05:05-B1*03:01L
  REGION 1..11: note = CONT. FROM ABOVE: HLA-DRB1*14:17L HLA-DQA1*01:03-B1*06:01L HLA-D QA1*02:01-B1*03:03L
VKPTVVVNAAN

SEQ ID NO: 8475 - protein, 11 aa, Severe acute respiratory syndrome coronavirus 2
  REGION 1..11: note = Table B: HLA-DQA1*03:02-B1*03:03L HLA-DQA1*05:01-B1*03:01L HLA-DRB1*04:03L HLA-DRB1*13:02L HLA-DRB1*01:03L HLA-DRB4*03:01NL HLA-DRB3*02:01L HLA-DPA1*01:03-B1*03:01L HLA-DPA1*03:01-B1*04:02L HLA-DRB1*03:01L HLA-DRB1*14:01L
  REGION 1..11: note = CONT. FROM ABOVE: HLA-DRB1*11:02L HLA-DQA1*01-B1*05L HLA-DRB4*01 :01L HLA-DPA1*01:03-B1*04:01L HLA-DPA1*01:03-B1*04:02L HLA-DRB1* 12:01L HLA-DRB1*12:02L HLA-DPA1*02:01-B1*13:01L HLA-DQA1*03:01-B 1*03:02L HLA-DRB1*14:54L HLA-DPA1*01:03-B1*104:01L
  REGION 1..11: note = CONT. FROM ABOVE: HLA-DQA1*05:05-B1*03:01L HLA-DPA1*01:02-B1*04: 01L HLA-DRB1*10:01L HLA-DRB1*16:01L HLA-DQA1*01:03-B1*06:01L HLA -DRB1*15:03L
PTVVVNAANVY

SEQ ID NO: 8476 - protein, 10 aa, Severe acute respiratory syndrome coronavirus 2
  REGION 1..10: note = Table B: HLA-DQA1*03:02-B1*03:03L HLA-DQA1*05:01-B1*03:01L HLA-DRB1*04:03L HLA-DRB1*13:02L HLA-DRB1*13:03L HLA-DRB1*04:02L HLA-DRB1*01:02L HLA-DRB1*08:77L HLA-DRB3*02:01L HLA-DPA1*03:01-B1*04:02L HLA-DRB1*14:01L HLA-DRB1*14:02L
  REGION 1..10: note = CONT. FROM ABOVE: HLA-DQA1*05:05-B1*03:19L HLA-DQA1*05:01-B1*02: 01L HLA-DRB1*09:01L HLA-DRB1*12:01L HLA-DPA1*03:01-B1*105:01L HL A-DQA1*03:01-B1*03:02L HLA-DPA1*01:02-B1*04:01L HLA-DRB1*16:01L HLA-DQA1*02:01-B1*03:03L HLA-DRB1*15:03L
VVVNAANVYL

SEQ ID NO: 8477 - protein, 12 aa, Severe acute respiratory syndrome coronavirus 2
  REGION 1..12: note = Table B: HLA-DQA1*03:02-B1*03:03L HLA-DQA1*05:01-B1*03:01L HLA-DRB1*04:03L HLA-DRB1*04:02L HLA-DQA1*01:02-B1*06:02L HLA-DQA1*05:05-B1*03:19L HLA-DQA1*05:05-B1*03:01L HLA-DRB1*14:17L HLA-DQA1*01:03-B1*06:01L
NAANVYLKHGGG

SEQ ID NO: 8478 - protein, 12 aa, Severe acute respiratory syndrome coronavirus 2
  REGION 1..12: note = Table B: HLA-DQA1*03:02-B1*03:03L HLA-DQA1*05:01-B1*03:01L HLA-DRB1*13:02L HLA-DRB1*04:05L HLA-DQA1*01:02-B1*06:02L HLA-DRB1*01:02L HLA-DRB1*08:04L HLA-DRB1*14:01L HLA-DRB1*08:01L HLA-DRB1*12:01L HLA-DRB1*12:02L HLA-DRB1*14:54L HLA-DRB1*04:08L
  REGION 1..12: note = CONT. FROM ABOVE: HLA-DRB1*15:03L
ANVYLKHGGGVA

SEQ ID NO: 8479 - protein, 11 aa, Severe acute respiratory syndrome coronavirus 2
  REGION 1..11: note = Table B: HLA-DQA1*03:02-B1*03:03L HLA-DQA1*05:01-B1*03:01L HLA-DRB1*04:03L HLA-DRB1*04:02L HLA-DRB1*01:02L HLA-DRB4*03:01NL HLA-DRB1*14:01L HLA-DQA1*05:05-B1*03:19L HLA-DRB1*12:01L HLA-DQA1*05:05-B1*03:01L HLA-DRB1*14:17L HLA-DRB1*16:01L
VYLKHGGGVAG

SEQ ID NO: 8480 - protein, 10 aa, Severe acute respiratory syndrome coronavirus 2
  REGION 1..10: note = Table B: HLA-DQA1*03:02-B1*03:03L HLA-DQA1*05:01-B1*03:01L HLA-DRB1*01:03L HLA-DQA1*01:02-B1*06:02L HLA-DQA1*05:05-B1*03:19L HLA-DQA1*03:01-B1*03:02L HLA-DQA1*05:05-B1*03:01L HLA-DQA1*01:03-B1*06:01L
  REGION 1..10: note = CONT. FROM ABOVE: HLA-DQA1*02:01-B1*03:03L
HGGGVAGALN

SEQ ID NO: 8481 - protein, 10 aa, Severe acute respiratory syndrome coronavirus 2
  REGION 1..10: note = Table B: HLA-DQA1*03:02-B1*03:03L HLA-DQA1*05:01-B1*03:01L HLA-DRB1*13:03L HLA-DRB1*01:03L HLA-DRB4*03:01NL HLA-DQA1*05:05-B1*03:19L HLA-DQA1*03:01-B1*03:02L HLA-DQA1*05:05-B1*03:01L HLA-DQA1*01:03-B1*06:01L
  REGION 1..10: note = CONT. FROM ABOVE: HLA-DQA1*02:01-B1*03:03L
GGGVAGALNK

SEQ ID NO: 8482 - protein, 10 aa, Severe acute respiratory syndrome coronavirus 2
  REGION 1..10: note = Table B: HLA-DQA1*03:02-B1*03:03L HLA-DQA1*05:01-B1*03:01L HLA-DRB1*04:03L HLA-DRB1*13:03L HLA-DRB1*01:03L HLA-DRB1*04:02L HLA-DQA1*01:02-B1*06:02L HLA-DRB4*03:01NL HLA-DRB1*08:04L HLA-DRB1*14:02L HLA-DQA1*05:05-B1*03:19L
  REGION 1..10: note = CONT. FROM ABOVE: HLA-DQA1*05:01-B1*02:01L HLA-DRB1*12:01L HLA-D PA1*03:01-B1*105:01L HLA-DQA1*03:01-B1*03:02L HLA-DQA1*05:05-B1* 03:01L HLA-DRB1*14:17L HLA-DRB1*16:01L HLA-DQA1*01:03-B1*06:01L HLA-DRB1*04:08L HLA-DQA1*02:01-B1*03:03L
VAGALNKATN

SEQ ID NO: 8483 - protein, 10 aa, Severe acute respiratory syndrome coronavirus 2
  REGION 1..10: note = Table B: HLA-DQA1*03:02-B1*03:03L HLA-DQA1*05:01-B1*03:01L HLA-DRB1*04:01L HLA-DRB1*04:03L HLA-DRB1*13:02L HLA-DRB1*13:03L HLA-DRB1*01:03L HLA-DRB1*04:02L HLA-DRB1*04:04L HLA-DRB1*04:05L HLA-DQA1*01:02-B1*06:02L HLA-DRB1*01:02L HLA-DRB4*03:01NL
  REGION 1..10: note = CONT. FROM ABOVE: HLA-DRB1*08:04L HLA-DRB1*08:77L HLA-DRB3*02:01 L HLA-DPA1*01:03-B1*03:01L HLA-DPA1*03:01-B1*04:02L HLA-DRB1*03: 01L HLA-DRB1*14:01L HLA-DRB1*11:03L HLA-DRB1*11:04L HLA-DRB1*14: 02L HLA-DQA1*01:01-B1*05:01L HLA-DRB1*08:01L HLA-DRB1*11:01L
  REGION 1..10: note = CONT. FROM ABOVE: HLA-DRB5*01:01L HLA-DQA1*01-B1*05L HLA-DQA1*05 :05-B1*03:19L HLA-DQA1*05:01-B1*02:01L HLA-DRB4*01:01L HLA-DPA1* 01:03-B1*04:01L HLA-DQA1*05:05-B1*03:116L HLA-DRB1*09:01L HLA-DP A1*01:03-B1*04:02L HLA-DRB1*12:01L HLA-DRB1*12:02L
  REGION 1..10: note = CONT. FROM ABOVE: HLA-DRB3*01:01L HLA-DPA1*02:01-B1*13:01L HLA-D PA1*03:01-B1*105:01L HLA-DQA1*03:01-B1*03:02L HLA-DRB1*14:54L HL A-DQA1*05:05-B1*03:01L HLA-DRB1*14:17L HLA-DPA1*01:02-B1*04:01L HLA-DRB1*07:01L HLA-DRB1*10:01L HLA-DRB1*16:01L
  REGION 1..10: note = CONT. FROM ABOVE: HLA-DQA1*01:03-B1*06:01L HLA-DRB1*04:08L HLA -DRB1*08:02L HLA-DRB1*08:03L HLA-DQA1*02:01-B1*03:03L HLA-DRB1* 15:03L
ALNKATNNAM

SEQ ID NO: 8484 - protein, 14 aa, Severe acute respiratory syndrome coronavirus 2
  REGION 1..14: note = Table B: HLA-DQA1*03:02-B1*03:03L HLA-DRB1*13:02L HLA-DPA1*01:03-B1*03:01L HLA-DQA1*05:05-B1*03:19L HLA-DPA1*02:01-B1*13:01L HLA-DQA1*05:05-B1*03:01L
LNKATNNAMQVESD

SEQ ID NO: 8485 - protein, 12 aa, Severe acute respiratory syndrome coronavirus 2
  REGION 1..12: note = Table B: HLA-DQA1*03:02-B1*03:03L HLA-DQA1*05:01-B1*03:01L HLA-DRB1*04:03L HLA-DQA1*01:02-B1*06:02L HLA-DQA1*05:05-B1*03:19L HLA-DQA1*05:01-B1*02:01L HLA-DQA1*05:05-B1*03:01L
ATNNAMQVESDD

SEQ ID NO: 8486 - protein, 10 aa, Severe acute respiratory syndrome coronavirus 2
  REGION 1..10: note = Table B: HLA-DQA1*03:02-B1*03:03L HLA-DQA1*05:01-B1*03:01L HLA-DRB1*13:03L HLA-DQA1*01:02-B1*06:02L HLA-DRB1*08:77L HLA-DPA1*01:03-B1*03:01L HLA-DQA1*01-B1*05L HLA-DQA1*05:05-B1*03:19L HLA-DQA1*05:01-B1*02:01L
  REGION 1..10: note = CONT. FROM ABOVE: HLA-DPA1*01:03-B1*04:01L HLA-DPA1*03:01-B1*105 :01L HLA-DQA1*03:01-B1*03:02L HLA-DPA1*01:03-B1*104:01L HLA-DRB1 *16:01L HLA-DQA1*01:03-B1*06:01L HLA-DQA1*02:01-B1*03:03L HLA-DR B1*15:03L
NAMQVESDDY

SEQ ID NO: 8487 - protein, 13 aa, Severe acute respiratory syndrome coronavirus 2
  REGION 1..13: note = Table B: HLA-DQA1*03:02-B1*03:03L HLA-DQA1*01-B1*05L HLA-DQA1*03:01-B1*03:02L
VESDDYIATNGPL

SEQ ID NO: 8488 - protein, 10 aa, Severe acute respiratory syndrome coronavirus 2
  REGION 1..10: note = Table B: HLA-DQA1*03:02-B1*03:03L HLA-DQA1*05:01-B1*03:01L HLA-DRB1*04:03L HLA-DRB1*13:02L HLA-DRB1*13:03L HLA-DRB1*01:03L HLA-DRB1*04:02L HLA-DRB1*04:05L HLA-DQA1*01:02-B1*06:02L HLA-DRB1*01:01L HLA-DRB1*01:02L HLA-DRB4*03:01NL HLA-DRB1*08:04L
  REGION 1..10: note = CONT. FROM ABOVE: HLA-DRB1*08:77L HLA-DRB3*02:01L HLA-DPA1*01:03 -B1*03:01L HLA-DRB1*14:01L HLA-DRB1*11:03L HLA-DRB1*11:04L HLA-D RB1*14:02L HLA-DQA1*01:01-B1*05:01L HLA-DRB1*08:01L HLA-DRB5*01: 01L HLA-DQA1*01-B1*05L HLA-DQA1*05:05-B1*03:19L
  REGION 1..10: note = CONT. FROM ABOVE: HLA-DQA1*05:01-B1*02:01L HLA-DRB1*04:10L HLA-D PA1*01:03-B1*04:02L HLA-DRB1*12:01L HLA-DRB1*12:02L HLA-DPA1*03: 01-B1*105:01L HLA-DQA1*03:01-B1*03:02L HLA-DRB1*14:54L HLA-DQA1* 05:05-B1*03:01L HLA-DRB1*14:17L HLA-DPA1*01:02-B1*04:01L
  REGION 1..10: note = CONT. FROM ABOVE: HLA-DRB1*07:01L HLA-DRB1*10:01L HLA-DRB1*16:01 L HLA-DQA1*01:03-B1*06:01L HLA-DRB1*04:08L HLA-DRB1*08:03L HLA-D QA1*02:01-B1*03:03L HLA-DRB1*15:03L
DYIATNGPLK

SEQ ID NO: 8489 - protein, 10 aa, Severe acute respiratory syndrome coronavirus 2
  REGION 1..10: note = Table B: HLA-DQA1*03:02-B1*03:03L HLA-DQA1*05:01-B1*03:01L HLA-DQA1*01:02-B1*06:02L HLA-DRB1*01:02L HLA-DRB1*08:77L HLA-DPA1*03:01-B1*04:02L HLA-DRB1*14:01L HLA-DRB1*14:02L HLA-DQA1*05:05-B1*03:19L HLA-DQA1*05:01-B1*02:01L
  REGION 1..10: note = CONT. FROM ABOVE: HLA-DQA1*05:05-B1*03:116L HLA-DRB1*09:01L HLA- DRB1*12:01L HLA-DPA1*02:01-B1*13:01L HLA-DPA1*03:01-B1*105:01L H LA-DQA1*03:01-B1*03:02L HLA-DPA1*01:03-B1*104:01L HLA-DPA1*01:02 -B1*04:01L HLA-DRB1*10:01L HLA-DRB1*16:01L
  REGION 1..10: note = CONT. FROM ABOVE: HLA-DQA1*01:03-B1*06:01L HLA-DRB1*08:03L HLA-D QA1*02:01-B1*03:03L HLA-DRB1*15:03L
YIATNGPLKV

SEQ ID NO: 8490 - protein, 10 aa, Severe acute respiratory syndrome coronavirus 2
  REGION 1..10: note = Table B: HLA-DQA1*03:02-B1*03:03L HLA-DQA1*05:01-B1*03:01L HLA-DRB1*04:03L HLA-DRB1*13:02L HLA-DRB1*13:03L HLA-DRB1*01:03L HLA-DRB1*04:02L HLA-DRB1*01:02L HLA-DRB4*03:01NL HLA-DRB1*08:04L HLA-DRB1*08:77L HLA-DRB3*02:01L HLA-DPA1*01:03-B1*03:01L
  REGION 1..10: note = CONT. FROM ABOVE: HLA-DPA1*03:01-B1*04:02L HLA-DRB1*14:01L HLA-D RB1*11:03L HLA-DRB1*11:04L HLA-DRB1*14:02L HLA-DQA1*05:05-B1*03: 19L HLA-DQA1*05:01-B1*02:01L HLA-DRB1*12:01L HLA-DRB1*12:02L HLA -DPA1*03:01-B1*105:01L HLA-DQA1*03:01-B1*03:02L HLA-DRB1*14:54L
  REGION 1..10: note = CONT. FROM ABOVE: HLA-DQA1*05:05-B1*03:01L HLA-DRB1*14:17L HLA-D PA1*01:02-B1*04:01L HLA-DRB1*07:01L HLA-DRB1*16:01L HLA-DQA1*01: 03-B1*06:01L HLA-DQA1*02:01-B1*03:03L HLA-DRB1*15:03L
IATNGPLKVG

SEQ ID NO: 8491 - protein, 10 aa, Severe acute respiratory syndrome coronavirus 2
  REGION 1..10: note = Table B: HLA-DQA1*03:02-B1*03:03L HLA-DRB1*04:03L HLA-DRB1*13:03L HLA-DRB1*01:03L HLA-DRB1*04:02L HLA-DRB1*04:05L HLA-DRB1*01:02L HLA-DRB4*03:01NL HLA-DRB1*14:01L HLA-DRB1*11:04L HLA-DRB1*12:01L HLA-DQA1*03:01-B1*03:02L HLA-DRB1*14:17L
  REGION 1..10: note = CONT. FROM ABOVE: HLA-DRB1*16:01L HLA-DRB1*04:08L HLA-DQA1*02:01 -B1*03:03L
TNGPLKVGGS

SEQ ID NO: 8492 - protein, 11 aa, Severe acute respiratory syndrome coronavirus 2
  REGION 1..11: note = Table B: HLA-DQA1*03:02-B1*03:03L HLA-DQA1*05:01-B1*03:01L HLA-DQA1*01:02-B1*06:02L HLA-DQA1*05:05-B1*03:19L HLA-DQA1*03:01-B1*03:02L HLA-DQA1*05:05-B1*03:01L HLA-DQA1*02:01-B1*03:03L
VGGSCVLSGHN

SEQ ID NO: 8493 - protein, 11 aa, Severe acute respiratory syndrome coronavirus 2
  REGION 1..11: note = Table B: HLA-DQA1*03:02-B1*03:03L HLA-DQA1*05:01-B1*03:01L HLA-DRB1*04:03L HLA-DRB1*13:03L HLA-DRB1*01:03L HLA-DRB1*04:02L HLA-DRB1*04:05L HLA-DRB4*03:01NL HLA-DQA1*05:01-B1*02:01L HLA-DRB1*14:54L HLA-DQA1*05:05-B1*03:01L HLA-DRB1*14:17L
  REGION 1..11: note = CONT. FROM ABOVE: HLA-DRB1*16:01L HLA-DQA1*01:03-B1*06:01L HLA-D QA1*02:01-B1*03:03L
VVGPNVNKGED

SEQ ID NO: 8494 - protein, 11 aa, Severe acute respiratory syndrome coronavirus 2
  REGION 1..11: note = Table B: HLA-DQA1*03:02-B1*03:03L HLA-DQA1*05:01-B1*03:01L HLA-DRB1*04:03L HLA-DRB1*13:03L HLA-DRB1*04:02L HLA-DQA1*01:01-B1*05:01L HLA-DQA1*01-B1*05L HLA-DQA1*05:05-B1*03:19L HLA-DQA1*05:01-B1*02:01L
  REGION 1..11: note = CONT. FROM ABOVE: HLA-DQA1*05:05-B1*03:01L HLA-DRB1*16:01L HLA-D QA1*01:03-B1*06:01L HLA-DQA1*02:01-B1*03:03L
GPNVNKGEDIQ

SEQ ID NO: 8495 - protein, 10 aa, Severe acute respiratory syndrome coronavirus 2
  REGION 1..10: note = Table B: HLA-DQA1*03:02-B1*03:03L HLA-DQA1*05:01-B1*03:01L HLA-DQA1*03:01-B1*03:02L HLA-DQA1*02:01-B1*03:03L
NVNKGEDIQL

SEQ ID NO: 8496 - protein, 10 aa, Severe acute respiratory syndrome coronavirus 2
  REGION 1..10: note = Table B: HLA-DQA1*03:02-B1*03:03L HLA-DQA1*05:05-B1*03:19L HLA-DQA1*03:01-B1*03:02L
GEDIQLLKSA

SEQ ID NO: 8497 - protein, 11 aa, Severe acute respiratory syndrome coronavirus 2
  REGION 1..11: note = Table B: HLA-DQA1*03:02-B1*03:03L HLA-DQA1*01:02-B1*06:02L HLA-DQA1*05:01-B1*02:01L HLA-DRB1*12:01L HLA-DRB1*14:54L HLA-DRB1*16:01L HLA-DRB1*04:08L HLA-DRB1*15:03L
DIQLLKSAYEN

SEQ ID NO: 8498 - protein, 12 aa, Severe acute respiratory syndrome coronavirus 2
  REGION 1..12: note = Table B: HLA-DQA1*03:02-B1*03:03L HLA-DQA1*05:01-B1*03:01L HLA-DRB1*13:02L HLA-DRB1*01:03L HLA-DRB1*01:02L HLA-DRB1*08:04L HLA-DRB3*02:01L HLA-DPA1*01:03-B1*03:01L HLA-DRB1*14:01L HLA-DQA1*05:05-B1*03:19L HLA-DPA1*01:03-B1*04:01L
  REGION 1..12: note = CONT. FROM ABOVE: HLA-DPA1*01:03-B1*04:02L HLA-DPA1*02:01-B1*13: 01L HLA-DQA1*05:05-B1*03:01L HLA-DRB1*16:01L HLA-DRB1*04:08L
IQLLKSAYENFN

SEQ ID NO: 8499 - protein, 10 aa, Severe acute respiratory syndrome coronavirus 2
  REGION 1..10: note = Table B: HLA-DQA1*03:02-B1*03:03L HLA-DRB1*04:03L HLA-DRB1*13:03L HLA-DRB1*04:02L HLA-DRB4*03:01NL HLA-DQA1*01-B1*05L HLA-DQA1*05:01-B1*02:01L HLA-DPA1*03:01-B1*105:01L HLA-DQA1*03:01-B1*03:02L
  REGION 1..10: note = CONT. FROM ABOVE: HLA-DRB1*14:17L HLA-DPA1*01:02-B1*04:01L HLA-D RB1*16:01L HLA-DQA1*01:03-B1*06:01L HLA-DQA1*02:01-B1*03:03L
SAYENFNQHE

SEQ ID NO: 8500 - protein, 10 aa, Severe acute respiratory syndrome coronavirus 2
  REGION 1..10: note = Table B: HLA-DQA1*03:02-B1*03:03L HLA-DQA1*05:01-B1*03:01L HLA-DRB1*04:05L HLA-DQA1*01:02-B1*06:02L HLA-DRB1*01:02L HLA-DPA1*03:01-B1*04:02L HLA-DRB1*11:02L HLA-DQA1*01-B1*05L HLA-DQA1*05:05-B1*03:19L HLA-DQA1*05:01-B1*02:01L
  REGION 1..10: note = CONT. FROM ABOVE: HLA-DQA1*05:05-B1*03:116L HLA-DPA1*02:01-B1*13 :01L HLA-DPA1*03:01-B1*105:01L HLA-DQA1*03:01-B1*03:02L HLA-DPA1 *01:03-B1*104:01L HLA-DPA1*01:02-B1*04:01L HLA-DRB1*16:01L HLA-D QA1*01:03-B1*06:01L HLA-DQA1*02:01-B1*03:03L HLA-DRB1*15:03L
AYENFNQHEV

SEQ ID NO: 8501 - protein, 10 aa, Severe acute respiratory syndrome coronavirus 2
  REGION 1..10: note = Table B: HLA-DQA1*03:02-B1*03:03M HLA-DQA1*05:01-B1*03:01L HLA-DRB1*13:03L HLA-DRB1*08:77L HLA-DPA1*03:01-B1*04:02L HLA-DRB1*11:02L HLA-DQA1*01-B1*05L HLA-DQA1*05:05-B1*03:19M HLA-DQA1*05:01-B1*02:01L HLA-DPA1*01:03-B1*04:01L
  REGION 1..10: note = CONT. FROM ABOVE: HLA-DQA1*05:05-B1*03:116L HLA-DRB1*09:01L HLA- DPA1*01:03-B1*04:02L HLA-DPA1*02:01-B1*13:01L HLA-DQA1*03:01-B1* 03:02M HLA-DPA1*01:03-B1*104:01L HLA-DPA1*01:02-B1*04:01L HLA-DR B1*16:01L HLA-DQA1*01:03-B1*06:01L HLA-DQA1*02:01-B1*03:03L
  REGION 1..10: note = CONT. FROM ABOVE: HLA-DRB1*15:03L
YENFNQHEVL

SEQ ID NO: 8502 - protein, 10 aa, Severe acute respiratory syndrome coronavirus 2
  REGION 1..10: note = Table B: HLA-DQA1*03:02-B1*03:03L HLA-DQA1*05:01-B1*03:01L HLA-DQA1*01:02-B1*06:02L HLA-DQA1*01-B1*05L HLA-DQA1*05:05-B1*03:19L HLA-DQA1*05:01-B1*02:01L HLA-DPA1*03:01-B1*105:01L HLA-DQA1*03:01-B1*03:02L
  REGION 1..10: note = CONT. FROM ABOVE: HLA-DPA1*01:02-B1*04:01L HLA-DQA1*01:03-B1*06: 01L HLA-DQA1*02:01-B1*03:03L HLA-DRB1*15:03L
ENFNQHEVLL

SEQ ID NO: 8503 - protein, 10 aa, Severe acute respiratory syndrome coronavirus 2
  REGION 1..10: note = Table B: HLA-DQA1*03:02-B1*03:03L HLA-DQA1*03:01-B1*03:02L HLA-DPA1*01:02-B1*04:01L HLA-DRB1*16:01L HLA-DQA1*02:01-B1*03:03L
NQHEVLLAPL

SEQ ID NO: 8504 - protein, 11 aa, Severe acute respiratory syndrome coronavirus 2
  REGION 1..11: note = Table B: HLA-DQA1*03:02-B1*03:03L
HEVLLAPLLSA

SEQ ID NO: 8505 - protein, 10 aa, Severe acute respiratory syndrome coronavirus 2
  REGION 1..10: note = Table B: HLA-DQA1*03:02-B1*03:03L HLA-DQA1*05:05-B1*03:19L
LLAPLLSAGI

SEQ ID NO: 8506 - protein, 13 aa, Severe acute respiratory syndrome coronavirus 2
  REGION 1..13: note = Table B: HLA-DQA1*03:02-B1*03:03L HLA-DQA1*05:01-B1*03:01L HLA-DQA1*01:02-B1*06:02L HLA-DQA1*05:05-B1*03:19L HLA-DQA1*05:01-B1*02:01L HLA-DPA1*03:01-B1*105:01L HLA-DQA1*03:01-B1*03:02L HLA-DQA1*05:05-B1*03:01L
  REGION 1..13: note = CONT. FROM ABOVE: HLA-DQA1*01:03-B1*06:01L HLA-DQA1*02:01-B1*03: 03L
APLLSAGIFGADP

SEQ ID NO: 8507 - protein, 11 aa, Severe acute respiratory syndrome coronavirus 2
  REGION 1..11: note = Table B: HLA-DQA1*03:02-B1*03:03L HLA-DQA1*01-B1*05L HLA-DQA1*05:01-B1*02:01L HLA-DQA1*01:03-B1*06:01L
SAGIFGADPIH

SEQ ID NO: 8508 - protein, 10 aa, Severe acute respiratory syndrome coronavirus 2
  REGION 1..10: note = Table B: HLA-DQA1*03:02-B1*03:03L HLA-DQA1*05:01-B1*03:01L HLA-DRB1*04:03L HLA-DRB1*13:03L HLA-DRB1*01:03L HLA-DRB1*04:02L HLA-DRB1*04:05L HLA-DRB1*01:02L HLA-DRB4*03:01NL HLA-DRB1*14:01L HLA-DQA1*01-B1*05L HLA-DQA1*05:05-B1*03:19L
  REGION 1..10: note = CONT. FROM ABOVE: HLA-DQA1*05:01-B1*02:01L HLA-DRB1*12:01L HLA-D QA1*03:01-B1*03:02L HLA-DQA1*05:05-B1*03:01L HLA-DRB1*14:17L HLA -DPA1*01:02-B1*04:01L HLA-DRB1*16:01L HLA-DQA1*01:03-B1*06:01L H LA-DQA1*02:01-B1*03:03L
GIFGADPIHS

SEQ ID NO: 8509 - protein, 10 aa, Severe acute respiratory syndrome coronavirus 2
  REGION 1..10: note = Table B: HLA-DQA1*03:02-B1*03:03M HLA-DQA1*05:01-B1*03:01L HLA-DRB1*04:01L HLA-DRB1*04:03L HLA-DRB1*13:02L HLA-DRB1*13:03L HLA-DRB1*01:03L HLA-DRB1*04:02L HLA-DRB1*04:05L HLA-DQA1*01:02-B1*06:02M HLA-DRB1*01:01L HLA-DRB1*01:02L
  REGION 1..10: note = CONT. FROM ABOVE: HLA-DRB4*03:01NL HLA-DRB1*08:77L HLA-DRB3*02:0 1L HLA-DPA1*01:03-B1*03:01L HLA-DPA1*03:01-B1*04:02L HLA-DRB1*03 :01L HLA-DRB1*14:01L HLA-DRB1*11:02L HLA-DRB1*11:03L HLA-DRB1*11 :04L HLA-DRB1*14:02L HLA-DQA1*01:01-B1*05:01L HLA-DRB1*08:01L
  REGION 1..10: note = CONT. FROM ABOVE: HLA-DRB1*11:01L HLA-DQA1*01-B1*05L HLA-DQA1*05 :05-B1*03:19L HLA-DQA1*05:01-B1*02:01L HLA-DRB4*01:01L HLA-DPA1* 01:03-B1*04:01L HLA-DQA1*05:05-B1*03:116L HLA-DRB1*09:01L HLA-DP A1*01:03-B1*04:02L HLA-DRB1*12:01L HLA-DPA1*02:01-B1*13:01M
  REGION 1..10: note = CONT. FROM ABOVE: HLA-DPA1*03:01-B1*105:01M HLA-DQA1*03:01-B1*03 :02L HLA-DPA1*01:03-B1*104:01L HLA-DQA1*05:05-B1*03:01L HLA-DPA1 *01:02-B1*04:01L HLA-DRB1*07:01L HLA-DRB1*10:01L HLA-DRB1*16:01L HLA-DQA1*01:03-B1*06:01M HLA-DRB1*04:08L HLA-DRB1*08:03L
  REGION 1..10: note = CONT. FROM ABOVE: HLA-DQA1*02:01-B1*03:03L HLA-DRB1*15:03L
IFGADPIHSL

SEQ ID NO: 8510 - protein, 10 aa, Severe acute respiratory syndrome coronavirus 2
  REGION 1..10: note = Table B: HLA-DQA1*03:02-B1*03:03L HLA-DQA1*05:01-B1*03:01L HLA-DQA1*01:02-B1*06:02L HLA-DPA1*03:01-B1*04:02L HLA-DQA1*01-B1*05L HLA-DQA1*05:05-B1*03:19L HLA-DQA1*05:01-B1*02:01L HLA-DQA1*05:05-B1*03:116L
  REGION 1..10: note = CONT. FROM ABOVE: HLA-DPA1*03:01-B1*105:01L HLA-DQA1*03:01-B1*03 :02L HLA-DPA1*01:03-B1*104:01L HLA-DPA1*01:02-B1*04:01L HLA-DRB1 *16:01L HLA-DQA1*01:03-B1*06:01L HLA-DQA1*02:01-B1*03:03L HLA-DR B1*15:03L
GADPIHSLRV

SEQ ID NO: 8511 - protein, 10 aa, Severe acute respiratory syndrome coronavirus 2
  REGION 1..10: note = Table B: HLA-DQA1*03:02-B1*03:03L HLA-DQA1*05:01-B1*03:01L HLA-DPA1*03:01-B1*04:02L HLA-DQA1*01-B1*05L HLA-DQA1*05:05-B1*03:19L HLA-DQA1*05:01-B1*02:01L HLA-DQA1*03:01-B1*03:02L HLA-DPA1*01:02-B1*04:01L
  REGION 1..10: note = CONT. FROM ABOVE: HLA-DRB1*16:01L HLA-DQA1*02:01-B1*03:03L
VDTVRTNVYL

SEQ ID NO: 8512 - protein, 10 aa, Severe acute respiratory syndrome coronavirus 2
  REGION 1..10: note = Table B: HLA-DQA1*03:02-B1*03:03L HLA-DQA1*01-B1*05L HLA-DPA1*03:01-B1*105:01L HLA-DQA1*03:01-B1*03:02L HLA-DQA1*01:03-B1*06:01L HLA-DQA1*02:01-B1*03:03L
NVYLAVFDKN

SEQ ID NO: 8513 - protein, 10 aa, Severe acute respiratory syndrome coronavirus 2
  REGION 1..10: note = Table B: HLA-DQA1*03:02-B1*03:03L HLA-DRB1*04:03L HLA-DRB1*04:05L HLA-DQA1*01:02-B1*06:02L HLA-DRB1*01:02L HLA-DPA1*03:01-B1*04:02L HLA-DQA1*01-B1*05L HLA-DQA1*05:01-B1*02:01L HLA-DPA1*01:03-B1*04:01L
  REGION 1..10: note = CONT. FROM ABOVE: HLA-DRB1*12:01L HLA-DPA1*02:01-B1*13:01L HLA-D PA1*03:01-B1*105:01L HLA-DQA1*03:01-B1*03:02L HLA-DPA1*01:02-B1* 04:01L HLA-DRB1*16:01L HLA-DQA1*01:03-B1*06:01L HLA-DQA1*02:01-B 1*03:03L HLA-DRB1*15:03L
VYLAVFDKNL

SEQ ID NO: 8514 - protein, 10 aa, Severe acute respiratory syndrome coronavirus 2
  REGION 1..10: note = Table B: HLA-DQA1*03:02-B1*03:03L HLA-DQA1*05:01-B1*03:01L HLA-DQA1*01:02-B1*06:02L HLA-DPA1*01:03-B1*03:01L HLA-DPA1*03:01-B1*04:02L HLA-DRB1*14:01L HLA-DRB1*14:02L HLA-DQA1*01-B1*05L HLA-DQA1*05:05-B1*03:19L
  REGION 1..10: note = CONT. FROM ABOVE: HLA-DQA1*05:01-B1*02:01L HLA-DPA1*01:03-B1*04: 01L HLA-DPA1*02:01-B1*13:01L HLA-DPA1*03:01-B1*105:01L HLA-DQA1* 03:01-B1*03:02L HLA-DPA1*01:03-B1*104:01L HLA-DPA1*01:02-B1*04:0 1L HLA-DRB1*16:01L HLA-DQA1*01:03-B1*06:01L
  REGION 1..10: note = CONT. FROM ABOVE: HLA-DQA1*02:01-B1*03:03L HLA-DRB1*15:03L
VFDKNLYDKL

SEQ ID NO: 8515 - protein, 10 aa, Severe acute respiratory syndrome coronavirus 2
  REGION 1..10: note = Table B: HLA-DQA1*03:02-B1*03:03M HLA-DQA1*05:01-B1*03:01M HLA-DRB1*04:01L HLA-DRB1*04:03L HLA-DRB1*13:02L HLA-DRB1*13:03M HLA-DRB1*01:03M HLA-DRB1*04:02L HLA-DRB1*04:05M HLA-DQA1*01:02-B1*06:02H HLA-DRB1*01:01M HLA-DRB1*01:02L
  REGION 1..10: note = CONT. FROM ABOVE: HLA-DRB4*03:01NL HLA-DRB1*08:77M HLA-DPA1*01:0 3-B1*03:01L HLA-DPA1*03:01-B1*04:02M HLA-DRB1*03:01L HLA-DRB1*14 :01L HLA-DRB1*11:03L HLA-DRB1*11:04L HLA-DRB1*14:02M HLA-DQA1*01 :01-B1*05:01L HLA-DRB1*08:01L HLA-DRB1*11:01L HLA-DRB5*01:01L
  REGION 1..10: note = CONT. FROM ABOVE: HLA-DQA1*01-B1*05L HLA-DQA1*05:05-B1*03:19L HL A-DQA1*05:01-B1*02:01M HLA-DRB4*01:01L HLA-DPA1*01:03-B1*04:01M HLA-DQA1*05:05-B1*03:116M HLA-DRB1*09:01L HLA-DPA1*01:03-B1*04:0 2M HLA-DRB1*12:01L HLA-DPA1*02:01-B1*13:01M
  REGION 1..10: note = CONT. FROM ABOVE: HLA-DPA1*03:01-B1*105:01M HLA-DQA1*03:01-B1*03 :02L HLA-DPA1*01:03-B1*104:01L HLA-DQA1*05:05-B1*03:01L HLA-DPA1 *01:02-B1*04:01L HLA-DRB1*07:01L HLA-DRB1*10:01L HLA-DRB1*16:01M HLA-DQA1*01:03-B1*06:01M HLA-DRB1*08:02L HLA-DRB1*08:03L
  REGION 1..10: note = CONT. FROM ABOVE: HLA-DQA1*02:01-B1*03:03M HLA-DRB1*15:01L HLA -DRB1*15:03M
NLYDKLVSSF

SEQ ID NO: 8516 - protein, 10 aa, Severe acute respiratory syndrome coronavirus 2
  REGION 1..10: note = Table B: HLA-DQA1*03:02-B1*03:03L HLA-DQA1*05:01-B1*02:01L HLA-DPA1*02:01-B1*13:01L HLA-DPA1*03:01-B1*105:01L HLA-DRB1*16:01L HLA-DQA1*01:03-B1*06:01L HLA-DRB1*15:03L
LYDKLVSSFL

SEQ ID NO: 8517 - protein, 13 aa, Severe acute respiratory syndrome coronavirus 2
  REGION 1..13: note = Table B: HLA-DQA1*03:02-B1*03:03L HLA-DQA1*05:01-B1*03:01L HLA-DRB1*04:03L HLA-DRB1*13:02L HLA-DRB1*04:05L HLA-DRB1*01:02L HLA-DQA1*05:01-B1*02:01L HLA-DPA1*02:01-B1*13:01L HLA-DPA1*01:03-B1*104:01L HLA-DQA1*05:05-B1*03:01L
  REGION 1..13: note = CONT. FROM ABOVE: HLA-DRB1*15:03L
DKLVSSFLEMKSE

SEQ ID NO: 8518 - protein, 12 aa, Severe acute respiratory syndrome coronavirus 2
  REGION 1..12: note = Table B: HLA-DQA1*03:02-B1*03:03L HLA-DQA1*05:01-B1*03:01L HLA-DRB1*04:01L HLA-DRB1*13:02L HLA-DQA1*01:02-B1*06:02L HLA-DRB1*08:04L HLA-DRB1*08:77L HLA-DPA1*01:03-B1*03:01L HLA-DPA1*03:01-B1*04:02L HLA-DRB1*11:03L HLA-DRB1*11:04L
  REGION 1..12: note = CONT. FROM ABOVE: HLA-DQA1*01:01-B1*05:01L HLA-DRB1*11:01L HLA-D RB5*01:01L HLA-DQA1*05:01-B1*02:01L HLA-DRB1*09:01L HLA-DPA1*01: 03-B1*04:02L HLA-DRB1*12:02L HLA-DRB3*01:01L HLA-DPA1*02:01-B1*1 3:01L HLA-DPA1*03:01-B1*105:01L HLA-DPA1*01:03-B1*02:01L
  REGION 1..12: note = CONT. FROM ABOVE: HLA-DQA1*05:05-B1*03:01L HLA-DPA1*01:02-B1*04: 01L HLA-DRB1*07:01L HLA-DQA1*01:03-B1*06:01L HLA-DRB1*15:03L
VSSFLEMKSEKQ

SEQ ID NO: 8519 - protein, 12 aa, Severe acute respiratory syndrome coronavirus 2
  REGION 1..12: note = Table B: HLA-DQA1*03:02-B1*03:03L HLA-DQA1*05:01-B1*03:01L HLA-DRB1*13:02L HLA-DRB1*01:01L HLA-DPA1*01:03-B1*03:01L HLA-DRB1*11:03L HLA-DRB1*14:02L HLA-DRB1*08:01L HLA-DRB1*11:01L HLA-DQA1*01-B1*05L HLA-DQA1*05:05-B1*03:19L
  REGION 1..12: note = CONT. FROM ABOVE: HLA-DQA1*05:01-B1*02:01L HLA-DRB1*04:10L HLA-D RB3*01:01L HLA-DPA1*02:01-B1*13:01L HLA-DQA1*05:05-B1*03:01L HLA -DRB1*08:03L
FLEMKSEKQVEQ

SEQ ID NO: 8520 - protein, 10 aa, Severe acute respiratory syndrome coronavirus 2
  REGION 1..10: note = Table B: HLA-DQA1*03:02-B1*03:03L HLA-DQA1*05:05-B1*03:19L
KQVEQKIAEI

SEQ ID NO: 8521 - protein, 12 aa, Severe acute respiratory syndrome coronavirus 2
  REGION 1..12: note = Table B: HLA-DQA1*03:02-B1*03:03L HLA-DQA1*05:01-B1*03:01L HLA-DRB1*13:02L HLA-DRB1*13:03L HLA-DRB1*01:03L HLA-DRB1*04:02L HLA-DRB1*04:05L HLA-DQA1*01:02-B1*06:02L HLA-DRB1*01:02L HLA-DPA1*01:03-B1*03:01L HLA-DQA1*01:01-B1*05:01L
  REGION 1..12: note = CONT. FROM ABOVE: HLA-DRB1*08:01L HLA-DQA1*01-B1*05L HLA-DQA1*05 :05-B1*03:19L HLA-DQA1*05:01-B1*02:01L HLA-DRB1*04:10L HLA-DRB1* 12:01L HLA-DPA1*02:01-B1*13:01L HLA-DPA1*03:01-B1*105:01L HLA-DR B1*14:54L HLA-DPA1*01:03-B1*104:01L HLA-DQA1*05:05-B1*03:01L
  REGION 1..12: note = CONT. FROM ABOVE: HLA-DRB1*14:17L HLA-DPA1*01:02-B1*04:01L HLA-D RB1*16:01L HLA-DQA1*01:03-B1*06:01L HLA-DRB1*04:08L HLA-DRB1*15: 03L
VEQKIAEIPKEE

SEQ ID NO: 8522 - protein, 10 aa, Severe acute respiratory syndrome coronavirus 2
  REGION 1..10: note = Table B: HLA-DQA1*03:02-B1*03:03L HLA-DQA1*05:01-B1*03:01L HLA-DQA1*01:02-B1*06:02L HLA-DRB1*01:02L HLA-DPA1*03:01-B1*04:02L HLA-DRB1*14:01L HLA-DRB1*14:02L HLA-DQA1*05:05-B1*03:19L HLA-DQA1*05:01-B1*02:01L
  REGION 1..10: note = CONT. FROM ABOVE: HLA-DQA1*05:05-B1*03:116L HLA-DRB1*09:01L HLA- DPA1*02:01-B1*13:01L HLA-DPA1*03:01-B1*105:01L HLA-DQA1*03:01-B1 *03:02L HLA-DPA1*01:03-B1*104:01L HLA-DPA1*01:02-B1*04:01L HLA-D RB1*16:01L HLA-DQA1*01:03-B1*06:01L HLA-DQA1*02:01-B1*03:03L
  REGION 1..10: note = CONT. FROM ABOVE: HLA-DRB1*15:03L
KIAEIPKEEV

SEQ ID NO: 8523 - protein, 10 aa, Severe acute respiratory syndrome coronavirus 2
  REGION 1..10: note = Table B: HLA-DQA1*03:02-B1*03:03L
AEIPKEEVKP

SEQ ID NO: 8524 - protein, 10 aa, Severe acute respiratory syndrome coronavirus 2
  REGION 1..10: note = Table B: HLA-DQA1*03:02-B1*03:03L HLA-DQA1*05:01-B1*03:01L HLA-DRB1*13:03L HLA-DRB1*01:03L HLA-DQA1*01:02-B1*06:02L HLA-DPA1*01:03-B1*03:01L HLA-DRB1*14:01L HLA-DRB1*14:02L HLA-DQA1*05:05-B1*03:19L HLA-DQA1*05:01-B1*02:01L
  REGION 1..10: note = CONT. FROM ABOVE: HLA-DPA1*01:03-B1*04:01L HLA-DPA1*03:01-B1*105 :01L HLA-DQA1*03:01-B1*03:02L HLA-DPA1*01:02-B1*04:01L HLA-DRB1* 16:01L HLA-DQA1*01:03-B1*06:01L HLA-DQA1*02:01-B1*03:03L HLA-DRB 1*15:03L
EIPKEEVKPF

SEQ ID NO: 8525 - protein, 12 aa, Severe acute respiratory syndrome coronavirus 2
  REGION 1..12: note = Table B: HLA-DQA1*03:02-B1*03:03L HLA-DQA1*05:01-B1*03:01L HLA-DRB1*04:03L HLA-DRB1*04:02L HLA-DQA1*01:02-B1*06:02L HLA-DRB1*01:02L HLA-DQA1*01-B1*05L HLA-DQA1*05:01-B1*02:01L HLA-DRB1*14:17L HLA-DRB1*16:01L HLA-DQA1*01:03-B1*06:01L
  REGION 1..12: note = CONT. FROM ABOVE: HLA-DRB1*04:08L HLA-DQA1*02:01-B1*03:03L HLA-D RB1*15:03L
EEVKPFITESKP

SEQ ID NO: 8526 - protein, 13 aa, Severe acute respiratory syndrome coronavirus 2
  REGION 1..13: note = Table B: HLA-DQA1*03:02-B1*03:03L HLA-DRB1*04:04L HLA-DRB4*03:01NL HLA-DRB1*08:77L HLA-DRB3*02:01L HLA-DPA1*01:03-B1*03:01L HLA-DPA1*03:01-B1*04:02L HLA-DRB1*11:03L HLA-DRB1*14:02L HLA-DQA1*01:01-B1*05:01L
  REGION 1..13: note = CONT. FROM ABOVE: HLA-DRB1*11:01L HLA-DQA1*05:05-B1*03:19L HLA-D QA1*05:05-B1*03:116L HLA-DRB1*04:10L HLA-DRB1*09:01L HLA-DPA1*01 :03-B1*04:02L HLA-DRB1*12:02L HLA-DRB3*01:01L HLA-DPA1*02:01-B1* 13:01L HLA-DPA1*03:01-B1*105:01L HLA-DQA1*05:05-B1*03:01L
  REGION 1..13: note = CONT. FROM ABOVE: HLA-DPA1*01:02-B1*04:01L HLA-DRB1*07:01L HLA-D RB1*10:01L HLA-DQA1*01:03-B1*06:01L HLA-DRB1*08:02L
VKPFITESKPSVE

SEQ ID NO: 8527 - protein, 10 aa, Severe acute respiratory syndrome coronavirus 2
  REGION 1..10: note = Table B: HLA-DQA1*03:02-B1*03:03L HLA-DQA1*05:01-B1*03:01L HLA-DRB1*04:03L HLA-DRB1*04:02L HLA-DRB4*03:01NL HLA-DQA1*05:05-B1*03:19L HLA-DQA1*05:01-B1*02:01L HLA-DQA1*03:01-B1*03:02L HLA-DQA1*05:05-B1*03:01L
  REGION 1..10: note = CONT. FROM ABOVE: HLA-DRB1*14:17L HLA-DRB1*16:01L HLA-DQA1*01:03 -B1*06:01L HLA-DQA1*02:01-B1*03:03L
ITESKPSVEQ

SEQ ID NO: 8528 - protein, 15 aa, Severe acute respiratory syndrome coronavirus 2
  REGION 1..15: note = Table B: HLA-DQA1*03:02-B1*03:03L HLA-DRB1*04:02L HLA-DRB1*04:04L HLA-DRB1*08:04L HLA-DPA1*03:01-B1*04:02L HLA-DQA1*05:05-B1*03:19L HLA-DQA1*05:01-B1*02:01L HLA-DPA1*01:03-B1*04:02L HLA-DPA1*01:02-B1*04:01L
DDKKIKACVEEVTTT

SEQ ID NO: 8529 - protein, 10 aa, Severe acute respiratory syndrome coronavirus 2
  REGION 1..10: note = Table B: HLA-DQA1*03:02-B1*03:03L HLA-DQA1*05:01-B1*03:01L HLA-DRB1*13:02L HLA-DRB1*13:03M HLA-DRB1*01:03L HLA-DRB1*04:02L HLA-DQA1*01:02-B1*06:02L HLA-DRB1*01:01L HLA-DRB4*03:01NL HLA-DRB3*02:01L HLA-DRB1*14:01L HLA-DRB1*11:04L HLA-DRB1*14:02L
  REGION 1..10: note = CONT. FROM ABOVE: HLA-DRB1*08:01L HLA-DRB5*01:01L HLA-DQA1*05:01 -B1*02:01L HLA-DPA1*01:03-B1*04:01L HLA-DPA1*01:03-B1*04:02L HLA -DRB1*12:01M HLA-DRB1*12:02L HLA-DPA1*03:01-B1*105:01L HLA-DQA1* 03:01-B1*03:02M HLA-DQA1*05:05-B1*03:01M HLA-DRB1*14:17L
  REGION 1..10: note = CONT. FROM ABOVE: HLA-DRB1*16:01L HLA-DQA1*01:03-B1*06:01L HLA-D RB1*08:03L HLA-DQA1*02:01-B1*03:03L HLA-DRB1*15:01L
EVTTTLEETK

SEQ ID NO: 8530 - protein, 10 aa, Severe acute respiratory syndrome coronavirus 2
  REGION 1..10: note = Table B: HLA-DQA1*03:02-B1*03:03L HLA-DQA1*05:01-B1*03:01L HLA-DRB1*04:03L HLA-DRB1*13:03L HLA-DRB1*01:03L HLA-DRB1*04:05L HLA-DQA1*01:02-B1*06:02L HLA-DRB4*03:01NL HLA-DRB1*08:77L HLA-DRB3*02:01L HLA-DPA1*01:03-B1*03:01L
  REGION 1..10: note = CONT. FROM ABOVE: HLA-DPA1*03:01-B1*04:02L HLA-DRB1*14:01L HLA-D RB1*14:02L HLA-DQA1*01-B1*05L HLA-DQA1*05:05-B1*03:19L HLA-DQA1* 05:01-B1*02:01L HLA-DRB4*01:01L HLA-DPA1*01:03-B1*04:01L HLA-DQA 1*05:05-B1*03:116L HLA-DPA1*01:03-B1*04:02L HLA-DRB1*12:01L
  REGION 1..10: note = CONT. FROM ABOVE: HLA-DPA1*02:01-B1*13:01L HLA-DPA1*03:01-B1*105 :01L HLA-DQA1*03:01-B1*03:02L HLA-DPA1*01:03-B1*104:01L HLA-DQA1 *05:05-B1*03:01L HLA-DPA1*01:02-B1*04:01L HLA-DRB1*07:01L HLA-DR B1*10:01L HLA-DRB1*16:01L HLA-DQA1*01:03-B1*06:01L
  REGION 1..10: note = CONT. FROM ABOVE: HLA-DQA1*02:01-B1*03:03L HLA-DRB1*15:03L
VTTTLEETKF

SEQ ID NO: 8531 - protein, 10 aa, Severe acute respiratory syndrome coronavirus 2
  REGION 1..10: note = Table B: HLA-DQA1*03:02-B1*03:03L HLA-DQA1*05:01-B1*03:01L HLA-DRB1*04:03L HLA-DRB1*01:03L HLA-DQA1*01:02-B1*06:02L HLA-DRB1*01:02L HLA-DPA1*01:03-B1*03:01L HLA-DPA1*03:01-B1*04:02L HLA-DRB1*14:01L HLA-DRB1*08:01L
  REGION 1..10: note = CONT. FROM ABOVE: HLA-DQA1*01-B1*05L HLA-DQA1*05:01-B1*02:01L HL A-DPA1*01:03-B1*04:01L HLA-DPA1*01:03-B1*04:02L HLA-DRB1*12:01L HLA-DPA1*03:01-B1*105:01L HLA-DQA1*03:01-B1*03:02L HLA-DPA1*01:0 3-B1*02:01L HLA-DPA1*01:02-B1*04:01M HLA-DRB1*16:01L
  REGION 1..10: note = CONT. FROM ABOVE: HLA-DQA1*01:03-B1*06:01L HLA-DRB1*04:08L HLA-D QA1*02:01-B1*03:03L HLA-DRB1*15:03L
LEETKFLTEN

SEQ ID NO: 8532 - protein, 10 aa, Severe acute respiratory syndrome coronavirus 2
  REGION 1..10: note = Table B: HLA-DQA1*03:02-B1*03:03M HLA-DQA1*05:01-B1*03:01L HLA-DRB1*13:03L HLA-DRB1*08:77L HLA-DPA1*03:01-B1*04:02L HLA-DRB1*11:02L HLA-DQA1*05:05-B1*03:19M HLA-DQA1*05:01-B1*02:01L HLA-DRB4*01:01L
  REGION 1..10: note = CONT. FROM ABOVE: HLA-DPA1*01:03-B1*04:01L HLA-DQA1*05:05-B1*03: 116L HLA-DRB1*09:01L HLA-DPA1*01:03-B1*04:02L HLA-DQA1*03:01-B1* 03:02M HLA-DPA1*01:03-B1*104:01M HLA-DPA1*01:02-B1*04:01L HLA-DR B1*16:01L HLA-DQA1*01:03-B1*06:01L HLA-DQA1*02:01-B1*03:03L
  REGION 1..10: note = CONT. FROM ABOVE: HLA-DRB1*15:03L
EETKFLTENL

SEQ ID NO: 8533 - protein, 10 aa, Severe acute respiratory syndrome coronavirus 2
  REGION 1..10: note = Table B: HLA-DQA1*03:02-B1*03:03L HLA-DQA1*01:02-B1*06:02L HLA-DQA1*01-B1*05L HLA-DQA1*05:01-B1*02:01L HLA-DPA1*03:01-B1*105:01L HLA-DQA1*03:01-B1*03:02L HLA-DPA1*01:02-B1*04:01L HLA-DQA1*01:03-B1*06:01L
  REGION 1..10: note = CONT. FROM ABOVE: HLA-DQA1*02:01-B1*03:03L HLA-DRB1*15:03L
ETKFLTENLL

SEQ ID NO: 8534 - protein, 10 aa, Severe acute respiratory syndrome coronavirus 2
  REGION 1..10: note = Table B: HLA-DQA1*03:02-B1*03:03L HLA-DQA1*05:01-B1*03:01L HLA-DRB1*04:03L HLA-DRB1*01:03L HLA-DRB1*04:05L HLA-DQA1*01:02-B1*06:02M HLA-DRB1*01:01L HLA-DRB1*08:77L HLA-DPA1*01:03-B1*03:01L HLA-DPA1*03:01-B1*04:02L
  REGION 1..10: note = CONT. FROM ABOVE: HLA-DRB1*03:01L HLA-DRB1*11:02L HLA-DRB1*14:02 L HLA-DQA1*01-B1*05L HLA-DQA1*05:05-B1*03:19M HLA-DQA1*05:01-B1* 02:01M HLA-DRB4*01:01M HLA-DPA1*01:03-B1*04:01M HLA-DQA1*05:05-B 1*03:116L HLA-DPA1*01:03-B1*04:02L HLA-DRB1*12:01L
  REGION 1..10: note = CONT. FROM ABOVE: HLA-DPA1*02:01-B1*13:01M HLA-DPA1*03:01-B1*105 :01L HLA-DPA1*01:03-B1*104:01L HLA-DQA1*05:05-B1*03:01L HLA-DPA1 *01:02-B1*04:01L HLA-DRB1*10:01L HLA-DRB1*16:01L HLA-DQA1*01:03- B1*06:01M HLA-DRB1*08:02L HLA-DQA1*02:01-B1*03:03L
  REGION 1..10: note = CONT. FROM ABOVE: HLA-DRB1*15:03L
KFLTENLLLY

SEQ ID NO: 8535 - protein, 10 aa, Severe acute respiratory syndrome coronavirus 2
  REGION 1..10: note = Table B: HLA-DQA1*03:02-B1*03:03L HLA-DRB1*04:03L HLA-DRB1*13:03L HLA-DRB1*01:03L HLA-DRB1*04:02L HLA-DRB1*04:05L HLA-DRB4*03:01NL HLA-DQA1*01-B1*05L HLA-DQA1*05:01-B1*02:01L HLA-DRB1*12:01L HLA-DQA1*03:01-B1*03:02L HLA-DRB1*14:54L
  REGION 1..10: note = CONT. FROM ABOVE: HLA-DRB1*14:17L HLA-DPA1*01:02-B1*04:01L HLA-D RB1*16:01L HLA-DQA1*02:01-B1*03:03L
IDINGNLHPD

SEQ ID NO: 8536 - protein, 12 aa, Severe acute respiratory syndrome coronavirus 2
  REGION 1..12: note = Table B: HLA-DQA1*03:02-B1*03:03L HLA-DRB1*04:02L HLA-DQA1*01:02-B1*06:02L HLA-DQA1*05:01-B1*02:01L HLA-DQA1*05:05-B1*03:01L HLA-DQA1*01:03-B1*06:01L
DINGNLHPDSAT

SEQ ID NO: 8537 - protein, 10 aa, Severe acute respiratory syndrome coronavirus 2
  REGION 1..10: note = Table B: HLA-DQA1*03:02-B1*03:03L HLA-DQA1*05:01-B1*03:01L HLA-DRB1*13:03L HLA-DRB1*04:02L HLA-DPA1*03:01-B1*04:02L HLA-DRB1*14:01L HLA-DRB1*08:01L HLA-DQA1*01-B1*05L HLA-DQA1*05:01-B1*02:01L HLA-DQA1*05:05-B1*03:116L
  REGION 1..10: note = CONT. FROM ABOVE: HLA-DQA1*03:01-B1*03:02L HLA-DPA1*01:02-B1*04: 01L HLA-DRB1*16:01L HLA-DQA1*02:01-B1*03:03L
GNLHPDSATL

SEQ ID NO: 8538 - protein, 10 aa, Severe acute respiratory syndrome coronavirus 2
  REGION 1..10: note = Table B: HLA-DQA1*03:02-B1*03:03L
NLHPDSATLV

SEQ ID NO: 8539 - protein, 12 aa, Severe acute respiratory syndrome coronavirus 2
  REGION 1..12: note = Table B: HLA-DQA1*03:02-B1*03:03L HLA-DQA1*05:01-B1*03:01L HLA-DRB1*04:03L HLA-DQA1*01:02-B1*06:02L HLA-DPA1*01:03-B1*03:01L HLA-DQA1*01:01-B1*05:01L HLA-DQA1*01-B1*05L HLA-DQA1*05:05-B1*03:19L
  REGION 1..12: note = CONT. FROM ABOVE: HLA-DQA1*05:01-B1*02:01L HLA-DPA1*03:01-B1*105 :01L HLA-DQA1*03:01-B1*03:02L HLA-DQA1*05:05-B1*03:01L HLA-DRB1* 16:01L HLA-DQA1*02:01-B1*03:03L
HPDSATLVSDID

SEQ ID NO: 8540 - protein, 12 aa, Severe acute respiratory syndrome coronavirus 2
  REGION 1..12: note = Table B: HLA-DQA1*03:02-B1*03:03L HLA-DQA1*03:01-B1*03:02L
DSATLVSDIDIT

SEQ ID NO: 8541 - protein, 10 aa, Severe acute respiratory syndrome coronavirus 2
  REGION 1..10: note = Table B: HLA-DQA1*03:02-B1*03:03L HLA-DQA1*01:02-B1*06:02L HLA-DRB1*14:02L HLA-DQA1*05:05-B1*03:19L HLA-DRB4*01:01L HLA-DPA1*02:01-B1*13:01L HLA-DPA1*03:01-B1*105:01L HLA-DQA1*01:03-B1*06:01L HLA-DQA1*02:01-B1*03:03L
  REGION 1..10: note = CONT. FROM ABOVE: HLA-DRB1*15:03L
TLVSDIDITF

SEQ ID NO: 8542 - protein, 10 aa, Severe acute respiratory syndrome coronavirus 2
  REGION 1..10: note = Table B: HLA-DQA1*03:02-B1*03:03L HLA-DPA1*03:01-B1*04:02L HLA-DRB1*14:02L HLA-DQA1*03:01-B1*03:02L HLA-DRB1*15:03L
LVSDIDITFL

SEQ ID NO: 8543 - protein, 13 aa, Severe acute respiratory syndrome coronavirus 2
  REGION 1..13: note = Table B: HLA-DQA1*03:02-B1*03:03L HLA-DRB1*04:03L HLA-DRB1*13:02L HLA-DRB1*04:05L HLA-DRB1*01:02L HLA-DRB3*02:01L HLA-DPA1*01:03-B1*03:01L HLA-DPA1*03:01-B1*04:02L HLA-DRB1*11:04L HLA-DRB1*14:02L HLA-DQA1*01:01-B1*05:01L
  REGION 1..13: note = CONT. FROM ABOVE: HLA-DRB1*11:01L HLA-DQA1*01-B1*05L HLA-DPA1*01 :03-B1*04:01L HLA-DPA1*01:03-B1*04:02L HLA-DRB3*01:01L HLA-DRB1* 14:54L HLA-DPA1*01:03-B1*104:01L HLA-DQA1*05:05-B1*03:01L HLA-DR B1*14:17L HLA-DRB1*08:03L
DIDITFLKKDAPY

SEQ ID NO: 8544 - protein, 13 aa, Severe acute respiratory syndrome coronavirus 2
  REGION 1..13: note = Table B: HLA-DQA1*03:02-B1*03:03L HLA-DRB1*01:01L HLA-DRB4*03:01NL HLA-DRB1*08:77L HLA-DRB3*02:01L HLA-DPA1*03:01-B1*04:02L HLA-DRB1*11:02L HLA-DRB1*11:03L HLA-DRB1*11:04L HLA-DRB1*11:01L HLA-DRB5*01:01L
  REGION 1..13: note = CONT. FROM ABOVE: HLA-DQA1*01-B1*05L HLA-DRB1*13:01L HLA-DRB4*01 :01L HLA-DPA1*01:03-B1*04:01L HLA-DRB1*04:10L HLA-DRB1*09:01L HL A-DPA1*01:03-B1*04:02L HLA-DRB1*12:02L HLA-DPA1*02:01-B1*13:01L HLA-DQA1*05:05-B1*03:01L HLA-DRB1*07:01L HLA-DRB1*10:01L
  REGION 1..13: note = CONT. FROM ABOVE: HLA-DRB1*08:03L
ITFLKKDAPYIVG

SEQ ID NO: 8545 - protein, 12 aa, Severe acute respiratory syndrome coronavirus 2
  REGION 1..12: note = Table B: HLA-DQA1*03:02-B1*03:03L HLA-DRB1*04:03L HLA-DQA1*05:01-B1*02:01L
DAPYIVGDVVQE

SEQ ID NO: 8546 - protein, 12 aa, Severe acute respiratory syndrome coronavirus 2
  REGION 1..12: note = Table B: HLA-DQA1*03:02-B1*03:03L HLA-DRB1*13:02L HLA-DRB1*13:03L HLA-DRB1*01:03L HLA-DRB1*04:02L HLA-DRB1*04:04L HLA-DRB1*04:05L HLA-DRB4*03:01NL HLA-DRB1*08:77L HLA-DRB1*11:04L HLA-DQA1*05:01-B1*02:01L HLA-DRB1*04:10L HLA-DRB1*12:01L
  REGION 1..12: note = CONT. FROM ABOVE: HLA-DRB1*12:02L HLA-DPA1*03:01-B1*105:01L HLA- DRB1*14:54L HLA-DRB1*10:01L HLA-DRB1*16:01L HLA-DRB1*04:08L HLA- DQA1*02:01-B1*03:03L
APYIVGDVVQEG

SEQ ID NO: 8547 - protein, 10 aa, Severe acute respiratory syndrome coronavirus 2
  REGION 1..10: note = Table B: HLA-DQA1*03:02-B1*03:03L
IVGDVVQEGV

SEQ ID NO: 8548 - protein, 10 aa, Severe acute respiratory syndrome coronavirus 2
  REGION 1..10: note = Table B: HLA-DQA1*03:02-B1*03:03L HLA-DRB1*13:03L HLA-DQA1*01:02-B1*06:02L HLA-DRB1*01:02L HLA-DQA1*05:01-B1*02:01L HLA-DPA1*03:01-B1*105:01L HLA-DQA1*03:01-B1*03:02L HLA-DPA1*01:02-B1*04:01L
  REGION 1..10: note = CONT. FROM ABOVE: HLA-DRB1*15:03L
DVVQEGVLTA

SEQ ID NO: 8549 - protein, 10 aa, Severe acute respiratory syndrome coronavirus 2
  REGION 1..10: note = Table B: HLA-DQA1*03:02-B1*03:03M HLA-DQA1*05:01-B1*03:01L HLA-DRB1*13:03L HLA-DQA1*01:02-B1*06:02L HLA-DRB1*01:02L HLA-DPA1*03:01-B1*04:02L HLA-DRB1*14:01L HLA-DRB1*14:02L HLA-DQA1*05:05-B1*03:19L HLA-DQA1*05:05-B1*03:116L
  REGION 1..10: note = CONT. FROM ABOVE: HLA-DRB1*09:01L HLA-DPA1*02:01-B1*13:01L HLA-D PA1*03:01-B1*105:01L HLA-DQA1*03:01-B1*03:02L HLA-DPA1*01:03-B1* 104:01L HLA-DPA1*01:02-B1*04:01L HLA-DRB1*10:01L HLA-DRB1*16:01L HLA-DRB1*08:03L HLA-DQA1*02:01-B1*03:03L HLA-DRB1*15:03L
VVQEGVLTAV

SEQ ID NO: 8550 - protein, 10 aa, Severe acute respiratory syndrome coronavirus 2
  REGION 1..10: note = Table B: HLA-DQA1*03:02-B1*03:03L HLA-DQA1*05:01-B1*03:01L HLA-DRB1*04:03L HLA-DRB1*13:02L HLA-DRB1*13:03L HLA-DRB1*01:03L HLA-DRB1*04:02L HLA-DQA1*01:02-B1*06:02L HLA-DRB1*01:02L HLA-DRB4*03:01NL HLA-DRB1*08:01L HLA-DQA1*05:05-B1*03:19L
  REGION 1..10: note = CONT. FROM ABOVE: HLA-DQA1*05:01-B1*02:01L HLA-DPA1*01:03-B1*04: 02L HLA-DRB1*12:01L HLA-DPA1*03:01-B1*105:01L HLA-DQA1*03:01-B1* 03:02L HLA-DQA1*05:05-B1*03:01M HLA-DRB1*14:17L HLA-DPA1*01:02-B 1*04:01L HLA-DRB1*16:01L HLA-DQA1*01:03-B1*06:01M
  REGION 1..10: note = CONT. FROM ABOVE: HLA-DRB1*04:08L HLA-DQA1*02:01-B1*03:03L
VLTAVVIPTK

SEQ ID NO: 8551 - protein, 12 aa, Severe acute respiratory syndrome coronavirus 2
  REGION 1..12: note = Table B: HLA-DQA1*03:02-B1*03:03L HLA-DQA1*05:01-B1*03:01L HLA-DRB1*13:02L HLA-DRB1*04:04L HLA-DRB1*04:05L HLA-DQA1*01:02-B1*06:02L HLA-DRB1*01:02L HLA-DRB1*08:04L HLA-DRB1*11:03L HLA-DRB1*14:02L HLA-DRB1*08:01L HLA-DRB1*11:01L
  REGION 1..12: note = CONT. FROM ABOVE: HLA-DQA1*05:05-B1*03:19L HLA-DRB1*04:10L HLA-D RB1*12:01L HLA-DRB3*01:01L HLA-DQA1*05:05-B1*03:01L HLA-DRB1*16: 01L HLA-DQA1*01:03-B1*06:01L HLA-DRB1*08:02L HLA-DRB1*08:03L HLA -DQA1*02:01-B1*03:03L HLA-DRB1*15:03L
VVIPTKKAGGTT

SEQ ID NO: 8552 - protein, 12 aa, Severe acute respiratory syndrome coronavirus 2
  REGION 1..12: note = Table B: HLA-DQA1*03:02-B1*03:03L HLA-DQA1*05:01-B1*03:01L HLA-DRB1*04:05L HLA-DQA1*01:02-B1*06:02L HLA-DRB1*01:02L HLA-DRB1*08:04L HLA-DRB1*08:01L HLA-DRB1*11:01L HLA-DQA1*05:05-B1*03:19L HLA-DRB1*12:01L
  REGION 1..12: note = CONT. FROM ABOVE: HLA-DQA1*05:05-B1*03:01L HLA-DRB1*16:01L HLA-D QA1*02:01-B1*03:03L
VIPTKKAGGTTE

SEQ ID NO: 8553 - protein, 11 aa, Severe acute respiratory syndrome coronavirus 2
  REGION 1..11: note = Table B: HLA-DQA1*03:02-B1*03:03L HLA-DQA1*05:01-B1*03:01L
AGGTTEMLAKA

SEQ ID NO: 8554 - protein, 10 aa, Severe acute respiratory syndrome coronavirus 2
  REGION 1..10: note = Table B: HLA-DQA1*03:02-B1*03:03L HLA-DQA1*05:01-B1*03:01L HLA-DQA1*01:02-B1*06:02L HLA-DQA1*05:05-B1*03:19L HLA-DQA1*05:01-B1*02:01L HLA-DPA1*03:01-B1*105:01L HLA-DQA1*03:01-B1*03:02L HLA-DPA1*01:03-B1*104:01L
  REGION 1..10: note = CONT. FROM ABOVE: HLA-DPA1*01:02-B1*04:01L HLA-DQA1*01:03-B1*06: 01L HLA-DQA1*02:01-B1*03:03L
GTTEMLAKAL

SEQ ID NO: 8555 - protein, 10 aa, Severe acute respiratory syndrome coronavirus 2
  REGION 1..10: note = Table B: HLA-DQA1*03:02-B1*03:03L HLA-DRB1*04:03L HLA-DRB1*04:02L HLA-DRB1*04:05L HLA-DRB4*03:01NL HLA-DQA1*01-B1*05L HLA-DQA1*05:01-B1*02:01L HLA-DRB1*04:10L HLA-DQA1*03:01-B1*03:02L HLA-DRB1*14:54L HLA-DRB1*14:17L
  REGION 1..10: note = CONT. FROM ABOVE: HLA-DRB1*16:01L HLA-DRB1*04:08L HLA-DQA1*02:01 -B1*03:03L
NYITTYPGQG

SEQ ID NO: 8556 - protein, 10 aa, Severe acute respiratory syndrome coronavirus 2
  REGION 1..10: note = Table B: HLA-DQA1*03:02-B1*03:03L HLA-DQA1*05:01-B1*03:01L HLA-DRB1*04:03L HLA-DRB1*04:02L HLA-DQA1*01:02-B1*06:02L HLA-DRB1*01:02L HLA-DRB3*02:01L HLA-DPA1*03:01-B1*04:02L HLA-DQA1*01-B1*05L HLA-DQA1*05:05-B1*03:19L
  REGION 1..10: note = CONT. FROM ABOVE: HLA-DQA1*05:01-B1*02:01L HLA-DRB1*12:01L HLA-D PA1*03:01-B1*105:01L HLA-DQA1*03:01-B1*03:02L HLA-DPA1*01:02-B1* 04:01L HLA-DRB1*16:01L HLA-DQA1*01:03-B1*06:01L HLA-DQA1*02:01-B 1*03:03L HLA-DRB1*15:03L
YITTYPGQGL

SEQ ID NO: 8557 - protein, 10 aa, Severe acute respiratory syndrome coronavirus 2
  REGION 1..10: note = Table B: HLA-DQA1*03:02-B1*03:03L HLA-DQA1*05:01-B1*03:01L HLA-DRB1*04:03L HLA-DRB1*13:03L HLA-DRB1*01:03L HLA-DRB1*04:02L HLA-DQA1*01:02-B1*06:02L HLA-DRB1*01:02L HLA-DRB3*02:01L HLA-DRB1*14:01L HLA-DQA1*01-B1*05L HLA-DQA1*05:05-B1*03:19L
  REGION 1..10: note = CONT. FROM ABOVE: HLA-DQA1*05:01-B1*02:01L HLA-DRB1*12:01L HLA-D PA1*03:01-B1*105:01L HLA-DQA1*03:01-B1*03:02L HLA-DQA1*05:05-B1* 03:01L HLA-DRB1*14:17L HLA-DRB1*16:01L HLA-DQA1*01:03-B1*06:01L HLA-DRB1*04:08L HLA-DQA1*02:01-B1*03:03L HLA-DRB1*15:01L
  REGION 1..10: note = CONT. FROM ABOVE: HLA-DRB1*15:03L
ITTYPGQGLN

SEQ ID NO: 8558 - protein, 10 aa, Severe acute respiratory syndrome coronavirus 2
  REGION 1..10: note = Table B: HLA-DQA1*03:02-B1*03:03L HLA-DQA1*05:01-B1*03:01L HLA-DRB1*04:01L HLA-DRB1*04:03L HLA-DRB1*13:02L HLA-DRB1*13:03L HLA-DRB1*01:03L HLA-DRB1*04:05L HLA-DQA1*01:02-B1*06:02M HLA-DRB1*01:01L HLA-DRB4*03:01NL HLA-DRB1*08:77L
  REGION 1..10: note = CONT. FROM ABOVE: HLA-DPA1*01:03-B1*03:01L HLA-DPA1*03:01-B1*04: 02L HLA-DRB1*03:01L HLA-DRB1*14:01L HLA-DRB1*11:02L HLA-DRB1*11: 03L HLA-DRB1*14:02M HLA-DRB1*11:01L HLA-DQA1*01-B1*05L HLA-DQA1* 05:05-B1*03:19M HLA-DQA1*05:01-B1*02:01L HLA-DRB4*01:01L
  REGION 1..10: note = CONT. FROM ABOVE: HLA-DPA1*01:03-B1*04:01M HLA-DQA1*05:05-B1*03: 116L HLA-DPA1*01:03-B1*04:02L HLA-DRB1*12:01L HLA-DPA1*02:01-B1* 13:01M HLA-DPA1*03:01-B1*105:01M HLA-DPA1*01:03-B1*104:01L HLA-D QA1*05:05-B1*03:01L HLA-DPA1*01:02-B1*04:01L HLA-DRB1*10:01L
  REGION 1..10: note = CONT. FROM ABOVE: HLA-DRB1*16:01L HLA-DQA1*01:03-B1*06:01L HLA-D RB1*08:02L HLA-DRB1*08:03L HLA-DQA1*02:01-B1*03:03L HLA-DRB1*15: 03L
TYPGQGLNGY

SEQ ID NO: 8559 - protein, 13 aa, Severe acute respiratory syndrome coronavirus 2
  REGION 1..13: note = Table B: HLA-DQA1*03:02-B1*03:03L HLA-DQA1*05:01-B1*03:01L HLA-DQA1*05:05-B1*03:19L HLA-DQA1*03:01-B1*03:02L HLA-DQA1*02:01-B1*03:03L
YPGQGLNGYTVEE

SEQ ID NO: 8560 - protein, 10 aa, Severe acute respiratory syndrome coronavirus 2
  REGION 1..10: note = Table B: HLA-DQA1*03:02-B1*03:03L HLA-DRB1*04:03L HLA-DRB1*04:02L HLA-DQA1*01-B1*05L HLA-DQA1*05:01-B1*02:01L HLA-DQA1*03:01-B1*03:02L HLA-DQA1*01:03-B1*06:01L HLA-DQA1*02:01-B1*03:03L
NGYTVEEAKT

SEQ ID NO: 8561 - protein, 10 aa, Severe acute respiratory syndrome coronavirus 2
  REGION 1..10: note = Table B: HLA-DQA1*03:02-B1*03:03L HLA-DQA1*01-B1*05L HLA-DQA1*05:05-B1*03:19L HLA-DQA1*05:01-B1*02:01L HLA-DPA1*02:01-B1*13:01L HLA-DQA1*03:01-B1*03:02L HLA-DRB1*16:01L HLA-DQA1*01:03-B1*06:01L
  REGION 1..10: note = CONT. FROM ABOVE: HLA-DQA1*02:01-B1*03:03L HLA-DRB1*15:03L
GYTVEEAKTV

SEQ ID NO: 8562 - protein, 10 aa, Severe acute respiratory syndrome coronavirus 2
  REGION 1..10: note = Table B: HLA-DQA1*03:02-B1*03:03M HLA-DQA1*05:01-B1*03:01L HLA-DRB1*04:01L HLA-DRB1*04:03L HLA-DRB1*13:02L HLA-DRB1*13:03L HLA-DRB1*01:03L HLA-DRB1*04:02L HLA-DRB1*04:05L HLA-DQA1*01:02-B1*06:02L HLA-DRB1*01:01L HLA-DRB1*01:02L
  REGION 1..10: note = CONT. FROM ABOVE: HLA-DRB4*03:01NL HLA-DRB1*08:77L HLA-DRB3*02:0 1L HLA-DPA1*01:03-B1*03:01L HLA-DPA1*03:01-B1*04:02L HLA-DRB1*14 :01L HLA-DRB1*14:02L HLA-DRB1*08:01L HLA-DRB1*11:01L HLA-DQA1*01 -B1*05L HLA-DQA1*05:05-B1*03:19L HLA-DQA1*05:01-B1*02:01L
  REGION 1..10: note = CONT. FROM ABOVE: HLA-DRB4*01:01L HLA-DPA1*01:03-B1*04:01L HLA-D QA1*05:05-B1*03:116L HLA-DRB1*09:01L HLA-DPA1*01:03-B1*04:02L HL A-DRB1*12:01L HLA-DPA1*02:01-B1*13:01L HLA-DPA1*03:01-B1*105:01L HLA-DQA1*03:01-B1*03:02M HLA-DPA1*01:03-B1*104:01L
  REGION 1..10: note = CONT. FROM ABOVE: HLA-DQA1*05:05-B1*03:01L HLA-DPA1*01:02-B1*04: 01L HLA-DRB1*07:01L HLA-DRB1*10:01L HLA-DRB1*16:01L HLA-DQA1*01: 03-B1*06:01L HLA-DRB1*08:03L HLA-DQA1*02:01-B1*03:03M HLA-DRB1*1 5:03M
YTVEEAKTVL

SEQ ID NO: 8563 - protein, 12 aa, Severe acute respiratory syndrome coronavirus 2
  REGION 1..12: note = Table B: HLA-DQA1*03:02-B1*03:03L HLA-DRB1*13:03L HLA-DRB1*01:03L HLA-DRB1*04:02L HLA-DRB1*04:04L HLA-DQA1*01:02-B1*06:02L HLA-DRB1*01:02L HLA-DRB4*03:01NL HLA-DPA1*01:03-B1*03:01L HLA-DPA1*03:01-B1*04:02L
  REGION 1..12: note = CONT. FROM ABOVE: HLA-DRB1*14:01L HLA-DRB1*08:01L HLA-DQA1*05:01 -B1*02:01L HLA-DRB1*04:10L HLA-DRB1*12:01L HLA-DRB1*12:02L HLA-D PA1*02:01-B1*13:01L HLA-DPA1*03:01-B1*105:01L HLA-DQA1*03:01-B1* 03:02L HLA-DRB1*14:54L HLA-DRB1*10:01L HLA-DRB1*16:01L
  REGION 1..12: note = CONT. FROM ABOVE: HLA-DRB1*04:08L HLA-DQA1*02:01-B1*03:03L HLA-D RB1*15:03L
KSAFYILPSIIS

SEQ ID NO: 8564 - protein, 10 aa, Severe acute respiratory syndrome coronavirus 2
  REGION 1..10: note = Table B: HLA-DQA1*03:02-B1*03:03L HLA-DRB1*04:03L HLA-DRB1*13:03L HLA-DRB1*01:03L HLA-DRB1*04:02L HLA-DRB1*04:05L HLA-DRB1*01:02L HLA-DRB4*03:01NL HLA-DQA1*01-B1*05L HLA-DQA1*05:01-B1*02:01L HLA-DRB1*04:10L HLA-DRB1*12:01L
  REGION 1..10: note = CONT. FROM ABOVE: HLA-DPA1*03:01-B1*105:01L HLA-DQA1*03:01-B1*03 :02L HLA-DRB1*14:54L HLA-DQA1*05:05-B1*03:01L HLA-DRB1*14:17L HL A-DRB1*10:01L HLA-DRB1*16:01L HLA-DRB1*04:08L HLA-DQA1*02:01-B1* 03:03L HLA-DRB1*15:03L
FYILPSIISN

SEQ ID NO: 8565 - protein, 11 aa, Severe acute respiratory syndrome coronavirus 2
  REGION 1..11: note = Table B: HLA-DQA1*03:02-B1*03:03L HLA-DQA1*05:01-B1*03:01L HLA-DRB1*13:03L HLA-DRB1*01:03L HLA-DRB1*04:05L HLA-DQA1*01:02-B1*06:02L HLA-DRB1*01:02L HLA-DRB4*03:01NL HLA-DRB1*12:01L HLA-DPA1*03:01-B1*105:01L
  REGION 1..11: note = CONT. FROM ABOVE: HLA-DPA1*01:02-B1*04:01L HLA-DRB1*16:01L HLA-D RB1*04:08L
YILPSIISNEK

SEQ ID NO: 8566 - protein, 11 aa, Severe acute respiratory syndrome coronavirus 2
  REGION 1..11: note = Table B: HLA-DQA1*03:02-B1*03:03L HLA-DQA1*01:02-B1*06:02L HLA-DQA1*05:01-B1*02:01L
ILPSIISNEKQ

SEQ ID NO: 8567 - protein, 10 aa, Severe acute respiratory syndrome coronavirus 2
  REGION 1..10: note = Table B: HLA-DQA1*03:02-B1*03:03L HLA-DRB1*04:03L HLA-DRB1*04:02L HLA-DQA1*05:01-B1*02:01L HLA-DQA1*03:01-B1*03:02L HLA-DRB1*14:17L HLA-DQA1*01:03-B1*06:01L HLA-DQA1*02:01-B1*03:03L
PSIISNEKQE

SEQ ID NO: 8568 - protein, 10 aa, Severe acute respiratory syndrome coronavirus 2
  REGION 1..10: note = Table B: HLA-DQA1*03:02-B1*03:03L HLA-DQA1*05:05-B1*03:19L HLA-DPA1*01:03-B1*104:01L
SIISNEKQEI

SEQ ID NO: 8569 - protein, 10 aa, Severe acute respiratory syndrome coronavirus 2
  REGION 1..10: note = Table B: HLA-DQA1*03:02-B1*03:03L HLA-DQA1*05:01-B1*03:01L HLA-DRB1*04:03L HLA-DRB1*04:02L HLA-DRB3*02:01L HLA-DPA1*03:01-B1*04:02L HLA-DRB1*14:01L HLA-DQA1*05:01-B1*02:01L HLA-DRB1*12:01L
  REGION 1..10: note = CONT. FROM ABOVE: HLA-DQA1*03:01-B1*03:02L HLA-DRB1*14:54L HLA-D PA1*01:02-B1*04:01L HLA-DRB1*16:01L HLA-DQA1*02:01-B1*03:03L HLA -DRB1*15:03L
IISNEKQEIL

SEQ ID NO: 8570 - protein, 10 aa, Severe acute respiratory syndrome coronavirus 2
  REGION 1..10: note = Table B: HLA-DQA1*03:02-B1*03:03M HLA-DRB1*11:02L HLA-DQA1*05:05-B1*03:19M HLA-DRB1*09:01L HLA-DQA1*03:01-B1*03:02L HLA-DPA1*01:03-B1*104:01L
NEKQEILGTV

SEQ ID NO: 8571 - protein, 10 aa, Severe acute respiratory syndrome coronavirus 2
  REGION 1..10: note = Table B: HLA-DQA1*03:02-B1*03:03L HLA-DQA1*01:02-B1*06:02L HLA-DRB1*09:01L HLA-DPA1*03:01-B1*105:01L HLA-DQA1*02:01-B1*03:03L HLA-DRB1*15:03L
EILGTVSWNL

SEQ ID NO: 8572 - protein, 10 aa, Severe acute respiratory syndrome coronavirus 2
  REGION 1..10: note = Table B: HLA-DQA1*03:02-B1*03:03L HLA-DQA1*05:01-B1*03:01L HLA-DQA1*01:02-B1*06:02L HLA-DQA1*05:05-B1*03:19L HLA-DQA1*05:01-B1*02:01L HLA-DPA1*03:01-B1*105:01L HLA-DQA1*03:01-B1*03:02L HLA-DPA1*01:02-B1*04:01L
  REGION 1..10: note = CONT. FROM ABOVE: HLA-DQA1*01:03-B1*06:01L HLA-DQA1*02:01-B1*03: 03L
GTVSWNLREM

SEQ ID NO: 8573 - protein, 10 aa, Severe acute respiratory syndrome coronavirus 2
  REGION 1..10: note = Table B: HLA-DQA1*03:02-B1*03:03L HLA-DQA1*05:05-B1*03:19L
AEETRKLMPV

SEQ ID NO: 8574 - protein, 10 aa, Severe acute respiratory syndrome coronavirus 2
  REGION 1..10: note = Table B: HLA-DQA1*03:02-B1*03:03M HLA-DQA1*05:01-B1*03:01L HLA-DRB1*08:77L HLA-DRB1*11:02M HLA-DQA1*05:05-B1*03:19H HLA-DQA1*05:01-B1*02:01L HLA-DRB4*01:01L HLA-DPA1*01:03-B1*04:01L HLA-DQA1*05:05-B1*03:116L
  REGION 1..10: note = CONT. FROM ABOVE: HLA-DRB1*09:01L HLA-DQA1*03:01-B1*03:02L HLA-D PA1*01:03-B1*104:01M HLA-DRB1*10:01L HLA-DRB1*16:01L HLA-DQA1*01 :03-B1*06:01L HLA-DQA1*02:01-B1*03:03L HLA-DRB1*15:03L
VETKAIVSTI

SEQ ID NO: 8575 - protein, 10 aa, Severe acute respiratory syndrome coronavirus 2
  REGION 1..10: note = Table B: HLA-DQA1*03:02-B1*03:03L HLA-DQA1*05:01-B1*03:01L HLA-DRB1*04:01L HLA-DRB1*04:03L HLA-DRB1*13:02L HLA-DRB1*13:03L HLA-DRB1*01:03L HLA-DRB1*04:02L HLA-DRB1*04:05L HLA-DQA1*01:02-B1*06:02M HLA-DRB1*01:01L HLA-DRB1*01:02L
  REGION 1..10: note = CONT. FROM ABOVE: HLA-DRB4*03:01NL HLA-DRB1*08:77L HLA-DRB3*02:0 1L HLA-DPA1*01:03-B1*03:01L HLA-DPA1*03:01-B1*04:02L HLA-DRB1*03 :01L HLA-DRB1*14:01L HLA-DRB1*11:02L HLA-DRB1*11:03L HLA-DRB1*11 :04L HLA-DRB1*14:02M HLA-DRB1*08:01L HLA-DRB1*11:01L
  REGION 1..10: note = CONT. FROM ABOVE: HLA-DQA1*01-B1*05L HLA-DQA1*05:05-B1*03:19L HL A-DQA1*05:01-B1*02:01M HLA-DRB4*01:01L HLA-DPA1*01:03-B1*04:01M HLA-DQA1*05:05-B1*03:116L HLA-DPA1*01:03-B1*04:02L HLA-DRB1*12:0 1L HLA-DRB1*12:02L HLA-DPA1*02:01-B1*13:01L
  REGION 1..10: note = CONT. FROM ABOVE: HLA-DPA1*03:01-B1*105:01L HLA-DQA1*03:01-B1*03 :02L HLA-DRB1*14:54L HLA-DPA1*01:03-B1*104:01L HLA-DQA1*05:05-B1 *03:01L HLA-DRB1*14:17L HLA-DPA1*01:02-B1*04:01L HLA-DRB1*07:01L HLA-DRB1*10:01L HLA-DRB1*16:01L HLA-DQA1*01:03-B1*06:01L
  REGION 1..10: note = CONT. FROM ABOVE: HLA-DRB1*08:02L HLA-DQA1*02:01-B1*03:03M HLA -DRB1*15:03L
AIVSTIQRKY

SEQ ID NO: 8576 - protein, 10 aa, Severe acute respiratory syndrome coronavirus 2
  REGION 1..10: note = Table B: HLA-DQA1*03:02-B1*03:03L HLA-DQA1*05:01-B1*03:01L HLA-DRB1*04:03L HLA-DRB1*04:02L HLA-DQA1*01:02-B1*06:02L HLA-DQA1*05:01-B1*02:01L HLA-DPA1*03:01-B1*105:01L HLA-DQA1*03:01-B1*03:02L HLA-DQA1*05:05-B1*03:01L
  REGION 1..10: note = CONT. FROM ABOVE: HLA-DQA1*01:03-B1*06:01L HLA-DQA1*02:01-B1*03: 03L
GIKIQEGVVD

SEQ ID NO: 8577 - protein, 11 aa, Severe acute respiratory syndrome coronavirus 2
  REGION 1..11: note = Table B: HLA-DQA1*03:02-B1*03:03L HLA-DRB1*04:03L HLA-DRB1*04:02L HLA-DRB1*04:05L HLA-DRB1*01:02L HLA-DRB4*03:01NL HLA-DRB1*14:01L HLA-DQA1*01-B1*05L HLA-DRB1*04:10L HLA-DRB1*12:01L HLA-DPA1*03:01-B1*105:01L
  REGION 1..11: note = CONT. FROM ABOVE: HLA-DQA1*03:01-B1*03:02L HLA-DRB1*14:54L HLA-D RB1*14:17L HLA-DRB1*04:08L HLA-DRB1*15:03L
IKIQEGVVDYG

SEQ ID NO: 8578 - protein, 10 aa, Severe acute respiratory syndrome coronavirus 2
  REGION 1..10: note = Table B: HLA-DQA1*03:02-B1*03:03L HLA-DQA1*03:01-B1*03:02L HLA-DQA1*01:03-B1*06:01L HLA-DQA1*02:01-B1*03:03L
QEGVVDYGAR

SEQ ID NO: 8579 - protein, 10 aa, Severe acute respiratory syndrome coronavirus 2
  REGION 1..10: note = Table B: HLA-DQA1*03:02-B1*03:03L HLA-DQA1*05:01-B1*03:01L HLA-DQA1*01:02-B1*06:02L HLA-DQA1*05:05-B1*03:19L HLA-DQA1*05:01-B1*02:01L HLA-DPA1*03:01-B1*105:01L HLA-DQA1*03:01-B1*03:02L HLA-DPA1*01:02-B1*04:01L
  REGION 1..10: note = CONT. FROM ABOVE: HLA-DQA1*01:03-B1*06:01L HLA-DQA1*02:01-B1*03: 03L HLA-DRB1*15:03L
EGVVDYGARF

SEQ ID NO: 8580 - protein, 10 aa, Severe acute respiratory syndrome coronavirus 2
  REGION 1..10: note = Table B: HLA-DQA1*03:02-B1*03:03L HLA-DQA1*05:01-B1*03:01M HLA-DRB1*04:01L HLA-DRB1*04:03L HLA-DRB1*13:02L HLA-DRB1*13:03M HLA-DRB1*01:03M HLA-DRB1*04:02L HLA-DRB1*04:05L HLA-DQA1*01:02-B1*06:02M HLA-DRB1*01:01L HLA-DRB4*03:01NL
  REGION 1..10: note = CONT. FROM ABOVE: HLA-DRB1*08:77M HLA-DPA1*01:03-B1*03:01M HLA-D PA1*03:01-B1*04:02L HLA-DRB1*03:01M HLA-DRB1*14:01L HLA-DRB1*11: 02L HLA-DRB1*11:03L HLA-DRB1*11:04L HLA-DRB1*14:02M HLA-DRB1*11: 01L HLA-DRB5*01:01L HLA-DQA1*01-B1*05M HLA-DQA1*05:05-B1*03:19M
  REGION 1..10: note = CONT. FROM ABOVE: HLA-DQA1*05:01-B1*02:01M HLA-DRB4*01:01M HLA-D PA1*01:03-B1*04:01M HLA-DQA1*05:05-B1*03:116L HLA-DRB1*09:01L HL A-DPA1*01:03-B1*04:02M HLA-DRB1*12:01L HLA-DRB1*12:02L HLA-DPA1* 02:01-B1*13:01L HLA-DPA1*03:01-B1*105:01M
  REGION 1..10: note = CONT. FROM ABOVE: HLA-DQA1*03:01-B1*03:02L HLA-DRB1*14:54L HLA-D PA1*01:03-B1*104:01M HLA-DQA1*05:05-B1*03:01L HLA-DRB1*14:17L HL A-DPA1*01:02-B1*04:01L HLA-DRB1*10:01M HLA-DRB1*16:01M HLA-DQA1* 01:03-B1*06:01L HLA-DRB1*08:02M HLA-DRB1*08:03L
  REGION 1..10: note = CONT. FROM ABOVE: HLA-DQA1*02:01-B1*03:03M HLA-DRB1*15:01L HLA -DRB1*15:03M
GVVDYGARFY

SEQ ID NO: 8581 - protein, 10 aa, Severe acute respiratory syndrome coronavirus 2
  REGION 1..10: note = Table B: HLA-DQA1*03:02-B1*03:03L HLA-DRB1*04:05L HLA-DQA1*01:02-B1*06:02L HLA-DRB1*01:02L HLA-DRB1*11:02L HLA-DQA1*05:05-B1*03:19L HLA-DQA1*05:05-B1*03:116L HLA-DPA1*02:01-B1*13:01L HLA-DPA1*03:01-B1*105:01L
  REGION 1..10: note = CONT. FROM ABOVE: HLA-DPA1*01:03-B1*104:01L HLA-DRB1*16:01L HLA- DQA1*01:03-B1*06:01L HLA-DQA1*02:01-B1*03:03L HLA-DRB1*15:03L
FYFYTSKTTV

SEQ ID NO: 8582 - protein, 10 aa, Severe acute respiratory syndrome coronavirus 2
  REGION 1..10: note = Table B: HLA-DQA1*03:02-B1*03:03L HLA-DQA1*05:01-B1*03:01L HLA-DRB1*04:03L HLA-DRB1*13:03L HLA-DRB1*01:03L HLA-DRB1*04:02L HLA-DRB1*04:05L HLA-DRB1*01:02L HLA-DRB4*03:01NL HLA-DQA1*01-B1*05L HLA-DQA1*05:01-B1*02:01L HLA-DRB1*04:10L
  REGION 1..10: note = CONT. FROM ABOVE: HLA-DRB1*12:01L HLA-DPA1*03:01-B1*105:01L HLA- DQA1*03:01-B1*03:02L HLA-DRB1*14:54L HLA-DRB1*14:17L HLA-DPA1*01 :02-B1*04:01L HLA-DRB1*16:01L HLA-DRB1*04:08L HLA-DQA1*02:01-B1* 03:03L HLA-DRB1*15:03L
FYTSKTTVAS

SEQ ID NO: 8583 - protein, 10 aa, Severe acute respiratory syndrome coronavirus 2
  REGION 1..10: note = Table B: HLA-DQA1*03:02-B1*03:03L HLA-DQA1*05:01-B1*03:01L HLA-DRB1*13:02L HLA-DRB1*13:03L HLA-DRB1*01:03L HLA-DRB1*04:02L HLA-DQA1*01:02-B1*06:02L HLA-DRB1*01:02L HLA-DRB1*08:77L HLA-DPA1*01:03-B1*03:01L HLA-DPA1*03:01-B1*04:02L
  REGION 1..10: note = CONT. FROM ABOVE: HLA-DRB1*14:01L HLA-DRB1*14:02L HLA-DRB1*08:01 L HLA-DRB5*01:01L HLA-DQA1*01-B1*05L HLA-DQA1*05:05-B1*03:19L HL A-DQA1*05:01-B1*02:01L HLA-DPA1*01:03-B1*04:01L HLA-DQA1*05:05-B 1*03:116L HLA-DRB1*09:01L HLA-DPA1*01:03-B1*04:02L
  REGION 1..10: note = CONT. FROM ABOVE: HLA-DPA1*03:01-B1*105:01L HLA-DQA1*03:01-B1*03 :02L HLA-DPA1*01:02-B1*04:01L HLA-DRB1*10:01L HLA-DRB1*16:01L HL A-DQA1*02:01-B1*03:03L HLA-DRB1*15:03L
YTSKTTVASL

SEQ ID NO: 8584 - protein, 11 aa, Severe acute respiratory syndrome coronavirus 2
  REGION 1..11: note = Table B: HLA-DQA1*03:02-B1*03:03L HLA-DQA1*05:01-B1*02:01L HLA-DQA1*03:01-B1*03:02L HLA-DQA1*02:01-B1*03:03L
TSKTTVASLIN

SEQ ID NO: 8585 - protein, 10 aa, Severe acute respiratory syndrome coronavirus 2
  REGION 1..10: note = Table B: HLA-DQA1*03:02-B1*03:03M HLA-DQA1*05:01-B1*03:01L HLA-DRB1*13:03L HLA-DQA1*01:02-B1*06:02L HLA-DRB1*01:02L HLA-DPA1*03:01-B1*04:02L HLA-DRB1*14:01L HLA-DRB1*14:02L HLA-DRB1*08:01L HLA-DQA1*05:05-B1*03:19L
  REGION 1..10: note = CONT. FROM ABOVE: HLA-DQA1*05:01-B1*02:01L HLA-DPA1*01:03-B1*04: 01L HLA-DQA1*05:05-B1*03:116L HLA-DRB1*09:01L HLA-DPA1*01:03-B1* 04:02L HLA-DRB1*12:01L HLA-DPA1*03:01-B1*105:01M HLA-DQA1*03:01- B1*03:02L HLA-DPA1*01:02-B1*04:01L HLA-DQA1*01:03-B1*06:01L
  REGION 1..10: note = CONT. FROM ABOVE: HLA-DRB1*08:03L HLA-DQA1*02:01-B1*03:03L HLA-D RB1*15:03L
TTVASLINTL

SEQ ID NO: 8586 - protein, 12 aa, Severe acute respiratory syndrome coronavirus 2
  REGION 1..12: note = Table B: HLA-DQA1*03:02-B1*03:03L HLA-DQA1*05:01-B1*03:01L HLA-DRB1*04:03L HLA-DRB1*04:02L HLA-DQA1*01:02-B1*06:02L HLA-DQA1*01-B1*05L HLA-DQA1*05:05-B1*03:19L HLA-DQA1*05:01-B1*02:01L HLA-DPA1*03:01-B1*105:01L
  REGION 1..12: note = CONT. FROM ABOVE: HLA-DQA1*03:01-B1*03:02L HLA-DQA1*05:05-B1*03: 01L HLA-DRB1*14:17L HLA-DQA1*01:03-B1*06:01L HLA-DQA1*02:01-B1*0 3:03L
VASLINTLNDLN

SEQ ID NO: 8587 - protein, 11 aa, Severe acute respiratory syndrome coronavirus 2
  REGION 1..11: note = Table B: HLA-DQA1*03:02-B1*03:03L HLA-DRB1*13:03L HLA-DRB1*01:03L HLA-DRB1*04:04L HLA-DRB1*12:01L HLA-DQA1*01:03-B1*06:01L HLA-DRB1*04:08L HLA-DQA1*02:01-B1*03:03L
LINTLNDLNET

SEQ ID NO: 8588 - protein, 10 aa, Severe acute respiratory syndrome coronavirus 2
  REGION 1..10: note = Table B: HLA-DQA1*03:02-B1*03:03M HLA-DQA1*05:01-B1*03:01L HLA-DRB1*13:03L HLA-DQA1*01:02-B1*06:02L HLA-DPA1*03:01-B1*04:02L HLA-DRB1*14:01L HLA-DRB1*14:02L HLA-DQA1*05:05-B1*03:19L HLA-DQA1*05:01-B1*02:01L
  REGION 1..10: note = CONT. FROM ABOVE: HLA-DQA1*05:05-B1*03:116L HLA-DRB1*09:01L HLA- DPA1*03:01-B1*105:01L HLA-DQA1*03:01-B1*03:02L HLA-DPA1*01:02-B1 *04:01L HLA-DRB1*08:03L HLA-DQA1*02:01-B1*03:03L HLA-DRB1*15:03L
NTLNDLNETL

SEQ ID NO: 8589 - protein, 10 aa, Severe acute respiratory syndrome coronavirus 2
  REGION 1..10: note = Table B: HLA-DQA1*03:02-B1*03:03L
TLNDLNETLV

SEQ ID NO: 8590 - protein, 10 aa, Severe acute respiratory syndrome coronavirus 2
  REGION 1..10: note = Table B: HLA-DQA1*03:02-B1*03:03L HLA-DQA1*05:01-B1*03:01L HLA-DRB1*13:03M HLA-DRB1*01:03L HLA-DQA1*01:02-B1*06:02M HLA-DRB4*03:01NL HLA-DRB1*08:77M HLA-DPA1*01:03-B1*03:01L HLA-DPA1*03:01-B1*04:02L HLA-DRB1*03:01L HLA-DRB1*14:01L
  REGION 1..10: note = CONT. FROM ABOVE: HLA-DRB1*11:02L HLA-DRB1*14:02L HLA-DRB5*01:01 L HLA-DQA1*01-B1*05L HLA-DQA1*05:05-B1*03:19M HLA-DQA1*05:01-B1* 02:01M HLA-DRB4*01:01L HLA-DPA1*01:03-B1*04:01M HLA-DQA1*05:05-B 1*03:116L HLA-DPA1*01:03-B1*04:02L HLA-DRB1*12:01L
  REGION 1..10: note = CONT. FROM ABOVE: HLA-DPA1*02:01-B1*13:01L HLA-DPA1*03:01-B1*105 :01L HLA-DPA1*01:03-B1*104:01L HLA-DQA1*05:05-B1*03:01L HLA-DRB1 *10:01L HLA-DRB1*16:01M HLA-DRB1*08:02L HLA-DQA1*02:01-B1*03:03L HLA-DRB1*15:03L
ETLVTMPLGY

SEQ ID NO: 8591 - protein, 10 aa, Severe acute respiratory syndrome coronavirus 2
  REGION 1..10: note = Table B: HLA-DQA1*03:02-B1*03:03L HLA-DQA1*05:01-B1*03:01M HLA-DRB1*13:03L HLA-DRB1*04:05L HLA-DQA1*01:02-B1*06:02L HLA-DRB1*01:02L HLA-DPA1*01:03-B1*03:01L HLA-DPA1*03:01-B1*04:02L HLA-DRB1*14:01L HLA-DRB1*14:02L
  REGION 1..10: note = CONT. FROM ABOVE: HLA-DRB1*08:01L HLA-DRB5*01:01L HLA-DQA1*01-B1 *05L HLA-DQA1*05:01-B1*02:01L HLA-DPA1*01:03-B1*04:01L HLA-DQA1* 05:05-B1*03:116L HLA-DPA1*02:01-B1*13:01L HLA-DPA1*03:01-B1*105: 01L HLA-DQA1*03:01-B1*03:02L HLA-DPA1*01:02-B1*04:01L
  REGION 1..10: note = CONT. FROM ABOVE: HLA-DRB1*16:01L HLA-DQA1*01:03-B1*06:01L HLA-D RB1*08:03L HLA-DQA1*02:01-B1*03:03L HLA-DRB1*15:03L
MPLGYVTHGL

SEQ ID NO: 8592 - protein, 10 aa, Severe acute respiratory syndrome coronavirus 2
  REGION 1..10: note = Table B: HLA-DQA1*03:02-B1*03:03L HLA-DQA1*03:01-B1*03:02L HLA-DQA1*02:01-B1*03:03L
VTHGLNLEEA

SEQ ID NO: 8593 - protein, 10 aa, Severe acute respiratory syndrome coronavirus 2
  REGION 1..10: note = Table B: HLA-DQA1*03:02-B1*03:03L HLA-DQA1*05:01-B1*03:01L HLA-DQA1*01:02-B1*06:02L HLA-DQA1*05:05-B1*03:19L HLA-DQA1*05:01-B1*02:01L HLA-DQA1*03:01-B1*03:02L HLA-DQA1*01:03-B1*06:01L HLA-DQA1*02:01-B1*03:03L
EEAARYMRSL

SEQ ID NO: 8594 - protein, 12 aa, Severe acute respiratory syndrome coronavirus 2
  REGION 1..12: note = Table B: HLA-DQA1*03:02-B1*03:03L HLA-DRB1*13:02L HLA-DRB1*04:04L HLA-DRB1*04:05L HLA-DQA1*01:02-B1*06:02L HLA-DPA1*01:03-B1*03:01L HLA-DRB1*11:01L HLA-DQA1*05:05-B1*03:19L HLA-DPA1*01:03-B1*04:02L
  REGION 1..12: note = CONT. FROM ABOVE: HLA-DPA1*02:01-B1*13:01L HLA-DPA1*03:01-B1*105 :01L HLA-DPA1*01:03-B1*104:01L HLA-DQA1*05:05-B1*03:01L HLA-DRB1 *10:01L HLA-DQA1*01:03-B1*06:01L HLA-DRB1*15:03L
YMRSLKVPATVS

SEQ ID NO: 8595 - protein, 10 aa, Severe acute respiratory syndrome coronavirus 2
  REGION 1..10: note = Table B: HLA-DQA1*03:02-B1*03:03L HLA-DQA1*05:01-B1*03:01L HLA-DQA1*01:02-B1*06:02L HLA-DRB1*01:02L HLA-DPA1*03:01-B1*04:02L HLA-DRB1*14:01L HLA-DRB1*14:02L HLA-DQA1*05:05-B1*03:19L HLA-DQA1*05:05-B1*03:116L
  REGION 1..10: note = CONT. FROM ABOVE: HLA-DPA1*02:01-B1*13:01L HLA-DPA1*03:01-B1*105 :01L HLA-DQA1*03:01-B1*03:02L HLA-DPA1*01:02-B1*04:01L HLA-DRB1* 16:01L HLA-DQA1*01:03-B1*06:01L HLA-DQA1*02:01-B1*03:03L HLA-DRB 1*15:03L
SLKVPATVSV

SEQ ID NO: 8596 - protein, 12 aa, Severe acute respiratory syndrome coronavirus 2
  REGION 1..12: note = Table B: HLA-DQA1*03:02-B1*03:03L HLA-DRB1*04:03L HLA-DRB1*14:17L HLA-DQA1*02:01-B1*03:03L
KVPATVSVSSPD

SEQ ID NO: 8597 - protein, 12 aa, Severe acute respiratory syndrome coronavirus 2
  REGION 1..12: note = Table B: HLA-DQA1*03:02-B1*03:03L HLA-DQA1*05:01-B1*03:01L HLA-DRB1*04:03L HLA-DQA1*01:01-B1*05:01L HLA-DQA1*05:05-B1*03:19L HLA-DQA1*05:01-B1*02:01L HLA-DQA1*05:05-B1*03:01L HLA-DQA1*02:01-B1*03:03L
VPATVSVSSPDA

SEQ ID NO: 8598 - protein, 13 aa, Severe acute respiratory syndrome coronavirus 2
  REGION 1..13: note = Table B: HLA-DQA1*03:02-B1*03:03L HLA-DQA1*05:05-B1*03:01L HLA-DQA1*01:03-B1*06:01L
VSVSSPDAVTAYN

SEQ ID NO: 8599 - protein, 13 aa, Severe acute respiratory syndrome coronavirus 2
  REGION 1..13: note = Table B: HLA-DQA1*03:02-B1*03:03L HLA-DPA1*03:01-B1*04:02L HLA-DQA1*05:05-B1*03:01L HLA-DQA1*01:03-B1*06:01L
VSSPDAVTAYNGY

SEQ ID NO: 8600 - protein, 12 aa, Severe acute respiratory syndrome coronavirus 2
  REGION 1..12: note = Table B: HLA-DQA1*03:02-B1*03:03L HLA-DQA1*03:01-B1*03:02L HLA-DQA1*01:03-B1*06:01L
SPDAVTAYNGYL

SEQ ID NO: 8601 - protein, 13 aa, Severe acute respiratory syndrome coronavirus 2
  REGION 1..13: note = Table B: HLA-DQA1*03:02-B1*03:03L HLA-DQA1*05:01-B1*03:01L HLA-DRB1*04:01L HLA-DRB1*13:02L HLA-DRB1*04:04L HLA-DQA1*01:02-B1*06:02L HLA-DRB1*14:01L HLA-DRB1*11:03L HLA-DRB1*11:04L HLA-DQA1*05:05-B1*03:19L
  REGION 1..13: note = CONT. FROM ABOVE: HLA-DQA1*05:01-B1*02:01L HLA-DRB1*12:02L HLA-D PA1*03:01-B1*105:01L HLA-DQA1*01:03-B1*06:01L HLA-DRB1*08:03L
VTAYNGYLTSSSK

SEQ ID NO: 8602 - protein, 13 aa, Severe acute respiratory syndrome coronavirus 2
  REGION 1..13: note = Table B: HLA-DQA1*03:02-B1*03:03L HLA-DQA1*05:01-B1*03:01L HLA-DQA1*01:02-B1*06:02L HLA-DPA1*03:01-B1*105:01L HLA-DQA1*05:05-B1*03:01L
AYNGYLTSSSKTP

SEQ ID NO: 8603 - protein, 10 aa, Severe acute respiratory syndrome coronavirus 2
  REGION 1..10: note = Table B: HLA-DQA1*03:02-B1*03:03L HLA-DQA1*05:01-B1*03:01L HLA-DRB1*04:03L HLA-DRB1*13:02L HLA-DRB1*13:03L HLA-DRB1*01:03L HLA-DRB1*04:02L HLA-DRB1*04:05L HLA-DRB1*01:02L HLA-DRB4*03:01NL HLA-DRB1*08:04L HLA-DRB1*08:77L HLA-DRB1*14:01L HLA-DRB1*11:03L
  REGION 1..10: note = CONT. FROM ABOVE: HLA-DRB1*11:04L HLA-DRB1*14:02L HLA-DQA1*01-B1 *05L HLA-DQA1*05:01-B1*02:01L HLA-DRB1*04:10L HLA-DRB1*12:01L HL A-DRB1*12:02L HLA-DQA1*03:01-B1*03:02L HLA-DRB1*14:54L HLA-DQA1* 05:05-B1*03:01L HLA-DRB1*14:17L HLA-DPA1*01:02-B1*04:01L
  REGION 1..10: note = CONT. FROM ABOVE: HLA-DRB1*10:01L HLA-DRB1*16:01L HLA-DRB1*04:08 L HLA-DRB1*08:03L HLA-DQA1*02:01-B1*03:03L HLA-DRB1*15:03L
YLTSSSKTPE

SEQ ID NO: 8604 - protein, 11 aa, Severe acute respiratory syndrome coronavirus 2
  REGION 1..11: note = Table B: HLA-DQA1*03:02-B1*03:03L HLA-DQA1*05:01-B1*03:01L HLA-DRB1*01:03L HLA-DRB1*04:05L HLA-DQA1*01:02-B1*06:02L HLA-DQA1*01:01-B1*05:01L
LTSSSKTPEEH

SEQ ID NO: 8605 - protein, 10 aa, Severe acute respiratory syndrome coronavirus 2
  REGION 1..10: note = Table B: HLA-DQA1*03:02-B1*03:03L HLA-DQA1*05:01-B1*03:01L HLA-DRB1*01:03L HLA-DQA1*01:02-B1*06:02L HLA-DRB1*08:77L HLA-DPA1*01:03-B1*03:01L HLA-DRB1*14:02L HLA-DQA1*05:05-B1*03:19L HLA-DQA1*05:01-B1*02:01L
  REGION 1..10: note = CONT. FROM ABOVE: HLA-DPA1*01:03-B1*04:01L HLA-DPA1*03:01-B1*105 :01L HLA-DQA1*03:01-B1*03:02L HLA-DRB1*16:01L HLA-DQA1*01:03-B1* 06:01L HLA-DQA1*02:01-B1*03:03L HLA-DRB1*15:03L
SSSKTPEEHF

SEQ ID NO: 8606 - protein, 10 aa, Severe acute respiratory syndrome coronavirus 2
  REGION 1..10: note = Table B: HLA-DQA1*03:02-B1*03:03M HLA-DQA1*05:05-B1*03:19M HLA-DQA1*05:05-B1*03:116L HLA-DRB1*09:01L HLA-DPA1*01:03-B1*04:02L HLA-DQA1*03:01-B1*03:02M HLA-DPA1*01:03-B1*104:01L
EEHFIETISL

SEQ ID NO: 8607 - protein, 12 aa, Severe acute respiratory syndrome coronavirus 2
  REGION 1..12: note = Table B: HLA-DQA1*03:02-B1*03:03L HLA-DRB1*04:03L HLA-DRB1*01:02L HLA-DPA1*03:01-B1*04:02L HLA-DRB1*14:02L HLA-DPA1*01:03-B1*04:02L HLA-DRB1*12:01L HLA-DPA1*03:01-B1*105:01L HLA-DQA1*03:01-B1*03:02L
  REGION 1..12: note = CONT. FROM ABOVE: HLA-DQA1*05:05-B1*03:01L HLA-DQA1*01:03-B1*06: 01L HLA-DQA1*02:01-B1*03:03L HLA-DRB1*15:03L
HFIETISLAGSY

SEQ ID NO: 8608 - protein, 11 aa, Severe acute respiratory syndrome coronavirus 2
  REGION 1..11: note = Table B: HLA-DQA1*03:02-B1*03:03L HLA-DRB1*04:03L HLA-DRB1*04:02L HLA-DRB1*01:02L HLA-DQA1*05:01-B1*02:01L HLA-DRB1*14:54L
IETISLAGSYK

SEQ ID NO: 8609 - protein, 12 aa, Severe acute respiratory syndrome coronavirus 2
  REGION 1..12: note = Table B: HLA-DQA1*03:02-B1*03:03L HLA-DQA1*05:01-B1*03:01L HLA-DPA1*01:03-B1*03:01L HLA-DPA1*03:01-B1*04:02L HLA-DQA1*01-B1*05L HLA-DRB1*16:01L
ETISLAGSYKDW

SEQ ID NO: 8610 - protein, 12 aa, Severe acute respiratory syndrome coronavirus 2
  REGION 1..12: note = Table B: HLA-DQA1*03:02-B1*03:03L HLA-DQA1*05:01-B1*03:01L HLA-DPA1*03:01-B1*04:02L HLA-DRB1*14:01L HLA-DRB1*12:01L HLA-DPA1*02:01-B1*13:01L HLA-DQA1*05:05-B1*03:01L
ISLAGSYKDWSY

SEQ ID NO: 8611 - protein, 13 aa, Severe acute respiratory syndrome coronavirus 2
  REGION 1..13: note = Table B: HLA-DQA1*03:02-B1*03:03L HLA-DRB1*01:03L HLA-DRB1*04:05L HLA-DQA1*01:02-B1*06:02L HLA-DRB1*08:04L HLA-DPA1*03:01-B1*04:02L HLA-DPA1*02:01-B1*13:01L HLA-DPA1*03:01-B1*105:01L HLA-DRB1*14:17L
  REGION 1..13: note = CONT. FROM ABOVE: HLA-DPA1*01:02-B1*04:01L HLA-DRB1*04:08L HLA-D QA1*02:01-B1*03:03L
AGSYKDWSYSGQS

SEQ ID NO: 8612 - protein, 12 aa, Severe acute respiratory syndrome coronavirus 2
  REGION 1..12: note = Table B: HLA-DQA1*03:02-B1*03:03L HLA-DQA1*05:01-B1*03:01L HLA-DRB1*04:03L HLA-DRB1*13:03L HLA-DRB1*04:02L HLA-DRB1*04:05L HLA-DQA1*01:02-B1*06:02L HLA-DQA1*05:05-B1*03:19L HLA-DQA1*05:01-B1*02:01L HLA-DPA1*03:01-B1*105:01L
  REGION 1..12: note = CONT. FROM ABOVE: HLA-DQA1*05:05-B1*03:01L HLA-DRB1*14:17L HLA-D RB1*16:01L HLA-DQA1*02:01-B1*03:03L
YKDWSYSGQSTQ

SEQ ID NO: 8613 - protein, 10 aa, Severe acute respiratory syndrome coronavirus 2
  REGION 1..10: note = Table B: HLA-DQA1*03:02-B1*03:03L HLA-DQA1*05:01-B1*03:01L HLA-DQA1*01:02-B1*06:02L HLA-DQA1*05:05-B1*03:19L HLA-DQA1*05:05-B1*03:116L HLA-DPA1*02:01-B1*13:01L HLA-DPA1*03:01-B1*105:01L HLA-DQA1*03:01-B1*03:02L
  REGION 1..10: note = CONT. FROM ABOVE: HLA-DQA1*02:01-B1*03:03L HLA-DRB1*15:03L
WSYSGQSTQL

SEQ ID NO: 8614 - protein, 12 aa, Severe acute respiratory syndrome coronavirus 2
  REGION 1..12: note = Table B: HLA-DQA1*03:02-B1*03:03L HLA-DQA1*05:01-B1*03:01L HLA-DRB1*04:04L HLA-DRB1*01:02L HLA-DQA1*05:01-B1*02:01L HLA-DPA1*03:01-B1*105:01L HLA-DRB1*10:01L HLA-DQA1*01:03-B1*06:01L
SYSGQSTQLGIE

SEQ ID NO: 8615 - protein, 10 aa, Severe acute respiratory syndrome coronavirus 2
  REGION 1..10: note = Table B: HLA-DQA1*03:02-B1*03:03L HLA-DRB1*13:03L HLA-DQA1*01:02-B1*06:02L HLA-DRB1*08:77L HLA-DQA1*05:05-B1*03:19L HLA-DQA1*05:01-B1*02:01L HLA-DPA1*01:03-B1*04:01L HLA-DPA1*03:01-B1*105:01L
  REGION 1..10: note = CONT. FROM ABOVE: HLA-DQA1*02:01-B1*03:03L HLA-DRB1*15:03L
GQSTQLGIEF

SEQ ID NO: 8616 - protein, 12 aa, Severe acute respiratory syndrome coronavirus 2
  REGION 1..12: note = Table B: HLA-DQA1*03:02-B1*03:03L HLA-DRB1*13:03L HLA-DRB1*01:03L HLA-DRB1*04:02L HLA-DRB1*04:05L HLA-DRB4*03:01NL HLA-DQA1*05:01-B1*02:01L HLA-DRB1*04:10L HLA-DRB1*12:01L HLA-DQA1*03:01-B1*03:02L HLA-DRB1*14:54L HLA-DRB1*14:17L
  REGION 1..12: note = CONT. FROM ABOVE: HLA-DRB1*16:01L HLA-DQA1*02:01-B1*03:03L
DKSVYYTSNPTT

SEQ ID NO: 8617 - protein, 10 aa, Severe acute respiratory syndrome coronavirus 2
  REGION 1..10: note = Table B: HLA-DQA1*03:02-B1*03:03L HLA-DQA1*05:01-B1*03:01L HLA-DRB1*04:03M HLA-DRB1*01:03M HLA-DRB1*04:05M HLA-DQA1*01:02-B1*06:02L HLA-DRB1*01:01M HLA-DRB1*01:02L HLA-DRB4*03:01NL HLA-DRB1*08:77L HLA-DPA1*03:01-B1*04:02L
  REGION 1..10: note = CONT. FROM ABOVE: HLA-DRB1*14:01L HLA-DRB1*11:03L HLA-DRB1*14:02 L HLA-DQA1*01:01-B1*05:01L HLA-DRB1*11:01L HLA-DQA1*01-B1*05L HL A-DQA1*05:05-B1*03:19L HLA-DQA1*05:01-B1*02:01L HLA-DRB4*01:01L HLA-DPA1*01:03-B1*04:01L HLA-DQA1*05:05-B1*03:116L
  REGION 1..10: note = CONT. FROM ABOVE: HLA-DPA1*01:03-B1*04:02L HLA-DRB1*12:01L HLA-D PA1*02:01-B1*13:01H HLA-DPA1*03:01-B1*105:01L HLA-DPA1*01:02-B1* 04:01L HLA-DRB1*10:01L HLA-DRB1*16:01L HLA-DQA1*01:03-B1*06:01M HLA-DRB1*08:03L HLA-DQA1*02:01-B1*03:03L HLA-DRB1*15:03L
VYYTSNPTTF

SEQ ID NO: 8618 - protein, 10 aa, Severe acute respiratory syndrome coronavirus 2
  REGION 1..10: note = Table B: HLA-DQA1*03:02-B1*03:03L HLA-DQA1*05:01-B1*03:01L HLA-DRB1*04:03L HLA-DRB1*13:02L HLA-DRB1*13:03L HLA-DRB1*01:03L HLA-DRB1*04:02L HLA-DRB1*01:02L HLA-DRB4*03:01NL HLA-DRB1*08:77L HLA-DRB3*02:01L HLA-DRB1*14:01L HLA-DQA1*01-B1*05L
  REGION 1..10: note = CONT. FROM ABOVE: HLA-DQA1*05:05-B1*03:19L HLA-DQA1*05:01-B1*02: 01L HLA-DRB1*12:01L HLA-DPA1*03:01-B1*105:01L HLA-DQA1*03:01-B1* 03:02L HLA-DQA1*05:05-B1*03:01L HLA-DPA1*01:02-B1*04:01L HLA-DRB 1*16:01L HLA-DQA1*01:03-B1*06:01L HLA-DQA1*02:01-B1*03:03L
  REGION 1..10: note = CONT. FROM ABOVE: HLA-DRB1*15:03L
YYTSNPTTFH

SEQ ID NO: 8619 - protein, 10 aa, Severe acute respiratory syndrome coronavirus 2
  REGION 1..10: note = Table B: HLA-DQA1*03:02-B1*03:03M HLA-DQA1*05:01-B1*03:01L HLA-DRB1*13:03L HLA-DRB1*01:03L HLA-DQA1*01:02-B1*06:02L HLA-DRB1*01:02L HLA-DPA1*03:01-B1*04:02L HLA-DRB1*14:01L HLA-DRB1*14:02L HLA-DRB1*08:01L HLA-DQA1*05:05-B1*03:19L
  REGION 1..10: note = CONT. FROM ABOVE: HLA-DQA1*05:01-B1*02:01L HLA-DPA1*01:03-B1*04: 01L HLA-DQA1*05:05-B1*03:116L HLA-DRB1*09:01L HLA-DPA1*01:03-B1* 04:02L HLA-DRB1*12:01L HLA-DPA1*02:01-B1*13:01L HLA-DPA1*03:01-B 1*105:01L HLA-DQA1*03:01-B1*03:02L HLA-DPA1*01:03-B1*104:01L
  REGION 1..10: note = CONT. FROM ABOVE: HLA-DPA1*01:02-B1*04:01L HLA-DRB1*10:01L HLA-D RB1*16:01L HLA-DQA1*01:03-B1*06:01L HLA-DRB1*08:03L HLA-DQA1*02: 01-B1*03:03L HLA-DRB1*15:03L
YTSNPTTFHL

SEQ ID NO: 8620 - protein, 12 aa, Severe acute respiratory syndrome coronavirus 2
  REGION 1..12: note = Table B: HLA-DQA1*03:02-B1*03:03L HLA-DRB1*04:03L HLA-DQA1*01-B1*05L HLA-DQA1*05:01-B1*02:01L HLA-DQA1*03:01-B1*03:02L
PTTFHLDGEVIT

SEQ ID NO: 8621 - protein, 10 aa, Severe acute respiratory syndrome coronavirus 2
  REGION 1..10: note = Table B: HLA-DQA1*03:02-B1*03:03L HLA-DQA1*05:01-B1*03:01L HLA-DRB1*04:03L HLA-DRB1*13:03L HLA-DRB1*01:03L HLA-DRB1*04:05L HLA-DQA1*01:02-B1*06:02M HLA-DRB1*01:01L HLA-DRB1*01:02L HLA-DRB1*08:77L HLA-DPA1*01:03-B1*03:01L
  REGION 1..10: note = CONT. FROM ABOVE: HLA-DPA1*03:01-B1*04:02L HLA-DRB1*03:01L HLA-D RB1*14:01L HLA-DRB1*11:03L HLA-DRB1*14:02M HLA-DQA1*01:01-B1*05: 01L HLA-DRB1*08:01L HLA-DRB1*11:01L HLA-DQA1*05:05-B1*03:19L HLA -DQA1*05:01-B1*02:01L HLA-DRB4*01:01L HLA-DPA1*01:03-B1*04:01L
  REGION 1..10: note = CONT. FROM ABOVE: HLA-DQA1*05:05-B1*03:116L HLA-DRB1*09:01L HLA- DPA1*01:03-B1*04:02L HLA-DRB1*12:01L HLA-DPA1*02:01-B1*13:01M HL A-DPA1*03:01-B1*105:01L HLA-DQA1*03:01-B1*03:02L HLA-DPA1*01:03- B1*104:01L HLA-DPA1*01:02-B1*04:01L HLA-DRB1*10:01L
  REGION 1..10: note = CONT. FROM ABOVE: HLA-DRB1*16:01L HLA-DQA1*01:03-B1*06:01M HLA-D RB1*08:02L HLA-DRB1*08:03L HLA-DQA1*02:01-B1*03:03M HLA-DRB1*15: 03L
FHLDGEVITF

SEQ ID NO: 8622 - protein, 12 aa, Severe acute respiratory syndrome coronavirus 2
  REGION 1..12: note = Table B: HLA-DQA1*03:02-B1*03:03L HLA-DQA1*01:02-B1*06:02L HLA-DQA1*05:01-B1*02:01L HLA-DQA1*01:03-B1*06:01L
LDGEVITFDNLK

SEQ ID NO: 8623 - protein, 11 aa, Severe acute respiratory syndrome coronavirus 2
  REGION 1..11: note = Table B: HLA-DQA1*03:02-B1*03:03L HLA-DRB1*13:03L HLA-DRB1*01:03L HLA-DRB1*04:04L HLA-DRB1*04:05L HLA-DQA1*01:02-B1*06:02L HLA-DRB1*01:02L HLA-DRB4*03:01NL HLA-DRB1*14:01L HLA-DQA1*05:01-B1*02:01L HLA-DRB1*04:10L
  REGION 1..11: note = CONT. FROM ABOVE: HLA-DRB1*12:01L HLA-DRB1*14:54L HLA-DRB1*16:01 L HLA-DRB1*04:08L HLA-DRB1*15:03L
GEVITFDNLKT

SEQ ID NO: 8624 - protein, 10 aa, Severe acute respiratory syndrome coronavirus 2
  REGION 1..10: note = Table B: HLA-DQA1*03:02-B1*03:03L HLA-DQA1*05:01-B1*03:01L HLA-DRB1*04:03L HLA-DRB1*04:02L HLA-DPA1*03:01-B1*04:02L HLA-DRB1*14:01L HLA-DQA1*01-B1*05L HLA-DQA1*05:01-B1*02:01L HLA-DRB1*12:01L HLA-DPA1*03:01-B1*105:01L
  REGION 1..10: note = CONT. FROM ABOVE: HLA-DQA1*03:01-B1*03:02L HLA-DPA1*01:02-B1*04: 01L HLA-DRB1*16:01L HLA-DQA1*01:03-B1*06:01L HLA-DQA1*02:01-B1*0 3:03L HLA-DRB1*15:03L
VITFDNLKTL

SEQ ID NO: 8625 - protein, 10 aa, Severe acute respiratory syndrome coronavirus 2
  REGION 1..10: note = Table B: HLA-DQA1*03:02-B1*03:03L HLA-DQA1*05:01-B1*03:01L HLA-DQA1*01:02-B1*06:02L HLA-DPA1*03:01-B1*04:02L HLA-DRB1*14:02L HLA-DQA1*05:05-B1*03:19L HLA-DQA1*05:01-B1*02:01L HLA-DQA1*05:05-B1*03:116L
  REGION 1..10: note = CONT. FROM ABOVE: HLA-DPA1*02:01-B1*13:01L HLA-DPA1*03:01-B1*105 :01L HLA-DQA1*03:01-B1*03:02L HLA-DPA1*01:02-B1*04:01L HLA-DQA1* 01:03-B1*06:01L HLA-DQA1*02:01-B1*03:03L HLA-DRB1*15:03L
ITFDNLKTLL

SEQ ID NO: 8626 - protein, 10 aa, Severe acute respiratory syndrome coronavirus 2
  REGION 1..10: note = Table B: HLA-DQA1*03:02-B1*03:03L HLA-DQA1*05:05-B1*03:19L HLA-DQA1*03:01-B1*03:02L
FDNLKTLLSL

SEQ ID NO: 8627 - protein, 12 aa, Severe acute respiratory syndrome coronavirus 2
  REGION 1..12: note = Table B: HLA-DQA1*03:02-B1*03:03L HLA-DQA1*05:01-B1*03:01L HLA-DRB1*01:03L HLA-DRB1*04:04L HLA-DRB1*04:05L HLA-DRB1*01:02L HLA-DRB4*03:01NL HLA-DPA1*01:03-B1*03:01L HLA-DRB1*14:01L HLA-DQA1*01:01-B1*05:01L HLA-DRB1*08:01L HLA-DQA1*01-B1*05L
  REGION 1..12: note = CONT. FROM ABOVE: HLA-DQA1*05:05-B1*03:19L HLA-DQA1*05:01-B1*02: 01L HLA-DRB1*04:10L HLA-DRB1*12:01L HLA-DPA1*03:01-B1*105:01L HL A-DRB1*14:54L HLA-DQA1*05:05-B1*03:01L HLA-DRB1*16:01L HLA-DRB1* 04:08L HLA-DRB1*15:03L
VRTIKVFTTVDN

SEQ ID NO: 8628 - protein, 11 aa, Severe acute respiratory syndrome coronavirus 2
  REGION 1..11: note = Table B: HLA-DQA1*03:02-B1*03:03L HLA-DRB1*04:03L HLA-DRB1*04:02L HLA-DQA1*01-B1*05L HLA-DQA1*05:01-B1*02:01L HLA-DRB1*14:17L HLA-DQA1*02:01-B1*03:03L
IKVFTTVDNIN

SEQ ID NO: 8629 - protein, 10 aa, Severe acute respiratory syndrome coronavirus 2
  REGION 1..10: note = Table B: HLA-DQA1*03:02-B1*03:03L HLA-DQA1*05:01-B1*02:01L HLA-DQA1*03:01-B1*03:02L HLA-DRB1*16:01L HLA-DQA1*01:03-B1*06:01L HLA-DQA1*02:01-B1*03:03L HLA-DRB1*15:03L
VFTTVDNINL

SEQ ID NO: 8630 - protein, 10 aa, Severe acute respiratory syndrome coronavirus 2
  REGION 1..10: note = Table B: HLA-DQA1*03:02-B1*03:03L HLA-DQA1*05:01-B1*03:01L HLA-DRB1*04:03L HLA-DRB1*13:02L HLA-DRB1*13:03L HLA-DRB1*01:03L HLA-DRB1*04:02L HLA-DRB1*04:05L HLA-DQA1*01:02-B1*06:02L HLA-DRB1*01:02L HLA-DRB4*03:01NL HLA-DRB1*08:77L HLA-DRB3*02:01L
  REGION 1..10: note = CONT. FROM ABOVE: HLA-DRB1*14:01L HLA-DRB1*11:03L HLA-DRB1*14:02 L HLA-DQA1*01-B1*05L HLA-DQA1*05:05-B1*03:19L HLA-DQA1*05:01-B1* 02:01L HLA-DRB1*04:10L HLA-DRB1*12:01L HLA-DRB1*12:02L HLA-DPA1* 03:01-B1*105:01L HLA-DQA1*03:01-B1*03:02L HLA-DRB1*14:54L
  REGION 1..10: note = CONT. FROM ABOVE: HLA-DQA1*05:05-B1*03:01L HLA-DRB1*14:17L HLA-D PA1*01:02-B1*04:01L HLA-DRB1*10:01L HLA-DRB1*16:01L HLA-DQA1*01: 03-B1*06:01L HLA-DRB1*04:08L HLA-DQA1*02:01-B1*03:03L HLA-DRB1*1 5:03L
FTTVDNINLH

SEQ ID NO: 8631 - protein, 10 aa, Severe acute respiratory syndrome coronavirus 2
  REGION 1..10: note = Table B: HLA-DQA1*03:02-B1*03:03L HLA-DRB1*04:03L HLA-DRB1*13:03L HLA-DRB1*01:03L HLA-DRB1*04:02L HLA-DRB4*03:01NL HLA-DQA1*01-B1*05L HLA-DQA1*05:01-B1*02:01L HLA-DQA1*03:01-B1*03:02L HLA-DRB1*14:54L HLA-DRB1*14:17L
  REGION 1..10: note = CONT. FROM ABOVE: HLA-DRB1*16:01L HLA-DQA1*01:03-B1*06:01L HLA-D QA1*02:01-B1*03:03L
TVDNINLHTQ

SEQ ID NO: 8632 - protein, 10 aa, Severe acute respiratory syndrome coronavirus 2
  REGION 1..10: note = Table B: HLA-DQA1*03:02-B1*03:03L HLA-DQA1*05:01-B1*03:01L HLA-DRB1*04:03L HLA-DRB1*13:03L HLA-DRB1*01:03L HLA-DRB1*04:02L HLA-DRB1*04:05L HLA-DQA1*01:02-B1*06:02L HLA-DRB4*03:01NL HLA-DRB1*14:01L HLA-DQA1*01-B1*05L HLA-DQA1*05:01-B1*02:01L
  REGION 1..10: note = CONT. FROM ABOVE: HLA-DRB1*12:01L HLA-DPA1*03:01-B1*105:01L HLA- DQA1*03:01-B1*03:02L HLA-DRB1*14:54L HLA-DQA1*05:05-B1*03:01L HL A-DRB1*14:17L HLA-DPA1*01:02-B1*04:01L HLA-DRB1*16:01L HLA-DQA1* 01:03-B1*06:01L HLA-DQA1*02:01-B1*03:03L
NINLHTQVVD

SEQ ID NO: 8633 - protein, 10 aa, Severe acute respiratory syndrome coronavirus 2
  REGION 1..10: note = Table B: HLA-DQA1*03:02-B1*03:03L HLA-DRB1*04:03L HLA-DQA1*01-B1*05L HLA-DQA1*03:01-B1*03:02L HLA-DQA1*02:01-B1*03:03L
INLHTQVVDM

SEQ ID NO: 8634 - protein, 10 aa, Severe acute respiratory syndrome coronavirus 2
  REGION 1..10: note = Table B: HLA-DQA1*03:02-B1*03:03L HLA-DRB1*04:03L HLA-DRB1*01:03L HLA-DQA1*01-B1*05L HLA-DQA1*05:01-B1*02:01L HLA-DPA1*03:01-B1*105:01L HLA-DQA1*03:01-B1*03:02L HLA-DPA1*01:02-B1*04:01L HLA-DRB1*16:01L
  REGION 1..10: note = CONT. FROM ABOVE: HLA-DQA1*01:03-B1*06:01L HLA-DQA1*02:01-B1*03: 03L HLA-DRB1*15:03L
LHTQVVDMSM

SEQ ID NO: 8635 - protein, 10 aa, Severe acute respiratory syndrome coronavirus 2
  REGION 1..10: note = Table B: HLA-DQA1*03:02-B1*03:03L HLA-DRB1*04:03L HLA-DQA1*01-B1*05L HLA-DQA1*05:01-B1*02:01L HLA-DQA1*03:01-B1*03:02L HLA-DRB1*16:01L HLA-DQA1*01:03-B1*06:01L HLA-DQA1*02:01-B1*03:03L
HTQVVDMSMT

SEQ ID NO: 8636 - protein, 13 aa, Severe acute respiratory syndrome coronavirus 2
  REGION 1..13: note = Table B: HLA-DQA1*03:02-B1*03:03L HLA-DRB1*13:02L HLA-DRB1*01:03L HLA-DRB1*04:02L HLA-DRB1*04:05L HLA-DQA1*01:02-B1*06:02L HLA-DRB1*01:02L HLA-DRB4*03:01NL HLA-DRB1*08:77L HLA-DPA1*01:03-B1*03:01L HLA-DRB1*14:01L
  REGION 1..13: note = CONT. FROM ABOVE: HLA-DQA1*05:01-B1*02:01L HLA-DRB1*04:10L HLA-D RB1*12:02L HLA-DPA1*03:01-B1*105:01L HLA-DRB1*14:54L HLA-DRB1*14 :17L HLA-DRB1*07:01L HLA-DRB1*16:01L HLA-DRB1*15:03L
DMSMTYGQQFGPT

SEQ ID NO: 8637 - protein, 10 aa, Severe acute respiratory syndrome coronavirus 2
  REGION 1..10: note = Table B: HLA-DQA1*03:02-B1*03:03L HLA-DQA1*05:01-B1*03:01L HLA-DRB1*04:03L HLA-DRB1*13:03L HLA-DRB1*01:03L HLA-DRB1*04:05L HLA-DQA1*01:02-B1*06:02L HLA-DRB1*01:01L HLA-DRB4*03:01NL HLA-DRB1*08:77L HLA-DPA1*01:03-B1*03:01L
  REGION 1..10: note = CONT. FROM ABOVE: HLA-DPA1*03:01-B1*04:02L HLA-DRB1*03:01L HLA-D RB1*14:01L HLA-DRB1*14:02L HLA-DRB1*11:01L HLA-DQA1*01-B1*05L HL A-DQA1*05:05-B1*03:19L HLA-DQA1*05:01-B1*02:01L HLA-DRB4*01:01L HLA-DPA1*01:03-B1*04:01L HLA-DQA1*05:05-B1*03:116L
  REGION 1..10: note = CONT. FROM ABOVE: HLA-DPA1*01:03-B1*04:02L HLA-DRB1*12:01L HLA-D PA1*02:01-B1*13:01M HLA-DPA1*03:01-B1*105:01L HLA-DQA1*03:01-B1* 03:02L HLA-DPA1*01:03-B1*104:01L HLA-DPA1*01:02-B1*04:01L HLA-DR B1*10:01L HLA-DRB1*16:01L HLA-DQA1*01:03-B1*06:01L
  REGION 1..10: note = CONT. FROM ABOVE: HLA-DRB1*08:02L HLA-DQA1*02:01-B1*03:03L HLA-D RB1*15:03L
TYGQQFGPTY

SEQ ID NO: 8638 - protein, 13 aa, Severe acute respiratory syndrome coronavirus 2
  REGION 1..13: note = Table B: HLA-DQA1*03:02-B1*03:03L HLA-DQA1*01-B1*05L HLA-DQA1*05:01-B1*02:01L HLA-DQA1*03:01-B1*03:02L
GQQFGPTYLDGAD

SEQ ID NO: 8639 - protein, 12 aa, Severe acute respiratory syndrome coronavirus 2
  REGION 1..12: note = Table B: HLA-DQA1*03:02-B1*03:03L HLA-DQA1*05:01-B1*02:01L HLA-DQA1*02:01-B1*03:03L
FGPTYLDGADVT

SEQ ID NO: 8640 - protein, 12 aa, Severe acute respiratory syndrome coronavirus 2
  REGION 1..12: note = Table B: HLA-DQA1*03:02-B1*03:03L HLA-DQA1*05:01-B1*03:01L HLA-DRB1*04:03L HLA-DRB1*01:03L HLA-DRB1*04:05L HLA-DRB1*01:02L HLA-DRB1*08:77L HLA-DRB1*11:03L HLA-DRB1*11:04L HLA-DRB1*14:02L HLA-DQA1*01:01-B1*05:01L HLA-DRB5*01:01L
  REGION 1..12: note = CONT. FROM ABOVE: HLA-DQA1*05:05-B1*03:19L HLA-DQA1*05:01-B1*02: 01L HLA-DRB1*04:10L HLA-DRB1*12:02L HLA-DRB1*14:54L HLA-DRB1*10: 01L HLA-DRB1*16:01L HLA-DRB1*04:08L
GPTYLDGADVTK

SEQ ID NO: 8641 - protein, 10 aa, Severe acute respiratory syndrome coronavirus 2
  REGION 1..10: note = Table B: HLA-DQA1*03:02-B1*03:03M HLA-DQA1*05:01-B1*03:01L HLA-DQA1*01:02-B1*06:02L HLA-DRB1*01:02L HLA-DRB1*08:77L HLA-DPA1*03:01-B1*04:02L HLA-DRB1*14:01L HLA-DRB1*11:02L HLA-DRB1*14:02L HLA-DQA1*05:05-B1*03:19M
  REGION 1..10: note = CONT. FROM ABOVE: HLA-DQA1*05:01-B1*02:01L HLA-DRB4*01:01L HLA-D PA1*01:03-B1*04:01L HLA-DQA1*05:05-B1*03:116L HLA-DRB1*09:01L HL A-DPA1*01:03-B1*04:02L HLA-DPA1*02:01-B1*13:01L HLA-DPA1*03:01-B 1*105:01L HLA-DQA1*03:01-B1*03:02M HLA-DPA1*01:03-B1*104:01M
  REGION 1..10: note = CONT. FROM ABOVE: HLA-DPA1*01:02-B1*04:01L HLA-DRB1*10:01L HLA-D RB1*16:01L HLA-DQA1*01:03-B1*06:01L HLA-DRB1*08:03L HLA-DQA1*02: 01-B1*03:03M HLA-DRB1*15:03L
YLDGADVTKI

SEQ ID NO: 8642 - protein, 12 aa, Severe acute respiratory syndrome coronavirus 2
  REGION 1..12: note = Table B: HLA-DQA1*03:02-B1*03:03L HLA-DRB1*01:03L HLA-DPA1*03:01-B1*105:01L HLA-DRB1*04:08L
LDGADVTKIKPH

SEQ ID NO: 8643 - protein, 12 aa, Severe acute respiratory syndrome coronavirus 2
  REGION 1..12: note = Table B: HLA-DQA1*03:02-B1*03:03L HLA-DRB1*01:03L HLA-DQA1*01:02-B1*06:02L HLA-DQA1*01:01-B1*05:01L HLA-DRB1*08:01L HLA-DQA1*05:05-B1*03:01L
DGADVTKIKPHN

SEQ ID NO: 8644 - protein, 12 aa, Severe acute respiratory syndrome coronavirus 2
  REGION 1..12: note = Table B: HLA-DQA1*03:02-B1*03:03L HLA-DQA1*02:01-B1*03:03L
EGKTFYVLPNDD

SEQ ID NO: 8645 - protein, 10 aa, Severe acute respiratory syndrome coronavirus 2
  REGION 1..10: note = Table B: HLA-DQA1*03:02-B1*03:03L HLA-DQA1*01-B1*05L HLA-DQA1*05:01-B1*02:01L HLA-DQA1*03:01-B1*03:02L
TFYVLPNDDT

SEQ ID NO: 8646 - protein, 10 aa, Severe acute respiratory syndrome coronavirus 2
  REGION 1..10: note = Table B: HLA-DQA1*03:02-B1*03:03L HLA-DQA1*05:01-B1*03:01L HLA-DRB1*04:03L HLA-DRB1*04:05L HLA-DQA1*01:02-B1*06:02L HLA-DPA1*03:01-B1*04:02L HLA-DRB1*14:02L HLA-DQA1*01-B1*05L HLA-DQA1*05:05-B1*03:19L HLA-DQA1*05:01-B1*02:01L
  REGION 1..10: note = CONT. FROM ABOVE: HLA-DQA1*05:05-B1*03:116L HLA-DRB1*09:01L HLA- DPA1*01:03-B1*04:02L HLA-DPA1*02:01-B1*13:01L HLA-DPA1*03:01-B1* 105:01L HLA-DQA1*03:01-B1*03:02L HLA-DPA1*01:02-B1*04:01L HLA-DR B1*16:01L HLA-DQA1*01:03-B1*06:01L HLA-DQA1*02:01-B1*03:03L
  REGION 1..10: note = CONT. FROM ABOVE: HLA-DRB1*15:03L
FYVLPNDDTL

SEQ ID NO: 8647 - protein, 10 aa, Severe acute respiratory syndrome coronavirus 2
  REGION 1..10: note = Table B: HLA-DQA1*03:02-B1*03:03L HLA-DQA1*05:01-B1*03:01L HLA-DRB1*14:01L HLA-DQA1*05:05-B1*03:19L HLA-DQA1*05:05-B1*03:116L HLA-DPA1*02:01-B1*13:01L HLA-DQA1*03:01-B1*03:02L HLA-DRB1*16:01L
  REGION 1..10: note = CONT. FROM ABOVE: HLA-DQA1*02:01-B1*03:03L HLA-DRB1*15:03L
VLPNDDTLRV

SEQ ID NO: 8648 - protein, 13 aa, Severe acute respiratory syndrome coronavirus 2
  REGION 1..13: note = Table B: HLA-DQA1*03:02-B1*03:03L HLA-DQA1*05:01-B1*03:01L HLA-DQA1*01:02-B1*06:02L HLA-DQA1*01:01-B1*05:01L HLA-DPA1*03:01-B1*105:01L HLA-DQA1*05:05-B1*03:01L HLA-DQA1*01:03-B1*06:01L HLA-DQA1*02:01-B1*03:03L
LPNDDTLRVEAFE

SEQ ID NO: 8649 - protein, 19 aa, Severe acute respiratory syndrome coronavirus 2
  REGION 1..19: note = Table B: HLA-DQA1*03:02-B1*03:03L
PNDDTLRVEAFEYYHTTDP

SEQ ID NO: 8650 - protein, 12 aa, Severe acute respiratory syndrome coronavirus 2
  REGION 1..12: note = Table B: HLA-DQA1*03:02-B1*03:03L HLA-DQA1*02:01-B1*03:03L
EAFEYYHTTDPS

SEQ ID NO: 8651 - protein, 10 aa, Severe acute respiratory syndrome coronavirus 2
  REGION 1..10: note = Table B: HLA-DQA1*03:02-B1*03:03L HLA-DQA1*05:01-B1*03:01L HLA-DRB1*04:03L HLA-DRB1*13:03L HLA-DRB1*01:03L HLA-DRB1*04:05M HLA-DQA1*01:02-B1*06:02M HLA-DRB1*01:01L HLA-DRB1*01:02L HLA-DRB4*03:01NL HLA-DRB1*08:77L HLA-DPA1*01:03-B1*03:01L
  REGION 1..10: note = CONT. FROM ABOVE: HLA-DPA1*03:01-B1*04:02L HLA-DRB1*03:01L HLA-D RB1*14:01L HLA-DRB1*11:03L HLA-DRB1*14:02L HLA-DQA1*01:01-B1*05: 01L HLA-DRB1*08:01L HLA-DRB1*11:01L HLA-DQA1*01-B1*05L HLA-DQA1* 05:05-B1*03:19L HLA-DQA1*05:01-B1*02:01L HLA-DRB4*01:01L
  REGION 1..10: note = CONT. FROM ABOVE: HLA-DPA1*01:03-B1*04:01L HLA-DQA1*05:05-B1*03: 116L HLA-DPA1*01:03-B1*04:02L HLA-DRB1*12:01L HLA-DPA1*02:01-B1* 13:01M HLA-DPA1*03:01-B1*105:01M HLA-DQA1*03:01-B1*03:02L HLA-DQ A1*05:05-B1*03:01L HLA-DPA1*01:02-B1*04:01L HLA-DRB1*10:01L
  REGION 1..10: note = CONT. FROM ABOVE: HLA-DRB1*16:01L HLA-DQA1*01:03-B1*06:01M HLA-D RB1*08:02L HLA-DRB1*08:03L HLA-DQA1*02:01-B1*03:03L HLA-DRB1*15: 03L
EYYHTTDPSF

SEQ ID NO: 8652 - protein, 10 aa, Severe acute respiratory syndrome coronavirus 2
  REGION 1..10: note = Table B: HLA-DQA1*03:02-B1*03:03L HLA-DQA1*05:01-B1*03:01L HLA-DRB1*04:03L HLA-DRB1*13:02L HLA-DRB1*13:03L HLA-DRB1*01:03L HLA-DRB1*04:05L HLA-DQA1*01:02-B1*06:02L HLA-DRB1*01:01L HLA-DRB1*01:02L HLA-DRB1*08:77L HLA-DRB3*02:01L
  REGION 1..10: note = CONT. FROM ABOVE: HLA-DPA1*03:01-B1*04:02L HLA-DRB1*14:01L HLA-D RB1*11:03L HLA-DRB1*14:02L HLA-DQA1*01:01-B1*05:01L HLA-DRB1*08: 01L HLA-DQA1*01-B1*05L HLA-DQA1*05:05-B1*03:19L HLA-DQA1*05:01-B 1*02:01L HLA-DPA1*01:03-B1*04:01L HLA-DQA1*05:05-B1*03:116L
  REGION 1..10: note = CONT. FROM ABOVE: HLA-DRB1*09:01L HLA-DPA1*01:03-B1*04:02L HLA-D RB1*12:01L HLA-DPA1*02:01-B1*13:01L HLA-DPA1*03:01-B1*105:01L HL A-DQA1*03:01-B1*03:02L HLA-DQA1*05:05-B1*03:01L HLA-DPA1*01:02-B 1*04:01L HLA-DRB1*07:01L HLA-DRB1*16:01L
  REGION 1..10: note = CONT. FROM ABOVE: HLA-DQA1*01:03-B1*06:01L HLA-DRB1*08:03L HLA-D QA1*02:01-B1*03:03L HLA-DRB1*15:03L
YYHTTDPSFL

SEQ ID NO: 8653 - protein, 10 aa, Severe acute respiratory syndrome coronavirus 2
  REGION 1..10: note = Table B: HLA-DQA1*03:02-B1*03:03L HLA-DQA1*05:01-B1*03:01L HLA-DRB1*04:03L HLA-DQA1*01-B1*05L HLA-DQA1*05:01-B1*02:01L HLA-DRB1*12:01L HLA-DQA1*03:01-B1*03:02L HLA-DRB1*16:01L HLA-DQA1*01:03-B1*06:01L HLA-DQA1*02:01-B1*03:03L
  REGION 1..10: note = CONT. FROM ABOVE: HLA-DRB1*15:03L
YHTTDPSFLG

SEQ ID NO: 8654 - protein, 10 aa, Severe acute respiratory syndrome coronavirus 2
  REGION 1..10: note = Table B: HLA-DQA1*03:02-B1*03:03L HLA-DQA1*05:01-B1*03:01M HLA-DRB1*14:04M HLA-DRB1*04:01L HLA-DRB1*04:03M HLA-DRB1*13:02M HLA-DRB1*13:03H HLA-DRB1*01:03H HLA-DRB1*04:02M HLA-DRB1*04:05H HLA-DQA1*01:02-B1*06:02H HLA-DRB1*01:01L HLA-DRB4*03:01NM
  REGION 1..10: note = CONT. FROM ABOVE: HLA-DRB1*08:04L HLA-DRB1*08:77H HLA-DRB3*02:01 L HLA-DPA1*01:03-B1*03:01H HLA-DPA1*03:01-B1*04:02M HLA-DRB1*03: 01H HLA-DRB1*14:01M HLA-DRB1*11:02H HLA-DRB1*11:03H HLA-DRB1*11: 04H HLA-DRB1*14:02M HLA-DRB1*08:01L HLA-DRB1*11:01M
  REGION 1..10: note = CONT. FROM ABOVE: HLA-DRB5*01:01H HLA-DQA1*01-B1*05H HLA-DQA1*05 :05-B1*03:19H HLA-DRB4*02:01NL HLA-DQA1*05:01-B1*02:01H HLA-DRB1 *13:01L HLA-DRB4*01:01H HLA-DPA1*01:03-B1*04:01H HLA-DQA1*05:05- B1*03:116H HLA-DRB1*09:01L HLA-DPA1*01:03-B1*04:02H
  REGION 1..10: note = CONT. FROM ABOVE: HLA-DRB1*12:01H HLA-DRB1*12:02L HLA-DPA1*02:01 -B1*13:01L HLA-DPA1*03:01-B1*105:01M HLA-DQA1*03:01-B1*03:02L HL A-DRB1*14:54H HLA-DPA1*01:03-B1*104:01H HLA-DQA1*05:05-B1*03:01L HLA-DRB1*14:17L HLA-DPA1*01:02-B1*04:01M HLA-DRB1*10:01H
  REGION 1..10: note = CONT. FROM ABOVE: HLA-DRB1*16:01H HLA-DQA1*01:03-B1*06:01L HLA -DRB1*04:08L HLA-DRB1*08:02M HLA-DRB1*08:03L HLA-DQA1*02:01-B1 *03:03L HLA-DRB1*15:01M HLA-DRB1*15:03M
TTDPSFLGRY

SEQ ID NO: 8655 - protein, 10 aa, Severe acute respiratory syndrome coronavirus 2
  REGION 1..10: note = Table B: HLA-DQA1*03:02-B1*03:03L HLA-DQA1*05:05-B1*03:19L HLA-DQA1*05:01-B1*02:01L HLA-DQA1*03:01-B1*03:02L
TDPSFLGRYM

SEQ ID NO: 8656 - protein, 10 aa, Severe acute respiratory syndrome coronavirus 2
  REGION 1..10: note = Table B: HLA-DQA1*03:02-B1*03:03L HLA-DQA1*05:01-B1*03:01L HLA-DRB1*13:03L HLA-DQA1*01:02-B1*06:02L HLA-DQA1*01-B1*05L HLA-DQA1*05:05-B1*03:19L HLA-DQA1*05:05-B1*03:116L HLA-DPA1*02:01-B1*13:01L HLA-DPA1*03:01-B1*105:01L
  REGION 1..10: note = CONT. FROM ABOVE: HLA-DPA1*01:02-B1*04:01L HLA-DRB1*08:03L HLA-D RB1*15:03L
YPQVNGLTSI

SEQ ID NO: 8657 - protein, 12 aa, Severe acute respiratory syndrome coronavirus 2
  REGION 1..12: note = Table B: HLA-DQA1*03:02-B1*03:03L HLA-DQA1*05:01-B1*03:01L HLA-DRB1*04:03L HLA-DRB1*13:02L HLA-DRB1*01:03L HLA-DRB1*04:02L HLA-DRB1*04:05L HLA-DRB1*01:02L HLA-DRB4*03:01NL HLA-DRB1*08:04L HLA-DRB3*02:01L HLA-DPA1*01:03-B1*03:01L
  REGION 1..12: note = CONT. FROM ABOVE: HLA-DPA1*03:01-B1*04:02L HLA-DRB1*14:01L HLA-D QA1*05:05-B1*03:19L HLA-DQA1*05:01-B1*02:01L HLA-DRB1*04:10L HLA -DRB1*12:01L HLA-DRB1*12:02L HLA-DPA1*02:01-B1*13:01L HLA-DPA1*0 3:01-B1*105:01L HLA-DRB1*14:54L HLA-DQA1*05:05-B1*03:01L
  REGION 1..12: note = CONT. FROM ABOVE: HLA-DRB1*14:17L HLA-DPA1*01:02-B1*04:01L HLA-D RB1*16:01L HLA-DRB1*04:08L HLA-DRB1*15:03L
VNGLTSIKWADN

SEQ ID NO: 8658 - protein, 10 aa, Severe acute respiratory syndrome coronavirus 2
  REGION 1..10: note = Table B: HLA-DQA1*03:02-B1*03:03L HLA-DRB1*04:03L HLA-DQA1*01:02-B1*06:02L HLA-DQA1*01-B1*05L HLA-DPA1*03:01-B1*105:01L HLA-DQA1*03:01-B1*03:02L HLA-DPA1*01:02-B1*04:01L HLA-DQA1*01:03-B1*06:01L
  REGION 1..10: note = CONT. FROM ABOVE: HLA-DQA1*02:01-B1*03:03L
LTSIKWADNN

SEQ ID NO: 8659 - protein, 10 aa, Severe acute respiratory syndrome coronavirus 2
  REGION 1..10: note = Table B: HLA-DQA1*03:02-B1*03:03L HLA-DQA1*01:02-B1*06:02L HLA-DQA1*05:05-B1*03:19L HLA-DPA1*03:01-B1*105:01L HLA-DPA1*01:03-B1*104:01L HLA-DRB1*15:03L
ATALLTLQQI

SEQ ID NO: 8660 - protein, 10 aa, Severe acute respiratory syndrome coronavirus 2
  REGION 1..10: note = Table B: HLA-DQA1*03:02-B1*03:03L HLA-DQA1*05:01-B1*03:01L HLA-DPA1*03:01-B1*04:02L HLA-DRB1*09:01L HLA-DQA1*03:01-B1*03:02L HLA-DQA1*02:01-B1*03:03L HLA-DRB1*15:03L
ALLTLQQIEL

SEQ ID NO: 8661 - protein, 10 aa, Severe acute respiratory syndrome coronavirus 2
  REGION 1..10: note = Table B: HLA-DQA1*03:02-B1*03:03M HLA-DQA1*05:01-B1*03:01L HLA-DRB1*13:03L HLA-DPA1*03:01-B1*04:02L HLA-DRB1*11:02L HLA-DRB1*11:01L HLA-DQA1*05:05-B1*03:19M HLA-DQA1*05:05-B1*03:116L HLA-DRB1*09:01M
  REGION 1..10: note = CONT. FROM ABOVE: HLA-DPA1*01:03-B1*04:02L HLA-DQA1*03:01-B1*03: 02M HLA-DPA1*01:03-B1*104:01L HLA-DPA1*01:02-B1*04:01L HLA-DRB1* 16:01L HLA-DQA1*02:01-B1*03:03L
IELKFNPPAL

SEQ ID NO: 8662 - protein, 11 aa, Severe acute respiratory syndrome coronavirus 2
  REGION 1..11: note = Table B: HLA-DQA1*03:02-B1*03:03L HLA-DRB1*04:01L HLA-DRB1*04:03L HLA-DRB1*13:02L HLA-DRB1*04:05L HLA-DRB4*03:01NL HLA-DPA1*03:01-B1*04:02L HLA-DRB1*14:01L HLA-DRB1*11:01L HLA-DPA1*02:01-B1*13:01L HLA-DQA1*03:01-B1*03:02L
  REGION 1..11: note = CONT. FROM ABOVE: HLA-DQA1*05:05-B1*03:01L HLA-DPA1*01:02-B1*04: 01L HLA-DQA1*01:03-B1*06:01L HLA-DRB1*08:02L
KFNPPALQDAY

SEQ ID NO: 8663 - protein, 17 aa, Severe acute respiratory syndrome coronavirus 2
  REGION 1..17: note = Table B: HLA-DQA1*03:02-B1*03:03L HLA-DQA1*05:01-B1*03:01L HLA-DRB1*13:02L HLA-DRB1*04:02L HLA-DRB1*04:05L HLA-DRB1*08:04L HLA-DPA1*01:03-B1*03:01L HLA-DRB1*14:01L HLA-DQA1*01:01-B1*05:01L HLA-DRB1*11:01L
  REGION 1..17: note = CONT. FROM ABOVE: HLA-DQA1*05:05-B1*03:19L HLA-DPA1*01:03-B1*04: 02L HLA-DRB1*12:01L HLA-DRB3*01:01L HLA-DPA1*02:01-B1*13:01L HLA -DQA1*05:05-B1*03:01L HLA-DRB1*15:03L
NPPALQDAYYRARAGEA

SEQ ID NO: 8664 - protein, 12 aa, Severe acute respiratory syndrome coronavirus 2
  REGION 1..12: note = Table B: HLA-DQA1*03:02-B1*03:03L HLA-DQA1*05:01-B1*03:01L HLA-DRB1*04:03L HLA-DRB1*13:02L HLA-DRB1*13:03L HLA-DRB1*01:03L HLA-DRB1*04:02L HLA-DRB1*04:05L HLA-DQA1*01:02-B1*06:02L HLA-DRB1*01:02L HLA-DRB4*03:01NL HLA-DRB1*08:04L HLA-DRB1*08:77L
  REGION 1..12: note = CONT. FROM ABOVE: HLA-DRB1*14:01L HLA-DRB1*11:03L HLA-DRB1*11:04 L HLA-DRB1*14:02L HLA-DQA1*01:01-B1*05:01L HLA-DRB1*08:01L HLA-D RB1*11:01L HLA-DQA1*01-B1*05L HLA-DQA1*05:05-B1*03:19L HLA-DQA1* 05:01-B1*02:01L HLA-DRB1*04:10L HLA-DRB1*09:01L HLA-DRB1*12:01L
  REGION 1..12: note = CONT. FROM ABOVE: HLA-DRB1*12:02L HLA-DPA1*02:01-B1*13:01L HLA-D PA1*03:01-B1*105:01L HLA-DRB1*14:54L HLA-DQA1*05:05-B1*03:01L HL A-DRB1*14:17L HLA-DPA1*01:02-B1*04:01L HLA-DRB1*07:01L HLA-DRB1* 10:01L HLA-DQA1*01:03-B1*06:01L HLA-DRB1*04:08L HLA-DRB1*08:03L
  REGION 1..12: note = CONT. FROM ABOVE: HLA-DRB1*15:03L
DAYYRARAGEAA

SEQ ID NO: 8665 - protein, 12 aa, Severe acute respiratory syndrome coronavirus 2
  REGION 1..12: note = Table B: HLA-DQA1*03:02-B1*03:03L HLA-DRB1*01:01L HLA-DRB1*08:04L HLA-DRB1*11:04L HLA-DRB1*11:01L HLA-DPA1*02:01-B1*13:01L HLA-DPA1*03:01-B1*105:01L HLA-DRB1*10:01L
AYYRARAGEAAN

SEQ ID NO: 8666 - protein, 10 aa, Severe acute respiratory syndrome coronavirus 2
  REGION 1..10: note = Table B: HLA-DQA1*03:02-B1*03:03L HLA-DRB1*04:03L HLA-DRB1*04:02L HLA-DQA1*05:01-B1*02:01L HLA-DQA1*03:01-B1*03:02L HLA-DQA1*01:03-B1*06:01L HLA-DQA1*02:01-B1*03:03L
TVGELGDVRE

SEQ ID NO: 8667 - protein, 10 aa, Severe acute respiratory syndrome coronavirus 2
  REGION 1..10: note = Table B: HLA-DQA1*03:02-B1*03:03L HLA-DQA1*05:01-B1*03:01L HLA-DRB1*04:03L HLA-DRB1*13:03L HLA-DRB1*01:03L HLA-DRB1*04:02L HLA-DRB1*04:05L HLA-DRB4*03:01NL HLA-DQA1*01:01-B1*05:01L HLA-DQA1*01-B1*05L HLA-DQA1*05:01-B1*02:01L HLA-DRB1*04:10L
  REGION 1..10: note = CONT. FROM ABOVE: HLA-DRB1*12:01L HLA-DQA1*03:01-B1*03:02L HLA-D RB1*14:54L HLA-DQA1*05:05-B1*03:01L HLA-DRB1*14:17L HLA-DPA1*01: 02-B1*04:01L HLA-DRB1*16:01L HLA-DQA1*01:03-B1*06:01L HLA-DRB1*0 4:08L HLA-DQA1*02:01-B1*03:03L
VGELGDVRET

SEQ ID NO: 8668 - protein, 10 aa, Severe acute respiratory syndrome coronavirus 2
  REGION 1..10: note = Table B: HLA-DQA1*03:02-B1*03:03H HLA-DQA1*05:01-B1*03:01M HLA-DRB1*04:01L HLA-DRB1*13:02L HLA-DRB1*13:03L HLA-DRB1*01:03L HLA-DQA1*01:02-B1*06:02L HLA-DRB4*03:01NL HLA-DRB1*08:77M HLA-DPA1*03:01-B1*04:02M HLA-DRB1*03:01L HLA-DRB1*14:01L
  REGION 1..10: note = CONT. FROM ABOVE: HLA-DRB1*11:02L HLA-DRB1*14:02L HLA-DRB1*08:01 L HLA-DRB1*11:01L HLA-DQA1*01-B1*05L HLA-DQA1*05:05-B1*03:19M HL A-DQA1*05:01-B1*02:01L HLA-DRB4*01:01M HLA-DPA1*01:03-B1*04:01M HLA-DQA1*05:05-B1*03:116M HLA-DRB1*09:01M
  REGION 1..10: note = CONT. FROM ABOVE: HLA-DPA1*01:03-B1*04:02M HLA-DRB1*12:01L HLA-D QA1*03:01-B1*03:02H HLA-DPA1*01:03-B1*104:01M HLA-DPA1*01:02-B1* 04:01L HLA-DRB1*10:01L HLA-DRB1*16:01L HLA-DQA1*01:03-B1*06:01L HLA-DQA1*02:01-B1*03:03L HLA-DRB1*15:03L
GELGDVRETM

SEQ ID NO: 8669 - protein, 10 aa, Severe acute respiratory syndrome coronavirus 2
  REGION 1..10: note = Table B: HLA-DQA1*03:02-B1*03:03L HLA-DQA1*01:02-B1*06:02L HLA-DPA1*03:01-B1*105:01L HLA-DQA1*03:01-B1*03:02L HLA-DQA1*01:03-B1*06:01L
ETMSYLFQHA

SEQ ID NO: 8670 - protein, 10 aa, Severe acute respiratory syndrome coronavirus 2
  REGION 1..10: note = Table B: HLA-DQA1*03:02-B1*03:03L HLA-DQA1*03:01-B1*03:02L HLA-DQA1*01:03-B1*06:01L HLA-DQA1*02:01-B1*03:03L
MSYLFQHANL

SEQ ID NO: 8671 - protein, 10 aa, Severe acute respiratory syndrome coronavirus 2
  REGION 1..10: note = Table B: HLA-DQA1*03:02-B1*03:03L HLA-DRB1*04:03L HLA-DRB1*13:03L HLA-DRB1*01:03L HLA-DRB1*04:02L HLA-DRB1*04:05L HLA-DRB4*03:01NL HLA-DQA1*01-B1*05L HLA-DRB1*04:10L HLA-DQA1*03:01-B1*03:02L HLA-DRB1*14:54L HLA-DRB1*14:17L
  REGION 1..10: note = CONT. FROM ABOVE: HLA-DRB1*16:01L HLA-DQA1*02:01-B1*03:03L
YLFQHANLDS

SEQ ID NO: 8672 - protein, 10 aa, Severe acute respiratory syndrome coronavirus 2
  REGION 1..10: note = Table B: HLA-DQA1*03:02-B1*03:03L HLA-DQA1*05:05-B1*03:19L HLA-DPA1*01:03-B1*104:01L
GQQQTTLKGV

SEQ ID NO: 8673 - protein, 10 aa, Severe acute respiratory syndrome coronavirus 2
  REGION 1..10: note = Table B: HLA-DQA1*03:02-B1*03:03L HLA-DQA1*03:01-B1*03:02L
QQTTLKGVEA

SEQ ID NO: 8674 - protein, 10 aa, Severe acute respiratory syndrome coronavirus 2
  REGION 1..10: note = Table B: HLA-DQA1*03:02-B1*03:03L HLA-DQA1*05:05-B1*03:19L
QTTLKGVEAV

SEQ ID NO: 8675 - protein, 10 aa, Severe acute respiratory syndrome coronavirus 2
  REGION 1..10: note = Table B: HLA-DQA1*03:02-B1*03:03L HLA-DQA1*05:01-B1*03:01L HLA-DQA1*01:02-B1*06:02L HLA-DQA1*05:01-B1*02:01L HLA-DPA1*03:01-B1*105:01L HLA-DQA1*03:01-B1*03:02L HLA-DPA1*01:02-B1*04:01L HLA-DQA1*02:01-B1*03:03L
  REGION 1..10: note = CONT. FROM ABOVE: HLA-DRB1*15:03L
TTLKGVEAVM

SEQ ID NO: 8676 - protein, 10 aa, Severe acute respiratory syndrome coronavirus 2
  REGION 1..10: note = Table B: HLA-DQA1*03:02-B1*03:03L HLA-DQA1*05:01-B1*03:01L HLA-DRB1*04:01L HLA-DRB1*04:03L HLA-DRB1*13:02L HLA-DRB1*13:03L HLA-DRB1*01:03L HLA-DQA1*01:02-B1*06:02M HLA-DRB4*03:01NL HLA-DRB1*08:77L HLA-DPA1*01:03-B1*03:01L
  REGION 1..10: note = CONT. FROM ABOVE: HLA-DPA1*03:01-B1*04:02L HLA-DRB1*03:01L HLA-D RB1*14:01L HLA-DRB1*11:02L HLA-DRB1*14:02M HLA-DRB1*11:01L HLA-D QA1*01-B1*05L HLA-DQA1*05:05-B1*03:19M HLA-DQA1*05:01-B1*02:01L HLA-DRB4*01:01L HLA-DPA1*01:03-B1*04:01L
  REGION 1..10: note = CONT. FROM ABOVE: HLA-DQA1*05:05-B1*03:116L HLA-DPA1*01:03-B1*04 :02L HLA-DRB1*12:01L HLA-DPA1*02:01-B1*13:01L HLA-DPA1*03:01-B1* 105:01L HLA-DQA1*03:01-B1*03:02L HLA-DPA1*01:03-B1*104:01L HLA-D QA1*05:05-B1*03:01L HLA-DPA1*01:02-B1*04:01L HLA-DRB1*10:01L
  REGION 1..10: note = CONT. FROM ABOVE: HLA-DRB1*16:01L HLA-DQA1*01:03-B1*06:01L HLA-D RB1*08:02L HLA-DQA1*02:01-B1*03:03M HLA-DRB1*15:03L
TLKGVEAVMY

SEQ ID NO: 8677 - protein, 10 aa, Severe acute respiratory syndrome coronavirus 2
  REGION 1..10: note = Table B: HLA-DQA1*03:02-B1*03:03L HLA-DQA1*05:05-B1*03:19L HLA-DQA1*03:01-B1*03:02L
VEAVMYMGTL

SEQ ID NO: 8678 - protein, 13 aa, Severe acute respiratory syndrome coronavirus 2
  REGION 1..13: note = Table B: HLA-DQA1*03:02-B1*03:03L HLA-DRB1*01:03L HLA-DRB1*01:02L HLA-DRB1*08:04L HLA-DPA1*01:03-B1*03:01L HLA-DQA1*01-B1*05L HLA-DPA1*01:03-B1*04:01L HLA-DRB1*16:01L HLA-DRB1*04:08L
VMYMGTLSYEQFK

SEQ ID NO: 8679 - protein, 12 aa, Severe acute respiratory syndrome coronavirus 2
  REGION 1..12: note = Table B: HLA-DQA1*03:02-B1*03:03L HLA-DRB1*04:04L HLA-DRB4*03:01NL HLA-DRB1*08:04L HLA-DRB1*11:03L HLA-DQA1*01:01-B1*05:01L HLA-DQA1*05:05-B1*03:19L HLA-DQA1*05:01-B1*02:01L HLA-DRB1*14:54L
  REGION 1..12: note = CONT. FROM ABOVE: HLA-DPA1*01:03-B1*104:01L HLA-DQA1*05:05-B1*03 :01L HLA-DRB1*07:01L HLA-DRB1*10:01L HLA-DRB1*08:03L
MGTLSYEQFKKG

SEQ ID NO: 8680 - protein, 10 aa, Severe acute respiratory syndrome coronavirus 2
  REGION 1..10: note = Table B: HLA-DQA1*03:02-B1*03:03L HLA-DQA1*05:05-B1*03:19M HLA-DPA1*01:03-B1*104:01L
YEQFKKGVQI

SEQ ID NO: 8681 - protein, 10 aa, Severe acute respiratory syndrome coronavirus 2
  REGION 1..10: note = Table B: HLA-DQA1*03:02-B1*03:03L HLA-DQA1*05:01-B1*03:01L HLA-DRB1*04:03L HLA-DRB1*01:03L HLA-DRB1*04:05L HLA-DQA1*01:02-B1*06:02L HLA-DRB1*01:01L HLA-DRB1*01:02L HLA-DPA1*03:01-B1*04:02L HLA-DQA1*01:01-B1*05:01L
  REGION 1..10: note = CONT. FROM ABOVE: HLA-DQA1*01-B1*05L HLA-DQA1*05:05-B1*03:19L HL A-DQA1*05:01-B1*02:01L HLA-DPA1*01:03-B1*04:01L HLA-DRB1*12:01L HLA-DPA1*02:01-B1*13:01M HLA-DPA1*03:01-B1*105:01L HLA-DQA1*03:0 1-B1*03:02L HLA-DQA1*05:05-B1*03:01L HLA-DPA1*01:02-B1*04:01L
  REGION 1..10: note = CONT. FROM ABOVE: HLA-DRB1*16:01L HLA-DQA1*01:03-B1*06:01M HLA-D QA1*02:01-B1*03:03L HLA-DRB1*15:03L
KYLVQQESPF

SEQ ID NO: 8682 - protein, 10 aa, Severe acute respiratory syndrome coronavirus 2
  REGION 1..10: note = Table B: HLA-DQA1*03:02-B1*03:03L HLA-DQA1*05:01-B1*03:01L HLA-DRB1*04:03L HLA-DQA1*01:02-B1*06:02L HLA-DRB1*01:02L HLA-DPA1*03:01-B1*04:02L HLA-DRB1*14:01L HLA-DRB1*14:02L HLA-DQA1*01-B1*05L HLA-DQA1*05:05-B1*03:19L
  REGION 1..10: note = CONT. FROM ABOVE: HLA-DQA1*05:01-B1*02:01L HLA-DQA1*05:05-B1*03: 116L HLA-DRB1*09:01L HLA-DRB1*12:01L HLA-DPA1*02:01-B1*13:01L HL A-DPA1*03:01-B1*105:01L HLA-DQA1*03:01-B1*03:02L HLA-DPA1*01:03- B1*104:01L HLA-DPA1*01:02-B1*04:01L HLA-DRB1*16:01L
  REGION 1..10: note = CONT. FROM ABOVE: HLA-DQA1*01:03-B1*06:01L HLA-DQA1*02:01-B1*03: 03L HLA-DRB1*15:03L
YLVQQESPFV

SEQ ID NO: 8683 - protein, 10 aa, Severe acute respiratory syndrome coronavirus 2
  REGION 1..10: note = Table B: HLA-DQA1*03:02-B1*03:03L HLA-DQA1*05:01-B1*03:01L HLA-DRB1*04:03L HLA-DQA1*01:02-B1*06:02L HLA-DRB1*01:02L HLA-DPA1*03:01-B1*04:02L HLA-DRB1*14:01L HLA-DQA1*01-B1*05L HLA-DQA1*05:05-B1*03:19L HLA-DQA1*05:01-B1*02:01L
  REGION 1..10: note = CONT. FROM ABOVE: HLA-DRB1*12:01L HLA-DPA1*03:01-B1*105:01L HLA- DQA1*03:01-B1*03:02L HLA-DPA1*01:02-B1*04:01L HLA-DRB1*16:01L HL A-DQA1*01:03-B1*06:01L HLA-DQA1*02:01-B1*03:03L HLA-DRB1*15:03L
LVQQESPFVM

SEQ ID NO: 8684 - protein, 10 aa, Severe acute respiratory syndrome coronavirus 2
  REGION 1..10: note = Table B: HLA-DQA1*03:02-B1*03:03L HLA-DQA1*03:01-B1*03:02L
VQQESPFVMM

SEQ ID NO: 8685 - protein, 10 aa, Severe acute respiratory syndrome coronavirus 2
  REGION 1..10: note = Table B: HLA-DQA1*03:02-B1*03:03L HLA-DQA1*05:05-B1*03:19L
QESPFVMMSA

SEQ ID NO: 8686 - protein, 12 aa, Severe acute respiratory syndrome coronavirus 2
  REGION 1..12: note = Table B: HLA-DQA1*03:02-B1*03:03L HLA-DQA1*05:01-B1*03:01L HLA-DRB1*04:01L HLA-DRB1*13:02L HLA-DQA1*01:02-B1*06:02L HLA-DRB1*01:01L HLA-DRB1*08:04L HLA-DRB1*08:77L HLA-DRB3*02:01L HLA-DPA1*01:03-B1*03:01L HLA-DPA1*03:01-B1*04:02L
  REGION 1..12: note = CONT. FROM ABOVE: HLA-DRB1*14:01L HLA-DRB1*11:03L HLA-DRB1*11:04 L HLA-DRB1*14:02L HLA-DRB1*08:01L HLA-DRB1*11:01L HLA-DRB5*01:01 L HLA-DQA1*01-B1*05L HLA-DQA1*05:05-B1*03:19L HLA-DQA1*05:01-B1* 02:01L HLA-DRB4*01:01L HLA-DRB1*09:01L HLA-DRB1*12:02L
  REGION 1..12: note = CONT. FROM ABOVE: HLA-DRB3*01:01L HLA-DPA1*02:01-B1*13:01L HLA-D PA1*03:01-B1*105:01L HLA-DPA1*01:03-B1*104:01L HLA-DQA1*05:05-B1 *03:01L HLA-DRB1*07:01L HLA-DRB1*08:02L HLA-DRB1*08:03L HLA-DRB1 *15:01L
SPFVMMSAPPAQ

SEQ ID NO: 8687 - protein, 10 aa, Severe acute respiratory syndrome coronavirus 2
  REGION 1..10: note = Table B: HLA-DQA1*03:02-B1*03:03L HLA-DQA1*05:01-B1*03:01L HLA-DRB1*04:01L HLA-DRB1*04:03L HLA-DRB1*13:02L HLA-DRB1*13:03L HLA-DRB1*01:03L HLA-DQA1*01:02-B1*06:02L HLA-DRB4*03:01NL HLA-DRB1*08:77L HLA-DPA1*01:03-B1*03:01L
  REGION 1..10: note = CONT. FROM ABOVE: HLA-DPA1*03:01-B1*04:02L HLA-DRB1*03:01L HLA-D RB1*14:01L HLA-DRB1*11:02L HLA-DRB1*14:02L HLA-DRB1*11:01L HLA-D QA1*01-B1*05L HLA-DQA1*05:05-B1*03:19L HLA-DQA1*05:01-B1*02:01L HLA-DRB4*01:01L HLA-DPA1*01:03-B1*04:01L
  REGION 1..10: note = CONT. FROM ABOVE: HLA-DQA1*05:05-B1*03:116L HLA-DPA1*01:03-B1*04 :02L HLA-DRB1*12:01L HLA-DPA1*02:01-B1*13:01L HLA-DPA1*03:01-B1* 105:01L HLA-DPA1*01:03-B1*104:01L HLA-DQA1*05:05-B1*03:01L HLA-D PA1*01:02-B1*04:01L HLA-DRB1*10:01L HLA-DRB1*16:01L
  REGION 1..10: note = CONT. FROM ABOVE: HLA-DQA1*01:03-B1*06:01L HLA-DRB1*08:02L HLA-D QA1*02:01-B1*03:03L HLA-DRB1*15:03L
VMMSAPPAQY

SEQ ID NO: 8688 - protein, 10 aa, Severe acute respiratory syndrome coronavirus 2
  REGION 1..10: note = Table B: HLA-DQA1*03:02-B1*03:03L HLA-DQA1*05:01-B1*03:01L HLA-DQA1*01:02-B1*06:02L HLA-DRB1*01:02L HLA-DPA1*03:01-B1*04:02L HLA-DRB1*14:02L HLA-DQA1*05:05-B1*03:19L HLA-DQA1*05:01-B1*02:01L
  REGION 1..10: note = CONT. FROM ABOVE: HLA-DQA1*05:05-B1*03:116L HLA-DRB1*09:01L HLA- DPA1*03:01-B1*105:01L HLA-DQA1*03:01-B1*03:02L HLA-DPA1*01:02-B1 *04:01L HLA-DQA1*02:01-B1*03:03L HLA-DRB1*15:03L
MSAPPAQYEL

SEQ ID NO: 8689 - protein, 10 aa, Severe acute respiratory syndrome coronavirus 2
  REGION 1..10: note = Table B: HLA-DQA1*03:02-B1*03:03L HLA-DQA1*05:01-B1*03:01L HLA-DRB1*01:03L HLA-DRB1*04:05L HLA-DQA1*01:02-B1*06:02M HLA-DRB1*08:77L HLA-DPA1*01:03-B1*03:01L HLA-DPA1*03:01-B1*04:02L HLA-DRB1*03:01L HLA-DRB1*14:02L
  REGION 1..10: note = CONT. FROM ABOVE: HLA-DQA1*05:05-B1*03:19L HLA-DQA1*05:01-B1*02: 01L HLA-DRB4*01:01L HLA-DPA1*01:03-B1*04:01L HLA-DQA1*05:05-B1*0 3:116L HLA-DPA1*01:03-B1*04:02L HLA-DPA1*02:01-B1*13:01L HLA-DPA 1*03:01-B1*105:01L HLA-DPA1*01:02-B1*04:01L HLA-DRB1*16:01L
  REGION 1..10: note = CONT. FROM ABOVE: HLA-DQA1*01:03-B1*06:01L HLA-DRB1*08:02L HLA-D QA1*02:01-B1*03:03M HLA-DRB1*15:03L
AQYELKHGTF

SEQ ID NO: 8690 - protein, 15 aa, Severe acute respiratory syndrome coronavirus 2
  REGION 1..15: note = Table B: HLA-DQA1*03:02-B1*03:03L HLA-DQA1*05:01-B1*03:01L HLA-DRB1*13:02L HLA-DRB1*04:05L HLA-DRB1*01:02L HLA-DQA1*05:05-B1*03:19L HLA-DRB1*12:01L HLA-DQA1*03:01-B1*03:02L HLA-DPA1*01:03-B1*104:01L
  REGION 1..15: note = CONT. FROM ABOVE: HLA-DRB1*04:08L
YELKHGTFTCASEYT

SEQ ID NO: 8691 - protein, 15 aa, Severe acute respiratory syndrome coronavirus 2
  REGION 1..15: note = Table B: HLA-DQA1*03:02-B1*03:03L HLA-DRB1*04:03L HLA-DRB1*01:03L HLA-DRB1*01:02L HLA-DRB1*08:04L HLA-DPA1*01:03-B1*04:02L HLA-DRB1*12:01L HLA-DQA1*03:01-B1*03:02L HLA-DRB1*16:01L HLA-DRB1*04:08L
  REGION 1..15: note = CONT. FROM ABOVE: HLA-DRB1*15:03L
HGTFTCASEYTGNYQ

SEQ ID NO: 8692 - protein, 12 aa, Severe acute respiratory syndrome coronavirus 2
  REGION 1..12: note = Table B: HLA-DQA1*03:02-B1*03:03L HLA-DQA1*05:01-B1*03:01L HLA-DPA1*01:03-B1*03:01L HLA-DPA1*03:01-B1*04:02L HLA-DPA1*01:03-B1*04:01L HLA-DPA1*03:01-B1*105:01L HLA-DPA1*01:03-B1*104:01L HLA-DRB1*15:03L
SEYTGNYQCGHY

SEQ ID NO: 8693 - protein, 18 aa, Severe acute respiratory syndrome coronavirus 2
  REGION 1..18: note = Table B: HLA-DQA1*03:02-B1*03:03L HLA-DRB3*02:01L HLA-DRB4*01:01L HLA-DQA1*05:05-B1*03:116L
HYKHITSKETLYCIDGAL

SEQ ID NO: 8694 - protein, 10 aa, Severe acute respiratory syndrome coronavirus 2
  REGION 1..10: note = Table B: HLA-DQA1*03:02-B1*03:03L HLA-DQA1*05:01-B1*03:01L HLA-DQA1*01:02-B1*06:02L HLA-DQA1*05:05-B1*03:19L HLA-DQA1*03:01-B1*03:02L HLA-DQA1*05:05-B1*03:01L HLA-DQA1*01:03-B1*06:01L HLA-DQA1*02:01-B1*03:03L
IDGALLTKSS

SEQ ID NO: 8695 - protein, 12 aa, Severe acute respiratory syndrome coronavirus 2
  REGION 1..12: note = Table B: HLA-DQA1*03:02-B1*03:03L HLA-DQA1*05:05-B1*03:01L
DGALLTKSSEYK

SEQ ID NO: 8696 - protein, 10 aa, Severe acute respiratory syndrome coronavirus 2
  REGION 1..10: note = Table B: HLA-DQA1*03:02-B1*03:03L HLA-DQA1*01-B1*05L HLA-DQA1*03:01-B1*03:02L
SSEYKGPITD

SEQ ID NO: 8697 - protein, 10 aa, Severe acute respiratory syndrome coronavirus 2
  REGION 1..10: note = Table B: HLA-DQA1*03:02-B1*03:03M HLA-DQA1*05:01-B1*03:01L HLA-DRB1*13:02L HLA-DRB1*13:03L HLA-DRB1*01:02L HLA-DRB1*08:77L HLA-DPA1*03:01-B1*04:02L HLA-DRB1*11:02M HLA-DRB1*11:01L HLA-DQA1*05:05-B1*03:19H HLA-DQA1*05:01-B1*02:01L
  REGION 1..10: note = CONT. FROM ABOVE: HLA-DRB4*01:01L HLA-DPA1*01:03-B1*04:01L HLA-D QA1*05:05-B1*03:116L HLA-DRB1*09:01M HLA-DPA1*01:03-B1*04:02L HL A-DPA1*03:01-B1*105:01L HLA-DQA1*03:01-B1*03:02M HLA-DPA1*01:03- B1*104:01M HLA-DPA1*01:02-B1*04:01L HLA-DRB1*07:01L
  REGION 1..10: note = CONT. FROM ABOVE: HLA-DRB1*10:01L HLA-DRB1*16:01L HLA-DQA1*01:03 -B1*06:01L HLA-DQA1*02:01-B1*03:03L HLA-DRB1*15:03L
SEYKGPITDV

SEQ ID NO: 8698 - protein, 10 aa, Severe acute respiratory syndrome coronavirus 2
  REGION 1..10: note = Table B: HLA-DQA1*03:02-B1*03:03L HLA-DQA1*05:01-B1*03:01L HLA-DRB1*04:03L HLA-DRB1*13:03L HLA-DRB1*01:03L HLA-DRB1*04:05L HLA-DQA1*01:02-B1*06:02M HLA-DRB1*01:01L HLA-DRB1*01:02L HLA-DRB1*08:77L HLA-DPA1*01:03-B1*03:01L
  REGION 1..10: note = CONT. FROM ABOVE: HLA-DPA1*03:01-B1*04:02L HLA-DRB1*03:01L HLA-D RB1*11:03L HLA-DRB1*14:02L HLA-DQA1*01:01-B1*05:01L HLA-DRB1*11: 01L HLA-DQA1*01-B1*05L HLA-DQA1*05:05-B1*03:19L HLA-DQA1*05:01-B 1*02:01L HLA-DRB4*01:01L HLA-DPA1*01:03-B1*04:01L
  REGION 1..10: note = CONT. FROM ABOVE: HLA-DQA1*05:05-B1*03:116L HLA-DPA1*01:03-B1*04 :02L HLA-DRB1*12:01L HLA-DPA1*02:01-B1*13:01M HLA-DPA1*03:01-B1* 105:01L HLA-DPA1*01:02-B1*04:01L HLA-DRB1*16:01L HLA-DQA1*01:03- B1*06:01M HLA-DQA1*02:01-B1*03:03L HLA-DRB1*15:03L
EYKGPITDVF

SEQ ID NO: 8699 - protein, 11 aa, Severe acute respiratory syndrome coronavirus 2
  REGION 1..11: note = Table B: HLA-DQA1*03:02-B1*03:03L HLA-DRB1*04:03L HLA-DQA1*01:02-B1*06:02L HLA-DQA1*05:01-B1*02:01L HLA-DQA1*03:01-B1*03:02L HLA-DPA1*01:02-B1*04:01L HLA-DQA1*02:01-B1*03:03L
GPITDVFYKEN

SEQ ID NO: 8700 - protein, 11 aa, Severe acute respiratory syndrome coronavirus 2
  REGION 1..11: note = Table B: HLA-DQA1*03:02-B1*03:03L HLA-DPA1*02:01-B1*13:01L
FYKENSYTTTI

SEQ ID NO: 8701 - protein, 10 aa, Severe acute respiratory syndrome coronavirus 2
  REGION 1..10: note = Table B: HLA-DQA1*03:02-B1*03:03L HLA-DQA1*05:01-B1*03:01L HLA-DRB1*04:03L HLA-DRB1*13:02L HLA-DRB1*13:03L HLA-DRB1*01:03L HLA-DRB1*04:02L HLA-DRB1*04:05L HLA-DQA1*01:02-B1*06:02L HLA-DRB1*01:02L HLA-DRB4*03:01NL HLA-DRB1*08:04L
  REGION 1..10: note = CONT. FROM ABOVE: HLA-DPA1*01:03-B1*03:01L HLA-DPA1*03:01-B1*04: 02L HLA-DRB1*14:01L HLA-DRB1*14:02L HLA-DQA1*01:01-B1*05:01L HLA -DRB1*08:01L HLA-DQA1*01-B1*05L HLA-DQA1*05:05-B1*03:19L HLA-DQA 1*05:01-B1*02:01L HLA-DPA1*01:03-B1*04:01L HLA-DRB1*04:10L
  REGION 1..10: note = CONT. FROM ABOVE: HLA-DPA1*01:03-B1*04:02L HLA-DRB1*12:01L HLA-D PA1*02:01-B1*13:01L HLA-DPA1*03:01-B1*105:01L HLA-DQA1*03:01-B1* 03:02L HLA-DRB1*14:54L HLA-DQA1*05:05-B1*03:01L HLA-DRB1*14:17L HLA-DPA1*01:02-B1*04:01L HLA-DRB1*16:01L
  REGION 1..10: note = CONT. FROM ABOVE: HLA-DQA1*01:03-B1*06:01L HLA-DRB1*04:08L HLA-D RB1*08:03L HLA-DQA1*02:01-B1*03:03L HLA-DRB1*15:03L
SYTTTIKPVT

SEQ ID NO: 8702 - protein, 10 aa, Severe acute respiratory syndrome coronavirus 2
  REGION 1..10: note = Table B: HLA-DQA1*03:02-B1*03:03L HLA-DQA1*05:01-B1*03:01M HLA-DRB1*14:04L HLA-DRB1*04:01L HLA-DRB1*04:03L HLA-DRB1*13:02L HLA-DRB1*13:03M HLA-DRB1*01:03M HLA-DRB1*04:02L HLA-DRB1*04:05L HLA-DQA1*01:02-B1*06:02M HLA-DRB1*01:01L HLA-DRB1*01:02L
  REGION 1..10: note = CONT. FROM ABOVE: HLA-DRB4*03:01NL HLA-DRB1*08:77M HLA-DRB3*02:0 1L HLA-DPA1*01:03-B1*03:01M HLA-DPA1*03:01-B1*04:02L HLA-DRB1*03 :01M HLA-DRB1*14:01L HLA-DRB1*11:02M HLA-DRB1*11:03L HLA-DRB1*11 :04L HLA-DRB1*14:02M HLA-DRB1*08:01L HLA-DRB1*11:01L
  REGION 1..10: note = CONT. FROM ABOVE: HLA-DRB5*01:01L HLA-DQA1*01-B1*05M HLA-DQA1*05 :05-B1*03:19M HLA-DRB4*02:01NL HLA-DQA1*05:01-B1*02:01M HLA-DRB4 *01:01M HLA-DPA1*01:03-B1*04:01M HLA-DQA1*05:05-B1*03:116M HLA-D RB1*09:01L HLA-DPA1*01:03-B1*04:02M HLA-DRB1*12:01L
  REGION 1..10: note = CONT. FROM ABOVE: HLA-DRB1*12:02L HLA-DPA1*02:01-B1*13:01L HLA-D PA1*03:01-B1*105:01M HLA-DQA1*03:01-B1*03:02L HLA-DRB1*14:54L HL A-DPA1*01:03-B1*104:01M HLA-DQA1*05:05-B1*03:01L HLA-DRB1*14:17L HLA-DPA1*01:02-B1*04:01L HLA-DRB1*10:01M HLA-DRB1*16:01M
  REGION 1..10: note = CONT. FROM ABOVE: HLA-DQA1*01:03-B1*06:01L HLA-DRB1*08:02L HLA -DRB1*08:03L HLA-DQA1*02:01-B1*03:03M HLA-DRB1*15:01L HLA-DRB1 *15:03M
YTTTIKPVTY

SEQ ID NO: 8703 - protein, 10 aa, Severe acute respiratory syndrome coronavirus 2
  REGION 1..10: note = Table B: HLA-DQA1*03:02-B1*03:03L HLA-DQA1*05:01-B1*03:01L HLA-DQA1*01:02-B1*06:02L HLA-DRB1*01:02L HLA-DPA1*03:01-B1*04:02L HLA-DRB1*14:01L HLA-DRB1*14:02L HLA-DRB1*08:01L HLA-DQA1*05:01-B1*02:01L
  REGION 1..10: note = CONT. FROM ABOVE: HLA-DQA1*05:05-B1*03:116L HLA-DPA1*03:01-B1*10 5:01L HLA-DQA1*03:01-B1*03:02L HLA-DPA1*01:02-B1*04:01L HLA-DRB1 *16:01L HLA-DQA1*01:03-B1*06:01L HLA-DQA1*02:01-B1*03:03L HLA-DR B1*15:03L
TTIKPVTYKL

SEQ ID NO: 8704 - protein, 12 aa, Severe acute respiratory syndrome coronavirus 2
  REGION 1..12: note = Table B: HLA-DQA1*03:02-B1*03:03L HLA-DQA1*05:01-B1*03:01L HLA-DQA1*01:02-B1*06:02L HLA-DQA1*05:05-B1*03:01L HLA-DQA1*01:03-B1*06:01L
LDGVVCTEIDPK

SEQ ID NO: 8705 - protein, 13 aa, Severe acute respiratory syndrome coronavirus 2
  REGION 1..13: note = Table B: HLA-DQA1*03:02-B1*03:03L HLA-DRB1*04:03L HLA-DRB1*04:05L HLA-DRB1*01:02L HLA-DPA1*02:01-B1*13:01L HLA-DRB1*16:01L HLA-DRB1*15:03L
DGVVCTEIDPKLD

SEQ ID NO: 8706 - protein, 12 aa, Severe acute respiratory syndrome coronavirus 2
  REGION 1..12: note = Table B: HLA-DQA1*03:02-B1*03:03L HLA-DRB1*04:03L HLA-DRB1*04:02L HLA-DRB1*04:05L HLA-DQA1*01:02-B1*06:02L HLA-DQA1*01-B1*05L HLA-DQA1*05:01-B1*02:01L HLA-DPA1*03:01-B1*105:01L HLA-DQA1*03:01-B1*03:02L
  REGION 1..12: note = CONT. FROM ABOVE: HLA-DQA1*05:05-B1*03:01L HLA-DRB1*16:01L HLA-D QA1*02:01-B1*03:03L
VVCTEIDPKLDN

SEQ ID NO: 8707 - protein, 10 aa, Severe acute respiratory syndrome coronavirus 2
  REGION 1..10: note = Table B: HLA-DQA1*03:02-B1*03:03M HLA-DQA1*05:01-B1*03:01H HLA-DRB1*14:04L HLA-DRB1*04:01L HLA-DRB1*04:03L HLA-DRB1*13:02L HLA-DRB1*13:03M HLA-DRB1*01:03M HLA-DRB1*04:02M HLA-DRB1*04:05L HLA-DQA1*01:02-B1*06:02M HLA-DRB1*01:01L HLA-DRB4*03:01NM
  REGION 1..10: note = CONT. FROM ABOVE: HLA-DRB1*08:77H HLA-DPA1*01:03-B1*03:01M HLA-D PA1*03:01-B1*04:02H HLA-DRB1*03:01H HLA-DRB1*14:01L HLA-DRB1*11: 02M HLA-DRB1*11:03L HLA-DRB1*11:04L HLA-DRB1*14:02M HLA-DRB1*08: 01L HLA-DRB1*11:01L HLA-DRB5*01:01L HLA-DQA1*01-B1*05H
  REGION 1..10: note = CONT. FROM ABOVE: HLA-DQA1*05:05-B1*03:19H HLA-DRB4*02:01NL HLA- DQA1*05:01-B1*02:01H HLA-DRB4*01:01H HLA-DPA1*01:03-B1*04:01H HL A-DQA1*05:05-B1*03:116M HLA-DRB1*09:01L HLA-DPA1*01:03-B1*04:02M HLA-DRB1*12:01M HLA-DPA1*02:01-B1*13:01L
  REGION 1..10: note = CONT. FROM ABOVE: HLA-DPA1*03:01-B1*105:01L HLA-DQA1*03:01-B1*03 :02M HLA-DRB1*14:54M HLA-DPA1*01:03-B1*104:01M HLA-DRB1*14:17L H LA-DPA1*01:02-B1*04:01M HLA-DRB1*10:01H HLA-DRB1*16:01M HLA-DQA1 *01:03-B1*06:01L HLA-DRB1*04:08L HLA-DRB1*08:02L HLA-DRB1*08:03L
  REGION 1..10: note = CONT. FROM ABOVE: HLA-DQA1*02:01-B1*03:03L HLA-DRB1*15:01L HLA -DRB1*15:03H
TEIDPKLDNY

SEQ ID NO: 8708 - protein, 10 aa, Severe acute respiratory syndrome coronavirus 2
  REGION 1..10: note = Table B: HLA-DQA1*03:02-B1*03:03L HLA-DQA1*05:01-B1*03:01L HLA-DRB1*04:03L HLA-DRB1*13:02L HLA-DRB1*13:03M HLA-DRB1*01:03M HLA-DRB1*04:02L HLA-DRB1*04:05L HLA-DQA1*01:02-B1*06:02M HLA-DRB1*01:01L HLA-DRB4*03:01NL HLA-DRB1*08:77M
  REGION 1..10: note = CONT. FROM ABOVE: HLA-DPA1*01:03-B1*03:01H HLA-DPA1*03:01-B1*04: 02L HLA-DRB1*03:01M HLA-DRB1*14:01L HLA-DRB1*11:02M HLA-DRB1*11: 03L HLA-DRB1*11:04L HLA-DRB1*14:02M HLA-DRB1*11:01L HLA-DRB5*01: 01L HLA-DQA1*01-B1*05M HLA-DQA1*05:05-B1*03:19H
  REGION 1..10: note = CONT. FROM ABOVE: HLA-DQA1*05:01-B1*02:01H HLA-DRB4*01:01M HLA-D PA1*01:03-B1*04:01M HLA-DQA1*05:05-B1*03:116M HLA-DPA1*01:03-B1* 04:02M HLA-DRB1*12:01M HLA-DPA1*02:01-B1*13:01L HLA-DPA1*03:01-B 1*105:01L HLA-DQA1*03:01-B1*03:02L HLA-DRB1*14:54L
  REGION 1..10: note = CONT. FROM ABOVE: HLA-DPA1*01:03-B1*104:01M HLA-DQA1*05:05-B1*03 :01L HLA-DPA1*01:02-B1*04:01L HLA-DRB1*10:01M HLA-DRB1*16:01M HL A-DQA1*01:03-B1*06:01L HLA-DRB1*08:02L HLA-DQA1*02:01-B1*03:03L HLA-DRB1*15:03L
EIDPKLDNYY

SEQ ID NO: 8709 - protein, 20 aa, Severe acute respiratory syndrome coronavirus 2
  REGION 1..20: note = Table B: HLA-DQA1*03:02-B1*03:03L HLA-DQA1*05:05-B1*03:01L
IDPKLDNYYKKDNSYFTEQP

SEQ ID NO: 8710 - protein, 20 aa, Severe acute respiratory syndrome coronavirus 2
  REGION 1..20: note = Table B: HLA-DQA1*03:02-B1*03:03L HLA-DRB3*02:01L
DPKLDNYYKKDNSYFTEQPI

SEQ ID NO: 8711 - protein, 11 aa, Severe acute respiratory syndrome coronavirus 2
  REGION 1..11: note = Table B: HLA-DQA1*03:02-B1*03:03L HLA-DQA1*05:01-B1*02:01L HLA-DQA1*03:01-B1*03:02L
DNSYFTEQPID

SEQ ID NO: 8712 - protein, 10 aa, Severe acute respiratory syndrome coronavirus 2
  REGION 1..10: note = Table B: HLA-DQA1*03:02-B1*03:03L HLA-DRB1*04:05L HLA-DQA1*01-B1*05L HLA-DQA1*05:01-B1*02:01L HLA-DPA1*02:01-B1*13:01L HLA-DQA1*03:01-B1*03:02L HLA-DRB1*16:01L HLA-DQA1*01:03-B1*06:01L
  REGION 1..10: note = CONT. FROM ABOVE: HLA-DQA1*02:01-B1*03:03L HLA-DRB1*15:03L
SYFTEQPIDL

SEQ ID NO: 8713 - protein, 11 aa, Severe acute respiratory syndrome coronavirus 2
  REGION 1..11: note = Table B: HLA-DQA1*03:02-B1*03:03L HLA-DRB1*13:03L HLA-DRB1*01:03L HLA-DRB1*04:02L HLA-DRB1*04:05L HLA-DRB4*03:01NL HLA-DRB1*08:77L HLA-DRB1*14:01L HLA-DRB1*14:02L HLA-DQA1*01-B1*05L HLA-DQA1*05:01-B1*02:01L HLA-DRB1*04:10L
  REGION 1..11: note = CONT. FROM ABOVE: HLA-DRB1*12:01L HLA-DQA1*03:01-B1*03:02L HLA-D RB1*14:54L HLA-DRB1*14:17L HLA-DRB1*16:01L HLA-DRB1*04:08L HLA-D QA1*02:01-B1*03:03L
FTEQPIDLVPN

SEQ ID NO: 8714 - protein, 12 aa, Severe acute respiratory syndrome coronavirus 2
  REGION 1..12: note = Table B: HLA-DQA1*03:02-B1*03:03L HLA-DQA1*01-B1*05L HLA-DQA1*05:01-B1*02:01L HLA-DQA1*03:01-B1*03:02L HLA-DQA1*02:01-B1*03:03L
TEQPIDLVPNQP

SEQ ID NO: 8715 - protein, 12 aa, Severe acute respiratory syndrome coronavirus 2
  REGION 1..12: note = Table B: HLA-DQA1*03:02-B1*03:03L HLA-DQA1*05:01-B1*03:01L HLA-DRB1*13:02L HLA-DRB1*13:03L HLA-DRB1*01:03L HLA-DRB1*04:02L HLA-DRB1*04:05L HLA-DRB1*01:02L HLA-DRB4*03:01NL HLA-DRB1*08:77L HLA-DRB3*02:01L HLA-DPA1*03:01-B1*04:02L HLA-DRB1*14:01L
  REGION 1..12: note = CONT. FROM ABOVE: HLA-DQA1*01-B1*05L HLA-DRB1*04:10L HLA-DRB1*12 :01L HLA-DRB1*12:02L HLA-DQA1*03:01-B1*03:02L HLA-DRB1*14:54L HL A-DRB1*14:17L HLA-DRB1*04:08L HLA-DQA1*02:01-B1*03:03L HLA-DRB1* 15:03L
QPIDLVPNQPYP

SEQ ID NO: 8716 - protein, 10 aa, Severe acute respiratory syndrome coronavirus 2
  REGION 1..10: note = Table B: HLA-DQA1*03:02-B1*03:03L HLA-DQA1*05:01-B1*03:01L HLA-DRB1*04:03L HLA-DRB1*13:02L HLA-DRB1*13:03L HLA-DRB1*01:03L HLA-DRB1*04:02L HLA-DRB1*04:05L HLA-DRB4*03:01NL HLA-DRB1*08:77L HLA-DRB1*14:01L HLA-DQA1*01-B1*05L HLA-DQA1*05:01-B1*02:01L
  REGION 1..10: note = CONT. FROM ABOVE: HLA-DRB1*04:10L HLA-DRB1*12:01L HLA-DRB1*12:02 L HLA-DQA1*03:01-B1*03:02L HLA-DRB1*14:54L HLA-DRB1*14:17L HLA-D RB1*16:01L HLA-DQA1*02:01-B1*03:03L
DLVPNQPYPN

SEQ ID NO: 8717 - protein, 10 aa, Severe acute respiratory syndrome coronavirus 2
  REGION 1..10: note = Table B: HLA-DQA1*03:02-B1*03:03L HLA-DQA1*05:01-B1*03:01L HLA-DRB1*04:03L HLA-DRB1*13:03L HLA-DRB1*04:02L HLA-DRB4*03:01NL HLA-DRB1*14:01L HLA-DRB1*12:01L HLA-DQA1*03:01-B1*03:02L HLA-DRB1*14:17L HLA-DRB1*16:01L HLA-DQA1*02:01-B1*03:03L
LVPNQPYPNA

SEQ ID NO: 8718 - protein, 11 aa, Severe acute respiratory syndrome coronavirus 2
  REGION 1..11: note = Table B: HLA-DQA1*03:02-B1*03:03L HLA-DQA1*05:01-B1*03:01L HLA-DRB1*01:03L HLA-DRB1*04:05L HLA-DQA1*01:02-B1*06:02M HLA-DRB1*01:01L HLA-DRB4*03:01NL HLA-DRB1*08:77L HLA-DPA1*01:03-B1*03:01L HLA-DPA1*03:01-B1*04:02L
  REGION 1..11: note = CONT. FROM ABOVE: HLA-DRB1*14:01L HLA-DRB1*11:03L HLA-DRB1*14:02 L HLA-DRB1*08:01L HLA-DRB5*01:01L HLA-DQA1*01-B1*05L HLA-DQA1*05 :05-B1*03:19L HLA-DQA1*05:01-B1*02:01L HLA-DPA1*01:03-B1*04:01L HLA-DQA1*05:05-B1*03:116L HLA-DPA1*01:03-B1*04:02L
  REGION 1..11: note = CONT. FROM ABOVE: HLA-DPA1*02:01-B1*13:01L HLA-DPA1*03:01-B1*105 :01M HLA-DPA1*01:02-B1*04:01L HLA-DRB1*10:01L HLA-DRB1*16:01L HL A-DQA1*01:03-B1*06:01L HLA-DQA1*02:01-B1*03:03L HLA-DRB1*15:03L
VPNQPYPNASF

SEQ ID NO: 8719 - protein, 12 aa, Severe acute respiratory syndrome coronavirus 2
  REGION 1..12: note = Table B: HLA-DQA1*03:02-B1*03:03L HLA-DQA1*05:01-B1*03:01L HLA-DQA1*01:02-B1*06:02L HLA-DQA1*05:05-B1*03:19L HLA-DQA1*05:05-B1*03:01L HLA-DQA1*01:03-B1*06:01L
PNQPYPNASFDN

SEQ ID NO: 8720 - protein, 12 aa, Severe acute respiratory syndrome coronavirus 2
  REGION 1..12: note = Table B: HLA-DQA1*03:02-B1*03:03L HLA-DRB1*04:02L HLA-DQA1*05:05-B1*03:19L HLA-DQA1*05:01-B1*02:01L HLA-DRB1*12:01L HLA-DQA1*05:05-B1*03:01L
QPYPNASFDNFK

SEQ ID NO: 8721 - protein, 15 aa, Severe acute respiratory syndrome coronavirus 2
  REGION 1..15: note = Table B: HLA-DQA1*03:02-B1*03:03L HLA-DQA1*05:01-B1*03:01L HLA-DRB1*04:03L HLA-DRB1*04:04L HLA-DRB1*08:04L HLA-DRB3*02:01L HLA-DPA1*01:03-B1*03:01L HLA-DPA1*03:01-B1*04:02L HLA-DRB1*03:01L HLA-DRB1*11:02L HLA-DRB1*14:02L HLA-DRB1*11:01L
  REGION 1..15: note = CONT. FROM ABOVE: HLA-DQA1*05:05-B1*03:19L HLA-DQA1*05:01-B1*02: 01L HLA-DPA1*01:03-B1*04:02L HLA-DRB3*01:01L HLA-DPA1*01:03-B1*1 04:01L HLA-DQA1*05:05-B1*03:01L HLA-DPA1*01:02-B1*04:01L HLA-DQA 1*01:03-B1*06:01L HLA-DRB1*08:03L HLA-DQA1*02:01-B1*03:03L
DNFKFVCDNIKFADD

SEQ ID NO: 8722 - protein, 11 aa, Severe acute respiratory syndrome coronavirus 2
  REGION 1..11: note = Table B: HLA-DQA1*03:02-B1*03:03L HLA-DRB1*13:03L HLA-DRB1*01:03L HLA-DRB1*04:02L HLA-DRB1*04:04L HLA-DRB1*04:05L HLA-DRB4*03:01NL HLA-DRB1*11:04L HLA-DQA1*05:01-B1*02:01L HLA-DRB1*04:10L HLA-DRB1*12:01L HLA-DRB1*14:54L HLA-DRB1*14:17L
  REGION 1..11: note = CONT. FROM ABOVE: HLA-DRB1*16:01L HLA-DRB1*04:08L HLA-DRB1*08:03 L HLA-DQA1*02:01-B1*03:03L
DNIKFADDLNQ

SEQ ID NO: 8723 - protein, 10 aa, Severe acute respiratory syndrome coronavirus 2
  REGION 1..10: note = Table B: HLA-DQA1*03:02-B1*03:03L HLA-DRB1*04:03L HLA-DRB1*04:02L HLA-DRB1*04:05L HLA-DPA1*03:01-B1*04:02L HLA-DRB1*14:01L HLA-DQA1*01-B1*05L HLA-DQA1*05:01-B1*02:01L HLA-DPA1*02:01-B1*13:01L HLA-DQA1*03:01-B1*03:02L
  REGION 1..10: note = CONT. FROM ABOVE: HLA-DPA1*01:02-B1*04:01L HLA-DRB1*16:01L HLA-D QA1*02:01-B1*03:03L HLA-DRB1*15:03L
IKFADDLNQL

SEQ ID NO: 8724 - protein, 18 aa, Severe acute respiratory syndrome coronavirus 2
  REGION 1..18: note = Table B: HLA-DQA1*03:02-B1*03:03L HLA-DRB3*02:01L HLA-DQA1*05:01-B1*02:01L HLA-DPA1*01:03-B1*04:01L HLA-DRB1*09:01L
DDLNQLTGYKKPASRELK

SEQ ID NO: 8725 - protein, 16 aa, Severe acute respiratory syndrome coronavirus 2
  REGION 1..16: note = Table B: HLA-DQA1*03:02-B1*03:03L HLA-DRB1*04:05L HLA-DRB1*14:02L HLA-DQA1*05:05-B1*03:01L
KPASRELKVTFFPDLN

SEQ ID NO: 8726 - protein, 11 aa, Severe acute respiratory syndrome coronavirus 2
  REGION 1..11: note = Table B: HLA-DQA1*03:02-B1*03:03L HLA-DRB1*04:03L HLA-DRB1*04:02L HLA-DRB1*04:05L HLA-DQA1*05:01-B1*02:01L HLA-DRB1*04:10L HLA-DQA1*03:01-B1*03:02L HLA-DRB1*14:17L HLA-DRB1*16:01L HLA-DQA1*02:01-B1*03:03L HLA-DRB1*15:03L
VTFFPDLNGDV

SEQ ID NO: 8727 - protein, 10 aa, Severe acute respiratory syndrome coronavirus 2
  REGION 1..10: note = Table B: HLA-DQA1*03:02-B1*03:03L HLA-DQA1*01-B1*05L HLA-DQA1*05:05-B1*03:19L HLA-DQA1*05:01-B1*02:01L HLA-DPA1*02:01-B1*13:01L HLA-DQA1*03:01-B1*03:02L HLA-DQA1*02:01-B1*03:03L HLA-DRB1*15:03L
FFPDLNGDVV

SEQ ID NO: 8728 - protein, 13 aa, Severe acute respiratory syndrome coronavirus 2
  REGION 1..13: note = Table B: HLA-DQA1*03:02-B1*03:03L HLA-DRB1*04:03L HLA-DPA1*01:03-B1*03:01L HLA-DQA1*01-B1*05L HLA-DPA1*03:01-B1*105:01L HLA-DRB1*16:01L
FPDLNGDVVAIDY

SEQ ID NO: 8729 - protein, 10 aa, Severe acute respiratory syndrome coronavirus 2
  REGION 1..10: note = Table B: HLA-DQA1*03:02-B1*03:03L HLA-DQA1*05:01-B1*02:01L HLA-DQA1*03:01-B1*03:02L HLA-DQA1*01:03-B1*06:01L HLA-DQA1*02:01-B1*03:03L
NGDVVAIDYK

SEQ ID NO: 8730 - protein, 10 aa, Severe acute respiratory syndrome coronavirus 2
  REGION 1..10: note = Table B: HLA-DQA1*03:02-B1*03:03L HLA-DQA1*05:01-B1*03:01L HLA-DRB1*13:02L HLA-DRB1*13:03M HLA-DRB1*01:03L HLA-DQA1*01:02-B1*06:02M HLA-DRB4*03:01NL HLA-DRB1*08:77L HLA-DPA1*01:03-B1*03:01L HLA-DPA1*03:01-B1*04:02L
  REGION 1..10: note = CONT. FROM ABOVE: HLA-DRB1*03:01L HLA-DRB1*14:01L HLA-DRB1*14:02 L HLA-DRB5*01:01L HLA-DQA1*01-B1*05L HLA-DQA1*05:05-B1*03:19L HL A-DQA1*05:01-B1*02:01L HLA-DRB4*01:01L HLA-DPA1*01:03-B1*04:01M HLA-DQA1*05:05-B1*03:116L HLA-DPA1*01:03-B1*04:02L
  REGION 1..10: note = CONT. FROM ABOVE: HLA-DRB1*12:01L HLA-DPA1*02:01-B1*13:01L HLA-D PA1*03:01-B1*105:01M HLA-DQA1*05:05-B1*03:01L HLA-DPA1*01:02-B1* 04:01L HLA-DRB1*10:01L HLA-DRB1*16:01L HLA-DQA1*01:03-B1*06:01L HLA-DQA1*02:01-B1*03:03L HLA-DRB1*15:03L
DVVAIDYKHY

SEQ ID NO: 8731 - protein, 12 aa, Severe acute respiratory syndrome coronavirus 2
  REGION 1..12: note = Table B: HLA-DQA1*03:02-B1*03:03L HLA-DQA1*05:01-B1*03:01L HLA-DRB1*14:04L HLA-DRB1*04:01L HLA-DRB1*04:04L HLA-DRB1*04:05L HLA-DQA1*01:02-B1*06:02L HLA-DRB1*01:02L HLA-DRB1*08:04L HLA-DRB1*08:77L HLA-DRB3*02:01L HLA-DPA1*01:03-B1*03:01L
  REGION 1..12: note = CONT. FROM ABOVE: HLA-DPA1*03:01-B1*04:02L HLA-DRB1*03:01L HLA-D RB1*11:02L HLA-DRB1*11:03L HLA-DRB1*11:04L HLA-DRB1*14:02L HLA-D RB1*08:01L HLA-DRB1*11:01L HLA-DRB5*01:01L HLA-DQA1*01-B1*05L HL A-DQA1*05:05-B1*03:19L HLA-DQA1*05:01-B1*02:01L HLA-DRB1*13:01L
  REGION 1..12: note = CONT. FROM ABOVE: HLA-DRB4*01:01L HLA-DPA1*01:03-B1*04:01L HLA-D RB1*04:10L HLA-DPA1*01:03-B1*04:02L HLA-DRB1*12:02L HLA-DRB3*01: 01L HLA-DPA1*02:01-B1*13:01L HLA-DPA1*03:01-B1*105:01L HLA-DPA1* 01:03-B1*02:01L HLA-DRB1*10:01L HLA-DQA1*01:03-B1*06:01L
  REGION 1..12: note = CONT. FROM ABOVE: HLA-DRB1*08:03L HLA-DQA1*02:01-B1*03:03L HLA-D RB1*15:03L
VVAIDYKHYTPS

SEQ ID NO: 8732 - protein, 15 aa, Severe acute respiratory syndrome coronavirus 2
  REGION 1..15: note = Table B: HLA-DQA1*03:02-B1*03:03L HLA-DPA1*03:01-B1*04:02L HLA-DRB1*03:01L HLA-DRB1*11:02L HLA-DQA1*05:05-B1*03:19L HLA-DQA1*05:01-B1*02:01L HLA-DRB1*09:01L HLA-DPA1*01:03-B1*04:02L HLA-DPA1*01:03-B1*104:01L
  REGION 1..15: note = CONT. FROM ABOVE: HLA-DQA1*01:03-B1*06:01L HLA-DRB1*08:02L
KPIVWHVNNATNKAT

SEQ ID NO: 8733 - protein, 11 aa, Severe acute respiratory syndrome coronavirus 2
  REGION 1..11: note = Table B: HLA-DQA1*03:02-B1*03:03L HLA-DRB1*04:01L HLA-DRB1*13:02L HLA-DRB4*03:01NL HLA-DPA1*03:01-B1*04:02L HLA-DRB1*14:01L HLA-DRB1*11:02L HLA-DRB1*11:01L HLA-DRB4*01:01L HLA-DQA1*05:05-B1*03:116L HLA-DPA1*02:01-B1*13:01L
  REGION 1..11: note = CONT. FROM ABOVE: HLA-DPA1*01:03-B1*104:01L HLA-DRB1*14:17L HLA- DPA1*01:02-B1*04:01L HLA-DQA1*01:03-B1*06:01L
HVNNATNKATY

SEQ ID NO: 8734 - protein, 10 aa, Severe acute respiratory syndrome coronavirus 2
  REGION 1..10: note = Table B: HLA-DQA1*03:02-B1*03:03L HLA-DQA1*05:01-B1*03:01L HLA-DRB1*04:03L HLA-DRB1*13:02L HLA-DRB1*13:03L HLA-DRB1*01:03L HLA-DRB1*04:02L HLA-DRB1*04:05L HLA-DRB1*01:02L HLA-DRB4*03:01NL HLA-DRB1*08:77L HLA-DRB1*14:01L HLA-DRB1*11:04L HLA-DRB1*12:01L
  REGION 1..10: note = CONT. FROM ABOVE: HLA-DQA1*03:01-B1*03:02L HLA-DRB1*14:54L HLA-D RB1*14:17L HLA-DPA1*01:02-B1*04:01L HLA-DRB1*16:01L HLA-DQA1*01: 03-B1*06:01L HLA-DRB1*04:08L HLA-DQA1*02:01-B1*03:03L
ATNKATYKPN

SEQ ID NO: 8735 - protein, 10 aa, Severe acute respiratory syndrome coronavirus 2
  REGION 1..10: note = Table B: HLA-DQA1*03:02-B1*03:03L HLA-DQA1*05:01-B1*03:01L HLA-DRB1*04:03L HLA-DRB1*13:03L HLA-DRB1*04:02L HLA-DQA1*01:02-B1*06:02L HLA-DRB4*03:01NL HLA-DQA1*05:05-B1*03:19L HLA-DQA1*05:01-B1*02:01L
  REGION 1..10: note = CONT. FROM ABOVE: HLA-DPA1*03:01-B1*105:01L HLA-DQA1*03:01-B1*03 :02L HLA-DQA1*05:05-B1*03:01L HLA-DRB1*14:17L HLA-DQA1*01:03-B1* 06:01L HLA-DQA1*02:01-B1*03:03L
WSTKPVETSN

SEQ ID NO: 8736 - protein, 11 aa, Severe acute respiratory syndrome coronavirus 2
  REGION 1..11: note = Table B: HLA-DQA1*03:02-B1*03:03L HLA-DQA1*05:01-B1*03:01L HLA-DRB1*04:03L HLA-DRB1*08:77L HLA-DPA1*01:03-B1*03:01L HLA-DPA1*03:01-B1*04:02L HLA-DRB1*03:01L HLA-DRB1*14:01L HLA-DRB1*14:02L HLA-DRB1*11:01L HLA-DQA1*01-B1*05L
  REGION 1..11: note = CONT. FROM ABOVE: HLA-DQA1*05:05-B1*03:19L HLA-DQA1*05:01-B1*02: 01L HLA-DRB4*01:01L HLA-DPA1*01:03-B1*04:01L HLA-DQA1*05:05-B1*0 3:116L HLA-DPA1*01:03-B1*04:02L HLA-DPA1*02:01-B1*13:01L HLA-DPA 1*03:01-B1*105:01L HLA-DPA1*01:02-B1*04:01L HLA-DRB1*10:01L
  REGION 1..11: note = CONT. FROM ABOVE: HLA-DRB1*16:01L HLA-DQA1*01:03-B1*06:01L HLA-D RB1*08:02L HLA-DRB1*15:03L
STKPVETSNSF

SEQ ID NO: 8737 - protein, 10 aa, Severe acute respiratory syndrome coronavirus 2
  REGION 1..10: note = Table B: HLA-DQA1*03:02-B1*03:03L HLA-DQA1*05:05-B1*03:19L HLA-DQA1*03:01-B1*03:02L
VETSNSFDVL

SEQ ID NO: 8738 - protein, 12 aa, Severe acute respiratory syndrome coronavirus 2
  REGION 1..12: note = Table B: HLA-DQA1*03:02-B1*03:03L HLA-DRB1*04:03L HLA-DQA1*01:02-B1*06:02L HLA-DQA1*01-B1*05L HLA-DQA1*05:01-B1*02:01L HLA-DPA1*03:01-B1*105:01L
TSNSFDVLKSED

SEQ ID NO: 8739 - protein, 12 aa, Severe acute respiratory syndrome coronavirus 2
  REGION 1..12: note = Table B: HLA-DQA1*03:02-B1*03:03L HLA-DQA1*05:01-B1*03:01L HLA-DRB1*13:02L HLA-DRB1*01:03L HLA-DRB1*04:04L HLA-DQA1*01:02-B1*06:02L HLA-DRB1*01:02L HLA-DRB1*08:04L HLA-DPA1*01:03-B1*03:01L HLA-DRB1*14:01L HLA-DRB1*11:04L
  REGION 1..12: note = CONT. FROM ABOVE: HLA-DQA1*01:01-B1*05:01L HLA-DRB1*08:01L HLA-D QA1*05:05-B1*03:19L HLA-DRB1*12:02L HLA-DPA1*02:01-B1*13:01L HLA -DPA1*03:01-B1*105:01L HLA-DQA1*05:05-B1*03:01L HLA-DRB1*10:01L HLA-DRB1*04:08L HLA-DRB1*08:03L HLA-DRB1*15:03L
SNSFDVLKSEDA

SEQ ID NO: 8740 - protein, 12 aa, Severe acute respiratory syndrome coronavirus 2
  REGION 1..12: note = Table B: HLA-DQA1*03:02-B1*03:03L HLA-DQA1*05:01-B1*03:01L HLA-DRB1*13:02L HLA-DRB1*01:03L HLA-DRB1*04:04L HLA-DQA1*01:02-B1*06:02L HLA-DRB1*01:02L HLA-DRB1*08:04L HLA-DRB1*08:77L HLA-DRB3*02:01L HLA-DPA1*01:03-B1*03:01L
  REGION 1..12: note = CONT. FROM ABOVE: HLA-DRB1*14:01L HLA-DRB1*11:03L HLA-DRB1*14:02 L HLA-DRB1*08:01L HLA-DQA1*05:05-B1*03:19L HLA-DRB1*12:02L HLA-D PA1*02:01-B1*13:01L HLA-DPA1*03:01-B1*105:01L HLA-DQA1*05:05-B1* 03:01L HLA-DRB1*10:01L HLA-DRB1*04:08L HLA-DRB1*08:03L
  REGION 1..12: note = CONT. FROM ABOVE: HLA-DRB1*15:03L
NSFDVLKSEDAQ

SEQ ID NO: 8741 - protein, 12 aa, Severe acute respiratory syndrome coronavirus 2
  REGION 1..12: note = Table B: HLA-DQA1*03:02-B1*03:03L HLA-DQA1*05:01-B1*03:01L HLA-DRB1*13:02L HLA-DQA1*01:02-B1*06:02L HLA-DRB1*01:01L HLA-DRB1*08:04L HLA-DRB1*08:77L HLA-DPA1*01:03-B1*03:01L HLA-DRB1*14:01L HLA-DRB1*11:03L HLA-DRB1*14:02L HLA-DRB1*08:01L
  REGION 1..12: note = CONT. FROM ABOVE: HLA-DRB1*11:01L HLA-DRB5*01:01L HLA-DQA1*05:05 -B1*03:19L HLA-DRB1*09:01L HLA-DRB1*12:02L HLA-DRB3*01:01L HLA-D PA1*02:01-B1*13:01L HLA-DPA1*03:01-B1*105:01L HLA-DQA1*05:05-B1* 03:01L HLA-DRB1*07:01L HLA-DRB1*08:03L HLA-DRB1*15:03L
SFDVLKSEDAQG

SEQ ID NO: 8742 - protein, 10 aa, Severe acute respiratory syndrome coronavirus 2
  REGION 1..10: note = Table B: HLA-DQA1*03:02-B1*03:03L
VLKSEDAQGM

SEQ ID NO: 8743 - protein, 10 aa, Severe acute respiratory syndrome coronavirus 2
  REGION 1..10: note = Table B: HLA-DQA1*03:02-B1*03:03L HLA-DRB1*04:03L HLA-DQA1*05:01-B1*02:01L HLA-DQA1*03:01-B1*03:02L
KSEDAQGMDN

SEQ ID NO: 8744 - protein, 10 aa, Severe acute respiratory syndrome coronavirus 2
  REGION 1..10: note = Table B: HLA-DQA1*03:02-B1*03:03H HLA-DQA1*05:01-B1*03:01L HLA-DRB1*13:03L HLA-DRB1*08:77L HLA-DPA1*03:01-B1*04:02L HLA-DRB1*11:02L HLA-DQA1*05:05-B1*03:19M HLA-DRB4*01:01L HLA-DPA1*01:03-B1*04:01L HLA-DQA1*05:05-B1*03:116L
  REGION 1..10: note = CONT. FROM ABOVE: HLA-DRB1*09:01M HLA-DPA1*01:03-B1*04:02L HLA-D QA1*03:01-B1*03:02M HLA-DPA1*01:03-B1*104:01L HLA-DPA1*01:02-B1* 04:01L HLA-DRB1*10:01L HLA-DRB1*16:01L
SEDAQGMDNL

SEQ ID NO: 8745 - protein, 16 aa, Severe acute respiratory syndrome coronavirus 2
  REGION 1..16: note = Table B: HLA-DQA1*03:02-B1*03:03L HLA-DQA1*05:01-B1*03:01L HLA-DRB1*04:05L HLA-DRB1*01:02L HLA-DPA1*01:03-B1*03:01L HLA-DQA1*05:05-B1*03:19L HLA-DQA1*05:01-B1*02:01L HLA-DRB1*12:01L HLA-DPA1*02:01-B1*13:01L HLA-DRB1*15:03L
DAQGMDNLACEDLKPV

SEQ ID NO: 8746 - protein, 14 aa, Severe acute respiratory syndrome coronavirus 2
  REGION 1..14: note = Table B: HLA-DQA1*03:02-B1*03:03L HLA-DRB1*04:03L HLA-DRB1*04:05L HLA-DRB1*01:02L HLA-DRB1*08:04L HLA-DPA1*01:03-B1*03:01L HLA-DRB1*08:01L HLA-DQA1*05:05-B1*03:19L HLA-DRB1*12:01L
  REGION 1..14: note = CONT. FROM ABOVE: HLA-DPA1*02:01-B1*13:01L HLA-DPA1*01:03-B1*02: 01L HLA-DRB1*15:03L
DNLACEDLKPVSEE

SEQ ID NO: 8747 - protein, 10 aa, Severe acute respiratory syndrome coronavirus 2
  REGION 1..10: note = Table B: HLA-DQA1*03:02-B1*03:03L HLA-DQA1*05:05-B1*03:19L HLA-DQA1*03:01-B1*03:02L HLA-DPA1*01:03-B1*104:01L
EDLKPVSEEV

SEQ ID NO: 8748 - protein, 11 aa, Severe acute respiratory syndrome coronavirus 2
  REGION 1..11: note = Table B: HLA-DQA1*03:02-B1*03:03L HLA-DQA1*05:01-B1*03:01L HLA-DRB1*13:02L HLA-DRB1*04:02L HLA-DRB1*04:05L HLA-DQA1*01:02-B1*06:02L HLA-DRB1*01:02L HLA-DRB4*03:01NL HLA-DRB3*02:01L HLA-DRB1*14:01L HLA-DQA1*01:01-B1*05:01L
  REGION 1..11: note = CONT. FROM ABOVE: HLA-DRB1*04:10L HLA-DRB1*12:01L HLA-DRB1*12:02 L HLA-DPA1*03:01-B1*105:01L HLA-DRB1*14:54L HLA-DQA1*05:05-B1*03 :01L HLA-DRB1*16:01L HLA-DQA1*01:03-B1*06:01L HLA-DRB1*15:03L
DLKPVSEEVVE

SEQ ID NO: 8749 - protein, 12 aa, Severe acute respiratory syndrome coronavirus 2
  REGION 1..12: note = Table B: HLA-DQA1*03:02-B1*03:03L HLA-DRB1*04:03L HLA-DRB1*04:05L HLA-DQA1*01:01-B1*05:01L HLA-DQA1*01-B1*05L HLA-DQA1*05:01-B1*02:01L HLA-DQA1*03:01-B1*03:02L HLA-DRB1*16:01L HLA-DQA1*01:03-B1*06:01L
  REGION 1..12: note = CONT. FROM ABOVE: HLA-DQA1*02:01-B1*03:03L
KPVSEEVVENPT

SEQ ID NO: 8750 - protein, 10 aa, Severe acute respiratory syndrome coronavirus 2
  REGION 1..10: note = Table B: HLA-DQA1*03:02-B1*03:03L HLA-DRB1*11:02L HLA-DQA1*05:05-B1*03:19M HLA-DRB1*09:01L HLA-DQA1*03:01-B1*03:02L HLA-DPA1*01:03-B1*104:01M
SEEVVENPTI

SEQ ID NO: 8751 - protein, 11 aa, Severe acute respiratory syndrome coronavirus 2
  REGION 1..11: note = Table B: HLA-DQA1*03:02-B1*03:03L HLA-DRB1*08:77L HLA-DPA1*01:03-B1*03:01L
EEVVENPTIQK

SEQ ID NO: 8752 - protein, 10 aa, Severe acute respiratory syndrome coronavirus 2
  REGION 1..10: note = Table B: HLA-DQA1*03:02-B1*03:03L HLA-DQA1*05:01-B1*03:01L HLA-DRB1*04:03L HLA-DRB1*13:02L HLA-DRB1*13:03L HLA-DRB1*01:03L HLA-DRB1*04:02L HLA-DRB1*04:05L HLA-DQA1*01:02-B1*06:02L HLA-DRB1*01:02L HLA-DRB4*03:01NL HLA-DRB1*08:04L HLA-DRB1*08:77L
  REGION 1..10: note = CONT. FROM ABOVE: HLA-DRB3*02:01L HLA-DPA1*01:03-B1*03:01L HLA-D RB1*14:01L HLA-DRB1*11:03L HLA-DRB1*11:04L HLA-DRB1*14:02L HLA-D QA1*01:01-B1*05:01L HLA-DQA1*01-B1*05L HLA-DQA1*05:05-B1*03:19L HLA-DQA1*05:01-B1*02:01L HLA-DRB1*04:10L
  REGION 1..10: note = CONT. FROM ABOVE: HLA-DPA1*01:03-B1*04:02L HLA-DRB1*12:01L HLA-D PA1*03:01-B1*105:01L HLA-DQA1*03:01-B1*03:02L HLA-DRB1*14:54L HL A-DQA1*05:05-B1*03:01L HLA-DRB1*14:17L HLA-DPA1*01:02-B1*04:01L HLA-DRB1*10:01L HLA-DRB1*16:01L HLA-DQA1*01:03-B1*06:01L
  REGION 1..10: note = CONT. FROM ABOVE: HLA-DRB1*04:08L HLA-DQA1*02:01-B1*03:03L HLA-D RB1*15:03L
VVENPTIQKD

SEQ ID NO: 8753 - protein, 10 aa, Severe acute respiratory syndrome coronavirus 2
  REGION 1..10: note = Table B: HLA-DQA1*03:02-B1*03:03L HLA-DRB1*11:02L HLA-DQA1*05:05-B1*03:19M HLA-DQA1*05:01-B1*02:01L HLA-DRB1*09:01L HLA-DPA1*01:03-B1*04:02L HLA-DQA1*03:01-B1*03:02L HLA-DPA1*01:03-B1*104:01L
  REGION 1..10: note = CONT. FROM ABOVE: HLA-DRB1*16:01L
VENPTIQKDV

SEQ ID NO: 8754 - protein, 10 aa, Severe acute respiratory syndrome coronavirus 2
  REGION 1..10: note = Table B: HLA-DQA1*03:02-B1*03:03L HLA-DQA1*05:01-B1*03:01L HLA-DQA1*01:02-B1*06:02L HLA-DQA1*01-B1*05L HLA-DQA1*05:01-B1*02:01L HLA-DPA1*03:01-B1*105:01L HLA-DQA1*03:01-B1*03:02L HLA-DQA1*01:03-B1*06:01L
  REGION 1..10: note = CONT. FROM ABOVE: HLA-DQA1*02:01-B1*03:03L
ENPTIQKDVL

SEQ ID NO: 8755 - protein, 10 aa, Severe acute respiratory syndrome coronavirus 2
  REGION 1..10: note = Table B: HLA-DQA1*03:02-B1*03:03L HLA-DQA1*01-B1*05L HLA-DQA1*05:01-B1*02:01L HLA-DQA1*03:01-B1*03:02L HLA-DQA1*02:01-B1*03:03L
NPTIQKDVLE

SEQ ID NO: 8756 - protein, 11 aa, Severe acute respiratory syndrome coronavirus 2
  REGION 1..11: note = Table B: HLA-DQA1*03:02-B1*03:03L HLA-DQA1*01-B1*05L HLA-DQA1*05:01-B1*02:01L HLA-DQA1*03:01-B1*03:02L HLA-DQA1*01:03-B1*06:01L HLA-DQA1*02:01-B1*03:03L
NVKTTEVVGDI

SEQ ID NO: 8757 - protein, 10 aa, Severe acute respiratory syndrome coronavirus 2
  REGION 1..10: note = Table B: HLA-DQA1*03:02-B1*03:03L HLA-DPA1*03:01-B1*105:01L
KTTEVVGDII

SEQ ID NO: 8758 - protein, 10 aa, Severe acute respiratory syndrome coronavirus 2
  REGION 1..10: note = Table B: HLA-DQA1*03:02-B1*03:03L HLA-DQA1*01-B1*05L HLA-DQA1*03:01-B1*03:02L
TTEVVGDIIL

SEQ ID NO: 8759 - protein, 10 aa, Severe acute respiratory syndrome coronavirus 2
  REGION 1..10: note = Table B: HLA-DQA1*03:02-B1*03:03L HLA-DRB1*13:03L HLA-DQA1*01:02-B1*06:02L HLA-DRB1*01:02L HLA-DQA1*05:01-B1*02:01L HLA-DRB1*12:01L HLA-DPA1*03:01-B1*105:01L HLA-DQA1*03:01-B1*03:02L
  REGION 1..10: note = CONT. FROM ABOVE: HLA-DQA1*05:05-B1*03:01L HLA-DQA1*01:03-B1*06: 01L HLA-DQA1*02:01-B1*03:03L HLA-DRB1*15:03L
EVVGDIILKP

SEQ ID NO: 8760 - protein, 11 aa, Severe acute respiratory syndrome coronavirus 2
  REGION 1..11: note = Table B: HLA-DQA1*03:02-B1*03:03L HLA-DQA1*05:01-B1*03:01L HLA-DRB1*04:03L HLA-DRB1*04:02L HLA-DQA1*01:02-B1*06:02L HLA-DQA1*05:05-B1*03:19L HLA-DQA1*05:01-B1*02:01L HLA-DPA1*03:01-B1*105:01L HLA-DQA1*05:05-B1*03:01L
VVGDIILKPAN

SEQ ID NO: 8761 - protein, 12 aa, Severe acute respiratory syndrome coronavirus 2
  REGION 1..12: note = Table B: HLA-DQA1*03:02-B1*03:03L HLA-DQA1*05:01-B1*03:01L HLA-DRB1*04:05L HLA-DQA1*01:02-B1*06:02L HLA-DRB1*14:01L HLA-DQA1*05:01-B1*02:01L HLA-DRB1*04:10L HLA-DRB1*12:01L HLA-DQA1*05:05-B1*03:01L HLA-DRB1*16:01L
VGDIILKPANNS

SEQ ID NO: 8762 - protein, 10 aa, Severe acute respiratory syndrome coronavirus 2
  REGION 1..10: note = Table B: HLA-DQA1*03:02-B1*03:03L HLA-DQA1*05:01-B1*03:01L HLA-DRB1*04:03L HLA-DRB1*13:02L HLA-DRB1*13:03L HLA-DRB1*01:03L HLA-DRB1*04:02L HLA-DRB1*04:05L HLA-DQA1*01:02-B1*06:02L HLA-DRB1*01:02L HLA-DRB4*03:01NL HLA-DRB1*08:77L
  REGION 1..10: note = CONT. FROM ABOVE: HLA-DPA1*01:03-B1*03:01L HLA-DPA1*03:01-B1*04: 02L HLA-DRB1*14:01L HLA-DRB1*14:02L HLA-DRB1*08:01L HLA-DQA1*01- B1*05L HLA-DQA1*05:05-B1*03:19L HLA-DQA1*05:01-B1*02:01L HLA-DPA 1*01:03-B1*04:01L HLA-DQA1*05:05-B1*03:116L HLA-DRB1*09:01L
  REGION 1..10: note = CONT. FROM ABOVE: HLA-DPA1*01:03-B1*04:02L HLA-DRB1*12:01L HLA-D PA1*03:01-B1*105:01L HLA-DQA1*03:01-B1*03:02L HLA-DRB1*14:17L HL A-DPA1*01:02-B1*04:01L HLA-DRB1*10:01L HLA-DRB1*16:01L HLA-DQA1* 01:03-B1*06:01L HLA-DQA1*02:01-B1*03:03L HLA-DRB1*15:03L
IILKPANNSL

SEQ ID NO: 8763 - protein, 11 aa, Severe acute respiratory syndrome coronavirus 2
  REGION 1..11: note = Table B: HLA-DQA1*03:02-B1*03:03L HLA-DRB1*04:03L HLA-DQA1*01:02-B1*06:02L
NNSLKITEEVG

SEQ ID NO: 8764 - protein, 12 aa, Severe acute respiratory syndrome coronavirus 2
  REGION 1..12: note = Table B: HLA-DQA1*03:02-B1*03:03L HLA-DQA1*05:01-B1*03:01L HLA-DRB1*04:05L HLA-DQA1*01:02-B1*06:02L HLA-DRB1*01:02L HLA-DRB1*14:01L HLA-DQA1*01-B1*05L HLA-DQA1*05:01-B1*02:01L HLA-DRB1*12:01L HLA-DPA1*02:01-B1*13:01L
  REGION 1..12: note = CONT. FROM ABOVE: HLA-DPA1*03:01-B1*105:01L HLA-DRB1*15:03L
SLKITEEVGHTD

SEQ ID NO: 8765 - protein, 10 aa, Severe acute respiratory syndrome coronavirus 2
  REGION 1..10: note = Table B: HLA-DQA1*03:02-B1*03:03M HLA-DQA1*05:01-B1*03:01L HLA-DRB1*04:03L HLA-DRB1*13:02L HLA-DRB1*13:03L HLA-DRB1*01:03L HLA-DRB1*04:02L HLA-DRB1*04:05L HLA-DRB4*03:01NL HLA-DRB1*08:77L HLA-DPA1*01:03-B1*03:01L HLA-DPA1*03:01-B1*04:02L
  REGION 1..10: note = CONT. FROM ABOVE: HLA-DRB1*14:01L HLA-DRB1*14:02L HLA-DQA1*01:01 -B1*05:01L HLA-DQA1*01-B1*05L HLA-DQA1*05:05-B1*03:19L HLA-DQA1* 05:01-B1*02:01L HLA-DQA1*05:05-B1*03:116L HLA-DRB1*09:01L HLA-DP A1*01:03-B1*04:02L HLA-DRB1*12:01L HLA-DPA1*03:01-B1*105:01L
  REGION 1..10: note = CONT. FROM ABOVE: HLA-DQA1*03:01-B1*03:02M HLA-DPA1*01:03-B1*104 :01L HLA-DRB1*14:17L HLA-DPA1*01:02-B1*04:01L HLA-DRB1*10:01L HL A-DRB1*16:01L HLA-DQA1*01:03-B1*06:01L HLA-DQA1*02:01-B1*03:03L HLA-DRB1*15:03L
ITEEVGHTDL

SEQ ID NO: 8766 - protein, 10 aa, Severe acute respiratory syndrome coronavirus 2
  REGION 1..10: note = Table B: HLA-DQA1*03:02-B1*03:03M HLA-DQA1*05:01-B1*03:01L HLA-DQA1*01-B1*05L HLA-DQA1*05:05-B1*03:19L HLA-DQA1*05:01-B1*02:01L HLA-DRB1*09:01L HLA-DQA1*03:01-B1*03:02L HLA-DPA1*01:03-B1*104:01L
  REGION 1..10: note = CONT. FROM ABOVE: HLA-DPA1*01:02-B1*04:01L HLA-DRB1*16:01L
TEEVGHTDLM

SEQ ID NO: 8767 - protein, 10 aa, Severe acute respiratory syndrome coronavirus 2
  REGION 1..10: note = Table B: HLA-DQA1*03:02-B1*03:03L HLA-DQA1*05:05-B1*03:19L HLA-DRB1*09:01L HLA-DQA1*03:01-B1*03:02L HLA-DPA1*01:03-B1*104:01L
EEVGHTDLMA

SEQ ID NO: 8768 - protein, 12 aa, Severe acute respiratory syndrome coronavirus 2
  REGION 1..12: note = Table B: HLA-DQA1*03:02-B1*03:03L HLA-DQA1*05:01-B1*03:01L HLA-DQA1*03:01-B1*03:02L HLA-DQA1*05:05-B1*03:01L HLA-DQA1*01:03-B1*06:01L
VGHTDLMAAYVD

SEQ ID NO: 8769 - protein, 11 aa, Severe acute respiratory syndrome coronavirus 2
  REGION 1..11: note = Table B: HLA-DQA1*03:02-B1*03:03L HLA-DQA1*05:01-B1*03:01L HLA-DRB1*04:03L HLA-DQA1*01:02-B1*06:02L HLA-DQA1*01:01-B1*05:01L HLA-DQA1*01-B1*05L HLA-DQA1*05:05-B1*03:19L HLA-DQA1*05:01-B1*02:01L
  REGION 1..11: note = CONT. FROM ABOVE: HLA-DQA1*03:01-B1*03:02L HLA-DQA1*05:05-B1*03: 01L HLA-DQA1*01:03-B1*06:01L HLA-DQA1*02:01-B1*03:03L
HTDLMAAYVDN

SEQ ID NO: 8770 - protein, 12 aa, Severe acute respiratory syndrome coronavirus 2
  REGION 1..12: note = Table B: HLA-DQA1*03:02-B1*03:03L HLA-DRB1*04:02L HLA-DRB1*14:17L HLA-DRB1*16:01L HLA-DQA1*02:01-B1*03:03L
TDLMAAYVDNSS

SEQ ID NO: 8771 - protein, 10 aa, Severe acute respiratory syndrome coronavirus 2
  REGION 1..10: note = Table B: HLA-DQA1*03:02-B1*03:03L HLA-DQA1*01-B1*05L HLA-DQA1*05:01-B1*02:01L HLA-DQA1*03:01-B1*03:02L HLA-DQA1*02:01-B1*03:03L HLA-DRB1*15:03L
MAAYVDNSSL

SEQ ID NO: 8772 - protein, 10 aa, Severe acute respiratory syndrome coronavirus 2
  REGION 1..10: note = Table B: HLA-DQA1*03:02-B1*03:03L HLA-DRB1*04:03L HLA-DRB1*04:05L HLA-DQA1*01:02-B1*06:02L HLA-DRB1*01:01L HLA-DRB1*11:02L HLA-DQA1*05:05-B1*03:19L HLA-DQA1*05:05-B1*03:116L HLA-DPA1*02:01-B1*13:01M
  REGION 1..10: note = CONT. FROM ABOVE: HLA-DPA1*01:03-B1*104:01L HLA-DRB1*16:01L HLA- DQA1*01:03-B1*06:01L HLA-DRB1*08:03L HLA-DQA1*02:01-B1*03:03L HL A-DRB1*15:03L
AYVDNSSLTI

SEQ ID NO: 8773 - protein, 10 aa, Severe acute respiratory syndrome coronavirus 2
  REGION 1..10: note = Table B: HLA-DQA1*03:02-B1*03:03L HLA-DQA1*05:01-B1*03:01L HLA-DRB1*04:01L HLA-DRB1*04:03L HLA-DRB1*13:02L HLA-DRB1*13:03L HLA-DRB1*01:03L HLA-DRB1*04:02L HLA-DRB1*04:05L HLA-DRB1*01:01L HLA-DRB1*01:02L HLA-DRB4*03:01NL HLA-DRB1*08:04L HLA-DRB1*08:77L
  REGION 1..10: note = CONT. FROM ABOVE: HLA-DRB3*02:01L HLA-DPA1*01:03-B1*03:01L HLA-D PA1*03:01-B1*04:02L HLA-DRB1*03:01L HLA-DRB1*14:01L HLA-DRB1*11: 03L HLA-DRB1*11:04L HLA-DRB1*14:02L HLA-DRB1*11:01L HLA-DRB5*01: 01L HLA-DQA1*01-B1*05L HLA-DQA1*05:05-B1*03:19L
  REGION 1..10: note = CONT. FROM ABOVE: HLA-DQA1*05:01-B1*02:01L HLA-DPA1*01:03-B1*04: 02L HLA-DRB1*12:01L HLA-DRB1*12:02L HLA-DRB3*01:01L HLA-DPA1*03: 01-B1*105:01L HLA-DQA1*03:01-B1*03:02L HLA-DRB1*14:54L HLA-DQA1* 05:05-B1*03:01L HLA-DRB1*14:17L HLA-DPA1*01:02-B1*04:01L
  REGION 1..10: note = CONT. FROM ABOVE: HLA-DRB1*07:01L HLA-DRB1*10:01L HLA-DRB1*16:01 L HLA-DRB1*04:08L HLA-DQA1*02:01-B1*03:03L HLA-DRB1*15:03L
YVDNSSLTIK

SEQ ID NO: 8774 - protein, 11 aa, Severe acute respiratory syndrome coronavirus 2
  REGION 1..11: note = Table B: HLA-DQA1*03:02-B1*03:03L HLA-DQA1*05:01-B1*03:01L HLA-DQA1*01:02-B1*06:02L
DNSSLTIKKPN

SEQ ID NO: 8775 - protein, 11 aa, Severe acute respiratory syndrome coronavirus 2
  REGION 1..11: note = Table B: HLA-DQA1*03:02-B1*03:03L HLA-DQA1*05:01-B1*03:01L HLA-DRB1*14:01L HLA-DRB1*12:01L HLA-DPA1*01:02-B1*04:01L HLA-DRB1*16:01L
SSLTIKKPNEL

SEQ ID NO: 8776 - protein, 10 aa, Severe acute respiratory syndrome coronavirus 2
  REGION 1..10: note = Table B: HLA-DQA1*03:02-B1*03:03L HLA-DQA1*05:01-B1*03:01L HLA-DRB1*12:01L HLA-DQA1*03:01-B1*03:02L HLA-DPA1*01:02-B1*04:01L HLA-DRB1*16:01L HLA-DQA1*02:01-B1*03:03L
GLKTLATHGL

SEQ ID NO: 8777 - protein, 10 aa, Severe acute respiratory syndrome coronavirus 2
  REGION 1..10: note = Table B: HLA-DQA1*03:02-B1*03:03M HLA-DQA1*05:01-B1*03:01L HLA-DRB1*04:01L HLA-DRB1*13:03L HLA-DRB1*01:03L HLA-DRB1*04:04L HLA-DQA1*01:02-B1*06:02L HLA-DRB1*01:02L HLA-DPA1*03:01-B1*04:02L HLA-DRB1*14:01L HLA-DRB1*14:02L
  REGION 1..10: note = CONT. FROM ABOVE: HLA-DRB1*08:01L HLA-DQA1*05:05-B1*03:19L HLA-D QA1*05:01-B1*02:01L HLA-DPA1*01:03-B1*04:01L HLA-DQA1*05:05-B1*0 3:116M HLA-DRB1*09:01L HLA-DPA1*01:03-B1*04:02L HLA-DRB1*12:01L HLA-DPA1*02:01-B1*13:01L HLA-DPA1*03:01-B1*105:01L
  REGION 1..10: note = CONT. FROM ABOVE: HLA-DQA1*03:01-B1*03:02L HLA-DPA1*01:03-B1*104 :01L HLA-DPA1*01:02-B1*04:01L HLA-DRB1*07:01L HLA-DRB1*10:01L HL A-DRB1*16:01L HLA-DQA1*01:03-B1*06:01L HLA-DRB1*08:03L HLA-DQA1* 02:01-B1*03:03M HLA-DRB1*15:03L
TLATHGLAAV

SEQ ID NO: 8778 - protein, 12 aa, Severe acute respiratory syndrome coronavirus 2
  REGION 1..12: note = Table B: HLA-DQA1*03:02-B1*03:03L HLA-DQA1*05:01-B1*03:01L HLA-DRB1*04:03L HLA-DRB1*13:02L HLA-DRB1*04:02L HLA-DRB1*01:02L HLA-DRB1*08:77L HLA-DRB3*02:01L HLA-DPA1*01:03-B1*03:01L HLA-DPA1*03:01-B1*04:02L HLA-DRB1*14:01L
  REGION 1..12: note = CONT. FROM ABOVE: HLA-DQA1*05:05-B1*03:19L HLA-DQA1*05:01-B1*02: 01L HLA-DRB1*12:01L HLA-DRB1*12:02L HLA-DPA1*03:01-B1*105:01L HL A-DQA1*03:01-B1*03:02L HLA-DRB1*14:54L HLA-DQA1*05:05-B1*03:01L HLA-DRB1*14:17L HLA-DRB1*16:01L
THGLAAVNSVPW

SEQ ID NO: 8779 - protein, 12 aa, Severe acute respiratory syndrome coronavirus 2
  REGION 1..12: note = Table B: HLA-DQA1*03:02-B1*03:03L HLA-DQA1*05:01-B1*03:01L HLA-DRB1*04:02L HLA-DRB1*01:02L HLA-DQA1*05:05-B1*03:19L HLA-DPA1*03:01-B1*105:01L HLA-DQA1*05:05-B1*03:01L HLA-DRB1*14:17L HLA-DRB1*16:01L
HGLAAVNSVPWD

SEQ ID NO: 8780 - protein, 10 aa, Severe acute respiratory syndrome coronavirus 2
  REGION 1..10: note = Table B: HLA-DQA1*03:02-B1*03:03L HLA-DQA1*01:02-B1*06:02L HLA-DQA1*05:05-B1*03:19L HLA-DPA1*02:01-B1*13:01L HLA-DPA1*03:01-B1*105:01L HLA-DQA1*03:01-B1*03:02L HLA-DPA1*01:03-B1*104:01L HLA-DQA1*01:03-B1*06:01L
  REGION 1..10: note = CONT. FROM ABOVE: HLA-DQA1*02:01-B1*03:03L HLA-DRB1*15:03L
AVNSVPWDTI

SEQ ID NO: 8781 - protein, 11 aa, Severe acute respiratory syndrome coronavirus 2
  REGION 1..11: note = Table B: HLA-DQA1*03:02-B1*03:03L HLA-DRB1*04:03L HLA-DRB1*04:02L HLA-DQA1*01-B1*05L HLA-DQA1*05:01-B1*02:01L HLA-DPA1*03:01-B1*105:01L HLA-DQA1*03:01-B1*03:02L HLA-DRB1*14:17L HLA-DPA1*01:02-B1*04:01L HLA-DRB1*16:01L
  REGION 1..11: note = CONT. FROM ABOVE: HLA-DQA1*01:03-B1*06:01L HLA-DQA1*02:01-B1*03: 03L
VNSVPWDTIAN

SEQ ID NO: 8782 - protein, 11 aa, Severe acute respiratory syndrome coronavirus 2
  REGION 1..11: note = Table B: HLA-DQA1*03:02-B1*03:03L HLA-DQA1*05:01-B1*03:01L HLA-DRB1*11:02L HLA-DPA1*01:03-B1*04:02L HLA-DRB1*08:02L
NSVPWDTIANY

SEQ ID NO: 8783 - protein, 12 aa, Severe acute respiratory syndrome coronavirus 2
  REGION 1..12: note = Table B: HLA-DQA1*03:02-B1*03:03L HLA-DQA1*05:01-B1*03:01L HLA-DRB1*04:03L HLA-DRB1*13:03L HLA-DRB1*01:03L HLA-DRB1*04:02L HLA-DRB1*04:05L HLA-DQA1*01:02-B1*06:02L HLA-DRB1*01:02L HLA-DRB4*03:01NL HLA-DQA1*01:01-B1*05:01L HLA-DQA1*01-B1*05L
  REGION 1..12: note = CONT. FROM ABOVE: HLA-DQA1*05:05-B1*03:19L HLA-DQA1*05:01-B1*02: 01L HLA-DRB1*12:01L HLA-DPA1*03:01-B1*105:01L HLA-DQA1*05:05-B1* 03:01L HLA-DRB1*14:17L HLA-DPA1*01:02-B1*04:01L HLA-DRB1*16:01L HLA-DQA1*01:03-B1*06:01L HLA-DRB1*04:08L
  REGION 1..12: note = CONT. FROM ABOVE: HLA-DQA1*02:01-B1*03:03L
VPWDTIANYAKP

SEQ ID NO: 8784 - protein, 10 aa, Severe acute respiratory syndrome coronavirus 2
  REGION 1..10: note = Table B: HLA-DQA1*03:02-B1*03:03L HLA-DQA1*05:01-B1*03:01L HLA-DRB1*04:03L HLA-DRB1*13:03L HLA-DRB1*01:03L HLA-DQA1*01:02-B1*06:02L HLA-DRB4*03:01NL HLA-DRB1*08:77L HLA-DPA1*01:03-B1*03:01L HLA-DPA1*03:01-B1*04:02L
  REGION 1..10: note = CONT. FROM ABOVE: HLA-DRB1*14:01L HLA-DRB1*14:02L HLA-DQA1*01-B1 *05L HLA-DQA1*05:05-B1*03:19L HLA-DQA1*05:01-B1*02:01L HLA-DPA1* 01:03-B1*04:01L HLA-DRB1*12:01L HLA-DPA1*02:01-B1*13:01L HLA-DPA 1*03:01-B1*105:01L HLA-DQA1*03:01-B1*03:02L
  REGION 1..10: note = CONT. FROM ABOVE: HLA-DQA1*05:05-B1*03:01L HLA-DRB1*14:17L HLA-D PA1*01:02-B1*04:01L HLA-DRB1*16:01L HLA-DQA1*01:03-B1*06:01L HLA -DQA1*02:01-B1*03:03L HLA-DRB1*15:03L
DTIANYAKPF

SEQ ID NO: 8785 - protein, 10 aa, Severe acute respiratory syndrome coronavirus 2
  REGION 1..10: note = Table B: HLA-DQA1*03:02-B1*03:03L HLA-DQA1*05:01-B1*03:01L HLA-DRB1*14:01L HLA-DQA1*03:01-B1*03:02L HLA-DQA1*01:03-B1*06:01L HLA-DQA1*02:01-B1*03:03L HLA-DRB1*15:03L
TIANYAKPFL

SEQ ID NO: 8786 - protein, 10 aa, Severe acute respiratory syndrome coronavirus 2
  REGION 1..10: note = Table B: HLA-DQA1*03:02-B1*03:03L HLA-DRB1*01:03L HLA-DRB1*04:05L HLA-DQA1*01:02-B1*06:02L HLA-DQA1*05:05-B1*03:19L HLA-DQA1*05:05-B1*03:116L HLA-DPA1*02:01-B1*13:01L HLA-DPA1*03:01-B1*105:01L
  REGION 1..10: note = CONT. FROM ABOVE: HLA-DQA1*03:01-B1*03:02L HLA-DPA1*01:02-B1*04: 01L HLA-DRB1*16:01L HLA-DQA1*01:03-B1*06:01L HLA-DQA1*02:01-B1*0 3:03L HLA-DRB1*15:03L
NYAKPFLNKV

SEQ ID NO: 8787 - protein, 12 aa, Severe acute respiratory syndrome coronavirus 2
  REGION 1..12: note = Table B: HLA-DQA1*03:02-B1*03:03L HLA-DQA1*05:01-B1*03:01L HLA-DRB1*01:03L HLA-DRB1*04:02L HLA-DQA1*01:02-B1*06:02L HLA-DRB1*01:02L HLA-DQA1*05:05-B1*03:19L HLA-DPA1*03:01-B1*105:01L HLA-DQA1*05:05-B1*03:01L
  REGION 1..12: note = CONT. FROM ABOVE: HLA-DRB1*16:01L HLA-DQA1*01:03-B1*06:01L HLA-D RB1*04:08L HLA-DRB1*15:03L
PFLNKVVSTTTN

SEQ ID NO: 8788 - protein, 12 aa, Severe acute respiratory syndrome coronavirus 2
  REGION 1..12: note = Table B: HLA-DQA1*03:02-B1*03:03L HLA-DQA1*05:01-B1*03:01L HLA-DRB1*13:02L HLA-DRB1*13:03L HLA-DRB1*01:03L HLA-DRB1*04:02L HLA-DRB1*04:05L HLA-DRB1*01:02L HLA-DRB4*03:01NL HLA-DRB1*08:04L HLA-DRB1*08:77L HLA-DRB3*02:01L HLA-DPA1*01:03-B1*03:01L
  REGION 1..12: note = CONT. FROM ABOVE: HLA-DPA1*03:01-B1*04:02L HLA-DRB1*14:01L HLA-D RB1*11:03L HLA-DRB1*11:04L HLA-DQA1*01-B1*05L HLA-DQA1*05:01-B1* 02:01L HLA-DPA1*01:03-B1*04:01L HLA-DRB1*04:10L HLA-DRB1*09:01L HLA-DRB1*12:02L HLA-DPA1*02:01-B1*13:01L
  REGION 1..12: note = CONT. FROM ABOVE: HLA-DPA1*03:01-B1*105:01L HLA-DRB1*14:54L HLA- DQA1*05:05-B1*03:01L HLA-DPA1*01:02-B1*04:01L HLA-DRB1*07:01L HL A-DRB1*15:03L
LNKVVSTTTNIV

SEQ ID NO: 8789 - protein, 10 aa, Severe acute respiratory syndrome coronavirus 2
  REGION 1..10: note = Table B: HLA-DQA1*03:02-B1*03:03L HLA-DRB1*04:03L HLA-DRB1*13:02L HLA-DRB1*13:03L HLA-DRB1*01:03L HLA-DRB1*04:02L HLA-DRB1*04:05L HLA-DRB4*03:01NL HLA-DRB1*08:77L HLA-DRB3*02:01L HLA-DRB1*14:01L HLA-DRB1*11:03L HLA-DRB1*11:04L
  REGION 1..10: note = CONT. FROM ABOVE: HLA-DQA1*05:01-B1*02:01L HLA-DRB1*04:10L HLA-D RB1*12:01L HLA-DRB1*12:02L HLA-DQA1*03:01-B1*03:02L HLA-DRB1*14: 54L HLA-DRB1*14:17L HLA-DRB1*07:01L HLA-DRB1*16:01L HLA-DQA1*02: 01-B1*03:03L
VVSTTTNIVT

SEQ ID NO: 8790 - protein, 10 aa, Severe acute respiratory syndrome coronavirus 2
  REGION 1..10: note = Table B: HLA-DQA1*03:02-B1*03:03L HLA-DQA1*01:02-B1*06:02L HLA-DQA1*05:05-B1*03:19L HLA-DPA1*02:01-B1*13:01L HLA-DQA1*01:03-B1*06:01L
TNYMPYFFTL

SEQ ID NO: 8791 - protein, 10 aa, Severe acute respiratory syndrome coronavirus 2
  REGION 1..10: note = Table B: HLA-DQA1*03:02-B1*03:03L HLA-DQA1*05:01-B1*03:01L HLA-DRB1*04:03L HLA-DRB1*13:02L HLA-DRB1*13:03L HLA-DRB1*01:03M HLA-DRB1*04:02L HLA-DRB1*04:05L HLA-DQA1*01:02-B1*06:02L HLA-DRB1*01:01L HLA-DRB1*01:02M HLA-DRB4*03:01NL HLA-DRB1*08:77L
  REGION 1..10: note = CONT. FROM ABOVE: HLA-DRB3*02:01L HLA-DRB1*14:01L HLA-DRB1*11:03 L HLA-DRB1*11:04L HLA-DRB1*08:01L HLA-DRB1*11:01L HLA-DRB1*12:01 L HLA-DRB1*12:02L HLA-DRB3*01:01L HLA-DPA1*03:01-B1*105:01L HLA- DQA1*03:01-B1*03:02L HLA-DRB1*14:54L HLA-DQA1*05:05-B1*03:01L
  REGION 1..10: note = CONT. FROM ABOVE: HLA-DRB1*14:17L HLA-DPA1*01:02-B1*04:01L HLA-D RB1*07:01L HLA-DRB1*16:01L HLA-DQA1*01:03-B1*06:01L HLA-DRB1*04: 08L HLA-DQA1*02:01-B1*03:03L HLA-DRB1*15:03L
FTRSTNSRIK

SEQ ID NO: 8792 - protein, 10 aa, Severe acute respiratory syndrome coronavirus 2
  REGION 1..10: note = Table B: HLA-DQA1*03:02-B1*03:03L HLA-DQA1*05:05-B1*03:19L HLA-DQA1*03:01-B1*03:02L HLA-DRB1*16:01L HLA-DQA1*01:03-B1*06:01L HLA-DQA1*02:01-B1*03:03L
RIKASMPTTI

SEQ ID NO: 8793 - protein, 12 aa, Severe acute respiratory syndrome coronavirus 2
  REGION 1..12: note = Table B: HLA-DQA1*03:02-B1*03:03L HLA-DPA1*03:01-B1*105:01L HLA-DRB1*15:03L
IKASMPTTIAKN

SEQ ID NO: 8794 - protein, 10 aa, Severe acute respiratory syndrome coronavirus 2
  REGION 1..10: note = Table B: HLA-DQA1*03:02-B1*03:03L HLA-DQA1*05:01-B1*03:01L HLA-DRB1*13:03L HLA-DRB1*04:05L HLA-DQA1*01:02-B1*06:02L HLA-DRB1*01:01L HLA-DRB1*01:02L HLA-DRB4*03:01NL HLA-DPA1*01:03-B1*03:01L HLA-DPA1*03:01-B1*04:02L
  REGION 1..10: note = CONT. FROM ABOVE: HLA-DRB1*14:01L HLA-DRB1*08:01L HLA-DQA1*01-B1 *05L HLA-DQA1*05:05-B1*03:19L HLA-DQA1*05:01-B1*02:01L HLA-DPA1* 01:03-B1*04:01L HLA-DQA1*05:05-B1*03:116M HLA-DPA1*02:01-B1*13:0 1M HLA-DPA1*03:01-B1*105:01M HLA-DQA1*03:01-B1*03:02L
  REGION 1..10: note = CONT. FROM ABOVE: HLA-DPA1*01:02-B1*04:01L HLA-DRB1*10:01L HLA-D RB1*16:01L HLA-DQA1*01:03-B1*06:01L HLA-DRB1*08:03L HLA-DQA1*02: 01-B1*03:03L HLA-DRB1*15:03L
MPTTIAKNTV

SEQ ID NO: 8795 - protein, 10 aa, Severe acute respiratory syndrome coronavirus 2
  REGION 1..10: note = Table B: HLA-DQA1*03:02-B1*03:03L HLA-DRB1*04:03L HLA-DRB1*04:02L HLA-DQA1*01-B1*05L HLA-DQA1*03:01-B1*03:02L HLA-DRB1*14:17L HLA-DPA1*01:02-B1*04:01L HLA-DQA1*02:01-B1*03:03L
ASFNYLKSPN

SEQ ID NO: 8796 - protein, 10 aa, Severe acute respiratory syndrome coronavirus 2
  REGION 1..10: note = Table B: HLA-DQA1*03:02-B1*03:03L HLA-DQA1*05:01-B1*03:01L HLA-DRB1*04:03L HLA-DRB1*04:05L HLA-DQA1*01:02-B1*06:02L HLA-DRB1*01:02L HLA-DRB1*08:77L HLA-DPA1*03:01-B1*04:02L HLA-DQA1*05:05-B1*03:19L HLA-DQA1*05:01-B1*02:01L
  REGION 1..10: note = CONT. FROM ABOVE: HLA-DRB1*12:01L HLA-DPA1*02:01-B1*13:01L HLA-D PA1*03:01-B1*105:01L HLA-DPA1*01:02-B1*04:01L HLA-DRB1*16:01L HL A-DQA1*01:03-B1*06:01L HLA-DQA1*02:01-B1*03:03L HLA-DRB1*15:03L
SFNYLKSPNF

SEQ ID NO: 8797 - protein, 10 aa, Severe acute respiratory syndrome coronavirus 2
  REGION 1..10: note = Table B: HLA-DQA1*03:02-B1*03:03L HLA-DQA1*05:01-B1*03:01L HLA-DRB1*04:03L HLA-DRB1*13:02L HLA-DRB1*01:03L HLA-DQA1*01:02-B1*06:02L HLA-DRB1*01:02L HLA-DPA1*01:03-B1*03:01L HLA-DPA1*03:01-B1*04:02L
  REGION 1..10: note = CONT. FROM ABOVE: HLA-DRB1*14:01L HLA-DRB1*14:02L HLA-DRB1*08:01 L HLA-DQA1*01-B1*05L HLA-DQA1*05:05-B1*03:19L HLA-DQA1*05:01-B1* 02:01L HLA-DPA1*01:03-B1*04:01L HLA-DQA1*05:05-B1*03:116L HLA-DP A1*01:03-B1*04:02L HLA-DRB1*12:01L HLA-DPA1*02:01-B1*13:01L
  REGION 1..10: note = CONT. FROM ABOVE: HLA-DPA1*03:01-B1*105:01L HLA-DQA1*03:01-B1*03 :02L HLA-DPA1*01:02-B1*04:01L HLA-DRB1*16:01L HLA-DQA1*01:03-B1* 06:01L HLA-DQA1*02:01-B1*03:03L HLA-DRB1*15:03L
YLKSPNFSKL

SEQ ID NO: 8798 - protein, 11 aa, Severe acute respiratory syndrome coronavirus 2
  REGION 1..11: note = Table B: HLA-DQA1*03:02-B1*03:03L HLA-DQA1*05:01-B1*03:01L HLA-DQA1*01:02-B1*06:02L HLA-DQA1*05:05-B1*03:19L HLA-DQA1*05:01-B1*02:01L HLA-DPA1*03:01-B1*105:01L HLA-DQA1*03:01-B1*03:02L HLA-DPA1*01:02-B1*04:01L
  REGION 1..11: note = CONT. FROM ABOVE: HLA-DQA1*01:03-B1*06:01L HLA-DQA1*02:01-B1*03: 03L
SPNFSKLINII

SEQ ID NO: 8799 - protein, 10 aa, Severe acute respiratory syndrome coronavirus 2
  REGION 1..10: note = Table B: HLA-DQA1*03:02-B1*03:03L HLA-DQA1*05:01-B1*03:01L HLA-DRB1*04:03L HLA-DQA1*01:02-B1*06:02L HLA-DRB1*08:77L HLA-DPA1*03:01-B1*04:02L HLA-DQA1*05:05-B1*03:19L HLA-DQA1*05:01-B1*02:01L HLA-DRB1*12:01L
  REGION 1..10: note = CONT. FROM ABOVE: HLA-DPA1*02:01-B1*13:01L HLA-DPA1*03:01-B1*105 :01L HLA-DQA1*03:01-B1*03:02L HLA-DQA1*05:05-B1*03:01L HLA-DPA1* 01:02-B1*04:01L HLA-DRB1*16:01L HLA-DQA1*01:03-B1*06:01L HLA-DQA 1*02:01-B1*03:03L HLA-DRB1*15:03L
IYSTAALGVL

SEQ ID NO: 8800 - protein, 10 aa, Severe acute respiratory syndrome coronavirus 2
  REGION 1..10: note = Table B: HLA-DQA1*03:02-B1*03:03L HLA-DQA1*03:01-B1*03:02L HLA-DQA1*02:01-B1*03:03L
AALGVLMSNL

SEQ ID NO: 8801 - protein, 12 aa, Severe acute respiratory syndrome coronavirus 2
  REGION 1..12: note = Table B: HLA-DQA1*03:02-B1*03:03L HLA-DRB1*04:02L HLA-DRB1*01:02L HLA-DRB1*08:04L HLA-DRB3*02:01L HLA-DRB1*12:02L HLA-DQA1*03:01-B1*03:02L HLA-DRB1*14:54L HLA-DPA1*01:02-B1*04:01L
GVLMSNLGMPSY

SEQ ID NO: 8802 - protein, 16 aa, Severe acute respiratory syndrome coronavirus 2
  REGION 1..16: note = Table B: HLA-DQA1*03:02-B1*03:03L
VLMSNLGMPSYCTGYR

SEQ ID NO: 8803 - protein, 12 aa, Severe acute respiratory syndrome coronavirus 2
  REGION 1..12: note = Table B: HLA-DQA1*03:02-B1*03:03L HLA-DQA1*05:01-B1*03:01L HLA-DRB1*04:03L HLA-DRB1*01:03L HLA-DRB1*04:02L HLA-DRB1*04:05L HLA-DQA1*01:02-B1*06:02L HLA-DRB1*01:02L HLA-DPA1*01:03-B1*03:01L HLA-DPA1*03:01-B1*04:02L
  REGION 1..12: note = CONT. FROM ABOVE: HLA-DQA1*01-B1*05L HLA-DQA1*05:05-B1*03:19L HL A-DQA1*05:01-B1*02:01L HLA-DPA1*01:03-B1*04:02L HLA-DRB1*12:01L HLA-DPA1*02:01-B1*13:01L HLA-DQA1*05:05-B1*03:01L HLA-DRB1*16:01 L HLA-DRB1*04:08L HLA-DRB1*15:03L
TGYREGYLNSTN

SEQ ID NO: 8804 - protein, 10 aa, Severe acute respiratory syndrome coronavirus 2
  REGION 1..10: note = Table B: HLA-DQA1*03:02-B1*03:03L HLA-DRB1*11:02L HLA-DQA1*05:05-B1*03:19M HLA-DRB1*09:01L HLA-DQA1*03:01-B1*03:02L HLA-DPA1*01:03-B1*104:01L
REGYLNSTNV

SEQ ID NO: 8805 - protein, 10 aa, Severe acute respiratory syndrome coronavirus 2
  REGION 1..10: note = Table B: HLA-DQA1*03:02-B1*03:03L HLA-DQA1*05:01-B1*03:01L HLA-DRB1*04:03L HLA-DRB1*01:03L HLA-DRB1*04:05L HLA-DQA1*01:02-B1*06:02L HLA-DRB1*01:01L HLA-DRB1*01:02L HLA-DRB1*08:77L HLA-DPA1*03:01-B1*04:02L HLA-DRB1*14:01L
  REGION 1..10: note = CONT. FROM ABOVE: HLA-DRB1*14:02L HLA-DQA1*05:05-B1*03:19L HLA-D QA1*05:05-B1*03:116L HLA-DRB1*09:01L HLA-DPA1*02:01-B1*13:01M HL A-DPA1*03:01-B1*105:01L HLA-DQA1*03:01-B1*03:02L HLA-DPA1*01:03- B1*104:01L HLA-DPA1*01:02-B1*04:01L HLA-DRB1*16:01L
  REGION 1..10: note = CONT. FROM ABOVE: HLA-DQA1*01:03-B1*06:01M HLA-DRB1*08:03L HLA-D QA1*02:01-B1*03:03L HLA-DRB1*15:03L
GYLNSTNVTI

SEQ ID NO: 8806 - protein, 10 aa, Severe acute respiratory syndrome coronavirus 2
  REGION 1..10: note = Table B: HLA-DQA1*03:02-B1*03:03L HLA-DQA1*05:01-B1*03:01L HLA-DRB1*04:03L HLA-DRB1*13:02L HLA-DRB1*13:03M HLA-DRB1*01:03L HLA-DQA1*01:02-B1*06:02M HLA-DRB4*03:01NL HLA-DRB1*08:77L HLA-DPA1*01:03-B1*03:01L HLA-DPA1*03:01-B1*04:02L
  REGION 1..10: note = CONT. FROM ABOVE: HLA-DRB1*03:01L HLA-DRB1*14:01L HLA-DRB1*11:02 L HLA-DRB1*14:02L HLA-DRB5*01:01L HLA-DQA1*01-B1*05L HLA-DQA1*05 :05-B1*03:19M HLA-DQA1*05:01-B1*02:01L HLA-DRB4*01:01L HLA-DPA1* 01:03-B1*04:01M HLA-DQA1*05:05-B1*03:116L
  REGION 1..10: note = CONT. FROM ABOVE: HLA-DPA1*01:03-B1*04:02L HLA-DRB1*12:01L HLA-D PA1*02:01-B1*13:01L HLA-DPA1*03:01-B1*105:01M HLA-DPA1*01:03-B1* 104:01L HLA-DQA1*05:05-B1*03:01L HLA-DPA1*01:02-B1*04:01L HLA-DR B1*10:01L HLA-DRB1*16:01L HLA-DQA1*01:03-B1*06:01L
  REGION 1..10: note = CONT. FROM ABOVE: HLA-DRB1*08:02L HLA-DQA1*02:01-B1*03:03L HLA-D RB1*15:03L
NSTNVTIATY

SEQ ID NO: 8807 - protein, 10 aa, Severe acute respiratory syndrome coronavirus 2
  REGION 1..10: note = Table B: HLA-DQA1*03:02-B1*03:03L
LDSLDTYPSL

SEQ ID NO: 8808 - protein, 11 aa, Severe acute respiratory syndrome coronavirus 2
  REGION 1..11: note = Table B: HLA-DQA1*03:02-B1*03:03L HLA-DPA1*02:01-B1*13:01L HLA-DQA1*01:03-B1*06:01L
SLDTYPSLETI

SEQ ID NO: 8809 - protein, 11 aa, Severe acute respiratory syndrome coronavirus 2
  REGION 1..11: note = Table B: HLA-DQA1*03:02-B1*03:03L HLA-DQA1*05:01-B1*03:01L HLA-DQA1*01:02-B1*06:02L HLA-DRB1*01:02L HLA-DPA1*03:01-B1*105:01L HLA-DPA1*01:03-B1*104:01L HLA-DRB1*08:03L HLA-DQA1*02:01-B1*03:03L
DTYPSLETIQI

SEQ ID NO: 8810 - protein, 10 aa, Severe acute respiratory syndrome coronavirus 2
  REGION 1..10: note = Table B: HLA-DQA1*03:02-B1*03:03L HLA-DQA1*05:01-B1*03:01L HLA-DRB1*13:03M HLA-DQA1*01:02-B1*06:02H HLA-DRB1*01:01L HLA-DRB1*01:02L HLA-DRB4*03:01NL HLA-DPA1*01:03-B1*03:01L HLA-DPA1*03:01-B1*04:02L HLA-DRB1*03:01L HLA-DRB1*14:01L
  REGION 1..10: note = CONT. FROM ABOVE: HLA-DRB1*14:02L HLA-DRB1*08:01L HLA-DRB5*01:01 L HLA-DQA1*05:01-B1*02:01L HLA-DRB4*01:01L HLA-DPA1*01:03-B1*04: 01M HLA-DQA1*05:05-B1*03:116L HLA-DRB1*09:01L HLA-DPA1*01:03-B1* 04:02L HLA-DRB1*12:01L HLA-DPA1*02:01-B1*13:01L
  REGION 1..10: note = CONT. FROM ABOVE: HLA-DPA1*03:01-B1*105:01H HLA-DQA1*05:05-B1*03 :01L HLA-DPA1*01:02-B1*04:01L HLA-DQA1*01:03-B1*06:01L HLA-DQA1* 02:01-B1*03:03L HLA-DRB1*15:01L HLA-DRB1*15:03M
ETIQITISSF

SEQ ID NO: 8811 - protein, 12 aa, Severe acute respiratory syndrome coronavirus 2
  REGION 1..12: note = Table B: HLA-DQA1*03:02-B1*03:03L HLA-DQA1*05:01-B1*03:01L HLA-DRB1*13:02L HLA-DRB1*13:03L HLA-DRB1*04:02L HLA-DRB1*04:04L HLA-DRB1*01:02L HLA-DRB4*03:01NL HLA-DRB1*08:04L HLA-DRB3*02:01L HLA-DPA1*01:03-B1*03:01L HLA-DPA1*03:01-B1*04:02L
  REGION 1..12: note = CONT. FROM ABOVE: HLA-DRB1*14:01L HLA-DRB1*08:01L HLA-DPA1*01:03 -B1*04:01L HLA-DRB1*04:10L HLA-DPA1*01:03-B1*04:02L HLA-DRB1*12: 01L HLA-DRB3*01:01L HLA-DQA1*03:01-B1*03:02L HLA-DRB1*14:54L HLA -DPA1*01:03-B1*104:01L HLA-DQA1*05:05-B1*03:01L
  REGION 1..12: note = CONT. FROM ABOVE: HLA-DPA1*01:02-B1*04:01L HLA-DRB1*10:01L HLA-D RB1*16:01L HLA-DRB1*04:08L HLA-DRB1*08:03L
ISSFKWDLTAFG

SEQ ID NO: 8812 - protein, 10 aa, Severe acute respiratory syndrome coronavirus 2
  REGION 1..10: note = Table B: HLA-DQA1*03:02-B1*03:03L HLA-DQA1*05:01-B1*03:01L HLA-DRB1*04:03L HLA-DRB1*04:05L HLA-DQA1*01:02-B1*06:02L HLA-DRB1*01:02L HLA-DPA1*01:03-B1*03:01L HLA-DPA1*03:01-B1*04:02L HLA-DRB1*14:01L HLA-DRB1*14:02L
  REGION 1..10: note = CONT. FROM ABOVE: HLA-DQA1*01-B1*05L HLA-DQA1*05:05-B1*03:19L HL A-DQA1*05:01-B1*02:01L HLA-DRB4*01:01L HLA-DPA1*01:03-B1*04:01L HLA-DQA1*05:05-B1*03:116L HLA-DPA1*01:03-B1*04:02L HLA-DRB1*12:0 1L HLA-DPA1*02:01-B1*13:01L HLA-DPA1*03:01-B1*105:01L
  REGION 1..10: note = CONT. FROM ABOVE: HLA-DPA1*01:03-B1*104:01L HLA-DQA1*05:05-B1*03 :01L HLA-DPA1*01:02-B1*04:01L HLA-DRB1*16:01L HLA-DQA1*01:03-B1* 06:01L HLA-DQA1*02:01-B1*03:03L HLA-DRB1*15:03L
FLAYILFTRF

SEQ ID NO: 8813 - protein, 11 aa, Severe acute respiratory syndrome coronavirus 2
  REGION 1..11: note = Table B: HLA-DQA1*03:02-B1*03:03L HLA-DQA1*01:02-B1*06:02L HLA-DRB1*15:03L
YVLGLAAIMQL

SEQ ID NO: 8814 - protein, 10 aa, Severe acute respiratory syndrome coronavirus 2
  REGION 1..10: note = Table B: HLA-DQA1*03:02-B1*03:03L HLA-DQA1*01:02-B1*06:02L HLA-DPA1*03:01-B1*04:02L HLA-DQA1*01-B1*05L HLA-DPA1*01:03-B1*04:02L HLA-DPA1*03:01-B1*105:01L HLA-DQA1*03:01-B1*03:02L HLA-DPA1*01:02-B1*04:01L
  REGION 1..10: note = CONT. FROM ABOVE: HLA-DRB1*16:01L HLA-DQA1*01:03-B1*06:01L HLA-D QA1*02:01-B1*03:03L
SYFAVHFISN

SEQ ID NO: 8815 - protein, 10 aa, Severe acute respiratory syndrome coronavirus 2
  REGION 1..10: note = Table B: HLA-DQA1*03:02-B1*03:03L HLA-DQA1*05:01-B1*03:01L HLA-DRB1*04:03L HLA-DRB1*13:03L HLA-DRB1*01:03L HLA-DRB1*04:05L HLA-DQA1*01:02-B1*06:02M HLA-DRB1*01:01L HLA-DRB1*08:77L HLA-DPA1*01:03-B1*03:01L HLA-DPA1*03:01-B1*04:02L
  REGION 1..10: note = CONT. FROM ABOVE: HLA-DRB1*03:01L HLA-DRB1*14:01L HLA-DRB1*14:02 L HLA-DQA1*01-B1*05L HLA-DQA1*05:05-B1*03:19L HLA-DQA1*05:01-B1* 02:01L HLA-DRB4*01:01L HLA-DPA1*01:03-B1*04:01L HLA-DQA1*05:05-B 1*03:116L HLA-DPA1*01:03-B1*04:02L HLA-DRB1*12:01L
  REGION 1..10: note = CONT. FROM ABOVE: HLA-DPA1*02:01-B1*13:01M HLA-DPA1*03:01-B1*105 :01L HLA-DQA1*03:01-B1*03:02L HLA-DPA1*01:03-B1*104:01L HLA-DQA1 *05:05-B1*03:01L HLA-DPA1*01:02-B1*04:01L HLA-DRB1*10:01L HLA-DR B1*16:01L HLA-DQA1*01:03-B1*06:01L HLA-DRB1*08:02L
  REGION 1..10: note = CONT. FROM ABOVE: HLA-DQA1*02:01-B1*03:03M HLA-DRB1*15:03L
FAVHFISNSW

SEQ ID NO: 8816 - protein, 10 aa, Severe acute respiratory syndrome coronavirus 2
  REGION 1..10: note = Table B: HLA-DQA1*03:02-B1*03:03L HLA-DQA1*05:01-B1*03:01L HLA-DRB1*04:03L HLA-DRB1*04:02L HLA-DQA1*01:02-B1*06:02L HLA-DRB1*01:02L HLA-DPA1*03:01-B1*04:02L HLA-DRB1*14:01L HLA-DQA1*01-B1*05L HLA-DQA1*05:01-B1*02:01L HLA-DRB1*12:01L
  REGION 1..10: note = CONT. FROM ABOVE: HLA-DPA1*03:01-B1*105:01L HLA-DQA1*03:01-B1*03 :02L HLA-DPA1*01:02-B1*04:01L HLA-DRB1*16:01L HLA-DQA1*01:03-B1* 06:01L HLA-DQA1*02:01-B1*03:03L HLA-DRB1*15:03L
AVHFISNSWL

SEQ ID NO: 8817 - protein, 12 aa, Severe acute respiratory syndrome coronavirus 2
  REGION 1..12: note = Table B: HLA-DQA1*03:02-B1*03:03L HLA-DRB1*13:02L HLA-DRB1*04:05L HLA-DRB4*03:01NL HLA-DPA1*01:03-B1*03:01L HLA-DQA1*05:05-B1*03:19L HLA-DRB1*04:10L HLA-DRB1*12:02L HLA-DRB1*14:54L
IINLVQMAPISA

SEQ ID NO: 8818 - protein, 10 aa, Severe acute respiratory syndrome coronavirus 2
  REGION 1..10: note = Table B: HLA-DQA1*03:02-B1*03:03L HLA-DQA1*05:01-B1*03:01L HLA-DRB1*04:03L HLA-DRB1*04:02L HLA-DQA1*01:02-B1*06:02L HLA-DRB1*01:02L HLA-DRB1*14:01L HLA-DQA1*05:05-B1*03:19L HLA-DQA1*05:01-B1*02:01L HLA-DRB1*12:01L
  REGION 1..10: note = CONT. FROM ABOVE: HLA-DPA1*03:01-B1*105:01L HLA-DQA1*03:01-B1*03 :02L HLA-DRB1*14:17L HLA-DRB1*16:01L HLA-DQA1*01:03-B1*06:01L HL A-DQA1*02:01-B1*03:03L HLA-DRB1*15:03L
LVQMAPISAM

SEQ ID NO: 8819 - protein, 10 aa, Severe acute respiratory syndrome coronavirus 2
  REGION 1..10: note = Table B: HLA-DQA1*03:02-B1*03:03L HLA-DQA1*05:05-B1*03:19L HLA-DQA1*03:01-B1*03:02L
VQMAPISAMV

SEQ ID NO: 8820 - protein, 11 aa, Severe acute respiratory syndrome coronavirus 2
  REGION 1..11: note = Table B: HLA-DQA1*03:02-B1*03:03L HLA-DQA1*05:05-B1*03:19L
QMAPISAMVRM

SEQ ID NO: 8821 - protein, 10 aa, Severe acute respiratory syndrome coronavirus 2
  REGION 1..10: note = Table B: HLA-DQA1*03:02-B1*03:03L HLA-DQA1*01:02-B1*06:02L HLA-DPA1*03:01-B1*04:02L HLA-DQA1*05:05-B1*03:19L HLA-DPA1*02:01-B1*13:01L HLA-DPA1*03:01-B1*105:01L HLA-DPA1*01:03-B1*104:01L HLA-DPA1*01:02-B1*04:01L
  REGION 1..10: note = CONT. FROM ABOVE: HLA-DRB1*16:01L HLA-DQA1*01:03-B1*06:01L HLA-D QA1*02:01-B1*03:03L HLA-DRB1*15:03L
YYVWKSYVHV

SEQ ID NO: 8822 - protein, 12 aa, Severe acute respiratory syndrome coronavirus 2
  REGION 1..12: note = Table B: HLA-DQA1*03:02-B1*03:03L HLA-DQA1*05:01-B1*03:01L HLA-DRB1*04:03L HLA-DRB1*13:02L HLA-DRB1*04:02L HLA-DRB1*04:04L HLA-DRB1*01:01L HLA-DRB1*08:04L HLA-DPA1*01:03-B1*03:01L HLA-DRB1*14:01L HLA-DRB1*11:03L HLA-DRB1*11:04L HLA-DRB1*14:02L
  REGION 1..12: note = CONT. FROM ABOVE: HLA-DQA1*01:01-B1*05:01L HLA-DRB1*11:01L HLA-D QA1*01-B1*05L HLA-DQA1*05:05-B1*03:19L HLA-DQA1*05:01-B1*02:01L HLA-DQA1*05:05-B1*03:116L HLA-DRB3*01:01L HLA-DPA1*02:01-B1*13:0 1L HLA-DRB1*14:54L HLA-DPA1*01:03-B1*104:01L
  REGION 1..12: note = CONT. FROM ABOVE: HLA-DQA1*05:05-B1*03:01L HLA-DRB1*07:01L HLA-D RB1*10:01L HLA-DRB1*08:02L HLA-DRB1*08:03L
YVWKSYVHVVDG

SEQ ID NO: 8823 - protein, 10 aa, Severe acute respiratory syndrome coronavirus 2
  REGION 1..10: note = Table B: HLA-DQA1*03:02-B1*03:03L HLA-DQA1*05:01-B1*03:01L HLA-DRB1*13:03L HLA-DRB1*01:03L HLA-DQA1*01:02-B1*06:02L HLA-DPA1*01:03-B1*03:01L HLA-DRB1*03:01L HLA-DRB1*14:01L HLA-DRB1*14:02L HLA-DQA1*05:05-B1*03:19L
  REGION 1..10: note = CONT. FROM ABOVE: HLA-DQA1*05:01-B1*02:01L HLA-DPA1*01:03-B1*04: 01L HLA-DPA1*02:01-B1*13:01L HLA-DPA1*03:01-B1*105:01L HLA-DPA1* 01:02-B1*04:01L HLA-DQA1*01:03-B1*06:01L HLA-DQA1*02:01-B1*03:03 L HLA-DRB1*15:03L
TIVNGVRRSF

SEQ ID NO: 8824 - protein, 10 aa, Severe acute respiratory syndrome coronavirus 2
  REGION 1..10: note = Table B: HLA-DQA1*03:02-B1*03:03L HLA-DQA1*05:01-B1*03:01L HLA-DRB1*04:03L HLA-DRB1*13:03L HLA-DRB1*01:03L HLA-DRB1*04:02L HLA-DRB1*04:05L HLA-DRB1*01:02L HLA-DRB4*03:01NL HLA-DQA1*01-B1*05L HLA-DQA1*05:01-B1*02:01L HLA-DRB1*12:01L
  REGION 1..10: note = CONT. FROM ABOVE: HLA-DQA1*03:01-B1*03:02L HLA-DRB1*14:54L HLA-D RB1*14:17L HLA-DRB1*16:01L HLA-DQA1*01:03-B1*06:01L HLA-DRB1*04: 08L HLA-DQA1*02:01-B1*03:03L HLA-DRB1*15:03L
FYVYANGGKG

SEQ ID NO: 8825 - protein, 10 aa, Severe acute respiratory syndrome coronavirus 2
  REGION 1..10: note = Table B: HLA-DQA1*03:02-B1*03:03L HLA-DQA1*05:01-B1*03:01L HLA-DRB1*04:01L HLA-DRB1*04:03L HLA-DRB1*13:02L HLA-DRB1*13:03M HLA-DRB1*01:03M HLA-DRB1*04:02L HLA-DRB1*04:05M HLA-DQA1*01:02-B1*06:02M HLA-DRB1*01:01L HLA-DRB1*01:02L
  REGION 1..10: note = CONT. FROM ABOVE: HLA-DRB4*03:01NL HLA-DRB1*08:77M HLA-DRB3*02:0 1L HLA-DPA1*01:03-B1*03:01L HLA-DPA1*03:01-B1*04:02L HLA-DRB1*03 :01L HLA-DRB1*14:01L HLA-DRB1*11:03L HLA-DRB1*11:04L HLA-DRB1*14 :02M HLA-DQA1*01:01-B1*05:01L HLA-DRB1*08:01L HLA-DRB1*11:01L
  REGION 1..10: note = CONT. FROM ABOVE: HLA-DRB5*01:01L HLA-DQA1*01-B1*05L HLA-DQA1*05 :05-B1*03:19L HLA-DQA1*05:01-B1*02:01L HLA-DRB4*01:01L HLA-DPA1* 01:03-B1*04:01M HLA-DQA1*05:05-B1*03:116L HLA-DRB1*09:01L HLA-DP A1*01:03-B1*04:02L HLA-DRB1*12:01L HLA-DPA1*02:01-B1*13:01M
  REGION 1..10: note = CONT. FROM ABOVE: HLA-DPA1*03:01-B1*105:01M HLA-DQA1*03:01-B1*03 :02L HLA-DPA1*01:03-B1*104:01L HLA-DQA1*05:05-B1*03:01L HLA-DPA1 *01:02-B1*04:01L HLA-DRB1*07:01L HLA-DRB1*10:01L HLA-DRB1*16:01L HLA-DQA1*01:03-B1*06:01M HLA-DRB1*08:02L HLA-DRB1*08:03L
  REGION 1..10: note = CONT. FROM ABOVE: HLA-DQA1*02:01-B1*03:03M HLA-DRB1*15:03M
YVYANGGKGF

SEQ ID NO: 8826 - protein, 12 aa, Severe acute respiratory syndrome coronavirus 2
  REGION 1..12: note = Table B: HLA-DQA1*03:02-B1*03:03L HLA-DQA1*01:01-B1*05:01L HLA-DQA1*05:01-B1*02:01L
AGSTFISDEVAR

SEQ ID NO: 8827 - protein, 10 aa, Severe acute respiratory syndrome coronavirus 2
  REGION 1..10: note = Table B: HLA-DQA1*03:02-B1*03:03L HLA-DRB1*04:03L HLA-DRB1*13:02L HLA-DRB1*13:03L HLA-DRB1*01:03L HLA-DRB1*04:02L HLA-DRB1*04:05L HLA-DRB1*01:02L HLA-DRB4*03:01NL HLA-DQA1*01:01-B1*05:01L HLA-DQA1*01-B1*05L
  REGION 1..10: note = CONT. FROM ABOVE: HLA-DQA1*05:01-B1*02:01L HLA-DRB1*04:10L HLA-D RB1*12:01L HLA-DPA1*03:01-B1*105:01L HLA-DQA1*03:01-B1*03:02L HL A-DRB1*14:54L HLA-DRB1*14:17L HLA-DPA1*01:02-B1*04:01L HLA-DRB1* 10:01L HLA-DRB1*16:01L HLA-DQA1*01:03-B1*06:01L HLA-DRB1*04:08L
  REGION 1..10: note = CONT. FROM ABOVE: HLA-DQA1*02:01-B1*03:03L HLA-DRB1*15:03L
TFISDEVARD

SEQ ID NO: 8828 - protein, 10 aa, Severe acute respiratory syndrome coronavirus 2
  REGION 1..10: note = Table B: HLA-DQA1*03:02-B1*03:03L HLA-DQA1*05:01-B1*03:01L HLA-DRB1*04:01L HLA-DRB1*04:03L HLA-DRB1*13:02L HLA-DRB1*13:03L HLA-DRB1*01:03L HLA-DRB1*04:02L HLA-DRB1*04:04L HLA-DRB1*04:05M HLA-DQA1*01:02-B1*06:02L HLA-DRB1*01:02L HLA-DRB4*03:01NL
  REGION 1..10: note = CONT. FROM ABOVE: HLA-DRB1*08:04L HLA-DRB1*08:77L HLA-DRB3*02:01 L HLA-DPA1*01:03-B1*03:01L HLA-DPA1*03:01-B1*04:02L HLA-DRB1*14: 01L HLA-DRB1*11:03L HLA-DRB1*11:04L HLA-DRB1*14:02L HLA-DQA1*01: 01-B1*05:01L HLA-DRB1*08:01L HLA-DRB1*11:01L HLA-DRB5*01:01L
  REGION 1..10: note = CONT. FROM ABOVE: HLA-DQA1*01-B1*05L HLA-DQA1*05:05-B1*03:19L HL A-DQA1*05:01-B1*02:01L HLA-DRB4*01:01L HLA-DPA1*01:03-B1*04:01L HLA-DQA1*05:05-B1*03:116L HLA-DRB1*04:10L HLA-DRB1*09:01L HLA-DP A1*01:03-B1*04:02L HLA-DRB1*12:01L HLA-DRB1*12:02L
  REGION 1..10: note = CONT. FROM ABOVE: HLA-DRB3*01:01L HLA-DPA1*02:01-B1*13:01L HLA-D PA1*03:01-B1*105:01L HLA-DQA1*03:01-B1*03:02L HLA-DRB1*14:54L HL A-DPA1*01:03-B1*104:01L HLA-DQA1*05:05-B1*03:01L HLA-DRB1*14:17L HLA-DPA1*01:02-B1*04:01L HLA-DRB1*07:01L HLA-DRB1*10:01L
  REGION 1..10: note = CONT. FROM ABOVE: HLA-DRB1*16:01L HLA-DQA1*01:03-B1*06:01L HLA -DRB1*04:08L HLA-DRB1*08:02L HLA-DRB1*08:03L HLA-DQA1*02:01-B1 *03:03L HLA-DRB1*15:03L
FISDEVARDL

SEQ ID NO: 8829 - protein, 10 aa, Severe acute respiratory syndrome coronavirus 2
  REGION 1..10: note = Table B: HLA-DQA1*03:02-B1*03:03L HLA-DRB1*04:03L HLA-DRB1*04:02L HLA-DQA1*01-B1*05L HLA-DQA1*05:01-B1*02:01L HLA-DQA1*03:01-B1*03:02L HLA-DRB1*14:17L HLA-DRB1*16:01L HLA-DQA1*01:03-B1*06:01L HLA-DQA1*02:01-B1*03:03L
ISDEVARDLS

SEQ ID NO: 8830 - protein, 10 aa, Severe acute respiratory syndrome coronavirus 2
  REGION 1..10: note = Table B: HLA-DQA1*03:02-B1*03:03L HLA-DQA1*01-B1*05L HLA-DQA1*05:05-B1*03:19L HLA-DQA1*03:01-B1*03:02L HLA-DRB1*16:01L
SDEVARDLSL

SEQ ID NO: 8831 - protein, 10 aa, Severe acute respiratory syndrome coronavirus 2
  REGION 1..10: note = Table B: HLA-DQA1*03:02-B1*03:03L HLA-DQA1*05:01-B1*02:01L HLA-DQA1*03:01-B1*03:02L
DEVARDLSLQ

SEQ ID NO: 8832 - protein, 10 aa, Severe acute respiratory syndrome coronavirus 2
  REGION 1..10: note = Table B: HLA-DQA1*03:02-B1*03:03L HLA-DQA1*05:01-B1*03:01L HLA-DRB1*13:02L HLA-DRB1*13:03M HLA-DRB1*01:03L HLA-DQA1*01:02-B1*06:02M HLA-DRB1*01:01L HLA-DRB1*01:02L HLA-DRB4*03:01NL HLA-DRB1*08:77L HLA-DPA1*01:03-B1*03:01L
  REGION 1..10: note = CONT. FROM ABOVE: HLA-DPA1*03:01-B1*04:02L HLA-DRB1*03:01L HLA-D RB1*14:01L HLA-DRB1*14:02L HLA-DRB5*01:01L HLA-DQA1*01-B1*05L HL A-DQA1*05:05-B1*03:19L HLA-DQA1*05:01-B1*02:01L HLA-DRB4*01:01L HLA-DPA1*01:03-B1*04:01M HLA-DQA1*05:05-B1*03:116L
  REGION 1..10: note = CONT. FROM ABOVE: HLA-DPA1*01:03-B1*04:02L HLA-DRB1*12:01L HLA-D PA1*02:01-B1*13:01L HLA-DPA1*03:01-B1*105:01M HLA-DQA1*03:01-B1* 03:02L HLA-DQA1*05:05-B1*03:01L HLA-DPA1*01:02-B1*04:01L HLA-DRB 1*10:01L HLA-DRB1*16:01L HLA-DQA1*01:03-B1*06:01L
  REGION 1..10: note = CONT. FROM ABOVE: HLA-DQA1*02:01-B1*03:03L HLA-DRB1*15:03L
EVARDLSLQF

SEQ ID NO: 8833 - protein, 13 aa, Severe acute respiratory syndrome coronavirus 2
  REGION 1..13: note = Table B: HLA-DQA1*03:02-B1*03:03L HLA-DQA1*05:01-B1*03:01L HLA-DRB1*04:04L HLA-DRB1*01:02L HLA-DRB4*03:01NL HLA-DQA1*01:01-B1*05:01L HLA-DQA1*01-B1*05L HLA-DRB1*12:01L HLA-DPA1*02:01-B1*13:01L HLA-DPA1*03:01-B1*105:01L
  REGION 1..13: note = CONT. FROM ABOVE: HLA-DRB1*14:17L
SLQFKRPINPTDQ

SEQ ID NO: 8834 - protein, 11 aa, Severe acute respiratory syndrome coronavirus 2
  REGION 1..11: note = Table B: HLA-DQA1*03:02-B1*03:03L HLA-DRB1*14:04L HLA-DRB1*04:01L HLA-DRB1*13:02M HLA-DRB1*04:02L HLA-DRB1*04:05L HLA-DRB1*01:01L HLA-DRB1*01:02L HLA-DRB3*02:01L HLA-DPA1*03:01-B1*04:02L HLA-DRB1*14:01M HLA-DRB1*11:03L
  REGION 1..11: note = CONT. FROM ABOVE: HLA-DRB1*11:04L HLA-DRB1*08:01L HLA-DRB1*11:01 L HLA-DRB5*01:01L HLA-DRB4*02:01NL HLA-DRB1*13:01L HLA-DQA1*05:0 5-B1*03:116L HLA-DRB1*09:01L HLA-DRB1*12:02L HLA-DRB3*01:01L HLA -DPA1*02:01-B1*13:01L HLA-DQA1*03:01-B1*03:02L HLA-DRB1*14:54L
  REGION 1..11: note = CONT. FROM ABOVE: HLA-DQA1*05:05-B1*03:01L HLA-DRB1*14:17L HLA-D PA1*01:02-B1*04:01L HLA-DQA1*01:03-B1*06:01L HLA-DRB1*08:03L HLA -DRB1*15:01L
RPINPTDQSSY

SEQ ID NO: 8835 - protein, 11 aa, Severe acute respiratory syndrome coronavirus 2
  REGION 1..11: note = Table B: HLA-DQA1*03:02-B1*03:03L HLA-DQA1*01-B1*05L HLA-DQA1*05:01-B1*02:01L HLA-DQA1*03:01-B1*03:02L HLA-DQA1*01:03-B1*06:01L HLA-DQA1*02:01-B1*03:03L
DQSSYIVDSVT

SEQ ID NO: 8836 - protein, 10 aa, Severe acute respiratory syndrome coronavirus 2
  REGION 1..10: note = Table B: HLA-DQA1*03:02-B1*03:03L HLA-DQA1*05:05-B1*03:19L
SSYIVDSVTV

SEQ ID NO: 8837 - protein, 10 aa, Severe acute respiratory syndrome coronavirus 2
  REGION 1..10: note = Table B: HLA-DQA1*03:02-B1*03:03L HLA-DQA1*05:01-B1*03:01L HLA-DRB1*04:03L HLA-DRB1*13:02L HLA-DRB1*13:03L HLA-DRB1*01:03L HLA-DRB1*04:02L HLA-DRB1*04:05L HLA-DRB4*03:01NL HLA-DRB1*14:01L HLA-DQA1*01-B1*05L HLA-DQA1*05:01-B1*02:01L HLA-DRB1*04:10L
  REGION 1..10: note = CONT. FROM ABOVE: HLA-DRB1*12:01L HLA-DQA1*03:01-B1*03:02L HLA-D RB1*14:54L HLA-DRB1*14:17L HLA-DRB1*10:01L HLA-DRB1*16:01L HLA-D QA1*02:01-B1*03:03L
IVDSVTVKNG

SEQ ID NO: 8838 - protein, 10 aa, Severe acute respiratory syndrome coronavirus 2
  REGION 1..10: note = Table B: HLA-DQA1*03:02-B1*03:03L HLA-DQA1*05:01-B1*03:01L HLA-DRB1*04:03L HLA-DRB1*13:03L HLA-DRB1*01:03L HLA-DRB1*04:02L HLA-DRB1*04:05L HLA-DQA1*01:02-B1*06:02L HLA-DRB1*01:02L HLA-DRB4*03:01NL HLA-DRB1*14:01L HLA-DQA1*01:01-B1*05:01L
  REGION 1..10: note = CONT. FROM ABOVE: HLA-DRB1*08:01L HLA-DQA1*05:05-B1*03:19L HLA-D RB1*12:01L HLA-DQA1*03:01-B1*03:02L HLA-DRB1*14:54L HLA-DQA1*05: 05-B1*03:01L HLA-DRB1*14:17L HLA-DPA1*01:02-B1*04:01L HLA-DRB1*1 6:01L HLA-DQA1*01:03-B1*06:01L HLA-DRB1*04:08L
  REGION 1..10: note = CONT. FROM ABOVE: HLA-DQA1*02:01-B1*03:03L
SVTVKNGSIH

SEQ ID NO: 8839 - protein, 10 aa, Severe acute respiratory syndrome coronavirus 2
  REGION 1..10: note = Table B: HLA-DQA1*03:02-B1*03:03L HLA-DQA1*05:01-B1*03:01L HLA-DRB1*13:02L HLA-DRB1*13:03L HLA-DRB1*01:03L HLA-DRB1*04:02L HLA-DQA1*01:02-B1*06:02L HLA-DRB1*14:01L HLA-DRB1*08:01L HLA-DQA1*05:01-B1*02:01L HLA-DQA1*05:05-B1*03:116L
  REGION 1..10: note = CONT. FROM ABOVE: HLA-DQA1*03:01-B1*03:02L HLA-DPA1*01:02-B1*04: 01L HLA-DRB1*16:01L HLA-DQA1*01:03-B1*06:01L HLA-DQA1*02:01-B1*0 3:03L HLA-DRB1*15:03L
VTVKNGSIHL

SEQ ID NO: 8840 - protein, 10 aa, Severe acute respiratory syndrome coronavirus 2
  REGION 1..10: note = Table B: HLA-DQA1*03:02-B1*03:03L HLA-DQA1*05:01-B1*03:01L HLA-DRB1*04:03L HLA-DRB1*13:02L HLA-DRB1*13:03L HLA-DRB1*01:03L HLA-DRB1*04:02L HLA-DRB1*04:05L HLA-DQA1*01:02-B1*06:02M HLA-DRB4*03:01NL HLA-DRB1*08:77M HLA-DPA1*01:03-B1*03:01M
  REGION 1..10: note = CONT. FROM ABOVE: HLA-DPA1*03:01-B1*04:02L HLA-DRB1*03:01M HLA-D RB1*14:01L HLA-DRB1*11:02L HLA-DRB1*11:03L HLA-DRB1*11:04L HLA-D RB1*14:02L HLA-DRB1*11:01L HLA-DRB5*01:01L HLA-DQA1*01-B1*05M HL A-DQA1*05:05-B1*03:19M HLA-DQA1*05:01-B1*02:01M HLA-DRB4*01:01L
  REGION 1..10: note = CONT. FROM ABOVE: HLA-DPA1*01:03-B1*04:01M HLA-DQA1*05:05-B1*03: 116L HLA-DPA1*01:03-B1*04:02L HLA-DRB1*12:01L HLA-DPA1*02:01-B1* 13:01L HLA-DPA1*03:01-B1*105:01L HLA-DPA1*01:03-B1*104:01M HLA-D PA1*01:02-B1*04:01L HLA-DRB1*10:01M HLA-DRB1*16:01M
  REGION 1..10: note = CONT. FROM ABOVE: HLA-DQA1*01:03-B1*06:01L HLA-DRB1*08:02L HLA-D QA1*02:01-B1*03:03L HLA-DRB1*15:03L
YFDKAGQKTY

SEQ ID NO: 8841 - protein, 10 aa, Severe acute respiratory syndrome coronavirus 2
  REGION 1..10: note = Table B: HLA-DQA1*03:02-B1*03:03L HLA-DRB1*04:03L HLA-DRB1*04:02L HLA-DQA1*01-B1*05L HLA-DPA1*03:01-B1*105:01L HLA-DQA1*03:01-B1*03:02L HLA-DPA1*01:02-B1*04:01L HLA-DQA1*01:03-B1*06:01L HLA-DQA1*02:01-B1*03:03L
SLSHFVNLDN

SEQ ID NO: 8842 - protein, 12 aa, Severe acute respiratory syndrome coronavirus 2
  REGION 1..12: note = Table B: HLA-DQA1*03:02-B1*03:03L HLA-DQA1*05:01-B1*03:01L HLA-DRB1*01:01L HLA-DRB1*08:77L HLA-DPA1*01:03-B1*03:01L HLA-DRB1*14:02L HLA-DRB5*01:01L HLA-DRB1*09:01L HLA-DRB3*01:01L HLA-DPA1*02:01-B1*13:01L HLA-DRB1*07:01L
SHFVNLDNLRAN

SEQ ID NO: 8843 - protein, 11 aa, Severe acute respiratory syndrome coronavirus 2
  REGION 1..11: note = Table B: HLA-DQA1*03:02-B1*03:03L HLA-DQA1*05:01-B1*03:01L HLA-DRB1*04:03L HLA-DRB1*13:03L HLA-DRB1*04:02L HLA-DQA1*05:01-B1*02:01L HLA-DQA1*05:05-B1*03:01L HLA-DRB1*14:17L HLA-DRB1*16:01L HLA-DQA1*01:03-B1*06:01L
  REGION 1..11: note = CONT. FROM ABOVE: HLA-DQA1*02:01-B1*03:03L
ANNTKGSLPIN

SEQ ID NO: 8844 - protein, 10 aa, Severe acute respiratory syndrome coronavirus 2
  REGION 1..10: note = Table B: HLA-DQA1*03:02-B1*03:03L HLA-DQA1*05:01-B1*03:01L HLA-DQA1*01:02-B1*06:02L HLA-DRB1*01:02L HLA-DQA1*05:05-B1*03:19L HLA-DPA1*03:01-B1*105:01L HLA-DQA1*03:01-B1*03:02L HLA-DRB1*16:01L
  REGION 1..10: note = CONT. FROM ABOVE: HLA-DQA1*02:01-B1*03:03L HLA-DRB1*15:03L
NTKGSLPINV

SEQ ID NO: 8845 - protein, 12 aa, Severe acute respiratory syndrome coronavirus 2
  REGION 1..12: note = Table B: HLA-DQA1*03:02-B1*03:03L HLA-DQA1*05:01-B1*03:01L HLA-DRB1*04:03L HLA-DRB1*04:02L HLA-DQA1*01:02-B1*06:02L HLA-DQA1*01-B1*05L HLA-DQA1*05:01-B1*02:01L HLA-DPA1*03:01-B1*105:01L HLA-DRB1*14:17L HLA-DRB1*16:01L
  REGION 1..12: note = CONT. FROM ABOVE: HLA-DQA1*01:03-B1*06:01L
LPINVIVFDGKS

SEQ ID NO: 8846 - protein, 14 aa, Severe acute respiratory syndrome coronavirus 2
  REGION 1..14: note = Table B: HLA-DQA1*03:02-B1*03:03L HLA-DQA1*05:01-B1*03:01L HLA-DRB1*04:01L HLA-DRB1*01:01L HLA-DRB3*02:01L HLA-DRB1*11:02L HLA-DRB1*13:01L HLA-DRB4*01:01L HLA-DPA1*01:03-B1*04:01L HLA-DQA1*05:05-B1*03:116L HLA-DPA1*01:03-B1*04:02L
  REGION 1..14: note = CONT. FROM ABOVE: HLA-DPA1*02:01-B1*13:01L HLA-DPA1*01:03-B1*02: 01L HLA-DPA1*01:03-B1*104:01L HLA-DQA1*05:05-B1*03:01L HLA-DRB1* 14:17L HLA-DRB1*10:01L HLA-DQA1*01:03-B1*06:01L HLA-DRB1*08:02L HLA-DRB1*08:03L HLA-DQA1*02:01-B1*03:03L
VIVFDGKSKCEESS

SEQ ID NO: 8847 - protein, 10 aa, Severe acute respiratory syndrome coronavirus 2
  REGION 1..10: note = Table B: HLA-DQA1*03:02-B1*03:03M HLA-DQA1*05:01-B1*03:01L HLA-DRB1*13:03L HLA-DRB1*08:77L HLA-DRB1*11:02M HLA-DRB1*11:01L HLA-DQA1*05:05-B1*03:19H HLA-DQA1*05:01-B1*02:01L HLA-DRB4*01:01L HLA-DPA1*01:03-B1*04:01L
  REGION 1..10: note = CONT. FROM ABOVE: HLA-DQA1*05:05-B1*03:116L HLA-DRB1*09:01L HLA- DPA1*01:03-B1*04:02L HLA-DQA1*03:01-B1*03:02L HLA-DPA1*01:03-B1* 104:01M HLA-DRB1*10:01L HLA-DRB1*16:01L
EESSAKSASV

SEQ ID NO: 8848 - protein, 10 aa, Severe acute respiratory syndrome coronavirus 2
  REGION 1..10: note = Table B: HLA-DQA1*03:02-B1*03:03L HLA-DQA1*05:01-B1*03:01L HLA-DRB1*13:02L HLA-DRB1*13:03M HLA-DRB1*01:03L HLA-DQA1*01:02-B1*06:02M HLA-DRB1*01:01L HLA-DRB4*03:01NL HLA-DRB1*08:77L HLA-DPA1*01:03-B1*03:01L
  REGION 1..10: note = CONT. FROM ABOVE: HLA-DPA1*03:01-B1*04:02L HLA-DRB1*03:01L HLA-D RB1*14:01L HLA-DRB1*11:04L HLA-DRB1*14:02L HLA-DRB1*08:01L HLA-D RB1*11:01L HLA-DRB5*01:01L HLA-DQA1*01-B1*05L HLA-DQA1*05:05-B1* 03:19L HLA-DQA1*05:01-B1*02:01L HLA-DRB4*01:01L
  REGION 1..10: note = CONT. FROM ABOVE: HLA-DPA1*01:03-B1*04:01M HLA-DQA1*05:05-B1*03: 116L HLA-DPA1*01:03-B1*04:02L HLA-DRB1*12:01L HLA-DPA1*02:01-B1* 13:01L HLA-DPA1*03:01-B1*105:01M HLA-DQA1*03:01-B1*03:02L HLA-DP A1*01:03-B1*104:01L HLA-DQA1*05:05-B1*03:01L HLA-DRB1*14:17L
  REGION 1..10: note = CONT. FROM ABOVE: HLA-DPA1*01:02-B1*04:01L HLA-DRB1*10:01L HLA-D RB1*16:01L HLA-DQA1*01:03-B1*06:01L HLA-DRB1*08:02L HLA-DQA1*02: 01-B1*03:03L HLA-DRB1*15:03L
ESSAKSASVY

SEQ ID NO: 8849 - protein, 10 aa, Severe acute respiratory syndrome coronavirus 2
  REGION 1..10: note = Table B: HLA-DQA1*03:02-B1*03:03L HLA-DQA1*05:01-B1*03:01L HLA-DRB1*04:01L HLA-DRB1*04:03L HLA-DRB1*13:02L HLA-DRB1*13:03M HLA-DRB1*01:03M HLA-DRB1*04:02L HLA-DQA1*01:02-B1*06:02M HLA-DRB4*03:01NL HLA-DRB1*08:77L HLA-DPA1*01:03-B1*03:01L
  REGION 1..10: note = CONT. FROM ABOVE: HLA-DPA1*03:01-B1*04:02L HLA-DRB1*03:01L HLA-D RB1*14:01L HLA-DRB1*11:02L HLA-DRB1*11:03L HLA-DRB1*14:02M HLA-D RB1*11:01L HLA-DRB5*01:01L HLA-DQA1*01-B1*05L HLA-DQA1*05:05-B1* 03:19M HLA-DQA1*05:01-B1*02:01M HLA-DRB4*01:01L
  REGION 1..10: note = CONT. FROM ABOVE: HLA-DPA1*01:03-B1*04:01L HLA-DQA1*05:05-B1*03: 116L HLA-DPA1*01:03-B1*04:02L HLA-DRB1*12:01L HLA-DPA1*02:01-B1* 13:01L HLA-DPA1*03:01-B1*105:01L HLA-DPA1*01:03-B1*104:01L HLA-D PA1*01:02-B1*04:01L HLA-DRB1*10:01L HLA-DRB1*16:01L
  REGION 1..10: note = CONT. FROM ABOVE: HLA-DQA1*01:03-B1*06:01L HLA-DRB1*08:02L HLA-D QA1*02:01-B1*03:03M HLA-DRB1*15:03L
SSAKSASVYY

SEQ ID NO: 8850 - protein, 10 aa, Severe acute respiratory syndrome coronavirus 2
  REGION 1..10: note = Table B: HLA-DQA1*03:02-B1*03:03L HLA-DQA1*05:01-B1*03:01L HLA-DQA1*01:02-B1*06:02L HLA-DQA1*05:05-B1*03:19L HLA-DQA1*05:01-B1*02:01L HLA-DPA1*03:01-B1*105:01L HLA-DQA1*03:01-B1*03:02L HLA-DPA1*01:02-B1*04:01L
  REGION 1..10: note = CONT. FROM ABOVE: HLA-DQA1*01:03-B1*06:01L HLA-DQA1*02:01-B1*03: 03L HLA-DRB1*15:03L
KSASVYYSQL

SEQ ID NO: 8851 - protein, 13 aa, Severe acute respiratory syndrome coronavirus 2
  REGION 1..13: note = Table B: HLA-DQA1*03:02-B1*03:03L HLA-DQA1*05:01-B1*03:01L HLA-DRB1*04:03L HLA-DRB1*04:05L HLA-DPA1*01:03-B1*03:01L HLA-DQA1*01-B1*05L HLA-DQA1*05:01-B1*02:01L HLA-DPA1*01:03-B1*04:02L HLA-DPA1*02:01-B1*13:01L
  REGION 1..13: note = CONT. FROM ABOVE: HLA-DPA1*01:03-B1*104:01L HLA-DPA1*01:02-B1*04 :01L HLA-DRB1*10:01L HLA-DRB1*16:01L HLA-DQA1*01:03-B1*06:01L HL A-DRB1*04:08L HLA-DQA1*02:01-B1*03:03L
SVYYSQLMCQPIL

SEQ ID NO: 8852 - protein, 10 aa, Severe acute respiratory syndrome coronavirus 2
  REGION 1..10: note = Table B: HLA-DQA1*03:02-B1*03:03L
QPILLLDQAL

SEQ ID NO: 8853 - protein, 14 aa, Severe acute respiratory syndrome coronavirus 2
  REGION 1..14: note = Table B: HLA-DQA1*03:02-B1*03:03L HLA-DQA1*05:01-B1*03:01L HLA-DRB1*04:01L HLA-DRB1*13:02L HLA-DRB1*13:03L HLA-DRB1*01:03L HLA-DRB1*04:04L HLA-DRB1*04:05L HLA-DRB1*01:02L HLA-DRB1*08:04L HLA-DRB1*08:77L HLA-DPA1*01:03-B1*03:01L
  REGION 1..14: note = CONT. FROM ABOVE: HLA-DPA1*03:01-B1*04:02L HLA-DRB1*03:01L HLA-D RB1*14:01L HLA-DRB1*11:03L HLA-DQA1*05:05-B1*03:19L HLA-DRB4*01: 01L HLA-DPA1*01:03-B1*04:02L HLA-DRB1*12:01L HLA-DRB3*01:01L HLA -DQA1*05:05-B1*03:01L HLA-DRB1*10:01L HLA-DQA1*01:03-B1*06:01L
  REGION 1..14: note = CONT. FROM ABOVE: HLA-DRB1*04:08L
PILLLDQALVSDVG

SEQ ID NO: 8854 - protein, 12 aa, Severe acute respiratory syndrome coronavirus 2
  REGION 1..12: note = Table B: HLA-DQA1*03:02-B1*03:03L HLA-DQA1*05:01-B1*03:01L HLA-DRB1*04:03L HLA-DQA1*01:02-B1*06:02L HLA-DQA1*01:01-B1*05:01L HLA-DQA1*01-B1*05L HLA-DQA1*05:05-B1*03:19L HLA-DQA1*05:01-B1*02:01L
  REGION 1..12: note = CONT. FROM ABOVE: HLA-DQA1*05:05-B1*03:01L HLA-DQA1*01:03-B1*06: 01L HLA-DQA1*02:01-B1*03:03L
LDQALVSDVGDS

SEQ ID NO: 8855 - protein, 13 aa, Severe acute respiratory syndrome coronavirus 2
  REGION 1..13: note = Table B: HLA-DQA1*03:02-B1*03:03L HLA-DRB1*13:02L HLA-DRB1*13:03L HLA-DRB1*01:03L HLA-DRB1*04:02L HLA-DRB1*04:05L HLA-DRB4*03:01NL HLA-DRB1*04:10L HLA-DRB1*12:01L HLA-DRB1*14:54L HLA-DRB1*14:17L HLA-DRB1*16:01L HLA-DQA1*02:01-B1*03:03L
DQALVSDVGDSAE

SEQ ID NO: 8856 - protein, 12 aa, Severe acute respiratory syndrome coronavirus 2
  REGION 1..12: note = Table B: HLA-DQA1*03:02-B1*03:03L HLA-DRB1*04:03L HLA-DRB1*04:02L HLA-DRB1*04:05L HLA-DQA1*01-B1*05L HLA-DQA1*05:01-B1*02:01L HLA-DQA1*03:01-B1*03:02L HLA-DRB1*14:17L HLA-DRB1*16:01L HLA-DQA1*02:01-B1*03:03L
LVSDVGDSAEVA

SEQ ID NO: 8857 - protein, 12 aa, Severe acute respiratory syndrome coronavirus 2
  REGION 1..12: note = Table B: HLA-DQA1*03:02-B1*03:03L HLA-DQA1*01-B1*05L HLA-DQA1*05:01-B1*02:01L HLA-DQA1*03:01-B1*03:02L
VSDVGDSAEVAV

SEQ ID NO: 8858 - protein, 10 aa, Severe acute respiratory syndrome coronavirus 2
  REGION 1..10: note = Table B: HLA-DQA1*03:02-B1*03:03L HLA-DQA1*05:01-B1*03:01L HLA-DRB1*04:03L HLA-DRB1*13:02L HLA-DRB1*13:03L HLA-DRB1*01:03L HLA-DRB1*04:02L HLA-DRB1*04:05L HLA-DRB4*03:01NL HLA-DRB1*14:02L HLA-DQA1*01:01-B1*05:01L HLA-DRB5*01:01L HLA-DQA1*01-B1*05L
  REGION 1..10: note = CONT. FROM ABOVE: HLA-DQA1*05:05-B1*03:19L HLA-DQA1*05:01-B1*02: 01L HLA-DPA1*01:03-B1*04:02L HLA-DRB1*12:01L HLA-DPA1*03:01-B1*1 05:01L HLA-DQA1*03:01-B1*03:02L HLA-DRB1*14:54L HLA-DQA1*05:05-B 1*03:01L HLA-DRB1*14:17L HLA-DRB1*16:01L
  REGION 1..10: note = CONT. FROM ABOVE: HLA-DQA1*01:03-B1*06:01L HLA-DQA1*02:01-B1*03: 03L
VGDSAEVAVK

SEQ ID NO: 8859 - protein, 10 aa, Severe acute respiratory syndrome coronavirus 2
  REGION 1..10: note = Table B: HLA-DQA1*03:02-B1*03:03L HLA-DQA1*05:01-B1*03:01L HLA-DQA1*01-B1*05L HLA-DQA1*05:05-B1*03:19L HLA-DQA1*05:01-B1*02:01L HLA-DQA1*03:01-B1*03:02L
GDSAEVAVKM

SEQ ID NO: 8860 - protein, 10 aa, Severe acute respiratory syndrome coronavirus 2
  REGION 1..10: note = Table B: HLA-DQA1*03:02-B1*03:03L HLA-DQA1*05:01-B1*03:01L HLA-DRB1*13:03L HLA-DQA1*01:02-B1*06:02M HLA-DPA1*01:03-B1*03:01L HLA-DPA1*03:01-B1*04:02L HLA-DRB1*14:01L HLA-DRB1*14:02L HLA-DQA1*05:01-B1*02:01L
  REGION 1..10: note = CONT. FROM ABOVE: HLA-DPA1*01:03-B1*04:01L HLA-DRB1*12:01L HLA-D PA1*02:01-B1*13:01L HLA-DPA1*03:01-B1*105:01M HLA-DQA1*05:05-B1* 03:01L HLA-DPA1*01:02-B1*04:01L HLA-DQA1*01:03-B1*06:01L HLA-DQA 1*02:01-B1*03:03L HLA-DRB1*15:03L
DSAEVAVKMF

SEQ ID NO: 8861 - protein, 10 aa, Severe acute respiratory syndrome coronavirus 2
  REGION 1..10: note = Table B: HLA-DQA1*03:02-B1*03:03L HLA-DQA1*05:05-B1*03:19L HLA-DRB1*09:01L HLA-DPA1*01:03-B1*04:02L HLA-DQA1*03:01-B1*03:02L
AEVAVKMFDA

SEQ ID NO: 8862 - protein, 10 aa, Severe acute respiratory syndrome coronavirus 2
  REGION 1..10: note = Table B: HLA-DQA1*03:02-B1*03:03L HLA-DQA1*05:01-B1*03:01L HLA-DRB1*13:02L HLA-DRB1*13:03M HLA-DRB1*01:03L HLA-DQA1*01:02-B1*06:02H HLA-DRB1*01:01L HLA-DRB4*03:01NL HLA-DRB1*08:77L HLA-DPA1*01:03-B1*03:01L
  REGION 1..10: note = CONT. FROM ABOVE: HLA-DPA1*03:01-B1*04:02L HLA-DRB1*03:01L HLA-D RB1*14:01L HLA-DRB1*14:02L HLA-DRB5*01:01L HLA-DQA1*01-B1*05L HL A-DQA1*05:05-B1*03:19L HLA-DQA1*05:01-B1*02:01L HLA-DRB4*01:01L HLA-DPA1*01:03-B1*04:01M HLA-DQA1*05:05-B1*03:116L
  REGION 1..10: note = CONT. FROM ABOVE: HLA-DPA1*01:03-B1*04:02L HLA-DRB1*12:01L HLA-D PA1*02:01-B1*13:01L HLA-DPA1*03:01-B1*105:01M HLA-DPA1*01:03-B1* 104:01L HLA-DQA1*05:05-B1*03:01L HLA-DPA1*01:02-B1*04:01L HLA-DR B1*10:01L HLA-DRB1*16:01L HLA-DQA1*01:03-B1*06:01L
  REGION 1..10: note = CONT. FROM ABOVE: HLA-DQA1*02:01-B1*03:03L HLA-DRB1*15:03L
EVAVKMFDAY

SEQ ID NO: 8863 - protein, 12 aa, Severe acute respiratory syndrome coronavirus 2
  REGION 1..12: note = Table B: HLA-DQA1*03:02-B1*03:03L HLA-DQA1*05:01-B1*03:01L HLA-DRB1*01:03L HLA-DRB1*04:04L HLA-DRB1*04:05L HLA-DRB1*01:02L HLA-DPA1*01:03-B1*03:01L HLA-DPA1*03:01-B1*04:02L HLA-DRB1*14:01L HLA-DRB1*04:10L HLA-DRB1*12:01L
  REGION 1..12: note = CONT. FROM ABOVE: HLA-DPA1*02:01-B1*13:01L HLA-DPA1*03:01-B1*105 :01L HLA-DQA1*05:05-B1*03:01L HLA-DPA1*01:02-B1*04:01L HLA-DRB1* 16:01L HLA-DRB1*04:08L HLA-DRB1*15:03L
VAVKMFDAYVNT

SEQ ID NO: 8864 - protein, 10 aa, Severe acute respiratory syndrome coronavirus 2
  REGION 1..10: note = Table B: HLA-DQA1*03:02-B1*03:03L HLA-DQA1*05:01-B1*03:01L HLA-DRB1*04:01L HLA-DRB1*04:03L HLA-DRB1*13:02L HLA-DRB1*13:03L HLA-DRB1*01:03M HLA-DRB1*04:05L HLA-DQA1*01:02-B1*06:02M HLA-DRB1*01:01L HLA-DRB1*01:02L HLA-DRB1*08:77L
  REGION 1..10: note = CONT. FROM ABOVE: HLA-DPA1*01:03-B1*03:01L HLA-DPA1*03:01-B1*04: 02L HLA-DRB1*03:01L HLA-DRB1*14:01L HLA-DRB1*11:03L HLA-DRB1*14: 02M HLA-DQA1*01:01-B1*05:01L HLA-DRB1*08:01L HLA-DRB1*11:01L HLA -DQA1*01-B1*05L HLA-DQA1*05:05-B1*03:19L
  REGION 1..10: note = CONT. FROM ABOVE: HLA-DQA1*05:01-B1*02:01L HLA-DRB4*01:01L HLA-D PA1*01:03-B1*04:01L HLA-DQA1*05:05-B1*03:116M HLA-DRB1*09:01L HL A-DPA1*01:03-B1*04:02M HLA-DRB1*12:01L HLA-DPA1*02:01-B1*13:01M HLA-DPA1*03:01-B1*105:01L HLA-DQA1*03:01-B1*03:02L
  REGION 1..10: note = CONT. FROM ABOVE: HLA-DPA1*01:03-B1*104:01L HLA-DPA1*01:02-B1*04 :01L HLA-DRB1*07:01L HLA-DRB1*10:01L HLA-DRB1*16:01L HLA-DQA1*01 :03-B1*06:01M HLA-DRB1*08:02L HLA-DRB1*08:03L HLA-DQA1*02:01-B1* 03:03M HLA-DRB1*15:03L
KMFDAYVNTF

SEQ ID NO: 8865 - protein, 11 aa, Severe acute respiratory syndrome coronavirus 2
  REGION 1..11: note = Table B: HLA-DQA1*03:02-B1*03:03L HLA-DRB1*13:03L HLA-DPA1*03:01-B1*04:02L HLA-DQA1*05:05-B1*03:19L HLA-DQA1*05:01-B1*02:01L HLA-DPA1*01:03-B1*04:01L HLA-DRB1*12:01L HLA-DPA1*01:02-B1*04:01L
DAYVNTFSSTF

SEQ ID NO: 8866 - protein, 11 aa, Severe acute respiratory syndrome coronavirus 2
  REGION 1..11: note = Table B: HLA-DQA1*03:02-B1*03:03L HLA-DPA1*03:01-B1*04:02L HLA-DQA1*01-B1*05L HLA-DQA1*05:01-B1*02:01L HLA-DRB1*12:01L HLA-DPA1*01:02-B1*04:01L
AYVNTFSSTFN

SEQ ID NO: 8867 - protein, 11 aa, Severe acute respiratory syndrome coronavirus 2
  REGION 1..11: note = Table B: HLA-DQA1*03:02-B1*03:03L HLA-DRB1*04:03L HLA-DRB1*13:02L HLA-DRB4*03:01NL HLA-DRB1*08:77L HLA-DRB3*02:01L HLA-DPA1*03:01-B1*04:02L HLA-DQA1*05:01-B1*02:01L HLA-DRB1*12:01L HLA-DRB1*07:01L HLA-DRB1*16:01L
  REGION 1..11: note = CONT. FROM ABOVE: HLA-DQA1*02:01-B1*03:03L HLA-DRB1*15:03L
NTFSSTFNVPM

SEQ ID NO: 8868 - protein, 10 aa, Severe acute respiratory syndrome coronavirus 2
  REGION 1..10: note = Table B: HLA-DQA1*03:02-B1*03:03L HLA-DRB1*04:03L HLA-DQA1*01-B1*05L HLA-DQA1*05:01-B1*02:01L HLA-DRB1*12:01L HLA-DQA1*03:01-B1*03:02L HLA-DRB1*16:01L HLA-DQA1*01:03-B1*06:01L HLA-DQA1*02:01-B1*03:03L
FSSTFNVPME

SEQ ID NO: 8869 - protein, 10 aa, Severe acute respiratory syndrome coronavirus 2
  REGION 1..10: note = Table B: HLA-DQA1*03:02-B1*03:03L HLA-DQA1*05:01-B1*03:01L HLA-DRB1*04:03L HLA-DRB1*13:02L HLA-DRB1*13:03L HLA-DRB1*01:03L HLA-DRB1*04:02L HLA-DRB4*03:01NL HLA-DQA1*01:01-B1*05:01L HLA-DRB1*08:01L HLA-DRB5*01:01L HLA-DQA1*01-B1*05L
  REGION 1..10: note = CONT. FROM ABOVE: HLA-DQA1*05:01-B1*02:01L HLA-DRB1*12:01L HLA-D RB1*12:02L HLA-DPA1*03:01-B1*105:01L HLA-DQA1*03:01-B1*03:02L HL A-DQA1*05:05-B1*03:01L HLA-DRB1*14:17L HLA-DRB1*16:01L HLA-DQA1* 01:03-B1*06:01L HLA-DQA1*02:01-B1*03:03L
SSTFNVPMEK

SEQ ID NO: 8870 - protein, 10 aa, Severe acute respiratory syndrome coronavirus 2
  REGION 1..10: note = Table B: HLA-DQA1*03:02-B1*03:03M HLA-DQA1*05:01-B1*03:01M HLA-DRB1*04:01L HLA-DRB1*13:02L HLA-DRB1*13:03L HLA-DRB1*01:03L HLA-DRB1*04:02L HLA-DRB1*04:05L HLA-DQA1*01:02-B1*06:02M HLA-DRB1*01:01L HLA-DRB1*01:02M HLA-DRB4*03:01NL HLA-DRB1*08:77L
  REGION 1..10: note = CONT. FROM ABOVE: HLA-DRB3*02:01L HLA-DPA1*01:03-B1*03:01L HLA-D PA1*03:01-B1*04:02L HLA-DRB1*03:01L HLA-DRB1*14:01L HLA-DRB1*14: 02M HLA-DRB1*08:01L HLA-DRB1*11:01L HLA-DQA1*01-B1*05L HLA-DQA1* 05:05-B1*03:19L HLA-DQA1*05:01-B1*02:01L HLA-DRB4*01:01L
  REGION 1..10: note = CONT. FROM ABOVE: HLA-DPA1*01:03-B1*04:01L HLA-DQA1*05:05-B1*03: 116M HLA-DRB1*09:01L HLA-DPA1*01:03-B1*04:02L HLA-DRB1*12:01L HL A-DPA1*02:01-B1*13:01L HLA-DPA1*03:01-B1*105:01M HLA-DQA1*03:01- B1*03:02M HLA-DPA1*01:03-B1*104:01L HLA-DQA1*05:05-B1*03:01L
  REGION 1..10: note = CONT. FROM ABOVE: HLA-DPA1*01:02-B1*04:01L HLA-DRB1*07:01L HLA-D RB1*10:01L HLA-DRB1*16:01L HLA-DQA1*01:03-B1*06:01L HLA-DRB1*08: 03L HLA-DQA1*02:01-B1*03:03M HLA-DRB1*15:03M
STFNVPMEKL

SEQ ID NO: 8871 - protein, 15 aa, Severe acute respiratory syndrome coronavirus 2
  REGION 1..15: note = Table B: HLA-DQA1*03:02-B1*03:03L HLA-DRB1*13:03L HLA-DRB1*07:01L HLA-DQA1*01:03-B1*06:01L
VPMEKLKTLVATAEA

SEQ ID NO: 8872 - protein, 13 aa, Severe acute respiratory syndrome coronavirus 2
  REGION 1..13: note = Table B: HLA-DQA1*03:02-B1*03:03L HLA-DQA1*05:01-B1*03:01L HLA-DRB1*13:02L HLA-DRB1*13:03L HLA-DRB1*01:03L HLA-DRB1*04:02L HLA-DRB1*04:04L HLA-DQA1*01:02-B1*06:02L HLA-DRB1*01:02L HLA-DRB4*03:01NL HLA-DPA1*01:03-B1*03:01L
  REGION 1..13: note = CONT. FROM ABOVE: HLA-DQA1*01:01-B1*05:01L HLA-DQA1*01-B1*05L HL A-DQA1*05:01-B1*02:01L HLA-DRB1*04:10L HLA-DRB1*12:01L HLA-DPA1* 02:01-B1*13:01L HLA-DPA1*03:01-B1*105:01L HLA-DRB1*14:54L HLA-DP A1*01:03-B1*104:01L HLA-DQA1*05:05-B1*03:01L HLA-DRB1*14:17L
  REGION 1..13: note = CONT. FROM ABOVE: HLA-DRB1*16:01L HLA-DQA1*01:03-B1*06:01L HLA-D RB1*04:08L HLA-DRB1*15:03L
EKLKTLVATAEAE

SEQ ID NO: 8873 - protein, 10 aa, Severe acute respiratory syndrome coronavirus 2
  REGION 1..10: note = Table B: HLA-DQA1*03:02-B1*03:03L
TLVATAEAEL

SEQ ID NO: 8874 - protein, 10 aa, Severe acute respiratory syndrome coronavirus 2
  REGION 1..10: note = Table B: HLA-DQA1*03:02-B1*03:03L HLA-DQA1*05:01-B1*03:01L HLA-DRB1*04:03L HLA-DRB1*01:03L HLA-DRB1*04:02L HLA-DQA1*01:02-B1*06:02L HLA-DRB4*03:01NL HLA-DQA1*01:01-B1*05:01L HLA-DQA1*05:05-B1*03:19L
  REGION 1..10: note = CONT. FROM ABOVE: HLA-DRB4*02:01NL HLA-DQA1*05:01-B1*02:01L HLA- DPA1*01:03-B1*04:02L HLA-DRB1*12:01L HLA-DPA1*03:01-B1*105:01L H LA-DQA1*03:01-B1*03:02L HLA-DQA1*05:05-B1*03:01L HLA-DRB1*14:17L HLA-DRB1*16:01L HLA-DQA1*01:03-B1*06:01M HLA-DRB1*04:08L
  REGION 1..10: note = CONT. FROM ABOVE: HLA-DQA1*02:01-B1*03:03L
VATAEAELAK

SEQ ID NO: 8875 - protein, 10 aa, Severe acute respiratory syndrome coronavirus 2
  REGION 1..10: note = Table B: HLA-DQA1*03:02-B1*03:03L HLA-DQA1*05:01-B1*03:01L HLA-DRB1*04:03L HLA-DRB1*01:03L HLA-DRB1*04:02L HLA-DQA1*01:02-B1*06:02L HLA-DRB4*03:01NL HLA-DQA1*01:01-B1*05:01L HLA-DQA1*05:05-B1*03:19L
  REGION 1..10: note = CONT. FROM ABOVE: HLA-DQA1*05:01-B1*02:01L HLA-DPA1*01:03-B1*04: 02L HLA-DRB1*12:01L HLA-DPA1*03:01-B1*105:01L HLA-DQA1*03:01-B1* 03:02L HLA-DQA1*05:05-B1*03:01L HLA-DRB1*14:17L HLA-DPA1*01:02-B 1*04:01L HLA-DRB1*16:01L HLA-DQA1*01:03-B1*06:01M
  REGION 1..10: note = CONT. FROM ABOVE: HLA-DRB1*04:08L HLA-DQA1*02:01-B1*03:03L
ATAEAELAKN

SEQ ID NO: 8876 - protein, 10 aa, Severe acute respiratory syndrome coronavirus 2
  REGION 1..10: note = Table B: HLA-DQA1*03:02-B1*03:03L HLA-DQA1*05:05-B1*03:19L HLA-DQA1*03:01-B1*03:02L HLA-DQA1*01:03-B1*06:01L
TAEAELAKNV

SEQ ID NO: 8877 - protein, 10 aa, Severe acute respiratory syndrome coronavirus 2
  REGION 1..10: note = Table B: HLA-DQA1*03:02-B1*03:03L HLA-DQA1*05:05-B1*03:19L HLA-DQA1*03:01-B1*03:02L
AEAELAKNVS

SEQ ID NO: 8878 - protein, 10 aa, Severe acute respiratory syndrome coronavirus 2
  REGION 1..10: note = Table B: HLA-DQA1*03:02-B1*03:03M HLA-DQA1*05:01-B1*03:01L HLA-DQA1*05:05-B1*03:19L HLA-DQA1*05:01-B1*02:01L HLA-DQA1*03:01-B1*03:02L
EAELAKNVSL

SEQ ID NO: 8879 - protein, 10 aa, Severe acute respiratory syndrome coronavirus 2
  REGION 1..10: note = Table B: HLA-DQA1*03:02-B1*03:03L HLA-DQA1*05:01-B1*03:01L HLA-DRB1*04:03L HLA-DRB1*04:02L HLA-DRB4*03:01NL HLA-DQA1*03:01-B1*03:02L HLA-DRB1*14:17L HLA-DQA1*01:03-B1*06:01L HLA-DQA1*02:01-B1*03:03L
ELAKNVSLDN

SEQ ID NO: 8880 - protein, 11 aa, Severe acute respiratory syndrome coronavirus 2
  REGION 1..11: note = Table B: HLA-DQA1*03:02-B1*03:03L HLA-DRB1*04:03L HLA-DQA1*05:01-B1*02:01L HLA-DQA1*02:01-B1*03:03L
LAKNVSLDNVL

SEQ ID NO: 8881 - protein, 10 aa, Severe acute respiratory syndrome coronavirus 2
  REGION 1..10: note = Table B: HLA-DQA1*03:02-B1*03:03L HLA-DQA1*05:01-B1*03:01L HLA-DRB1*04:03L HLA-DRB1*13:03L HLA-DRB1*01:03L HLA-DRB1*04:05L HLA-DQA1*01:02-B1*06:02L HLA-DRB1*01:01L HLA-DRB1*08:77L HLA-DPA1*03:01-B1*04:02L HLA-DRB1*14:01L HLA-DRB1*14:02L
  REGION 1..10: note = CONT. FROM ABOVE: HLA-DQA1*01-B1*05L HLA-DQA1*05:05-B1*03:19L HL A-DQA1*05:01-B1*02:01L HLA-DRB4*01:01L HLA-DPA1*01:03-B1*04:01L HLA-DQA1*05:05-B1*03:116L HLA-DPA1*01:03-B1*04:02L HLA-DRB1*12:0 1L HLA-DPA1*02:01-B1*13:01L HLA-DPA1*03:01-B1*105:01L
  REGION 1..10: note = CONT. FROM ABOVE: HLA-DPA1*01:02-B1*04:01L HLA-DRB1*10:01L HLA-D RB1*16:01L HLA-DQA1*01:03-B1*06:01L HLA-DRB1*08:02L HLA-DQA1*02: 01-B1*03:03L HLA-DRB1*15:03L
VSLDNVLSTF

SEQ ID NO: 8882 - protein, 10 aa, Severe acute respiratory syndrome coronavirus 2
  REGION 1..10: note = Table B: HLA-DQA1*03:02-B1*03:03L HLA-DQA1*05:05-B1*03:19L
SLDNVLSTFI

SEQ ID NO: 8883 - protein, 12 aa, Severe acute respiratory syndrome coronavirus 2
  REGION 1..12: note = Table B: HLA-DQA1*03:02-B1*03:03L HLA-DQA1*05:01-B1*03:01L HLA-DRB1*04:03L HLA-DRB1*01:03L HLA-DRB1*04:02L HLA-DRB1*04:05L HLA-DRB1*01:02L HLA-DQA1*01:01-B1*05:01L HLA-DQA1*01-B1*05L HLA-DQA1*05:05-B1*03:19L HLA-DQA1*05:01-B1*02:01L
  REGION 1..12: note = CONT. FROM ABOVE: HLA-DRB1*16:01L HLA-DRB1*04:08L
DNVLSTFISAAR

SEQ ID NO: 8884 - protein, 12 aa, Severe acute respiratory syndrome coronavirus 2
  REGION 1..12: note = Table B: HLA-DQA1*03:02-B1*03:03L HLA-DQA1*05:01-B1*03:01L HLA-DRB1*04:03L HLA-DRB1*04:02L HLA-DRB1*01:02L HLA-DQA1*01-B1*05L HLA-DQA1*05:05-B1*03:19L HLA-DRB1*16:01L HLA-DRB1*04:08L HLA-DRB1*15:03L
NVLSTFISAARQ

SEQ ID NO: 8885 - protein, 10 aa, Severe acute respiratory syndrome coronavirus 2
  REGION 1..10: note = Table B: HLA-DQA1*03:02-B1*03:03L HLA-DQA1*05:01-B1*03:01L HLA-DRB1*04:03L HLA-DRB1*13:03L HLA-DRB1*01:03L HLA-DRB1*04:02L HLA-DQA1*01:02-B1*06:02L HLA-DRB4*03:01NL HLA-DQA1*01:01-B1*05:01L HLA-DQA1*05:05-B1*03:19L
  REGION 1..10: note = CONT. FROM ABOVE: HLA-DQA1*05:01-B1*02:01L HLA-DQA1*03:01-B1*03: 02L HLA-DQA1*05:05-B1*03:01L HLA-DRB1*14:17L HLA-DPA1*01:02-B1*0 4:01L HLA-DRB1*16:01L HLA-DQA1*01:03-B1*06:01L HLA-DQA1*02:01-B1 *03:03L
STFISAARQG

SEQ ID NO: 8886 - protein, 10 aa, Severe acute respiratory syndrome coronavirus 2
  REGION 1..10: note = Table B: HLA-DQA1*03:02-B1*03:03L HLA-DQA1*05:01-B1*03:01L HLA-DRB1*04:03L HLA-DRB1*04:02L HLA-DQA1*01:02-B1*06:02L HLA-DRB4*03:01NL HLA-DQA1*05:05-B1*03:19L HLA-DQA1*05:01-B1*02:01L HLA-DPA1*03:01-B1*105:01L
  REGION 1..10: note = CONT. FROM ABOVE: HLA-DQA1*03:01-B1*03:02L HLA-DQA1*05:05-B1*03: 01L HLA-DRB1*14:17L HLA-DQA1*01:03-B1*06:01L HLA-DQA1*02:01-B1*0 3:03L
ISAARQGFVD

SEQ ID NO: 8887 - protein, 11 aa, Severe acute respiratory syndrome coronavirus 2
  REGION 1..11: note = Table B: HLA-DQA1*03:02-B1*03:03L HLA-DRB1*04:03L HLA-DRB1*16:01L HLA-DQA1*01:03-B1*06:01L
ARQGFVDSDVE

SEQ ID NO: 8888 - protein, 10 aa, Severe acute respiratory syndrome coronavirus 2
  REGION 1..10: note = Table B: HLA-DQA1*03:02-B1*03:03L HLA-DRB1*04:03L HLA-DRB1*13:03L HLA-DRB1*01:03L HLA-DRB1*04:02L HLA-DRB1*04:05L HLA-DRB4*03:01NL HLA-DQA1*01-B1*05L HLA-DQA1*05:01-B1*02:01L HLA-DRB1*04:10L HLA-DRB1*12:01L HLA-DPA1*03:01-B1*105:01L
  REGION 1..10: note = CONT. FROM ABOVE: HLA-DQA1*03:01-B1*03:02L HLA-DRB1*14:54L HLA-D RB1*14:17L HLA-DRB1*16:01L HLA-DQA1*02:01-B1*03:03L
FVDSDVETKD

SEQ ID NO: 8889 - protein, 10 aa, Severe acute respiratory syndrome coronavirus 2
  REGION 1..10: note = Table B: HLA-DQA1*03:02-B1*03:03L HLA-DQA1*01-B1*05L HLA-DQA1*05:01-B1*02:01L HLA-DQA1*03:01-B1*03:02L
VDSDVETKDV

SEQ ID NO: 8890 - protein, 10 aa, Severe acute respiratory syndrome coronavirus 2
  REGION 1..10: note = Table B: HLA-DQA1*03:02-B1*03:03L
DSDVETKDVV

SEQ ID NO: 8891 - protein, 10 aa, Severe acute respiratory syndrome coronavirus 2
  REGION 1..10: note = Table B: HLA-DQA1*03:02-B1*03:03L HLA-DRB1*04:03L HLA-DRB1*13:03L HLA-DQA1*01:01-B1*05:01L HLA-DQA1*01-B1*05L HLA-DQA1*05:01-B1*02:01L HLA-DQA1*03:01-B1*03:02L HLA-DRB1*16:01L HLA-DQA1*02:01-B1*03:03L
SDVETKDVVE

SEQ ID NO: 8892 - protein, 10 aa, Severe acute respiratory syndrome coronavirus 2
  REGION 1..10: note = Table B: HLA-DQA1*03:02-B1*03:03L HLA-DQA1*05:05-B1*03:19L
VETKDVVECL

SEQ ID NO: 8893 - protein, 11 aa, Severe acute respiratory syndrome coronavirus 2
  REGION 1..11: note = Table B: HLA-DQA1*03:02-B1*03:03L HLA-DRB1*04:03L HLA-DRB1*04:02L HLA-DQA1*05:01-B1*02:01L HLA-DRB1*14:17L HLA-DQA1*01:03-B1*06:01L HLA-DQA1*02:01-B1*03:03L
LSHQSDIEVTG

SEQ ID NO: 8894 - protein, 12 aa, Severe acute respiratory syndrome coronavirus 2
  REGION 1..12: note = Table B: HLA-DQA1*03:02-B1*03:03L HLA-DQA1*05:01-B1*03:01L HLA-DRB1*04:03L HLA-DQA1*01:02-B1*06:02L HLA-DQA1*01:01-B1*05:01L HLA-DQA1*01-B1*05L HLA-DQA1*05:05-B1*03:19L HLA-DQA1*05:01-B1*02:01L
  REGION 1..12: note = CONT. FROM ABOVE: HLA-DPA1*03:01-B1*105:01L HLA-DQA1*05:05-B1*03 :01L HLA-DRB1*16:01L HLA-DQA1*01:03-B1*06:01M HLA-DQA1*02:01-B1* 03:03L
SHQSDIEVTGDS

SEQ ID NO: 8895 - protein, 13 aa, Severe acute respiratory syndrome coronavirus 2
  REGION 1..13: note = Table B: HLA-DQA1*03:02-B1*03:03L HLA-DRB1*04:03L HLA-DRB1*12:01L HLA-DQA1*05:05-B1*03:01L HLA-DQA1*01:03-B1*06:01L
SDIEVTGDSCNNY

SEQ ID NO: 8896 - protein, 12 aa, Severe acute respiratory syndrome coronavirus 2
  REGION 1..12: note = Table B: HLA-DQA1*03:02-B1*03:03L HLA-DQA1*03:01-B1*03:02L HLA-DQA1*05:05-B1*03:01L HLA-DQA1*01:03-B1*06:01L
IEVTGDSCNNYM

SEQ ID NO: 8897 - protein, 11 aa, Severe acute respiratory syndrome coronavirus 2
  REGION 1..11: note = Table B: HLA-DQA1*03:02-B1*03:03L HLA-DQA1*01:02-B1*06:02L HLA-DPA1*03:01-B1*105:01L HLA-DRB1*16:01L HLA-DQA1*01:03-B1*06:01L
NYMLTYNKVEN

SEQ ID NO: 8898 - protein, 12 aa, Severe acute respiratory syndrome coronavirus 2
  REGION 1..12: note = Table B: HLA-DQA1*03:02-B1*03:03L HLA-DQA1*05:01-B1*03:01L HLA-DRB1*13:02L HLA-DRB1*04:04L HLA-DQA1*01:02-B1*06:02L HLA-DRB1*01:02L HLA-DRB1*08:04L HLA-DRB1*14:01L HLA-DRB1*11:04L HLA-DRB1*11:01L HLA-DQA1*01-B1*05L HLA-DQA1*05:01-B1*02:01L
  REGION 1..12: note = CONT. FROM ABOVE: HLA-DRB1*04:10L HLA-DPA1*03:01-B1*105:01L HLA- DQA1*05:05-B1*03:01L HLA-DRB1*10:01L HLA-DQA1*01:03-B1*06:01L HL A-DRB1*08:03L HLA-DRB1*15:03L
LTYNKVENMTPR

SEQ ID NO: 8899 - protein, 12 aa, Severe acute respiratory syndrome coronavirus 2
  REGION 1..12: note = Table B: HLA-DQA1*03:02-B1*03:03L HLA-DQA1*01:02-B1*06:02L HLA-DRB1*01:02L HLA-DRB1*14:01L HLA-DQA1*01-B1*05L HLA-DQA1*05:01-B1*02:01L HLA-DRB1*12:01L HLA-DPA1*02:01-B1*13:01L HLA-DPA1*03:01-B1*105:01L
  REGION 1..12: note = CONT. FROM ABOVE: HLA-DRB1*15:03L
YNKVENMTPRDL

SEQ ID NO: 8900 - protein, 10 aa, Severe acute respiratory syndrome coronavirus 2
  REGION 1..10: note = Table B: HLA-DQA1*03:02-B1*03:03L HLA-DQA1*05:01-B1*03:01L HLA-DRB1*04:03L HLA-DRB1*13:03L HLA-DRB1*04:02L HLA-DQA1*01:02-B1*06:02L HLA-DRB4*03:01NL HLA-DQA1*01-B1*05L HLA-DQA1*05:05-B1*03:19L HLA-DQA1*05:01-B1*02:01L
  REGION 1..10: note = CONT. FROM ABOVE: HLA-DRB1*12:01L HLA-DPA1*03:01-B1*105:01L HLA- DQA1*03:01-B1*03:02L HLA-DRB1*14:54L HLA-DQA1*05:05-B1*03:01L HL A-DRB1*14:17L HLA-DPA1*01:02-B1*04:01L HLA-DRB1*16:01L HLA-DQA1* 01:03-B1*06:01L HLA-DQA1*02:01-B1*03:03L HLA-DRB1*15:03L
VENMTPRDLG

SEQ ID NO: 8901 - protein, 10 aa, Severe acute respiratory syndrome coronavirus 2
  REGION 1..10: note = Table B: HLA-DQA1*03:02-B1*03:03L HLA-DQA1*05:01-B1*03:01L HLA-DRB1*04:03L HLA-DRB1*13:03L HLA-DRB1*01:03L HLA-DRB1*04:02L HLA-DRB1*04:05L HLA-DQA1*01:02-B1*06:02L HLA-DRB1*01:02L HLA-DRB4*03:01NL HLA-DQA1*01:01-B1*05:01L
  REGION 1..10: note = CONT. FROM ABOVE: HLA-DQA1*05:05-B1*03:19L HLA-DQA1*05:01-B1*02: 01L HLA-DRB1*12:01L HLA-DPA1*03:01-B1*105:01L HLA-DQA1*03:01-B1* 03:02L HLA-DRB1*14:54L HLA-DQA1*05:05-B1*03:01L HLA-DRB1*14:17L HLA-DRB1*16:01L HLA-DQA1*01:03-B1*06:01L HLA-DRB1*04:08L
  REGION 1..10: note = CONT. FROM ABOVE: HLA-DQA1*02:01-B1*03:03L
INAQVAKSHN

SEQ ID NO: 8902 - protein, 10 aa, Severe acute respiratory syndrome coronavirus 2
  REGION 1..10: note = Table B: HLA-DQA1*03:02-B1*03:03L HLA-DQA1*05:01-B1*03:01L HLA-DRB1*13:02L HLA-DRB1*13:03L HLA-DRB1*01:03L HLA-DRB1*04:02L HLA-DQA1*01:02-B1*06:02L HLA-DRB1*01:02L HLA-DRB4*03:01NL HLA-DRB1*08:77L HLA-DRB3*02:01L HLA-DPA1*01:03-B1*03:01L
  REGION 1..10: note = CONT. FROM ABOVE: HLA-DPA1*03:01-B1*04:02L HLA-DRB1*14:01L HLA-D RB1*14:02L HLA-DRB1*08:01L HLA-DRB5*01:01L HLA-DQA1*01-B1*05L HL A-DQA1*05:01-B1*02:01L HLA-DPA1*01:03-B1*04:01L HLA-DQA1*05:05-B 1*03:116L HLA-DRB1*09:01L HLA-DRB1*12:01L
  REGION 1..10: note = CONT. FROM ABOVE: HLA-DPA1*03:01-B1*105:01L HLA-DQA1*03:01-B1*03 :02L HLA-DPA1*01:02-B1*04:01L HLA-DRB1*07:01L HLA-DRB1*16:01L HL A-DQA1*02:01-B1*03:03L HLA-DRB1*15:03L
QVAKSHNIAL

SEQ ID NO: 8903 - protein, 12 aa, Severe acute respiratory syndrome coronavirus 2
  REGION 1..12: note = Table B: HLA-DQA1*03:02-B1*03:03L HLA-DQA1*05:01-B1*03:01L HLA-DRB1*13:03L HLA-DRB1*01:03L HLA-DRB1*04:04L HLA-DRB1*04:05L HLA-DRB1*01:02L HLA-DRB4*03:01NL HLA-DPA1*01:03-B1*03:01L HLA-DRB1*14:01L HLA-DRB1*11:04L HLA-DRB1*08:01L
  REGION 1..12: note = CONT. FROM ABOVE: HLA-DQA1*01-B1*05L HLA-DQA1*05:01-B1*02:01L HL A-DRB1*04:10L HLA-DRB1*12:01L HLA-DPA1*02:01-B1*13:01L HLA-DPA1* 03:01-B1*105:01L HLA-DQA1*03:01-B1*03:02L HLA-DRB1*14:54L HLA-DQ A1*05:05-B1*03:01L HLA-DPA1*01:02-B1*04:01L HLA-DRB1*16:01L
  REGION 1..12: note = CONT. FROM ABOVE: HLA-DRB1*04:08L HLA-DQA1*02:01-B1*03:03L HLA-D RB1*15:03L
SHNIALIWNVKD

SEQ ID NO: 8904 - protein, 10 aa, Severe acute respiratory syndrome coronavirus 2
  REGION 1..10: note = Table B: HLA-DQA1*03:02-B1*03:03L HLA-DQA1*05:01-B1*03:01L HLA-DRB1*04:03L HLA-DRB1*04:05L HLA-DQA1*01:02-B1*06:02L HLA-DPA1*03:01-B1*04:02L HLA-DRB1*14:01L HLA-DQA1*01-B1*05L HLA-DQA1*05:05-B1*03:19L HLA-DQA1*05:01-B1*02:01L
  REGION 1..10: note = CONT. FROM ABOVE: HLA-DRB1*12:01L HLA-DPA1*02:01-B1*13:01L HLA-D PA1*03:01-B1*105:01L HLA-DQA1*03:01-B1*03:02L HLA-DQA1*05:05-B1* 03:01L HLA-DRB1*16:01L HLA-DQA1*01:03-B1*06:01L HLA-DQA1*02:01-B 1*03:03L HLA-DRB1*15:03L
IALIWNVKDF

SEQ ID NO: 8905 - protein, 10 aa, Severe acute respiratory syndrome coronavirus 2
  REGION 1..10: note = Table B: HLA-DQA1*03:02-B1*03:03L HLA-DRB1*01:03L HLA-DQA1*01:02-B1*06:02L HLA-DPA1*01:03-B1*03:01L HLA-DPA1*03:01-B1*04:02L HLA-DQA1*01-B1*05L HLA-DQA1*05:01-B1*02:01L HLA-DPA1*01:03-B1*04:01L
  REGION 1..10: note = CONT. FROM ABOVE: HLA-DPA1*01:03-B1*04:02L HLA-DRB1*12:01L HLA-D PA1*02:01-B1*13:01L HLA-DPA1*03:01-B1*105:01L HLA-DPA1*01:02-B1* 04:01L HLA-DRB1*16:01L HLA-DQA1*01:03-B1*06:01L HLA-DRB1*04:08L HLA-DQA1*02:01-B1*03:03L HLA-DRB1*15:03L
IWNVKDFMSL

SEQ ID NO: 8906 - protein, 10 aa, Severe acute respiratory syndrome coronavirus 2
  REGION 1..10: note = Table B: HLA-DQA1*03:02-B1*03:03L
KDFMSLSEQL

SEQ ID NO: 8907 - protein, 15 aa, Severe acute respiratory syndrome coronavirus 2
  REGION 1..15: note = Table B: HLA-DQA1*03:02-B1*03:03L HLA-DRB1*04:01L HLA-DRB1*13:02L HLA-DRB1*04:02L HLA-DRB1*04:04L HLA-DRB1*04:05L HLA-DRB1*01:01L HLA-DRB1*08:04L HLA-DRB3*02:01L HLA-DPA1*01:03-B1*03:01L HLA-DPA1*03:01-B1*04:02L
  REGION 1..15: note = CONT. FROM ABOVE: HLA-DRB1*14:01L HLA-DRB1*11:02L HLA-DRB1*11:03 L HLA-DRB1*11:04L HLA-DRB1*14:02L HLA-DQA1*01:01-B1*05:01L HLA-D RB1*08:01L HLA-DRB1*11:01L HLA-DQA1*05:01-B1*02:01L HLA-DRB1*09: 01L HLA-DPA1*01:03-B1*04:02L HLA-DRB3*01:01L
  REGION 1..15: note = CONT. FROM ABOVE: HLA-DPA1*02:01-B1*13:01L HLA-DPA1*01:03-B1*02: 01L HLA-DPA1*01:03-B1*104:01L HLA-DPA1*01:02-B1*04:01L HLA-DRB1* 07:01L HLA-DRB1*10:01L HLA-DRB1*08:02L HLA-DRB1*08:03L
LPFKLTCATTRQVVN

SEQ ID NO: 8908 - protein, 10 aa, Severe acute respiratory syndrome coronavirus 2
  REGION 1..10: note = Table B: HLA-DQA1*03:02-B1*03:03M HLA-DQA1*05:01-B1*03:01L HLA-DRB1*13:03L HLA-DQA1*01:02-B1*06:02M HLA-DRB1*01:02M HLA-DRB1*08:77L HLA-DPA1*01:03-B1*03:01L HLA-DPA1*03:01-B1*04:02L HLA-DRB1*14:01L HLA-DRB1*11:02L
  REGION 1..10: note = CONT. FROM ABOVE: HLA-DRB1*14:02L HLA-DRB1*08:01L HLA-DQA1*05:05 -B1*03:19L HLA-DQA1*05:01-B1*02:01L HLA-DRB4*01:01L HLA-DPA1*01: 03-B1*04:01L HLA-DQA1*05:05-B1*03:116L HLA-DRB1*09:01L HLA-DPA1* 01:03-B1*04:02L HLA-DRB1*12:01L HLA-DPA1*02:01-B1*13:01L
  REGION 1..10: note = CONT. FROM ABOVE: HLA-DPA1*03:01-B1*105:01M HLA-DQA1*03:01-B1*03 :02L HLA-DPA1*01:03-B1*104:01L HLA-DQA1*05:05-B1*03:01L HLA-DPA1 *01:02-B1*04:01L HLA-DRB1*10:01L HLA-DRB1*16:01L HLA-DQA1*01:03- B1*06:01L HLA-DRB1*08:03L HLA-DQA1*02:01-B1*03:03L
  REGION 1..10: note = CONT. FROM ABOVE: HLA-DRB1*15:03M
QVVNVVTTKI

SEQ ID NO: 8909 - protein, 10 aa, Severe acute respiratory syndrome coronavirus 2
  REGION 1..10: note = Table B: HLA-DQA1*03:02-B1*03:03L HLA-DQA1*05:01-B1*03:01L HLA-DRB1*04:03L HLA-DRB1*13:02L HLA-DRB1*13:03L HLA-DRB1*04:02L HLA-DRB1*04:05L HLA-DRB1*01:02L HLA-DRB4*03:01NL HLA-DRB1*08:77L HLA-DRB3*02:01L HLA-DRB1*14:01L HLA-DQA1*05:01-B1*02:01L
  REGION 1..10: note = CONT. FROM ABOVE: HLA-DRB1*12:01L HLA-DRB1*12:02L HLA-DPA1*03:01 -B1*105:01L HLA-DQA1*03:01-B1*03:02L HLA-DRB1*14:54L HLA-DRB1*14 :17L HLA-DPA1*01:02-B1*04:01L HLA-DRB1*16:01L HLA-DQA1*01:03-B1* 06:01L HLA-DQA1*02:01-B1*03:03L HLA-DRB1*15:03L
VVNVVTTKIA

SEQ ID NO: 8910 - protein, 10 aa, Severe acute respiratory syndrome coronavirus 2
  REGION 1..10: note = Table B: HLA-DQA1*03:02-B1*03:03L HLA-DQA1*03:01-B1*03:02L HLA-DQA1*02:01-B1*03:03L
VNVVTTKIAL

SEQ ID NO: 8911 - protein, 11 aa, Severe acute respiratory syndrome coronavirus 2
  REGION 1..11: note = Table B: HLA-DQA1*03:02-B1*03:03L HLA-DQA1*01:02-B1*06:02L HLA-DQA1*05:05-B1*03:19L HLA-DPA1*03:01-B1*105:01L HLA-DQA1*01:03-B1*06:01L
IALKGGKIVNN

SEQ ID NO: 8912 - protein, 10 aa, Severe acute respiratory syndrome coronavirus 2
  REGION 1..10: note = Table B: HLA-DQA1*03:02-B1*03:03L HLA-DQA1*01:02-B1*06:02L HLA-DQA1*03:01-B1*03:02L HLA-DPA1*01:02-B1*04:01L HLA-DQA1*01:03-B1*06:01L HLA-DQA1*02:01-B1*03:03L HLA-DRB1*15:03L
KIVNNWLKQL

SEQ ID NO: 8913 - protein, 10 aa, Severe acute respiratory syndrome coronavirus 2
  REGION 1..10: note = Table B: HLA-DQA1*03:02-B1*03:03L HLA-DQA1*05:01-B1*03:01L HLA-DRB1*04:03L HLA-DRB1*01:03L HLA-DRB1*04:05L HLA-DQA1*01:02-B1*06:02L HLA-DRB1*01:01L HLA-DRB1*01:02L HLA-DPA1*03:01-B1*04:02L HLA-DRB1*14:01L HLA-DRB1*14:02L
  REGION 1..10: note = CONT. FROM ABOVE: HLA-DQA1*01-B1*05L HLA-DQA1*05:05-B1*03:19L HL A-DQA1*05:01-B1*02:01L HLA-DPA1*01:03-B1*04:01L HLA-DQA1*05:05-B 1*03:116L HLA-DRB1*09:01L HLA-DPA1*01:03-B1*04:02L HLA-DRB1*12:0 1L HLA-DPA1*02:01-B1*13:01M HLA-DPA1*03:01-B1*105:01L
  REGION 1..10: note = CONT. FROM ABOVE: HLA-DQA1*03:01-B1*03:02L HLA-DPA1*01:03-B1*104 :01L HLA-DPA1*01:02-B1*04:01L HLA-DRB1*10:01L HLA-DRB1*16:01L HL A-DQA1*01:03-B1*06:01M HLA-DRB1*08:03L HLA-DQA1*02:01-B1*03:03L HLA-DRB1*15:03L
IFYLITPVHV

SEQ ID NO: 8914 - protein, 10 aa, Severe acute respiratory syndrome coronavirus 2
  REGION 1..10: note = Table B: HLA-DQA1*03:02-B1*03:03L HLA-DQA1*05:01-B1*03:01L HLA-DRB1*04:03L HLA-DRB1*01:03L HLA-DRB1*04:05L HLA-DQA1*01:02-B1*06:02L HLA-DRB1*01:01L HLA-DRB1*01:02L HLA-DRB1*08:77L HLA-DRB3*02:01L HLA-DPA1*03:01-B1*04:02L
  REGION 1..10: note = CONT. FROM ABOVE: HLA-DRB1*14:01L HLA-DRB1*11:03L HLA-DRB1*14:02 L HLA-DQA1*01-B1*05L HLA-DQA1*05:05-B1*03:19L HLA-DQA1*05:01-B1* 02:01L HLA-DPA1*01:03-B1*04:01L HLA-DQA1*05:05-B1*03:116L HLA-DR B1*09:01L HLA-DPA1*01:03-B1*04:02L HLA-DRB1*12:01L
  REGION 1..10: note = CONT. FROM ABOVE: HLA-DPA1*02:01-B1*13:01L HLA-DPA1*03:01-B1*105 :01L HLA-DQA1*03:01-B1*03:02L HLA-DQA1*05:05-B1*03:01L HLA-DPA1* 01:02-B1*04:01L HLA-DRB1*07:01L HLA-DRB1*10:01L HLA-DRB1*16:01L HLA-DQA1*01:03-B1*06:01L HLA-DQA1*02:01-B1*03:03L
  REGION 1..10: note = CONT. FROM ABOVE: HLA-DRB1*15:03L
FYLITPVHVM

SEQ ID NO: 8915 - protein, 10 aa, Severe acute respiratory syndrome coronavirus 2
  REGION 1..10: note = Table B: HLA-DQA1*03:02-B1*03:03L HLA-DRB1*04:03L HLA-DQA1*01-B1*05L HLA-DQA1*05:01-B1*02:01L HLA-DQA1*03:01-B1*03:02L HLA-DRB1*16:01L
HTDFSSEIIG

SEQ ID NO: 8916 - protein, 10 aa, Severe acute respiratory syndrome coronavirus 2
  REGION 1..10: note = Table B: HLA-DQA1*03:02-B1*03:03L HLA-DQA1*05:01-B1*03:01L HLA-DRB1*13:02L HLA-DRB1*13:03L HLA-DRB1*04:02L HLA-DQA1*01:02-B1*06:02L HLA-DRB4*03:01NL HLA-DRB1*08:01L HLA-DQA1*05:05-B1*03:19L HLA-DQA1*05:01-B1*02:01L
  REGION 1..10: note = CONT. FROM ABOVE: HLA-DPA1*01:03-B1*04:02L HLA-DRB1*12:01L HLA-D PA1*03:01-B1*105:01L HLA-DQA1*03:01-B1*03:02L HLA-DQA1*05:05-B1* 03:01L HLA-DPA1*01:02-B1*04:01L HLA-DRB1*16:01L HLA-DQA1*01:03-B 1*06:01L HLA-DQA1*02:01-B1*03:03L
DFSSEIIGYK

SEQ ID NO: 8917 - protein, 12 aa, Severe acute respiratory syndrome coronavirus 2
  REGION 1..12: note = Table B: HLA-DQA1*03:02-B1*03:03L HLA-DQA1*05:01-B1*03:01L HLA-DRB1*13:02L HLA-DRB1*01:03L HLA-DQA1*01:02-B1*06:02L HLA-DRB1*01:02L HLA-DRB1*08:77L HLA-DRB3*02:01L HLA-DPA1*03:01-B1*04:02L HLA-DRB1*14:01L HLA-DRB1*11:03L
  REGION 1..12: note = CONT. FROM ABOVE: HLA-DRB1*11:04L HLA-DRB1*08:01L HLA-DQA1*05:01 -B1*02:01L HLA-DRB1*12:02L HLA-DPA1*03:01-B1*105:01L HLA-DQA1*05 :05-B1*03:01L HLA-DRB1*08:03L
SSEIIGYKAIDG

SEQ ID NO: 8918 - protein, 12 aa, Severe acute respiratory syndrome coronavirus 2
  REGION 1..12: note = Table B: HLA-DQA1*03:02-B1*03:03L HLA-DQA1*05:01-B1*03:01L HLA-DRB1*01:03L HLA-DQA1*01:02-B1*06:02L HLA-DRB1*01:02L HLA-DRB3*02:01L HLA-DPA1*03:01-B1*04:02L HLA-DRB1*14:01L HLA-DRB1*08:01L HLA-DQA1*05:01-B1*02:01L
  REGION 1..12: note = CONT. FROM ABOVE: HLA-DPA1*03:01-B1*105:01L
SEIIGYKAIDGG

SEQ ID NO: 8919 - protein, 11 aa, Severe acute respiratory syndrome coronavirus 2
  REGION 1..11: note = Table B: HLA-DQA1*03:02-B1*03:03L HLA-DQA1*05:01-B1*03:01L HLA-DRB1*04:03L HLA-DRB1*13:03L HLA-DRB1*01:03L HLA-DRB1*04:02L HLA-DRB1*04:05L HLA-DRB4*03:01NL HLA-DQA1*01-B1*05L HLA-DQA1*05:01-B1*02:01L HLA-DRB1*04:10L HLA-DRB1*12:01L
  REGION 1..11: note = CONT. FROM ABOVE: HLA-DQA1*03:01-B1*03:02L HLA-DRB1*14:54L HLA-D RB1*14:17L HLA-DRB1*16:01L HLA-DRB1*04:08L HLA-DQA1*02:01-B1*03: 03L
IGYKAIDGGVT

SEQ ID NO: 8920 - protein, 10 aa, Severe acute respiratory syndrome coronavirus 2
  REGION 1..10: note = Table B: HLA-DQA1*03:02-B1*03:03L HLA-DQA1*05:01-B1*03:01L HLA-DRB1*13:02L HLA-DRB1*13:03L HLA-DRB1*01:03L HLA-DRB4*03:01NL HLA-DQA1*03:01-B1*03:02L HLA-DRB1*16:01L HLA-DQA1*02:01-B1*03:03L
KAIDGGVTRD

SEQ ID NO: 8921 - protein, 10 aa, Severe acute respiratory syndrome coronavirus 2
  REGION 1..10: note = Table B: HLA-DQA1*03:02-B1*03:03L HLA-DQA1*05:01-B1*03:01L HLA-DQA1*01:02-B1*06:02L HLA-DRB1*01:02L HLA-DPA1*03:01-B1*04:02L HLA-DRB1*14:01L HLA-DRB1*14:02L HLA-DQA1*01-B1*05L HLA-DQA1*05:05-B1*03:19L
  REGION 1..10: note = CONT. FROM ABOVE: HLA-DQA1*05:01-B1*02:01L HLA-DQA1*05:05-B1*03: 116L HLA-DRB1*09:01L HLA-DPA1*02:01-B1*13:01L HLA-DPA1*03:01-B1* 105:01L HLA-DQA1*03:01-B1*03:02L HLA-DPA1*01:03-B1*104:01L HLA-D PA1*01:02-B1*04:01L HLA-DRB1*10:01L HLA-DRB1*16:01L
  REGION 1..10: note = CONT. FROM ABOVE: HLA-DQA1*01:03-B1*06:01L HLA-DQA1*02:01-B1*03: 03L HLA-DRB1*15:03L
AIDGGVTRDI

SEQ ID NO: 8922 - protein, 10 aa, Severe acute respiratory syndrome coronavirus 2
  REGION 1..10: note = Table B: HLA-DQA1*03:02-B1*03:03L HLA-DQA1*05:01-B1*03:01L HLA-DQA1*01:02-B1*06:02L HLA-DQA1*05:05-B1*03:19L HLA-DQA1*05:01-B1*02:01L HLA-DQA1*03:01-B1*03:02L HLA-DQA1*05:05-B1*03:01L HLA-DQA1*01:03-B1*06:01L
  REGION 1..10: note = CONT. FROM ABOVE: HLA-DQA1*02:01-B1*03:03L
IDGGVTRDIA

SEQ ID NO: 8923 - protein, 11 aa, Severe acute respiratory syndrome coronavirus 2
  REGION 1..11: note = Table B: HLA-DQA1*03:02-B1*03:03L HLA-DQA1*03:01-B1*03:02L
DGGVTRDIAST

SEQ ID NO: 8924 - protein, 11 aa, Severe acute respiratory syndrome coronavirus 2
  REGION 1..11: note = Table B: HLA-DQA1*03:02-B1*03:03L HLA-DRB1*13:03L HLA-DRB1*04:05L HLA-DRB4*03:01NL HLA-DQA1*05:01-B1*02:01L HLA-DRB1*16:01L HLA-DQA1*01:03-B1*06:01L
GVTRDIASTDT

SEQ ID NO: 8925 - protein, 13 aa, Severe acute respiratory syndrome coronavirus 2
  REGION 1..13: note = Table B: HLA-DQA1*03:02-B1*03:03L HLA-DRB1*01:03L HLA-DRB1*04:05L HLA-DRB1*01:02L HLA-DRB1*08:01L HLA-DQA1*05:05-B1*03:19L HLA-DRB1*16:01L HLA-DRB1*04:08L
DIASTDTCFANKH

SEQ ID NO: 8926 - protein, 16 aa, Severe acute respiratory syndrome coronavirus 2
  REGION 1..16: note = Table B: HLA-DQA1*03:02-B1*03:03L HLA-DQA1*05:05-B1*03:19L HLA-DPA1*02:01-B1*13:01L HLA-DRB1*04:08L
IASTDTCFANKHADFD

SEQ ID NO: 8927 - protein, 10 aa, Severe acute respiratory syndrome coronavirus 2
  REGION 1..10: note = Table B: HLA-DQA1*03:02-B1*03:03L HLA-DQA1*05:01-B1*03:01L HLA-DRB1*13:03L HLA-DRB1*01:03L HLA-DQA1*01:02-B1*06:02L HLA-DRB1*08:77L HLA-DPA1*01:03-B1*03:01L HLA-DPA1*03:01-B1*04:02L HLA-DRB1*03:01L HLA-DRB1*14:02L
  REGION 1..10: note = CONT. FROM ABOVE: HLA-DQA1*01-B1*05L HLA-DQA1*05:05-B1*03:19L HL A-DQA1*05:01-B1*02:01L HLA-DRB4*01:01L HLA-DPA1*01:03-B1*04:01L HLA-DPA1*01:03-B1*04:02L HLA-DRB1*12:01L HLA-DPA1*02:01-B1*13:01 L HLA-DPA1*03:01-B1*105:01L HLA-DPA1*01:03-B1*104:01L
  REGION 1..10: note = CONT. FROM ABOVE: HLA-DQA1*05:05-B1*03:01L HLA-DPA1*01:02-B1*04: 01L HLA-DRB1*10:01L HLA-DRB1*16:01L HLA-DQA1*01:03-B1*06:01L HLA -DRB1*08:02L HLA-DQA1*02:01-B1*03:03L HLA-DRB1*15:03L
TWFSQRGGSY

SEQ ID NO: 8928 - protein, 11 aa, Severe acute respiratory syndrome coronavirus 2
  REGION 1..11: note = Table B: HLA-DQA1*03:02-B1*03:03L HLA-DQA1*05:01-B1*03:01L HLA-DRB1*04:03L HLA-DRB1*13:02L HLA-DRB1*13:03L HLA-DRB1*01:03L HLA-DRB1*04:02L HLA-DRB1*04:05L HLA-DRB1*01:02L HLA-DRB4*03:01NL HLA-DRB1*08:04L HLA-DRB1*08:77L HLA-DRB3*02:01L
  REGION 1..11: note = CONT. FROM ABOVE: HLA-DPA1*01:03-B1*03:01L HLA-DPA1*03:01-B1*04: 02L HLA-DRB1*14:01L HLA-DQA1*01-B1*05L HLA-DQA1*05:01-B1*02:01L HLA-DPA1*01:03-B1*04:01L HLA-DRB1*12:01L HLA-DRB1*12:02L HLA-DRB 3*01:01L HLA-DPA1*03:01-B1*105:01L HLA-DQA1*03:01-B1*03:02L
  REGION 1..11: note = CONT. FROM ABOVE: HLA-DRB1*14:54L HLA-DRB1*14:17L HLA-DPA1*01:02 -B1*04:01L HLA-DRB1*07:01L HLA-DRB1*16:01L HLA-DRB1*04:08L HLA-D QA1*02:01-B1*03:03L
GSYTNDKACPL

SEQ ID NO: 8929 - protein, 13 aa, Severe acute respiratory syndrome coronavirus 2
  REGION 1..13: note = Table B: HLA-DQA1*03:02-B1*03:03L HLA-DRB1*01:02L HLA-DPA1*01:03-B1*03:01L HLA-DRB1*12:01L HLA-DPA1*02:01-B1*13:01L HLA-DQA1*03:01-B1*03:02L HLA-DPA1*01:03-B1*104:01L
NDKACPLIAAVIT

SEQ ID NO: 8930 - protein, 10 aa, Severe acute respiratory syndrome coronavirus 2
  REGION 1..10: note = Table B: HLA-DQA1*03:02-B1*03:03L HLA-DQA1*05:01-B1*03:01L HLA-DRB1*04:03L HLA-DRB1*13:02L HLA-DRB1*13:03L HLA-DRB1*01:03L HLA-DRB1*04:02L HLA-DRB1*04:05L HLA-DQA1*01:02-B1*06:02L HLA-DRB1*01:02L HLA-DRB4*03:01NL HLA-DRB1*08:77L HLA-DRB3*02:01L
  REGION 1..10: note = CONT. FROM ABOVE: HLA-DPA1*01:03-B1*03:01L HLA-DPA1*03:01-B1*04: 02L HLA-DRB1*14:01L HLA-DQA1*01:01-B1*05:01L HLA-DRB1*08:01L HLA -DQA1*01-B1*05L HLA-DQA1*05:05-B1*03:19L HLA-DQA1*05:01-B1*02:01 L HLA-DQA1*05:05-B1*03:116L HLA-DRB1*04:10L
  REGION 1..10: note = CONT. FROM ABOVE: HLA-DPA1*01:03-B1*04:02L HLA-DRB1*12:01L HLA-D RB1*12:02L HLA-DPA1*03:01-B1*105:01L HLA-DQA1*03:01-B1*03:02L HL A-DRB1*14:54L HLA-DQA1*05:05-B1*03:01L HLA-DRB1*14:17L HLA-DPA1* 01:02-B1*04:01L HLA-DRB1*07:01L HLA-DRB1*16:01L
  REGION 1..10: note = CONT. FROM ABOVE: HLA-DQA1*01:03-B1*06:01M HLA-DRB1*04:08L HLA-D QA1*02:01-B1*03:03M HLA-DRB1*15:03L
IAAVITREVG

SEQ ID NO: 8931 - protein, 14 aa, Severe acute respiratory syndrome coronavirus 2
  REGION 1..14: note = Table B: HLA-DQA1*03:02-B1*03:03L HLA-DRB1*08:77L HLA-DPA1*03:01-B1*04:02L HLA-DRB1*11:04L HLA-DRB1*14:02L HLA-DRB1*08:01L HLA-DRB1*11:01L HLA-DRB1*04:10L HLA-DRB1*09:01L HLA-DRB3*01:01L HLA-DRB1*08:03L
AAVITREVGFVVPG

SEQ ID NO: 8932 - protein, 10 aa, Severe acute respiratory syndrome coronavirus 2
  REGION 1..10: note = Table B: HLA-DQA1*03:02-B1*03:03M HLA-DRB1*11:02L HLA-DQA1*05:05-B1*03:19M HLA-DQA1*05:05-B1*03:116L HLA-DRB1*09:01L HLA-DPA1*01:03-B1*04:02L HLA-DQA1*03:01-B1*03:02L HLA-DPA1*01:03-B1*104:01L
REVGFVVPGL

SEQ ID NO: 8933 - protein, 10 aa, Severe acute respiratory syndrome coronavirus 2
  REGION 1..10: note = Table B: HLA-DQA1*03:02-B1*03:03M HLA-DQA1*05:01-B1*03:01L HLA-DRB1*04:01L HLA-DRB1*13:03L HLA-DRB1*01:03L HLA-DRB1*04:05L HLA-DQA1*01:02-B1*06:02L HLA-DRB1*01:02L HLA-DRB1*08:77L HLA-DRB3*02:01L HLA-DPA1*01:03-B1*03:01L
  REGION 1..10: note = CONT. FROM ABOVE: HLA-DPA1*03:01-B1*04:02L HLA-DRB1*14:01L HLA-D RB1*11:02L HLA-DRB1*14:02L HLA-DRB1*08:01L HLA-DRB1*11:01L HLA-D QA1*01-B1*05L HLA-DQA1*05:05-B1*03:19M HLA-DQA1*05:01-B1*02:01L HLA-DRB4*01:01L HLA-DPA1*01:03-B1*04:01L
  REGION 1..10: note = CONT. FROM ABOVE: HLA-DQA1*05:05-B1*03:116M HLA-DRB1*09:01L HLA- DPA1*01:03-B1*04:02L HLA-DRB1*12:01L HLA-DPA1*02:01-B1*13:01L HL A-DPA1*03:01-B1*105:01L HLA-DQA1*03:01-B1*03:02M HLA-DPA1*01:03- B1*104:01L HLA-DPA1*01:02-B1*04:01L HLA-DRB1*07:01L
  REGION 1..10: note = CONT. FROM ABOVE: HLA-DRB1*10:01L HLA-DRB1*16:01L HLA-DQA1*01:03 -B1*06:01L HLA-DRB1*08:03L HLA-DQA1*02:01-B1*03:03M HLA-DRB1*15: 03M
FVVPGLPGTI

SEQ ID NO: 8934 - protein, 10 aa, Severe acute respiratory syndrome coronavirus 2
  REGION 1..10: note = Table B: HLA-DQA1*03:02-B1*03:03L HLA-DQA1*05:01-B1*03:01L HLA-DQA1*01:02-B1*06:02L HLA-DQA1*05:05-B1*03:19L HLA-DQA1*03:01-B1*03:02L HLA-DQA1*05:05-B1*03:01L HLA-DQA1*01:03-B1*06:01L HLA-DQA1*02:01-B1*03:03L
VVPGLPGTIL

SEQ ID NO: 8935 - protein, 14 aa, Severe acute respiratory syndrome coronavirus 2
  REGION 1..14: note = Table B: HLA-DQA1*03:02-B1*03:03L HLA-DQA1*05:01-B1*03:01L HLA-DQA1*05:05-B1*03:19L HLA-DPA1*03:01-B1*105:01L HLA-DQA1*02:01-B1*03:03L
VPGLPGTILRTTNG

SEQ ID NO: 8936 - protein, 13 aa, Severe acute respiratory syndrome coronavirus 2
  REGION 1..13: note = Table B: HLA-DQA1*03:02-B1*03:03L HLA-DQA1*05:01-B1*03:01L HLA-DRB1*04:03L HLA-DRB1*13:02L HLA-DRB1*13:03L HLA-DRB1*01:03L HLA-DRB1*04:02L HLA-DRB1*04:05L HLA-DRB1*01:02L HLA-DRB4*03:01NL HLA-DRB1*08:04L HLA-DRB1*08:77L HLA-DRB3*02:01L
  REGION 1..13: note = CONT. FROM ABOVE: HLA-DPA1*01:03-B1*03:01L HLA-DPA1*03:01-B1*04: 02L HLA-DRB1*14:01L HLA-DRB1*11:03L HLA-DRB1*14:02L HLA-DQA1*01: 01-B1*05:01L HLA-DRB1*08:01L HLA-DQA1*01-B1*05L HLA-DQA1*05:05-B 1*03:19L HLA-DQA1*05:01-B1*02:01L HLA-DPA1*01:03-B1*04:01L
  REGION 1..13: note = CONT. FROM ABOVE: HLA-DRB1*04:10L HLA-DRB1*09:01L HLA-DRB1*12:01 L HLA-DRB1*12:02L HLA-DPA1*02:01-B1*13:01L HLA-DPA1*03:01-B1*105 :01L HLA-DRB1*14:54L HLA-DQA1*05:05-B1*03:01L HLA-DRB1*14:17L HL A-DPA1*01:02-B1*04:01L HLA-DRB1*07:01L HLA-DRB1*16:01L
  REGION 1..13: note = CONT. FROM ABOVE: HLA-DRB1*04:08L HLA-DRB1*15:03L
LPGTILRTTNGDF

SEQ ID NO: 8937 - protein, 10 aa, Severe acute respiratory syndrome coronavirus 2
  REGION 1..10: note = Table B: HLA-DQA1*03:02-B1*03:03L HLA-DQA1*05:01-B1*03:01L HLA-DRB1*04:03L HLA-DPA1*03:01-B1*04:02L HLA-DRB1*14:01L HLA-DQA1*01-B1*05L HLA-DQA1*05:01-B1*02:01L HLA-DRB1*12:01L HLA-DQA1*03:01-B1*03:02L HLA-DPA1*01:02-B1*04:01L
  REGION 1..10: note = CONT. FROM ABOVE: HLA-DRB1*16:01L HLA-DQA1*02:01-B1*03:03L HLA-D RB1*15:03L
ILRTTNGDFL

SEQ ID NO: 8938 - protein, 10 aa, Severe acute respiratory syndrome coronavirus 2
  REGION 1..10: note = Table B: HLA-DQA1*03:02-B1*03:03L HLA-DQA1*05:01-B1*03:01L HLA-DRB1*13:02L HLA-DRB1*13:03L HLA-DRB1*01:03M HLA-DRB1*04:05L HLA-DQA1*01:02-B1*06:02M HLA-DRB1*08:77L HLA-DPA1*01:03-B1*03:01L HLA-DPA1*03:01-B1*04:02L
  REGION 1..10: note = CONT. FROM ABOVE: HLA-DRB1*03:01L HLA-DRB1*14:01L HLA-DRB1*14:02 L HLA-DRB1*11:01L HLA-DQA1*01-B1*05L HLA-DQA1*05:05-B1*03:19L HL A-DQA1*05:01-B1*02:01L HLA-DRB4*01:01L HLA-DPA1*01:03-B1*04:01L HLA-DQA1*05:05-B1*03:116L HLA-DPA1*01:03-B1*04:02L
  REGION 1..10: note = CONT. FROM ABOVE: HLA-DPA1*02:01-B1*13:01L HLA-DPA1*03:01-B1*105 :01L HLA-DQA1*03:01-B1*03:02L HLA-DPA1*01:03-B1*104:01L HLA-DPA1 *01:02-B1*04:01L HLA-DRB1*10:01L HLA-DRB1*16:01L HLA-DQA1*01:03- B1*06:01L HLA-DRB1*08:02L HLA-DQA1*02:01-B1*03:03M
  REGION 1..10: note = CONT. FROM ABOVE: HLA-DRB1*15:03L
RTTNGDFLHF

SEQ ID NO: 8939 - protein, 10 aa, Severe acute respiratory syndrome coronavirus 2
  REGION 1..10: note = Table B: HLA-DQA1*03:02-B1*03:03L HLA-DQA1*01:02-B1*06:02L HLA-DPA1*03:01-B1*105:01L HLA-DQA1*01:03-B1*06:01L HLA-DRB1*15:03L
TTNGDFLHFL

SEQ ID NO: 8940 - protein, 16 aa, Severe acute respiratory syndrome coronavirus 2
  REGION 1..16: note = Table B: HLA-DQA1*03:02-B1*03:03L HLA-DRB1*04:01L HLA-DRB1*13:03L HLA-DRB1*04:02L HLA-DRB1*04:04L HLA-DRB1*04:05L HLA-DRB1*08:04L HLA-DRB1*08:77L HLA-DRB3*02:01L HLA-DRB1*03:01L HLA-DRB1*11:02L HLA-DRB1*11:03L HLA-DRB1*11:04L HLA-DRB1*08:01L
  REGION 1..16: note = CONT. FROM ABOVE: HLA-DRB1*11:01L HLA-DQA1*01-B1*05L HLA-DRB1*09 :01L HLA-DPA1*01:03-B1*04:02L HLA-DRB3*01:01L HLA-DQA1*03:01-B1* 03:02L HLA-DRB1*14:54L HLA-DRB1*14:17L HLA-DPA1*01:02-B1*04:01L HLA-DRB1*07:01L HLA-DRB1*08:02L HLA-DRB1*08:03L HLA-DRB1*15:01L
LPRVFSAVGNICYTPS

SEQ ID NO: 8941 - protein, 12 aa, Severe acute respiratory syndrome coronavirus 2
  REGION 1..12: note = Table B: HLA-DQA1*03:02-B1*03:03L HLA-DQA1*05:01-B1*03:01L HLA-DRB1*13:02L HLA-DRB1*13:03L HLA-DRB1*01:02L HLA-DRB4*03:01NL HLA-DRB1*08:77L HLA-DRB3*02:01L HLA-DPA1*01:03-B1*03:01L HLA-DRB1*14:01L HLA-DRB1*11:03L HLA-DPA1*01:03-B1*04:01L
  REGION 1..12: note = CONT. FROM ABOVE: HLA-DRB1*09:01L HLA-DPA1*03:01-B1*105:01L HLA- DQA1*03:01-B1*03:02L HLA-DQA1*05:05-B1*03:01L HLA-DRB1*07:01L HL A-DQA1*01:03-B1*06:01L HLA-DRB1*04:08L
GNICYTPSKLIE

SEQ ID NO: 8942 - protein, 12 aa, Severe acute respiratory syndrome coronavirus 2
  REGION 1..12: note = Table B: HLA-DQA1*03:02-B1*03:03L HLA-DQA1*01:02-B1*06:02L HLA-DQA1*05:01-B1*02:01L HLA-DQA1*03:01-B1*03:02L HLA-DQA1*01:03-B1*06:01L HLA-DQA1*02:01-B1*03:03L
TPSKLIEYTDFA

SEQ ID NO: 8943 - protein, 10 aa, Severe acute respiratory syndrome coronavirus 2
  REGION 1..10: note = Table B: HLA-DQA1*03:02-B1*03:03M HLA-DRB1*13:03L HLA-DPA1*03:01-B1*04:02L HLA-DRB1*11:02L HLA-DRB1*11:01L HLA-DQA1*01-B1*05L HLA-DQA1*05:05-B1*03:19L HLA-DQA1*05:01-B1*02:01L HLA-DPA1*01:03-B1*04:01L
  REGION 1..10: note = CONT. FROM ABOVE: HLA-DRB1*09:01L HLA-DPA1*01:03-B1*04:02L HLA-D PA1*03:01-B1*105:01L HLA-DQA1*03:01-B1*03:02L HLA-DPA1*01:03-B1* 104:01L HLA-DPA1*01:02-B1*04:01L HLA-DRB1*16:01L HLA-DQA1*01:03- B1*06:01L HLA-DQA1*02:01-B1*03:03L HLA-DRB1*15:03L
IEYTDFATSA

SEQ ID NO: 8944 - protein, 13 aa, Severe acute respiratory syndrome coronavirus 2
  REGION 1..13: note = Table B: HLA-DQA1*03:02-B1*03:03L HLA-DRB1*04:03L
TDFATSACVLAAE

SEQ ID NO: 8945 - protein, 11 aa, Severe acute respiratory syndrome coronavirus 2
  REGION 1..11: note = Table B: HLA-DQA1*03:02-B1*03:03L HLA-DQA1*05:01-B1*03:01L HLA-DRB1*13:02L HLA-DRB1*13:03L HLA-DRB1*01:03L HLA-DRB1*04:02L HLA-DRB1*04:05L HLA-DQA1*01:02-B1*06:02L HLA-DRB4*03:01NL HLA-DRB1*08:77L HLA-DRB3*02:01L HLA-DPA1*01:03-B1*03:01L
  REGION 1..11: note = CONT. FROM ABOVE: HLA-DRB1*14:01L HLA-DQA1*01-B1*05L HLA-DQA1*05 :05-B1*03:19L HLA-DQA1*05:01-B1*02:01L HLA-DRB1*12:01L HLA-DPA1* 02:01-B1*13:01L HLA-DPA1*03:01-B1*105:01L HLA-DRB1*14:54L HLA-DQ A1*05:05-B1*03:01L HLA-DRB1*14:17L HLA-DPA1*01:02-B1*04:01L
  REGION 1..11: note = CONT. FROM ABOVE: HLA-DRB1*07:01L HLA-DQA1*01:03-B1*06:01L HLA-D RB1*04:08L
IFKDASGKPVP

SEQ ID NO: 8946 - protein, 10 aa, Severe acute respiratory syndrome coronavirus 2
  REGION 1..10: note = Table B: HLA-DQA1*03:02-B1*03:03L HLA-DQA1*05:01-B1*03:01L HLA-DRB1*13:03L HLA-DRB1*01:03L HLA-DRB1*04:02L HLA-DQA1*01:02-B1*06:02L HLA-DRB4*03:01NL HLA-DRB1*08:77L HLA-DPA1*01:03-B1*03:01L HLA-DPA1*03:01-B1*04:02L
  REGION 1..10: note = CONT. FROM ABOVE: HLA-DRB1*03:01L HLA-DRB1*14:02L HLA-DQA1*01-B1 *05L HLA-DQA1*05:05-B1*03:19L HLA-DQA1*05:01-B1*02:01L HLA-DRB4* 01:01L HLA-DPA1*01:03-B1*04:01L HLA-DPA1*01:03-B1*04:02L HLA-DRB 1*12:01L HLA-DQA1*03:01-B1*03:02L HLA-DPA1*01:03-B1*104:01L
  REGION 1..10: note = CONT. FROM ABOVE: HLA-DPA1*01:02-B1*04:01L HLA-DRB1*10:01L HLA-D RB1*16:01L HLA-DQA1*02:01-B1*03:03L HLA-DRB1*15:03L
KDASGKPVPY

SEQ ID NO: 8947 - protein, 12 aa, Severe acute respiratory syndrome coronavirus 2
  REGION 1..12: note = Table B: HLA-DQA1*03:02-B1*03:03L HLA-DQA1*05:01-B1*03:01L
DASGKPVPYCYD

SEQ ID NO: 8948 - protein, 16 aa, Severe acute respiratory syndrome coronavirus 2
  REGION 1..16: note = Table B: HLA-DQA1*03:02-B1*03:03L HLA-DQA1*05:01-B1*03:01L HLA-DRB1*04:01L HLA-DRB1*13:02L HLA-DPA1*01:03-B1*03:01L HLA-DPA1*03:01-B1*04:02L HLA-DRB1*03:01L HLA-DRB1*14:02L HLA-DQA1*05:05-B1*03:19L HLA-DRB4*01:01L
  REGION 1..16: note = CONT. FROM ABOVE: HLA-DPA1*01:03-B1*04:02L HLA-DRB3*01:01L HLA-D PA1*01:03-B1*104:01L HLA-DQA1*05:05-B1*03:01L HLA-DQA1*01:03-B1* 06:01L HLA-DRB1*08:03L
KPVPYCYDTNVLEGSV

SEQ ID NO: 8949 - protein, 15 aa, Severe acute respiratory syndrome coronavirus 2
  REGION 1..15: note = Table B: HLA-DQA1*03:02-B1*03:03L HLA-DQA1*05:05-B1*03:19L HLA-DQA1*05:01-B1*02:01L
VPYCYDTNVLEGSVA

SEQ ID NO: 8950 - protein, 12 aa, Severe acute respiratory syndrome coronavirus 2
  REGION 1..12: note = Table B: HLA-DQA1*03:02-B1*03:03L HLA-DQA1*03:01-B1*03:02L
DTNVLEGSVAYE

SEQ ID NO: 8951 - protein, 10 aa, Severe acute respiratory syndrome coronavirus 2
  REGION 1..10: note = Table B: HLA-DQA1*03:02-B1*03:03L HLA-DQA1*03:01-B1*03:02L
LEGSVAYESL

SEQ ID NO: 8952 - protein, 10 aa, Severe acute respiratory syndrome coronavirus 2
  REGION 1..10: note = Table B: HLA-DQA1*03:02-B1*03:03L HLA-DRB1*04:03L HLA-DQA1*01-B1*05L HLA-DQA1*05:01-B1*02:01L HLA-DPA1*03:01-B1*105:01L HLA-DQA1*03:01-B1*03:02L HLA-DPA1*01:02-B1*04:01L HLA-DQA1*01:03-B1*06:01L
  REGION 1..10: note = CONT. FROM ABOVE: HLA-DQA1*02:01-B1*03:03L
SVAYESLRPD

SEQ ID NO: 8953 - protein, 10 aa, Severe acute respiratory syndrome coronavirus 2
  REGION 1..10: note = Table B: HLA-DQA1*03:02-B1*03:03L HLA-DQA1*05:01-B1*03:01L HLA-DRB1*04:03L HLA-DRB1*13:03L HLA-DRB1*01:03L HLA-DRB1*04:02L HLA-DRB1*04:05L HLA-DRB4*03:01NL HLA-DQA1*01-B1*05L HLA-DQA1*05:01-B1*02:01L HLA-DPA1*03:01-B1*105:01L
  REGION 1..10: note = CONT. FROM ABOVE: HLA-DQA1*03:01-B1*03:02L HLA-DRB1*14:17L HLA-D PA1*01:02-B1*04:01L HLA-DRB1*16:01L HLA-DQA1*01:03-B1*06:01L HLA -DQA1*02:01-B1*03:03L
VAYESLRPDT

SEQ ID NO: 8954 - protein, 10 aa, Severe acute respiratory syndrome coronavirus 2
  REGION 1..10: note = Table B: HLA-DQA1*03:02-B1*03:03L HLA-DQA1*05:01-B1*03:01L HLA-DRB1*13:03L HLA-DRB1*01:03L HLA-DQA1*01:02-B1*06:02L HLA-DRB4*03:01NL HLA-DRB1*08:77L HLA-DPA1*01:03-B1*03:01L HLA-DPA1*03:01-B1*04:02L HLA-DRB1*03:01L HLA-DRB1*14:02L
  REGION 1..10: note = CONT. FROM ABOVE: HLA-DQA1*01-B1*05L HLA-DQA1*05:05-B1*03:19L HL A-DQA1*05:01-B1*02:01L HLA-DRB4*01:01L HLA-DPA1*01:03-B1*04:01L HLA-DQA1*05:05-B1*03:116L HLA-DPA1*01:03-B1*04:02L HLA-DRB1*12:0 1L HLA-DQA1*03:01-B1*03:02L HLA-DPA1*01:03-B1*104:01L
  REGION 1..10: note = CONT. FROM ABOVE: HLA-DPA1*01:02-B1*04:01L HLA-DRB1*10:01L HLA-D RB1*16:01L HLA-DQA1*01:03-B1*06:01L HLA-DQA1*02:01-B1*03:03L HLA -DRB1*15:03L
YESLRPDTRY

SEQ ID NO: 8955 - protein, 12 aa, Severe acute respiratory syndrome coronavirus 2
  REGION 1..12: note = Table B: HLA-DQA1*03:02-B1*03:03L HLA-DRB1*04:01L HLA-DRB1*04:04L HLA-DQA1*01:02-B1*06:02L HLA-DRB1*08:04L HLA-DPA1*01:03-B1*03:01L HLA-DPA1*03:01-B1*04:02L HLA-DRB1*03:01L HLA-DRB1*11:04L HLA-DRB1*14:02L HLA-DRB1*08:01L
  REGION 1..12: note = CONT. FROM ABOVE: HLA-DRB1*11:01L HLA-DRB5*01:01L HLA-DQA1*01-B1 *05L HLA-DRB4*02:01NL HLA-DPA1*01:03-B1*04:01L HLA-DRB1*04:10L H LA-DRB1*09:01L HLA-DRB3*01:01L HLA-DPA1*02:01-B1*13:01L HLA-DPA1 *01:03-B1*104:01L HLA-DQA1*01:03-B1*06:01L HLA-DRB1*08:03L
  REGION 1..12: note = CONT. FROM ABOVE: HLA-DRB1*15:01L
TRYVLMDGSIIQ

SEQ ID NO: 8956 - protein, 10 aa, Severe acute respiratory syndrome coronavirus 2
  REGION 1..10: note = Table B: HLA-DQA1*03:02-B1*03:03L HLA-DQA1*05:01-B1*03:01L HLA-DRB1*13:03L HLA-DRB1*01:03L HLA-DQA1*01:02-B1*06:02L HLA-DRB1*08:77L HLA-DPA1*03:01-B1*04:02L HLA-DRB1*14:01L HLA-DRB1*14:02M HLA-DQA1*05:05-B1*03:19L
  REGION 1..10: note = CONT. FROM ABOVE: HLA-DQA1*05:01-B1*02:01L HLA-DRB4*01:01L HLA-D PA1*01:03-B1*04:01L HLA-DQA1*05:05-B1*03:116L HLA-DPA1*01:03-B1* 04:02L HLA-DPA1*02:01-B1*13:01L HLA-DPA1*03:01-B1*105:01L HLA-DQ A1*03:01-B1*03:02L HLA-DPA1*01:02-B1*04:01L HLA-DRB1*10:01L
  REGION 1..10: note = CONT. FROM ABOVE: HLA-DRB1*16:01L HLA-DQA1*01:03-B1*06:01L HLA-D RB1*08:03L HLA-DQA1*02:01-B1*03:03L HLA-DRB1*15:03L
VLMDGSIIQF

SEQ ID NO: 8957 - protein, 10 aa, Severe acute respiratory syndrome coronavirus 2
  REGION 1..10: note = Table B: HLA-DQA1*03:02-B1*03:03L HLA-DQA1*05:01-B1*03:01L HLA-DRB1*13:03L HLA-DQA1*01:02-B1*06:02L HLA-DRB1*08:77L HLA-DPA1*01:03-B1*03:01L HLA-DRB1*03:01L HLA-DRB1*14:02L HLA-DQA1*01-B1*05L HLA-DQA1*05:05-B1*03:19L
  REGION 1..10: note = CONT. FROM ABOVE: HLA-DQA1*05:01-B1*02:01L HLA-DRB4*01:01L HLA-D PA1*01:03-B1*04:01L HLA-DPA1*01:03-B1*04:02L HLA-DPA1*03:01-B1*1 05:01L HLA-DQA1*03:01-B1*03:02L HLA-DPA1*01:03-B1*104:01L HLA-DR B1*16:01L HLA-DQA1*01:03-B1*06:01L HLA-DQA1*02:01-B1*03:03L
  REGION 1..10: note = CONT. FROM ABOVE: HLA-DRB1*15:03L
GSIIQFPNTY

SEQ ID NO: 8958 - protein, 10 aa, Severe acute respiratory syndrome coronavirus 2
  REGION 1..10: note = Table B: HLA-DQA1*03:02-B1*03:03L HLA-DQA1*05:01-B1*03:01L HLA-DRB1*04:03L HLA-DRB1*04:02L HLA-DQA1*01:02-B1*06:02L HLA-DRB1*01:02L HLA-DRB3*02:01L HLA-DPA1*03:01-B1*04:02L HLA-DRB1*14:01L HLA-DQA1*01-B1*05L HLA-DQA1*05:05-B1*03:19L
  REGION 1..10: note = CONT. FROM ABOVE: HLA-DQA1*05:01-B1*02:01L HLA-DRB1*09:01L HLA-D RB1*12:01L HLA-DPA1*02:01-B1*13:01L HLA-DPA1*03:01-B1*105:01L HL A-DQA1*03:01-B1*03:02L HLA-DRB1*14:17L HLA-DPA1*01:02-B1*04:01L HLA-DRB1*16:01L HLA-DQA1*01:03-B1*06:01L
  REGION 1..10: note = CONT. FROM ABOVE: HLA-DQA1*02:01-B1*03:03L HLA-DRB1*15:03L
SIIQFPNTYL

SEQ ID NO: 8959 - protein, 10 aa, Severe acute respiratory syndrome coronavirus 2
  REGION 1..10: note = Table B: HLA-DQA1*03:02-B1*03:03L HLA-DQA1*05:01-B1*03:01L HLA-DRB1*04:03L HLA-DRB1*13:03L HLA-DRB1*04:02L HLA-DQA1*01:02-B1*06:02L HLA-DQA1*01-B1*05L HLA-DQA1*05:01-B1*02:01L HLA-DQA1*03:01-B1*03:02L
  REGION 1..10: note = CONT. FROM ABOVE: HLA-DQA1*05:05-B1*03:01L HLA-DRB1*14:17L HLA-D PA1*01:02-B1*04:01L HLA-DRB1*16:01L HLA-DQA1*01:03-B1*06:01L HLA -DQA1*02:01-B1*03:03L
PNTYLEGSVR

SEQ ID NO: 8960 - protein, 10 aa, Severe acute respiratory syndrome coronavirus 2
  REGION 1..10: note = Table B: HLA-DQA1*03:02-B1*03:03L HLA-DQA1*05:01-B1*03:01L HLA-DQA1*01:02-B1*06:02L HLA-DRB1*01:02L HLA-DPA1*03:01-B1*04:02L HLA-DQA1*05:05-B1*03:19L HLA-DQA1*05:01-B1*02:01L HLA-DQA1*05:05-B1*03:116L
  REGION 1..10: note = CONT. FROM ABOVE: HLA-DPA1*02:01-B1*13:01L HLA-DPA1*03:01-B1*105 :01L HLA-DQA1*03:01-B1*03:02L HLA-DPA1*01:02-B1*04:01L HLA-DRB1* 16:01L HLA-DQA1*01:03-B1*06:01L HLA-DRB1*08:03L HLA-DQA1*02:01-B 1*03:03L HLA-DRB1*15:03L
NTYLEGSVRV

SEQ ID NO: 8961 - protein, 10 aa, Severe acute respiratory syndrome coronavirus 2
  REGION 1..10: note = Table B: HLA-DQA1*03:02-B1*03:03L HLA-DQA1*05:01-B1*03:01L HLA-DRB1*04:05L HLA-DQA1*01:02-B1*06:02L HLA-DRB1*01:02L HLA-DPA1*03:01-B1*04:02L HLA-DRB1*14:02L HLA-DQA1*01-B1*05L HLA-DQA1*05:05-B1*03:19L HLA-DQA1*05:01-B1*02:01L
  REGION 1..10: note = CONT. FROM ABOVE: HLA-DQA1*05:05-B1*03:116L HLA-DPA1*02:01-B1*13 :01L HLA-DPA1*03:01-B1*105:01L HLA-DQA1*03:01-B1*03:02L HLA-DPA1 *01:03-B1*104:01L HLA-DPA1*01:02-B1*04:01L HLA-DRB1*16:01L HLA-D QA1*01:03-B1*06:01L HLA-DRB1*08:03L HLA-DQA1*02:01-B1*03:03L
  REGION 1..10: note = CONT. FROM ABOVE: HLA-DRB1*15:03L
TYLEGSVRVV

SEQ ID NO: 8962 - protein, 10 aa, Severe acute respiratory syndrome coronavirus 2
  REGION 1..10: note = Table B: HLA-DQA1*03:02-B1*03:03L HLA-DQA1*03:01-B1*03:02L
LEGSVRVVTT

SEQ ID NO: 8963 - protein, 12 aa, Severe acute respiratory syndrome coronavirus 2
  REGION 1..12: note = Table B: HLA-DQA1*03:02-B1*03:03L HLA-DRB1*04:05L HLA-DRB1*04:10L HLA-DRB1*14:54L HLA-DQA1*05:05-B1*03:01L
EGSVRVVTTFDS

SEQ ID NO: 8964 - protein, 12 aa, Severe acute respiratory syndrome coronavirus 2
  REGION 1..12: note = Table B: HLA-DQA1*03:02-B1*03:03L HLA-DQA1*05:01-B1*03:01L HLA-DRB1*13:02L HLA-DRB1*13:03L HLA-DRB1*01:03L HLA-DRB1*04:04L HLA-DRB1*04:05L HLA-DQA1*01:02-B1*06:02L HLA-DRB1*01:02L HLA-DRB4*03:01NL HLA-DPA1*01:03-B1*03:01L HLA-DRB1*14:01L
  REGION 1..12: note = CONT. FROM ABOVE: HLA-DQA1*01-B1*05L HLA-DQA1*05:01-B1*02:01L HL A-DRB1*04:10L HLA-DRB1*12:01L HLA-DRB1*12:02L HLA-DPA1*02:01-B1* 13:01L HLA-DPA1*03:01-B1*105:01L HLA-DQA1*03:01-B1*03:02L HLA-DR B1*14:54L HLA-DPA1*01:03-B1*104:01L HLA-DQA1*05:05-B1*03:01L
  REGION 1..12: note = CONT. FROM ABOVE: HLA-DRB1*16:01L HLA-DQA1*01:03-B1*06:01L HLA-D RB1*04:08L HLA-DQA1*02:01-B1*03:03L HLA-DRB1*15:03L
GSVRVVTTFDSE

SEQ ID NO: 8965 - protein, 10 aa, Severe acute respiratory syndrome coronavirus 2
  REGION 1..10: note = Table B: HLA-DQA1*03:02-B1*03:03L HLA-DQA1*05:01-B1*03:01L HLA-DRB1*04:01L HLA-DRB1*04:03L HLA-DRB1*13:02L HLA-DRB1*13:03M HLA-DRB1*01:03M HLA-DRB1*04:02L HLA-DQA1*01:02-B1*06:02M HLA-DRB1*01:01L HLA-DRB4*03:01NL HLA-DRB1*08:77L
  REGION 1..10: note = CONT. FROM ABOVE: HLA-DPA1*01:03-B1*03:01L HLA-DPA1*03:01-B1*04: 02L HLA-DRB1*03:01M HLA-DRB1*14:01L HLA-DRB1*11:02L HLA-DRB1*11: 03L HLA-DRB1*11:04L HLA-DRB1*14:02M HLA-DRB1*11:01L HLA-DRB5*01: 01L HLA-DQA1*01-B1*05L HLA-DQA1*05:05-B1*03:19M
  REGION 1..10: note = CONT. FROM ABOVE: HLA-DQA1*05:01-B1*02:01M HLA-DRB4*01:01L HLA-D PA1*01:03-B1*04:01L HLA-DQA1*05:05-B1*03:116L HLA-DPA1*01:03-B1* 04:02M HLA-DRB1*12:01L HLA-DPA1*02:01-B1*13:01L HLA-DPA1*03:01-B 1*105:01L HLA-DQA1*03:01-B1*03:02L HLA-DPA1*01:03-B1*104:01L
  REGION 1..10: note = CONT. FROM ABOVE: HLA-DQA1*05:05-B1*03:01L HLA-DRB1*14:17L HLA-D PA1*01:02-B1*04:01L HLA-DRB1*10:01L HLA-DRB1*16:01L HLA-DQA1*01: 03-B1*06:01L HLA-DRB1*08:02L HLA-DQA1*02:01-B1*03:03M HLA-DRB1*1 5:03L
RVVTTFDSEY

SEQ ID NO: 8966 - protein, 13 aa, Severe acute respiratory syndrome coronavirus 2
  REGION 1..13: note = Table B: HLA-DQA1*03:02-B1*03:03L HLA-DQA1*02:01-B1*03:03L
ERSEAGVCVSTSG

SEQ ID NO: 8967 - protein, 12 aa, Severe acute respiratory syndrome coronavirus 2
  REGION 1..12: note = Table B: HLA-DQA1*03:02-B1*03:03L HLA-DQA1*05:01-B1*03:01L HLA-DQA1*05:05-B1*03:19L HLA-DPA1*03:01-B1*105:01L HLA-DQA1*03:01-B1*03:02L HLA-DQA1*02:01-B1*03:03L
SEAGVCVSTSGR

SEQ ID NO: 8968 - protein, 13 aa, Severe acute respiratory syndrome coronavirus 2
  REGION 1..13: note = Table B: HLA-DQA1*03:02-B1*03:03L HLA-DQA1*05:01-B1*03:01L HLA-DQA1*03:01-B1*03:02L
VSTSGRWVLNNDY

SEQ ID NO: 8969 - protein, 12 aa, Severe acute respiratory syndrome coronavirus 2
  REGION 1..12: note = Table B: HLA-DQA1*03:02-B1*03:03L HLA-DQA1*05:01-B1*03:01L HLA-DPA1*03:01-B1*04:02L HLA-DRB1*14:02L HLA-DQA1*01-B1*05L HLA-DRB1*12:01L HLA-DPA1*03:01-B1*105:01L HLA-DQA1*03:01-B1*03:02L HLA-DPA1*01:03-B1*104:01L
  REGION 1..12: note = CONT. FROM ABOVE: HLA-DQA1*05:05-B1*03:01L HLA-DPA1*01:02-B1*04: 01L HLA-DRB1*15:03L
TSGRWVLNNDYY

SEQ ID NO: 8970 - protein, 13 aa, Severe acute respiratory syndrome coronavirus 2
  REGION 1..13: note = Table B: HLA-DQA1*03:02-B1*03:03L HLA-DRB1*13:02L HLA-DRB1*13:03L HLA-DRB1*04:04L HLA-DRB1*08:04L HLA-DRB1*11:04L HLA-DRB1*11:01L HLA-DRB3*01:01L HLA-DPA1*02:01-B1*13:01L HLA-DRB1*14:54L HLA-DQA1*05:05-B1*03:01L HLA-DRB1*14:17L
WVLNNDYYRSLPG

SEQ ID NO: 8971 - protein, 10 aa, Severe acute respiratory syndrome coronavirus 2
  REGION 1..10: note = Table B: HLA-DQA1*03:02-B1*03:03L HLA-DQA1*05:01-B1*03:01L HLA-DRB1*04:03L HLA-DRB1*13:03L HLA-DRB1*01:03L HLA-DRB1*04:05M HLA-DQA1*01:02-B1*06:02M HLA-DRB1*01:01L HLA-DRB1*01:02L HLA-DRB4*03:01NL HLA-DRB1*08:77L HLA-DPA1*01:03-B1*03:01L
  REGION 1..10: note = CONT. FROM ABOVE: HLA-DPA1*03:01-B1*04:02L HLA-DRB1*14:01L HLA-D RB1*11:03L HLA-DRB1*14:02L HLA-DQA1*01:01-B1*05:01L HLA-DRB1*08: 01L HLA-DRB1*11:01L HLA-DQA1*01-B1*05L HLA-DQA1*05:05-B1*03:19L HLA-DQA1*05:01-B1*02:01L HLA-DRB4*01:01L
  REGION 1..10: note = CONT. FROM ABOVE: HLA-DPA1*01:03-B1*04:01L HLA-DQA1*05:05-B1*03: 116L HLA-DPA1*01:03-B1*04:02L HLA-DRB1*12:01L HLA-DPA1*02:01-B1* 13:01M HLA-DPA1*03:01-B1*105:01L HLA-DQA1*03:01-B1*03:02L HLA-DP A1*01:03-B1*104:01L HLA-DQA1*05:05-B1*03:01L
  REGION 1..10: note = CONT. FROM ABOVE: HLA-DPA1*01:02-B1*04:01L HLA-DRB1*07:01L HLA-D RB1*10:01L HLA-DRB1*16:01L HLA-DQA1*01:03-B1*06:01M HLA-DRB1*08: 02L HLA-DRB1*08:03L HLA-DQA1*02:01-B1*03:03L HLA-DRB1*15:03L
DYYRSLPGVF

SEQ ID NO: 8972 - protein, 13 aa, Severe acute respiratory syndrome coronavirus 2
  REGION 1..13: note = Table B: HLA-DQA1*03:02-B1*03:03L HLA-DQA1*05:01-B1*03:01L HLA-DRB1*04:03L HLA-DRB1*04:05L HLA-DQA1*01:02-B1*06:02L HLA-DRB1*01:02L HLA-DRB3*02:01L HLA-DPA1*01:03-B1*03:01L HLA-DPA1*03:01-B1*04:02L HLA-DQA1*01-B1*05L
  REGION 1..13: note = CONT. FROM ABOVE: HLA-DQA1*05:01-B1*02:01L HLA-DPA1*01:03-B1*04: 01L HLA-DPA1*01:03-B1*04:02L HLA-DRB1*12:01L HLA-DPA1*02:01-B1*1 3:01L HLA-DPA1*03:01-B1*105:01L HLA-DQA1*03:01-B1*03:02L HLA-DQA 1*05:05-B1*03:01L HLA-DPA1*01:02-B1*04:01L HLA-DRB1*16:01L
  REGION 1..13: note = CONT. FROM ABOVE: HLA-DQA1*01:03-B1*06:01L HLA-DQA1*02:01-B1*03: 03L HLA-DRB1*15:03L
LPGVFCGVDAVNL

SEQ ID NO: 8973 - protein, 10 aa, Severe acute respiratory syndrome coronavirus 2
  REGION 1..10: note = Table B: HLA-DQA1*03:02-B1*03:03L HLA-DQA1*05:05-B1*03:19L HLA-DQA1*03:01-B1*03:02L
VDAVNLLTNM

SEQ ID NO: 8974 - protein, 10 aa, Severe acute respiratory syndrome coronavirus 2
  REGION 1..10: note = Table B: HLA-DQA1*03:02-B1*03:03L HLA-DQA1*05:01-B1*03:01L HLA-DRB1*04:05L HLA-DQA1*01:02-B1*06:02L HLA-DPA1*03:01-B1*04:02L HLA-DQA1*01-B1*05L HLA-DQA1*05:05-B1*03:19L HLA-DQA1*05:01-B1*02:01L
  REGION 1..10: note = CONT. FROM ABOVE: HLA-DPA1*03:01-B1*105:01L HLA-DQA1*03:01-B1*03 :02L HLA-DQA1*05:05-B1*03:01L HLA-DPA1*01:02-B1*04:01L HLA-DQA1* 01:03-B1*06:01L HLA-DQA1*02:01-B1*03:03L
MFTPLIQPIG

SEQ ID NO: 8975 - protein, 11 aa, Severe acute respiratory syndrome coronavirus 2
  REGION 1..11: note = Table B: HLA-DQA1*03:02-B1*03:03L
FTPLIQPIGAL

SEQ ID NO: 8976 - protein, 11 aa, Severe acute respiratory syndrome coronavirus 2
  REGION 1..11: note = Table B: HLA-DQA1*03:02-B1*03:03L HLA-DRB1*04:03L HLA-DRB1*04:02L HLA-DRB4*03:01NL HLA-DQA1*05:01-B1*02:01L HLA-DRB1*14:17L HLA-DQA1*02:01-B1*03:03L
TPLIQPIGALD

SEQ ID NO: 8977 - protein, 12 aa, Severe acute respiratory syndrome coronavirus 2
  REGION 1..12: note = Table B: HLA-DQA1*03:02-B1*03:03L HLA-DQA1*05:01-B1*03:01L HLA-DRB1*13:02L HLA-DRB1*13:03L HLA-DRB1*01:03L HLA-DRB1*04:02L HLA-DRB1*04:04L HLA-DRB1*04:05L HLA-DQA1*01:02-B1*06:02L HLA-DRB1*01:02L HLA-DRB4*03:01NL HLA-DRB1*08:77L
  REGION 1..12: note = CONT. FROM ABOVE: HLA-DPA1*01:03-B1*03:01L HLA-DRB1*14:01L HLA-D RB1*11:03L HLA-DQA1*01-B1*05L HLA-DQA1*05:05-B1*03:19L HLA-DQA1* 05:01-B1*02:01L HLA-DRB1*04:10L HLA-DRB1*12:01L HLA-DRB1*12:02L HLA-DPA1*03:01-B1*105:01L HLA-DQA1*03:01-B1*03:02L
  REGION 1..12: note = CONT. FROM ABOVE: HLA-DRB1*14:54L HLA-DQA1*05:05-B1*03:01L HLA-D RB1*07:01L HLA-DRB1*10:01L HLA-DRB1*16:01L HLA-DQA1*01:03-B1*06: 01L HLA-DRB1*04:08L HLA-DQA1*02:01-B1*03:03L HLA-DRB1*15:03L
IQPIGALDISAS

SEQ ID NO: 8978 - protein, 12 aa, Severe acute respiratory syndrome coronavirus 2
  REGION 1..12: note = Table B: HLA-DQA1*03:02-B1*03:03L HLA-DQA1*05:01-B1*03:01L HLA-DRB1*04:03L HLA-DQA1*05:05-B1*03:19L HLA-DPA1*03:01-B1*105:01L HLA-DQA1*03:01-B1*03:02L HLA-DQA1*05:05-B1*03:01L HLA-DQA1*02:01-B1*03:03L
LDISASIVAGGI

SEQ ID NO: 8979 - protein, 12 aa, Severe acute respiratory syndrome coronavirus 2
  REGION 1..12: note = Table B: HLA-DQA1*03:02-B1*03:03L HLA-DRB1*04:03L HLA-DQA1*05:01-B1*02:01L HLA-DPA1*03:01-B1*105:01L HLA-DQA1*03:01-B1*03:02L HLA-DRB1*04:08L
DISASIVAGGIV

SEQ ID NO: 8980 - protein, 12 aa, Severe acute respiratory syndrome coronavirus 2
  REGION 1..12: note = Table B: HLA-DQA1*03:02-B1*03:03L HLA-DRB1*04:03L HLA-DPA1*03:01-B1*105:01L HLA-DQA1*03:01-B1*03:02L
ISASIVAGGIVA

SEQ ID NO: 8981 - protein, 10 aa, Severe acute respiratory syndrome coronavirus 2
  REGION 1..10: note = Table B: HLA-DQA1*03:02-B1*03:03M HLA-DQA1*05:01-B1*03:01L HLA-DQA1*01:02-B1*06:02L HLA-DRB1*01:02L HLA-DPA1*03:01-B1*04:02L HLA-DRB1*14:01L HLA-DRB1*14:02L HLA-DQA1*05:05-B1*03:19L HLA-DQA1*05:01-B1*02:01L
  REGION 1..10: note = CONT. FROM ABOVE: HLA-DQA1*05:05-B1*03:116L HLA-DRB1*09:01L HLA- DPA1*02:01-B1*13:01L HLA-DPA1*03:01-B1*105:01L HLA-DQA1*03:01-B1 *03:02L HLA-DPA1*01:03-B1*104:01L HLA-DPA1*01:02-B1*04:01L HLA-D RB1*10:01L HLA-DRB1*16:01L HLA-DQA1*01:03-B1*06:01L
  REGION 1..10: note = CONT. FROM ABOVE: HLA-DRB1*08:03L HLA-DQA1*02:01-B1*03:03L HLA-D RB1*15:03L
SIVAGGIVAI

SEQ ID NO: 8982 - protein, 11 aa, Severe acute respiratory syndrome coronavirus 2
  REGION 1..11: note = Table B: HLA-DQA1*03:02-B1*03:03L HLA-DQA1*05:01-B1*03:01L HLA-DQA1*01:02-B1*06:02L HLA-DQA1*05:05-B1*03:19L HLA-DQA1*05:05-B1*03:01L HLA-DQA1*01:03-B1*06:01L HLA-DQA1*02:01-B1*03:03L
VAGGIVAIVVT

SEQ ID NO: 8983 - protein, 11 aa, Severe acute respiratory syndrome coronavirus 2
  REGION 1..11: note = Table B: HLA-DQA1*03:02-B1*03:03L HLA-DRB1*04:03L HLA-DRB1*04:02L HLA-DQA1*03:01-B1*03:02L HLA-DRB1*14:17L HLA-DRB1*16:01L HLA-DQA1*02:01-B1*03:03L
GEYSHVVAFNT

SEQ ID NO: 8984 - protein, 10 aa, Severe acute respiratory syndrome coronavirus 2
  REGION 1..10: note = Table B: HLA-DQA1*03:02-B1*03:03L HLA-DQA1*05:01-B1*03:01L HLA-DRB1*04:03L HLA-DRB1*13:03L HLA-DRB1*04:02L HLA-DRB1*04:05L HLA-DQA1*01:02-B1*06:02L HLA-DRB1*01:02L HLA-DRB3*02:01L HLA-DPA1*01:03-B1*03:01L HLA-DPA1*03:01-B1*04:02L
  REGION 1..10: note = CONT. FROM ABOVE: HLA-DRB1*14:01L HLA-DRB1*14:02L HLA-DRB1*08:01 L HLA-DQA1*01-B1*05L HLA-DQA1*05:05-B1*03:19L HLA-DQA1*05:01-B1* 02:01L HLA-DPA1*01:03-B1*04:01L HLA-DQA1*05:05-B1*03:116L HLA-DP A1*01:03-B1*04:02L HLA-DRB1*12:01L HLA-DPA1*02:01-B1*13:01L
  REGION 1..10: note = CONT. FROM ABOVE: HLA-DPA1*03:01-B1*105:01L HLA-DQA1*03:01-B1*03 :02L HLA-DQA1*05:05-B1*03:01L HLA-DPA1*01:02-B1*04:01L HLA-DRB1* 16:01L HLA-DQA1*01:03-B1*06:01L HLA-DQA1*02:01-B1*03:03L HLA-DRB 1*15:03L
YSHVVAFNTL

SEQ ID NO: 8985 - protein, 10 aa, Severe acute respiratory syndrome coronavirus 2
  REGION 1..10: note = Table B: HLA-DQA1*03:02-B1*03:03L HLA-DRB1*04:03L HLA-DQA1*01-B1*05L HLA-DQA1*03:01-B1*03:02L HLA-DPA1*01:02-B1*04:01L HLA-DQA1*01:03-B1*06:01L HLA-DQA1*02:01-B1*03:03L
SHVVAFNTLL

SEQ ID NO: 8986 - protein, 10 aa, Severe acute respiratory syndrome coronavirus 2
  REGION 1..10: note = Table B: HLA-DQA1*03:02-B1*03:03L HLA-DQA1*05:01-B1*03:01L HLA-DRB1*04:03L HLA-DQA1*01:02-B1*06:02L HLA-DPA1*03:01-B1*04:02L HLA-DRB1*14:01L HLA-DRB1*14:02L HLA-DQA1*05:05-B1*03:19L HLA-DQA1*05:01-B1*02:01L
  REGION 1..10: note = CONT. FROM ABOVE: HLA-DPA1*01:03-B1*04:01L HLA-DRB1*12:01L HLA-D PA1*02:01-B1*13:01L HLA-DPA1*03:01-B1*105:01L HLA-DQA1*01:03-B1* 06:01L HLA-DQA1*02:01-B1*03:03L HLA-DRB1*15:03L
HVVAFNTLLF

SEQ ID NO: 8987 - protein, 11 aa, Severe acute respiratory syndrome coronavirus 2
  REGION 1..11: note = Table B: HLA-DQA1*03:02-B1*03:03L HLA-DRB1*13:03L HLA-DPA1*01:03-B1*03:01L HLA-DRB1*14:02L HLA-DQA1*01-B1*05L
TPVYSFLPGVY

SEQ ID NO: 8988 - protein, 11 aa, Severe acute respiratory syndrome coronavirus 2
  REGION 1..11: note = Table B: HLA-DQA1*03:02-B1*03:03L HLA-DRB1*04:03L HLA-DQA1*01-B1*05L HLA-DQA1*03:01-B1*03:02L
PVYSFLPGVYS

SEQ ID NO: 8989 - protein, 10 aa, Severe acute respiratory syndrome coronavirus 2
  REGION 1..10: note = Table B: HLA-DQA1*03:02-B1*03:03M HLA-DQA1*05:01-B1*03:01L HLA-DRB1*04:05L HLA-DQA1*01:02-B1*06:02L HLA-DRB1*01:01L HLA-DRB1*01:02L HLA-DPA1*03:01-B1*04:02L HLA-DRB1*14:01L HLA-DRB1*11:02L HLA-DRB1*14:02L HLA-DQA1*05:05-B1*03:19L
  REGION 1..10: note = CONT. FROM ABOVE: HLA-DQA1*05:01-B1*02:01L HLA-DQA1*05:05-B1*03: 116L HLA-DRB1*09:01L HLA-DPA1*02:01-B1*13:01M HLA-DPA1*03:01-B1* 105:01L HLA-DQA1*03:01-B1*03:02L HLA-DPA1*01:03-B1*104:01L HLA-D PA1*01:02-B1*04:01L HLA-DRB1*10:01L HLA-DRB1*16:01L
  REGION 1..10: note = CONT. FROM ABOVE: HLA-DQA1*01:03-B1*06:01L HLA-DRB1*08:03L HLA-D QA1*02:01-B1*03:03L HLA-DRB1*15:03L
YSFLPGVYSV

SEQ ID NO: 8990 - protein, 10 aa, Severe acute respiratory syndrome coronavirus 2
  REGION 1..10: note = Table B: HLA-DQA1*03:02-B1*03:03L HLA-DQA1*05:01-B1*03:01L HLA-DQA1*01:02-B1*06:02L HLA-DPA1*03:01-B1*04:02L HLA-DRB1*14:02L HLA-DQA1*05:05-B1*03:19L HLA-DQA1*05:05-B1*03:116L HLA-DPA1*02:01-B1*13:01L
  REGION 1..10: note = CONT. FROM ABOVE: HLA-DPA1*03:01-B1*105:01L HLA-DQA1*03:01-B1*03 :02L HLA-DPA1*01:03-B1*104:01L HLA-DRB1*16:01L HLA-DQA1*01:03-B1 *06:01L HLA-DRB1*08:03L HLA-DQA1*02:01-B1*03:03L HLA-DRB1*15:03L
SFLPGVYSVI

SEQ ID NO: 8991 - protein, 10 aa, Severe acute respiratory syndrome coronavirus 2
  REGION 1..10: note = Table B: HLA-DQA1*03:02-B1*03:03L HLA-DQA1*05:01-B1*03:01L HLA-DRB1*04:03L HLA-DRB1*13:03L HLA-DRB1*01:03L HLA-DQA1*01:02-B1*06:02M HLA-DRB1*08:77L HLA-DPA1*01:03-B1*03:01L HLA-DPA1*03:01-B1*04:02L
  REGION 1..10: note = CONT. FROM ABOVE: HLA-DRB1*03:01L HLA-DRB1*14:01L HLA-DRB1*11:02 L HLA-DRB1*14:02L HLA-DQA1*01-B1*05L HLA-DQA1*05:05-B1*03:19M HL A-DQA1*05:01-B1*02:01L HLA-DRB4*01:01L HLA-DPA1*01:03-B1*04:01L HLA-DQA1*05:05-B1*03:116L HLA-DPA1*01:03-B1*04:02L
  REGION 1..10: note = CONT. FROM ABOVE: HLA-DRB1*12:01L HLA-DPA1*02:01-B1*13:01L HLA-D PA1*03:01-B1*105:01L HLA-DPA1*01:03-B1*104:01L HLA-DQA1*05:05-B1 *03:01L HLA-DPA1*01:02-B1*04:01L HLA-DRB1*10:01L HLA-DRB1*16:01L HLA-DQA1*01:03-B1*06:01L HLA-DQA1*02:01-B1*03:03L
  REGION 1..10: note = CONT. FROM ABOVE: HLA-DRB1*15:03L
FLPGVYSVIY

SEQ ID NO: 8992 - protein, 10 aa, Severe acute respiratory syndrome coronavirus 2
  REGION 1..10: note = Table B: HLA-DQA1*03:02-B1*03:03L HLA-DRB1*04:03L HLA-DRB1*04:05L HLA-DQA1*01:02-B1*06:02L HLA-DRB1*01:02L HLA-DPA1*03:01-B1*04:02L HLA-DQA1*01-B1*05L HLA-DQA1*05:05-B1*03:19L HLA-DQA1*05:01-B1*02:01L
  REGION 1..10: note = CONT. FROM ABOVE: HLA-DPA1*02:01-B1*13:01L HLA-DPA1*03:01-B1*105 :01L HLA-DQA1*03:01-B1*03:02L HLA-DRB1*16:01L HLA-DQA1*01:03-B1* 06:01L HLA-DQA1*02:01-B1*03:03L HLA-DRB1*15:03L
FYLTNDVSFL

SEQ ID NO: 8993 - protein, 10 aa, Severe acute respiratory syndrome coronavirus 2
  REGION 1..10: note = Table B: HLA-DQA1*03:02-B1*03:03L HLA-DQA1*05:05-B1*03:19L HLA-DPA1*01:03-B1*104:01L
TNDVSFLAHI

SEQ ID NO: 8994 - protein, 10 aa, Severe acute respiratory syndrome coronavirus 2
  REGION 1..10: note = Table B: HLA-DQA1*03:02-B1*03:03L HLA-DRB1*04:03L HLA-DQA1*01-B1*05L HLA-DQA1*05:01-B1*02:01L HLA-DPA1*03:01-B1*105:01L HLA-DQA1*03:01-B1*03:02L HLA-DPA1*01:02-B1*04:01L HLA-DQA1*01:03-B1*06:01L
  REGION 1..10: note = CONT. FROM ABOVE: HLA-DQA1*02:01-B1*03:03L
NDVSFLAHIQ

SEQ ID NO: 8995 - protein, 10 aa, Severe acute respiratory syndrome coronavirus 2
  REGION 1..10: note = Table B: HLA-DQA1*03:02-B1*03:03L HLA-DQA1*05:01-B1*03:01L HLA-DRB1*13:03L HLA-DQA1*01:02-B1*06:02M HLA-DRB1*08:77L HLA-DPA1*01:03-B1*03:01L HLA-DPA1*03:01-B1*04:02L HLA-DRB1*14:01L HLA-DRB1*14:02L HLA-DQA1*01-B1*05L
  REGION 1..10: note = CONT. FROM ABOVE: HLA-DQA1*05:05-B1*03:19L HLA-DQA1*05:01-B1*02: 01L HLA-DRB4*01:01L HLA-DPA1*01:03-B1*04:01L HLA-DQA1*05:05-B1*0 3:116L HLA-DRB1*12:01L HLA-DPA1*02:01-B1*13:01L HLA-DPA1*03:01-B 1*105:01M HLA-DPA1*01:02-B1*04:01L HLA-DQA1*01:03-B1*06:01L
  REGION 1..10: note = CONT. FROM ABOVE: HLA-DQA1*02:01-B1*03:03L HLA-DRB1*15:03L
DVSFLAHIQW

SEQ ID NO: 8996 - protein, 10 aa, Severe acute respiratory syndrome coronavirus 2
  REGION 1..10: note = Table B: HLA-DQA1*03:02-B1*03:03L HLA-DRB1*04:03L HLA-DRB1*01:03L HLA-DRB1*04:05L HLA-DQA1*01:02-B1*06:02M HLA-DRB1*01:01L HLA-DRB1*08:77L HLA-DPA1*03:01-B1*04:02L HLA-DRB1*14:02L HLA-DQA1*01-B1*05L HLA-DQA1*05:05-B1*03:19L
  REGION 1..10: note = CONT. FROM ABOVE: HLA-DQA1*05:01-B1*02:01L HLA-DRB4*01:01L HLA-D PA1*01:03-B1*04:01L HLA-DQA1*05:05-B1*03:116L HLA-DPA1*01:03-B1* 04:02L HLA-DPA1*02:01-B1*13:01M HLA-DPA1*03:01-B1*105:01L HLA-DP A1*01:03-B1*104:01L HLA-DPA1*01:02-B1*04:01L HLA-DRB1*10:01L
  REGION 1..10: note = CONT. FROM ABOVE: HLA-DRB1*16:01L HLA-DQA1*01:03-B1*06:01M HLA-D QA1*02:01-B1*03:03L HLA-DRB1*15:03L
VMFTPLVPFW

SEQ ID NO: 8997 - protein, 12 aa, Severe acute respiratory syndrome coronavirus 2
  REGION 1..12: note = Table B: HLA-DQA1*03:02-B1*03:03L HLA-DRB1*13:02L HLA-DRB1*01:03L HLA-DRB1*04:05L HLA-DRB1*01:02L HLA-DRB1*08:04L HLA-DRB3*02:01L HLA-DPA1*01:03-B1*03:01L HLA-DPA1*03:01-B1*04:02L HLA-DRB1*14:01L HLA-DRB1*08:01L
  REGION 1..12: note = CONT. FROM ABOVE: HLA-DQA1*05:05-B1*03:19L HLA-DQA1*05:01-B1*02: 01L HLA-DPA1*01:03-B1*04:01L HLA-DPA1*01:03-B1*04:02L HLA-DPA1*0 1:03-B1*104:01L HLA-DQA1*05:05-B1*03:01L HLA-DPA1*01:02-B1*04:01 L HLA-DRB1*16:01L HLA-DRB1*04:08L
IAYIICISTKHF

SEQ ID NO: 8998 - protein, 18 aa, Severe acute respiratory syndrome coronavirus 2
  REGION 1..18: note = Table B: HLA-DQA1*03:02-B1*03:03L HLA-DPA1*01:03-B1*04:01L HLA-DPA1*01:03-B1*104:01L
STKHFYWFFSNYLKRRVV

SEQ ID NO: 8999 - protein, 11 aa, Severe acute respiratory syndrome coronavirus 2
  REGION 1..11: note = Table B: HLA-DQA1*03:02-B1*03:03L HLA-DQA1*05:01-B1*03:01L HLA-DRB1*13:03L HLA-DRB1*01:02L HLA-DPA1*01:03-B1*03:01L HLA-DPA1*03:01-B1*04:02L HLA-DRB1*14:02L HLA-DQA1*01-B1*05L HLA-DQA1*05:05-B1*03:19L HLA-DQA1*05:01-B1*02:01L
  REGION 1..11: note = CONT. FROM ABOVE: HLA-DRB4*01:01L HLA-DPA1*01:03-B1*04:01L HLA-D QA1*05:05-B1*03:116L HLA-DPA1*01:03-B1*04:02L HLA-DRB1*12:01L HL A-DPA1*01:02-B1*04:01L
VVFNGVSFSTF

SEQ ID NO: 9000 - protein, 12 aa, Severe acute respiratory syndrome coronavirus 2
  REGION 1..12: note = Table B: HLA-DQA1*03:02-B1*03:03L HLA-DQA1*05:01-B1*03:01L HLA-DRB1*01:03L HLA-DQA1*01:02-B1*06:02L HLA-DRB1*01:02L HLA-DPA1*01:03-B1*03:01L HLA-DRB1*08:01L HLA-DQA1*05:05-B1*03:19L HLA-DQA1*05:01-B1*02:01L
  REGION 1..12: note = CONT. FROM ABOVE: HLA-DPA1*01:03-B1*04:02L HLA-DRB1*12:01L HLA-D PA1*02:01-B1*13:01L HLA-DQA1*03:01-B1*03:02L HLA-DQA1*05:05-B1*0 3:01L HLA-DRB1*16:01L HLA-DRB1*04:08L HLA-DQA1*02:01-B1*03:03L H LA-DRB1*15:03L
FNGVSFSTFEEA

SEQ ID NO: 9001 - protein, 10 aa, Severe acute respiratory syndrome coronavirus 2
  REGION 1..10: note = Table B: HLA-DQA1*03:02-B1*03:03L HLA-DQA1*01-B1*05L HLA-DQA1*05:01-B1*02:01L HLA-DQA1*01:03-B1*06:01L
SFSTFEEAAL

SEQ ID NO: 9002 - protein, 11 aa, Severe acute respiratory syndrome coronavirus 2
  REGION 1..11: note = Table B: HLA-DQA1*03:02-B1*03:03L HLA-DPA1*03:01-B1*04:02L HLA-DRB1*14:02L HLA-DQA1*05:05-B1*03:19L HLA-DQA1*05:01-B1*02:01L HLA-DRB4*01:01L HLA-DPA1*01:03-B1*04:01L HLA-DPA1*03:01-B1*105:01L
  REGION 1..11: note = CONT. FROM ABOVE: HLA-DQA1*02:01-B1*03:03L
STFEEAALCTF

SEQ ID NO: 9003 - protein, 10 aa, Severe acute respiratory syndrome coronavirus 2
  REGION 1..10: note = Table B: HLA-DQA1*03:02-B1*03:03L HLA-DQA1*05:05-B1*03:19L
FEEAALCTFL

SEQ ID NO: 9004 - protein, 10 aa, Severe acute respiratory syndrome coronavirus 2
  REGION 1..10: note = Table B: HLA-DQA1*03:02-B1*03:03L HLA-DPA1*03:01-B1*04:02L HLA-DQA1*05:05-B1*03:19L HLA-DRB1*12:01L HLA-DPA1*02:01-B1*13:01L HLA-DQA1*03:01-B1*03:02L HLA-DQA1*01:03-B1*06:01L HLA-DQA1*02:01-B1*03:03L
  REGION 1..10: note = CONT. FROM ABOVE: HLA-DRB1*15:03L
TFLLNKEMYL

SEQ ID NO: 9005 - protein, 15 aa, Severe acute respiratory syndrome coronavirus 2
  REGION 1..15: note = Table B: HLA-DQA1*03:02-B1*03:03L HLA-DRB1*04:03L HLA-DRB1*08:04L
LKLRSDVLLPLTQYN

SEQ ID NO: 9006 - protein, 11 aa, Severe acute respiratory syndrome coronavirus 2
  REGION 1..11: note = Table B: HLA-DQA1*03:02-B1*03:03L HLA-DRB1*04:01L HLA-DRB1*04:05L HLA-DRB1*01:01L HLA-DRB1*01:02L HLA-DQA1*01:01-B1*05:01L HLA-DRB1*11:01L HLA-DRB1*08:03L
VLLPLTQYNRY

SEQ ID NO: 9007 - protein, 10 aa, Severe acute respiratory syndrome coronavirus 2
  REGION 1..10: note = Table B: HLA-DQA1*03:02-B1*03:03L HLA-DQA1*05:01-B1*03:01L HLA-DRB1*13:02L HLA-DRB1*13:03L HLA-DRB1*01:03L HLA-DQA1*01:02-B1*06:02L HLA-DRB1*08:77L HLA-DPA1*01:03-B1*03:01L HLA-DPA1*03:01-B1*04:02L
  REGION 1..10: note = CONT. FROM ABOVE: HLA-DRB1*03:01L HLA-DRB1*14:01L HLA-DRB1*11:02 L HLA-DRB1*14:02L HLA-DRB1*11:01L HLA-DQA1*01-B1*05L HLA-DQA1*05 :05-B1*03:19M HLA-DQA1*05:01-B1*02:01M HLA-DRB4*01:01L HLA-DPA1* 01:03-B1*04:01L HLA-DQA1*05:05-B1*03:116L
  REGION 1..10: note = CONT. FROM ABOVE: HLA-DPA1*01:03-B1*04:02L HLA-DRB1*12:01L HLA-D PA1*02:01-B1*13:01L HLA-DPA1*03:01-B1*105:01L HLA-DPA1*01:03-B1* 104:01L HLA-DPA1*01:02-B1*04:01L HLA-DRB1*10:01L HLA-DRB1*16:01M HLA-DQA1*01:03-B1*06:01L HLA-DRB1*08:02L
  REGION 1..10: note = CONT. FROM ABOVE: HLA-DQA1*02:01-B1*03:03L HLA-DRB1*15:03L
TQYNRYLALY

SEQ ID NO: 9008 - protein, 16 aa, Severe acute respiratory syndrome coronavirus 2
  REGION 1..16: note = Table B: HLA-DQA1*03:02-B1*03:03L HLA-DRB1*04:01L HLA-DRB1*09:01L
YNRYLALYNKYKYFSG

SEQ ID NO: 9009 - protein, 13 aa, Severe acute respiratory syndrome coronavirus 2
  REGION 1..13: note = Table B: HLA-DQA1*03:02-B1*03:03L HLA-DQA1*05:01-B1*03:01L HLA-DRB1*13:02L HLA-DRB1*04:04L HLA-DRB1*08:04L HLA-DPA1*01:03-B1*03:01L HLA-DPA1*03:01-B1*04:02L HLA-DRB1*14:01L HLA-DRB1*11:04L HLA-DRB1*11:01L
  REGION 1..13: note = CONT. FROM ABOVE: HLA-DQA1*05:01-B1*02:01L HLA-DRB1*09:01L HLA-D RB1*12:02L HLA-DRB3*01:01L HLA-DPA1*03:01-B1*105:01L HLA-DRB1*14 :54L HLA-DPA1*01:03-B1*104:01L HLA-DQA1*05:05-B1*03:01L HLA-DPA1 *01:02-B1*04:01L HLA-DRB1*07:01L HLA-DRB1*10:01L
YNKYKYFSGAMDT

SEQ ID NO: 9010 - protein, 13 aa, Severe acute respiratory syndrome coronavirus 2
  REGION 1..13: note = Table B: HLA-DQA1*03:02-B1*03:03L HLA-DQA1*05:01-B1*03:01L HLA-DRB1*13:02L HLA-DRB1*04:04L HLA-DRB1*08:04L HLA-DPA1*01:03-B1*03:01L HLA-DPA1*03:01-B1*04:02L HLA-DRB1*14:01L HLA-DQA1*05:05-B1*03:19L
  REGION 1..13: note = CONT. FROM ABOVE: HLA-DPA1*01:03-B1*04:01L HLA-DPA1*01:03-B1*04: 02L HLA-DPA1*01:03-B1*104:01L HLA-DQA1*05:05-B1*03:01L HLA-DPA1* 01:02-B1*04:01L HLA-DRB1*07:01L HLA-DRB1*10:01L HLA-DQA1*01:03-B 1*06:01L
NKYKYFSGAMDTT

SEQ ID NO: 9011 - protein, 12 aa, Severe acute respiratory syndrome coronavirus 2
  REGION 1..12: note = Table B: HLA-DQA1*03:02-B1*03:03L HLA-DQA1*05:01-B1*03:01L HLA-DRB1*13:03L HLA-DRB1*01:03L HLA-DRB1*04:02L HLA-DRB1*04:05L HLA-DQA1*01:02-B1*06:02L HLA-DRB1*01:02L HLA-DRB4*03:01NL HLA-DPA1*01:03-B1*03:01L HLA-DPA1*03:01-B1*04:02L
  REGION 1..12: note = CONT. FROM ABOVE: HLA-DQA1*05:05-B1*03:19L HLA-DRB1*04:10L HLA-D RB1*12:01L HLA-DPA1*03:01-B1*105:01L HLA-DQA1*05:05-B1*03:01L HL A-DRB1*14:17L HLA-DRB1*16:01L HLA-DQA1*01:03-B1*06:01L HLA-DRB1* 04:08L HLA-DRB1*15:03L
YKYFSGAMDTTS

SEQ ID NO: 9012 - protein, 12 aa, Severe acute respiratory syndrome coronavirus 2
  REGION 1..12: note = Table B: HLA-DQA1*03:02-B1*03:03L HLA-DRB1*04:03L HLA-DRB1*13:02L HLA-DRB1*04:05L HLA-DRB1*14:01L HLA-DQA1*05:05-B1*03:116L HLA-DRB1*12:01L HLA-DQA1*03:01-B1*03:02L HLA-DQA1*05:05-B1*03:01L
  REGION 1..12: note = CONT. FROM ABOVE: HLA-DPA1*01:02-B1*04:01L HLA-DRB1*08:02L
KYFSGAMDTTSY

SEQ ID NO: 9013 - protein, 11 aa, Severe acute respiratory syndrome coronavirus 2
  REGION 1..11: note = Table B: HLA-DQA1*03:02-B1*03:03L HLA-DRB1*04:01L HLA-DRB1*13:02L HLA-DRB1*01:03L HLA-DRB1*04:04L HLA-DRB1*04:05L HLA-DRB1*01:02L HLA-DRB1*14:01L HLA-DRB1*11:04L HLA-DRB1*14:02L HLA-DQA1*01:01-B1*05:01L HLA-DRB1*08:01L HLA-DRB5*01:01L
  REGION 1..11: note = CONT. FROM ABOVE: HLA-DRB1*04:10L HLA-DPA1*01:03-B1*04:02L HLA-D PA1*03:01-B1*105:01L HLA-DRB1*14:54L HLA-DRB1*10:01L HLA-DRB1*04 :08L HLA-DRB1*15:03L
FSGAMDTTSYR

SEQ ID NO: 9014 - protein, 10 aa, Severe acute respiratory syndrome coronavirus 2
  REGION 1..10: note = Table B: HLA-DQA1*03:02-B1*03:03L HLA-DRB1*04:03L HLA-DRB1*13:03L HLA-DRB1*01:03L HLA-DRB1*04:02L HLA-DRB4*03:01NL HLA-DRB1*14:01L HLA-DRB1*14:02L HLA-DQA1*01-B1*05L HLA-DQA1*05:01-B1*02:01L HLA-DRB1*12:01L
  REGION 1..10: note = CONT. FROM ABOVE: HLA-DPA1*03:01-B1*105:01L HLA-DQA1*03:01-B1*03 :02L HLA-DRB1*14:54L HLA-DRB1*14:17L HLA-DPA1*01:02-B1*04:01L HL A-DRB1*16:01L HLA-DQA1*02:01-B1*03:03L
AMDTTSYREA

SEQ ID NO: 9015 - protein, 10 aa, Severe acute respiratory syndrome coronavirus 2
  REGION 1..10: note = Table B: HLA-DQA1*03:02-B1*03:03L HLA-DRB1*04:03L HLA-DQA1*01-B1*05L HLA-DQA1*05:01-B1*02:01L HLA-DQA1*03:01-B1*03:02L HLA-DPA1*01:02-B1*04:01L HLA-DRB1*16:01L HLA-DQA1*01:03-B1*06:01L
  REGION 1..10: note = CONT. FROM ABOVE: HLA-DQA1*02:01-B1*03:03L
MDTTSYREAA

SEQ ID NO: 9016 - protein, 13 aa, Severe acute respiratory syndrome coronavirus 2
  REGION 1..13: note = Table B: HLA-DQA1*03:02-B1*03:03L HLA-DRB1*13:03L HLA-DRB1*04:04L HLA-DRB4*03:01NL HLA-DRB1*12:01L HLA-DRB1*14:54L HLA-DRB1*04:08L HLA-DQA1*02:01-B1*03:03L HLA-DRB1*15:03L
AKALNDFSNSGSD

SEQ ID NO: 9017 - protein, 10 aa, Severe acute respiratory syndrome coronavirus 2
  REGION 1..10: note = Table B: HLA-DQA1*03:02-B1*03:03L
DFSNSGSDVL

SEQ ID NO: 9018 - protein, 13 aa, Severe acute respiratory syndrome coronavirus 2
  REGION 1..13: note = Table B: HLA-DQA1*03:02-B1*03:03L HLA-DQA1*03:01-B1*03:02L HLA-DQA1*05:05-B1*03:01L HLA-DQA1*02:01-B1*03:03L
FSNSGSDVLYQPP

SEQ ID NO: 9019 - protein, 13 aa, Severe acute respiratory syndrome coronavirus 2
  REGION 1..13: note = Table B: HLA-DQA1*03:02-B1*03:03L HLA-DQA1*05:05-B1*03:01L
SNSGSDVLYQPPQ

SEQ ID NO: 9020 - protein, 13 aa, Severe acute respiratory syndrome coronavirus 2
  REGION 1..13: note = Table B: HLA-DQA1*03:02-B1*03:03L HLA-DRB1*04:03L HLA-DQA1*01-B1*05L HLA-DQA1*05:01-B1*02:01L HLA-DQA1*03:01-B1*03:02L HLA-DQA1*02:01-B1*03:03L
SGSDVLYQPPQTS

SEQ ID NO: 9021 - protein, 10 aa, Severe acute respiratory syndrome coronavirus 2
  REGION 1..10: note = Table B: HLA-DQA1*03:02-B1*03:03M HLA-DQA1*05:01-B1*03:01M HLA-DRB1*04:01L HLA-DRB1*13:03L HLA-DRB1*01:03L HLA-DRB1*04:04L HLA-DRB1*04:05L HLA-DQA1*01:02-B1*06:02L HLA-DRB1*01:01L HLA-DRB1*01:02L HLA-DRB1*08:77L HLA-DPA1*03:01-B1*04:02L
  REGION 1..10: note = CONT. FROM ABOVE: HLA-DRB1*14:01L HLA-DRB1*11:02L HLA-DRB1*14:02 L HLA-DRB1*08:01L HLA-DQA1*05:05-B1*03:19M HLA-DQA1*05:01-B1*02: 01L HLA-DRB4*01:01L HLA-DPA1*01:03-B1*04:01L HLA-DQA1*05:05-B1*0 3:116M HLA-DRB1*09:01L HLA-DPA1*01:03-B1*04:02L HLA-DRB1*12:01L
  REGION 1..10: note = CONT. FROM ABOVE: HLA-DPA1*02:01-B1*13:01M HLA-DPA1*03:01-B1*105 :01L HLA-DQA1*03:01-B1*03:02L HLA-DPA1*01:03-B1*104:01L HLA-DPA1 *01:02-B1*04:01L HLA-DRB1*07:01L HLA-DRB1*10:01L HLA-DRB1*16:01L HLA-DQA1*01:03-B1*06:01M HLA-DRB1*08:03L
  REGION 1..10: note = CONT. FROM ABOVE: HLA-DQA1*02:01-B1*03:03M HLA-DRB1*15:03M
VLYQPPQTSI

SEQ ID NO: 9022 - protein, 13 aa, Severe acute respiratory syndrome coronavirus 2
  REGION 1..13: note = Table B: HLA-DQA1*03:02-B1*03:03L HLA-DQA1*03:01-B1*03:02L
YQPPQTSITSAVL

SEQ ID NO: 9023 - protein, 13 aa, Severe acute respiratory syndrome coronavirus 2
  REGION 1..13: note = Table B: HLA-DQA1*03:02-B1*03:03L HLA-DQA1*05:01-B1*03:01L HLA-DQA1*05:05-B1*03:19L HLA-DQA1*05:01-B1*02:01L HLA-DQA1*03:01-B1*03:02L HLA-DQA1*05:05-B1*03:01L HLA-DQA1*01:03-B1*06:01L HLA-DQA1*02:01-B1*03:03L
QPPQTSITSAVLQ

SEQ ID NO: 9024 - protein, 14 aa, Severe acute respiratory syndrome coronavirus 2
  REGION 1..14: note = Table B: HLA-DQA1*03:02-B1*03:03L HLA-DQA1*05:01-B1*03:01L HLA-DQA1*05:05-B1*03:19L HLA-DPA1*03:01-B1*105:01L HLA-DQA1*05:05-B1*03:01L
PPQTSITSAVLQSG

SEQ ID NO: 9025 - protein, 10 aa, Severe acute respiratory syndrome coronavirus 2
  REGION 1..10: note = Table B: HLA-DQA1*03:02-B1*03:03L HLA-DQA1*05:01-B1*03:01L HLA-DQA1*01:02-B1*06:02L HLA-DPA1*03:01-B1*04:02L HLA-DQA1*05:05-B1*03:19L HLA-DQA1*05:01-B1*02:01L HLA-DPA1*03:01-B1*105:01L HLA-DQA1*05:05-B1*03:01L
  REGION 1..10: note = CONT. FROM ABOVE: HLA-DQA1*01:03-B1*06:01L HLA-DQA1*02:01-B1*03: 03L HLA-DRB1*15:03L
ITSAVLQSGF

SEQ ID NO: 9026 - protein, 10 aa, Severe acute respiratory syndrome coronavirus 2
  REGION 1..10: note = Table B: HLA-DQA1*03:02-B1*03:03L HLA-DQA1*05:01-B1*03:01L HLA-DQA1*01:02-B1*06:02L HLA-DQA1*05:05-B1*03:19L HLA-DRB1*12:01L HLA-DPA1*03:01-B1*105:01L HLA-DQA1*03:01-B1*03:02L HLA-DQA1*05:05-B1*03:01L
  REGION 1..10: note = CONT. FROM ABOVE: HLA-DQA1*01:03-B1*06:01M HLA-DQA1*02:01-B1*03: 03L
TSAVLQSGFR

SEQ ID NO: 9027 - protein, 10 aa, Severe acute respiratory syndrome coronavirus 2
  REGION 1..10: note = Table B: HLA-DQA1*03:02-B1*03:03L HLA-DQA1*05:01-B1*03:01L HLA-DRB1*04:03L HLA-DRB1*13:02L HLA-DRB1*13:03L HLA-DRB1*01:03L HLA-DRB1*04:02L HLA-DRB1*04:05L HLA-DRB1*01:02L HLA-DRB4*03:01NL HLA-DRB1*14:01L HLA-DQA1*01-B1*05L HLA-DQA1*05:05-B1*03:19L
  REGION 1..10: note = CONT. FROM ABOVE: HLA-DQA1*05:01-B1*02:01L HLA-DRB1*12:01L HLA-D PA1*03:01-B1*105:01L HLA-DQA1*03:01-B1*03:02L HLA-DRB1*14:54L HL A-DQA1*05:05-B1*03:01L HLA-DRB1*14:17L HLA-DPA1*01:02-B1*04:01L HLA-DRB1*16:01L HLA-DQA1*01:03-B1*06:01L
  REGION 1..10: note = CONT. FROM ABOVE: HLA-DQA1*02:01-B1*03:03L HLA-DRB1*15:03L
MAFPSGKVEG

SEQ ID NO: 9028 - protein, 12 aa, Severe acute respiratory syndrome coronavirus 2
  REGION 1..12: note = Table B: HLA-DQA1*03:02-B1*03:03L HLA-DQA1*05:01-B1*03:01L HLA-DQA1*01:02-B1*06:02L HLA-DQA1*05:05-B1*03:19L HLA-DQA1*05:05-B1*03:01L HLA-DQA1*01:03-B1*06:01L HLA-DQA1*02:01-B1*03:03L
FPSGKVEGCMVQ

SEQ ID NO: 9029 - protein, 12 aa, Severe acute respiratory syndrome coronavirus 2
  REGION 1..12: note = Table B: HLA-DQA1*03:02-B1*03:03L HLA-DQA1*03:01-B1*03:02L
TSEDMLNPNYED

SEQ ID NO: 9030 - protein, 10 aa, Severe acute respiratory syndrome coronavirus 2
  REGION 1..10: note = Table B: HLA-DQA1*03:02-B1*03:03L HLA-DQA1*05:01-B1*02:01L HLA-DPA1*03:01-B1*105:01L HLA-DQA1*03:01-B1*03:02L
DMLNPNYEDL

SEQ ID NO: 9031 - protein, 10 aa, Severe acute respiratory syndrome coronavirus 2
  REGION 1..10: note = Table B: HLA-DQA1*03:02-B1*03:03L HLA-DQA1*01-B1*05L HLA-DQA1*05:01-B1*02:01L HLA-DPA1*03:01-B1*105:01L HLA-DQA1*03:01-B1*03:02L HLA-DQA1*01:03-B1*06:01L HLA-DQA1*02:01-B1*03:03L HLA-DRB1*15:03L
MLNPNYEDLL

SEQ ID NO: 9032 - protein, 13 aa, Severe acute respiratory syndrome coronavirus 2
  REGION 1..13: note = Table B: HLA-DQA1*03:02-B1*03:03L HLA-DQA1*05:01-B1*03:01L HLA-DRB1*13:03L HLA-DRB1*01:03L HLA-DRB1*01:02L HLA-DRB1*08:04L HLA-DPA1*01:03-B1*03:01L HLA-DPA1*03:01-B1*04:02L HLA-DRB1*14:01L HLA-DQA1*01:01-B1*05:01L HLA-DRB1*08:01L
  REGION 1..13: note = CONT. FROM ABOVE: HLA-DQA1*05:05-B1*03:19L HLA-DPA1*01:03-B1*04: 02L HLA-DRB1*12:01L HLA-DPA1*02:01-B1*13:01L HLA-DPA1*03:01-B1*1 05:01L HLA-DQA1*05:05-B1*03:01L HLA-DRB1*14:17L HLA-DPA1*01:02-B 1*04:01L HLA-DRB1*15:03L
NPNYEDLLIRKSN

SEQ ID NO: 9033 - protein, 18 aa, Severe acute respiratory syndrome coronavirus 2
  REGION 1..18: note = Table B: HLA-DQA1*03:02-B1*03:03L HLA-DPA1*03:01-B1*04:02L HLA-DPA1*01:03-B1*04:02L
EDLLIRKSNHNFLVQAGN

SEQ ID NO: 9034 - protein, 10 aa, Severe acute respiratory syndrome coronavirus 2
  REGION 1..10: note = Table B: HLA-DQA1*03:02-B1*03:03L HLA-DRB1*04:03L HLA-DQA1*01-B1*05L HLA-DQA1*05:01-B1*02:01L HLA-DQA1*03:01-B1*03:02L HLA-DQA1*02:01-B1*03:03L
NFLVQAGNVQ

SEQ ID NO: 9035 - protein, 10 aa, Severe acute respiratory syndrome coronavirus 2
  REGION 1..10: note = Table B: HLA-DQA1*03:02-B1*03:03M HLA-DQA1*05:01-B1*03:01M HLA-DRB1*04:01L HLA-DRB1*04:03L HLA-DRB1*13:02L HLA-DRB1*13:03L HLA-DRB1*01:03L HLA-DRB1*04:02L HLA-DRB1*04:04L HLA-DRB1*04:05L HLA-DQA1*01:02-B1*06:02L HLA-DRB1*01:02L HLA-DRB1*08:77L
  REGION 1..10: note = CONT. FROM ABOVE: HLA-DRB3*02:01L HLA-DPA1*03:01-B1*04:02L HLA-D RB1*14:01L HLA-DRB1*14:02M HLA-DRB1*08:01L HLA-DQA1*01-B1*05L HL A-DQA1*05:05-B1*03:19L HLA-DQA1*05:01-B1*02:01L HLA-DRB4*01:01L HLA-DPA1*01:03-B1*04:01L HLA-DQA1*05:05-B1*03:116M
  REGION 1..10: note = CONT. FROM ABOVE: HLA-DRB1*09:01L HLA-DPA1*01:03-B1*04:02L HLA-D RB1*12:01L HLA-DPA1*02:01-B1*13:01L HLA-DPA1*03:01-B1*105:01L HL A-DQA1*03:01-B1*03:02M HLA-DPA1*01:03-B1*104:01L HLA-DPA1*01:02- B1*04:01L HLA-DRB1*07:01L HLA-DRB1*10:01L HLA-DRB1*16:01L
  REGION 1..10: note = CONT. FROM ABOVE: HLA-DQA1*01:03-B1*06:01L HLA-DRB1*08:03L HLA-D QA1*02:01-B1*03:03M HLA-DRB1*15:03M
FLVQAGNVQL

SEQ ID NO: 9036 - protein, 10 aa, Severe acute respiratory syndrome coronavirus 2
  REGION 1..10: note = Table B: HLA-DQA1*03:02-B1*03:03L HLA-DQA1*05:01-B1*03:01L HLA-DQA1*05:05-B1*03:19L HLA-DPA1*03:01-B1*105:01L HLA-DPA1*01:03-B1*104:01L HLA-DQA1*01:03-B1*06:01L HLA-DQA1*02:01-B1*03:03L HLA-DRB1*15:03L
VQAGNVQLRV

SEQ ID NO: 9037 - protein, 13 aa, Severe acute respiratory syndrome coronavirus 2
  REGION 1..13: note = Table B: HLA-DQA1*03:02-B1*03:03L HLA-DRB1*14:04L HLA-DPA1*03:01-B1*04:02L HLA-DRB1*11:02L HLA-DQA1*05:05-B1*03:19L HLA-DPA1*01:03-B1*04:02L HLA-DPA1*01:03-B1*02:01L HLA-DRB1*07:01L HLA-DRB1*08:02L
NVQLRVIGHSMQN

SEQ ID NO: 9038 - protein, 10 aa, Severe acute respiratory syndrome coronavirus 2
  REGION 1..10: note = Table B: HLA-DQA1*03:02-B1*03:03L HLA-DRB1*16:01L HLA-DQA1*02:01-B1*03:03L
RVIGHSMQNC

SEQ ID NO: 9039 - protein, 10 aa, Severe acute respiratory syndrome coronavirus 2
  REGION 1..10: note = Table B: HLA-DQA1*03:02-B1*03:03L HLA-DQA1*05:01-B1*03:01L HLA-DRB1*04:01L HLA-DRB1*04:03L HLA-DRB1*13:02L HLA-DRB1*13:03L HLA-DRB1*01:03L HLA-DRB1*04:02L HLA-DRB1*04:04L HLA-DRB1*04:05L HLA-DRB1*01:01L HLA-DRB1*01:02L HLA-DRB4*03:01NL HLA-DRB1*08:04L
  REGION 1..10: note = CONT. FROM ABOVE: HLA-DRB1*08:77L HLA-DRB3*02:01L HLA-DRB1*14:01 L HLA-DRB1*11:03L HLA-DRB1*11:04L HLA-DRB1*14:02L HLA-DQA1*01:01 -B1*05:01L HLA-DRB1*08:01L HLA-DRB1*11:01L HLA-DRB5*01:01L HLA-D QA1*01-B1*05L HLA-DQA1*05:05-B1*03:19L HLA-DQA1*05:01-B1*02:01L
  REGION 1..10: note = CONT. FROM ABOVE: HLA-DRB1*04:10L HLA-DPA1*01:03-B1*04:02L HLA-D RB1*12:01L HLA-DRB1*12:02L HLA-DPA1*03:01-B1*105:01L HLA-DQA1*03 :01-B1*03:02L HLA-DRB1*14:54L HLA-DQA1*05:05-B1*03:01L HLA-DRB1* 14:17L HLA-DPA1*01:02-B1*04:01L HLA-DRB1*10:01L HLA-DRB1*16:01L
  REGION 1..10: note = CONT. FROM ABOVE: HLA-DQA1*01:03-B1*06:01L HLA-DRB1*04:08L HLA-D QA1*02:01-B1*03:03L
VDTANPKTPK

SEQ ID NO: 9040 - protein, 10 aa, Severe acute respiratory syndrome coronavirus 2
  REGION 1..10: note = Table B: HLA-DQA1*03:02-B1*03:03L HLA-DQA1*05:01-B1*03:01L HLA-DRB1*13:02L HLA-DRB1*13:03M HLA-DRB1*01:03L HLA-DQA1*01:02-B1*06:02H HLA-DRB1*01:01L HLA-DRB4*03:01NL HLA-DRB1*08:77L HLA-DPA1*01:03-B1*03:01L
  REGION 1..10: note = CONT. FROM ABOVE: HLA-DPA1*03:01-B1*04:02L HLA-DRB1*03:01L HLA-D RB1*14:01L HLA-DRB1*11:03L HLA-DRB1*11:04L HLA-DRB1*14:02M HLA-D RB1*08:01L HLA-DRB1*11:01L HLA-DRB5*01:01L HLA-DQA1*01-B1*05L HL A-DQA1*05:05-B1*03:19L HLA-DRB4*02:01NL HLA-DQA1*05:01-B1*02:01M
  REGION 1..10: note = CONT. FROM ABOVE: HLA-DRB4*01:01L HLA-DPA1*01:03-B1*04:01M HLA-D QA1*05:05-B1*03:116L HLA-DRB1*09:01L HLA-DPA1*01:03-B1*04:02L HL A-DRB1*12:01L HLA-DPA1*02:01-B1*13:01L HLA-DPA1*03:01-B1*105:01M HLA-DPA1*01:03-B1*104:01L HLA-DQA1*05:05-B1*03:01L
  REGION 1..10: note = CONT. FROM ABOVE: HLA-DRB1*14:17L HLA-DPA1*01:02-B1*04:01L HLA-D RB1*10:01L HLA-DRB1*16:01L HLA-DQA1*01:03-B1*06:01L HLA-DRB1*08: 02L HLA-DQA1*02:01-B1*03:03L HLA-DRB1*15:01L HLA-DRB1*15:03L
DTANPKTPKY

SEQ ID NO: 9041 - protein, 11 aa, Severe acute respiratory syndrome coronavirus 2
  REGION 1..11: note = Table B: HLA-DQA1*03:02-B1*03:03L HLA-DRB1*13:03L HLA-DRB1*01:03L HLA-DRB1*04:02L HLA-DRB1*04:05L HLA-DRB1*01:02L HLA-DRB4*03:01NL HLA-DRB1*08:04L HLA-DRB1*14:01L HLA-DRB1*08:01L HLA-DQA1*05:05-B1*03:19L HLA-DQA1*05:01-B1*02:01L
  REGION 1..11: note = CONT. FROM ABOVE: HLA-DRB1*04:10L HLA-DPA1*01:03-B1*04:02L HLA-D RB1*12:01L HLA-DPA1*03:01-B1*105:01L HLA-DRB1*14:54L HLA-DQA1*05 :05-B1*03:01L HLA-DPA1*01:02-B1*04:01L HLA-DRB1*16:01L HLA-DRB1* 04:08L HLA-DRB1*15:03L
YKFVRIQPGQT

SEQ ID NO: 9042 - protein, 10 aa, Severe acute respiratory syndrome coronavirus 2
  REGION 1..10: note = Table B: HLA-DQA1*03:02-B1*03:03L HLA-DQA1*05:01-B1*03:01L HLA-DRB1*04:03L HLA-DRB1*13:02L HLA-DRB1*13:03L HLA-DRB1*01:03L HLA-DRB1*04:02L HLA-DRB1*04:05L HLA-DQA1*01:02-B1*06:02L HLA-DRB1*01:01L HLA-DRB1*01:02L HLA-DRB4*03:01NL HLA-DRB1*08:77L
  REGION 1..10: note = CONT. FROM ABOVE: HLA-DRB3*02:01L HLA-DPA1*01:03-B1*03:01L HLA-D PA1*03:01-B1*04:02L HLA-DRB1*14:01L HLA-DRB1*11:03L HLA-DRB1*14: 02L HLA-DQA1*01:01-B1*05:01L HLA-DRB1*11:01L HLA-DQA1*01-B1*05L HLA-DQA1*05:05-B1*03:19L HLA-DQA1*05:01-B1*02:01L
  REGION 1..10: note = CONT. FROM ABOVE: HLA-DRB4*01:01L HLA-DPA1*01:03-B1*04:01L HLA-D QA1*05:05-B1*03:116L HLA-DPA1*01:03-B1*04:02L HLA-DRB1*12:01L HL A-DPA1*02:01-B1*13:01L HLA-DPA1*03:01-B1*105:01L HLA-DQA1*03:01- B1*03:02L HLA-DQA1*05:05-B1*03:01L HLA-DPA1*01:02-B1*04:01L
  REGION 1..10: note = CONT. FROM ABOVE: HLA-DRB1*07:01L HLA-DRB1*10:01L HLA-DRB1*16:01 L HLA-DQA1*01:03-B1*06:01L HLA-DRB1*08:02L HLA-DQA1*02:01-B1*03: 03L HLA-DRB1*15:03L
FVRIQPGQTF

SEQ ID NO: 9043 - protein, 10 aa, Severe acute respiratory syndrome coronavirus 2
  REGION 1..10: note = Table B: HLA-DQA1*03:02-B1*03:03M HLA-DQA1*05:01-B1*03:01L HLA-DRB1*13:02L HLA-DRB1*13:03L HLA-DRB1*01:03L HLA-DRB1*04:05L HLA-DQA1*01:02-B1*06:02L HLA-DRB1*01:02L HLA-DPA1*03:01-B1*04:02L HLA-DRB1*14:01L HLA-DRB1*11:02L
  REGION 1..10: note = CONT. FROM ABOVE: HLA-DRB1*14:02L HLA-DRB1*08:01L HLA-DQA1*05:05 -B1*03:19M HLA-DQA1*05:01-B1*02:01L HLA-DQA1*05:05-B1*03:116L HL A-DRB1*09:01L HLA-DPA1*01:03-B1*04:02L HLA-DPA1*02:01-B1*13:01L HLA-DPA1*03:01-B1*105:01L HLA-DQA1*03:01-B1*03:02L
  REGION 1..10: note = CONT. FROM ABOVE: HLA-DPA1*01:03-B1*104:01L HLA-DPA1*01:02-B1*04 :01L HLA-DRB1*07:01L HLA-DRB1*10:01L HLA-DRB1*16:01L HLA-DQA1*01 :03-B1*06:01L HLA-DRB1*08:03L HLA-DQA1*02:01-B1*03:03M HLA-DRB1* 15:03L
RIQPGQTFSV

SEQ ID NO: 9044 - protein, 10 aa, Severe acute respiratory syndrome coronavirus 2
  REGION 1..10: note = Table B: HLA-DQA1*03:02-B1*03:03L HLA-DQA1*05:01-B1*03:01L HLA-DQA1*01:02-B1*06:02L HLA-DQA1*05:05-B1*03:19L HLA-DQA1*03:01-B1*03:02L HLA-DQA1*01:03-B1*06:01L HLA-DQA1*02:01-B1*03:03L
IQPGQTFSVL

SEQ ID NO: 9045 - protein, 17 aa, Severe acute respiratory syndrome coronavirus 2
  REGION 1..17: note = Table B: HLA-DQA1*03:02-B1*03:03L HLA-DQA1*05:01-B1*03:01L HLA-DRB1*04:01L HLA-DRB1*13:02L HLA-DRB1*04:02L HLA-DRB1*04:04L HLA-DRB1*04:05L HLA-DRB1*01:01L HLA-DRB1*14:02L HLA-DRB1*11:01L HLA-DQA1*01-B1*05L HLA-DQA1*05:05-B1*03:19L
  REGION 1..17: note = CONT. FROM ABOVE: HLA-DPA1*01:03-B1*04:02L HLA-DRB1*12:01L HLA-D QA1*03:01-B1*03:02L HLA-DQA1*01:03-B1*06:01L HLA-DQA1*02:01-B1*0 3:03L
QPGQTFSVLACYNGSPS

SEQ ID NO: 9046 - protein, 10 aa, Severe acute respiratory syndrome coronavirus 2
  REGION 1..10: note = Table B: HLA-DQA1*03:02-B1*03:03L
ACYNGSPSGV

SEQ ID NO: 9047 - protein, 10 aa, Severe acute respiratory syndrome coronavirus 2
  REGION 1..10: note = Table B: HLA-DQA1*03:02-B1*03:03L HLA-DQA1*05:01-B1*03:01L HLA-DRB1*04:03L HLA-DRB1*13:02L HLA-DRB1*13:03L HLA-DRB1*01:03L HLA-DRB1*04:02L HLA-DRB4*03:01NL HLA-DRB1*08:77L HLA-DRB1*11:03L HLA-DQA1*05:05-B1*03:19L HLA-DQA1*05:01-B1*02:01L
  REGION 1..10: note = CONT. FROM ABOVE: HLA-DRB1*12:01L HLA-DRB1*12:02L HLA-DQA1*03:01 -B1*03:02L HLA-DRB1*14:54L HLA-DQA1*05:05-B1*03:01L HLA-DRB1*14: 17L HLA-DRB1*16:01L HLA-DQA1*01:03-B1*06:01L HLA-DQA1*02:01-B1*0 3:03L
YNGSPSGVYQ

SEQ ID NO: 9048 - protein, 13 aa, Severe acute respiratory syndrome coronavirus 2
  REGION 1..13: note = Table B: HLA-DQA1*03:02-B1*03:03L HLA-DQA1*05:01-B1*03:01L HLA-DRB1*04:03L HLA-DRB1*13:03L HLA-DRB1*01:03L HLA-DRB1*04:02L HLA-DRB1*04:05L HLA-DRB1*01:02L HLA-DQA1*01:01-B1*05:01L HLA-DRB1*08:01L HLA-DQA1*05:05-B1*03:19L HLA-DRB1*12:01L
  REGION 1..13: note = CONT. FROM ABOVE: HLA-DPA1*03:01-B1*105:01L HLA-DQA1*03:01-B1*03 :02L HLA-DQA1*05:05-B1*03:01L HLA-DPA1*01:02-B1*04:01L HLA-DRB1* 16:01L HLA-DRB1*04:08L HLA-DQA1*02:01-B1*03:03L
SPSGVYQCAMRPN

SEQ ID NO: 9049 - protein, 12 aa, Severe acute respiratory syndrome coronavirus 2
  REGION 1..12: note = Table B: HLA-DQA1*03:02-B1*03:03L HLA-DRB1*04:03L HLA-DRB1*01:03L HLA-DRB1*01:02L HLA-DRB1*08:04L HLA-DRB1*14:01L HLA-DRB1*08:01L HLA-DRB1*11:01L HLA-DQA1*05:05-B1*03:19L HLA-DPA1*01:03-B1*04:02L HLA-DRB1*12:01L HLA-DRB1*16:01L
  REGION 1..12: note = CONT. FROM ABOVE: HLA-DRB1*04:08L HLA-DRB1*15:03L
GVYQCAMRPNFT

SEQ ID NO: 9050 - protein, 14 aa, Severe acute respiratory syndrome coronavirus 2
  REGION 1..14: note = Table B: HLA-DQA1*03:02-B1*03:03L HLA-DRB1*04:03L HLA-DRB1*01:03L HLA-DRB1*04:05L HLA-DRB1*01:02L HLA-DPA1*01:03-B1*03:01L HLA-DPA1*01:03-B1*04:02L HLA-DRB1*12:01L HLA-DPA1*02:01-B1*13:01L
  REGION 1..14: note = CONT. FROM ABOVE: HLA-DPA1*03:01-B1*105:01L HLA-DQA1*03:01-B1*03 :02L HLA-DPA1*01:03-B1*104:01L HLA-DRB1*04:08L HLA-DQA1*02:01-B1 *03:03L HLA-DRB1*15:03L
IKGSFLNGSCGSVG

SEQ ID NO: 9051 - protein, 10 aa, Severe acute respiratory syndrome coronavirus 2
  REGION 1..10: note = Table B: HLA-DQA1*03:02-B1*03:03L HLA-DQA1*03:01-B1*03:02L HLA-DRB1*16:01L HLA-DQA1*02:01-B1*03:03L
HMELPTGVHA

SEQ ID NO: 9052 - protein, 10 aa, Severe acute respiratory syndrome coronavirus 2
  REGION 1..10: note = Table B: HLA-DQA1*03:02-B1*03:03L HLA-DQA1*03:01-B1*03:02L
MELPTGVHAG

SEQ ID NO: 9053 - protein, 10 aa, Severe acute respiratory syndrome coronavirus 2
  REGION 1..10: note = Table B: HLA-DQA1*03:02-B1*03:03L HLA-DRB1*04:03L HLA-DRB1*13:03L HLA-DQA1*01-B1*05L HLA-DQA1*03:01-B1*03:02L HLA-DQA1*02:01-B1*03:03L
LPTGVHAGTD

SEQ ID NO: 9054 - protein, 10 aa, Severe acute respiratory syndrome coronavirus 2
  REGION 1..10: note = Table B: HLA-DQA1*03:02-B1*03:03L HLA-DRB1*04:03L HLA-DQA1*05:01-B1*02:01L HLA-DQA1*03:01-B1*03:02L HLA-DRB1*14:17L HLA-DQA1*01:03-B1*06:01L HLA-DQA1*02:01-B1*03:03L
VHAGTDLEGN

SEQ ID NO: 9055 - protein, 10 aa, Severe acute respiratory syndrome coronavirus 2
  REGION 1..10: note = Table B: HLA-DQA1*03:02-B1*03:03L HLA-DQA1*05:05-B1*03:19L
LEGNFYGPFV

SEQ ID NO: 9056 - protein, 12 aa, Severe acute respiratory syndrome coronavirus 2
  REGION 1..12: note = Table B: HLA-DQA1*03:02-B1*03:03L HLA-DRB1*04:03L HLA-DQA1*05:01-B1*02:01L HLA-DQA1*01:03-B1*06:01L
EGNFYGPFVDRQ

SEQ ID NO: 9057 - protein, 12 aa, Severe acute respiratory syndrome coronavirus 2
  REGION 1..12: note = Table B: HLA-DQA1*03:02-B1*03:03L HLA-DRB1*04:03L HLA-DRB1*04:02L HLA-DRB1*04:05L HLA-DQA1*01:02-B1*06:02L HLA-DQA1*05:01-B1*02:01L HLA-DPA1*02:01-B1*13:01L HLA-DPA1*03:01-B1*105:01L HLA-DPA1*01:02-B1*04:01L
  REGION 1..12: note = CONT. FROM ABOVE: HLA-DRB1*16:01L HLA-DQA1*01:03-B1*06:01L HLA-D RB1*04:08L HLA-DRB1*15:03L
GNFYGPFVDRQT

SEQ ID NO: 9058 - protein, 10 aa, Severe acute respiratory syndrome coronavirus 2
  REGION 1..10: note = Table B: HLA-DQA1*03:02-B1*03:03L HLA-DRB1*04:03L HLA-DRB1*13:03L HLA-DRB1*04:02L HLA-DRB1*04:05L HLA-DQA1*01-B1*05L HLA-DQA1*03:01-B1*03:02L HLA-DRB1*14:17L HLA-DRB1*16:01L HLA-DQA1*02:01-B1*03:03L
YGPFVDRQTA

SEQ ID NO: 9059 - protein, 11 aa, Severe acute respiratory syndrome coronavirus 2
  REGION 1..11: note = Table B: HLA-DQA1*03:02-B1*03:03L HLA-DQA1*05:01-B1*03:01L HLA-DRB1*01:03L HLA-DRB1*04:05L HLA-DRB4*03:01NL HLA-DRB1*14:01L HLA-DRB1*08:01L HLA-DQA1*05:01-B1*02:01L HLA-DRB1*12:01L HLA-DRB1*14:54L HLA-DPA1*01:02-B1*04:01L HLA-DRB1*16:01L
GPFVDRQTAQA

SEQ ID NO: 9060 - protein, 11 aa, Severe acute respiratory syndrome coronavirus 2
  REGION 1..11: note = Table B: HLA-DQA1*03:02-B1*03:03L HLA-DQA1*05:01-B1*03:01L HLA-DQA1*03:01-B1*03:02L HLA-DQA1*02:01-B1*03:03L
DRQTAQAAGTD

SEQ ID NO: 9061 - protein, 12 aa, Severe acute respiratory syndrome coronavirus 2
  REGION 1..12: note = Table B: HLA-DQA1*03:02-B1*03:03L HLA-DQA1*05:01-B1*03:01L HLA-DRB1*04:03L HLA-DRB1*04:02L HLA-DQA1*01:02-B1*06:02L HLA-DQA1*01:01-B1*05:01L HLA-DQA1*05:05-B1*03:19L HLA-DQA1*05:01-B1*02:01L HLA-DQA1*03:01-B1*03:02L
  REGION 1..12: note = CONT. FROM ABOVE: HLA-DQA1*05:05-B1*03:01L HLA-DRB1*14:17L HLA-D QA1*01:03-B1*06:01L HLA-DQA1*02:01-B1*03:03L
RQTAQAAGTDTT

SEQ ID NO: 9062 - protein, 10 aa, Severe acute respiratory syndrome coronavirus 2
  REGION 1..10: note = Table B: HLA-DQA1*03:02-B1*03:03L HLA-DQA1*05:05-B1*03:19L HLA-DPA1*01:03-B1*104:01L
AQAAGTDTTI

SEQ ID NO: 9063 - protein, 10 aa, Severe acute respiratory syndrome coronavirus 2
  REGION 1..10: note = Table B: HLA-DQA1*03:02-B1*03:03L HLA-DQA1*05:05-B1*03:19M HLA-DQA1*05:01-B1*02:01L HLA-DRB1*09:01L HLA-DPA1*03:01-B1*105:01L HLA-DQA1*03:01-B1*03:02L HLA-DPA1*01:03-B1*104:01L HLA-DRB1*16:01L
  REGION 1..10: note = CONT. FROM ABOVE: HLA-DQA1*02:01-B1*03:03L HLA-DRB1*15:03L
GTDTTITVNV

SEQ ID NO: 9064 - protein, 10 aa, Severe acute respiratory syndrome coronavirus 2
  REGION 1..10: note = Table B: HLA-DQA1*03:02-B1*03:03L HLA-DQA1*05:01-B1*02:01L HLA-DQA1*03:01-B1*03:02L
TDTTITVNVL

SEQ ID NO: 9065 - protein, 10 aa, Severe acute respiratory syndrome coronavirus 2
  REGION 1..10: note = Table B: HLA-DQA1*03:02-B1*03:03L HLA-DQA1*05:01-B1*03:01L HLA-DRB1*13:03L HLA-DQA1*01:02-B1*06:02M HLA-DRB1*08:77L HLA-DRB1*14:02L HLA-DQA1*05:05-B1*03:19L HLA-DQA1*05:01-B1*02:01L HLA-DRB4*01:01L
  REGION 1..10: note = CONT. FROM ABOVE: HLA-DPA1*01:03-B1*04:01L HLA-DPA1*02:01-B1*13: 01L HLA-DPA1*03:01-B1*105:01L HLA-DQA1*01:03-B1*06:01L HLA-DQA1* 02:01-B1*03:03L HLA-DRB1*15:03L
TTITVNVLAW

SEQ ID NO: 9066 - protein, 10 aa, Severe acute respiratory syndrome coronavirus 2
  REGION 1..10: note = Table B: HLA-DQA1*03:02-B1*03:03L HLA-DQA1*05:01-B1*03:01L HLA-DRB1*04:03L HLA-DRB1*01:03L HLA-DRB1*04:02L HLA-DRB1*04:05L HLA-DQA1*01:02-B1*06:02L HLA-DRB4*03:01NL HLA-DQA1*01:01-B1*05:01L HLA-DQA1*05:05-B1*03:19L
  REGION 1..10: note = CONT. FROM ABOVE: HLA-DQA1*05:01-B1*02:01L HLA-DPA1*01:03-B1*04: 02L HLA-DPA1*03:01-B1*105:01L HLA-DQA1*03:01-B1*03:02L HLA-DQA1* 05:05-B1*03:01L HLA-DRB1*14:17L HLA-DPA1*01:02-B1*04:01L HLA-DRB 1*16:01L HLA-DQA1*01:03-B1*06:01M HLA-DRB1*04:08L
  REGION 1..10: note = CONT. FROM ABOVE: HLA-DQA1*02:01-B1*03:03L
LYAAVINGDR

SEQ ID NO: 9067 - protein, 10 aa, Severe acute respiratory syndrome coronavirus 2
  REGION 1..10: note = Table B: HLA-DQA1*03:02-B1*03:03L HLA-DQA1*05:01-B1*03:01L HLA-DRB1*04:03L HLA-DRB1*13:03L HLA-DRB1*01:03L HLA-DRB1*04:05L HLA-DQA1*01:02-B1*06:02M HLA-DRB1*08:77L HLA-DPA1*01:03-B1*03:01L HLA-DPA1*03:01-B1*04:02L
  REGION 1..10: note = CONT. FROM ABOVE: HLA-DRB1*03:01L HLA-DRB1*14:01L HLA-DRB1*14:02 L HLA-DQA1*01-B1*05L HLA-DQA1*05:05-B1*03:19L HLA-DQA1*05:01-B1* 02:01L HLA-DRB4*01:01L HLA-DPA1*01:03-B1*04:01L HLA-DQA1*05:05-B 1*03:116L HLA-DPA1*01:03-B1*04:02L HLA-DRB1*12:01L
  REGION 1..10: note = CONT. FROM ABOVE: HLA-DPA1*02:01-B1*13:01L HLA-DPA1*03:01-B1*105 :01L HLA-DQA1*03:01-B1*03:02L HLA-DPA1*01:03-B1*104:01L HLA-DQA1 *05:05-B1*03:01L HLA-DPA1*01:02-B1*04:01L HLA-DRB1*10:01L HLA-DR B1*16:01L HLA-DQA1*01:03-B1*06:01L HLA-DQA1*02:01-B1*03:03L
  REGION 1..10: note = CONT. FROM ABOVE: HLA-DRB1*15:03L
YAAVINGDRW

SEQ ID NO: 9068 - protein, 10 aa, Severe acute respiratory syndrome coronavirus 2
  REGION 1..10: note = Table B: HLA-DQA1*03:02-B1*03:03M HLA-DQA1*05:01-B1*03:01L HLA-DQA1*01:02-B1*06:02L HLA-DRB1*01:02L HLA-DPA1*03:01-B1*04:02L HLA-DRB1*14:01L HLA-DRB1*14:02L HLA-DQA1*05:05-B1*03:19L HLA-DQA1*05:01-B1*02:01L
  REGION 1..10: note = CONT. FROM ABOVE: HLA-DQA1*05:05-B1*03:116L HLA-DRB1*09:01L HLA- DPA1*03:01-B1*105:01L HLA-DQA1*03:01-B1*03:02L HLA-DPA1*01:03-B1 *104:01L HLA-DPA1*01:02-B1*04:01L HLA-DQA1*01:03-B1*06:01L HLA-D RB1*08:03L HLA-DQA1*02:01-B1*03:03L HLA-DRB1*15:03L
AVINGDRWFL

SEQ ID NO: 9069 - protein, 10 aa, Severe acute respiratory syndrome coronavirus 2
  REGION 1..10: note = Table B: HLA-DQA1*03:02-B1*03:03L HLA-DQA1*01:02-B1*06:02L HLA-DPA1*03:01-B1*04:02L HLA-DQA1*05:05-B1*03:19L HLA-DPA1*01:03-B1*04:01L HLA-DPA1*01:03-B1*04:02L HLA-DPA1*02:01-B1*13:01L HLA-DPA1*03:01-B1*105:01L
  REGION 1..10: note = CONT. FROM ABOVE: HLA-DPA1*01:02-B1*04:01L HLA-DRB1*16:01L HLA-D QA1*01:03-B1*06:01L HLA-DQA1*02:01-B1*03:03L HLA-DRB1*15:03L
WFLNRFTTTL

SEQ ID NO: 9070 - protein, 11 aa, Severe acute respiratory syndrome coronavirus 2
  REGION 1..11: note = Table B: HLA-DQA1*03:02-B1*03:03L HLA-DRB1*16:01L
NRFTTTLNDFN

SEQ ID NO: 9071 - protein, 10 aa, Severe acute respiratory syndrome coronavirus 2
  REGION 1..10: note = Table B: HLA-DQA1*03:02-B1*03:03L HLA-DQA1*01-B1*05L HLA-DQA1*05:01-B1*02:01L HLA-DQA1*03:01-B1*03:02L
FTTTLNDFNL

SEQ ID NO: 9072 - protein, 10 aa, Severe acute respiratory syndrome coronavirus 2
  REGION 1..10: note = Table B: HLA-DQA1*03:02-B1*03:03M HLA-DQA1*05:01-B1*03:01L HLA-DQA1*01:02-B1*06:02L HLA-DRB1*01:02L HLA-DPA1*03:01-B1*04:02L HLA-DRB1*14:01L HLA-DRB1*14:02L HLA-DQA1*05:05-B1*03:19L HLA-DQA1*05:01-B1*02:01L
  REGION 1..10: note = CONT. FROM ABOVE: HLA-DPA1*01:03-B1*04:01L HLA-DQA1*05:05-B1*03: 116L HLA-DRB1*09:01L HLA-DPA1*01:03-B1*04:02L HLA-DPA1*02:01-B1* 13:01L HLA-DPA1*03:01-B1*105:01L HLA-DQA1*03:01-B1*03:02L HLA-DP A1*01:03-B1*104:01L HLA-DPA1*01:02-B1*04:01L HLA-DRB1*10:01L
  REGION 1..10: note = CONT. FROM ABOVE: HLA-DRB1*16:01L HLA-DQA1*01:03-B1*06:01L HLA-D RB1*08:03L HLA-DQA1*02:01-B1*03:03L HLA-DRB1*15:03L
TLNDFNLVAM

SEQ ID NO: 9073 - protein, 12 aa, Severe acute respiratory syndrome coronavirus 2
  REGION 1..12: note = Table B: HLA-DQA1*03:02-B1*03:03L HLA-DPA1*03:01-B1*105:01L HLA-DQA1*01:03-B1*06:01L HLA-DQA1*02:01-B1*03:03L
LNDFNLVAMKYN

SEQ ID NO: 9074 - protein, 13 aa, Severe acute respiratory syndrome coronavirus 2
  REGION 1..13: note = Table B: HLA-DQA1*03:02-B1*03:03L HLA-DQA1*05:01-B1*03:01L HLA-DRB1*04:03L HLA-DRB1*01:03L HLA-DRB1*04:05L HLA-DRB1*01:02L HLA-DRB1*08:04L HLA-DPA1*01:03-B1*03:01L HLA-DRB1*14:01L HLA-DRB1*08:01L HLA-DQA1*01-B1*05L HLA-DPA1*01:03-B1*04:01L
  REGION 1..13: note = CONT. FROM ABOVE: HLA-DPA1*01:03-B1*04:02L HLA-DPA1*02:01-B1*13: 01L HLA-DQA1*03:01-B1*03:02L HLA-DPA1*01:03-B1*02:01L HLA-DQA1*0 5:05-B1*03:01L HLA-DRB1*16:01L HLA-DQA1*01:03-B1*06:01L HLA-DRB1 *04:08L HLA-DQA1*02:01-B1*03:03L
DFNLVAMKYNYEP

SEQ ID NO: 9075 - protein, 13 aa, Severe acute respiratory syndrome coronavirus 2
  REGION 1..13: note = Table B: HLA-DQA1*03:02-B1*03:03L HLA-DRB1*01:03L HLA-DRB1*04:05L HLA-DRB1*01:02L HLA-DRB1*08:04L HLA-DRB1*08:01L HLA-DPA1*02:01-B1*13:01L
LVAMKYNYEPLTQ

SEQ ID NO: 9076 - protein, 10 aa, Severe acute respiratory syndrome coronavirus 2
  REGION 1..10: note = Table B: HLA-DQA1*03:02-B1*03:03L HLA-DRB1*04:03L HLA-DRB1*13:03L HLA-DRB1*01:03L HLA-DRB1*04:02L HLA-DRB1*04:05L HLA-DRB4*03:01NL HLA-DQA1*01-B1*05L HLA-DQA1*05:01-B1*02:01L HLA-DRB1*04:10L HLA-DPA1*03:01-B1*105:01L
  REGION 1..10: note = CONT. FROM ABOVE: HLA-DQA1*03:01-B1*03:02L HLA-DRB1*14:17L HLA-D PA1*01:02-B1*04:01L HLA-DRB1*16:01L HLA-DQA1*01:03-B1*06:01L HLA -DRB1*04:08L HLA-DQA1*02:01-B1*03:03L
YNYEPLTQDH

SEQ ID NO: 9077 - protein, 10 aa, Severe acute respiratory syndrome coronavirus 2
  REGION 1..10: note = Table B: HLA-DQA1*03:02-B1*03:03L HLA-DRB1*04:03L HLA-DQA1*01-B1*05L HLA-DQA1*05:01-B1*02:01L HLA-DQA1*03:01-B1*03:02L HLA-DRB1*16:01L HLA-DQA1*01:03-B1*06:01L HLA-DQA1*02:01-B1*03:03L
YEPLTQDHVD

SEQ ID NO: 9078 - protein, 11 aa, Severe acute respiratory syndrome coronavirus 2
  REGION 1..11: note = Table B: HLA-DQA1*03:02-B1*03:03L HLA-DRB1*04:03L HLA-DQA1*01-B1*05L HLA-DQA1*05:01-B1*02:01L HLA-DQA1*03:01-B1*03:02L HLA-DRB1*16:01L HLA-DQA1*02:01-B1*03:03L
EPLTQDHVDIL

SEQ ID NO: 9079 - protein, 10 aa, Severe acute respiratory syndrome coronavirus 2
  REGION 1..10: note = Table B: HLA-DQA1*03:02-B1*03:03L HLA-DQA1*05:05-B1*03:19L HLA-DQA1*03:01-B1*03:02L
HVDILGPLSA

SEQ ID NO: 9080 - protein, 12 aa, Severe acute respiratory syndrome coronavirus 2
  REGION 1..12: note = Table B: HLA-DQA1*03:02-B1*03:03L HLA-DQA1*05:01-B1*03:01L HLA-DRB1*01:03L HLA-DRB1*04:02L HLA-DRB1*04:04L HLA-DRB1*04:05L HLA-DQA1*01:02-B1*06:02L HLA-DRB1*01:02L HLA-DRB4*03:01NL HLA-DPA1*01:03-B1*03:01L HLA-DQA1*05:05-B1*03:19L
  REGION 1..12: note = CONT. FROM ABOVE: HLA-DQA1*05:01-B1*02:01L HLA-DRB1*04:10L HLA-D RB1*12:01L HLA-DPA1*03:01-B1*105:01L HLA-DRB1*14:54L HLA-DQA1*05 :05-B1*03:01L HLA-DRB1*10:01L HLA-DRB1*16:01L HLA-DRB1*04:08L
VDILGPLSAQTG

SEQ ID NO: 9081 - protein, 12 aa, Severe acute respiratory syndrome coronavirus 2
  REGION 1..12: note = Table B: HLA-DQA1*03:02-B1*03:03L HLA-DQA1*05:01-B1*03:01L HLA-DQA1*01:02-B1*06:02L HLA-DRB1*01:02L HLA-DQA1*05:05-B1*03:19L HLA-DQA1*03:01-B1*03:02L HLA-DQA1*05:05-B1*03:01L HLA-DQA1*01:03-B1*06:01L
  REGION 1..12: note = CONT. FROM ABOVE: HLA-DQA1*02:01-B1*03:03L
ILGPLSAQTGIA

SEQ ID NO: 9082 - protein, 12 aa, Severe acute respiratory syndrome coronavirus 2
  REGION 1..12: note = Table B: HLA-DQA1*03:02-B1*03:03L HLA-DQA1*05:01-B1*03:01L HLA-DQA1*05:05-B1*03:19L HLA-DQA1*05:01-B1*02:01L HLA-DQA1*03:01-B1*03:02L HLA-DQA1*05:05-B1*03:01L HLA-DQA1*02:01-B1*03:03L
GPLSAQTGIAVL

SEQ ID NO: 9083 - protein, 10 aa, Severe acute respiratory syndrome coronavirus 2
  REGION 1..10: note = Table B: HLA-DQA1*03:02-B1*03:03L HLA-DQA1*05:01-B1*03:01L HLA-DQA1*01:02-B1*06:02L HLA-DQA1*05:05-B1*03:19L HLA-DQA1*05:01-B1*02:01L HLA-DPA1*03:01-B1*105:01L HLA-DQA1*03:01-B1*03:02L HLA-DQA1*05:05-B1*03:01L
  REGION 1..10: note = CONT. FROM ABOVE: HLA-DQA1*01:03-B1*06:01L HLA-DQA1*02:01-B1*03: 03L
AQTGIAVLDM

SEQ ID NO: 9084 - protein, 10 aa, Severe acute respiratory syndrome coronavirus 2
  REGION 1..10: note = Table B: HLA-DQA1*03:02-B1*03:03L HLA-DQA1*01:02-B1*06:02L HLA-DPA1*03:01-B1*105:01L HLA-DQA1*03:01-B1*03:02L HLA-DQA1*02:01-B1*03:03L HLA-DRB1*15:03L
SLKELLQNGM

SEQ ID NO: 9085 - protein, 10 aa, Severe acute respiratory syndrome coronavirus 2
  REGION 1..10: note = Table B: HLA-DQA1*03:02-B1*03:03L HLA-DQA1*05:05-B1*03:19L
LQNGMNGRTI

SEQ ID NO: 9086 - protein, 10 aa, Severe acute respiratory syndrome coronavirus 2
  REGION 1..10: note = Table B: HLA-DQA1*03:02-B1*03:03L HLA-DQA1*05:01-B1*03:01L HLA-DQA1*03:01-B1*03:02L HLA-DQA1*02:01-B1*03:03L
NGRTILGSAL

SEQ ID NO: 9087 - protein, 12 aa, Severe acute respiratory syndrome coronavirus 2
  REGION 1..12: note = Table B: HLA-DQA1*03:02-B1*03:03L HLA-DQA1*05:01-B1*03:01L HLA-DRB1*04:03L HLA-DRB1*01:03L HLA-DQA1*01:02-B1*06:02L HLA-DRB1*01:02L HLA-DPA1*01:03-B1*03:01L HLA-DPA1*03:01-B1*04:02L HLA-DRB1*08:01L HLA-DQA1*01-B1*05L
  REGION 1..12: note = CONT. FROM ABOVE: HLA-DQA1*05:01-B1*02:01L HLA-DPA1*01:03-B1*04: 01L HLA-DPA1*01:03-B1*04:02L HLA-DRB1*12:01L HLA-DQA1*03:01-B1*0 3:02L HLA-DQA1*05:05-B1*03:01L HLA-DPA1*01:02-B1*04:01L HLA-DRB1 *16:01L HLA-DRB1*04:08L HLA-DQA1*02:01-B1*03:03L HLA-DRB1*15:03L
RTILGSALLEDE

SEQ ID NO: 9088 - protein, 10 aa, Severe acute respiratory syndrome coronavirus 2
  REGION 1..10: note = Table B: HLA-DQA1*03:02-B1*03:03L HLA-DQA1*01:02-B1*06:02L HLA-DQA1*05:05-B1*03:19L HLA-DQA1*05:01-B1*02:01L HLA-DQA1*02:01-B1*03:03L HLA-DRB1*15:03L
ALLEDEFTPF

SEQ ID NO: 9089 - protein, 10 aa, Severe acute respiratory syndrome coronavirus 2
  REGION 1..10: note = Table B: HLA-DQA1*03:02-B1*03:03L HLA-DQA1*05:05-B1*03:19L HLA-DPA1*01:03-B1*104:01L
LEDEFTPFDV

SEQ ID NO: 9090 - protein, 10 aa, Severe acute respiratory syndrome coronavirus 2
  REGION 1..10: note = Table B: HLA-DQA1*03:02-B1*03:03L
EDEFTPFDVV

SEQ ID NO: 9091 - protein, 10 aa, Severe acute respiratory syndrome coronavirus 2
  REGION 1..10: note = Table B: HLA-DQA1*03:02-B1*03:03L HLA-DRB1*13:02L HLA-DRB1*13:03L HLA-DRB1*04:02L HLA-DQA1*01:02-B1*06:02L HLA-DRB4*03:01NL HLA-DRB3*02:01L HLA-DRB1*08:01L HLA-DRB5*01:01L HLA-DQA1*01-B1*05L HLA-DQA1*05:01-B1*02:01L
  REGION 1..10: note = CONT. FROM ABOVE: HLA-DPA1*01:03-B1*04:02L HLA-DRB1*12:01L HLA-D PA1*03:01-B1*105:01L HLA-DQA1*03:01-B1*03:02L HLA-DQA1*05:05-B1* 03:01L HLA-DRB1*14:17L HLA-DPA1*01:02-B1*04:01L HLA-DRB1*16:01L HLA-DQA1*01:03-B1*06:01L HLA-DQA1*02:01-B1*03:03L
DEFTPFDVVR

SEQ ID NO: 9092 - protein, 10 aa, Severe acute respiratory syndrome coronavirus 2
  REGION 1..10: note = Table B: HLA-DQA1*03:02-B1*03:03L HLA-DQA1*05:01-B1*03:01L HLA-DRB1*04:03L HLA-DRB1*13:03L HLA-DRB1*01:03L HLA-DRB1*04:02L HLA-DRB1*04:04L HLA-DRB1*04:05L HLA-DQA1*01:02-B1*06:02L HLA-DRB1*01:02L HLA-DRB4*03:01NL HLA-DRB1*08:04L
  REGION 1..10: note = CONT. FROM ABOVE: HLA-DPA1*01:03-B1*03:01L HLA-DPA1*03:01-B1*04: 02L HLA-DRB1*14:01L HLA-DQA1*01:01-B1*05:01L HLA-DRB1*08:01L HLA -DQA1*01-B1*05L HLA-DQA1*05:05-B1*03:19L HLA-DQA1*05:01-B1*02:01 L HLA-DPA1*01:03-B1*04:01L HLA-DRB1*04:10L
  REGION 1..10: note = CONT. FROM ABOVE: HLA-DPA1*01:03-B1*04:02L HLA-DRB1*12:01L HLA-D PA1*02:01-B1*13:01L HLA-DPA1*03:01-B1*105:01L HLA-DQA1*03:01-B1* 03:02L HLA-DRB1*14:54L HLA-DPA1*01:03-B1*02:01L HLA-DQA1*05:05-B 1*03:01L HLA-DRB1*14:17L HLA-DPA1*01:02-B1*04:01L
  REGION 1..10: note = CONT. FROM ABOVE: HLA-DRB1*10:01L HLA-DRB1*16:01L HLA-DQA1*01:03 -B1*06:01L HLA-DRB1*04:08L HLA-DQA1*02:01-B1*03:03L HLA-DRB1*15: 03L
EFTPFDVVRQ

SEQ ID NO: 9093 - protein, 10 aa, Severe acute respiratory syndrome coronavirus 2
  REGION 1..10: note = Table B: HLA-DQA1*03:02-B1*03:03L HLA-DQA1*05:01-B1*03:01L HLA-DQA1*03:01-B1*03:02L HLA-DQA1*05:05-B1*03:01L HLA-DQA1*01:03-B1*06:01L HLA-DQA1*02:01-B1*03:03L
SGVTFQSAVK

SEQ ID NO: 9094 - protein, 10 aa, Severe acute respiratory syndrome coronavirus 2
  REGION 1..10: note = Table B: HLA-DQA1*03:02-B1*03:03M HLA-DQA1*05:01-B1*03:01L HLA-DRB1*04:03L HLA-DQA1*01:02-B1*06:02L HLA-DRB1*01:02L HLA-DPA1*03:01-B1*04:02L HLA-DRB1*14:01L HLA-DRB1*14:02L HLA-DQA1*05:05-B1*03:19L HLA-DQA1*05:01-B1*02:01L
  REGION 1..10: note = CONT. FROM ABOVE: HLA-DQA1*05:05-B1*03:116L HLA-DRB1*09:01L HLA- DRB1*12:01L HLA-DPA1*03:01-B1*105:01L HLA-DQA1*03:01-B1*03:02L H LA-DPA1*01:02-B1*04:01L HLA-DRB1*07:01L HLA-DRB1*10:01L HLA-DRB1 *16:01L HLA-DQA1*01:03-B1*06:01L HLA-DRB1*08:03L
  REGION 1..10: note = CONT. FROM ABOVE: HLA-DQA1*02:01-B1*03:03L HLA-DRB1*15:03L
VLVQSTQWSL

SEQ ID NO: 9095 - protein, 10 aa, Severe acute respiratory syndrome coronavirus 2
  REGION 1..10: note = Table B: HLA-DQA1*03:02-B1*03:03L HLA-DRB1*04:05L HLA-DQA1*01:02-B1*06:02L HLA-DPA1*03:01-B1*04:02L HLA-DRB1*14:02L HLA-DQA1*05:05-B1*03:19L HLA-DQA1*05:01-B1*02:01L HLA-DPA1*01:03-B1*04:01L
  REGION 1..10: note = CONT. FROM ABOVE: HLA-DPA1*02:01-B1*13:01L HLA-DPA1*03:01-B1*105 :01L HLA-DPA1*01:03-B1*104:01L HLA-DPA1*01:02-B1*04:01L HLA-DRB1 *16:01L HLA-DQA1*01:03-B1*06:01L HLA-DQA1*02:01-B1*03:03L HLA-DR B1*15:03L
FLYENAFLPF

SEQ ID NO: 9096 - protein, 10 aa, Severe acute respiratory syndrome coronavirus 2
  REGION 1..10: note = Table B: HLA-DQA1*03:02-B1*03:03L HLA-DPA1*03:01-B1*04:02L HLA-DQA1*01-B1*05L HLA-DQA1*05:01-B1*02:01L HLA-DPA1*01:03-B1*04:01L HLA-DPA1*03:01-B1*105:01L HLA-DPA1*01:02-B1*04:01L HLA-DQA1*01:03-B1*06:01L
LYENAFLPFA

SEQ ID NO: 9097 - protein, 10 aa, Severe acute respiratory syndrome coronavirus 2
  REGION 1..10: note = Table B: HLA-DQA1*03:02-B1*03:03L HLA-DQA1*05:05-B1*03:19M HLA-DQA1*03:01-B1*03:02L HLA-DPA1*01:03-B1*104:01L
YENAFLPFAM

SEQ ID NO: 9098 - protein, 10 aa, Severe acute respiratory syndrome coronavirus 2
  REGION 1..10: note = Table B: HLA-DQA1*03:02-B1*03:03L HLA-DQA1*01:02-B1*06:02L HLA-DQA1*05:05-B1*03:19L HLA-DPA1*02:01-B1*13:01L HLA-DPA1*03:01-B1*105:01L HLA-DQA1*01:03-B1*06:01L HLA-DRB1*15:03L
NAFLPFAMGI

SEQ ID NO: 9099 - protein, 10 aa, Severe acute respiratory syndrome coronavirus 2
  REGION 1..10: note = Table B: HLA-DQA1*03:02-B1*03:03L HLA-DQA1*05:01-B1*03:01L HLA-DRB1*13:03L HLA-DRB1*04:05L HLA-DQA1*01:02-B1*06:02L HLA-DPA1*03:01-B1*04:02L HLA-DRB1*14:01L HLA-DQA1*01-B1*05L HLA-DQA1*05:05-B1*03:116L HLA-DPA1*02:01-B1*13:01L
  REGION 1..10: note = CONT. FROM ABOVE: HLA-DPA1*03:01-B1*105:01L HLA-DQA1*03:01-B1*03 :02L HLA-DPA1*01:02-B1*04:01L HLA-DQA1*02:01-B1*03:03L HLA-DRB1* 15:03L
LPFAMGIIAM

SEQ ID NO: 9100 - protein, 10 aa, Severe acute respiratory syndrome coronavirus 2
  REGION 1..10: note = Table B: HLA-DQA1*03:02-B1*03:03L HLA-DQA1*05:05-B1*03:19L HLA-DQA1*05:05-B1*03:116L HLA-DPA1*02:01-B1*13:01L HLA-DQA1*03:01-B1*03:02L HLA-DPA1*01:03-B1*104:01L HLA-DQA1*01:03-B1*06:01L HLA-DQA1*02:01-B1*03:03L
  REGION 1..10: note = CONT. FROM ABOVE: HLA-DRB1*15:03L
LFLLPSLATV

SEQ ID NO: 9101 - protein, 10 aa, Severe acute respiratory syndrome coronavirus 2
  REGION 1..10: note = Table B: HLA-DQA1*03:02-B1*03:03L HLA-DQA1*05:01-B1*03:01L HLA-DRB1*04:03L HLA-DRB1*13:03L HLA-DRB1*01:03L HLA-DQA1*01:02-B1*06:02L HLA-DRB4*03:01NL HLA-DRB1*08:77L HLA-DPA1*01:03-B1*03:01L HLA-DPA1*03:01-B1*04:02L
  REGION 1..10: note = CONT. FROM ABOVE: HLA-DRB1*03:01L HLA-DRB1*14:01L HLA-DRB1*11:02 L HLA-DRB1*14:02L HLA-DQA1*01-B1*05L HLA-DQA1*05:05-B1*03:19M HL A-DQA1*05:01-B1*02:01L HLA-DRB4*01:01L HLA-DPA1*01:03-B1*04:01L HLA-DQA1*05:05-B1*03:116L HLA-DPA1*01:03-B1*04:02L
  REGION 1..10: note = CONT. FROM ABOVE: HLA-DRB1*12:01L HLA-DPA1*02:01-B1*13:01L HLA-D PA1*03:01-B1*105:01L HLA-DPA1*01:03-B1*104:01L HLA-DQA1*05:05-B1 *03:01L HLA-DPA1*01:02-B1*04:01L HLA-DRB1*10:01L HLA-DRB1*16:01L HLA-DQA1*01:03-B1*06:01L HLA-DRB1*08:02L
  REGION 1..10: note = CONT. FROM ABOVE: HLA-DQA1*02:01-B1*03:03L HLA-DRB1*15:03L
LLPSLATVAY

SEQ ID NO: 9102 - protein, 10 aa, Severe acute respiratory syndrome coronavirus 2
  REGION 1..10: note = Table B: HLA-DQA1*03:02-B1*03:03L HLA-DQA1*01:02-B1*06:02L HLA-DQA1*05:05-B1*03:19L HLA-DPA1*02:01-B1*13:01L HLA-DPA1*03:01-B1*105:01L HLA-DQA1*03:01-B1*03:02L HLA-DQA1*01:03-B1*06:01L HLA-DQA1*02:01-B1*03:03L
  REGION 1..10: note = CONT. FROM ABOVE: HLA-DRB1*15:03L
MVYMPASWVM

SEQ ID NO: 9103 - protein, 10 aa, Severe acute respiratory syndrome coronavirus 2
  REGION 1..10: note = Table B: HLA-DQA1*03:02-B1*03:03L HLA-DQA1*01:02-B1*06:02L HLA-DRB1*01:02L HLA-DQA1*05:05-B1*03:19L HLA-DQA1*05:05-B1*03:116L HLA-DPA1*02:01-B1*13:01M HLA-DPA1*03:01-B1*105:01L HLA-DQA1*03:01-B1*03:02L
  REGION 1..10: note = CONT. FROM ABOVE: HLA-DPA1*01:03-B1*104:01L HLA-DRB1*16:01L HLA- DQA1*01:03-B1*06:01L HLA-DRB1*08:03L HLA-DQA1*02:01-B1*03:03L HL A-DRB1*15:03L
YMPASWVMRI

SEQ ID NO: 9104 - protein, 10 aa, Severe acute respiratory syndrome coronavirus 2
  REGION 1..10: note = Table B: HLA-DQA1*03:02-B1*03:03L HLA-DPA1*03:01-B1*04:02L HLA-DQA1*01-B1*05L HLA-DQA1*05:05-B1*03:19L HLA-DQA1*05:01-B1*02:01L HLA-DRB1*09:01L HLA-DPA1*02:01-B1*13:01L HLA-DPA1*03:01-B1*105:01L
  REGION 1..10: note = CONT. FROM ABOVE: HLA-DQA1*03:01-B1*03:02L HLA-DQA1*01:03-B1*06: 01L HLA-DQA1*02:01-B1*03:03L HLA-DRB1*15:03L
TWLDMVDTSL

SEQ ID NO: 9105 - protein, 10 aa, Severe acute respiratory syndrome coronavirus 2
  REGION 1..10: note = Table B: HLA-DQA1*03:02-B1*03:03L HLA-DQA1*05:01-B1*03:01L HLA-DRB1*13:03L HLA-DQA1*01:02-B1*06:02M HLA-DRB1*08:77L HLA-DRB1*14:01L HLA-DRB1*14:02L HLA-DQA1*05:05-B1*03:19L HLA-DQA1*05:01-B1*02:01L HLA-DRB4*01:01L
  REGION 1..10: note = CONT. FROM ABOVE: HLA-DPA1*01:03-B1*04:01L HLA-DPA1*02:01-B1*13: 01L HLA-DPA1*03:01-B1*105:01L HLA-DQA1*02:01-B1*03:03L HLA-DRB1* 15:03L
DMVDTSLSGF

SEQ ID NO: 9106 - protein, 10 aa, Severe acute respiratory syndrome coronavirus 2
  REGION 1..10: note = Table B: HLA-DQA1*03:02-B1*03:03L HLA-DQA1*05:01-B1*03:01L HLA-DRB1*04:03L HLA-DRB1*13:02L HLA-DRB1*13:03L HLA-DRB1*01:03L HLA-DRB1*04:02L HLA-DRB4*03:01NL HLA-DQA1*01-B1*05L HLA-DQA1*05:01-B1*02:01L HLA-DRB1*12:01L
  REGION 1..10: note = CONT. FROM ABOVE: HLA-DPA1*03:01-B1*105:01L HLA-DQA1*03:01-B1*03 :02L HLA-DRB1*14:54L HLA-DQA1*05:05-B1*03:01L HLA-DRB1*14:17L HL A-DRB1*16:01L HLA-DQA1*01:03-B1*06:01L HLA-DQA1*02:01-B1*03:03L
MVDTSLSGFK

SEQ ID NO: 9107 - protein, 10 aa, Severe acute respiratory syndrome coronavirus 2
  REGION 1..10: note = Table B: HLA-DQA1*03:02-B1*03:03L HLA-DQA1*05:05-B1*03:19L HLA-DQA1*03:01-B1*03:02L
VDTSLSGFKL

SEQ ID NO: 9108 - protein, 12 aa, Severe acute respiratory syndrome coronavirus 2
  REGION 1..12: note = Table B: HLA-DQA1*03:02-B1*03:03L HLA-DRB1*04:04L HLA-DRB1*01:01L HLA-DRB1*08:04L HLA-DPA1*01:03-B1*03:01L HLA-DRB1*11:04L HLA-DRB1*04:10L HLA-DRB1*09:01L HLA-DRB1*07:01L HLA-DRB1*10:01L
LILMTARTVYDD

SEQ ID NO: 9109 - protein, 11 aa, Severe acute respiratory syndrome coronavirus 2
  REGION 1..11: note = Table B: HLA-DQA1*03:02-B1*03:03L HLA-DQA1*05:01-B1*03:01L HLA-DPA1*03:01-B1*105:01L HLA-DQA1*05:05-B1*03:01L HLA-DRB1*14:17L
LMTARTVYDDG

SEQ ID NO: 9110 - protein, 10 aa, Severe acute respiratory syndrome coronavirus 2
  REGION 1..10: note = Table B: HLA-DQA1*03:02-B1*03:03M HLA-DQA1*05:01-B1*03:01M HLA-DRB1*04:01L HLA-DRB1*04:03L HLA-DRB1*13:02L HLA-DRB1*13:03L HLA-DRB1*01:03L HLA-DRB1*04:02L HLA-DRB1*04:04L HLA-DRB1*04:05L HLA-DQA1*01:02-B1*06:02M HLA-DRB1*01:01L HLA-DRB1*01:02M
  REGION 1..10: note = CONT. FROM ABOVE: HLA-DRB4*03:01NL HLA-DRB1*08:77L HLA-DRB3*02:0 1L HLA-DPA1*01:03-B1*03:01L HLA-DPA1*03:01-B1*04:02L HLA-DRB1*03 :01L HLA-DRB1*14:01L HLA-DRB1*11:02L HLA-DRB1*11:03L HLA-DRB1*11 :04L HLA-DRB1*14:02M HLA-DQA1*01:01-B1*05:01L HLA-DRB1*08:01L
  REGION 1..10: note = CONT. FROM ABOVE: HLA-DRB1*11:01L HLA-DRB5*01:01L HLA-DQA1*01-B1 *05L HLA-DQA1*05:05-B1*03:19M HLA-DQA1*05:01-B1*02:01L HLA-DRB1* 13:01L HLA-DRB4*01:01L HLA-DPA1*01:03-B1*04:01L HLA-DQA1*05:05-B 1*03:116M HLA-DRB1*09:01L HLA-DPA1*01:03-B1*04:02L
  REGION 1..10: note = CONT. FROM ABOVE: HLA-DRB1*12:01L HLA-DPA1*02:01-B1*13:01L HLA-D PA1*03:01-B1*105:01M HLA-DQA1*03:01-B1*03:02M HLA-DPA1*01:03-B1* 104:01L HLA-DQA1*05:05-B1*03:01L HLA-DPA1*01:02-B1*04:01L HLA-DR B1*07:01L HLA-DRB1*10:01L HLA-DRB1*16:01M
  REGION 1..10: note = CONT. FROM ABOVE: HLA-DQA1*01:03-B1*06:01L HLA-DRB1*08:03L HLA -DQA1*02:01-B1*03:03M HLA-DRB1*15:01L HLA-DRB1*15:03M
TVYDDGARRV

SEQ ID NO: 9111 - protein, 10 aa, Severe acute respiratory syndrome coronavirus 2
  REGION 1..10: note = Table B: HLA-DQA1*03:02-B1*03:03L HLA-DQA1*05:01-B1*03:01L HLA-DRB1*04:03L HLA-DRB1*01:03M HLA-DRB1*04:05L HLA-DQA1*01:02-B1*06:02M HLA-DRB1*01:01L HLA-DRB1*01:02L HLA-DRB1*08:77L HLA-DPA1*01:03-B1*03:01L
  REGION 1..10: note = CONT. FROM ABOVE: HLA-DPA1*03:01-B1*04:02L HLA-DRB1*03:01L HLA-D RB1*14:01L HLA-DRB1*14:02L HLA-DQA1*01:01-B1*05:01L HLA-DRB1*11: 01L HLA-DQA1*01-B1*05L HLA-DQA1*05:05-B1*03:19L HLA-DQA1*05:01-B 1*02:01L HLA-DRB4*01:01L HLA-DPA1*01:03-B1*04:01L
  REGION 1..10: note = CONT. FROM ABOVE: HLA-DQA1*05:05-B1*03:116L HLA-DPA1*01:03-B1*04 :02L HLA-DRB1*12:01L HLA-DPA1*02:01-B1*13:01M HLA-DPA1*03:01-B1* 105:01L HLA-DPA1*01:02-B1*04:01L HLA-DRB1*10:01L HLA-DRB1*16:01L HLA-DQA1*01:03-B1*06:01M HLA-DRB1*08:02L
  REGION 1..10: note = CONT. FROM ABOVE: HLA-DQA1*02:01-B1*03:03M HLA-DRB1*15:03L
VYDDGARRVW

SEQ ID NO: 9112 - protein, 10 aa, Severe acute respiratory syndrome coronavirus 2
  REGION 1..10: note = Table B: HLA-DQA1*03:02-B1*03:03L HLA-DQA1*05:01-B1*03:01L HLA-DRB1*13:03L HLA-DRB1*01:03L HLA-DQA1*01:02-B1*06:02L HLA-DRB1*08:77L HLA-DPA1*01:03-B1*03:01L HLA-DPA1*03:01-B1*04:02L HLA-DRB1*03:01L HLA-DRB1*14:01L
  REGION 1..10: note = CONT. FROM ABOVE: HLA-DRB1*14:02L HLA-DQA1*01-B1*05L HLA-DQA1*05 :05-B1*03:19L HLA-DQA1*05:01-B1*02:01L HLA-DRB4*01:01L HLA-DPA1* 01:03-B1*04:01L HLA-DQA1*05:05-B1*03:116L HLA-DPA1*01:03-B1*04:0 2L HLA-DRB1*12:01L HLA-DPA1*02:01-B1*13:01L
  REGION 1..10: note = CONT. FROM ABOVE: HLA-DPA1*03:01-B1*105:01L HLA-DPA1*01:03-B1*10 4:01L HLA-DPA1*01:02-B1*04:01L HLA-DRB1*16:01L HLA-DQA1*01:03-B1 *06:01L HLA-DQA1*02:01-B1*03:03L HLA-DRB1*15:03L
NVLTLVYKVY

SEQ ID NO: 9113 - protein, 11 aa, Severe acute respiratory syndrome coronavirus 2
  REGION 1..11: note = Table B: HLA-DQA1*03:02-B1*03:03L HLA-DQA1*05:01-B1*03:01L HLA-DRB1*04:03L HLA-DRB1*01:02L HLA-DRB1*08:77L HLA-DRB3*02:01L HLA-DPA1*03:01-B1*04:02L HLA-DRB1*14:01L HLA-DQA1*01-B1*05L HLA-DQA1*05:01-B1*02:01L HLA-DRB1*12:01L
  REGION 1..11: note = CONT. FROM ABOVE: HLA-DPA1*03:01-B1*105:01L HLA-DQA1*03:01-B1*03 :02L HLA-DPA1*01:02-B1*04:01L HLA-DRB1*07:01L HLA-DRB1*04:08L
LVYKVYYGNAL

SEQ ID NO: 9114 - protein, 12 aa, Severe acute respiratory syndrome coronavirus 2
  REGION 1..12: note = Table B: HLA-DQA1*03:02-B1*03:03L HLA-DQA1*05:01-B1*03:01L HLA-DRB1*13:02L HLA-DRB1*04:04L HLA-DQA1*01:02-B1*06:02L HLA-DRB1*01:01L HLA-DRB1*08:77L HLA-DRB3*02:01L HLA-DPA1*03:01-B1*04:02L HLA-DRB1*11:03L HLA-DRB1*11:04L
  REGION 1..12: note = CONT. FROM ABOVE: HLA-DRB1*14:02L HLA-DRB1*08:01L HLA-DQA1*05:05 -B1*03:19L HLA-DQA1*05:01-B1*02:01L HLA-DRB1*09:01L HLA-DRB3*01: 01L HLA-DPA1*02:01-B1*13:01L HLA-DPA1*03:01-B1*105:01L HLA-DQA1* 05:05-B1*03:01L HLA-DPA1*01:02-B1*04:01L HLA-DRB1*07:01L
  REGION 1..12: note = CONT. FROM ABOVE: HLA-DRB1*10:01L HLA-DRB1*08:03L
VYKVYYGNALDQ

SEQ ID NO: 9115 - protein, 10 aa, Severe acute respiratory syndrome coronavirus 2
  REGION 1..10: note = Table B: HLA-DQA1*03:02-B1*03:03L HLA-DRB1*04:03L HLA-DQA1*01-B1*05L HLA-DQA1*05:01-B1*02:01L HLA-DQA1*03:01-B1*03:02L HLA-DQA1*02:01-B1*03:03L
VYYGNALDQA

SEQ ID NO: 9116 - protein, 11 aa, Severe acute respiratory syndrome coronavirus 2
  REGION 1..11: note = Table B: HLA-DQA1*03:02-B1*03:03L HLA-DQA1*03:01-B1*03:02L
YGNALDQAISM

SEQ ID NO: 9117 - protein, 10 aa, Severe acute respiratory syndrome coronavirus 2
  REGION 1..10: note = Table B: HLA-DQA1*03:02-B1*03:03L HLA-DQA1*05:01-B1*03:01L HLA-DRB1*13:03L HLA-DRB1*01:03L HLA-DQA1*01:02-B1*06:02M HLA-DRB1*08:77L HLA-DPA1*01:03-B1*03:01L HLA-DPA1*03:01-B1*04:02L HLA-DRB1*03:01L HLA-DRB1*14:01L
  REGION 1..10: note = CONT. FROM ABOVE: HLA-DRB1*14:02L HLA-DQA1*01-B1*05L HLA-DQA1*05 :05-B1*03:19L HLA-DQA1*05:01-B1*02:01L HLA-DRB4*01:01L HLA-DPA1* 01:03-B1*04:01L HLA-DQA1*05:05-B1*03:116L HLA-DPA1*01:03-B1*04:0 2L HLA-DRB1*12:01L HLA-DPA1*02:01-B1*13:01L
  REGION 1..10: note = CONT. FROM ABOVE: HLA-DPA1*03:01-B1*105:01M HLA-DPA1*01:03-B1*10 4:01L HLA-DPA1*01:02-B1*04:01L HLA-DRB1*10:01L HLA-DRB1*16:01L H LA-DQA1*01:03-B1*06:01L HLA-DQA1*02:01-B1*03:03L HLA-DRB1*15:03L
NALDQAISMW

SEQ ID NO: 9118 - protein, 11 aa, Severe acute respiratory syndrome coronavirus 2
  REGION 1..11: note = Table B: HLA-DQA1*03:02-B1*03:03L HLA-DQA1*05:05-B1*03:19L HLA-DQA1*03:01-B1*03:02L HLA-DPA1*01:03-B1*104:01L
ALDQAISMWAL

SEQ ID NO: 9119 - protein, 14 aa, Severe acute respiratory syndrome coronavirus 2
  REGION 1..14: note = Table B: HLA-DQA1*03:02-B1*03:03L HLA-DRB1*04:01L HLA-DRB3*02:01L HLA-DPA1*03:01-B1*04:02L HLA-DRB1*09:01L
ALIISVTSNYSGVV

SEQ ID NO: 9120 - protein, 12 aa, Severe acute respiratory syndrome coronavirus 2
  REGION 1..12: note = Table B: HLA-DQA1*03:02-B1*03:03L HLA-DQA1*05:01-B1*03:01L HLA-DRB1*13:02L HLA-DRB1*04:02L HLA-DRB4*03:01NL HLA-DRB1*14:01L HLA-DQA1*05:01-B1*02:01L HLA-DRB1*12:01L HLA-DRB1*12:02L HLA-DQA1*03:01-B1*03:02L HLA-DRB1*14:54L
  REGION 1..12: note = CONT. FROM ABOVE: HLA-DQA1*05:05-B1*03:01L HLA-DRB1*14:17L HLA-D RB1*16:01L HLA-DQA1*02:01-B1*03:03L HLA-DRB1*15:03L
ISVTSNYSGVVT

SEQ ID NO: 9121 - protein, 10 aa, Severe acute respiratory syndrome coronavirus 2
  REGION 1..10: note = Table B: HLA-DQA1*03:02-B1*03:03M HLA-DQA1*05:01-B1*03:01L HLA-DRB1*04:01L HLA-DRB1*13:03L HLA-DRB1*04:04L HLA-DRB1*04:05L HLA-DQA1*01:02-B1*06:02L HLA-DRB1*01:01L HLA-DRB1*01:02L HLA-DPA1*03:01-B1*04:02L HLA-DRB1*14:01L HLA-DRB1*14:02L
  REGION 1..10: note = CONT. FROM ABOVE: HLA-DRB1*08:01L HLA-DQA1*01-B1*05L HLA-DQA1*05 :05-B1*03:19L HLA-DQA1*05:01-B1*02:01L HLA-DQA1*05:05-B1*03:116L HLA-DRB1*09:01L HLA-DPA1*02:01-B1*13:01L HLA-DPA1*03:01-B1*105:0 1L HLA-DQA1*03:01-B1*03:02L HLA-DPA1*01:03-B1*104:01L
  REGION 1..10: note = CONT. FROM ABOVE: HLA-DPA1*01:02-B1*04:01L HLA-DRB1*10:01L HLA-D RB1*16:01L HLA-DQA1*01:03-B1*06:01L HLA-DRB1*08:03L HLA-DQA1*02: 01-B1*03:03M HLA-DRB1*15:03L
SNYSGVVTTV

SEQ ID NO: 9122 - protein, 10 aa, Severe acute respiratory syndrome coronavirus 2
  REGION 1..10: note = Table B: HLA-DQA1*03:02-B1*03:03L HLA-DQA1*05:01-B1*03:01L HLA-DQA1*01:02-B1*06:02L HLA-DPA1*03:01-B1*04:02L HLA-DQA1*05:05-B1*03:19L HLA-DQA1*05:01-B1*02:01L HLA-DPA1*03:01-B1*105:01L HLA-DQA1*03:01-B1*03:02L
  REGION 1..10: note = CONT. FROM ABOVE: HLA-DQA1*05:05-B1*03:01L HLA-DPA1*01:02-B1*04: 01L HLA-DRB1*16:01L HLA-DQA1*01:03-B1*06:01L HLA-DQA1*02:01-B1*0 3:03L HLA-DRB1*15:03L
NYSGVVTTVM

SEQ ID NO: 9123 - protein, 11 aa, Severe acute respiratory syndrome coronavirus 2
  REGION 1..11: note = Table B: HLA-DQA1*03:02-B1*03:03L HLA-DRB1*04:03L HLA-DQA1*05:05-B1*03:19L HLA-DPA1*01:02-B1*04:01L
VVTTVMFLARG

SEQ ID NO: 9124 - protein, 10 aa, Severe acute respiratory syndrome coronavirus 2
  REGION 1..10: note = Table B: HLA-DQA1*03:02-B1*03:03L HLA-DQA1*05:01-B1*03:01L HLA-DRB1*04:03L HLA-DRB1*13:02L HLA-DRB1*01:03L HLA-DRB1*04:05L HLA-DQA1*01:02-B1*06:02L HLA-DRB1*01:02L HLA-DRB1*08:77L HLA-DRB3*02:01L HLA-DPA1*01:03-B1*03:01L
  REGION 1..10: note = CONT. FROM ABOVE: HLA-DPA1*03:01-B1*04:02L HLA-DRB1*14:01L HLA-D RB1*14:02L HLA-DQA1*05:05-B1*03:19L HLA-DQA1*05:01-B1*02:01L HLA -DRB4*01:01L HLA-DPA1*01:03-B1*04:01L HLA-DPA1*01:03-B1*04:02L H LA-DRB1*12:01L HLA-DPA1*02:01-B1*13:01L
  REGION 1..10: note = CONT. FROM ABOVE: HLA-DPA1*03:01-B1*105:01L HLA-DQA1*05:05-B1*03 :01L HLA-DPA1*01:02-B1*04:01L HLA-DRB1*07:01L HLA-DRB1*16:01L HL A-DQA1*01:03-B1*06:01L HLA-DQA1*02:01-B1*03:03L HLA-DRB1*15:03L
VMFLARGIVF

SEQ ID NO: 9125 - protein, 10 aa, Severe acute respiratory syndrome coronavirus 2
  REGION 1..10: note = Table B: HLA-DQA1*03:02-B1*03:03L HLA-DQA1*01:02-B1*06:02L HLA-DPA1*03:01-B1*04:02L HLA-DPA1*02:01-B1*13:01L HLA-DPA1*03:01-B1*105:01L HLA-DQA1*01:03-B1*06:01L HLA-DQA1*02:01-B1*03:03L HLA-DRB1*15:03L
MFLARGIVFM

SEQ ID NO: 9126 - protein, 10 aa, Severe acute respiratory syndrome coronavirus 2
  REGION 1..10: note = Table B: HLA-DQA1*03:02-B1*03:03L
PIFFITGNTL

SEQ ID NO: 9127 - protein, 11 aa, Severe acute respiratory syndrome coronavirus 2
  REGION 1..11: note = Table B: HLA-DQA1*03:02-B1*03:03L HLA-DRB1*04:03L HLA-DRB1*13:03L HLA-DRB1*04:02L HLA-DRB1*04:05L HLA-DRB4*03:01NL HLA-DQA1*05:01-B1*02:01L HLA-DRB1*04:10L HLA-DQA1*03:01-B1*03:02L HLA-DRB1*14:54L HLA-DRB1*14:17L
  REGION 1..11: note = CONT. FROM ABOVE: HLA-DRB1*16:01L HLA-DQA1*02:01-B1*03:03L
GVYDYLVSTQE

SEQ ID NO: 9128 - protein, 12 aa, Severe acute respiratory syndrome coronavirus 2
  REGION 1..12: note = Table B: HLA-DQA1*03:02-B1*03:03L HLA-DQA1*05:01-B1*03:01L HLA-DRB1*01:02L HLA-DPA1*03:01-B1*04:02L HLA-DRB1*08:01L HLA-DRB1*04:10L HLA-DRB1*12:01L HLA-DQA1*05:05-B1*03:01L HLA-DPA1*01:02-B1*04:01L HLA-DRB1*10:01L HLA-DRB1*04:08L
VYDYLVSTQEFR

SEQ ID NO: 9129 - protein, 10 aa, Severe acute respiratory syndrome coronavirus 2
  REGION 1..10: note = Table B: HLA-DQA1*03:02-B1*03:03L HLA-DQA1*05:01-B1*03:01L HLA-DRB1*04:03L HLA-DRB1*13:02L HLA-DRB1*13:03L HLA-DRB1*01:03L HLA-DRB1*04:05L HLA-DQA1*01:02-B1*06:02L HLA-DRB4*03:01NL HLA-DRB1*08:77L HLA-DPA1*01:03-B1*03:01M
  REGION 1..10: note = CONT. FROM ABOVE: HLA-DPA1*03:01-B1*04:02L HLA-DRB1*03:01L HLA-D RB1*14:01L HLA-DRB1*11:02L HLA-DRB1*14:02L HLA-DQA1*01-B1*05M HL A-DQA1*05:05-B1*03:19M HLA-DQA1*05:01-B1*02:01M HLA-DRB4*01:01L HLA-DPA1*01:03-B1*04:01L HLA-DQA1*05:05-B1*03:116L
  REGION 1..10: note = CONT. FROM ABOVE: HLA-DPA1*01:03-B1*04:02L HLA-DRB1*12:01L HLA-D PA1*02:01-B1*13:01L HLA-DPA1*03:01-B1*105:01L HLA-DPA1*01:03-B1* 104:01M HLA-DQA1*05:05-B1*03:01L HLA-DPA1*01:02-B1*04:01L HLA-DR B1*10:01L HLA-DRB1*16:01M HLA-DQA1*01:03-B1*06:01L
  REGION 1..10: note = CONT. FROM ABOVE: HLA-DRB1*08:02L HLA-DQA1*02:01-B1*03:03L HLA-D RB1*15:03L
YLVSTQEFRY

SEQ ID NO: 9130 - protein, 11 aa, Severe acute respiratory syndrome coronavirus 2
  REGION 1..11: note = Table B: HLA-DQA1*03:02-B1*03:03L HLA-DQA1*05:01-B1*03:01L HLA-DRB1*08:77L HLA-DPA1*03:01-B1*04:02L HLA-DQA1*05:05-B1*03:19L HLA-DQA1*05:01-B1*02:01L HLA-DRB1*09:01L HLA-DQA1*03:01-B1*03:02L
  REGION 1..11: note = CONT. FROM ABOVE: HLA-DPA1*01:02-B1*04:01L HLA-DRB1*07:01L HLA-D RB1*15:03L
QEFRYMNSQGL

SEQ ID NO: 9131 - protein, 12 aa, Severe acute respiratory syndrome coronavirus 2
  REGION 1..12: note = Table B: HLA-DQA1*03:02-B1*03:03L HLA-DQA1*01:02-B1*06:02L HLA-DRB1*01:02L HLA-DQA1*05:05-B1*03:19L HLA-DQA1*05:01-B1*02:01L
YMNSQGLLPPKN

SEQ ID NO: 9132 - protein, 13 aa, Severe acute respiratory syndrome coronavirus 2
  REGION 1..13: note = Table B: HLA-DQA1*03:02-B1*03:03L HLA-DRB1*04:05L HLA-DRB1*04:10L
SQGLLPPKNSIDA

SEQ ID NO: 9133 - protein, 13 aa, Severe acute respiratory syndrome coronavirus 2
  REGION 1..13: note = Table B: HLA-DQA1*03:02-B1*03:03L HLA-DRB1*04:03L HLA-DRB1*13:02L HLA-DRB1*04:05L HLA-DRB1*01:02L HLA-DPA1*01:03-B1*03:01L HLA-DQA1*01:01-B1*05:01L HLA-DQA1*01-B1*05L HLA-DQA1*05:01-B1*02:01L HLA-DRB1*12:01L
  REGION 1..13: note = CONT. FROM ABOVE: HLA-DPA1*01:03-B1*104:01L HLA-DQA1*05:05-B1*03 :01L HLA-DRB1*16:01L HLA-DQA1*01:03-B1*06:01L HLA-DQA1*02:01-B1* 03:03L
LPPKNSIDAFKLN

SEQ ID NO: 9134 - protein, 10 aa, Severe acute respiratory syndrome coronavirus 2
  REGION 1..10: note = Table B: HLA-DQA1*03:02-B1*03:03L HLA-DQA1*01:02-B1*06:02L HLA-DRB1*01:02L HLA-DQA1*05:05-B1*03:19L HLA-DPA1*03:01-B1*105:01L HLA-DPA1*01:03-B1*104:01L HLA-DRB1*15:03L
NSIDAFKLNI

SEQ ID NO: 9135 - protein, 17 aa, Severe acute respiratory syndrome coronavirus 2
  REGION 1..17: note = Table B: HLA-DQA1*03:02-B1*03:03L HLA-DQA1*05:01-B1*02:01L HLA-DRB1*07:01L
IDAFKLNIKLLGVGGKP

SEQ ID NO: 9136 - protein, 10 aa, Severe acute respiratory syndrome coronavirus 2
  REGION 1..10: note = Table B: HLA-DQA1*03:02-B1*03:03L HLA-DQA1*05:01-B1*03:01L HLA-DRB1*04:03L HLA-DRB1*13:03L HLA-DRB1*01:03L HLA-DRB1*04:02L HLA-DQA1*01:02-B1*06:02L HLA-DRB4*03:01NL HLA-DQA1*05:05-B1*03:19L HLA-DQA1*05:01-B1*02:01L
  REGION 1..10: note = CONT. FROM ABOVE: HLA-DRB1*12:01L HLA-DPA1*03:01-B1*105:01L HLA- DQA1*03:01-B1*03:02L HLA-DQA1*05:05-B1*03:01L HLA-DRB1*14:17L HL A-DRB1*16:01L HLA-DQA1*01:03-B1*06:01L HLA-DQA1*02:01-B1*03:03L
VATVQSKMSD

SEQ ID NO: 9137 - protein, 10 aa, Severe acute respiratory syndrome coronavirus 2
  REGION 1..10: note = Table B: HLA-DQA1*03:02-B1*03:03L HLA-DPA1*03:01-B1*04:02L HLA-DQA1*02:01-B1*03:03L HLA-DRB1*15:03L
VVLLSVLQQL

SEQ ID NO: 9138 - protein, 14 aa, Severe acute respiratory syndrome coronavirus 2
  REGION 1..14: note = Table B: HLA-DQA1*03:02-B1*03:03L HLA-DRB1*13:02L HLA-DRB1*13:03L HLA-DRB1*11:03L HLA-DRB1*14:02L HLA-DQA1*01:01-B1*05:01L HLA-DPA1*01:03-B1*04:02L HLA-DRB3*01:01L HLA-DPA1*02:01-B1*13:01L
  REGION 1..14: note = CONT. FROM ABOVE: HLA-DPA1*01:03-B1*02:01L HLA-DPA1*01:02-B1*04: 01L HLA-DRB1*07:01L HLA-DRB1*08:02L HLA-DRB1*08:03L
LSVLQQLRVESSSK

SEQ ID NO: 9139 - protein, 12 aa, Severe acute respiratory syndrome coronavirus 2
  REGION 1..12: note = Table B: HLA-DQA1*03:02-B1*03:03L HLA-DRB1*13:02L HLA-DRB1*13:03L HLA-DRB1*01:03L HLA-DRB1*04:02L HLA-DRB1*04:05L HLA-DQA1*01:02-B1*06:02L HLA-DRB4*03:01NL HLA-DRB1*08:77L HLA-DRB3*02:01L HLA-DPA1*01:03-B1*03:01L
  REGION 1..12: note = CONT. FROM ABOVE: HLA-DPA1*03:01-B1*04:02L HLA-DRB1*11:03L HLA-D QA1*05:01-B1*02:01L HLA-DRB1*04:10L HLA-DRB1*12:02L HLA-DPA1*02: 01-B1*13:01L HLA-DPA1*03:01-B1*105:01L HLA-DRB1*14:54L HLA-DPA1* 01:02-B1*04:01L HLA-DRB1*07:01L HLA-DQA1*01:03-B1*06:01L
  REGION 1..12: note = CONT. FROM ABOVE: HLA-DRB1*04:08L
LQQLRVESSSKL

SEQ ID NO: 9140 - protein, 10 aa, Severe acute respiratory syndrome coronavirus 2
  REGION 1..10: note = Table B: HLA-DQA1*03:02-B1*03:03L HLA-DQA1*05:01-B1*03:01L HLA-DRB1*04:03L HLA-DRB1*13:03L HLA-DRB1*04:02L HLA-DRB1*14:01L HLA-DQA1*05:05-B1*03:19L HLA-DQA1*05:01-B1*02:01L HLA-DQA1*03:01-B1*03:02L HLA-DRB1*14:17L
  REGION 1..10: note = CONT. FROM ABOVE: HLA-DPA1*01:02-B1*04:01L HLA-DRB1*16:01L HLA-D QA1*01:03-B1*06:01L HLA-DQA1*02:01-B1*03:03L
VESSSKLWAQ

SEQ ID NO: 9141 - protein, 16 aa, Severe acute respiratory syndrome coronavirus 2
  REGION 1..16: note = Table B: HLA-DQA1*03:02-B1*03:03L HLA-DQA1*05:01-B1*03:01L HLA-DRB1*11:02L HLA-DRB1*14:02L
SSKLWAQCVQLHNDIL

SEQ ID NO: 9142 - protein, 14 aa, Severe acute respiratory syndrome coronavirus 2
  REGION 1..14: note = Table B: HLA-DQA1*03:02-B1*03:03L HLA-DQA1*05:01-B1*03:01L HLA-DRB1*13:02L HLA-DRB1*01:03L HLA-DRB1*04:05L HLA-DPA1*01:03-B1*03:01L HLA-DRB1*14:01L HLA-DQA1*05:01-B1*02:01L HLA-DRB1*12:01L
  REGION 1..14: note = CONT. FROM ABOVE: HLA-DPA1*02:01-B1*13:01L HLA-DPA1*01:03-B1*104 :01L HLA-DQA1*05:05-B1*03:01L HLA-DPA1*01:02-B1*04:01L HLA-DRB1* 16:01L HLA-DRB1*04:08L
VQLHNDILLAKDTT

SEQ ID NO: 9143 - protein, 10 aa, Severe acute respiratory syndrome coronavirus 2
  REGION 1..10: note = Table B: HLA-DQA1*03:02-B1*03:03L HLA-DRB1*04:03L HLA-DRB1*04:02L HLA-DQA1*01-B1*05L HLA-DQA1*05:01-B1*02:01L HLA-DQA1*03:01-B1*03:02L HLA-DRB1*14:17L HLA-DQA1*02:01-B1*03:03L
DILLAKDTTE

SEQ ID NO: 9144 - protein, 10 aa, Severe acute respiratory syndrome coronavirus 2
  REGION 1..10: note = Table B: HLA-DQA1*03:02-B1*03:03L HLA-DRB1*04:03L HLA-DRB1*13:03L HLA-DRB1*01:03L HLA-DRB1*04:02L HLA-DRB1*04:05L HLA-DRB4*03:01NL HLA-DQA1*01-B1*05L HLA-DRB1*04:10L HLA-DQA1*03:01-B1*03:02L HLA-DRB1*14:54L HLA-DRB1*14:17L
  REGION 1..10: note = CONT. FROM ABOVE: HLA-DRB1*16:01L HLA-DQA1*02:01-B1*03:03L
ILLAKDTTEA

SEQ ID NO: 9145 - protein, 11 aa, Severe acute respiratory syndrome coronavirus 2
  REGION 1..11: note = Table B: HLA-DQA1*03:02-B1*03:03L HLA-DRB1*13:02L HLA-DRB1*13:03L HLA-DRB1*01:03L HLA-DRB1*04:02L HLA-DRB1*04:05L HLA-DRB1*01:02L HLA-DRB4*03:01NL HLA-DRB1*14:01L HLA-DQA1*01:01-B1*05:01L HLA-DRB1*12:01L HLA-DRB3*01:01L
  REGION 1..11: note = CONT. FROM ABOVE: HLA-DRB1*14:54L HLA-DRB1*14:17L HLA-DPA1*01:02 -B1*04:01L HLA-DRB1*16:01L HLA-DRB1*04:08L HLA-DQA1*02:01-B1*03: 03L
LAKDTTEAFEK

SEQ ID NO: 9146 - protein, 10 aa, Severe acute respiratory syndrome coronavirus 2
  REGION 1..10: note = Table B: HLA-DQA1*03:02-B1*03:03L HLA-DQA1*01-B1*05L HLA-DQA1*03:01-B1*03:02L
KDTTEAFEKM

SEQ ID NO: 9147 - protein, 10 aa, Severe acute respiratory syndrome coronavirus 2
  REGION 1..10: note = Table B: HLA-DQA1*03:02-B1*03:03L HLA-DQA1*01:02-B1*06:02L HLA-DRB1*01:02L HLA-DQA1*05:05-B1*03:19L HLA-DQA1*05:01-B1*02:01L HLA-DPA1*03:01-B1*105:01L HLA-DQA1*03:01-B1*03:02L HLA-DQA1*01:03-B1*06:01L
  REGION 1..10: note = CONT. FROM ABOVE: HLA-DQA1*02:01-B1*03:03L HLA-DRB1*15:03L
DTTEAFEKMV

SEQ ID NO: 9148 - protein, 10 aa, Severe acute respiratory syndrome coronavirus 2
  REGION 1..10: note = Table B: HLA-DQA1*03:02-B1*03:03H HLA-DQA1*05:01-B1*03:01L HLA-DRB1*13:02L HLA-DRB1*13:03L HLA-DQA1*01:02-B1*06:02L HLA-DRB1*08:77L HLA-DPA1*03:01-B1*04:02L HLA-DRB1*03:01L HLA-DRB1*14:01L HLA-DRB1*11:02M HLA-DRB1*14:02L HLA-DRB1*11:01L
  REGION 1..10: note = CONT. FROM ABOVE: HLA-DQA1*01-B1*05L HLA-DQA1*05:05-B1*03:19H HL A-DQA1*05:01-B1*02:01L HLA-DRB4*01:01L HLA-DPA1*01:03-B1*04:01L HLA-DQA1*05:05-B1*03:116M HLA-DRB1*09:01M HLA-DPA1*01:03-B1*04:0 2M HLA-DRB1*12:01L HLA-DQA1*03:01-B1*03:02M
  REGION 1..10: note = CONT. FROM ABOVE: HLA-DPA1*01:03-B1*104:01M HLA-DPA1*01:02-B1*04 :01L HLA-DRB1*10:01L HLA-DRB1*16:01L HLA-DQA1*01:03-B1*06:01L HL A-DQA1*02:01-B1*03:03L HLA-DRB1*15:03L
TEAFEKMVSL

SEQ ID NO: 9149 - protein, 10 aa, Severe acute respiratory syndrome coronavirus 2
  REGION 1..10: note = Table B: HLA-DQA1*03:02-B1*03:03L HLA-DQA1*05:01-B1*03:01L HLA-DQA1*01:02-B1*06:02L HLA-DRB1*01:02L HLA-DPA1*03:01-B1*04:02L HLA-DQA1*05:05-B1*03:19L HLA-DQA1*05:01-B1*02:01L HLA-DPA1*01:03-B1*04:01L
  REGION 1..10: note = CONT. FROM ABOVE: HLA-DRB1*12:01L HLA-DPA1*02:01-B1*13:01L HLA-D PA1*03:01-B1*105:01L HLA-DQA1*03:01-B1*03:02L HLA-DPA1*01:02-B1* 04:01L HLA-DQA1*01:03-B1*06:01L HLA-DQA1*02:01-B1*03:03L HLA-DRB 1*15:03L
EAFEKMVSLL

SEQ ID NO: 9150 - protein, 10 aa, Severe acute respiratory syndrome coronavirus 2
  REGION 1..10: note = Table B: HLA-DQA1*03:02-B1*03:03L HLA-DRB1*11:02L HLA-DQA1*05:05-B1*03:19M HLA-DQA1*03:01-B1*03:02L HLA-DPA1*01:03-B1*104:01M HLA-DRB1*16:01L HLA-DQA1*01:03-B1*06:01L
FEKMVSLLSV

SEQ ID NO: 9151 - protein, 14 aa, Severe acute respiratory syndrome coronavirus 2
  REGION 1..14: note = Table B: HLA-DQA1*03:02-B1*03:03L HLA-DRB1*04:04L HLA-DRB1*08:04L HLA-DPA1*01:03-B1*03:01L HLA-DQA1*01-B1*05L HLA-DPA1*02:01-B1*13:01L HLA-DRB1*14:54L HLA-DRB1*10:01L HLA-DRB1*08:03L
SVLLSMQGAVDINK

SEQ ID NO: 9152 - protein, 10 aa, Severe acute respiratory syndrome coronavirus 2
  REGION 1..10: note = Table B: HLA-DQA1*03:02-B1*03:03M HLA-DQA1*05:01-B1*03:01L HLA-DRB1*04:03L HLA-DRB1*13:02L HLA-DRB1*13:03L HLA-DRB1*01:03L HLA-DRB1*04:02L HLA-DRB1*04:05L HLA-DQA1*01:02-B1*06:02L HLA-DRB1*01:02L HLA-DRB1*08:77L HLA-DRB3*02:01L
  REGION 1..10: note = CONT. FROM ABOVE: HLA-DPA1*01:03-B1*03:01L HLA-DPA1*03:01-B1*04: 02L HLA-DRB1*14:01L HLA-DRB1*14:02L HLA-DRB1*08:01L HLA-DQA1*01- B1*05L HLA-DQA1*05:05-B1*03:19L HLA-DQA1*05:01-B1*02:01L HLA-DRB 4*01:01L HLA-DPA1*01:03-B1*04:01L HLA-DQA1*05:05-B1*03:116L
  REGION 1..10: note = CONT. FROM ABOVE: HLA-DRB1*09:01L HLA-DPA1*01:03-B1*04:02L HLA-D RB1*12:01L HLA-DPA1*02:01-B1*13:01L HLA-DPA1*03:01-B1*105:01L HL A-DQA1*03:01-B1*03:02M HLA-DPA1*01:03-B1*104:01L HLA-DQA1*05:05- B1*03:01L HLA-DPA1*01:02-B1*04:01L HLA-DRB1*07:01L
  REGION 1..10: note = CONT. FROM ABOVE: HLA-DRB1*10:01L HLA-DRB1*16:01L HLA-DQA1*01:03 -B1*06:01L HLA-DRB1*08:03L HLA-DQA1*02:01-B1*03:03L HLA-DRB1*15: 03L
MQGAVDINKL

SEQ ID NO: 9153 - protein, 14 aa, Severe acute respiratory syndrome coronavirus 2
  REGION 1..14: note = Table B: HLA-DQA1*03:02-B1*03:03L HLA-DQA1*05:01-B1*03:01L HLA-DRB1*13:02L HLA-DRB1*13:03L HLA-DRB1*01:03L HLA-DRB1*04:04L HLA-DPA1*03:01-B1*04:02L HLA-DQA1*01:01-B1*05:01L HLA-DRB1*08:01L HLA-DQA1*01-B1*05L HLA-DQA1*05:01-B1*02:01L
  REGION 1..14: note = CONT. FROM ABOVE: HLA-DRB1*04:10L HLA-DRB3*01:01L HLA-DPA1*03:01 -B1*105:01L HLA-DPA1*01:03-B1*104:01L HLA-DQA1*05:05-B1*03:01L H LA-DPA1*01:02-B1*04:01L HLA-DRB1*07:01L HLA-DRB1*16:01L
INKLCEEMLDNRAT

SEQ ID NO: 9154 - protein, 10 aa, Severe acute respiratory syndrome coronavirus 2
  REGION 1..10: note = Table B: HLA-DQA1*03:02-B1*03:03H HLA-DQA1*05:01-B1*03:01L HLA-DRB1*13:03L HLA-DRB1*04:02L HLA-DRB1*08:77L HLA-DPA1*03:01-B1*04:02L HLA-DRB1*14:01L HLA-DRB1*11:02L HLA-DQA1*01-B1*05L HLA-DQA1*05:05-B1*03:19M
  REGION 1..10: note = CONT. FROM ABOVE: HLA-DQA1*05:01-B1*02:01L HLA-DRB4*01:01L HLA-D PA1*01:03-B1*04:01L HLA-DQA1*05:05-B1*03:116L HLA-DRB1*09:01M HL A-DPA1*01:03-B1*04:02L HLA-DRB1*12:01L HLA-DQA1*03:01-B1*03:02M HLA-DPA1*01:03-B1*104:01L HLA-DPA1*01:02-B1*04:01L
  REGION 1..10: note = CONT. FROM ABOVE: HLA-DRB1*10:01L HLA-DRB1*16:01L HLA-DQA1*02:01 -B1*03:03L HLA-DRB1*15:03L
EEMLDNRATL

SEQ ID NO: 9155 - protein, 10 aa, Severe acute respiratory syndrome coronavirus 2
  REGION 1..10: note = Table B: HLA-DQA1*03:02-B1*03:03L HLA-DRB1*04:03L HLA-DRB1*13:03L HLA-DRB1*04:02L HLA-DRB1*14:01L HLA-DQA1*03:01-B1*03:02L HLA-DRB1*16:01L
MLDNRATLQA

SEQ ID NO: 9156 - protein, 12 aa, Severe acute respiratory syndrome coronavirus 2
  REGION 1..12: note = Table B: HLA-DQA1*03:02-B1*03:03L HLA-DQA1*05:01-B1*03:01L HLA-DRB1*04:03L HLA-DRB1*13:02L HLA-DRB1*13:03L HLA-DRB1*01:03L HLA-DRB1*04:02L HLA-DRB1*04:04L HLA-DRB1*04:05L HLA-DQA1*01:02-B1*06:02L HLA-DRB1*01:02L HLA-DRB4*03:01NL
  REGION 1..12: note = CONT. FROM ABOVE: HLA-DPA1*01:03-B1*03:01L HLA-DRB1*04:10L HLA-D RB1*12:01L HLA-DPA1*02:01-B1*13:01L HLA-DPA1*03:01-B1*105:01L HL A-DRB1*14:54L HLA-DPA1*01:03-B1*104:01L HLA-DQA1*05:05-B1*03:01L HLA-DRB1*14:17L HLA-DRB1*16:01L HLA-DRB1*04:08L
LDNRATLQAIAS

SEQ ID NO: 9157 - protein, 12 aa, Severe acute respiratory syndrome coronavirus 2
  REGION 1..12: note = Table B: HLA-DQA1*03:02-B1*03:03L HLA-DQA1*05:01-B1*03:01L HLA-DRB1*04:03L HLA-DRB1*04:02L HLA-DRB1*04:05L HLA-DQA1*01:02-B1*06:02L HLA-DRB1*01:02L HLA-DPA1*01:03-B1*03:01L HLA-DQA1*01:01-B1*05:01L
  REGION 1..12: note = CONT. FROM ABOVE: HLA-DQA1*05:05-B1*03:19L HLA-DQA1*05:01-B1*02: 01L HLA-DRB1*12:01L HLA-DPA1*02:01-B1*13:01L HLA-DPA1*03:01-B1*1 05:01L HLA-DPA1*01:03-B1*104:01L HLA-DQA1*05:05-B1*03:01L HLA-DR B1*14:17L HLA-DRB1*16:01L
DNRATLQAIASE

SEQ ID NO: 9158 - protein, 10 aa, Severe acute respiratory syndrome coronavirus 2
  REGION 1..10: note = Table B: HLA-DQA1*03:02-B1*03:03L HLA-DQA1*05:01-B1*03:01L HLA-DRB1*13:03L HLA-DRB1*01:03L HLA-DQA1*01:02-B1*06:02M HLA-DRB1*08:77L HLA-DPA1*01:03-B1*03:01L HLA-DPA1*03:01-B1*04:02L HLA-DRB1*03:01L HLA-DRB1*14:01L
  REGION 1..10: note = CONT. FROM ABOVE: HLA-DRB1*14:02L HLA-DQA1*01-B1*05L HLA-DQA1*05 :05-B1*03:19L HLA-DQA1*05:01-B1*02:01L HLA-DRB4*01:01L HLA-DPA1* 01:03-B1*04:01L HLA-DQA1*05:05-B1*03:116L HLA-DPA1*01:03-B1*04:0 2L HLA-DPA1*02:01-B1*13:01L HLA-DPA1*03:01-B1*105:01L
  REGION 1..10: note = CONT. FROM ABOVE: HLA-DQA1*03:01-B1*03:02L HLA-DPA1*01:03-B1*104 :01L HLA-DPA1*01:02-B1*04:01L HLA-DRB1*10:01L HLA-DRB1*16:01L HL A-DQA1*01:03-B1*06:01L HLA-DQA1*02:01-B1*03:03L HLA-DRB1*15:03L
ATLQAIASEF

SEQ ID NO: 9159 - protein, 13 aa, Severe acute respiratory syndrome coronavirus 2
  REGION 1..13: note = Table B: HLA-DQA1*03:02-B1*03:03L HLA-DRB1*04:03L HLA-DRB1*04:02L HLA-DRB1*04:05L HLA-DQA1*01:02-B1*06:02L HLA-DQA1*01-B1*05L HLA-DQA1*05:01-B1*02:01L HLA-DRB1*04:10L HLA-DRB1*12:01L HLA-DQA1*03:01-B1*03:02L HLA-DRB1*14:17L
  REGION 1..13: note = CONT. FROM ABOVE: HLA-DRB1*16:01L HLA-DQA1*01:03-B1*06:01L HLA-D QA1*02:01-B1*03:03L
LQAIASEFSSLPS

SEQ ID NO: 9160 - protein, 10 aa, Severe acute respiratory syndrome coronavirus 2
  REGION 1..10: note = Table B: HLA-DQA1*03:02-B1*03:03L HLA-DQA1*05:05-B1*03:19L HLA-DQA1*03:01-B1*03:02L
SEFSSLPSYA

SEQ ID NO: 9161 - protein, 10 aa, Severe acute respiratory syndrome coronavirus 2
  REGION 1..10: note = Table B: HLA-DQA1*03:02-B1*03:03L HLA-DQA1*05:01-B1*03:01L HLA-DRB1*04:03L HLA-DQA1*01:02-B1*06:02L HLA-DRB1*14:02L HLA-DQA1*05:05-B1*03:19L HLA-DQA1*05:01-B1*02:01L HLA-DRB1*12:01L HLA-DPA1*02:01-B1*13:01L
  REGION 1..10: note = CONT. FROM ABOVE: HLA-DPA1*03:01-B1*105:01L HLA-DRB1*16:01L HLA- DQA1*01:03-B1*06:01L HLA-DQA1*02:01-B1*03:03L HLA-DRB1*15:03L
FSSLPSYAAF

SEQ ID NO: 9162 - protein, 12 aa, Severe acute respiratory syndrome coronavirus 2
  REGION 1..12: note = Table B: HLA-DQA1*03:02-B1*03:03L HLA-DQA1*05:01-B1*03:01L HLA-DRB1*04:01L HLA-DRB1*13:02L HLA-DRB1*13:03L HLA-DRB1*01:03L HLA-DRB1*04:02L HLA-DRB1*04:04L HLA-DRB1*04:05L HLA-DQA1*01:02-B1*06:02L HLA-DRB1*01:02L HLA-DRB4*03:01NL
  REGION 1..12: note = CONT. FROM ABOVE: HLA-DRB1*08:04L HLA-DRB1*08:77L HLA-DPA1*01:03 -B1*03:01L HLA-DRB1*14:01L HLA-DRB1*11:03L HLA-DRB1*11:04L HLA-D RB1*08:01L HLA-DRB5*01:01L HLA-DQA1*01-B1*05L HLA-DQA1*05:05-B1* 03:19L HLA-DQA1*05:01-B1*02:01L HLA-DRB1*04:10M HLA-DRB1*09:01L
  REGION 1..12: note = CONT. FROM ABOVE: HLA-DRB1*12:01L HLA-DRB1*12:02L HLA-DPA1*03:01 -B1*105:01L HLA-DQA1*03:01-B1*03:02L HLA-DRB1*14:54L HLA-DQA1*05 :05-B1*03:01L HLA-DRB1*14:17M HLA-DRB1*10:01L HLA-DRB1*16:01L HL A-DRB1*04:08L HLA-DRB1*08:03L HLA-DQA1*02:01-B1*03:03L
  REGION 1..12: note = CONT. FROM ABOVE: HLA-DRB1*15:03L
LPSYAAFATAQE

SEQ ID NO: 9163 - protein, 12 aa, Severe acute respiratory syndrome coronavirus 2
  REGION 1..12: note = Table B: HLA-DQA1*03:02-B1*03:03L HLA-DRB1*04:02L HLA-DRB1*04:05L HLA-DRB4*03:01NL HLA-DQA1*01-B1*05L HLA-DQA1*05:01-B1*02:01L HLA-DRB1*04:10L HLA-DPA1*03:01-B1*105:01L HLA-DQA1*03:01-B1*03:02L
  REGION 1..12: note = CONT. FROM ABOVE: HLA-DRB1*14:17L HLA-DRB1*16:01L HLA-DRB1*04:08 L HLA-DQA1*02:01-B1*03:03L
PSYAAFATAQEA

SEQ ID NO: 9164 - protein, 10 aa, Severe acute respiratory syndrome coronavirus 2
  REGION 1..10: note = Table B: HLA-DQA1*03:02-B1*03:03L HLA-DQA1*05:01-B1*03:01L HLA-DRB1*13:03L HLA-DRB1*01:03L HLA-DQA1*01:02-B1*06:02L HLA-DRB1*08:77L HLA-DPA1*01:03-B1*03:01L HLA-DRB1*03:01L HLA-DRB1*14:02L HLA-DQA1*05:05-B1*03:19L
  REGION 1..10: note = CONT. FROM ABOVE: HLA-DQA1*05:01-B1*02:01L HLA-DRB4*01:01L HLA-D PA1*01:03-B1*04:01L HLA-DPA1*01:03-B1*04:02L HLA-DPA1*02:01-B1*1 3:01L HLA-DPA1*03:01-B1*105:01L HLA-DRB1*16:01L HLA-DQA1*01:03-B 1*06:01L HLA-DRB1*08:02L HLA-DQA1*02:01-B1*03:03L
  REGION 1..10: note = CONT. FROM ABOVE: HLA-DRB1*15:03L
AAFATAQEAY

SEQ ID NO: 9165 - protein, 10 aa, Severe acute respiratory syndrome coronavirus 2
  REGION 1..10: note = Table B: HLA-DQA1*03:02-B1*03:03L HLA-DQA1*05:01-B1*03:01L HLA-DQA1*01:02-B1*06:02L HLA-DQA1*05:05-B1*03:19L HLA-DQA1*05:01-B1*02:01L HLA-DQA1*03:01-B1*03:02L HLA-DQA1*05:05-B1*03:01L HLA-DQA1*01:03-B1*06:01L
  REGION 1..10: note = CONT. FROM ABOVE: HLA-DQA1*02:01-B1*03:03L
AFATAQEAYE

SEQ ID NO: 9166 - protein, 10 aa, Severe acute respiratory syndrome coronavirus 2
  REGION 1..10: note = Table B: HLA-DQA1*03:02-B1*03:03L HLA-DQA1*05:01-B1*03:01L HLA-DRB1*04:03L HLA-DQA1*01:02-B1*06:02L HLA-DQA1*05:05-B1*03:19L HLA-DQA1*05:01-B1*02:01L HLA-DQA1*03:01-B1*03:02L HLA-DQA1*05:05-B1*03:01L
  REGION 1..10: note = CONT. FROM ABOVE: HLA-DQA1*01:03-B1*06:01L HLA-DQA1*02:01-B1*03: 03L
FATAQEAYEQ

SEQ ID NO: 9167 - protein, 12 aa, Severe acute respiratory syndrome coronavirus 2
  REGION 1..12: note = Table B: HLA-DQA1*03:02-B1*03:03L HLA-DQA1*01-B1*05L HLA-DQA1*05:01-B1*02:01L
ATAQEAYEQAVA

SEQ ID NO: 9168 - protein, 12 aa, Severe acute respiratory syndrome coronavirus 2
  REGION 1..12: note = Table B: HLA-DQA1*03:02-B1*03:03L HLA-DRB1*04:03L HLA-DQA1*01-B1*05L HLA-DQA1*05:01-B1*02:01L HLA-DQA1*03:01-B1*03:02L HLA-DQA1*02:01-B1*03:03L
TAQEAYEQAVAN

SEQ ID NO: 9169 - protein, 13 aa, Severe acute respiratory syndrome coronavirus 2
  REGION 1..13: note = Table B: HLA-DQA1*03:02-B1*03:03L HLA-DRB1*04:02L HLA-DRB1*04:05L HLA-DRB4*03:01NL HLA-DRB1*14:17L HLA-DRB1*16:01L HLA-DQA1*02:01-B1*03:03L
AQEAYEQAVANGD

SEQ ID NO: 9170 - protein, 11 aa, Severe acute respiratory syndrome coronavirus 2
  REGION 1..11: note = Table B: HLA-DQA1*03:02-B1*03:03L HLA-DRB1*13:03L HLA-DRB1*01:03L HLA-DRB1*04:02L HLA-DRB4*03:01NL HLA-DQA1*01-B1*05L HLA-DQA1*05:01-B1*02:01L HLA-DRB1*04:10L HLA-DRB1*12:01L HLA-DRB1*14:54L HLA-DRB1*10:01L HLA-DRB1*16:01L
  REGION 1..11: note = CONT. FROM ABOVE: HLA-DRB1*04:08L HLA-DQA1*02:01-B1*03:03L
AYEQAVANGDS

SEQ ID NO: 9171 - protein, 11 aa, Severe acute respiratory syndrome coronavirus 2
  REGION 1..11: note = Table B: HLA-DQA1*03:02-B1*03:03L HLA-DQA1*05:01-B1*03:01L HLA-DRB1*13:03L HLA-DRB1*04:02L HLA-DRB4*03:01NL HLA-DQA1*01-B1*05L HLA-DQA1*05:01-B1*02:01L HLA-DRB1*04:10L HLA-DRB1*14:54L HLA-DQA1*05:05-B1*03:01L HLA-DRB1*16:01L
  REGION 1..11: note = CONT. FROM ABOVE: HLA-DQA1*02:01-B1*03:03L
YEQAVANGDSE

SEQ ID NO: 9172 - protein, 10 aa, Severe acute respiratory syndrome coronavirus 2
  REGION 1..10: note = Table B: HLA-DQA1*03:02-B1*03:03L
AVANGDSEVV

SEQ ID NO: 9173 - protein, 10 aa, Severe acute respiratory syndrome coronavirus 2
  REGION 1..10: note = Table B: HLA-DQA1*03:02-B1*03:03L HLA-DQA1*03:01-B1*03:02L
VANGDSEVVL

SEQ ID NO: 9174 - protein, 10 aa, Severe acute respiratory syndrome coronavirus 2
  REGION 1..10: note = Table B: HLA-DQA1*03:02-B1*03:03L HLA-DQA1*05:01-B1*03:01L HLA-DQA1*01-B1*05L HLA-DQA1*05:05-B1*03:19L HLA-DQA1*05:01-B1*02:01L HLA-DQA1*03:01-B1*03:02L HLA-DPA1*01:02-B1*04:01L
GDSEVVLKKL

SEQ ID NO: 9175 - protein, 12 aa, Severe acute respiratory syndrome coronavirus 2
  REGION 1..12: note = Table B: HLA-DQA1*03:02-B1*03:03L HLA-DQA1*05:01-B1*03:01L HLA-DQA1*01:02-B1*06:02L HLA-DRB1*08:01L HLA-DQA1*05:01-B1*02:01L HLA-DRB1*16:01L HLA-DRB1*04:08L
SLNVAKSEFDRD

SEQ ID NO: 9176 - protein, 12 aa, Severe acute respiratory syndrome coronavirus 2
  REGION 1..12: note = Table B: HLA-DQA1*03:02-B1*03:03L HLA-DQA1*05:01-B1*03:01L HLA-DRB1*04:02L HLA-DQA1*01:02-B1*06:02L HLA-DQA1*01:01-B1*05:01L HLA-DQA1*05:01-B1*02:01L HLA-DRB1*04:10L HLA-DPA1*03:01-B1*105:01L
  REGION 1..12: note = CONT. FROM ABOVE: HLA-DQA1*05:05-B1*03:01L HLA-DRB1*16:01L HLA-D RB1*04:08L
LNVAKSEFDRDA

SEQ ID NO: 9177 - protein, 12 aa, Severe acute respiratory syndrome coronavirus 2
  REGION 1..12: note = Table B: HLA-DQA1*03:02-B1*03:03L HLA-DRB1*01:03L HLA-DRB1*04:02L HLA-DRB1*04:05L HLA-DQA1*01:02-B1*06:02L HLA-DQA1*05:01-B1*02:01L HLA-DRB1*14:17L HLA-DRB1*16:01L
NVAKSEFDRDAA

SEQ ID NO: 9178 - protein, 10 aa, Severe acute respiratory syndrome coronavirus 2
  REGION 1..10: note = Table B: HLA-DQA1*03:02-B1*03:03L HLA-DQA1*01-B1*05L HLA-DQA1*03:01-B1*03:02L
SEFDRDAAMQ

SEQ ID NO: 9179 - protein, 11 aa, Severe acute respiratory syndrome coronavirus 2
  REGION 1..11: note = Table B: HLA-DQA1*03:02-B1*03:03L HLA-DRB1*04:02L HLA-DRB1*04:05L HLA-DRB4*03:01NL HLA-DQA1*05:01-B1*02:01L HLA-DRB1*04:10L HLA-DRB1*12:01L HLA-DQA1*03:01-B1*03:02L HLA-DRB1*14:54L HLA-DRB1*14:17L HLA-DRB1*16:01L
  REGION 1..11: note = CONT. FROM ABOVE: HLA-DQA1*02:01-B1*03:03L
LEKMADQAMTQ

SEQ ID NO: 9180 - protein, 10 aa, Severe acute respiratory syndrome coronavirus 2
  REGION 1..10: note = Table B: HLA-DQA1*03:02-B1*03:03M HLA-DQA1*05:01-B1*03:01L HLA-DRB1*13:02L HLA-DRB1*13:03L HLA-DRB1*01:03L HLA-DQA1*01:02-B1*06:02L HLA-DRB3*02:01L HLA-DPA1*03:01-B1*04:02L HLA-DRB1*14:01L HLA-DRB1*14:02L
  REGION 1..10: note = CONT. FROM ABOVE: HLA-DRB1*08:01L HLA-DQA1*05:05-B1*03:19L HLA-D QA1*05:01-B1*02:01L HLA-DPA1*01:03-B1*04:01L HLA-DQA1*05:05-B1*0 3:116M HLA-DRB1*09:01L HLA-DPA1*01:03-B1*04:02L HLA-DPA1*02:01-B 1*13:01L HLA-DPA1*03:01-B1*105:01L HLA-DQA1*03:01-B1*03:02M
  REGION 1..10: note = CONT. FROM ABOVE: HLA-DPA1*01:03-B1*104:01L HLA-DPA1*01:02-B1*04 :01L HLA-DRB1*10:01L HLA-DRB1*16:01L HLA-DQA1*01:03-B1*06:01L HL A-DRB1*08:03L HLA-DQA1*02:01-B1*03:03M HLA-DRB1*15:03L
KMADQAMTQM

SEQ ID NO: 9181 - protein, 11 aa, Severe acute respiratory syndrome coronavirus 2
  REGION 1..11: note = Table B: HLA-DQA1*03:02-B1*03:03L
SEDKRAKVTSA

SEQ ID NO: 9182 - protein, 10 aa, Severe acute respiratory syndrome coronavirus 2
  REGION 1..10: note = Table B: HLA-DQA1*03:02-B1*03:03L HLA-DQA1*03:01-B1*03:02L HLA-DQA1*02:01-B1*03:03L
AKVTSAMQTM

SEQ ID NO: 9183 - protein, 10 aa, Severe acute respiratory syndrome coronavirus 2
  REGION 1..10: note = Table B: HLA-DQA1*03:02-B1*03:03L HLA-DQA1*05:01-B1*03:01L HLA-DQA1*01:02-B1*06:02L HLA-DQA1*05:05-B1*03:19L HLA-DQA1*05:01-B1*02:01L HLA-DPA1*03:01-B1*105:01L HLA-DQA1*03:01-B1*03:02L HLA-DRB1*16:01L
  REGION 1..10: note = CONT. FROM ABOVE: HLA-DQA1*01:03-B1*06:01L HLA-DQA1*02:01-B1*03: 03L HLA-DRB1*15:03L
KVTSAMQTML

SEQ ID NO: 9184 - protein, 10 aa, Severe acute respiratory syndrome coronavirus 2
  REGION 1..10: note = Table B: HLA-DQA1*03:02-B1*03:03L HLA-DQA1*01:02-B1*06:02L HLA-DPA1*03:01-B1*105:01L HLA-DRB1*15:03L
SAMQTMLFTM

SEQ ID NO: 9185 - protein, 10 aa, Severe acute respiratory syndrome coronavirus 2
  REGION 1..10: note = Table B: HLA-DQA1*03:02-B1*03:03M HLA-DQA1*05:01-B1*03:01L HLA-DQA1*01:02-B1*06:02L HLA-DRB1*11:02L HLA-DRB1*14:02L HLA-DQA1*05:05-B1*03:19M HLA-DQA1*05:01-B1*02:01L HLA-DQA1*05:05-B1*03:116L HLA-DRB1*09:01L
  REGION 1..10: note = CONT. FROM ABOVE: HLA-DPA1*03:01-B1*105:01L HLA-DQA1*03:01-B1*03 :02L HLA-DPA1*01:03-B1*104:01L HLA-DRB1*10:01L HLA-DRB1*16:01L H LA-DQA1*01:03-B1*06:01L HLA-DQA1*02:01-B1*03:03L HLA-DRB1*15:03L
KLDNDALNNI

SEQ ID NO: 9186 - protein, 11 aa, Severe acute respiratory syndrome coronavirus 2
  REGION 1..11: note = Table B: HLA-DQA1*03:02-B1*03:03L HLA-DQA1*05:01-B1*02:01L HLA-DQA1*03:01-B1*03:02L
LDNDALNNIIN

SEQ ID NO: 9187 - protein, 11 aa, Severe acute respiratory syndrome coronavirus 2
  REGION 1..11: note = Table B: HLA-DQA1*03:02-B1*03:03L HLA-DQA1*05:01-B1*02:01L HLA-DQA1*02:01-B1*03:03L
DNDALNNIINN

SEQ ID NO: 9188 - protein, 10 aa, Severe acute respiratory syndrome coronavirus 2
  REGION 1..10: note = Table B: HLA-DQA1*03:02-B1*03:03L HLA-DQA1*05:01-B1*03:01L HLA-DRB1*13:03L HLA-DQA1*01-B1*05L HLA-DPA1*03:01-B1*105:01L HLA-DQA1*03:01-B1*03:02L HLA-DRB1*15:03L
DALNNIINNA

SEQ ID NO: 9189 - protein, 10 aa, Severe acute respiratory syndrome coronavirus 2
  REGION 1..10: note = Table B: HLA-DQA1*03:02-B1*03:03L HLA-DQA1*05:01-B1*03:01L HLA-DRB1*04:03L HLA-DRB1*13:03L HLA-DRB1*01:03L HLA-DRB1*04:02L HLA-DRB1*04:05L HLA-DQA1*01:02-B1*06:02L HLA-DRB4*03:01NL HLA-DQA1*01:01-B1*05:01L HLA-DQA1*01-B1*05L
  REGION 1..10: note = CONT. FROM ABOVE: HLA-DQA1*05:01-B1*02:01L HLA-DRB1*04:10L HLA-D RB1*12:01L HLA-DQA1*03:01-B1*03:02L HLA-DRB1*14:54L HLA-DQA1*05: 05-B1*03:01L HLA-DRB1*14:17L HLA-DRB1*16:01L HLA-DQA1*01:03-B1*0 6:01L HLA-DRB1*04:08L HLA-DQA1*02:01-B1*03:03L
NNIINNARDG

SEQ ID NO: 9190 - protein, 11 aa, Severe acute respiratory syndrome coronavirus 2
  REGION 1..11: note = Table B: HLA-DQA1*03:02-B1*03:03L HLA-DRB1*04:03L HLA-DRB1*13:03L HLA-DQA1*01-B1*05L HLA-DPA1*03:01-B1*105:01L HLA-DQA1*03:01-B1*03:02L HLA-DPA1*01:02-B1*04:01L HLA-DRB1*16:01L
VPLNIIPLTTA

SEQ ID NO: 9191 - protein, 10 aa, Severe acute respiratory syndrome coronavirus 2
  REGION 1..10: note = Table B: HLA-DQA1*03:02-B1*03:03L HLA-DQA1*05:01-B1*03:01L HLA-DRB1*04:03L HLA-DRB1*13:03L HLA-DRB1*01:03L HLA-DRB1*04:02L HLA-DRB1*04:05L HLA-DQA1*01:02-B1*06:02L HLA-DRB1*01:02L HLA-DRB4*03:01NL HLA-DRB1*08:77L HLA-DRB3*02:01L
  REGION 1..10: note = CONT. FROM ABOVE: HLA-DPA1*01:03-B1*03:01L HLA-DPA1*03:01-B1*04: 02L HLA-DRB1*14:01L HLA-DQA1*01-B1*05L HLA-DQA1*05:05-B1*03:19L HLA-DQA1*05:01-B1*02:01L HLA-DRB1*12:01L HLA-DPA1*02:01-B1*13:01 L HLA-DPA1*03:01-B1*105:01L HLA-DQA1*03:01-B1*03:02L
  REGION 1..10: note = CONT. FROM ABOVE: HLA-DQA1*05:05-B1*03:01L HLA-DRB1*14:17L HLA-D PA1*01:02-B1*04:01L HLA-DRB1*07:01L HLA-DRB1*16:01L HLA-DQA1*01: 03-B1*06:01L HLA-DQA1*02:01-B1*03:03L HLA-DRB1*15:03L
IIPLTTAAKL

SEQ ID NO: 9192 - protein, 10 aa, Severe acute respiratory syndrome coronavirus 2
  REGION 1..10: note = Table B: HLA-DQA1*03:02-B1*03:03L HLA-DQA1*05:01-B1*03:01L HLA-DQA1*05:01-B1*02:01L HLA-DQA1*03:01-B1*03:02L HLA-DQA1*01:03-B1*06:01L HLA-DQA1*02:01-B1*03:03L
IPLTTAAKLM

SEQ ID NO: 9193 - protein, 12 aa, Severe acute respiratory syndrome coronavirus 2
  REGION 1..12: note = Table B: HLA-DQA1*03:02-B1*03:03L HLA-DQA1*05:01-B1*03:01L HLA-DRB1*04:03L HLA-DQA1*01:02-B1*06:02M HLA-DQA1*05:05-B1*03:19L HLA-DPA1*03:01-B1*105:01L HLA-DQA1*03:01-B1*03:02L HLA-DQA1*05:05-B1*03:01L
  REGION 1..12: note = CONT. FROM ABOVE: HLA-DQA1*02:01-B1*03:03L
TTAAKLMVVIPD

SEQ ID NO: 9194 - protein, 12 aa, Severe acute respiratory syndrome coronavirus 2
  REGION 1..12: note = Table B: HLA-DQA1*03:02-B1*03:03L HLA-DQA1*05:01-B1*03:01L HLA-DRB1*04:05L HLA-DPA1*01:03-B1*03:01L HLA-DRB1*12:01L HLA-DPA1*02:01-B1*13:01L HLA-DPA1*03:01-B1*105:01L HLA-DQA1*05:05-B1*03:01L HLA-DRB1*16:01L HLA-DRB1*15:03L
AAKLMVVIPDYN

SEQ ID NO: 9195 - protein, 10 aa, Severe acute respiratory syndrome coronavirus 2
  REGION 1..10: note = Table B: HLA-DQA1*03:02-B1*03:03L HLA-DQA1*05:01-B1*03:01L HLA-DRB1*04:03L HLA-DRB1*13:02L HLA-DRB1*13:03L HLA-DRB1*01:03L HLA-DRB1*04:05L HLA-DQA1*01:02-B1*06:02M HLA-DRB4*03:01NL HLA-DRB1*08:77L HLA-DPA1*01:03-B1*03:01L
  REGION 1..10: note = CONT. FROM ABOVE: HLA-DPA1*03:01-B1*04:02L HLA-DRB1*03:01L HLA-D RB1*14:01L HLA-DRB1*11:02L HLA-DRB1*14:02L HLA-DQA1*01-B1*05L HL A-DQA1*05:05-B1*03:19M HLA-DQA1*05:01-B1*02:01M HLA-DRB4*01:01L HLA-DPA1*01:03-B1*04:01M HLA-DQA1*05:05-B1*03:116L
  REGION 1..10: note = CONT. FROM ABOVE: HLA-DPA1*01:03-B1*04:02L HLA-DRB1*12:01L HLA-D PA1*02:01-B1*13:01L HLA-DPA1*03:01-B1*105:01L HLA-DQA1*03:01-B1* 03:02L HLA-DPA1*01:03-B1*104:01L HLA-DQA1*05:05-B1*03:01L HLA-DP A1*01:02-B1*04:01L HLA-DRB1*10:01L HLA-DRB1*16:01L
  REGION 1..10: note = CONT. FROM ABOVE: HLA-DQA1*01:03-B1*06:01L HLA-DRB1*08:02L HLA-D QA1*02:01-B1*03:03L HLA-DRB1*15:03L
MVVIPDYNTY

SEQ ID NO: 9196 - protein, 12 aa, Severe acute respiratory syndrome coronavirus 2
  REGION 1..12: note = Table B: HLA-DQA1*03:02-B1*03:03L HLA-DQA1*05:01-B1*03:01L HLA-DRB1*04:04L HLA-DRB1*04:05L HLA-DQA1*01:02-B1*06:02L HLA-DRB1*01:02L HLA-DRB1*08:04L HLA-DPA1*01:03-B1*03:01L HLA-DPA1*03:01-B1*04:02L HLA-DRB1*03:01L HLA-DRB1*14:02L
  REGION 1..12: note = CONT. FROM ABOVE: HLA-DRB1*04:10L HLA-DPA1*01:03-B1*04:02L HLA-D RB3*01:01L HLA-DPA1*03:01-B1*105:01L HLA-DQA1*01:03-B1*06:01L HL A-DRB1*04:08L HLA-DRB1*15:03L
VVIPDYNTYKNT

SEQ ID NO: 9197 - protein, 13 aa, Severe acute respiratory syndrome coronavirus 2
  REGION 1..13: note = Table B: HLA-DQA1*03:02-B1*03:03L HLA-DQA1*05:01-B1*03:01L HLA-DRB1*04:03L HLA-DRB1*13:03L HLA-DRB1*01:03L HLA-DRB1*04:02L HLA-DRB1*04:04L HLA-DRB1*04:05L HLA-DQA1*01:02-B1*06:02L HLA-DRB1*01:02L HLA-DRB4*03:01NL HLA-DRB1*08:04L HLA-DRB1*14:01L
  REGION 1..13: note = CONT. FROM ABOVE: HLA-DRB1*11:04L HLA-DRB1*08:01L HLA-DQA1*05:01 -B1*02:01L HLA-DRB1*04:10L HLA-DRB1*12:01L HLA-DPA1*02:01-B1*13: 01L HLA-DPA1*03:01-B1*105:01L HLA-DQA1*03:01-B1*03:02L HLA-DRB1* 14:54L HLA-DRB1*14:17L HLA-DRB1*10:01L HLA-DRB1*16:01L
  REGION 1..13: note = CONT. FROM ABOVE: HLA-DQA1*01:03-B1*06:01L HLA-DRB1*04:08L HLA-D RB1*08:03L HLA-DQA1*02:01-B1*03:03L HLA-DRB1*15:03L
IPDYNTYKNTCDG

SEQ ID NO: 9198 - protein, 13 aa, Severe acute respiratory syndrome coronavirus 2
  REGION 1..13: note = Table B: HLA-DQA1*03:02-B1*03:03L HLA-DQA1*05:01-B1*03:01L HLA-DRB1*04:02L HLA-DRB1*04:05L HLA-DPA1*03:01-B1*04:02L HLA-DQA1*05:05-B1*03:19L HLA-DRB1*04:10L HLA-DPA1*03:01-B1*105:01L HLA-DQA1*03:01-B1*03:02L
  REGION 1..13: note = CONT. FROM ABOVE: HLA-DQA1*05:05-B1*03:01L HLA-DRB1*16:01L HLA-D QA1*01:03-B1*06:01L HLA-DQA1*02:01-B1*03:03L
DGTTFTYASALWE

SEQ ID NO: 9199 - protein, 14 aa, Severe acute respiratory syndrome coronavirus 2
  REGION 1..14: note = Table B: HLA-DQA1*03:02-B1*03:03L HLA-DQA1*05:01-B1*03:01L HLA-DRB1*13:02L HLA-DRB1*13:03L HLA-DRB1*01:03L HLA-DRB1*04:05L HLA-DRB1*01:02L HLA-DRB1*08:04L HLA-DRB3*02:01L HLA-DPA1*01:03-B1*03:01L HLA-DRB1*14:02L HLA-DRB1*08:01L
  REGION 1..14: note = CONT. FROM ABOVE: HLA-DRB4*01:01L HLA-DRB1*04:10L HLA-DRB1*09:01 L HLA-DPA1*02:01-B1*13:01L HLA-DQA1*03:01-B1*03:02L HLA-DPA1*01: 03-B1*104:01L HLA-DPA1*01:02-B1*04:01L HLA-DRB1*10:01L HLA-DRB1* 16:01L HLA-DRB1*04:08L HLA-DRB1*08:03L HLA-DQA1*02:01-B1*03:03L
GTTFTYASALWEIQ

SEQ ID NO: 9200 - protein, 12 aa, Severe acute respiratory syndrome coronavirus 2
  REGION 1..12: note = Table B: HLA-DQA1*03:02-B1*03:03L HLA-DQA1*05:01-B1*03:01L HLA-DQA1*01-B1*05L HLA-DQA1*05:05-B1*03:19L HLA-DQA1*05:01-B1*02:01L HLA-DQA1*05:05-B1*03:01L HLA-DRB1*16:01L HLA-DRB1*04:08L HLA-DQA1*02:01-B1*03:03L
  REGION 1..12: note = CONT. FROM ABOVE: HLA-DRB1*15:03L
FTYASALWEIQQ

SEQ ID NO: 9201 - protein, 10 aa, Severe acute respiratory syndrome coronavirus 2
  REGION 1..10: note = Table B: HLA-DQA1*03:02-B1*03:03L HLA-DQA1*05:05-B1*03:19L
ASALWEIQQV

SEQ ID NO: 9202 - protein, 10 aa, Severe acute respiratory syndrome coronavirus 2
  REGION 1..10: note = Table B: HLA-DQA1*03:02-B1*03:03L HLA-DQA1*01-B1*05L HLA-DQA1*03:01-B1*03:02L
WEIQQVVDAD

SEQ ID NO: 9203 - protein, 10 aa, Severe acute respiratory syndrome coronavirus 2
  REGION 1..10: note = Table B: HLA-DQA1*03:02-B1*03:03L HLA-DRB1*04:01L HLA-DRB1*04:03M HLA-DRB1*13:03L HLA-DRB1*01:03L HLA-DRB1*04:02L HLA-DRB1*04:04L HLA-DRB1*04:05L HLA-DRB4*03:01NL HLA-DRB1*11:04L HLA-DQA1*01-B1*05L HLA-DQA1*05:01-B1*02:01L HLA-DRB1*04:10L
  REGION 1..10: note = CONT. FROM ABOVE: HLA-DRB1*12:01L HLA-DQA1*03:01-B1*03:02L HLA-D RB1*14:54L HLA-DRB1*14:17M HLA-DRB1*10:01L HLA-DRB1*16:01L HLA-D RB1*04:08L HLA-DRB1*08:03L HLA-DQA1*02:01-B1*03:03L
IQQVVDADSK

SEQ ID NO: 9204 - protein, 10 aa, Severe acute respiratory syndrome coronavirus 2
  REGION 1..10: note = Table B: HLA-DQA1*03:02-B1*03:03L HLA-DQA1*03:01-B1*03:02L
QVVDADSKIV

SEQ ID NO: 9205 - protein, 10 aa, Severe acute respiratory syndrome coronavirus 2
  REGION 1..10: note = Table B: HLA-DQA1*03:02-B1*03:03L HLA-DQA1*05:01-B1*03:01L HLA-DRB1*04:01L HLA-DRB1*04:03L HLA-DRB1*13:02L HLA-DRB1*13:03L HLA-DRB1*01:03L HLA-DRB1*04:02L HLA-DRB1*04:04L HLA-DRB1*04:05L HLA-DRB1*01:02L HLA-DRB4*03:01NL HLA-DRB1*08:04L HLA-DRB1*08:77L
  REGION 1..10: note = CONT. FROM ABOVE: HLA-DRB3*02:01L HLA-DPA1*01:03-B1*03:01L HLA-D RB1*14:01L HLA-DRB1*11:03L HLA-DRB1*11:04L HLA-DRB1*14:02L HLA-D QA1*01:01-B1*05:01L HLA-DRB5*01:01L HLA-DQA1*01-B1*05L HLA-DQA1* 05:05-B1*03:19L HLA-DQA1*05:01-B1*02:01L HLA-DRB1*04:10L
  REGION 1..10: note = CONT. FROM ABOVE: HLA-DRB1*12:01L HLA-DRB1*12:02L HLA-DRB3*01:01 L HLA-DPA1*03:01-B1*105:01L HLA-DQA1*03:01-B1*03:02L HLA-DRB1*14 :54L HLA-DQA1*05:05-B1*03:01L HLA-DRB1*14:17L HLA-DRB1*10:01L HL A-DRB1*16:01L HLA-DRB1*04:08L HLA-DQA1*02:01-B1*03:03L
  REGION 1..10: note = CONT. FROM ABOVE: HLA-DRB1*15:03L
VVDADSKIVQ

SEQ ID NO: 9206 - protein, 10 aa, Severe acute respiratory syndrome coronavirus 2
  REGION 1..10: note = Table B: HLA-DQA1*03:02-B1*03:03M HLA-DQA1*05:01-B1*03:01L HLA-DRB1*13:02L HLA-DRB1*13:03L HLA-DRB1*01:03L HLA-DRB1*04:02L HLA-DQA1*01:02-B1*06:02L HLA-DRB3*02:01L HLA-DPA1*01:03-B1*03:01L HLA-DPA1*03:01-B1*04:02L
  REGION 1..10: note = CONT. FROM ABOVE: HLA-DRB1*14:01L HLA-DRB1*14:02L HLA-DRB1*08:01 L HLA-DQA1*01-B1*05L HLA-DQA1*05:05-B1*03:19L HLA-DQA1*05:01-B1* 02:01L HLA-DPA1*01:03-B1*04:01L HLA-DQA1*05:05-B1*03:116L HLA-DR B1*09:01L HLA-DPA1*01:03-B1*04:02L HLA-DPA1*03:01-B1*105:01L
  REGION 1..10: note = CONT. FROM ABOVE: HLA-DQA1*03:01-B1*03:02M HLA-DPA1*01:03-B1*104 :01L HLA-DPA1*01:02-B1*04:01L HLA-DRB1*10:01L HLA-DRB1*16:01L HL A-DQA1*02:01-B1*03:03L HLA-DRB1*15:03L
VDADSKIVQL

SEQ ID NO: 9207 - protein, 12 aa, Severe acute respiratory syndrome coronavirus 2
  REGION 1..12: note = Table B: HLA-DQA1*03:02-B1*03:03L HLA-DQA1*01:02-B1*06:02L HLA-DQA1*05:01-B1*02:01L HLA-DQA1*03:01-B1*03:02L HLA-DQA1*01:03-B1*06:01L HLA-DQA1*02:01-B1*03:03L
ADSKIVQLSEIS

SEQ ID NO: 9208 - protein, 10 aa, Severe acute respiratory syndrome coronavirus 2
  REGION 1..10: note = Table B: HLA-DQA1*03:02-B1*03:03L HLA-DQA1*05:01-B1*03:01L HLA-DRB1*08:77L HLA-DRB3*02:01L HLA-DPA1*03:01-B1*04:02L HLA-DRB1*14:01L HLA-DQA1*05:01-B1*02:01L HLA-DRB1*12:01L HLA-DRB1*12:02L HLA-DQA1*03:01-B1*03:02L HLA-DRB1*16:01L
  REGION 1..10: note = CONT. FROM ABOVE: HLA-DQA1*02:01-B1*03:03L HLA-DRB1*15:03L
KIVQLSEISM

SEQ ID NO: 9209 - protein, 11 aa, Severe acute respiratory syndrome coronavirus 2
  REGION 1..11: note = Table B: HLA-DQA1*03:02-B1*03:03L HLA-DQA1*05:01-B1*03:01L HLA-DRB1*04:03L HLA-DRB1*13:02L HLA-DRB1*13:03L HLA-DRB1*01:03L HLA-DRB1*04:02L HLA-DRB1*04:04L HLA-DRB1*04:05L HLA-DQA1*01:02-B1*06:02L HLA-DRB1*01:02L HLA-DRB4*03:01NL
  REGION 1..11: note = CONT. FROM ABOVE: HLA-DRB1*08:77L HLA-DRB3*02:01L HLA-DRB1*14:01 L HLA-DRB1*11:03L HLA-DQA1*01-B1*05L HLA-DRB1*04:10L HLA-DRB1*12 :02L HLA-DPA1*03:01-B1*105:01L HLA-DQA1*03:01-B1*03:02L HLA-DRB1 *14:54L HLA-DQA1*05:05-B1*03:01L HLA-DRB1*14:17L HLA-DRB1*10:01L
  REGION 1..11: note = CONT. FROM ABOVE: HLA-DRB1*16:01L HLA-DQA1*01:03-B1*06:01L HLA-D QA1*02:01-B1*03:03L
IVQLSEISMDN

SEQ ID NO: 9210 - protein, 11 aa, Severe acute respiratory syndrome coronavirus 2
  REGION 1..11: note = Table B: HLA-DQA1*03:02-B1*03:03L HLA-DRB1*04:03L HLA-DQA1*01-B1*05L HLA-DQA1*05:01-B1*02:01L HLA-DQA1*03:01-B1*03:02L HLA-DRB1*14:17L HLA-DQA1*02:01-B1*03:03L
LSEISMDNSPN

SEQ ID NO: 9211 - protein, 10 aa, Severe acute respiratory syndrome coronavirus 2
  REGION 1..10: note = Table B: HLA-DQA1*03:02-B1*03:03L HLA-DQA1*03:01-B1*03:02L
EISMDNSPNL

SEQ ID NO: 9212 - protein, 11 aa, Severe acute respiratory syndrome coronavirus 2
  REGION 1..11: note = Table B: HLA-DQA1*03:02-B1*03:03L HLA-DQA1*05:05-B1*03:19L HLA-DQA1*03:01-B1*03:02L HLA-DQA1*05:05-B1*03:01L HLA-DQA1*02:01-B1*03:03L
SPNLAWPLIVT

SEQ ID NO: 9213 - protein, 10 aa, Severe acute respiratory syndrome coronavirus 2
  REGION 1..10: note = Table B: HLA-DQA1*03:02-B1*03:03L HLA-DQA1*01:02-B1*06:02L HLA-DQA1*05:05-B1*03:19L HLA-DPA1*03:01-B1*105:01L HLA-DQA1*02:01-B1*03:03L HLA-DRB1*15:03L
NLAWPLIVTA

SEQ ID NO: 9214 - protein, 10 aa, Severe acute respiratory syndrome coronavirus 2
  REGION 1..10: note = Table B: HLA-DQA1*03:02-B1*03:03L HLA-DQA1*01:02-B1*06:02L HLA-DPA1*03:01-B1*105:01L HLA-DRB1*15:03L
LAWPLIVTAL

SEQ ID NO: 9215 - protein, 10 aa, Severe acute respiratory syndrome coronavirus 2
  REGION 1..10: note = Table B: HLA-DQA1*03:02-B1*03:03L HLA-DRB1*04:03L HLA-DRB1*13:03L HLA-DRB1*04:02L HLA-DRB4*03:01NL HLA-DRB1*14:01L HLA-DRB1*12:01L HLA-DQA1*03:01-B1*03:02L HLA-DRB1*14:54L HLA-DRB1*14:17L HLA-DRB1*16:01L HLA-DQA1*02:01-B1*03:03L
IVTALRANSA

SEQ ID NO: 9216 - protein, 10 aa, Severe acute respiratory syndrome coronavirus 2
  REGION 1..10: note = Table B: HLA-DQA1*03:02-B1*03:03L HLA-DRB1*13:02L HLA-DRB3*02:01L HLA-DRB1*14:01L HLA-DRB1*12:01L HLA-DQA1*03:01-B1*03:02L HLA-DRB1*07:01L HLA-DRB1*16:01L HLA-DQA1*02:01-B1*03:03L
ALRANSAVKL

SEQ ID NO: 9217 - protein, 10 aa, Severe acute respiratory syndrome coronavirus 2
  REGION 1..10: note = Table B: HLA-DQA1*03:02-B1*03:03L HLA-DQA1*05:01-B1*03:01L HLA-DRB1*04:03L HLA-DRB1*01:03L HLA-DRB1*04:02L HLA-DQA1*01:02-B1*06:02L HLA-DRB4*03:01NL HLA-DRB1*12:01L HLA-DQA1*03:01-B1*03:02L HLA-DQA1*05:05-B1*03:01L
  REGION 1..10: note = CONT. FROM ABOVE: HLA-DRB1*14:17L HLA-DRB1*16:01L HLA-DQA1*01:03 -B1*06:01L HLA-DQA1*02:01-B1*03:03L
ANSAVKLQNN

SEQ ID NO: 9218 - protein, 10 aa, Severe acute respiratory syndrome coronavirus 2
  REGION 1..10: note = Table B: HLA-DQA1*03:02-B1*03:03L HLA-DQA1*05:01-B1*03:01L HLA-DQA1*01:02-B1*06:02L HLA-DRB1*14:01L HLA-DQA1*05:01-B1*02:01L HLA-DPA1*03:01-B1*105:01L HLA-DQA1*03:01-B1*03:02L HLA-DPA1*01:02-B1*04:01L
  REGION 1..10: note = CONT. FROM ABOVE: HLA-DQA1*01:03-B1*06:01L HLA-DQA1*02:01-B1*03: 03L
SAVKLQNNEL

SEQ ID NO: 9219 - protein, 11 aa, Severe acute respiratory syndrome coronavirus 2
  REGION 1..11: note = Table B: HLA-DQA1*03:02-B1*03:03L HLA-DQA1*05:01-B1*03:01L HLA-DRB1*04:01L HLA-DRB1*13:02L HLA-DRB1*13:03L HLA-DRB1*01:03L HLA-DRB1*04:04L HLA-DRB1*04:05L HLA-DQA1*01:02-B1*06:02L HLA-DRB1*01:02L HLA-DRB4*03:01NL HLA-DRB1*08:04L HLA-DRB1*08:77L
  REGION 1..11: note = CONT. FROM ABOVE: HLA-DRB1*14:01L HLA-DRB1*11:03L HLA-DRB1*11:04 L HLA-DRB1*14:02L HLA-DQA1*01-B1*05L HLA-DQA1*05:05-B1*03:19L HL A-DQA1*05:01-B1*02:01L HLA-DRB4*01:01L HLA-DRB1*04:10L HLA-DRB1* 09:01L HLA-DRB1*12:01L HLA-DPA1*03:01-B1*105:01L
  REGION 1..11: note = CONT. FROM ABOVE: HLA-DQA1*03:01-B1*03:02L HLA-DRB1*14:54L HLA-D QA1*05:05-B1*03:01L HLA-DRB1*10:01L HLA-DRB1*16:01L HLA-DRB1*04: 08L HLA-DRB1*08:03L HLA-DQA1*02:01-B1*03:03L HLA-DRB1*15:03L
VKLQNNELSPV

SEQ ID NO: 9220 - protein, 10 aa, Severe acute respiratory syndrome coronavirus 2
  REGION 1..10: note = Table B: HLA-DQA1*03:02-B1*03:03L HLA-DQA1*03:01-B1*03:02L
QNNELSPVAL

SEQ ID NO: 9221 - protein, 10 aa, Severe acute respiratory syndrome coronavirus 2
  REGION 1..10: note = Table B: HLA-DQA1*03:02-B1*03:03L HLA-DQA1*05:01-B1*03:01L HLA-DRB1*04:03L HLA-DRB1*13:02L HLA-DRB1*13:03L HLA-DRB1*01:03L HLA-DQA1*01:02-B1*06:02M HLA-DRB1*01:02L HLA-DRB4*03:01NL HLA-DRB1*08:77L HLA-DRB3*02:01L HLA-DPA1*01:03-B1*03:01L
  REGION 1..10: note = CONT. FROM ABOVE: HLA-DPA1*03:01-B1*04:02L HLA-DRB1*14:01L HLA-D RB1*14:02L HLA-DRB1*08:01L HLA-DRB5*01:01L HLA-DQA1*05:05-B1*03: 19L HLA-DQA1*05:01-B1*02:01L HLA-DPA1*01:03-B1*04:01L HLA-DQA1*0 5:05-B1*03:116L HLA-DRB1*09:01L HLA-DPA1*01:03-B1*04:02L
  REGION 1..10: note = CONT. FROM ABOVE: HLA-DRB1*12:01L HLA-DPA1*02:01-B1*13:01L HLA-D PA1*03:01-B1*105:01M HLA-DQA1*03:01-B1*03:02L HLA-DPA1*01:03-B1* 104:01L HLA-DQA1*05:05-B1*03:01L HLA-DPA1*01:02-B1*04:01L HLA-DR B1*16:01L HLA-DQA1*01:03-B1*06:01L HLA-DQA1*02:01-B1*03:03L
  REGION 1..10: note = CONT. FROM ABOVE: HLA-DRB1*15:03L
ELSPVALRQM

SEQ ID NO: 9222 - protein, 15 aa, Severe acute respiratory syndrome coronavirus 2
  REGION 1..15: note = Table B: HLA-DQA1*03:02-B1*03:03L HLA-DQA1*05:01-B1*03:01L HLA-DRB1*04:01L HLA-DRB1*13:02L HLA-DRB1*01:03L HLA-DRB1*04:02L HLA-DRB1*04:04L HLA-DRB1*04:05L HLA-DRB1*01:01L HLA-DRB1*08:04L HLA-DPA1*01:03-B1*03:01L HLA-DRB1*14:01L HLA-DRB1*11:04L
  REGION 1..15: note = CONT. FROM ABOVE: HLA-DRB1*08:01L HLA-DRB1*11:01L HLA-DQA1*05:05 -B1*03:19L HLA-DRB1*04:10L HLA-DPA1*01:03-B1*04:02L HLA-DRB1*12: 01L HLA-DPA1*02:01-B1*13:01L HLA-DPA1*03:01-B1*105:01L HLA-DQA1* 03:01-B1*03:02L HLA-DPA1*01:03-B1*104:01L
  REGION 1..15: note = CONT. FROM ABOVE: HLA-DQA1*05:05-B1*03:01L HLA-DRB1*14:17L HLA-D RB1*10:01L HLA-DRB1*16:01L HLA-DQA1*01:03-B1*06:01L HLA-DRB1*04: 08M HLA-DQA1*02:01-B1*03:03L HLA-DRB1*15:03L
SPVALRQMSCAAGTT

SEQ ID NO: 9223 - protein, 12 aa, Severe acute respiratory syndrome coronavirus 2
  REGION 1..12: note = Table B: HLA-DQA1*03:02-B1*03:03L HLA-DQA1*05:05-B1*03:19L HLA-DQA1*03:01-B1*03:02L HLA-DQA1*05:05-B1*03:01L HLA-DQA1*01:03-B1*06:01L HLA-DQA1*02:01-B1*03:03L
AGTTQTACTDDN

SEQ ID NO: 9224 - protein, 12 aa, Severe acute respiratory syndrome coronavirus 2
  REGION 1..12: note = Table B: HLA-DQA1*03:02-B1*03:03L HLA-DQA1*01:02-B1*06:02L HLA-DQA1*03:01-B1*03:02L HLA-DQA1*01:03-B1*06:01L HLA-DQA1*02:01-B1*03:03L
DDNALAYYNTTK

SEQ ID NO: 9225 - protein, 12 aa, Severe acute respiratory syndrome coronavirus 2
  REGION 1..12: note = Table B: HLA-DQA1*03:02-B1*03:03L HLA-DQA1*05:01-B1*03:01L HLA-DRB1*13:03L HLA-DRB1*01:03L HLA-DRB1*04:04L HLA-DRB1*04:05L HLA-DQA1*01:02-B1*06:02L HLA-DRB1*01:02L HLA-DRB4*03:01NL HLA-DRB1*14:01L HLA-DRB1*11:04L HLA-DRB1*08:01L
  REGION 1..12: note = CONT. FROM ABOVE: HLA-DQA1*05:01-B1*02:01L HLA-DRB1*04:10L HLA-D RB1*12:01L HLA-DRB1*12:02L HLA-DPA1*03:01-B1*105:01L HLA-DRB1*14 :54L HLA-DQA1*05:05-B1*03:01L HLA-DRB1*16:01L HLA-DQA1*01:03-B1* 06:01L HLA-DRB1*04:08L HLA-DRB1*08:03L HLA-DRB1*15:03L
DNALAYYNTTKG

SEQ ID NO: 9226 - protein, 10 aa, Severe acute respiratory syndrome coronavirus 2
  REGION 1..10: note = Table B: HLA-DQA1*03:02-B1*03:03L HLA-DQA1*05:01-B1*03:01L HLA-DRB1*04:01L HLA-DRB1*04:03L HLA-DRB1*13:02L HLA-DRB1*13:03L HLA-DRB1*01:03M HLA-DRB1*04:05L HLA-DQA1*01:02-B1*06:02L HLA-DRB1*01:01L HLA-DRB1*01:02L HLA-DRB4*03:01NL HLA-DRB1*08:77L
  REGION 1..10: note = CONT. FROM ABOVE: HLA-DRB3*02:01L HLA-DPA1*01:03-B1*03:01L HLA-D PA1*03:01-B1*04:02L HLA-DRB1*03:01L HLA-DRB1*14:01L HLA-DRB1*11: 03L HLA-DRB1*14:02L HLA-DQA1*01:01-B1*05:01L HLA-DRB1*08:01L HLA -DRB1*11:01L HLA-DQA1*01-B1*05L HLA-DQA1*05:05-B1*03:19L
  REGION 1..10: note = CONT. FROM ABOVE: HLA-DQA1*05:01-B1*02:01L HLA-DRB4*01:01L HLA-D PA1*01:03-B1*04:01L HLA-DQA1*05:05-B1*03:116L HLA-DPA1*01:03-B1* 04:02L HLA-DRB1*12:01L HLA-DPA1*02:01-B1*13:01M HLA-DPA1*03:01-B 1*105:01L HLA-DQA1*03:01-B1*03:02L HLA-DQA1*05:05-B1*03:01L
  REGION 1..10: note = CONT. FROM ABOVE: HLA-DPA1*01:02-B1*04:01L HLA-DRB1*07:01L HLA-D RB1*10:01L HLA-DRB1*16:01L HLA-DQA1*01:03-B1*06:01M HLA-DRB1*04: 08L HLA-DRB1*08:02L HLA-DRB1*08:03L HLA-DQA1*02:01-B1*03:03L HLA -DRB1*15:03L
YYNTTKGGRF

SEQ ID NO: 9227 - protein, 10 aa, Severe acute respiratory syndrome coronavirus 2
  REGION 1..10: note = Table B: HLA-DQA1*03:02-B1*03:03L HLA-DQA1*05:01-B1*03:01L HLA-DRB1*04:03L HLA-DRB1*13:02L HLA-DRB1*13:03L HLA-DRB1*01:03L HLA-DRB1*04:02L HLA-DRB1*04:05L HLA-DQA1*01:02-B1*06:02L HLA-DRB1*01:02L HLA-DRB4*03:01NL HLA-DRB1*08:77L HLA-DRB3*02:01L
  REGION 1..10: note = CONT. FROM ABOVE: HLA-DPA1*01:03-B1*03:01L HLA-DPA1*03:01-B1*04: 02L HLA-DRB1*14:01L HLA-DQA1*01-B1*05L HLA-DQA1*05:05-B1*03:19L HLA-DQA1*05:01-B1*02:01L HLA-DPA1*01:03-B1*04:01L HLA-DRB1*12:01 L HLA-DPA1*03:01-B1*105:01L HLA-DQA1*03:01-B1*03:02L
  REGION 1..10: note = CONT. FROM ABOVE: HLA-DQA1*05:05-B1*03:01L HLA-DRB1*14:17L HLA-D PA1*01:02-B1*04:01L HLA-DRB1*07:01L HLA-DRB1*16:01L HLA-DQA1*01: 03-B1*06:01L HLA-DRB1*04:08L HLA-DQA1*02:01-B1*03:03L HLA-DRB1*1 5:03L
YNTTKGGRFV

SEQ ID NO: 9228 - protein, 13 aa, Severe acute respiratory syndrome coronavirus 2
  REGION 1..13: note = Table B: HLA-DQA1*03:02-B1*03:03L HLA-DQA1*05:01-B1*03:01L HLA-DRB1*13:02L HLA-DRB1*01:03L HLA-DRB1*04:05L HLA-DRB1*01:02L HLA-DRB1*08:01L HLA-DQA1*05:01-B1*02:01L HLA-DQA1*03:01-B1*03:02L HLA-DPA1*01:03-B1*02:01L
  REGION 1..13: note = CONT. FROM ABOVE: HLA-DQA1*05:05-B1*03:01L HLA-DQA1*02:01-B1*03: 03L
GGRFVLALLSDLQ

SEQ ID NO: 9229 - protein, 10 aa, Severe acute respiratory syndrome coronavirus 2
  REGION 1..10: note = Table B: HLA-DQA1*03:02-B1*03:03L HLA-DQA1*05:01-B1*03:01L HLA-DRB1*13:03L HLA-DRB1*01:03L HLA-DQA1*01:02-B1*06:02L HLA-DRB1*08:77L HLA-DPA1*01:03-B1*03:01L HLA-DPA1*03:01-B1*04:02L HLA-DRB1*03:01L HLA-DRB1*11:02L
  REGION 1..10: note = CONT. FROM ABOVE: HLA-DRB1*14:02L HLA-DQA1*01-B1*05L HLA-DQA1*05 :05-B1*03:19M HLA-DQA1*05:01-B1*02:01L HLA-DRB4*01:01L HLA-DPA1* 01:03-B1*04:01L HLA-DQA1*05:05-B1*03:116L HLA-DPA1*01:03-B1*04:0 2L HLA-DRB1*12:01L HLA-DPA1*02:01-B1*13:01L
  REGION 1..10: note = CONT. FROM ABOVE: HLA-DPA1*03:01-B1*105:01L HLA-DPA1*01:03-B1*10 4:01L HLA-DPA1*01:02-B1*04:01L HLA-DRB1*10:01L HLA-DRB1*16:01L H LA-DQA1*01:03-B1*06:01L HLA-DQA1*02:01-B1*03:03L HLA-DRB1*15:03L
LLSDLQDLKW

SEQ ID NO: 9230 - protein, 14 aa, Severe acute respiratory syndrome coronavirus 2
  REGION 1..14: note = Table B: HLA-DQA1*03:02-B1*03:03L HLA-DRB1*04:03L HLA-DRB1*13:03L HLA-DRB1*04:02L HLA-DRB1*04:04L HLA-DRB1*08:04L HLA-DPA1*01:03-B1*03:01L HLA-DQA1*01:01-B1*05:01L HLA-DQA1*01-B1*05L HLA-DQA1*05:05-B1*03:19L HLA-DRB3*01:01L
  REGION 1..14: note = CONT. FROM ABOVE: HLA-DPA1*01:03-B1*104:01L HLA-DQA1*05:05-B1*03 :01L HLA-DRB1*07:01L HLA-DRB1*08:03L
LQDLKWARFPKSDG

SEQ ID NO: 9231 - protein, 14 aa, Severe acute respiratory syndrome coronavirus 2
  REGION 1..14: note = Table B: HLA-DQA1*03:02-B1*03:03L HLA-DRB1*13:02L HLA-DRB1*04:02L HLA-DRB1*04:04L HLA-DRB1*11:03L HLA-DRB1*14:02L HLA-DQA1*05:05-B1*03:19L HLA-DPA1*01:03-B1*04:01L HLA-DQA1*05:05-B1*03:116L HLA-DRB3*01:01L
  REGION 1..14: note = CONT. FROM ABOVE: HLA-DPA1*02:01-B1*13:01L HLA-DPA1*01:03-B1*02: 01L HLA-DQA1*05:05-B1*03:01L HLA-DRB1*10:01L HLA-DRB1*08:02L HLA -DRB1*08:03L HLA-DRB1*15:03L
DLKWARFPKSDGTG

SEQ ID NO: 9232 - protein, 12 aa, Severe acute respiratory syndrome coronavirus 2
  REGION 1..12: note = Table B: HLA-DQA1*03:02-B1*03:03L HLA-DQA1*03:01-B1*03:02L
RFPKSDGTGTIY

SEQ ID NO: 9233 - protein, 13 aa, Severe acute respiratory syndrome coronavirus 2
  REGION 1..13: note = Table B: HLA-DQA1*03:02-B1*03:03L
FPKSDGTGTIYTE

SEQ ID NO: 9234 - protein, 12 aa, Severe acute respiratory syndrome coronavirus 2
  REGION 1..12: note = Table B: HLA-DQA1*03:02-B1*03:03L HLA-DQA1*01:02-B1*06:02L HLA-DQA1*05:01-B1*02:01L HLA-DQA1*03:01-B1*03:02L HLA-DQA1*01:03-B1*06:01L HLA-DQA1*02:01-B1*03:03L
GTGTIYTELEPP

SEQ ID NO: 9235 - protein, 12 aa, Severe acute respiratory syndrome coronavirus 2
  REGION 1..12: note = Table B: HLA-DQA1*03:02-B1*03:03L HLA-DRB1*13:02L HLA-DRB1*13:03L HLA-DRB1*04:02L HLA-DRB1*04:04L HLA-DRB1*04:05L HLA-DRB4*03:01NL HLA-DPA1*01:03-B1*03:01L HLA-DRB1*14:01L HLA-DRB1*08:01L HLA-DQA1*05:05-B1*03:19L
  REGION 1..12: note = CONT. FROM ABOVE: HLA-DPA1*01:03-B1*04:01L HLA-DRB1*04:10L HLA-D PA1*01:03-B1*04:02L HLA-DPA1*02:01-B1*13:01L HLA-DRB1*14:54L HLA -DRB1*14:17L HLA-DRB1*10:01L
GTIYTELEPPCR

SEQ ID NO: 9236 - protein, 10 aa, Severe acute respiratory syndrome coronavirus 2
  REGION 1..10: note = Table B: HLA-DQA1*03:02-B1*03:03L HLA-DQA1*05:05-B1*03:19M HLA-DPA1*01:03-B1*104:01L
TELEPPCRFV

SEQ ID NO: 9237 - protein, 10 aa, Severe acute respiratory syndrome coronavirus 2
  REGION 1..10: note = Table B: HLA-DQA1*03:02-B1*03:03L HLA-DQA1*05:01-B1*03:01L HLA-DRB1*04:01L HLA-DRB1*04:03M HLA-DRB1*13:02L HLA-DRB1*13:03M HLA-DRB1*01:03L HLA-DRB1*04:02M HLA-DRB1*04:04L HLA-DRB1*04:05L HLA-DQA1*01:02-B1*06:02L HLA-DRB1*01:01L HLA-DRB1*01:02L
  REGION 1..10: note = CONT. FROM ABOVE: HLA-DRB4*03:01NM HLA-DRB1*08:04L HLA-DRB1*08:7 7L HLA-DRB3*02:01L HLA-DPA1*01:03-B1*03:01L HLA-DRB1*14:01L HLA- DRB1*11:03L HLA-DRB1*11:04L HLA-DRB1*14:02L HLA-DQA1*01:01-B1*05 :01L HLA-DRB1*08:01L HLA-DRB1*11:01L HLA-DRB5*01:01L
  REGION 1..10: note = CONT. FROM ABOVE: HLA-DQA1*01-B1*05L HLA-DQA1*05:05-B1*03:19L HL A-DQA1*05:01-B1*02:01L HLA-DRB1*04:10L HLA-DPA1*01:03-B1*04:02L HLA-DRB1*12:01L HLA-DRB1*12:02L HLA-DRB3*01:01L HLA-DPA1*03:01-B 1*105:01L HLA-DQA1*03:01-B1*03:02L HLA-DRB1*14:54L
  REGION 1..10: note = CONT. FROM ABOVE: HLA-DQA1*05:05-B1*03:01L HLA-DRB1*14:17M HLA-D PA1*01:02-B1*04:01L HLA-DRB1*07:01L HLA-DRB1*10:01L HLA-DRB1*16: 01L HLA-DQA1*01:03-B1*06:01L HLA-DRB1*04:08L HLA-DRB1*08:02L HLA -DRB1*08:03L HLA-DQA1*02:01-B1*03:03L HLA-DRB1*15:03L
FVTDTPKGPK

SEQ ID NO: 9238 - protein, 10 aa, Severe acute respiratory syndrome coronavirus 2
  REGION 1..10: note = Table B: HLA-DQA1*03:02-B1*03:03L HLA-DQA1*05:01-B1*03:01L HLA-DRB1*13:02L HLA-DRB1*13:03L HLA-DRB1*01:03L HLA-DRB1*08:77L HLA-DPA1*01:03-B1*03:01L HLA-DPA1*03:01-B1*04:02L HLA-DRB1*14:01L HLA-DRB1*11:02L HLA-DRB1*14:02L
  REGION 1..10: note = CONT. FROM ABOVE: HLA-DQA1*01-B1*05L HLA-DQA1*05:05-B1*03:19L HL A-DQA1*05:01-B1*02:01L HLA-DPA1*01:03-B1*04:01L HLA-DQA1*05:05-B 1*03:116L HLA-DRB1*09:01L HLA-DPA1*01:03-B1*04:02L HLA-DQA1*03:0 1-B1*03:02L HLA-DPA1*01:03-B1*104:01L HLA-DPA1*01:02-B1*04:01L
  REGION 1..10: note = CONT. FROM ABOVE: HLA-DRB1*10:01L HLA-DRB1*16:01L HLA-DQA1*02:01 -B1*03:03L HLA-DRB1*15:03L
VTDTPKGPKV

SEQ ID NO: 9239 - protein, 18 aa, Severe acute respiratory syndrome coronavirus 2
  REGION 1..18: note = Table B: HLA-DQA1*03:02-B1*03:03L HLA-DRB1*01:01L HLA-DRB1*03:01L HLA-DRB1*10:01L
TPKGPKVKYLYFIKGLNN

SEQ ID NO: 9240 - protein, 10 aa, Severe acute respiratory syndrome coronavirus 2
  REGION 1..10: note = Table B: HLA-DQA1*03:02-B1*03:03L HLA-DPA1*02:01-B1*13:01L HLA-DQA1*01:03-B1*06:01L HLA-DQA1*02:01-B1*03:03L
LYFIKGLNNL

SEQ ID NO: 9241 - protein, 11 aa, Severe acute respiratory syndrome coronavirus 2
  REGION 1..11: note = Table B: HLA-DQA1*03:02-B1*03:03L HLA-DQA1*05:01-B1*03:01L HLA-DQA1*05:05-B1*03:19L HLA-DPA1*03:01-B1*105:01L HLA-DQA1*03:01-B1*03:02L HLA-DQA1*05:05-B1*03:01L
NLNRGMVLGSL

SEQ ID NO: 9242 - protein, 10 aa, Severe acute respiratory syndrome coronavirus 2
  REGION 1..10: note = Table B: HLA-DQA1*03:02-B1*03:03L HLA-DRB1*15:03L
MVLGSLAATV

SEQ ID NO: 9243 - protein, 10 aa, Severe acute respiratory syndrome coronavirus 2
  REGION 1..10: note = Table B: HLA-DQA1*03:02-B1*03:03L HLA-DQA1*05:01-B1*03:01L HLA-DRB1*04:03L HLA-DRB1*13:03L HLA-DRB1*01:03L HLA-DRB1*04:02L HLA-DQA1*01:02-B1*06:02L HLA-DRB1*01:02L HLA-DRB4*03:01NL HLA-DQA1*01:01-B1*05:01L HLA-DRB1*08:01L
  REGION 1..10: note = CONT. FROM ABOVE: HLA-DQA1*05:05-B1*03:19L HLA-DQA1*05:01-B1*02: 01L HLA-DPA1*01:03-B1*04:02L HLA-DRB1*12:01L HLA-DPA1*03:01-B1*1 05:01L HLA-DQA1*03:01-B1*03:02L HLA-DQA1*05:05-B1*03:01L HLA-DRB 1*14:17L HLA-DPA1*01:02-B1*04:01L HLA-DRB1*16:01L
  REGION 1..10: note = CONT. FROM ABOVE: HLA-DQA1*01:03-B1*06:01L HLA-DRB1*04:08L HLA-D QA1*02:01-B1*03:03L
VLGSLAATVR

SEQ ID NO: 9244 - protein, 12 aa, Severe acute respiratory syndrome coronavirus 2
  REGION 1..12: note = Table B: HLA-DQA1*03:02-B1*03:03L HLA-DRB1*01:02L HLA-DRB1*08:01L HLA-DRB1*11:01L
SLAATVRLQAGN

SEQ ID NO: 9245 - protein, 12 aa, Severe acute respiratory syndrome coronavirus 2
  REGION 1..12: note = Table B: HLA-DQA1*03:02-B1*03:03L HLA-DRB1*08:04L
LAATVRLQAGNA

SEQ ID NO: 9246 - protein, 12 aa, Severe acute respiratory syndrome coronavirus 2
  REGION 1..12: note = Table B: HLA-DQA1*03:02-B1*03:03L HLA-DRB4*03:01NL HLA-DRB1*14:01L HLA-DQA1*05:05-B1*03:19L HLA-DRB1*04:10L HLA-DRB1*12:01L HLA-DPA1*03:01-B1*105:01L HLA-DRB1*14:54L
AATVRLQAGNAT

SEQ ID NO: 9247 - protein, 10 aa, Severe acute respiratory syndrome coronavirus 2
  REGION 1..10: note = Table B: HLA-DQA1*03:02-B1*03:03L HLA-DQA1*02:01-B1*03:03L
RLQAGNATEV

SEQ ID NO: 9248 - protein, 12 aa, Severe acute respiratory syndrome coronavirus 2
  REGION 1..12: note = Table B: HLA-DQA1*03:02-B1*03:03L HLA-DQA1*05:01-B1*03:01L HLA-DQA1*01:02-B1*06:02L HLA-DQA1*01:01-B1*05:01L HLA-DQA1*05:05-B1*03:19L HLA-DQA1*05:01-B1*02:01L HLA-DQA1*05:05-B1*03:01L HLA-DQA1*01:03-B1*06:01L
  REGION 1..12: note = CONT. FROM ABOVE: HLA-DRB1*04:08L HLA-DQA1*02:01-B1*03:03L
LQAGNATEVPAN

SEQ ID NO: 9249 - protein, 12 aa, Severe acute respiratory syndrome coronavirus 2
  REGION 1..12: note = Table B: HLA-DQA1*03:02-B1*03:03L HLA-DQA1*05:01-B1*03:01L HLA-DRB1*04:03L HLA-DQA1*05:05-B1*03:19L HLA-DQA1*05:01-B1*02:01L HLA-DQA1*05:05-B1*03:01L HLA-DRB1*14:17L HLA-DQA1*01:03-B1*06:01L
  REGION 1..12: note = CONT. FROM ABOVE: HLA-DQA1*02:01-B1*03:03L
AGNATEVPANST

(The sequence listing continues in the following parts.)

1. The composition of claim 40, wherein the antigen expression system comprises a self-amplifying alphavirus-based expression system,
wherein the self-amplifying alphavirus-based expression system comprises:
(A) one or more vectors, wherein the one or more vectors comprises:
(a) an RNA alphavirus backbone, wherein the RNA alphavirus backbone comprises:
(i) at least one promoter nucleotide sequence, and
(ii) at least one polyadenylation (poly(A)) sequence; and
(b) the antigen cassette, wherein the antigen cassette is inserted into the vector backbone,
(ii) optionally, a second promoter nucleotide sequence operably linked to the SARS-CoV-2 derived nucleic acid sequence; and
(iii) optionally, at least one MHC class II epitope-encoding nucleic acid sequence;
(iv) optionally, at least one nucleic acid sequence encoding a GPGPG amino acid linker sequence (SEQ ID NO:56); and
(v) optionally, at least one second poly(A) sequence, wherein the second poly(A) sequence is a native poly(A) sequence or an exogenous poly(A) sequence to the vector backbone, optionally wherein the exogenous poly(A) sequence comprises an SV40 poly(A) signal sequence or a Bovine Growth Hormone (BGH) poly(A) signal sequence; and
(B) a lipid-nanoparticle (LNP), wherein the LNP encapsulates the self-amplifying alphavirus-based expression system, and
wherein the composition comprises at least 10 μg of each of the one or more vectors;
optionally wherein the composition is further formulated in a pharmaceutical composition comprising a pharmaceutically acceptable carrier.

2. The composition of claim 1, wherein the composition for delivery of the self-amplifying alphavirus-based expression system comprises:
(a) at least 30 μg of each of the one or more vectors;
(b) 30 μg or less of each of the one or more vectors;
(c) between 10-30 μg or between 10-100 μg of each of the one or more vectors;
(d) at least 10 μg total of the one or more vectors combined;
(e) at least 30 μg total of the one or more vectors combined;
(f) 30 μg or less total of the one or more vectors combined; or
(g) between 10-30 μg or between 10-100 μg total of the one or more vectors combined.

3-8. (canceled)

9. The composition of claim 1, wherein:
(a) the one or more vectors of the self-amplifying alphavirus-based expression system is at a concentration of 1 mg/mL;
(b) the RNA alphavirus backbone comprises one or more elements obtained from the sequence of SEQ ID NO:3 or SEQ ID NO:5, optionally wherein the one or more elements are selected from the group consisting of the sequences necessary for nonstructural protein-mediated amplification, the 26S promoter nucleotide sequence, the poly(A) sequence, and the nsP1-4 genes of the sequence set forth in SEQ ID NO:3 or SEQ ID NO:5, optionally the RNA alphavirus backbone comprises the sequence set forth in the sequences selected from the group consisting of SEQ ID NOs:6-9; and/or
(c) the self-amplifying alphavirus-based expression system comprises a vector selected from the group of sequences consisting of: SEQ ID NO: 27983, SEQ ID NO:27981, SEQ ID NO:27982, SEQ ID NO: 27976, and SEQ ID NO: 27976 with Spike encoding sequences substituted with the sequence set forth in SEQ ID NO:27980.

10. (canceled)

11. (canceled)

12. A method for stimulating an immune response in a subject, the method comprising administering to the subject the composition for delivery of the self-amplifying alphavirus-based expression system of claim 1; optionally wherein the method comprises administering at least two doses of the composition for delivery of the self-amplifying alphavirus-based expression system,
and further optionally wherein the at least two doses comprise the same antigen cassette and/or wherein the at least two doses comprises a priming dose and at least one boosting dose, optionally wherein:
(a) the at least two doses are administered on days 1 and day 28 or later, optionally wherein day 28 or later comprises day 29 or later;
(b) the at least two doses are administered on days 1 and on or after week 4;
(c) the at least two doses are administered on days 1 and between day 28 to 113; or
(d) the at least two doses are administered on days 1 and day 113 or later.

13-20. (canceled)

21. The method of claim 12, wherein the method further comprises administration of a chimpanzee adenovirus (ChAdV)-based expression system,
wherein the composition for delivery of the ChAdV-based expression system comprises:
the ChAdV-based expression system, wherein the ChAdV-based expression system comprises a viral particle comprising a ChAdV vector, wherein the ChAdV vector comprises:
(a) a ChAdV backbone, wherein the ChAdV backbone comprises:
(i) at least one promoter nucleotide sequence, and
(ii) at least one polyadenylation (poly(A)) sequence; and
(b) an antigen cassette, wherein the antigen cassette is inserted into the vector backbone, and wherein the antigen cassette comprises at least one SARS-CoV-2 derived nucleic acid sequence encoding an immunogenic polypeptide;
optionally wherein the ChAdV-based expression system is administered as a priming dose, optionally wherein the antigen cassette of the ChAdV-based expression system is the same as the antigen cassette of the self-amplifying alphavirus-based expression system.

22. (canceled)

23. (canceled)

24. The composition of claim 40, wherein the antigen expression system comprises a chimpanzee adenovirus (ChAdV)-based expression system,
wherein the composition for delivery of the ChAdV-based expression system comprises:
a viral particle comprising a ChAdV vector, wherein the ChAdV vector comprises:
(a) a ChAdV backbone, wherein the ChAdV backbone comprises:
(i) at least one promoter nucleotide sequence, and
(ii) at least one polyadenylation (poly(A)) sequence; and
(b) the antigen cassette, wherein the antigen cassette is inserted into the vector backbone,
(ii) optionally, a second promoter nucleotide sequence operably linked to the SARS-CoV-2 derived nucleic acid sequence; and
(iii) optionally, at least one MHC class II epitope-encoding nucleic acid sequence;
(iv) optionally, at least one nucleic acid sequence encoding a GPGPG amino acid linker sequence (SEQ ID NO: 56); and
(v) optionally, at least one second poly(A) sequence, wherein the second poly(A) sequence is a native poly(A) sequence or an exogenous poly(A) sequence to the vector backbone, optionally wherein the exogenous poly(A) sequence comprises an SV40 poly(A) signal sequence or a Bovine Growth Hormone (BGH) poly(A) signal sequence, and
wherein the cassette is operably linked to the at least one promoter nucleotide sequence and the at least one poly(A) sequence, and wherein the composition comprises 1×10¹² or less of the viral particles;
optionally wherein the composition is further formulated in a pharmaceutical composition comprising a pharmaceutically acceptable carrier.

25. The composition of claim 24, wherein the composition for delivery of the ChAdV-based expression system comprises:
(a) at least 1×10¹¹ of the viral particles;
(b) between 1×10¹¹ and 1×10¹²; or
(c) 1×10¹¹, 3×10¹¹, or 1×10¹² of the viral particles;
optionally wherein the viral particles are at a concentration of 5×10¹¹ vp/mL, and further optionally wherein the ChAdV backbone comprises at least nucleotides 2 to 36,518 of the sequence set forth in SEQ ID NO:1, wherein the nucleotides 2 to 36,518 lack: (1) nucleotides 577 to 3403 of the sequence shown in SEQ ID NO:1 corresponding to an E1 deletion; (2) nucleotides 27,125 to 31,825 of the sequence shown in SEQ ID NO:1 corresponding to an E3 deletion; and (3) optionally nucleotides 34,916 to 35,642 of the sequence shown in SEQ ID NO:1 corresponding to a partial E4 deletion; optionally wherein the antigen cassette is inserted within the E1 deletion.

26-29. (canceled)

30. A method for stimulating an immune response in a subject, the method comprising administering to the subject the composition for delivery of the ChAdV-based expression system of claim 24, optionally wherein:
(1) the ChAdV-based expression system is administered as a priming dose; and/or
(2) the method further comprises administration of a composition for delivery of a self-amplifying alphavirus-based expression system,
wherein the composition for delivery of the self-amplifying alphavirus-based expression system comprises the self-amplifying alphavirus-based expression system, wherein the self-amplifying alphavirus-based expression system comprises one or more vectors, wherein the one or more vectors comprises:
(a) an RNA alphavirus backbone, wherein the RNA alphavirus backbone comprises:
(i) at least one promoter nucleotide sequence, and
(ii) at least one polyadenylation (poly(A)) sequence; and
(b) an antigen cassette, wherein the antigen cassette is inserted into the vector backbone, and wherein the antigen cassette comprises at least one SARS-CoV-2 derived nucleic acid sequence encoding an immunogenic polypeptide:
optionally wherein the antigen cassette of the ChAdV-based expression system is the same as the antigen cassette of the self-amplifying alphavirus-based expression system.

31-37. (canceled)

38. A method for stimulating an immune response in a subject, the method comprising administering to the subject a composition for delivery of a self-amplifying alphavirus-based expression system and administering to the subject a composition for delivery of a chimpanzee adenovirus (ChAdV)-based expression system, and
wherein either:
a. the composition for delivery of the ChAdV-based expression system comprises the ChAdV-based expression system, wherein the ChAdV-based expression system comprises a viral particle comprising a ChAdV vector, and wherein the composition comprises 1×10¹² or less of the viral particles,
b. the composition for delivery of the self-amplifying alphavirus-based expression system comprises the self-amplifying alphavirus-based expression system, wherein the self-amplifying alphavirus-based expression system comprises one or more vectors, and wherein the composition comprises at least 10 μg of each of the one or more vectors, or
c. the composition for delivery of the ChAdV-based expression system comprises the ChAdV-based expression system, wherein the ChAdV-based expression system comprises a viral particle comprising a ChAdV vector, and wherein the composition comprises 1×10¹² or less of the viral particles and wherein the composition for delivery of the self-amplifying alphavirus-based expression system comprises the self-amplifying alphavirus-based expression system, wherein the self-amplifying alphavirus-based expression system comprises one or more vectors, and wherein the composition comprises at least 10 μg of each of the one or more vectors;
optionally wherein the composition for delivery of the ChAdV-based expression system is administered as a priming dose and the composition for delivery of the self-amplifying alphavirus-based expression system is administered as one or more boosting doses.

39. (canceled)

40. A composition for delivery of an antigen expression system, comprising:
the antigen expression system, wherein the antigen expression system comprises:
(a) optionally, one or more vectors, the one or more vectors comprising:
a vector backbone, wherein the vector backbone comprises:
(i) at least one promoter nucleotide sequence, and
(ii) at least one polyadenylation (poly(A)) sequence; and
(1b) an antigen cassette, optionally wherein the antigen cassette is inserted into the vector backbone when present, and wherein the antigen cassette comprises:
(i) a SARS-CoV-2 derived nucleic acid sequence encoding an immunogenic polypeptide, wherein the immunogenic polypeptide comprises a SARS-CoV-2 variant Spike protein corresponding to a B.1.1.529 SARS-CoV-2 isolate optionally comprising the Spike polypeptide sequence as set forth in SEQ ID NO: 27974 and/or is encoded by nucleotides 9714-13,526 of the nucleotide sequence set forth in SEQ ID NO: 27976, or a SARS-CoV-2 variant Spike protein corresponding to a B.1.1.529 BA5 SARS-CoV-2 subvariant optionally comprising the Spike polypeptide sequence as set forth in SEQ ID NO: 27978 and/or encoded by SEQ ID NO: 27980,
optionally wherein (a) the B.1.1.529 isolate Spike protein or fragment comprises a mutation selected from the group consisting of: a Spike R679 mutation, a Spike R680 mutation, a Spike R682 mutation, a Spike K983P mutation, a Spike V984P mutation, and combinations thereof with reference to the Spike polypeptide sequence as set forth in SEQ ID NO:27977 or (b) the B.1.1.529 BA5 subvariant Spike protein or fragment comprises a mutation selected from the group consisting of: a Spike R677 mutation, a Spike R678 mutation, a Spike R680 mutation, a Spike K981P mutation, a Spike V982P mutation, and combinations thereof with reference to the Spike polypeptide sequence as set forth in SEQ ID NO: 27979, and
optionally wherein the antigen cassette further comprises at least one additional SARS-CoV-2 derived nucleic acid sequence encoding at least one additional immunogenic polypeptide, wherein the at least one additional immunogenic polypeptide comprises:
at least one MHC class I epitope comprising a polypeptide sequence as set forth in Table A,
at least one MHC class II epitope comprising a polypeptide sequence as set forth in Table B,
at least one MHC class I epitope comprising a polypeptide sequence as set forth in Table C, optionally wherein the at least one MHC I epitope is present in a concatenated polypeptide sequence as set forth in SEQ ID NO:57 or SEQ ID NO:58,
at least one polypeptide sequence as set forth in Table 6, or an epitope-containing fragment thereof, optionally wherein the at least one polypeptide sequence is present in a concatenated polypeptide sequence as set forth in SEQ ID NO:92,
at least one polypeptide sequence as set forth in Table 9A, Table 9B, or Table 9C, or an epitope-containing fragment thereof, optionally wherein the at least one polypeptide sequence is present in a concatenated polypeptide comprising each of the sequences set forth in Table 9A, Table 9B, or Table 9C, optionally wherein the concatenated polypeptide comprises the order of sequences set forth in Table 9A, Table 9B, or Table 9C,
at least one MHC class I epitope comprising a polypeptide sequence as set forth in Table A and/or Table C or MHC class II epitope comprising a polypeptide sequence as set forth in Table B, wherein the encoded SARS-CoV-2 immunogenic polypeptide is conserved between SARS-CoV-2 and a Coronavirus species and/or sub-species other than SARS-CoV-2, optionally wherein the Coronavirus species and/or sub-species other than SARS-CoV-2 is Severe acute respiratory syndrome (SARS) and/or Middle East respiratory syndrome (MERS),
one or more validated epitopes and/or at least 4, 5, 6, or 7 predicted epitopes, wherein at least 85%, 90%, or 95% of a population carries at least one HLA validated to present at least one of the one or more validated epitopes and/or at least one HLA predicted to present each of the at least 4, 5, 6, or 7 predicted epitopes,
a SARS-CoV-2 Spike protein or an epitope-containing fragment thereof corresponding to an isolate other than a B.1.1.529 SARS-CoV-2 isolate, optionally comprising a Spike polypeptide sequence as set forth in SEQ ID NO:59, optionally wherein the Spike polypeptide comprises a D614G mutation with reference to SEQ ID NO:59, and optionally wherein the Spike polypeptide is encoded by the nucleotide sequence shown in SEQ ID NO:79, SEQ ID NO:83, SEQ ID NO:85, or SEQ ID NO:87,
a SARS-CoV-2 modified Spike protein comprising a mutation selected from the group consisting of: a Spike R682 mutation, a Spike R683 mutation, a Spike R685 mutation, a Spike R815 mutation, a Spike K986P mutation, a Spike V987P mutation, and combinations thereof with reference to the Spike polypeptide sequence as set forth in SEQ ID NO:59, and optionally wherein the modified Spike protein comprises a polypeptide sequence as set forth in SEQ ID NO:60 or SEQ ID NO:90 or an epitope-containing fragment thereof,
a SARS-CoV-2 Membrane protein comprising a Membrane polypeptide sequence as set forth in SEQ ID NO:61 or an epitope-containing fragment thereof,
a SARS-CoV-2 Nucleocapsid protein comprising a Nucleocapsid polypeptide sequence as set forth in SEQ ID NO:62 or an epitope-containing fragment thereof,
a SARS-CoV-2 Envelope protein comprising an Envelope polypeptide sequence as set forth in SEQ ID NO:63 or an epitope-containing fragment thereof,
a variant of any of the above comprising a mutation found in 1% or greater of SARS-CoV-2 subtypes, optionally wherein the variant comprises a SARS-CoV-2 variant shown in Table 1,
or combinations thereof, and
wherein the immunogenic polypeptide optionally comprises a N-terminal linker and/or a C-terminal linker; or
(2b) an antigen cassette, optionally wherein the antigen cassette is inserted into the vector backbone when present, and wherein the antigen cassette comprises:
(i) three SARS-CoV-2 derived nucleic acid sequences encoding immunogenic polypeptides, wherein the immunogenic polypeptides comprises:
(A) a SARS-CoV-2 derived nucleic acid sequence encoding an immunogenic polypeptide, wherein the immunogenic polypeptide comprises a SARS-CoV-2 variant Spike protein corresponding to a B.1.1.529 SARS-CoV-2 isolate optionally comprising the Spike polypeptide sequence as set forth in SEQ ID NO: 27974 and/or is encoded by nucleotides 9714-13,526 of the nucleotide sequence set forth in SEQ ID NO: 27976, or a SARS-CoV-2 variant Spike protein corresponding to a B.1.1.529 BA5 SARS-CoV-2 subvariant optionally comprising the Spike polypeptide sequence as set forth in SEQ ID NO: 27978 and/or encoded by SEQ ID NO: 27980, optionally wherein (a) the B.1.1.529 isolate Spike protein or fragment comprises a mutation selected from the group consisting of: a Spike R679 mutation, a Spike R680 mutation, a Spike R682 mutation, a Spike K983P mutation, a Spike V984P mutation, and combinations thereof with reference to the Spike polypeptide sequence as set forth in SEQ ID NO:27977 or (b) the B.1.1.529 BA5 subvariant Spike protein or fragment comprises a mutation selected from the group consisting of: a Spike R677 mutation, a Spike R678 mutation, a Spike R680 mutation, a Spike K981P mutation, a Spike V982P mutation, and combinations thereof with reference to the Spike polypeptide sequence as set forth in SEQ ID NO: 27979;
(B) at least one polypeptide sequence as set forth in Table 9C, or an epitope-containing fragment thereof, optionally wherein the at least one polypeptide sequence is present in a concatenated polypeptide comprising each of the sequences set forth in Table 9C, optionally wherein the concatenated polypeptide comprises the order of sequences set forth in Table 9C, and
(C) a SARS-CoV-2 Nucleocapsid protein, optionally comprising a Nucleocapsid polypeptide sequence as set forth in SEQ ID NO:62 or an epitope-containing fragment thereof,
wherein each of the SAR-CoV-2 SARS-CoV-2 derived nucleic acid sequences comprises;
(I) optionally, a 5′ linker sequence, and
(II) optionally, a 3′ linker sequence;
(ii) optionally, a second promoter nucleotide sequence operably linked to one or more of the three SARS-CoV-2 derived nucleic acid sequences; and
(iii) optionally, at least one MHC class II epitope-encoding nucleic acid sequence;
(iv) optionally, at least one nucleic acid sequence encoding a GPGPG amino acid linker sequence (SEQ ID NO:56); and
(v) optionally, at least one second poly(A) sequence, wherein the second poly(A) sequence is a native poly(A) sequence or an exogenous poly(A) sequence to the vector backbone optionally wherein the exogenous poly(A) sequence comprises an SV40 poly(A) signal sequence or a Bovine Growth Hormone (BGH) poly(A) signal sequence, or
(3b) an antigen cassette, wherein the antigen cassette is inserted into the vector backbone such that the antigen cassette is operably linked to the at least one promoter nucleotide sequence, wherein the backbone comprises an alphavirus vector, wherein the alphavirus vector is a Venezuelan equine encephalitis virus vector, and wherein the vector backbone comprises: (i) a subgenomic promoter nucleotide sequence, and (ii) at least one polyadenylation (poly(A)) sequence; and
wherein the antigen cassette comprises:
(i) three SARS-CoV-2 derived nucleic acid sequences encoding immunogenic polypeptides, wherein the immunogenic polypeptides comprises:
(A) a SARS-CoV-2 derived nucleic acid sequence encoding an immunogenic polypeptide, wherein the immunogenic polypeptide comprises a SARS-CoV-2 variant Spike protein corresponding to a B.1.1.529 SARS-CoV-2 isolate optionally comprising the Spike polypeptide sequence as set forth in SEQ ID NO: 27974 and/or is encoded by nucleotides 9714-13,526 of the nucleotide sequence set forth in SEQ ID NO: 27976, or a SARS-CoV-2 variant Spike protein corresponding to a B.1.1.529 BA5 SARS-CoV-2 subvariant optionally comprising the Spike polypeptide sequence as set forth in SEQ ID NO: 27978 and/or encoded by SEQ ID NO: 27980, optionally wherein (a) the B.1.1.529 isolate Spike protein or fragment comprises a mutation selected from the group consisting of: a Spike R679 mutation, a Spike R680 mutation, a Spike R682 mutation, a Spike K983P mutation, a Spike V984P mutation, and combinations thereof with reference to the Spike polypeptide sequence as set forth in SEQ ID NO:27977 or (b) the B.1.1.529 BA5 subvariant Spike protein or fragment comprises a mutation selected from the group consisting of: a Spike R677 mutation, a Spike R678 mutation, a Spike R680 mutation, a Spike K981P mutation, a Spike V982P mutation, and combinations thereof with reference to the Spike polypeptide sequence as set forth in SEQ ID NO: 27979;
(B) at least one polypeptide sequence as set forth in Table 9C, or an epitope-containing fragment thereof, optionally wherein the at least one polypeptide sequence is present in a concatenated polypeptide comprising each of the sequences set forth in Table 9C, optionally wherein the concatenated polypeptide comprises the order of sequences set forth in Table 9C, and
(C) a SARS-CoV-2 Nucleocapsid protein, optionally comprising a Nucleocapsid polypeptide sequence as set forth in SEQ ID NO:62 or an epitope-containing fragment thereof;
(ii) a second subgenomic promoter nucleotide sequence operably linked to at least one of the three SARS-CoV-2 derived nucleic acid sequences; and
(iii) optionally, at least one MHC class II epitope-encoding nucleic acid sequence;
(iv) optionally, at least one nucleic acid sequence encoding a GPGPG amino acid linker sequence (SEQ ID NO:56); and
(v) optionally, at least one second poly(A) sequence, wherein the second poly(A) sequence is a native poly(A) sequence or an exogenous poly(A) sequence to the vector backbone optionally wherein the exogenous poly(A) sequence comprises an SV40 poly(A) signal sequence or a Bovine Growth Hormone (BGH) poly(A) signal sequence; or
(4b) an antigen cassette, wherein the antigen cassette is inserted into the vector backbone such that the antigen cassette is operably linked to the at least one promoter nucleotide sequence, wherein the backbone comprises an alphavirus vector, wherein the alphavirus vector is a Venezuelan equine encephalitis virus vector, and wherein the vector backbone comprises: (i) a subgenomic promoter nucleotide sequence, and (ii) at least one polyadenylation (poly(A)) sequence; and
wherein the antigen cassette comprises, in order from 5′ to 3′:
(i) a nucleotide sequence encoding a SARS-CoV-2 Nucleocapsid protein comprising a Nucleocapsid polypeptide sequence as set forth in SEQ ID NO:62;
(ii) a 2A ribosome skipping sequence element;
(iii) a nucleotide sequence encoding a concatenated polypeptide comprising each of the sequences set forth in Table 9C and in the order of sequences set forth in Table 9C;
(iv) a nucleotide sequence encoding at least one universal MHC class II epitope, optionally further encoding one or more GPGPG amino acid linker sequences (SEQ ID NO:56) at the 5′ terminus, 3′ terminus, and/or in between concatenated universal MHC class II epitope sequences;
(v) a second subgenomic promoter nucleotide sequence; and
(vi) a nucleotide sequence encoding a B.1.1.529 SARS-CoV-2 isolate optionally comprising the Spike polypeptide sequence as set forth in SEQ ID NO: 27974 and/or is encoded by nucleotides 9714-13,526 of the nucleotide sequence set forth in SEQ ID NO: 27976, or a SARS-CoV-2 variant Spike protein corresponding to a B.1.1.529 BA5 SARS-CoV-2 subvariant optionally comprising the Spike polypeptide sequence as set forth in SEQ ID NO: 27978 and/or encoded by SEQ ID NO: 27980.

41. An antigen-based vaccine comprising:
(i) a SARS-CoV-2 variant Spike protein corresponding to a B.1.1.529 SARS-CoV-2 isolate optionally comprising the Spike polypeptide sequence as set forth in SEQ ID NO: 27974 and/or is encoded by nucleotides 9714-13,526 of the nucleotide sequence set forth in SEQ ID NO: 27976, or a SARS-CoV-2 variant Spike protein corresponding to a B.1.1.529 BA5 SARS-CoV-2 subvariant optionally comprising the Spike polypeptide sequence as set forth in SEQ ID NO: 27978 and/or encoded by SEQ ID NO: 27980,
optionally wherein (a) the B.1.1.529 isolate Spike protein or fragment comprises a mutation selected from the group consisting of: a Spike R679 mutation, a Spike R680 mutation, a Spike R682 mutation, a Spike K983P mutation, a Spike V984P mutation, and combinations thereof with reference to the Spike polypeptide sequence as set forth in SEQ ID NO:27977 or (b) the B.1.1.529 BA5 subvariant Spike protein or fragment comprises a mutation selected from the group consisting of: a Spike R677 mutation, a Spike R678 mutation, a Spike R680 mutation, a Spike K981P mutation, a Spike V982P mutation, and combinations thereof with reference to the Spike polypeptide sequence as set forth in SEQ ID NO: 27979, and
optionally wherein the antigen-based vaccine further comprises at least one additional SARS-CoV-2 derived immunogenic polypeptide, wherein the additional immunogenic polypeptide comprises:
at least one MHC class I epitope comprising a polypeptide sequence as set forth in Table A,
at least one MHC class II epitope comprising a polypeptide sequence as set forth in Table B,
at least one MHC class I epitope comprising a polypeptide sequence as set forth in Table C, optionally wherein the at least one MHC I epitope is present in a concatenated polypeptide sequence as set forth in SEQ ID NO:57 or SEQ ID NO:58,
at least one polypeptide sequence as set forth in Table 6, or an epitope-containing fragment thereof, optionally wherein the at least one polypeptide sequence is present in a concatenated polypeptide sequence as set forth in SEQ ID NO:92,
at least one polypeptide sequence as set forth in Table 9A, Table 9B, or Table 9C, or an epitope-containing fragment thereof, optionally wherein the at least one polypeptide sequence is present in a concatenated polypeptide comprising each of the sequences set forth in Table 9A, Table 9B, or Table 9C, optionally wherein the concatenated polypeptide comprises the order of sequences set forth in Table 9A, Table 9B, or Table 9C,
at least one MHC class I epitope comprising a polypeptide sequence as set forth in Table A and/or Table C or MHC class II epitope comprising a polypeptide sequence as set forth in Table B, wherein the encoded SARS-CoV-2 immunogenic polypeptide is conserved between SARS-CoV-2 and a Coronavirus species and/or sub-species other than SARS-CoV-2, optionally wherein the Coronavirus species and/or sub-species other than SARS-CoV-2 is Severe acute respiratory syndrome (SARS) and/or Middle East respiratory syndrome (MERS),
one or more validated epitopes and/or at least 4, 5, 6, or 7 predicted epitopes, wherein at least 85%, 90%, or 95% of a population carries at least one HLA validated to present at least one of the one or more validated epitopes and/or at least one HLA predicted to present each of the at least 4, 5, 6, or 7 predicted epitopes,
a SARS-CoV-2 Spike protein comprising a Spike polypeptide sequence as set forth in SEQ ID NO:59 or an epitope-containing fragment thereof, optionally wherein the Spike polypeptide comprises a D614G mutation with reference to SEQ ID NO:59, and optionally wherein the Spike polypeptide is encoded by the nucleotide sequence shown in SEQ ID NO:79, SEQ ID NO:83, SEQ ID NO:85, or SEQ ID NO:87,
a SARS-CoV-2 modified Spike protein comprising a mutation selected from the group consisting of: a Spike R682 mutation, a Spike R683 mutation, a Spike R685 mutation, a Spike R815 mutation, a Spike K986P mutation, a Spike V987P mutation, and combinations thereof with reference to the Spike polypeptide sequence as set forth in SEQ ID NO:59, and optionally wherein the modified Spike protein comprises a polypeptide sequence as set forth in SEQ ID NO:60 or SEQ ID NO:90 or an epitope-containing fragment thereof,
a SARS-CoV-2 Membrane protein comprising a Membrane polypeptide sequence as set forth in SEQ ID NO:61 or an epitope-containing fragment thereof,
a SARS-CoV-2 Nucleocapsid protein comprising a Nucleocapsid polypeptide sequence as set forth in SEQ ID NO:62 or an epitope-containing fragment thereof,
a SARS-CoV-2 Envelope protein comprising an Envelope polypeptide sequence as set forth in SEQ ID NO:63 or an epitope-containing fragment thereof,
a variant of any of the above comprising a mutation found in 1% or greater of SARS-CoV-2 subtypes, optionally wherein the variant comprises a SARS-CoV-2 variant shown in Table 1,
or combinations thereof, and
wherein the immunogenic peptide optionally comprises a N-terminal linker and/or a C-terminal linker
(ii) optionally, at least one MHC class II antigen; and
(iii) optionally, at least one GPGPG amino acid linker sequence (SEQ ID NO:56);
further optionally wherein the antigen expression system comprises:
(a) the nucleotide sequence as set forth in SEQ ID NO:27976, optionally wherein the nucleotides encoding a SARS-CoV-2 variant Spike protein corresponding to the B.1.1.529 SARS-CoV-2 isolate are substituted with the nucleotides encoding a SARS-CoV-2 variant Spike protein corresponding to a B.1.1.529 BA5 SARS-CoV-2 subvariant; or
(b) the nucleotide sequence as set forth in nucleotides 7,571 to 13,526 of SEQ ID NO:27976, optionally wherein the nucleotides encoding a SARS-CoV-2 variant Spike protein corresponding to the B.1.1.529 SARS-CoV-2 isolate are substituted with the nucleotides encoding a SARS-CoV-2 variant Spike protein corresponding to a B.1.1.529 BA5 SARS-CoV-2 subvariant; or
(c) a self-amplifying alphavirus-based expression system comprising a vector selected from the group of sequences consisting of: SEQ ID NO: 27983, SEQ ID NO:27981, SEQ ID NO:27982, SEQ ID NO: 27976, and SEQ ID NO: 27976 with Spike encoding sequences substituted with the sequence set forth in SEQ ID NO:27980.

42-48. (canceled)
